United States Patent Application Publication US 2009/0070897 A1 - sequence listing, part 4

SEQ ID NO: 13646 - protein, 229 aa, Oryza sativa
  unsure (1)..(229): unsure at all Xaa locations
MTTPRATTTTSPFSSLLLLPISPSAATPPRRARTPPPAVAHGGVRWTAGGRRRRRGCRAAAAVVEDGVLLPKEQEDDASAARYDWREEWYPLYLAKEVPDDAALPLTVFDRQLVLYRDAAGVLRCHEDRCPHRLAKLSEGQLVDGKLECLYHGWQFDGEGKCVKIPQLPDGAKIPRNACARSYEVRDSQGVVWAWMSGTNPPDERKLPXXEPXARXGXTDLXTGHELRY

SEQ ID NO: 13647 - protein, 381 aa, Oryza sativa
LRMLSACGGVWPTSPAPPARSSSSSSAAAAADQAAAEGRDGLLRWRDLARCHAGELSVAVVQGNHVLEDQCRVESGPPPLAATCIGVFDGHAGPDAARFACDHLLPNLREAASGPEGVTADAIRDAFLATEEGFLAVVSRMWEAQPDMATVGTCCLVGVVHQRTLFVANLGDSRAVLGKKVGRAGQITAEQLSSEHNANEEDVRQELMAQHPDDPQIGALKHGVWRVKGIIQVSRSLGDAYLKHSQYNTEQIKPKFRLPEPFSRPILSANPSIIARCLQPSDCFIIFASDGLWEHLSNQQAVEIVHNHQRAGSARRLIKAALHEAARKREMRYSDLMKIDKKVRRHFHDDITVIVLFINYDQLAKGHSQGQSLSIRCALDH

SEQ ID NO: 13648 - protein, 417 aa, Azospirillum brasilense
MERILGGMSLPDLGTFALVNERLERLSDYPFTRLAALLSGVTPRANAEPIMMSVGEPQHQPPAIIDETLRANAHLWGKYPPVGGTPEFREAVGAWLARRYALPDGLFDAEKSVLPVSGTREALFLLALLAVPPSKAGRQPAVLMPNPFYAPYEGAALLAGAEPVFLPSTRETGFLPDLDALTPELLERTALFYLCTPANPQGAAADAAYLERAIGLARRYGFILAVDECYAEIYLDKPPVGALQLASGLHHGGKPWTNILVFHSLSKRSSAAGLRSGFVAGDPELMSRFTRLRSYSNAGMPLPVLAASAALWRDEAHVEENRALYRAKFDAAEAALNGRYGYYRPDGGFFLWLEVGDGEEATRRLWAEGGIRVLPGAYLTRCNPGEANPGAPFIRIALVNDAETVAHACSTIARILG

SEQ ID NO: 13649 - protein, 174 aa, Paeonia peregrina
  unsure (1)..(174): unsure at all Xaa locations
DLLRINTDRGVMLNDGKSRFSINGQPIFHFVGTSTFSEYTVLHVGCLAKINEEAPLDKVCVLSCGISTGLGATLNVXKPKKGSTVAIFGLGAVGLAAAEGARIAGASRIIGVDLNPKRFDEARKFGVTEFVNPKDYNKPVQEVIAEMTGGGVDRSVECTGSIMAMMSAFECVHD

SEQ ID NO: 13650 - protein, 322 aa, Xanthomonas campestris pv. phaseoli
MTASPSKLAQLRELSVVVADTGDYDAIKRLQPVDCTTNPTLVKKALDLPVYADLIERELAWGREHGGDDRTATVNEVADRLTIGVGVKLAGLVPGRVSTEVDADLAHDTQATIAKARKFIAMYAERGVSKDKILIKIAATWEGIEAARQLQKEGIDCNLTLIFNRSQALACAEAGVFLISPFVGRILDYYVGKGQTPASIDEDPGVVFVRTVYNEFKQRGYSTVVMGASFRSTAQIEALASCDRLTISPDLLEKLDAEHGELPRKLSPAKADNAQFTPIDSDSFASGLAADPMATEKLAGGIDTFAKDLHALRKTIADKLAG

SEQ ID NO: 13651 - protein, 174 aa, Paeonia peregrina
DLLRINTDRGVMLNDGKSRFSINGQPIFHFVGTSTFSEYTVLHVGCLAKINEEAPLDKVCVLSCGISTGLGATLNVAKPKKGSTVAIFGLGAVGLAAAEGARIAGASRIIGVDLNPKRFDEARKFGVTEFVNPKDYNKPVQEVIAEMTGGGVDRSVECTGSIMAMMSAFECVHD

SEQ ID NO: 13652 - protein, 203 aa, Pichia angusta
MNNEYDYLFKLLLIGDSGVGKSCLLLRFAEDTYTQDYISTIGVDFKIRTIELDGKTIKLQIWDTAGQERFRTITSSYYRGAHGIIIVYDVTDQESFNNVNQWLQEIDRYATSGVMKLLVGNKCDLTDKKVVDYAVAKEFADSRGIKFLETSASQSTNVEQAFIVMSKQIKSQMANSQPASNTAGKPSVNLSGTSVINQQGGCC

SEQ ID NO: 13653 - protein, 325 aa, Methylobacillus flagellatus KT
MLFITLLFNMLPTVFAETPAKPVAEQLVDTLTELAGGPHPGFRSNHAKGIVVEGHFTPAASAAEVTKAEIFTAPHPVVVRYSNATGVPNSADNDGSAFPKGIAIRFQLADEASADLVCISVNGFPAVTPEEFLGLLQAVAASRDSQAQPKPIEAFLGQHPAALRFVMTPKPVPESFATQPFFGVNAFKFTNAQGETRYGRYRIEPVGGAKFLNADAAKAVDADYLMHELPGRLQQAAYSYRISVQLADPGDEVNDATSVWPDSRQIVELGTLTIDRFRTDGAAFEKTMMFSPLNLVDGIEASDDPILHARPVTYSISFNRRLQSH

SEQ ID NO: 13654 - protein, 572 aa, Sinorhizobium meliloti 1021
MVEASEKSREDASSGSLQAAAGFVRDYLRRPFSFYLISLLLIAIIPPFIFSFVILQRNLDAQREEVTSLLRASTGSVTRIVEREVDGMLTTLRVLAKSGAVDLADMRGLYERASVALADTDSHLIIVDGNHDLLLSTRVPFGTPLGRASDPEIDLALQSTAPLVSGVFPSEVGRGWVFTVYLPVTTPDGKKYLLGLRQDAERMTRAVNRDTLSPGWNAALVDGKGRVIVSSDSSVKSGDPFFLDELPLISIGVGNISAGGVDYRVASEFSVVTGWRIVAWAPSEIVDQPMLWSFLWLSFGGIIFASIAVAGSLTIARLLTQGVRLLAMDARRLGAGEPVEPRRYMITEVEAVSTALASAATARAKAESEIRLLMREVAHRAKNQLTVIQSMLAQSANSAEEPSDFVEAFRKRLAGLARSTDLMVANAASGVDFRELVRNQLQPFMPAESDRVVLSGPALRLDAQMAQTLGMALHELATNAIKHGALANQTGMIKVEWSVGEGAIDIRWRESGADIVAPSGKKARRGFGTVVLERMLGLALRAELERTMHADGIEWRIRIPRGKDHSSQEAGG

SEQ ID NO: 13655 - protein, 583 aa, Nicotiana tabacum
SIKFLAPSLPNPARFSKNAVKLHATPPSVAAPPAGAPEVAAERLEPRVEEKDGYWILKEQFRKGINPQEKVKIEKQPMKLFMENGIEELAKIPIEEIDQSKLTKDDIDVRLKWLGLFHRRKNQYGRFMMRLKLPNGVTTSAQTRYLASVIRKYGKEGCADITTRQNWQIRGVVLPDVPEILKGLAEVGLTSLQSGMDNVRNPVGNPLAGIDPEEIVDTGPYTNLLSQFITGNSRGNPAVSNLPRKWNPCVVGSHDLYEHPHINDLAYMPATKDGRFGFNLLVGGFFSAKRCDEAIPLDAWVPADDVVPVCKAILEAFRDLGFRGNRQKCRMMWLIDELGVEGFRAEVEKRMPQQELERASPEDLVQKQWERRDYLGVHPQKQEGYSFIGLHIPVGRVQADDMDELARLADEYGSGEIRLTVEQNIIIPNIENSKIEALLKEPVLSTFSPDPPILMKGLVACTGNQFCGQAIIETKARSLMITEEVQRQVSLTRPVRMHWTGCPNTCAQVQVADIGFMGCLTRDKNGKTVEGADVFLGGRIGSDSHLGEVYKKAVPCDDLVPLVVDLLVNNFGAVPREREETED

SEQ ID NO: 13656 - protein, 590 aa, Oryza sativa
MCGILAVLGAADWLKHRGPDWSGLYQCEGNFLAQQRLAIVSPLSGDQPLYNADRTIVVVANGEIYNHKKIRKQFASKHTFSTGSDCEVIIPLYEEYGEDFVDMLDGVFAFVLYDTRTKTYMAARDAIGVNPLYIGRGSDGAVWISSEMKALNEDCVEFEIFPPGHLYSSAAGGLRRWYKPQWFAENVPATPYQPLLLREAFEKAVIKRLMTDVPFGVLLSGGLDSSLVAAVTKRHLIKTEAAEKFGAELHSFVVGLEGSPDLIAAREVADHLGTIHHEFHFTVQDGIDAIEEVIYHDETYDVTTIRASTPMFLMARKIKALGVKMVLSGEGSDELLGGYLYFHFAPNKEEFHKETCRKVKALHQYDCLRANKATSAWGLEVRVPFLDKEFINVAMSMDPEWKMYNADLGRIEKWVMRKAFDDEEHPYLPKHILYRQKEQFSDGVGYNWIDGLKAFTEQQVSDEMMKNAAKVYPHNTPVNKEAYYYRMIFERLFPQESARETVPWGPSIACSTPAAIEWVEQWKASHDPSGRLIASHNSASASANHTNHANANANGNSNGKANGNCAMAANGTNGVGLVVANGTANGKMEA

SEQ ID NO: 13657 - protein, 441 aa, Bifidobacterium longum DJO10A
MGHDLSQDAEIWDDAYKLDRAHVFHSWHAQRNLDPTEVVTGHGVWLKYGDGREMLDFTSQQVNVNIGYQHPKVIEGIKKQAELLCTVGPDYANLARGRAASLVARRAPEGFDKVFFTNAGADANENAMRAARLFTGRDKILSSYRCYHGNTGAAISATGDWRRKPNDYSRGHVHFFTPYLYRSEFSATTQEEECERALAHLEHVIQFEGPDTIAAVLLESVPGTAGIIIPPKDYFKGVREITKKYSILMITDEVMAGFGRTGFWFALDDYDYTPDIISFAKGCNSGYVPAGGVIMSDPVAHRFDDIVFPGGLTYSGHPLAMGAIVATQEAMEEEHIVDNAYTIGKDVLGPQLTALYDKHPKIGEVRGKGVFWAVEMVADRTTKEPLDDATMKQIVAEGDKRGLILGVHNNRIHVTPPCVISADEATQGVEILDQVLTAAGC

SEQ ID NO: 13658 - protein, 370 aa, Ustilago maydis 521
MAPAATSSRSHADPREQQLQVSGQNRVAIFDKQGGPVSVKEAPIQKELKRGEALVRVIYSGVCHTDLHAMLGDWPLDNKLPLVGGHEGAGVVVALGEGADQYVKVGDRVGIKWIATSCLNCSFCRTGAEPNCPHAQCSGFSVDGSFQKYAVSYANHLSIIPDDLPLDQAAPILCAGVTVYKALKEAQLNPGQWVAIPGAGGGLGHLAIQYAVAAGYRVIAIDTGADKKQLCESLGAERFIDFKTSKNLVDDIKAATPDGFGPQAAVVAASGAAAYEQALDYIRPRGVLVAVGLPGQADIKANVFFTVFRSVRIVGSYVGNRQDAQEALDIAAAGKVRTHFRTLGLSQLPQVYDDMQSGKIAGRIVLDIDQ

SEQ ID NO: 13659 - protein, 324 aa, Magnaporthe grisea 70-15
MASPTMKLNNGLDMPQVGFGLWKVENSVCADVVYNAIKAGYRLFDGACDYGNEVECGQGVKRAIDEGLVKREELFIVSKLWNTFHDGERVEPIVKKQLADWGIEYFDLYLIHFPVALEYVDPSVRYPPGWHYDDAGTEIRPSKASIQETWTAMEKLVDAGLSKAIGVSNFQAQLLYDMLRYARIRPATLQIEHHPYLVQQRLIEACKTEGIVVTAYSSFGPASFKEFNMEHAEALTPLLEEPTIVKLAEKYGKDPGQVLLRWATQRGLAVIPKSSREKTMKSNFEAVGWDMEDSDIKTISALDKGIRFNQPANYFSTDKLWIFG

SEQ ID NO: 13660 - protein, 492 aa, Hordeum vulgare
MDPYKHRPTSGANSAYWTTNSGAPVWNNNNALTVGHRGPILLEDYHLIEKLAQFDRERIPERVVHARGASAKGFFEVTHDVSQLTCADFLRAPGVQTPVIVRFSTVVHERGSPETLRDPRGFAVKFYTREGNFDLVGNNMPVFFIRDGMKFPDMVHAFKPSPKTNMQENWRVVDFFSHHPESLHMFTFLFDDVGIPLNYRHMDGFGVNTYTLISRDGKAHLVKFHWKPTCGVKCLLDDEAVTVGGTCHTHATKDLTDSIAAGNYPEWKLFIQTIDADHEDRFDFDPLDVTKTWPEDIIPLQPVGRMVLNKNIDNFFAENEQLAFCPAVTVPGIHYSDDKLLQTRIFSYADTQRHRLGPNYLMLPVNAPKCAHHNNHHDGLMNFIHRDEEVNYFPSRFDPTRHAEKYPMPPRVLSGCREKCIIDKENNFKQAGERYRSFDPARQDRFLQRWVDALTDARVTHEIQSIWVSYWSQCDASLGQKLASRLKIKPNM

SEQ ID NO: 13661 - protein, 492 aa, Nicotiana tabacum
MDLSKFRPSSAYDSPFLTTNAGGPVYNNVSSLTVGPRGPVLLEDYHLIEKLATFDRERIPERVVHARGASAKGFFEVTHDISHLTCADFLRAPGVQTPVICRFSTVVHERGSPESLRDIRGFAVKFYTREGNFDLVGNNVPVFFNRDAKSFPDTIRALKPNPKSHIQEYWKILDFFSFLPESLHTFAWFFDDVCLPTDYRHMEGYGVHAYQLINKAGKAHYVKFHWKPTCGVKCMSEEEAIRVGGTNHSHATKDLYDSIAAGNYPEWKLFIQIMDTEDVDKFDFDPLDVTKTWPEDILPLMPVGRLVLNRNIDNFFAENEQLAFNPGHIVPGLYYSEDKLLQTRIFAYADTQRHRIGPNYMQLPVNAPKCAHHNNHRDGAMNFMHRDEEVDYLPSRFDPCRHAEQYPIPSRVLTGRREMCVIEKENNFKQAGERYRSWEPDRQDRYVSKWVEHLSDPRVTYEIRSIWISYLSQADKSCGQKVASRLTLKPTM

SEQ ID NO: 13662 - protein, 264 aa, Bordetella bronchiseptica RB50
MRQALFLGYGRMGAALGEAWLRAGLLAGIDAVDPGRDGAGLRARLVRGADELPEQAYDLVVLAVKPAMAQQALRAVPPARLARACLVSIMAGVPAGALRQALQPPRPVARAMPNTPVMAGQGCTGLYGGDDVAPAQRAAIGRLFEAVGAAFWVDTEDQLHAVTALSGSGPAYYHLFSEALAQAGEQLGLPAALARSLAARTALGAASLQCEEGADFAALRREVTSPHGTTHAAIEVFEQAGALRTLVRDAVRQAQARSRELARP

SEQ ID NO: 13663 - protein, 439 aa, Mycobacterium tuberculosis H37Rv
MSFVIAVPEFLSAAATDLANLGSTISAANAAASIPTTGVLAAGADDVSAAIAALFGAHAQAYQTISAQAATFHAQFVQTLSAGAGAYANAEAANVQQSLLNAINAPTQALLGRPLIGDGADGTAPGQNGGAGGLLYGNGGNGAAGVNAGIAGGSGGAAGLIGNGGSGGAGGAGAAGGSGGQGGLLYGNGGAGGNGGAATIPGGNGGAGGAGGNAWLFGNGGAGGLGAAGAAGAAGVNPLTVPAGQGSMGNNGEPGGPGQPGTEFGQTGGTGGTGGTGLSVGGTGGTGGTGGTGGAGGSGGRGGLLVGDGGAGGIGGTGGEGGIGARGGTGGQGGMGGAGQPGVGGDAGDGGNGGIGGDGGAGGDGGAGGAGGAGGLFGVSGSSGLGGAAGSGGNGGGGGEPGVAGSPGVGPAGRGGDGNLGQFGPEGAPGQPGQPGQPG

SEQ ID NO: 13664 - protein, 494 aa, Hordeum vulgare
MDPCKFRPSSSFDTKTTTTNAGQPVWNDNEALTVGPRGPILLEDYHLLEKIAHFARERIPERVVHARGASAKGFFECTHDVTGLTCADFLRAPGARTPVIVRFSTVIHERGSPETIRDPRGFAVKFYTREGNWDLLGNNFPVFFIRDGIKFPDVIHAFKPNPKSHVQEYWRVFDFLSHHPESLHTFFFLFDDVGIPTDYRHMDGFGVNTYTFVSRAGKSHYVKFHWRPTCGVSCLMDDEATLVGGKNHSHATQDLYDSIDAGNFPEWKLFVQVIDPDEEDRFDFDPLDDTKTWPEDLVPLQPVGRLVLDRNVDNFFNENEQLAFGPGLVVPGIYYSDDKMLQCRVFAYADTQRYRLGPNYLMLPVNAPKCGFKNNHYDGAMNFMHRDEEVDYYPSRHAPLRHAEPASFPVPTRPVVGKREKTRIKKENDFVQPGERYRSWAPDRQDRFVRRFSDALAHPKVSHELRVIWIDFLSKCDKSCGMKVANRLNVKPSM

SEQ ID NO: 13665 - protein, 687 aa, Glycine max
MTTSFGPATTSAPLKDHKVQIPSFHGLRSSSASALPRNALSLPSSTRSLSLIRAVSTPAQSETATVKRSKVEIFKEQSNFIRYPLNEDILTDAPNISEAATQLIKFHGSYQQYNREERGSRSYSFMIRTKNPCGKVSNQLYLTMDDLADQFGIGTLRLTTRQTFQLHGVLKKDLKTVMGTIIRNMGSTLGACGDLNRNVLAPAAPLARKDYLFAQQTAENIAALLAPQSGFYYDIWVDGEKILTSEPPEVVQARNDNSHGTNFPDSPEPIYGTQFLPRKFKIAVTVPTDNSVDILTNDIGVVVVTDDDGEPQGFNIYVGGGMGRTHRLETTFPRLAEPIGYVPKEDILYAVKAIVVTQRENGRRDDRKYSRLKYLISSWGIEKFRSVVEQYYGKKFEPFRALPEWEFKSYLGWHEQGDGKLFYGLHVDNGRIGGNMKKTLREVIEKYNLNVRITPNQNIILTDVRAAWKRPITTTLAQAGLLQPRFVDPLNITAMACPAFPLCPLAITEAERGIPNILKRIRDVFDKVGLKYSESVVVRITGCPNGCARPYMAELGLVGDGPNSYQIWLGGNHKQTSLARSFMDRVKILDLEKVLEPLFYYWKQKRQSKESFGDFTNRMGFEKLKEYIEKWEGPVVAPSRHNLKLFADKETYESMDALAKLQNKTAHQLAMEVIRNYVASNQNGKGE

SEQ ID NO: 13666 - protein, 136 aa, Vibrio parahaemolyticus RIMD 2210633
MALFKYIFITVFALALYSPASNGSEIKQNVDLFEFQSVEVQQRATSLAKTLRCPQCQNQNLIESNAPAAKDLRLKVYTMVNEGSSDQQVKDYLVERYGNIVLYQPPFNYSTALLWIFPIIFLIFFALFSIRLIKRN

SEQ ID NO: 13667 - protein, 492 aa, Solanum tuberosum
MDPSKYRPSSAYDTPFLTTNAGGPVYNNVSSLTVGPRGPVLLEDYYLIEKLATFDREKIPERVVHARGASAKGFFEVTHDISHLTCADFLRAPGAQTPVICRFSTVVHERGSPESIRDIRGFAVKFYTREGNFDLVGNNVPVFFNRDAKSFPDTIRALKPNPKSHIQENWRILDFFSFLPESLHTFAFFYDDVCLPTDYRHMEGFGVHAYQLINKEGKAHYVKFHWKPTCGVKSMSEEEAIRVGGTNHSHATKDLYDSIAAGNYPEWKLFIQTMDPEDVDKFDFDPLDVTKTWPEDLLPLIPVGRLVLNRNIDNFFAENEQLAFNPGHIVPGIYYSEDKLLQTRIFAYADTQRHRIGPNYMQLPVNAPKCGHHNNHRDGAMNMTHRDEEVDYLPSRFDPCRPAEQYPIPACVLNGRRTNCVIPKENNFKQAGERYRSWESDRQDRYITKWVESLSDPRVTHEIRSIWISYLSQADKSCGQKVASRLTVKPTM

SEQ ID NO: 13668 - protein, 416 aa, Escherichia coli
MESKVVVPAQGKKITLQNGKLNVPENPIIPYIEGDGIGVDVTPAMLKVVDAAVEKAYKGERKISWMEIYTGEKSTQVYGQDVWLPAETLDLIREYRVAIKGPLTTPVGGGIRSLNVALRQELDLYICLRPVRYYQGTPSPVKHPELTDMVIFRENSEDIYAGIEWKADSADAEKVIKFLREEMGVKKIRFPEHCGIGIKPCSEEGTKRLVRAAIEYAIANDRDSVTLVHKGNIMKFTEGAFKDWGYQLAREEFGGELIDGGPWLKVKNPNTGKEIVIKDVIADAFLQQILLRPAEYDVIACMNLNGDYISDALAAQVGGIGIAPGANIGDECALFEATHGTAPAYAGQDKVNPGSIILSAEMMLRHMGWTEAADLIVKGMEGAINAKTVTYDFERLMDGAKLLKCSEFGDAIIENM

SEQ ID NO: 13669 - protein, 222 aa, Glycine max
KIGVETDKIGRILSNPSPAVNGVLPADTRTPFTAGLGLDKIGVETDKIGRILVNERFATNVSGVYAIGDVIPGPMLAHKAEEDGVACVEYIAGKVGHVDYDKVPGVVYTMPEVASVGKTEEQVKELGVEYRVGKFPFMANSRAKAIDNAEGLVKILAEKETDKILGVHIMAPNAGELIHEAAIALQYDASSEDIARVCHAHPTMSEAVKEAAMATYDKPIHI

SEQ ID NO: 13670 - protein, 387 aa, Pseudomonas fluorescens PfO-1
MTVLKMSDLDLQGKRVLIREDLNVPVKDGVVTSDARILASLPTIKLALEKGAAVMVCSHLGRPTEGEFSAENSLKPVADYLSKALGREVPLVADYLGGVDVKAGDIVLFENVRFNKGEKKNADELAQQYAALCDVFVMDAFGTAHRAEGSTHGVAKFAKVAAAGPLLAAELDALGKALGAPAKPMAAIVAGSKVSTKLDVLNSLSQICDQLIVGGGIANTFLAAAGHPVGKSLYEPDLLDTARAIAAKVSVPLPVDVVVAKEFAESAEATVKLIADVAADDMILDIGPQTAANFAELLKSSKTILWNGPVGVFEFDQFGNGTKVLAEAIAESAAFSIAGGGDTLAAIDKYGVAEKISYISTGGGAFLEFVEGKVLPAVEVLESRAKA

SEQ ID NO: 13671 - protein, 506 aa, Pseudomonas syringae pv. tomato str. DC3000
MRYAHPGTEGAIVNFKERYGNYIGGEFVAPVKGQYFTNTSPVNGKPIAEFPRSTAEDIDKALDAAHAAAAAWGSTSVQARSLVLLKIADRIEANLEVLAITETWDNGKAIRETLNADIPLAADHFRYFAGVLRAQEGSAAEIDGNTVAYHIHEPLGVVGQIIPWNFPILMAAWKLAPALAAGNCIVLKPAEQTPLGISVLIELIGDLLPAGVLNIVQGYGREAGEALASSKRIAKIAFTGSTPVGSHIMKLAADNIIPSTVELGGKSPNIFFEDIMSAEPEFIDKAAEGLVLAFFNQGEVCTCPSRALVQESIYPQFMEAVLRKVEKIKRGDPLDTDTMVGAQASEQQFDKILSYLEIAKGEGAELLTGGKVEKLEGDLSTGYYIQPTLLKGNNKMRVFQEEIFGPVVSVTTFKDEAQAVAIANDTEFGLGAGLWTRDINRAYRVGRAIKAGRVWTNCYHLYPAHAAFGGYKKSGVGRETHKIALEHYQQTKNLLVSYDTNPLGFF

SEQ ID NO: 13672 - protein, 116 aa, Bdellovibrio bacteriovorus HD100
MGKKIYVGNLSYSLDDQSLADTFAEFGNVESARIVIDRETGRSKGFAFVEMSTDDEAATAIAKLNGVELMGRAMNVSEAKPMAPRENRGGFGGGRGGGGGGNRGGGFGGGNRGGRF

SEQ ID NO: 13673 - protein, 275 aa, Wolbachia endosymbiont of Onchocerca volvulus
MSLIKLSPTIAVTDKVNRLKSQGKEICVLAAGEPDFDTPGHIKKAAIQAINEGKTKYTAVDGTRELKGAIIDKLKRDNDLEYMPSQICVSAGAKQVLFNLLMATINPEDEAVIPAPCWVSYVDMVSFFGGLPVIAECKDNFKLTSELLRSKITEKTKWLILNSPNNPAGVVYTYDELKKIAQILLEYPHVNIITDDIYEHIVYDGKFFTIAQVEPRLYDRVFVVNGVSKAYAMAGWRIGYVAGRSDVVKAISILQSQSTSNPNSIAQAAAVEALN

SEQ ID NO: 13674 - protein, 295 aa, Digitalis lanata
GEVFTEITKPGLEPYVGLHYPATDIPQAARFLFMKNKVRMICDCRAKHVKVVQDEKLPLDLTLCGSTLRAPHTCHLQYMENMDSIASLVMSIVINEGDEEGSEPVQVQNRKRLWGLVVCHNTTPRFVPFPLRYACEFLAQVFSIHVNKELELENQMFEKNILRTQTLLCDMLLRDAPLGIVSQSPNVMDLVKCDGAALLYKDKKYKLGLTPTDFQIRDIVSWLDEYHRDSTGLSTDSLYDAGFPGALSLGGSISGMAAVKISEKDWLFWFRSHTAAEVRWGGAKHEPGEKDDGSR

SEQ ID NO: 13675 - protein, 377 aa, Wolbachia endosymbiont of Brugia malayi
MSDLAKRMSLIKPSPTIAVTDKANRLKDEGKKICILAAGEPDFDTPDHIKKVAIQAIDEGKTKYTAVDGTRELKEAIISKLKRDNNLEYALSQVCVGAGAKQVLFNLFMATVNPGDEAIIPAPYWVSYVDMVSLFGGLPVVIECGQGLKLTPELLKNKVTKKTKWLILNSPNNPAGVVYTYDELKAIAQVLLEYPHVNIITDDIYEHIYDEKFFTIAQVEPKLYNRVFVVNGVSKAYAMTGWRIGYIAGRSDVVKAISTLQSQSTSNPNSIAQAAAVEALNGDHSFLKERMGIFKSRRDFVIEKLNSAPGLLASIPQGAFYLFVSCKDLLGKSTKSGKVINNDLDFAEYLLEDHLVAVIPGIAFGLKNFIRISYATS

SEQ ID NO: 13676 - protein, 516 aa, Triticum aestivum
  unsure (1)..(516): unsure at all Xaa locations
MPGGGFAVSAPSGVEFEAKITPIVIISCIMAATGGLMFGYDVGISGGVTSMDDFLREFFPAVLRRKNQDKESNYCKYDNQGLQLFTSSLYLAGLTATFFASYTTRRLGRRLTMLIAGVFFIIGVIFNGAAQNLAMLIIGRILLGCGVGFANQAVPLFLSEIAPTRIRGGLNILFQLNVTIGILFANLVNYGTSKIHPWGWRLSLSLAGIPAAMLTLGALFVTDTPNSLIERGHLEEGKAVLKRIRGTDNVEPEFNEIVEASRIAQEVKHPFRNLLQRRNRPQLVIAVLLQIFQQFTGINAIMFYAPVLFNTLXGFKSDASLYSAVITGAVNVLATLVSVYAVDRAGRRALLLEAGVQMFLSHAAIAGALGIKXRDKPDNPGHGWAILGAAMVCTYGALLPXAPGGPLGWLIPSETFPLETRSAGQSVTVCVNLLFTFLIAQAFLSMFCHLKFAIFILLSAWVLVMSVFVLFFLPETKNVPMEEMTDKVWKQHWLWKRFMDDDDQHHNIANGKNASV

SEQ ID NO: 13677 - protein, 233 aa, Plesiomonas shigelloides
MFKPFSAEFFGTFWLVLGGCGSALISAAFPQLGIGFLGVALAFGLTVVTMAYAVGHISGAHFNPAVTLGLWAGGRFPAARVLPYIIAQVIGGIAAAAVLYGIASGKAGFDATTSGFAANGYGIHSPGGYALSACMLSEFVLSAFFVIVIHGATEKRAPAGFAPLAIGLTLTIIHLVSIPVTNTSVNPARSIAAAVFQGTWALDQLWMFCLIPSLGGIAGGLIYRALLARPAEA

SEQ ID NO: 13678 - protein, 403 aa, Vibrio vulnificus YJ016
MTVEMKVERGLFDEVMVPCYNPMEMIPVKGQGSRIWDQNGNEYIDFAGGIAVSCLGHCHPVMVNALTEQAGKLWHLSNVMTNEPALRLAKKLTEVSFAERVFFANSGAEANEAALKLARRYAADVYGPEKSEIIAFKQGFHGRTFFTVTVGGQAAYSDGFGPKPGDVTHLPYNDIEALQAHISDRTCAVMMEPLQGEGGIIPPTAEFIQAVRELCDKHNALLVFDEVQTGNGRTGEFYAYQGLGVTPDILSTAKSLGGGFPIGAMLTTAKLAEHLKVGTHGSTYGGNPLACAVAEAVVTEVSKPETLQGVKEREQWFREGLAKLNEKYQIFAEIRGKGLLLGAALNEQWQGRARDVLVAAGKEGLLVLVAGANVVRFTPSLVITKQEIEEGFAKLDKAIASLV

SEQ ID NO: 13679 - protein, 389 aa, Escherichia coli
TLQNGKLNVPENPIIPYIEGDGIGVDVTPAMLKVVDAAVEKAYKGERKISWMEIYTGEKSTQVYGQDVWLPAETLDLIREYRVAIKGPLTTPVGGGIRSLNVALRQELDLYICLRPVRYYQGTPSPVKHPELTDMVIFRGNSEDIYAGIEWKADSADAEKVIKFCREEMGVKKIRFPEHCGIGIKPCSEEGTKRLVRATIEYAIANDRDSVTLVHKGNIMKFTEGAFKDWGYQLAREEFGGELIDGGPWLKVKNPNTGKEIVIKDVIADAFLQQILLRPAEYDVIACMNLNGDYISDALAAQVGGIGIAPGANIGDECALFEATHGTAPKYAGQDKVNPGSIILSAEMMLRHMGWTEAADLIVKGMEGAINAKTVTYDFERLMEGAKLL

SEQ ID NO: 13680 - protein, 465 aa, Saccharomyces cerevisiae
MPIKRLDTVVVNTGSQNDQHSASVPPVYLSTTFKVDLNNEDAQNYDYSRSGNPTRSVLQHQIGKLYRVPQENVLAVSSGMTALDVILRGLVLLNGTDNHTPTIIAGDDLYGGTQRLLNFFKQQSHAVSVHVDTSDFEKFKTVFQSLDKVDCVLLESPTNPLCKVVDIPRILRFVKCISPDTTVVVDNTMMSGLNCNPLQLNPGCDVVYESATKYLNGHHDLMGGVIISKTPEIASKLYFVINSTGAGLSPMDSWLLVRGLKTLGVRLYQQQRNAMILAHWLENSCGFKPTRTNKATKTRFVGLRSNPDFKLHKSFNNGPGAVLSFETGSFEHSKRLVSSKKLSIWAVTVSFGCVNSLLSMPCKMSHASIDPELRKERDFPEDLVRLCCGIENIVDLKKDLLAAMVDADIIEVRENGKYLFNKLNKNLAVNTTIDDLHKPLSIYEEFYNQDLIRKDSELNIKSSKL

SEQ ID NO: 13681 - protein, 491 aa, Oryza sativa
MDPCKFRPSSSFDTKTTTTNAGAPVWNDNEALTVGPRGPILLEDYHLIEKVAHFARERIPERVVHARGASAKGFFECTHDVTDITCADFLRSPGAQTPVIVRFSTVIHERGSPETIRDPRGFAVKFYTREGNWDLLGNNFPVFFIRDGIKFPDVIHAFKPNPRSHVQEYWRVFDFLSHHPESLHTFFFLFDDVGIPTDYRHMDGFGVNTYTFVTRDAKARYVKFHWKPTCGVSCLMDDEATLVGGKNHSHATQDLYDSIAAGNFPEWKLFVQVIDPEEEERFDFDPLDDTKTWPEDEVPLRPVGRLVLNRNVDNFFNENEQLAFGPGLVVPGIYYSDDKMLQCRVFAYADTQRYRLGPNYLMLPVNAPKCAHHNNHYDGAMNFMHRDEEVDYYPSRHAPLRHAPPTPITPRPVVGRRQKATIHKQNDFKQPGERYRSWAPDRQERFIAVRRRVAHPKVSPELRAIWVNYLSQCDESLGVKIANRLNVKPSM

SEQ ID NO: 13682 - protein, 388 aa, Escherichia coli
TLQNGKLNVPENPIIPYIEGDGIGVDVTPAMLKVVDAAVEKAYKGERKISWMEIYTGEKSTQVYGQDVWLPAETLDLIREYRVAIKGPLTTPVGGGIRSLNVALRQELDLYICLRPVRYYQGTPSPVKHPELTDMVIFRGNSEDIYAGIEWKADSADAKKVIKFLREEMGVKKIRFPEHCGIGIKPCSEEGTKRLVRAAIEYAIANDRDSVTLVHKGNIMKFTEGAFKDWGYQLAREEFGGELIDGGRWLKVKNPNTGKEIVIKDVIADAFLQQILLRPAEYDVIACMNLNGDYISDALAAQVGGIGIAPGANIGDECALFEATHGTAPKYAGQDKVNPGSIILSAEMMLRHMGWTEAADLIVKGMEGAINAKTVTYDFERLMEGAKL

SEQ ID NO: 13683 - protein, 319 aa, Bradyrhizobium japonicum USDA 110
MTAAFTFPGQGSQAVGMGKALADAFPVARAVFDEVDAALGEKLTATIWDGPAETLQLTENAQPALMAVSVATLRVLEAEAGFSVGRDAAFVAGHSLGEYSGLAAAGSLTVSDTARLLRTRGLAMQKAVPVGAGAMAALLGLDYEAAMEVANEAAQGQVCQAANDNGGGQVVVSGDKAAVDRAVEIAKTKGAKRAMLLPVSAPFHCKLMQPAADAMAEALAKVTIKAPAAPLVSNVLATAITDPDEIRRRLVEQVTGTVRWRESVAYMAGQGVTRFFEIGAGKVLTGLVKRIADGAVGVAVGGPNDIAAAKDALAAAKQA

SEQ ID NO: 13684 - protein, 251 aa, Acinetobacter sp. SE19
MEKIMSNKFNNKVALITGAGSGIGKSTALLLAQQGVSVVVSDINLEAAQKVVDEIVALGGKAAANKANTAEPEDMKAAVEFAVSTFGALHLAFNNAGILGEVNSTEELSIEGWRRVIDVNLNAVFYSMHYEVPAILAAGGGAIVNTASIAGLIGIQNISGYVAAKHGVTGLTKAAALEYADKGIRINSVHPGYIKTPLIAEFEEAEMVKLHPIGRLGQPEEVAQVVAFLLSDDASFVTGSQYVVDGAYTSK

SEQ ID NO: 13685 - protein, 509 aa, Bordetella bronchiseptica RB50
MDLSDLKKLGLDVAYPFKEQYENYIGGQWVPPVGAEYFDNLSPITGQPFCRVPRSGAADIELALDAAHRARAAWARTSPAERANILLRIADRIEGQLPMLAVAESIDNGKPLRETTAADLPLAIDHFRYFAGCIRAQEGAISEIDANTVAYHFHEPIGVVGQIIPWNFPLLMAAWKLAPALAAGCVVVLKPAEQTPASILVLAELIGDLLPPGVLNVVNGYGKEAGQALATSKRIAKIAFTGSTPVGKHILHAAADNLIPATVELGGKSPNIFFDDVMDHDDEFLDKALEGLAMFALNQGEVCTCPSRILIQESIYERFIEKAIARVQSIKTGHPLDAGTMVGAQVSQVQMDKILSYIDIGRQEGAQCLTGGARNDMLPGGLDQGFYVQPTMLLGKNSMRIFQEEIFGPVAAVATFKDEEEAIAMANDTFYGLGAGVWSRDGARAYRVGRGIEAGRVWTNCYHLYPAHAAFGGYKQSGIGRETHKAALSNYQQTKCLLVSYSAKALGFF

SEQ ID NO: 13686 - protein, 304 aa, Escherichia coli
TLQNGKLNVPENPIIPYIEGDGIGVDVTPAMLKVVDAAVEKAYKGERKISWMEIYTGEKSTQVYGQDVWLPAETLDLIREYRVAIKGPLTTPVGGGIRSLNVALRQELDLYICLRPVRYYQGTPSPVKHPELTDMVIFRENSEDIYAGIEWKADSADAEKVIKFLREEMGVKKIRFPEHCGIGIKPCSEEGTKRLVRAAIGYPIANDRDSVHLVHKGNIMKFTEGAFKDWGYQLAPEEFGGELIDGGPWLKVKNPNTGKKIVIKNVIADAFLQQILVRPAELNVIACLNLNGDFISDPLATQVG

SEQ ID NO: 13687 - protein, 434 aa, Chromobacterium violaceum ATCC 12472
MKQPHRQRKTVPSGGRPETETAAAMQPVHKSQKLANVCYDIRGPVLEHAKRMEDEGHRIIKLNIGNPAPFGFFAPDEIIEDVIVNLPAASGYSDSKGLFAARKAIMHYAQQKHLPNVAMDDIIVGNGVSELIVMAMQALLDNGDEVLVPAPDYPLWTAAVSLAGGKAVHYLCDEEQGWFPSIDDIRAKITPTTRAIVIINPNNPTGAVYPPALLQQIVDVARQHQLIIYADEIYDKVLYDAVRHTSIASLAPDLFVVTLNGLSKNYRACGYRAGWMILSGEKKHAKDYIEGLNMLASMRLCANVPSQYAIQTALGGYQSIDDLVAPGGRLARQRDLAHKLLTEIPGVSCVKPQGALYLFPRLDPKVYPIADDQQFILELLQQEKVLLVQGSGFNWIAPDHFRVVFLPNSDDLIEAIGRIARFLESYRKRHGAAE

SEQ ID NO: 13688 - protein, 389 aa, Escherichia coli
TLQNGKLNVPENPIIPYIEGDGIGVDVTPAMLKVVDAAVEKAYKGERKISWMEIYTGEKSTQVYGQDVWLPAETLDLIREYRVAIKGPLTTPVGGGIRSLNVALRQELDLYICLRPVRYYQGTPSPVKHPGLTDMVIFRGNSEDIYAGIEWKADSADAEKVIKFLREKMGVKKIRFPEHCGIGIKPCSKEGTKRLVRAAIEYAIANDRDSVTLVHKGNIMKFTEGAFKDWGYQLAREEFGGEPIDGGPWLKVKNPNTGKEIVIKDVIADAFLQQILLRPAEYDVIACMNLNGDYISDALAAQVGGIGIAPGANIGDECALFEATHGTAPKYAGQDKVNPGSIILSAEMMLRHMGWTEAADLIVKGMEGAINAKTVTYDFERLMEGAKLL

SEQ ID NO: 13689 - protein, 298 aa, Triticum aestivum
ADYRHMDGSGVNTYTLVNRAGKAHYVKFHWKPTCGVKSLLEEEAVTVGGTNHSHATKDLTDSIAAGNYPEWTFYIQTIDPDYEERFDFDPLDVTKTWPEDVVPLQPVGRLVLNRNIDNFFSENEQLAFCPGLIVPGVYYSDDKMLQCRVFAYADTQRYRLGPNYLMLPVNAPKCGFKNNHYDGAMNFMHRDEEVDYYPSRHAPLRQAEPASFPVPTRPVVGKREKTRIKKENDFVQPGERYRSWAPDRQDRFVRRFADALAHPKVSHELRVIWIDFLSKCDKSCGMKVANRLNVKPSM

SEQ ID NO: 13690 - protein, 236 aa, Oryza sativa
MDGGGDPVDEFLIGGGGEDGDLGVFCDGVPTLPCDGGLGIDDVSGDTCCLDQSVLGKRGRDESSSSGPKSKACREKIRRDRLNDRFLELSSVINPDKQAKLDKANILSDAARLLAELRGEAEKLKESNEKLRETIKDLKVEKNELRDEKVTLKAEKERLEQQVKALSVAPTGFVPHLPHPAAFHPAAFPPFIPPYQALGNKNAPTPAAFQGMAMWQWLPPTAVDTTQDPKLWPPNA

SEQ ID NO: 13691 - protein, 319 aa, Lactobacillus casei
MKRIGILTSGGDAPGMNAAVRAVARKAMHEGLEVYGINYGFAGLVAGDIFKMNESTVGDKIQRGGTMLYSARYPQFAQEEGQLRGVEQLNKFGIEALVVIGGDGSYHGALALTRHGFNTIGLPGTIDNDIPYTDFTIGFDTAVNTVVEAVDRLRDTAASHERTFVIEVMGREAGDIALWSGVAGGAEDVIIPEHDFDVKKIASKLQSSRERGQKHAVILLAEGVMHADQFAKELAAHGDFQLRSTVLGHIVRGGAPSARDRVLASQMGSYAVELLLQGKGALAVGIENNKITAHDVRTLFDAKHHAELSLYTLAEELTF

SEQ ID NO: 13692 - protein, 322 aa, Malus x domestica
ILPFKLPAIGPNDVRIRIKAVGICGSDIHYLKTMKCGDFQVKDPMVIGHECAGIVDKVGSEVKHLVPGDRVAVEPGISCAHCQQCKGGRYNLCPDMKFFATPPVHGSLANQIVHPADLCFKLPENVSLEEGAMCEPLSVGVHACRRANVGPETTVLIVGAGPIGLVSVLAARAFGAPRIVIVDMDDRRLAMAKSLGADGTVKVSTKMEDLDDEVAKIKEAMGSEVDVTFDCVGFNKTMSTGLNATRPGGKVCLVGMGHGVMTVPLTPAAAREVDVVGVFRYKNTWPLCLEFLRSGKIDVKPLITHRFGFTEKEVEEALEPVL

SEQ ID NO: 13693 - protein, 451 aa, Thermoanaerobacter tengcongensis
MNYDVIVVGGGPGGYTAAIRLSELGKKVALIEEDSLGGTCLNRGCIPTKVYAHAAELVTRIKEAKDFGITAEYTLDIAKLRQKKERVVKRLVGGVGYLMNLHHIDVINGKGTFIDKNTVEVNGAKYTAENFIIATGSKVFLPPIEGIDLEGVMTSDKALELEKIPEKIVIIGAGIIGLEFANIYASLGSKVIMIEMLPQLLPMLDRDVVGVMEKALKKQKIELHLNSKVEKIERGLRVIYTENGNQESVECDAVLVAVGRVPNVNGVDALNLEMNGRGIKVDSHMRTSIENIYAIGDVTGGIQLAHVASYQGIVAAHNIAGEEKEADLTAVPNCLYTNPEVAWVGLNESQAREKYGEVKIGTFPYTALGRAMTMGESDGFVKIIAEGKYGRVVGMEIIGAGATEIIHEGVLAIKEEFTLEELADSIHAHPTLSESIKEAAEDALGMPINKG

SEQ ID NO: 13694 - protein, 300 aa, Triticum aestivum
MLPSTFQDKMKEEEALKRKLKARMEYAKFLQEPAKEMAKEVKASYSGETKQTAGDLDEFLNKDATNVGDEGGFAPNIQENKEGLELLKTAIEKAGYTGKVVIGMDVAASEFYNDKDKTYDLNFKEENNDGSQKISGDSLKNVYKSFVSEYPIVSIEDPFDQDDWVHYAKMTEECGVEVQIVGDDLLVTNPTRVAKAIKEKSCNALLLKVNQIGSVTESIEAVKMSKHAGWGVMTSHRSGETEDTFIADLAVGLSTGQIKTGAPCRSERLAKYNQLLRIEEELGAAAVYAGLKFRAPVEPY

SEQ ID NO: 13695 - protein, 170 aa, Zea mays
MAPTVMMASSATAVAPFQGLKSAASLPVARRSTRSLGNVSNGGRIRCMQVWPAYGNKKFETLSYLPPLSTDDLLKQVDYLLRNGWIPCLEFSKLGFVYRENSTSPCYYDGRYWTMWKLPMFGCNDATQVYKELQEAIKSYPDAFHRVIGFDNIKQTQCVSFIAYKPPGSD

SEQ ID NO: 13696 - protein, 235 aa, Zea mays
MAGADVDVGTELRLGLPGGGADAAKAAKRGFEDTIDLKLKLPTAGMEEAAAAAKPEPAAEKAKRPAEAPAADAEKPPAPKAQAVGWPPVRSYRRNVMTVQSVKSKKEEEPEKQQSAANAGGNGSAFVKVSMDGAPYLRKVDLKMYNSYTELSVALKKMFSTFTTSGNNMNEGKLVDPVSGADVVTTYEDKDGDWMLVGDVPWEMFVESCRRLRIMKSSEAIGLAPRTKDKCKNRS

SEQ ID NO: 13697 - protein, 404 aa, Propionibacterium freudenreichii
MVKKVALLTAGGFAPCLSSAIAELIKRYTEVSPETTLIGYRYGYEGLLKGDSLEFSPAVRAHYDRLFSFGGSPIGNSRVKLTNVKDLVARGLVASGDDPLKVAADQLIADGVDVLHTIGGDDTNTTAADLAAYLAQHDYPLTVVGLPKTIDNDIVPIRQSLGAWTAADEGARFAANVIAEHNAAPRELIIHEIMGRNCGYLAAETSRRYVAWLDAQQWLPEAGLDRRGWDIHALYVPEATIDLDAEAERLRTVMDEVGSVNIFISEGAGVPDIVAQMQATGQEVPTDAFGHVQLDKINPGAWFAKQFAERIGAGKTMVQKSGYFSRSAKSNAQDLELIAATATMAVDAALAGTPGVVGQDEEAGDKLSVIDFKRIAGHKPFDITLDWYTQLLARIGQPAPIAAA

SEQ ID NO: 13698 - protein, 538 aa, Pneumocystis carinii
MDTSPLASFCFSGNQNSCMTSISGHNEIDKSNFMISGKKYTDKNNKFGMINLKQSSKSGNNGTCFDTGSFKMSPTTSLVAELSGNFYIDKSPVPPTPRRSLLFNFSCDHQSTPVLNFLNDPITPKFDSLTMGNINIVTPSSSPIETMDYSPLPQKHTIAAFGTEHCETFDDQNLCSFVNSETRDYCDIKNSRIPLDDISNSNELNNNILDSLFMANENSRINSSVLDTDYDKENVDNNQIKNDTESCDIALNDLFSNSPNPTRFSVGNVESEFLQSFKKPLFSRYSIALEASPFPFMDNDNMDHRLVKWRRTQSLYQNSSDFFSTKYKGQDNSDLCLQLSPFEFNSNDCQILPCFSIKDDRLKRIDSDIIVRLLDGHYHDQCDEYIIVDCRFEYEYNGGHIMGAININTKDALDALLLDNPKTKRCLIIFHCEYSSHRAPRLALYLRNKDRQLNMKRYPLLYYPEIYILHGGYRSFYEKYKERCEPQNYVEMDDSLHKTACAREMCNFRRNTKFLRTLTYTYSQTDAIYMNTLQKDVE

SEQ ID NO: 13699 - protein, 193 aa, Ustilago maydis 521
MSNPTLTFVTGNANKLREVQQIFSLTPNFPYELTNKDLDLPEIQGTTRDVAQAKCAAAAKALGGACITEDTALGFHALGGLPGPYIKDFMKTIGHDGLNKMLDGFEDRTASAICTFAYCAGPDEQVHLFEGRTEGVIVPPRGPTHFGWDPILEIKGTGLTYAEMDPKQKNTLSHRYKALTLLQDYLVGLSKQN

SEQ ID NO: 13700 - protein, 458 aa, Glycine max
  unsure (1)..(458): unsure at all Xaa locations
MSITHSLTTPLSSSSSAFLAPSSFNCRGQVSLPVKSVSICKCVATPEAETAYKTGVNRNPNMGKLQAGYLFPEIARRRSAHLLKYPDAXSLALGIGDTTEPIPEVITDAMSKRSHALATIGGYSGYGAEQGEKPLRRALASTFYSDLGIEEDDIFVSDGAKCDISRLQIVFGSNVKMAVQDPSYPAYVDSSVIMGQTGLFQKNVEKFANIEYMRCNPENGFFPDLSSISRPDIIFFCSPNNPTGAVATREQLTQLVQFAKDNGSIVIHDSAYAMYISGDNPRSIFEIPGAKEVAIETSSFSKYAGFTGVRLGWTVVPKQLLFSDGFPVAKDFNRIVCTCFNGASNISQAGGLACLSPEGLKAMRDVIGFYKENTNIIMETFDSLGFKVYGGKDAPYVWVHXPGRSSWDVFAEILEKTHVVTTPRRRFGPGGEGFIRVSAFGHRENVLEACRRFKQLYK

SEQ ID NO: 13701 - protein, 479 aa, Mesorhizobium sp. BNC1
MTTLHQNLIDGAWVGGEGKENINPSNIKDVVGIYAQASAEETKQAIAAAKAAFPAWSRSGILERHAILRKTADEILARKDELGELLSREEGKTLPEGIGEVTRAGQIFDFFAGAVLRLAGEVLPSVRPGIGVEITREPIGVIGIITPWNFPIAIPSWKIAPALAYGNTVVVKPADLVPGSTWAIVDILVRAGLPKGVLNLVMGKGSVVGQTMLESRDVTAITFTGSVGTGKRVAAASVELGRKFQLEMGGKNPTVVLDDADLKVAVESVTQSAFFSTGQRCTASSRVIVTEGIHDRFVEALAERIRGLKVGNALEPGIDIGPVVDANQLKQDTDYIEIGKQEGAKLVAGGERVQKETEGYFLQPALFTEATNSMRISREEIFGPVASVIRVKDYEEALATSNDTEFGLSAGIVTTSLKYATHFKRNAEAGMVMVNVPTAGVDFHVPFGGRKGSSYGPREQGTYAAEFFTVVKTAYTAAG

SEQ ID NO: 13702 - protein, 539 aa, Pneumocystis carinii
MDTSPLAAFCFSGNQNSCITSISGHNEMDKSNFIISGKKYGDRVNKFGMINLKQSSKSGNNGICFDTRSFKMSPTTSLVAELSGNFYIDKSPVPPTPRRSLLFKFSCDHQSTPALNFLKDPITPKFDSLTMGNINIATPCSSPIETMDYSPLPQKHILANFGSEHCETFDDQNLCSNVNPEIRDYCDIKNSKTPLNDISNSNELDNSVLNSLFMVNEKPNINSSVLDTNYDKENADKNQIKNDRESCDIASNDHFSNSPKPVRFSTGNVDSEFLQSFKKPLFSRYSIALEASPLSFMDNDDMDHRLVKWRRTQSLYQNSCDFLSTKYNGQDNSDLCLQLSPFEFNSNDCQILPCFSIKDDRLKRIDSDIIVRLLDGHYHDQCDEYMIVDCRFEYEYNGGHIMGAININSKDALDALLLDNPKTKRCLIIFHCEYSSHRAPRLASYLRNRDRQLNMKRYPLLYYPEIYILHGGYRSFYEKYKERCEPQNYVEMDDSLHKTACAKEMCNFRRNTKFLRTLTYTHDQTDAIYMNTLQKDIME

SEQ ID NO: 13703 - protein, 108 aa, Mycoplasma genitalium
KPTKPFVVVLGGAKVSDKLKVVENLLKLADNILIGGGMVNTFLKAKGKATANSLVEKELIDVAKQILDKDTHNKIVLAIDQVMGSEFKDQTGITLDVSDKIQEQYQSY

SEQ ID NO: 13704 - protein, 389 aa, Escherichia coli
TLQNGKLNVPENPIIPYIEGDGIGVDVTPAMLKVVDAAVEKAYKGERKISWMEIYTGEKSTQVYGQDVWLPAETLDLIREYRVAIKGPLTTPVGGGIRSLNVALRQELDLYICLRPVRYYQGTPSPVKHPGLTDMVIFRENSEDIYAGIEWEADSADAEKVIKFLREKMGVKKIRFPEHCGIGIKPCSKEGTKRLVRAAIEYAIANDRDSVTLVHKGNIMKFTEGAFKDWGYQLAREEFGGELIDGGPWLKVKNPNTGKEIVIKDVIADAFLQQILLRPAEYDVIACMNLNGDYISDALAAQVGGIGIAPGANIGDECALFEATHGTAPKYAGQDKVNPGSIILSAEMMLRHMGWTEAADLIVKGMEGAINAKTVTYDFERLMEGAKLV

SEQ ID NO: 13705 - protein, 703 aa, Mesorhizobium sp. BNC1
MNTHSSLHIGHSACPHDCPSTCALDVEVIAGRIGRVHGAKDNSYTAGVICAKVARYGERVHHPDRLLKPLVRAGAKGEGVWKEASWEAALDRLAEAFLEAEANYGSESVWPYHYAGTMGLVQRDSIHRLRHAKRYSGQFDTICTNPAWAGYVMGTGALRGADPREMAKADCVVIWGTNAVATQVNVMTHAVRARKERGAKIVVIDVYDNATMKQADLGIIVRPGTDGALACAVMHVLFRDGLVDRPYLERYTDDPKGLEQHLSTRTPEWAEAITGVPAAEIEAFARLVGETKRTFFRLGYGFTRNRNGAVNMHAALSIAAVTGAWQYEGGGAFHSNSGIFGLDKSLIEGTTFADPSVRSLDQSQIGRVLTGDEAALHGGPPVTAMLIQNTNPANVAPEQRLVKRGFLREDLFVCVHEQFMTDTAKLADVVLPATMFVEHDDIYRGGGHQHILLGPKLIDAPGEARENIFVIDELAKRLGVAHLPGFGLSAREHLDWTLGRRGLGTFDSFRHERWADVQPDFETAHFLTGFGHPDGKYRFRPSWKGTPGPNHPPESIGFQGPHESLPEFPDHVDFIEAADPEHPFRLATSPARSFLNSSFTETPGSKKREGRPELMLHPEDALALGIAEGDRVEIGNGRGEVVLHAKIFDGVRRGVVIAEGIWPNGAHERGEGINVLTGADAVAPYGGAAFHDTKIWVRAAHAA

SEQ ID NO: 13706 - protein, 706 aa, Mycobacterium avium
MATDHTSDAPDPKQRDLESARFRRDTGYLTTQQGVRVDHTDDALTVGERGPTLLEDFHAREKITHFDHERIPERVVHARGAGAYGYFEPYDDRLAQYTAAKFLTSPGTRTPVFVRFSTVAGSRGSADTVRDVRGFATKFYTEQGNYDLVGNNFPVFFIQDGIKFPVLVHAVKPEPHNEIPQAQSAHDTLWDFVSLQPETLHAIMWLMSDRALPRSYRMMQGFGVHTFRLVNARGRGTFVKFHWKPRLGVHSLIWDECQKIAGKDPDYNRRDLWEAIESGQYPEWELGVQLVAEDDEFSFDFDLLDATKIIPEEQVPVLPVGKMVLNRNPDNFFAETEQVAFHTANVVPGIDFTNDPLLQFRNFSYLDTQLIRLGGPNFAQLPVNRPVAQVRTNQHDGYAQHAIPQGRSSYFKNSIGGGCPALADEDVFRHYTQRVDGQTIGKRAEAFQNHYGQARMFFKSMSPVEAEHIVAAFAFELGKVEMPEIRSAVVAQLARVDDQLAAQVAAKLGLPEPPEEQVDESAPVSPALSQVTDGGDTIASRRIAVLAADGVDVVGTQRFTELMEQRGAVVEVLAPVAGGTLAGGSGGELRVDRSFTTMASVLYDAVVVACGPRSVSTLSDDGYAVHFVTEAYKHLKPIGAYGAGVDLLRKAGIDNRLAEDTDVLNDQAVVTTKAAADELPERFAEEFAAALAQHRCWQRRTDAVPA

SEQ ID NO: 13707 - protein, 207 aa, Zea mays
  unsure (1)..(207): unsure at all Xaa locations
RSKEGEGGKDEGTSGFLPRRKKKDNLFNDNLEQGIQIASYRGGQFQPFLERECXHAVACVQTCQTXTLQEKTVIXMGQAEHSVVTTCAYCGVGCGFKAEMKGQEVVRMVPWKDGQANRGHSCVKGRFAWGYATHKERVLKPMIRKRITDSWREVSWEEAIDYAASEFRRIQGQYGRDAVGGITSSRCTNEETWLVQKLVRAAFGTNN

SEQ ID NO: 13708 - protein, 690 aa, Arabidopsis thaliana
MLLMQSLLFTIHLSFLFSLLCQSNCSCKHHIVPFSKVSQEDAPHASHAGAYPQRIQRHGTTNSEAILKFKESLVVGQENALASWNAKSPPCTWSGVLCNGGSVWRLQMENLELSGSIDIEALSGLTSLRTLSFMNNKFEGPFPDFKKLAALKSLYLSNNQFGGDIPGDAFEGMGWLKKVHLAQNKFTGQIPSSVAKLPKLLELRLDGNQFTGEIPEFEHQLHLLNLSNNALTGPIPESLSMTDPKVFEGNKGLYGKPLETECDSPYIEHPPQSEARPKSSSRGPLVITAIVAALTILIILGVIFLLNRSYKNKKPRLAVETGPSSLQKKTGIREADQSRRDRKKADHRKGSGTTKRMGAAAGVENTKLSFLREDREKFDLQDLLKASAEILGSGCFGASYKAVLSSGQMMVVKRFKQMNNAGRDEFQEHMKRLGRLMHHNLLSIVAYYYRKEEKLLVCDFAERGSLAINLHSNQSLGKPSLDWPTRLKIVKGVAKGLFYLHQDLPSLMAPHGHLKSSNVLLTKTFEPLLTDYGLIPLINQEKAQMHMAAYRSPEYLQHRRITKKTDVWGLGILILEILTGKFPANFSQSSEEDLASWVNSGFHGVWAPSLFDKGMGKTSHCEGQILKLLTIGLNCCEPDVEKRLDIGQAVEKIEELKEREGDDDDFYSTYVSETDGRSSKGESCESISFA

SEQ ID NO: 13709 - protein, 179 aa, Zea mays
  unsure (1)..(179): unsure at all Xaa locations
TPSVXYDPLALRKAFEKAVVKRLMTDVPFGVLLSGGLDSSLVATVAVRHLARTEAARRWGTKLHSFCVGLEGSPDLKAAREVAEYLGTLHHEFHFTVQDGIDAIEDVIYHTETYDVTTIRASTPMFLMSRKIKSLGVKMVISGEGSDELFGGYLYFHKAPNKEELHRETCRKVCVSFFH

SEQ ID NO: 13710 - protein, 347 aa, Streptococcus agalactiae NEM316
MFVKKGLFVFLLLCILSMWLMIFGVAFYYFGSLHQSLTSRIIYQFVLTVLLTTTAWFMGAYFLAFEGHFKTVFQFQEADGKQIVNCLFQLCFALYAVVMLIGSIIDRVQTKRLLLAVVSWLFLVYTPLAYLIWNSEGVFAKMGVLDFSGGMVVHLSAGLSSYILAHVIGKSEHQHNKVKNDSLFLGMILITFGWFGFNMGPVGEWNSQAIMILLNTIFAIIGGGLAWTLAAKWNGEEEKTGSLLNGIIVGLVTSTAGVGYLLTWQLLAVTFFASLFTYFVTDYVAKAFAIDDVVSSFGMNGIGGLLGSLGVGLFKLSHMPVQLLALATTILLSIIMTYIISKAIFRK

SEQ ID NO: 13711 - protein, 104 aa, Shigella dysenteriae
TLQNGKLNVPENPIIPYIEGDGIGVDVTPAMLKVVDAAVEKAYKGERKISWMEIYTGEKSTQVYGQDVWLPAETLDLIREYRVAIKGPLTTPVGGGIRSLNVAL

SEQ ID NO: 13712 - protein, 367 aa, Azotobacter vinelandii
MPLFNFRGTQRMWYDGFLDPTPWQLIMVTLLITHLTVVSVTVYLHRYSAHRALELHPAVKHAFRFWLWLTTGMNTREWTAVHRKNHACCETPEDPHSPRYKGLANVLWRGAELYKAEAGNTETLRIYGKNCPDDWIERHVYSRFPNGGAMLMLLIDLALFGAFGLSVWAVQMLWIPFWAAGVVNGLGHAVGYRNFECRDAATNLVPWGILIGGEELHNNHHTYPGSAKLSVRPWEFDMGWAWIRLLVLLGLAEVKRTVPVAHRVADKRHLDMDTARAILNNRFQIMAHYRSRVIAPQVRMEAARAEASVRHLFHRDKGLLARESSLLEARQQARIQSLLEQSQTLRVVYERRLALQQVLDPDQRQRA

SEQ ID NO: 13713 - protein, 321 aa, Malus x domestica
ILPFKLPAIGLNDVQIRIKAVGICGSDVHYLKNMKLADFEVKEPMVIGHECAGIVEKVGSDVKHLVSGDRVAVEPGISCSRCQQCKGGRYNLCPDMKFFATPPVHGSLANQIVHPADLCFKLPENVSLEEGAMCEPLSVGVHACRRANVGPETTVLIVGAGPIGLVSVLAARAFGAPRIVIVDMDDKRLAVAKSLGADGTVKVSAKMEDLDDEVAKIKETMGAEVDVTFDCVGFNKTMSTGLNATRPGGKVCLVGMGHSMMTVPLTPAAAREVDVVGVFRYKNTWPLCLEFLRSGKIDVKPLITHRFGFTEKEVEEASLEF

SEQ ID NO: 13714 - protein, 471 aa, Lentinula edodes
MSDVVKKGSDDSSATVTSQVTDSPTIPDVDNYVAYTIKNTKALPPVTWSNLLNELNWLSVYILTIPPLVGFVGAFYVKLQWETAVWAVAYYFLTGLGITAGYHRLWAHRAFNASLPLQYVLAILGAGSLQGSIKWWSRGHRAHHRYTDTELDPYNAHKGFWFSHVGWMLVKPRRKPGVADVSDLRHNPVVKWQHKHYLSLILFMGFILPSIVAYVGWGDAKGGFIYAGVIRLVFVHHSTFCVNSLAHWLGETPFDDKHTPRDHMITAFVTIGEGYHNFHHQFPMDYRNAIKWYQYDPTKWTIWVLAKLGLASHLKVFPDNEVRKGQLTMELKKLRRTQDKLSWPSDSNDLPVISWESFTSQSEKRPLILISGFIHDVSDFIEEHPGGAHFVRNYIGKDATTAFFGGVYDHSNAAHNLLAMKRVGVLHGGSPHGLDDKRAIPPSQRLKIARYTELLSPGSSSAYSDGEDGLL

SEQ ID NO: 13715 - protein, 356 aa, Limnanthes douglasii
LRLSLYFPISISLSLSLEAMASFIATTTPAMPAFASVLDPKIPTKPEPKTETPKPKDDLERFRTSEVVLERKAKGFWRRKWNPRDIQNAVTLLVLHALAAMAPFYFSWDAFWISFILLGFASGVLGITLCFHRCLTHGGFKLPKLVEYFFAYCGSLALQGDPMEWVSNHRYHHQFVDTERDVHSPTQGFWFCHIGWVLDKDLFVEKRGGRRNNVNDLKKQAFYRFLQKTYMYHQLALIALLYYVGGFPYIVWGMGFRLVFMFHSTFAINSVCHKWGGRPWNTGDLSTNNMFVALCAFGEGWHNNHHAFEQSARHGLEWWEIDVTWYVIRTLQAIGLATNVKLPTEAQKQKLKAKSA

SEQ ID NO: 13716 - protein, 505 aa, Limnanthes douglasii
MSETKPEKPLIATVKNTLPDLKLSINLKHVKLGYHYLITHGMYLCLPPLALVLFAQISTLSLKDFNDIWEQLQFNLISVVVSSTLLVSLLILYFMTRPRPVYLMDFACYKPDETRKSTREHFMKCGESLGSFTEDNIDFQRKLVARSGLGDATYLPEAIGTIPAHPSMKAARREAELVMFGAIDQLLEKTKVNPKDIGILVVNCSLFSPTPSLSSMIVNHYKLRGNIISYNLGGMGCSAGLISVDLAKRLLETNPNTYALVMSTENITLNWYMGNDRSKLVSNCLFRMGGAAVLLSNKTSDKKRSKYQLVTTVRSHKGADDNCYGCIFQEEDSNGKIGVSLSKNLMAVAGDALKTNITTLGPLVLPMSEQLLFFATLVARKVFKKKIKPYIPDFKLAFDHFCIHAGGRAVLDELEKNLQLSSWHLEPSRMTLYRFGNTSSSSLWYELAYSEAKGRIRKGERVWQIGFGSGFKCNSAVWKALKSVDPKKEKNPWMDEIHQFPVAVV

SEQ ID NO: 13717 - protein, 559 aa, Alcaligenes sp.
MYLNITGMTCDSCATHVKDALEKVPGVLSALVSYPKGSAQLATDPGTSPEALTAAVAGLGYKATPADAPSTSARGRLLGKALGWLGGGDKAGGDGDGLHVAVIGSGAAMAAALKAVEQGANVTLIERGTIGGTCVNVGCVPSKIMIRAAHIAHLRRESPFDGGIAATVPAIDRSKLLAQQQARVDELRHAKYEGILDDNPAITVLHGEARFKDDQSLAVRLNDGGERVVAFDRCLVATGASPAVPPIPGLKESPYWTSTEALVSDTIPERLAVIGSSVVALELAQAFARLGSKVTILARSTLFFREDPAIGEAVTAAFRAEGIKVLEYTQASQVAHVDGEFVLTTGYGEIRADQLLVATGRAPNTRSLALEAAGVAANAQGAIVIDKGMRTSTPHIYAAGDCTDQPQFVYVAAAAGTRAAINMTGGDAALDLTAMPAVVFTDPQVATVGYSEAEAHHDGIETDSRTLTLDNVPRALANFDTRGFIKLVIEEGSGRLIGVQAVAPEAGELIQTAVLAIRNRMTVQELADQLFPYLTMVEGLKLAAQTFSKDVKQLSCCAG

SEQ ID NO: 13718 - protein, 560 aa, Xanthomonas campestris
MTTLQISGMTCASCADHVKDALEKIPGVHQADVSYASGKAELTVDKRVNHEQMQAAVEALGYRAAFEDATLQPRPGLLDQAPGWLSGGIGAGKEDVRLHVAVIGSGGAAMAAALKAVEGGARVTLIERGIIGGTCVNVGCVPSKIMIRAAHVAHLRRESPFDGGLSATTPTVLRERLLAQQQGRVDELRHAKYESILESTPAISVLRGTARFQDGHTLSVELAEGGERIVAFDRCLVATGASAAVPSIPGLKDTPYWTSDEALVSDSIPQRLAVIGASVVAVELAQAFARLGSRVTILARSSMFFREDPAIGAAVTEVFRMEGIEVLEQTQASQVSQPNGEFVLSTNHGELRADQLLIATGRLPNTQGMNLDGAGVTLDERGGIQIDRGMRTSARDIYAAGDCTDQPQFVYVAAAAGTRAAINMTGGEATLNLDVMPSVVFTDPQVATVGYSEAEAHNAGLETDSRTLTLDNVPRALANFDTRGSSSWCAEAGSGRLLGVQAVTPEAGELIQSAVIAIRARMTVQELADQLFPYLTMVEGLKLAAQTFTKDVKQLSCCAG

SEQ ID NO: 13719 - protein, 423 aa, GIBBERELLA ZEAE PH-1
MSSAPLNSDPVATPPRPPSPVHNFGTLAVHAGAPHDPATGAVIESISLSTTFAQSAVGKPVGEYEYSRSSNPNRTNFETAVAALEHAKYALAFSSGSATTATILQSLAAGSHVISVSDVYGGTHRYFTQVAKAHGVKVTFTPEIEVDIAEHITPDTRLIWIETPSNPTLRLVDIRAVVTEAHKHGVLVVVDNTFLSPYVQNPLDFGADIVVHSVTKYINGHSDVVMGVAAFNSDELKARLSFLQNAIGAVPSAFDSWLAHRGLKTLHLRAREASRNADAVARALEASPLVIAVNYPGLDSHPHRHIAKKQHRDALGGGMLSFRIQGGHAAAERFCQVTKIFTLAESLGGVESLVEVPSSMTHAGIPRDQREAVGIFDDLVRISCGVEDAQDLTNDVLQALEKATSAAKANGLNGNGVNGSNGH

SEQ ID NO: 13720 - protein, 159 aa, Zea mays
  unsure (1)..(159): unsure at all Xaa locations
GSSLVEHDKLELATSVLIKGQENGVCLMLPFDLDDADKLGPDASSXTFQVGPXLKLSDACMGLDLRPYPMSGLSCGLQSTQTXSWNGPMAALEFDRLADATSAMAKKLSQLSGTAFTTIVGGGDSIGAADIVGVCHSMTHISTGGCASLELLDGNELPR

SEQ ID NO: 13721 - protein, 730 aa, Aspergillus niger
MRHFWLLPAVAGIAGAQCPYLSGEMSFTQEQDNAGDTIEVTEQPIDNTLYVNDTGSYMTTDFGTPISDQTSLKAGPRGPTLLEDFIFRQKLQRFDHERVPERVVHARGAGAYGTFKSYADWSNVTAADFLSANDKETPMFCRFSTVVGFRGSVDTARDVHGHACRFYTDEGNYDIVGINFAPFFIQDAIQFPDLVHAIKPMPNNEIPQAATAHTSAWDFFSQQSTALHSALWLMSGNGIPRSFRHMNGYGVHSFRFVAANGTSKVVRTPWKSQQGVASLVWDEAQAAAGKNSDYHRQDLYNAMPNGHYPKYELQAQIMDEADMLRFGFDLLDPTKLVPEEVVPYTPLGMMELNANPTNYFAEVEQAGFQPGHVVPGIDFTDDPLLQGRLFSYLDTQLTRHGGPNFEQIPVNRPRKPVHNNNRDGFGQQQIPTNNWAYTPNSMSNGYPMQANQTQGHGFFTAPYRYASGHLVRQTSPTFNDHWSQPAMFWNSLIPAEQQMVVNAIVFENSKVNSPHVRKNVVNQLNMVNNNLAVRVARGLGLDEPSPNPTYYTSNKTSNVGTFGKPLLSIEGLQVGFLASNSHPESIKQGQAMAAQFSAAGVDLNIVTEAYADGVNTTYALSDAIDFDALIIADGVQSLFASPALANQMNSTATSTLYPPARPFQILVDSFRYGKPVAAVGSGSVALKNAGIDSSRSGVYTGSSETTEKIAKEVLEGLYTFRFVDRFALDE

SEQ ID NO: 13722 - protein, 310 aa, Oryza sativa (japonica cultivar-group)
MGRPPCCVKAEVKKGPWTPEEDLMLVAYVQEHGPGNWRAVPTNTGLMRCSKSCRLRWTNYLRPGIKRGNFTDQEEKLIVHLQALLGNRWAAIASYLPERTDNDIKNYWNTHLKKKLKKMSATGGGGDDGEGGGAGEVKTRAAAPKGQWERRLQTDIHTARQALRDALSLDPSPPAKPLDSSSGATAPPSSQAATSYASSAENIARLLEGWMRPGGGGGKTTTTPSSGSRSSAASVLSGEASHSGGATAPTPDGSTVTSKTKDEETAGAPPPPPPPAFSMLESWLLDDGMGHGEVGLMDVVVPLGDPSEFF

SEQ ID NO: 13723 - protein, 389 aa, Shigella sonnei
  unsure (1)..(389): unsure at all Xaa locations
TLQNGKLNVPENPIIPYIEGDGIGVDVTPAMLKVVDAAVEKAYKGERKISWMEIYTGEKSTQVYGQDVWLPAETLDLIREYRVAIKGPLTTPVGGGIRSLNVALRQELDLYICLRPVRYYQGTPSPVKHPELTDMVIFRENSEDIYAGIEWKADSADAEKAIKFLREEMGVKKIRFPEHXXXXXXXXXXXXXXXXXXXXXXXXXXXXXXXXXXXXXXXXXXXXXXXXXXXXXXXXXXXXXXXXXDGGPWMKVKNPITGKEMVIKDVIADAFLQQILLRPAEYDVIACMNLNGDYISDALAAQVGGIGIAPGANIGDECALFEATHGTAPKYAGQDKVNPGSIILSAEMMLRHMGWTEAADLIVKGMEGAINAKTVTYDFERLMEGAKLR

SEQ ID NO: 13724 - protein, 431 aa, Methylococcus capsulatus str. Bath
MGQGPKFFGFSLLGCLLVARPLEAAELEAADTAWILTSTGFAWFMTVPGLALLYAGLVRTKNVLSVLAQCFAVAALVSLVWMGAGYSLALGGGESSSPWLGGTSRLFLHGLTADSAVGPVSEAAYCIYHLGFAVLAPTVMVGGFAERMKFSAMLWFTTLWMLLVYAPVCHWLWGGGWLARLGAADFSGGVVVHATAGVSALTAAWLVGPRRGFPDALMPPHNLTLTAAGAGMLWIGWHGFSAGSALITNGAAALSMLNTHLAASAGAMVWMVAEWWRFGRPTLLGLVTGMIAGLVALSPAAGYLGPQGAVIVGGAGGLACFFAIPWIRRRLEIDDAMDVFPVHAAGALLGVLLTPLVAGGAWGGSGFPGDLGVGQRIGVQLVAIAAAGVWSGTVSYFILKGLNRWPGLRVGPDEETEGLDLSSHNGKGYYF

SEQ ID NO: 13725 - protein, 393 aa, Neisseria gonorrhoeae
MIIDVKVPMLSESVSEGTLLEWKKKVGDAVARDEILIDIETDKVVLEVPSPQAGVLVEIVAQDGETVVAGQVLARIDTAATVAAEAPAAAPAEAAPAAVPAAAQNNAAMPAAAKLAAETGVDVNVLQGSGRDGRVLKEDVQNAAAKPAAAVAPAVALPAGARPEERVPMSRLRARVAERLLASQQENAILTTFNEVNMKPIMDLRAKYKEKFEKEHGVKLGFMSFFVKAAVAALKKYPVVNASVDGKDIVYHGYFDIGIAIGSPRGLVVPILRDADQMSIADIEQAIVDYAKKAKDGKIAIEDLTGGTFSITNGGTFGSMMSTPIINPPQSAILGMHATKERAVVENGQVVVRPMMYLALSYDHRIIDGREAVLTLVAIKDALEDPVRLLLDL

SEQ ID NO: 13726 - protein, 459 aa, Neisseria gonorrhoeae
MSQYDVVVIGAGPGGYVAAIRAAQLGFKTACVDAGVNKAGNAPALGGTCLNVGCIPSKALLQSSEHFHAAQHDFAEHGITVGDVKFDVAKMIERKDAIVTKLTGGVKFLFQKNKVTSLFGTASFAGKNGDAYQIEVDNKGEKTVIEAKHVIVATGSVPRPLPQVAIDNVNVLDNEGALNLTEVPAKLGVIGSGVIGLEMGSVWNRVGAEVTILEAAPTFLRAADQQIAKEAFKYFTKEQGLSIELGVKIGDIKSEGKGVSVAYETAAGEAKTEVFDKLIVAIGRIPNTKGLNAEAVGLEKDERGFIKVDGECRTNLPNVWAIGDVVRGPMLAHKASDEGVAVAERIAGQKPHIDFNNVPFVIYTDPEIAWVGKTEEQLKAEGVEYKKGTSGFGANGRALAMGKAKGTVKVLADAKTDRILGVHMIGPVVSELVTEGVTALELTKTGTALPRPGPKGTIP

SEQ ID NO: 13727 - protein, 216 aa, Mycobacterium tuberculosis H37Rv
MTPALVVGPAAWHAVHVTQSSSAITPGQTAELYPGDIKSVLLTAEQIQARIAELGEQIGNDYRELSATTGQDLLLITVLKGAVLFVTDLARAIPVPTQFEFMAVSSYGSSTSSSGVVRILKDLDRDIHGRDVLIVEDVVDSGLTLSWLSRNLTSRNPRSLRVCTLLRKPDAVHANVEIAYVGFDIPNDFVVGYGLDYDERYRDLSYIGTLDPRVYQ

SEQ ID NO: 13728 - protein, 101 aa, Mycoplasma genitalium
LDVGSKTIALFESYLKTAKTIFWNGPLGVFEFTNFAKGTSKIGEIIAKNKTAFSVIGGGDSAAAVKQMQLSDQFSFISTGGGASLALIGGEELVGISDIQK

SEQ ID NO: 13729 - protein, 484 aa, Glycine max
MEESGDARDLQKPFLHTGSWYKMGSRQSSIMGSSTQVIRDGAVSVLFCVLIVALGPIQFGFTCGYSSPTQGAIVRDLNLSISEFSFFGSLSNVGAMVGAIASGQIAEYIGRKGSLMIAAIPNIIGWLAISFAKDSSFLYMGRLLEGFGVGIISYVVPVYIAEIAPQNLRGGLGSVNQLSVTIGIMLAYLLGLFVNWRVLAILGILPCTVLIPGLFFIPESPRWLAKMGMIDEFETSLQVLRGFDTDISVEVHEIKRSVASTGKRAAIRFADLKRKRYWFPLMVGIGLLVLQQLSGINGILFYSTTIFANAGISSSEAATVGLGAVQVIATGISTWLVDKSGRRLLLIISSSVMTVSLLIVSIAFYLEGVVSEDSHLFSILGIVSIVGLVAMVIGFSLGLGPIPWLIMSEILPVNIKGLAGSIATMGNWLISWGITMTANLLLNWSSGGTFTIYTVVAAFTIAFIAMWVPETKGRTLEEIQFSFR

SEQ ID NO: 13730 - protein, 203 aa, Triticum aestivum
  unsure (1)..(203): unsure at all Xaa locations
MAPTVMASSATSVAPFQGLKSTAGLPVSRRSNGASLGSVSNGGRIRCMQVWPIEGIKKFETLSYLPPLSTEALLKQVDYLIRSKWVPCLEFSKVGFIFREHNASPGYYDGRYWXTMWKLPMFGCTDATQVINEVEEXKKEYPDAYVRIIGFXNMRQVXCVSSIASTGLPGSGLNTNHTGIKMHSVNPNCLFLHYLLMSKKWPV

SEQ ID NO: 13731 - protein, 339 aa, Pyrococcus furiosus DSM 3638
MSIIQDIIGRIVVLRGGQYSVEVDVVTDESFGRFAAPIDENPALYIAEARRAVSEVDEIIGPELIGFDAIDQELIDSYLWEIDGTDNFSHIGANTALAVSVAVAKAAANSRNISLYSYIGGTFTTELPVPVVTFGADENFEYHVIVRDLLEVTDIIDAVVRLLDFSLSLEELSKASEQVGLELGLEVSLGITMRKELETEKVLEIVEDYNIAYIKPIGTPELFLELIAGTHGVFIDGEYLYRKYNILDRKYYNALSIKPINLGTLTDLYNFVNDVKAEKITPILSESKYEPADETLPHLALGLRCPAMLIHMNSVEKINELNRIAEELGERGRIITFEE

SEQ ID NO: 13732 - protein, 205 aa, Zea mays
LQAYTHHRFRPLTAYLAVNYLDRFLSLSEVPDCKDWMTQLLAVACVSLAAKMEETAVPQCLDLQVGDARSVFEAKTVQRMELLVLTTLNWRMHAVTPFSYVDYFLNKLNNGGSTAPRSCWLLQSAELILRAARGIYIVGFRPSEIAAAVAAAVAGDVDDADADGVENACCAHVDKARAFGCVSSIGGLFNARCCLTLWSVLCLQV

SEQ ID NO: 13733 - protein, 213 aa, Brassica rapa
MVRGKTQMKRIENATSRQVTFSKRRNGLLKKAFELSVLCDAEVSLIIFSPKAKLYEFASSNMQDTIDRYLRHTKDRVSTKPVSEENLQHLKHEAANMMKKIEQLEASKRKLLGEGIGSCSIEELQQIEQQLEKSVKCIRARKTQVFKVQIEQLKQKEKALAAENKKLTEKWGSHEIEVWSNKNQESGRGDEESSPSSEVETELFIGLPCSSRK

SEQ ID NO: 13734 - protein, 327 aa, Triticum aestivum
QKKKKKKKKRDRARIPAAREFHGMSSQLVKAMPSLIFTKVQEDNCTSSTCAICLEDYSVGEKIRVLPCRHKFHAACVDLWLTSWRTFCPVCKRDANAGMSNFPPSESTPLLSSAIPLPAESTALSSFRSMVAASPPRTISRHPSWQSMSRTNSNSSILHIRNPCRCCSNSPAISTSRSSVDLANMSSPWSNTLNLASGHSLGGGHFSPPISIGYTSPHVSPFGYRFSGQFIGSPHIPRSENGSPSYYPGSSGQQYPYLRHRTESGPSLFTMVPQSPQQTQLQDGGDSATSLSASASTQSLRQAYLQHCPDSDVSLSAATSAQSLPGC

SEQ ID NO: 13735 - protein, 129 aa, Triticum aestivum
  unsure (1)..(129): unsure at all Xaa locations
WVGHPETPFPGGXAWPFHQXAYGPQDGLLVAPNGDVGADAMVMNFASMLAGAATNPFGDGYYQGSSDAPLEAATACPGVFGKGAYPGYAGDLRVDQATGASYNCNGAHGRKYLLPALYDPSKSACGTLV

SEQ ID NO: 13736 - protein, 478 aa, Lactobacillus sakei
MTNQLTTNEGQPWADNQHSQTAGQRGPVLIQDYQLLEKLAHFNRERIPERVVHAKGAGAKGYFKVTKDMSAYTKAAVFSGVGKKTPLITRFSQVAGEAGYPDTYRDVRGFAVKFYTEEGNYDIVGNNTPVFFVNDPLKFPDFIHSQKRDPRTHARSQDMQWDFWSLSPESVHQVTILMSDRGIPASYRMMHGFGSHTFKWVNAQGEQFWVKYHFKTNQGIHNLSNELADELAGKDTDYLQNDLFDAIETGDYPSWTVAVQLVPYEDGLNYPQDIFDVTKVISQKDYPLIEIGQMVLDENPTNNFEDIQELAFSPANLVPGIEASPDKLLQGRLFGYKDAERYRLGANYEQLPVNRPKVPVHNYERDGAMAQNQATGVNYEPNSQDGPTEVPAAKIHGDQLSGTTGNFSADPDYYSAAGKLYRLLSADEQTRLIENIRMNLGQVTKPEIQIREVKQFYQADPEYGRRVATSVKLRFSSV

SEQ ID NO: 13737 - protein, 558 aa, Zea mays
  unsure (1)..(558): unsure at all Xaa locations
MASSWTLPDHPKLPKGKPVAVVVLDGWGEANPDQYNCIHVAQTPVMDSLKNGAPEKWRLVKAHGTAVGLPSDDDMGNSEVGHNALGAGRIFAQGAKLVDQALASGKIYDGDGFNYIKESFENGTLHLIGLLSDGGVHSRLDQLQLLLKGVSERGAXKKIRVHILTDGRDVLDGSSVGFVETLENDLLELRGKGIDAQIASGGGRMYVTMDRYENDWDVVKRGWDAQVLGEAXPYKFKSALEAVKTLRAQPKANDQYLPPFVIVDDSGKAVGPVLDGDAVVTINFRADRMVMLAKALEYADFNNFDRVRVPKIRYAGMLQYDGELKLPSRYLVSPPEIDRTSGEYLVKNGIRTFACSETVKFGHVTFFWNGNRSGYFDETKEEYVEVPSDSGITFNVAPKMKALQIAEKARDALLSGKFDQVRVNLPNGDMVGHTGDIEATVVACKAADEAVKIILDAVEQVGGIYLVTADHGNAEDMVKRNKSGKPLLDKNGGIQILTSHTLQPVPVAIGGPGLHPGVKFRNDIQIPGLANVAATVMNLHGFEAPADYEQTLIEVADN

SEQ ID NO: 13738 - protein, 549 aa, Secale cereale
MAAAATRRAASSLASRCLLSRPAASPAAVPSALRRADGARGLLPGLLQRFGTAAAAEEPISPSVQVSETQLLINGKFVDAASGKTFPTLDPRTGEVIARVSEGDAEDVDRAVIAARKAFDHGPWPKMTAYERSRILLRFADLIEKHNDDIAALETWDNGKPYEQAAQIEVPMLARLMRYYAGWTDKIHGLIVPADGPHHVQVLHEPIGVVGQIIPWNFPLLMYGWKVGPALACGNTIVLKTAEQTPLSALYVSKLLHEAGLPEGVLNIVSGFGPTAGAALASHMDVDKIAFTGSTDTGKVILELSARSNLKPVTLELGGKSPFIVMDDADIDQAVELAHFALFFNQGQCCCAGSRTFVHERVYDEFVEKSKARALKRVVGDPFRKGVEQGPQIDDEQFKKILRYIKSGVDSGATLVTGGDKLGDKGYYIQPTIFSDVQDGMKIAQEEIFGPVQSIFKFNDLNEVIKRANASQYGLAAGVFTNNLDTANTLTRALRAGTIWVNCFDIFDAAIPFGGYKMSGIGREKGIDSLKNYLQVKAVVTALKNPAWL

SEQ ID NO: 13739 - protein, 793 aa, Ustilago maydis 521
MSFTPRYGSSVTRDYTLLQGHPSSYQHFGALESSQPRHPHSTLTTRASDEDDGHSAHRDRDHDRDDNHAIASASASSIHTDDSTHNDLSSISLPPHQIAVSTSPAFGRTNRLATAPVVSPRNRRPSVNAYSQVVGIPSEYLLGGTTAAPLTHHPTGASNITLGASAVSTLAPPQKPTRRSQEDQGADATETTALLGGRPLAQPDTNSSYRAGTAAASYGGVRRSSVDCASIVSGGAGASGFSGWAAANLIREAPLPGVEQIESIAREPHDHIAWREARVLIGYTIPIFATHLLELSLSVASVFSLGHLGTVELAAASLSSMTANVSGFSVLSGFISALDTLLPSAYTQQPKSVGLWTQRMGVILTAILPLILAVWLNAEAILVRIGQDPEVAYLAGRYLSVLAYGLPGYALFEVCRRYLQAQGLMHAPTIVLMFVSPLNAIANYLLVWGPESIRIGFIGAPLASALSMWLMAILCFLQCVVAPRDAWDGFTTAAFKWDGIKPVLLLGFAGMVSLAAEWWAWEIVGLVTSQLGVIALAAQSVLLVSSSVTYQLPFGASVATAVRVGNLLGANRPDEAKISSRVSLILSLAMGGLNSALFLIFRKQWGWLFSSDIEVIKLVEHILPLLAFFQVADGICGIAGGVLRGTGRQAAGAGINMISYYVIGIPVGLVLTFTRINLGLAGLWWGLTIALLFGSAGMIWFISITDWDWEVKKVQLRMAVDDPSDSSHSARAAPSAHGAIKSDIEALTGPRLAQTSSTVDAINSRDPALSPHCLRPSSLAGSAIEEEEGQVSI

SEQ ID NO: 13740 - protein, 388 aa, Synechococcus sp. WH 8103
TTAFHSPTSRRRKTLQEANLLEGPLMLIKSIRGFSSNRAMTWLACAPLALMGLGIFTLSAKAEELPDLNAAFLANNLWLLVATILVIFMNAGFAMVEAGMCRQKNAVNILAKNLFVFALAVTAYWFVGYSFMYGDAAIDGWLYFGGLFFDPTVTAETISDAGLVPTVDFLFQAAFAGTAATIVSGLVAERIKFGEFVVFALILTAFIYPVAGSWEWNGGWLNSVGNAEFIDFAGSSIVHSVGAWAGLVGAALLGPRIGKYVGGKVQAIPGHNMSIATLGALILWIGWYGFNPGSQLAMDQWVPYVAVTTTLGAAGGAIGATVISTITSKKPDLTMIINGILAGLVSVTAGCGNLTLTGSWVAGLVGGIIVVFSVSALDSAGIDDPVGA

SEQ ID NO: 13741 - protein, 388 aa, Mycobacterium avium
MAVHNLKDLLAEGVSGRGVLVRSDLNVPLDSDGEQGRITDPGPDHRVGADVERTGRGGRQGGGRRAPRASQEWAGPGVVAGPGGRRARRAAGPARAAGLGRGGHRRPGPRRGVDRRRRPAAGKHPVRRPRNVQGRRRAARAGRQMAELVGPTGAFVSDGFGVVHRKQASVYDVATLLPHYAGTLVAEEIAVLEQLTGSTKRPYAVVLGGSKVSDKLGVIESLATKADSIVIGGGMCFTFLAAQGFSVGKSLVETEMVDTCRRLLDTYVDVLRLPVDMVAADRLAADAAPQTVPADAIPDDLMGVDIGPGSVKRFTALLSNAETMFWNGPMGVFEFPAFAAGTKGLAEAIAAATGKGAFSVVGGGDSAAATAVELQLLFPLVRLIARLA

SEQ ID NO: 13742 - protein, 551 aa, Sorghum bicolor
MAARRAASSVLSRFLLTRPSPSPSPASAASPAGKSALLGAGGPLHRFSTAPAAAAATAEEPIQPAVEVKHTQLLINGNFVDAASGKTFPTLDPRTGEVIARVAEGDSEDIDRAVAAARRAFDEGPWPRMTAYERCRVLLRFADLIERHAEEIAALETWDNGKTLAQAAGAEVPMVARCIRYYAGWADKIHGLVVPGDGAHHVQVLHEPVGVAGQIIPWNFPLLMFAWKVGPALACGNTVVLKTAEQTPLSALYVANLLHEAGLPEGVLNVVSGFGPTAGAALCSHMGVDKLAFTGSTGTGQIVLELAARSNLKPVTLELGGKSPFVVMDDADVDQAVELAHQAVFFNQGQCCCAGSRTFVHERVYDEFVEKSKARALKRVVGDPFRNGVEQGPQIDGDQFNKILRYVQSGVDSGATLVTGGDRVGSRGFYIQPTVFADAKDDMKIAREEIFGPVQTILKFSGMEEVIRRANATHYGLAAGVFTRSLDAANTLSRALRAGTVWVNCYDVFDATIPFGGYKMSGVGREKGVYALRNYLQTKAVVTPIKDPAWL

SEQ ID NO: 13743 - protein, 544 aa, Vibrio vulnificus YJ016
MLKKCSKITLVLFQGKQGMSPKCRKLLKFDEVITMSAKKPLALVILDGYGYREDTASNAIANAKTPVMDALIANQPNTLISASGMDVGLPDGQMGNSEVGHTNIGAGRVVYQDLTRITKSILDGEFQQTAALVEAIDTAVKAEKAVHIMGLMSPGGVHSHEDHILAAVEMAAERGAEKIYLHCFLDGRDTPPRSAEGSLQRFQDLFAKLGKGRVASLVGRYYAMDRDNNWDRVQVAYDLLTQAKADFTYDSAVAGLAAAYERGENDEFVKATEIKAEGQESAAMQDGDAVIFMNYRADRARQITRTFVADFAGFERAAFPAVNFVMLTQYAADIPLAIAFPPASLENTYGEWLSKQGQTQLRISETEKYAHVTFFFNGGVETEFAGEERQLVASPKVATYDLQPEMSSTELTEKMVAAIKSGKYDTIICNYPNADMVGHTGVYEAAEKAIEALDASVGQVVEAIKEVGGQLLITADHGNAEMMVDPETGGIHTAHTSLPVPLIYVGDKAVEFKEGGKLSDLAPTMLSLAGLEIPAEMTGQVLVK

SEQ ID NO: 13744 - protein, 485 aa, Bradyrhizobium japonicum USDA 110
MLPLIVFAVGIAVYNYKQDRSDATRRVLENVRSMRLVMDSEVQRMTGGLQVLALTNSLRNDDFPNFRRIALGFLDQYGKGGLVLISDRKGRLLFSSATEDTASLPPRGNLEIVEKVFATRAPQYSDLFTGALNGRQVLTVEVPVFRNGEVIYDLCFSPPINIFQDLVEKQRPDRQWTVSLLDAKGTVFARAPNPSETFGKRASPSLYAEMFRSDEAALPTVSLDGVALAAAYTRSGLTGWTVAAGVAESSLIAPLWRNIAITSLIGGILLLTGLTFAVRMATTIARGEMLHDLLIEELNHRVKNTLALMQAIAVQTFRSASREERAKFEGRLGALAEAHNLLSQEKWAGSELKEVITRALQPFLLNAPERIRMDGPAVPLSPRLAVVLSMIVHEIATNAAKYGALSNETGRVTLDWEVIADTPKPRLRLIWSEIGGPPVTAPVRRGFGSRLIERSARDQLGGEATVDFLPRGVVCTVTCALDEAR

SEQ ID NO: 13745 - protein, 227 aa, Triticum aestivum
  unsure (1)..(227): unsure at all Xaa locations
GVQKQVTGAPPPLPVVGPANVGGEASPSEPKECNHRNGRWVPDKRRPLYSGFGCKQWLSESWSCRLTQRTDFDYEQFRWQPEACDMLEFEASQFLMRVQDKTIAYVGDSLGRQMFQSMMCMATAGEERTDVEDVGAEYGLALAPGAKRPDGWAYRFPSTNTTILYHWSSTLCDLEPLNPSDPATXYAMHLDRPPAFXRDNLHRIHVLVLNTGHHWNRGKLRANKWEM

SEQ ID NO: 13746 - protein, 473 aa, Ralstonia metallidurans CH34
MTTESQAQCPFQTAKSPPPAGSPLPHPYGTWPPGPAAGLTGWHLLRRMSRDLLGTLGEWQQTYGDVVHLRMWPEHAVVVTDPQLVRELLVTHHDSLIRWERGTRVFSRVHGHSVLTAEGDAWSRKRQALQPGFMPKAVHGFVPGIVEIVDKGLATWPTRVADWPVESALTSLTMDVIVRMMFSDEIGEDARVAECAVRAISEAANADFYWPASLPDWVPWKRARRRALHTLRDLIERHLQARLRMRTDTWPDDLLSRLLCLHRDDATAWPLQAVRDECMTTFLAGHETTAATLTWWAWCMASNPSAQDAARAEVTHVLRGQAPTADSRQALRQVVQTITESMRLYPVAPVLISRRAVRPITLGPWRLPARTLFMLPLQLMHHDPRLFPEPERFQPDRFSTGSPQAPRGAYMPFGTGPRVCLGQHLATAEMTVIAAMLLQRYKLSVPEGAAHPRPLLNVTLRPDQPLWLAVTPI

SEQ ID NO: 13747 - protein, 473 aa, Azotobacter vinelandii
MTERLNNDFQFIEVGRKDPKKKLLRQRKKEFVEIYDLFKPQQAQEQAHRCLGCGNPYCEWKCPVHNFVPNWLKLVSEGNILAAAELSHQTNTLPEVCGRVCPQDRLCEGACTLNDGFGAVTIGSVEKYITDTAFAMGWRPDMSKVTPTGKRVAVVGAGPAGLGCADILARNGVTPVVFDRNPEIGGLLTFGIPEFKLEKSVMSRRREVFAGMGVEFRLNTEVGKDVTMQQLLDEFDAVFLGMGTYTYMKGGFPGEDLPGVYDALDFLIANVNRNLGFEKSPEDFIDMKGKKVVVLGGGDTAMDCNRTSIRQGAKSVTCAYRRDEENMPGSRREVKNAKDEGVKFLYNRQPIAIVGEDRVEGVKVVETRLGEPDARGRRSPEPIPGSEEILPADAVVIAFGFRPSPAPWFEALQIKTDSQGRVIAPLHDNPFKHQTSNPKVFAGGDMVRGSDLVVTAIYEGRQAAEGILDYLGL

SEQ ID NO: 13748 - protein, 257 aa, Populus tomentosa
CQSIAGRMDWDNNQENHQDSHQNQRECRNGINGTNVNVNVNGNGGNNTLYVKVMTDEQLETLRKQIAVYAAICEQLVEMHKTLSAQQDLAGGRLGNLYCDPLMASGGHKITARQRWTPTPVQLQILERIFDQGNGTPSKQKIKEITSELSQHGQISETNVYNWFQNRRARSKRKQLVASSNNAESEVETEVDSLNEKKKPEIFHAQQNPPRAEDLCFQGPEISSELHFLGDDHLTGKMGVPGNYNLYDQAEDYGMAG

SEQ ID NO: 13749 - protein, 134 aa, Triticum aestivum
QAAILSDATRMVIQLRSEAQQLKETNGSLEEKIKELKAEKDELRDEKQKLKLEKESLEHQMKLMTSTPAYMPHPTLMPAPFPQAPLAPFHAQGQAAGQKLMMPFVSYPGYPMWQFMPPSEVDTSKDSEACPPVA

SEQ ID NO: 13750 - protein, 547 aa, Sorghum bicolor
MARRAASSLVSRCLLARASAPAAPPAVPSALRRPDGMRGLLPGVLQRFSTAAAVEEPITPSVQVNYTKLLINGNFVDAASGKTFPTLDPRTGEVIAHVAEGDAEDINRAVAAARKAFDEGPWPKMTAYERSRILLRFADLIEKHNDELAALETWDNGKPYEQAAHIEVPMVARLMRYYAGWADKIHGLVVPADGPHHVQILHEPIGVAGQIIPWNFPLLMFAWKVGPALACGNTLVLKTAEQTPLSALYISKLLHEAGLPEGVVNVVSGFGPTAGAALASHMDVDKLAFTGSTDTGKVVLELAARSNLKTVTLELGGKSPFIIMDDADIDHAVELAHFALFFNQGQCCCAGSRTFVHERVYDEFVEKAKARALKRVVGDPFRKGVEQGPQIDDEQFNKILRYIRSGVDSGANLVTGGDRLGEKGYYIQPTIFSDVQDGMKIAQEEIFGPVQSILKFKDLNEVIKRANASPYGLAAGVFTNSLDTANTLTRALRAGTVWINCFDIFDAAIPFGGYKMSGIGREKGIDSLKNYLQVKAVVTPIKNAAWL

SEQ ID NO: 13751 - protein, 466 aa, Xylella fastidiosa 9a5c
MIKPRTPPGVLELLPREQIAFQRMLDVIRRNYERFGFLPVETPVFELSDVLLTKSGGETERQVYFVQSTGTLANAAESGATRLPELALRFDLTVPLARYVAEYEHVLAFPFRRYQMQRVYRGERAQRGRFREFYQCDIDVIGKQTLSIRYDAEVLAVIHAVFSELGIGDFQVQLNNRKVLRGFLESQGVRDGDLQLAVLREVDKLDKRGVLDVRDTLIGQGFGIPAAQVENILTFVATRSTSHADALVRLDALIEDSGPEAHEMLRQGVAELREVLTLVNVLGVPEHAYRLNFSIARGLDYYTGTVYETSLINHPQIGSICSGGRYENLANHYTQSKLPGVGISIGLTRLFWQLRDAGVMDGIAESSVQAMVVLMDEATLDDALDIARCLRIGGINTEVQMEAKKVSKQFQYASRAGIRFVVLAGDDERARGVVAVKDLTREQQFEIPREELASTLQVELEQAKVM

SEQ ID NO: 13752 - protein, 322 aa, Bacillus methanolicus
MNKIAVLTSGGDAPGMNAAIRAVVRRGIFKGLDVYGVKNGYKGLMNGNFVSMNLGSVGDIIHRGGTILQTTRCKEFKTAEGQQQALAQLKKEGIDGLIVIGGDGTFEGARKLTAQEFPTIGIPATIDNDIAGTEYTIGFDTAVNTAVEAIDKIRDTAASHDRIYVVEVMGRNAGDIALWAGMCAGAESIIIPEADHDVEDVIDRIKQGYQRGKTHSIIVVAEGAFNGVGAIEIGRAIKEKTGFDTKVTILGHIQRGGSPSAYDRMMSSQMGAKAVDLLVEGKKGLMVGLKNGQLIHTPFEEAAKDKHTVDLSIYHLARSLSL

SEQ ID NO: 13753 - protein, 427 aa, Neurospora crassa
MPSGNKGKNRSGGSLSLKTSNKIVRKQLYVKQKKEQGKERHEERHRRRKEEAKDPKLREERLANNQPLTIERKRVWDDVDDDSLGVAVDVAELKRRRLEKEEAEAARLADGVTEEDEEKDDDADSMLDSDEEGDDDDEDAEERIERLRQERAQRKPSIAPSTTSTNLDMTPDSLTRQFPNLFNEEPPVDPKILVTTHLNGTIHKEAEDIAAIFPNSTYIRRSAHAYGHKYSVREIAKFAKNRGYTILMIVGEDLKKPSSLTVIHLNGEDVAPGPSLTYTIRNYLPGKALLGHGNPTNHYPELLLNGFKTPLGILAAKSMHTMFPPRPELSGRQVVTLHNQRDYIFFRRHRYVFREARTTEKNVVTAEGKEMEGMQGIRAGLQEIGPRFTLKLRRVDKGIGRAGSEGEDALKWEWKAKMEKVRTRFNL

SEQ ID NO: 13754 - protein, 399 aa, Ustilago maydis 521
MEATCADAAASTAPLDPSDQTSPTNATANGNSVTEDEAALYDRQIRLWGLAAQTRLRCAHILILGWNGIATEILKNTVLSGIGSITILDPTCIDGSVDLLSGFFFRDEEVGQPKCSQGPLGRVRALNPLVKVNGIADMASYTKLMQGGKEAQAWIMERGVDVVVAGTPLPEESGVAHVGSRASLVKLNETTRSAGVKFFFSATCGFGGFYFADQITHDYLLEKAAPPPTANSTTSTDTSETQRVKKRQNFVPLSSSLATKWHLSERQQRRTRIPLDWFIWLALTDLETRLAPDSALTTLSSAALKERTEALIREKGLVPNVILANHEDSVFDIVAAQGAMGVTLSPVAAVVGGILSQDILNSIGGREEPVVNWLFLNMDASGATTVHRIGELPSAVVVD

SEQ ID NO: 13755 - protein, 234 aa, Nicotiana tabacum
MASYSLPSPIAKRLEGKVALITGGASGIGAATARLFVQHGAKVTIADIQDNLGTSLVQEIGNEHTIFIHCNVAVESDVQNVVDATIAKFGKLDIMFQYAGIGGKSISSILDVVRIIKTVFDVNIVGAFFCAKHAARVMIPFKKRFHYLHSKLLSRTHILHQKGAVLGFSKNIGVELGKYGIKVNCVSPHYISTPLVLNALGIAEREIAEKWFAAGGNLKGALLDEEEVAKAVLS

SEQ ID NO: 13756 - protein, 77 aa, Glycine max
MGFWTLLEGFLLFANALAILNEDRFLARRGWTLAEMTGPQRNSLKGQVIGLIYACQFLRLPLILFNVITIIVKLFSG

SEQ ID NO: 13757 - protein, 507 aa, Synechocystis sp. PCC 6803
MSNSILSKLNVGERSPVNRTHSSRTEAEKSSLFRFVRRKINSPWLACVPLTALIVAIWNAAAIAQDTEIVNITVETVNENVATLQGTLNAIWILIAAILVIFMNAGFGMLETGLCRQKNAVNILTKNLIVFALATIAYWAIGFSLMFGSSGNPFVGFGGFFLSGDHTNYGLSPFPEGLPVAVFFLFQVAFSATAATIVSGAVAERIKFNEFLIFSVLLVGIAYPITGHWVWDAGGWLYTMGFMDFAGSTVVHSVGGWAALAGAFLLGPRLGKFVDGRPGAIPGHNMGFAMLGCLILWIGWFGFNPGSQLAADQACAYIAVTTNLAASAGGLTATFTSWLKDGKPDLTMVINGVLAGLVGITAGCAGVSYWGSVIIGGIAGILVVYSVAFFDKIKIDDPVGAISVHLVNGVWGTLAVGFFNMEKGLFYGGGINQLIIQIVGILAIGAFTAIFSFVVWAILKQTMGIRVSGEEEMIGLDIGEHGMEAYTGFVKETDSFGSAVSGATVPE

SEQ ID NO: 13758 - protein, 245 aa, Streptomyces coelicolor A3(2)
MGKSLTGKIAVVTGGSTGIGFATARAFRDEGARVFVTGRRKDALDAATAELGPAVTGVVCDVSVPADLDAFYGTVRDQAGRIDVLVANAGIGVAAPFGEVTEELIDSVFAVNVKGTIFTLQQALPLLSSNASVILTGSTASTRPTQGLEVYGASKAAVRNLARGWAHSSRTHGFRVNVVSPGGTRTPGLLELVPPEALQQAEGGIPLGRLAEPEEIAALTTFLASDASSYVNGAEFFADGGYAQV

SEQ ID NO: 13759 - protein, 541 aa, Methanocaldococcus jannaschii
MCSISGIIVKDNQISAKYSIDMMKILKHRGRDNSGLLLDDEVIYFNDFEDVEDLEEEMIGNLSLAHNRLAIVGRYGVQPIPNEDETIWLVCNGEIYNYIELREYLKQNHEFRTDSDNEVIIHLYEEEKLEELDGDYAFAIYDKSKNVVRLARDMFGVKPLFYVDRDKYFAFASERKALWHLLINIDGCERDLDELNSKIKTLKPNSQLIYYLDDNRFEIIEGFKKLELNYMKERSYEEAKEYLDRALKNSVLKRVRGLDKVGIICSGGVDSSLIAKLASLYCEVILYAVGTENSEDLIYAERLAKDLNLKLRKKIISEEEYEEYVFKVAKAIDEVDLMKIGVGIPIYVASEMANEDGLKVVLSGQGADELFGGYARHERIYRERGEEELKKELLKDVYNLYKVNLERDDHCTMANGVELRVPFLDEEVVEIALSIPIEYKMSELSNRPYAESNISLKSEPINGLKNTNLNIKCVRSVRKKILRDVASQYLPDYIAYRPKKAAQYGSGGEKMIYKVAKKYGFSKKRINEFLDMLKRKIVSEF

SEQ ID NO: 13760 - protein, 535 aa, Oryza sativa (japonica cultivar-group)
MAVSLKSSGSFCSTPPQWLHSTRDRILYGYSHSNAKECTCKKTKRPAPLCVKATSTKVELDFNDPSWKQKFQEDWDKRFNLPRITDIYDLKPRPTTFSLKKNRSPAGDENGTPMDKWNGYVNSDDRALLKVIKYSSPNSAGAECIDPDCSWVEQWVHRAGPRKEIYYEPEEVKAAIVTCGGLCPGLNDVIRQIVFTLETYGVKNIVGIPFGYRGFFEKGLKEMPLSRHLVENINLAGGSFLGVSRGGAKTSEIVDSIQARRIDMLFVLGGNGTHAGANAIHEECRKRKLKVSVVAVPKTIDNDILLMDKTFGFDTAVEEAQRAINSAYIEARSAYHGIGLVKLMGRSSGFIAMHASLSSGQVDVCLIPEVPFTLDGEYGVLRHLEHLLKTKGFCVVCVAEAAGQLFYVHYRSLQKSGATDASGNVILSDIGVHMQQKIKMHFKDIGVPADVKYIDPTYMVRACRANASDAILCTVLGQNAVHGAFAGFSGITSCICNTHYVYLPITEVITVPKRVNPNSRMWHRCLTSTGQPDFH

SEQ ID NO: 13761 - protein, 289 aa, Sphingomonas paucimobilis
MTIKPLRKAVFPVAGLGTRFLPATKAMPKEMLPVVDRPLIQYAVDEAVEAGIEQMIFVTGRGKSALEDHFDIAYELEATMAARGKSLDVLDGTRLKPGNIAYVRQQEPMGLGHAVWCARDIVGDEPFAVLLPDDFMFGQPGCLKQMVDAYNKVGGNLICAEEVPDDQTHRYGIITPGTQDGVLTEVKGLVEKPAPGTAPSNLSVIGRYILQPEVMRILENQGKGAGGEIQLTDAMQRMIGDQPFHGVTFQGTRYDCGDKAGFIQANLAVALSRPDLEPAVRAFAVKALG

SEQ ID NO: 13762 - protein, 505 aa, Azotobacter vinelandii
MLVKAGDQVQAEQSLIVLESDKASMEIPSPASGVVESVAIQLNAEVGTGDLILTLRTTGAQAQPTAPAAAAAASPAPAPLAPAAAGPQEVKVPDIGSAGKARVIEVLVKAGDQVQAEQSLIVLESDKASMEIPSPAAGVVESVAVQLNAEVGTGDQILTLRVAGAAPAAAPAPAAAPAKPAAAPAAAAPAPAPVGAPSRNGAKVHAGPAVRQLAREFGVELAAINSTGPRGRILKEDVQAYVKAMMQKAKEAPAAGAASGAGIPPIPPVDFAKYGEIEEVPMTRLMQIGATNLHRSWLNVPHVTQFESADITELEAFRVAQKAVAEKAGVKLTVLPLLLKACAYLLKELPDFNSSLAPSGQALIRKKYVHIGFAVDTPDGLLVPVIRNVDQKSLLQLAAEAAELAEKARSKKLGADAMQGACFTISSLGHIGGTAFTPIVNAPEVAILGVSKASMQPVWDGKAFQPRLMLPLSLSYDHRVINGAAAARFTKRLGDLLADIRAILL

SEQ ID NO: 13763 - protein, 213 aa, Oryza sativa
  unsure (1)..(213): unsure at all Xaa locations
HASEKIHQIIISNTLITTTAILQPPSRRHGVVAAACRLRPPRRRRFHRRGAAAGGRRLRSAHGEGGAGEVRNVTCAGQQADARPVDDAAGVGKACASRTGCGNCERAXEQTPNTPSRSERGTRPSSKACAEKVXRTRLNERFLELGAXLEPGKTPKMDKSFILNDAIRVMAELRIEAXKLKESNXESLHEKIXELKGEKXELGDEKQKLKAEK

SEQ ID NO: 13764 - protein, 468 aa, Shewanella oneidensis MR-1
MSNDFQFIEVGRKDPTKHPAAKRSTQFIEIYQPFAQAQVSEQADRCLDCGNPYCEWKCPLHNYIPNWLKLAQQGRIMEAADLVHETNTLPEICGRVCPQDRLCEGACTLNADFGAVTIGNVEKYITDTAIAQGWRPDMSKVTPRKEKVAIVGAGPAGLGCADILARNGVKAVVFDKYPQIGGLLTYGIPAFKLDKAVMATRRTVLEGMGIEFKLGVTVGKDVAFNQLLEEYDAVFLGMGTYTAMKAGLEGEDAQGVYQALPYLIGNTHHLMGSTSPDMPYLNLAGKRVVVLGGGDTAMDCVRTAVRQGASSVICAYRRDEANMPGSRREVQNAREEGVNFLFNRQPVAIKTQDGKVLGVECVETQMGKADASGRQRAEAIVGSEQLLEADAVIIAFGFQPSPAPWFADYGIELDQWGRVKASKQADNPFQTTNPKVFAGGDMVRGSDLVVTAIAEGRDAAQGILNYLD

SEQ ID NO: 13765 - protein, 861 aa, Klebsiella pneumoniae
MTETRTTCPYCGVGCGVIASRAPHGQVSVRGDEQHPANFGRLCVKGAALGETVGLEDRMLFPEVDGERATWPQAGGGRFAPAGDYRSARGQAVRFTSGQLLTEDYYAANKLMKGFIGAANIDTNSRLCMSSAVTGYKRARWGTVVPCSYEDVENSDLVVLVGSNAAWAHPVLYQRLAQAKRDNPQMRVVVIDPRRTATCDIADRHLALAPGSDGGLFVGLLNAIAASRRISDDFNDAQRALTIAQDWDLDKVAQFCGLPRQQIADFYREFIAAPRAITLYTMGINQSASGSDKCNAIINVHLACGKYGRPGCGPFSLTGQPNAMGGREVGGLATMLAAHMNFEPDDLRRPARFWGSERLAQTGGLTGLELFAAIGRGEVKAVWIMGTNAMVSLPGTSHAVTEPWPVSLVIISDVADTDTGRFAHIRFPALAWGEKSGTVTNSERRISLQRAFMPPPGEARAAGGLSPAGRGLASALPGSIRTRCSANTPRFQGMKTMASGRLISADWRISAATWIALEPVRWPVSRSEAAWSVHKGWHRDGKLRMVPVAPQPTRATTVASIALLNADPQQRADPRSMAHHDPHPAVRLMQHINEPVVEVPPAEPQRYHLLEGELARVRSPKGVMVAKVTIGEANGPGSLFVPMHWNNQFARQGRVNNLLAAVTDPHSGQPESKQTAVAIATWLPAWKGELFSRQPVPLPCRCTGGGGRPRALSIFRWPGDTPSRDWLVEWCQRQGWQMQVAEGGKVWNLLAWRAGELMLGWWSDASEPAISASWIHARFVPPQNAARAHALLSGRKGGVEMPRGRIICSCFSVGERAIGEAIAGGCRSPGGRLGGKLKCGTNCGSCIPELKALLAANVAQA

SEQ ID NO: 13766 - protein, 389 aa, Ustilago maydis 521
MVAQRYTLSALRSTLSAASSAPRQSVATSSRTFASTPYNRSDRPPTGSFSPHQNDASSASTSSTNAFSSSRPAATFGMDGSASDHKQTHFGFKTVAEEEKESMVASVFSSVASKYDVMNDAMSLGIHRLWKDHFVSKLDPRGGIKVLDVAGGTGDIALRILDHARTKHFDRETHVTVLDINPSMLKEGQKRFKQTMYWGGPQVSFQLGNAEQLDSSMSVPAEPVRGPNSKHPYLPPLESKPIPDESIDLYTIAFGIRNCTHIDEVLRQAYRVLKPGGVFSCLEFGKVNIPFLAEAYKQYSFNVLPPLGQMLAGDRASYQYLVESIERFPTQPQFARMMKDAGFHLPGSPTATNLGFPAESGSAAGSEDVAGAWEDLTFGVATIWTGIKL

SEQ ID NO: 13767 - protein, 180 aa, Petunia x hybrida
MASSVISSAAVATRTNVAQASMVAPFNGLKSAVSFPVSSKQNLDITSIASNGGRVQCMQVWPPYGKKKYETLSYLPDLTDEQLLKEIEYLLNKGWVPCLEFETEHGFVYREYHASPRYYDGRYWTMWKLPMFGCTDATQVLGELQEAKKAYPNAWIRIIGFDNVRQVQCISFIAYKPPGF

SEQ ID NO: 13768 - protein, 550 aa, Haemophilus influenzae Rd KW20
MTTLLEVAQHWLNQDPDAETRAELTALLDAAKGGDKAAEAELHARFDGRLQFGTAGLRGRLQAGSMGMNRVLVSQAAGGLAEYLKGYDKEPSIVIGYDGRKNSDVFARDTAEIMAGAGVKAYLLPRKLPTPVLAYAIQYFDTTAGVMVTASHNPPEDNGYKVYLGKANGGGQIVSPADKDIAALIDKVAAGNIQDLPRSDNYVVLNDEVVDAYITKTASLAKEPACDINYVYTAMHGVGYEVLSKTLAKAGLPQPHVVADQVWPDGTFPTVNFPNPEEKGALDLAIKVAKEKNAEFIIANDPDADRLAVAVPDAQGNWKSLHGNVVGCFLGWYLAKQYQGKQGTLACSLVSSPALAEIAKKYSFQSEETLTGFKYIGKVSGLLFGFEEALGYLVDPDKVRDKDGISAAIVFLDLVRNLKKQGKTLADYADEFTKEFGAYVSGQISIRVSDLSEIGKLMTALRNNPPAEIAGVKVAQFIDHIKTDRQSDILVFNLENGGRLIARPSGTEPKIKFYLDARGKDPKDADRVLAEFDEGVRHILRQDAYGKQDC

SEQ ID NO: 13769 - protein, 901 aa, Bradyrhizobium japonicum USDA 110
MTAIDPKLRTTKTTCPYCGVGCGVLATPDGKGGAAIAGDPDHPANFGRLCSKGSALGETVGLEGRLLYPMIRCKGVLERVAWSDALDHVAHRMQHIAARDGADAVAFYLSGQLLTEDYYVANKLMKGFVGTANVDTNSRLCMSSSVAGHRRAFGADTVPGCYEDLDQADLLVFVGSNAAWCHPVLFQRMLKNRQERGARMIVIDPRRTDTASDVDLFLGLKPGTDTALFSGLFVHFADSGALDQAYIASNTSGFDDALVRARNIAGSVTATALATGLSEQDVATFFKMFRDTPRVVTLYSQGVNQSAQGTDKVNAILNCHLATGRIGKPGASPFSLTGQPNAMGGREVGGLANQLAAHMNFTPPDIDRVRRFWKAPRIATHEGLKAVQLFEAINRGEVKALWVMGTNPAVSLPDADFVREALKKLELFVVSENVLSNDTVEAGPHVLLPALAWGEKSGTVTNSERRISRQRSFLPAPGEARPDWWILSETAKRLGFGDSFDYKSAADIFREHAALSAFENDGSRDFDIGALTSLSNEAFDALKPVQWPVREGGAPGERFFASGGFFTNDGKGRFVAPEVPALRSETGASRPLRLNTGRIRDQWHTMTRTGLSQRLGAHLPEPFVEVHPDDAGKFGIAHDGYARITTDYGQCILKVVVSDRQQRGTLFVPIHWSAMNASHGRVGALVQSFTDPFSGQPESKATPAAIAPYEYVFRGFALSRKQLDLPPNLLWTRVTVNGGFGYLFADNADLSRWPAWLEGVAGEDVAEYRDFGGGVYRAASFAGDRIETCLFVGPAHDAGDWEVVKSLFVADQVTDDQRGMLLSGKSGEGAAATGPIVCACFGVGRGTICDTIASGARTTAEIGATLKAGTNCGSCIPELKRLIATTEVAPVKQVKIAGAAG

SEQ ID NO: 13770 - protein, 180 aa, Petunia x hybrida
MASSVMSSAAVATSTNAAQASMVAPFTGLKSAASFPVSRKQNLDITSIASNGGRVQCMQVWPPYGKKKYETLSYLPDLTDEQLLKEIEYLLNKGWVPCLEFETEHGFVYREYHASPRYYDGRYWTMWKLPMFGCTDATQVLGELQEAKKAYPNAWIRIIGFDNVRQVQCISFIAYKPPGY

SEQ ID NO: 13771 - protein, 568 aa, Clarkia arcuata
MASPALISETEAWKDLKAHLEGIKRTHLRELMGDTERCQSMMVEFDNIFLDYSRQQASSDTINKLYKLADAAHLKQKIDRMYNGDHINSTENRSVLHVALRAPRNSAICSDGKNVVPDVWNVLDKIKDFSDRVRNGSWIGATGKKLKDVIAVGIGGSFLGPLFVHTALQTDPEASKNARGRELRFLANVDPIDVARNISGLNPESTLVVVVSKTFTTAETMLNARTLREWISSALGPSAVAKHMVAVSTNLPLVEKFGIDPINAFAFWDWVGGRYSVCSAVGVLPLSLQYGFAVVEKFLQGAHSIDQHFSSASFEKNIPVLLGLLSVWNVSFLGYPARAILPYSQALEKLAPHIQQVSMESNGKGVSIDGLPLPFESGEIDFGEPGTNGQHSFYQLIHQGRVIPCDFIGVVKSQQPVYLKGEVVNNHDELMSNFFAQPDALAYGKTPEQLKKENVSEHLIPHKTFTGNRPSISILLPTLDGYRIGQLLAIYEHRVAVQGFVWGINSFDQWGVELGKSLATQVRKQLHASRVKGEPVEGFNFSTKTLLERYLEATSDVPADPSTLLPNI

SEQ ID NO: 13772 - protein, 310 aa, Zygosaccharomyces rouxii
MVTLQNSTSTLKLNTGQTIPQVGLGTWRSKENEGYKAVIEALKAGYRHIDGAAVYGNEGEVGKAIQDSGVPRNEIFLTTKLWCTQQRNPQEALDQSLQRLGLDYVDLYLIHWPVPLRTENIKDGNLFQFAEKPDGSKDVDLEWNFIKTWELMQKLLESGKTKAIGVSNFSVNNLKDLLAAPTTKVTPAVNQVELHPLLPQEDLIKFGKENGIVIEAYSPLGGENAPILSDPTVQEIAKANGVEAGHVVISWAVQKGLVTLPKSVTPSRIVGNLKVLTLSDSDVAKVDGLLKAKGERRTCYQDFSPFPIFQ

SEQ ID NO: 13773 - protein, 554 aa, Oryza sativa
MATAATLPSSSSSAAAAVQTISRVLSFPRRGGGGFLHLRRHPLAAAAAATRGRGPLLRLGPRRPFSASASAGDNGAAAGGDGGGCDYDYDLFTIGAGSGGMRASRVAASLYGARAAVCEMPFATVASDSLGGVGGTCVLRGCVPKKLLVYASKYSHEFEESHGFGWRYGTEPKHDWSTLMTNKNLELQRLVGVQTNMLKNSGVTIIEGRGKVVDPHTVSVDGKLYTAKNILIAVGGRPSMPDIPGIEHVIDSDAALDLPSRPEKIAIVGGGYIALEFAGIFNGLKSGVHVFIRQKKVLRGFDEEVRDFVADQMSLRGITFHTEETPQAVMKSDDGLLTLTTNKGSINGFSHNLGLEEVGVKMDKHGAIVVDEFSRTSVDSIWAVGDVTNRVNLTPVALMEGGALARTIFGNEPTKPDYSAVPSAVFSQPPIGQVGLTEEKAIEKYGDVDVYTSNFRPLRATLSGLPDRVYMKVIVCANTNKVLGVHVCGEDAPEIIQGIAIAVKAGLMKQNFDATIGVHPTTAEELVTMRSPTRKVRRDAVDEAKMKDEATSQK

SEQ ID NO: 13774 - protein, 569 aa, Clarkia concinna
MASPALISETEAWKDLKSHLEGIKKTHLRELMGDTERCQSMMVEFDNIFLDYSRQQASPDTISKLYKLADEAHLKQKIDRMYNGDHINSTENRSVLHVALRASRNSAISSDGKNVVPDVWNVLDKIKDFSDRARNGSWVGATGKELKDVIAVGIGGSFLGPLFVHTALQTDPEASKNARGRELRFLANVDPIDVARNISGLNPETTLVVVVSKTFTTAETMLNARTLREWISSALGPSAVAKHMVAVSTNLPLVEKFGIDPNNAFAFWDWVGGRYSVCSAVGVLPLSLQYGFAVVEKFLQGAHSIDQHFSSAPFEKNIPVLLGLLSVWNVSFLGYPARAILPYSQALEKLAPHIQQVSMESNGKGVSIDGLPLPFESGEIDFGEPGTNGQHSFYQLIHQGRVIPCDFIGVVKSQQPVYLKGEVVNNHDELMSNFFAQPDALAYGKTPEQLKKENVSEHLIPHKTFTGNRPSLSILLPTLDAYRIGQLLAIYEHRVAVQGFVWGINSFDQWGVELGKSLATQVRKQLHASRVKGEPVEEGFNFSTKTLLTRYLEATSDVPADPSTLLPNI

SEQ ID NO: 13775 - protein, 324 aa, Arabidopsis thaliana
MAVDLMRFPKIDDQTAIQEAASQGLQSMEHLIRVLSNRPEQQHNVDCSEITDFTVSKFKTVISLLNRTGHARFRRGPVHSTSSAASQKLQSQIVKNTQPEAPIVRTTTNHPQIVPPPSSVTLDFSKPSIFGTKAKSAELEFSKENFSVSLNSSFMSSAITGDGSVSNGKIFLASAPLQPVNSSGKPPLAGHPYRKRCLEHEHSESFSGKVSGSAYGKCHCKKSRKNRMKRTVRVPAISAKIADIPPDEYSWRKYGQKPIKGSPHPRGYYKCSTFRGCPARKHVERALDDPMLIVTYEGEHRHNQSAMQENISSSGINDLVFASA

SEQ ID NO: 13776 - protein, 569 aa, Clarkia concinna
MATPSLISETEAWKDLKAHLEGIKRTHLRELMGDTERCQSMMVEFDNIFLDYSRQQASPDTINKLFKLADAAHLKRKIDRMYNGDHINSTENRSVLHVALRAPRNSAICSDGKNVVPDVWSVLDKIKDFSERVRNGSWVGATGKELKDVIAVGIGGSFLGPLFVHTALQTDPEASKNAIGRELRFLANVDPIDAAKNISGLNPETTLVVVVSKTFTTAETMLNARTLREWISSALGASAVAKHMVAVSTNLPLVEKFGIDPNNAFAFWDWVGGRYSVCSAVGVLPLSLQYGFAVVEKFLQGAHSIDQHFSSAPFEKNIPVLLGLLSVWNVSFLGYPARAILPYSQALEKLAPHIQQVSMESNGKGVSVDGLPLPFESGEIDFGEPGTNGQHSFYQLIHQGRVIPCDFIGVVKSQQPVYLKGEVVNNHDELMSNFFAQPDALAYGKTPEQLKKENVSEHLIPHKTFNGNRPSLSILLPTLDAYRIGQLLAVYEHRVAVQGFVWGINSFDQWGVELGKSLATQVRKQLHASRVKGEAVEEGFNFSTKTLLTRYLEASSDVPADPSTLLPKI

SEQ ID NO: 13777 - protein, 350 aa, Synechocystis sp. PCC 6803
MAPSPAPLLSLSLPELTDWVQTTGQPAYRGKQIHQWLYQKGARSLTAMTDLPKVWREKNVHYPIGRSVIDHCAVAPDHTRKYLLRLADGLIIETVGIPSSKRLTVCVSSQVGCAMDCNFCATGKGGFIRNLESHEIVDQVLTVQEEFHERVSNVVFMGMGEPLLNLPQVVKAVECLNQVVGIGQRALTISTVGLPGKIRQLADRHLQVTFAVSLHAPNQTLRQSLIPSARHYPLEQLLADCRAYVETTGRRVTFEYVLLAGVNDQPVHAEELAQKLRGFQTHVNLIPYNPISEVDYQRPTEAQINQFAQVLSDHRIAVSVRYSRGVQADAACGQLRASRKEELAELTPMA

SEQ ID NO: 13778 - protein, 90 aa, Oryza sativa (japonica cultivar-group)
RDAKARYVKFHWKPTCGVSCLMDDEATLVGGKNHSHATQDLYDSIAAGNFPEWKLFVQVIDPEEEERFDFDPLDDTKTWPEDEVPLRPVG

SEQ ID NO: 13779 - protein, 379 aa, Streptococcus agalactiae NEM316
MKNEMLALILAGGQGTRLGKLTQSIAKPAVQFGGRYRIIDFALSNCANSGINNVGVITQYQPLELNTHIGNGSSWGLDGIDSGVTVLQPYSATEGNRWFQGTSHAIYQNIDYIDRINPEYVLILSGDHIYKMDYDDMLQTHKDNLASLTVAVLDVPLKEASRFGIMNTDSNDRIVEFEEKPEHPKSTKASMGIYIFDWKRLRTVLIDGEKNGIDMSDFGKNVIPAYLESGERVYTYNFDGYWKDVGTIESLWEANMEYIGEDNKLHSRDRSWKIYSKNLIAPPNFMTEDANVKDSLVVDGCFVAGNVEHSILSTNVQVKPNAIIKDSFVMSGATIGEGAKINRAIIGEDAVIGDGVVIDGSKEVEVIGYKEVVGVPNED

SEQ ID NO: 13780 - protein, 806 aa, Arabidopsis thaliana
MAECSVCRSRLVSPSSKAISRAYDNYNYKIRVSSKQRALNVFLVVGDCMLVGLQPVLVYMSKVDGKFNFSPISVNFLTEIAKVIFAMVMLLFQARHQKVGEKPLLSLSTFVQAARNNMLLAVPAGLYAINNYLKFTMQFHTAIHFSAVPAIFQSCYCEDAQQSKSSGDCCTTEDDNEASVFHHTGISINQLRSLPEGATTVAVPIATGAYICTFIFSLIQHVIMQVTVPSLASVYNEYALKSQYDTSIYLQLAVLTLWFDTFLLARIVELALFFGLVISLSNVVDHDPLLGSECKALISLVQNLFLYGYGAIFNFLGILGTVIYKGPGSFDILQGHSRATMFLILNNAAQGILSSFFFKYADTILKKYSSTVATIFTGIASAALFGHILTMNFLLGISIVFISMHQFFSPLSKAKDEQQNGNIELVDAKDGHRAKDSFINMAAGATEESTSEKHYTMNMTSCSSSSSSSFPRLFAAKSQIYKAPVLSFSTPKRRRPRPRRNRKSNGSSYDHTDGNLLSISTSSPSGADDQSLSLTLDVHRISTLANYRFQLFLDSSKDAFSDLQTLISLDDNRRVVVSCKKSTMQFVGGVVILGFVFGFAIRVLVKLGSALKGNFQSNPKFVVRRDRSLGGKEVVVSVDNIRSSSRDSKSFIASDQASRSNSTPRNLHLKAQNNLPKWWPTSLTSQSFDVVDKEDYQREANRIVRAPWESSSVEICSEDAREFIAGLAENIGLAKIDAARMVSAAVAARTRSWFLQAWAEMEMVARGLEKLMKLEERQSLLKTFVGMCCSEDSQRSAAEALGLVHW

SEQ ID NO: 13781 - protein, 280 aa, Streptococcus agalactiae NEM316
METYTLSNTLNIPKIGFGTWQLTEGEEAYKAVTHALKVGYTHIDTAQIYGNEHSVGRAIRDSGLARESIFLTTKIWNDKHDYHLAKASIDESLQKLGVDYIDLLLIHWPNPKALRENDAWKAGNAGTWKAMEEAYKEGKVKAIGVSNFMKHHLEALFETAEIKPMVNQIILAPGCAQEDLVRFCKGNDILLEAYSPFGTGAIFENESIKAIAEKYGKSVAQVALRWSLDNGFLPLPKSATPKNIEANLDIFDFQLNEDDITTLIQLDSGIKPKDPDNVSF

SEQ ID NO: 13782 - protein, 91 aa, Oryza sativa
RDAKARYVKFHWKPTCGVSCLMDDEATLVGGKNHSHATQDLYDSIAAGNFPEWKLFVQVIDPEEEERFDFDPLDDTKTWPEDEVPLRPVGR

SEQ ID NO: 13783 - protein, 377 aa, Streptococcus agalactiae NEM316
MKIDKYTAILGNTVSYPDMHSLTDNRPLASLPFDGKYRLIDFQLSSLANAGVRSIYGIFRGNNVRSVFDHIRSGREWGLGTLLSHYSLGFYDTDDDIRTVNGDYYDQILTYLRRSGSDQTIYMSCDMLCNIDLSQVIHLHNANGTQATVVYKKMPRSAIAEANQVLTIDESDHVVSLGKAVDNDDNQKMSAEIYVINTPWLIEKMEEEAQNNEPRKLRFLLRDLIVESNALAFEYTGYLSNISSIKSYYDANMDMLTPNKFYSLFFSNQKVYTKVKNEEATYFDKQSNVSNSQLASGSIIKGYLDHSIVSRNCLLENGTRVVNSIIFPKVKIGEGATIENTIIDKCVKVAPGVTLKGSLDKPLVIPKFSEINEDIIQ

SEQ ID NO: 13784 - protein, 118 aa, Lolium multiflorum
GVGHMGVKVAKSMGHHVTVISSSNKKRAEAMDDLGADAYLISSDEAQMAAAADSLDYIIDTVPVKHPLEPYLALLKMDGKLVLMGVIAEPLSFVSPMVMLGRKTITGSFIGSIEETEE

SEQ ID NO: 13785 - protein, 540 aa, Burkholderia fungorum LB400
MTQNSLPSWSSLQTHYEKIRDAHMRDWFAPENDPAPTRAERFAFAGGGLAADFSKNRITDETLKLLVQLAREAGVEKRRDAMFAGAVVNPTEGRAALHTALRATDPKAPFYDQVQAERARMAAFADQVRSGEWKGYTGKRIRYVVNIGIGGSDLGPKMVVHALHHLATPEITTHFVSNVDGADLYNVMQQIDPEETLAIIVSKTFTTLETMTNARSLRDWFVEKGCPESALAKHFVGVSANPAEVVKFGIAKENVFEMWDWVGGRYSLWSAVGLSIMIAVGPQQFGELLAGANEMDQHFRDAPLEKNLPVLLGMIGIWYRNFFGSQSYLVAPYSEALHFLPSYLQQLEMESNGKSARLDGVMVDYPTAAVTWGEPGTNGQHAFFQMLHQGPTIVPIDFIAVLTPEHPLVSHHPKLLANCFAQSEALMLGRTLEEAKKVAGADKPELAPHLVFPGNRPTSTLLVDALTARSLGALIALYEHKVLVQASVWDINPFDQWGVELGKILGKVVEADLTAPSVDEKKHDSSTSALIARARAALKK

SEQ ID NO: 13786 - protein, 221 aa, Oryza sativa
MEISSSSKKHFILVHGLCHGAWCWYRVVAALRAAGHRATALDMAASGAHPARVDEVGTFEEYSRPLLDAVAAAAAPGERLVLVGHSHGGLSVALAMERFPDKVAAAVFVAAAMPCVGKHMGVPTEEDLALAKMLVRPGNQFMDDPVMKDESLLTNGNYGSVKKVYVIAKADSSSTEEMQRWMVAMSPGTDVEEIAGADHAVMNSKPRELCDILIKIANKYE

SEQ ID NO: 13787 - protein, 533 aa, Mycobacterium tuberculosis CDC1551
MRVGQPNPRNWRNVPRKPRYIWLLATRQLARKRQRSLMSLLITSPATVAAAATHLAGIGSALSTANAAAAAPTTALSVAGADEVSVLIAALFEAYAQEYQALSAQALAFHDQFVQALNMGAVCYAAAETANATPLQALQTVQQNVLTVVNAPTQALLGRPIIGNGANGLPNTGQDGGPGGLLFGNGGNGGSGGVDQAGGNGGAAGLIGNGGSGGVGGPGIAGSAGGAGGAGGLLFGNGGPGGAGGIGTTGDGGPGGAGGNAIGLFGSGGTGGMGGVGGMGGVGNGGNAGNGGTAGLFGHGGAGGAGGIGSADGGLGGGGGNGRFMGNGGVGGAGGYGASGDGGNAGNGGLGGVFGDGGAGGTGGLGDVNGGLAGIGGNAGFVGNGGAGGNGQLGSGAVSSAGGMGGNGGLVFGNGGPGGLGGPGTSAGNGGMGGNAVGLFGQGGAGGAGGSGFGAGIPGGRGGDGGSGGLIGDGGTGGGAGAGDAAASAGGNGGNARLIGNGGDGGPGMFGGPGGAGGSGGTIFGFAGTPGPS

SEQ ID NO: 13788 - protein, 324 aa, Candida tropicalis
MSTTPTIPTIKLNSGYEMPLVGFGCWKVTNATAADQIYNAIKTGYRLFDGAEDYGNEKEVGEGINRAIKEGLVKREELFITSKLWNNFHDPKNVETALNKTLSDLNLDYVDLFLIHFPIAFKFVPIEEKYPPGFYCGDGDNFHYEDVPLLDTWKALEKLVEAGKIKSIGISNFTGALIYDLIRGATIKPAVLQIEHHPYLQQPKLIEYVQKAGIAITGYSSFGPQSFLELESKRALNTPTLFEHETIKLIADKHGKSPAQVLLRWATQRNIAVIPKSNNPERLAQNLSVVDFDLTKDDLDNIAKLDIGLRFNDPWDWDNIPIFV

SEQ ID NO: 13789 - protein, 200 aa, Zea mays
  unsure (1)..(200): unsure at all Xaa locations
MAMAAVTGAVLSGLGSSFLSGGRRSITALGTGVGTGAARVGRKTLIVAAAAAQPKKSWIPAVKGGGNFLDPEWLDGSLPGDFGFDPLGLGKDPAFLKWYREAELIHGRWAMAAVLGIFXVGQAWXSGVPWFEARADPRAIAPFSXFGSLLRTQLLLMGWXERKRGARLFSPPSFYRGGGGRPPGGEGPRGKFSPQTRGGK

SEQ ID NO: 13790 - protein, 322 aa, Vibrio vulnificus YJ016
MSMIKKIGVLTSGGDAPGMNAAIRGVVRTALGAGLEVYGIYDGYLGLYEGRIKQLDRSSVSDVINRGGTFLGSARFPEFKEVAVREKAIENLKAHGIDALVVIGGDGSYMGAKKLTEMGYPCIGLPGTIDNDIAGTDYTIGYLTALNTVIESIDRLRDTSSSHQRISIVEIMGRHCGDLTLMSAIAGGCEYIITPETGLDKEKLIGNIQDGISKGKKHAIIALTELMMDANELAKEIEAGTGRETRATVLGHIQRGGRPTAFDRVLASRMGNYAVHLLMEGHGGRCVGIVKEQLVHHDIIDAIENMKRPVRNDLFKVAEELF

SEQ ID NO: 13791 - protein, 329 aa, Pseudomonas sp. ATCC19151
MICNERMVIYRGAGQRVAALEDFCPHRGAPLSLGSIQDGKLVCGYHGLVMDCDGRTASMPAQRVQAFPCIRAFPAQERHGFIWVWPGDAALADPALIPHLEWAENPAWAYGGGLYHIACDYRLMIDNLMDLTHETYVHASSIGQKEIDEAPVSTRVEGDRLITGRFMEGILAPPFWRAALRGNGLADDVPVDRWQICRFTPPSHVLIEVGVAHAGRGGYDAPADCKASSIVVDFITPETDTSIWYFWGMARSFRPEDNELTARIREGQGTIFAEDLEMLEQQQRNLLAWPERPLLKLNIDAGGVQSRRIIERLVSAERAAEAQLIGRQA

SEQ ID NO: 13792 - protein, 248 aa, Synechocystis sp. PCC 6803
MAVTDLSLTNSSLMPTLNPMIQQLALAIAASWQSLPLKPYQLPEDLGYVEGRLEGEKLVIENRCYQTPQFRKMHLELAKVGKGLDILHCVMFPEPLYGLPLFGCDIVAGPGGVSAAIADLSPTQSDRQLPAAYQKSLAELGQPEFEQQRELPPWGEIFSEYCLFIRPSNVTEEERFVQRVVDFLQIHCHQSIVAEPLSEAQTLEHRQGQIHYCQQQQKNDKTRRVLEKAFGEAWAERYMSQVLFDVIQ

SEQ ID NO: 13793 - protein, 336 aa, Candida parapsilosis
MSIPSSQYGFVFNKQSGLNLRNDLPVHKPKAGQLLLKVDAVGLCHSDLHVIYEGLDCGDNYVMGHEIAGTVAAVGDDVINYKVGDRVACVGPNGCGGCKYCRGAIDNVCKNAFGDWFGLGYDGGYQQYLLVTRPRNLSRIPDNVSADVAAASTDAVLTPYHAIKMAQVSPTSNILLIGAGGLGGNAIQVAKAFGAKVTVLDKKKEARDQAKKLGADAVYETLPESISPGSFSACFDFVSVQATFDVCQKYVEPKGVIMPVGLGAPNLSFNLGDLALREIRILGSFWGTTNDLDDVLKLVSEGKVKPVVRSAKLKELPEYIEKLRNNAYEGRVVFNP

SEQ ID NO: 13794 - protein, 163 aa, Chlamydomonas sp. W80
MASPFYALAATDIAGKEFPFAQLQGKVVLVVNVASQCGFTPQYKGLQELYDKYKDEGLVIIGFPCDQFGHQEPGQESEIASFCQKNFGVTFPMMAKIEVNGDNTHPVYQFLKSEKKQLFMERIKWNFEKFLINKQGEVVERFSSAGDPMRNIAPAVAKLLAEA

SEQ ID NO: 13795 - protein, 120 aa, Glycine max
  unsure (1)..(120): unsure at all Xaa locations
AISMIFTPAATTVNRAGAGMVAPFTGLKSMDGFPTKXTNNDITSIASNGGRVQCVHVWPSVGXKKSETLYYLPYLDDAQLAKEVEYLLTKGWIPCLXLQWEHGYLYRDHNRSPRYYRWTL

SEQ ID NO: 13796 - protein, 324 aa, Candida tropicalis
MSTTPTIPTIKLNSGYEMPLVGFGCWKVNNETAADQIYNAIKTGYRLFDGAEDYGNEKEVGEGINRAIKEGLVKREELFITSKLWNNFHDPKNVETALNKTLSDLNLDYVDLFLIHFPIAFKFVPIEEKYPPGFYCGDGDNFHYEDVPLLDTWKALEKLVEAGKIKSIGISNFTGALIYDLIRGATIKPAVLQIEHHPYLQQPKLIEYVQKAGIAITGYSSFGPQSFLELESKRALNTPTLFEHETIKSIADKHGKSPAQVLLRWATQRNIAVIPKSNNPERLAQNLSVVDFDLTKDDLDNIAKLDIGLRFNDPWDWDNIPIFV

SEQ ID NO: 13797 - protein, 505 aa, Zea mays
MASPAMVPLRQLFVDGEWRPPAQGRRLPVVNPTTEAHIGEIPAGTAEDVDAAVAAARAALKRNRGRDWARAPGAVRAKYLRAIAAKVIERKPELAKLEALDCGKPYDEAAWDMDDVAGCFEYFADQAEALDKRQNSPVSLPMETFKCHLRREPIGVVGLITPWNYPLLMATWKIAPALAAGCTAVLKPSELASVTCLELADICKEVGLPSGVLNIVTGLGPDAGAPLSAHPDVDKVAFTGSFETGKKIMASAAPMVKPVTLELGGKSPIVVFDDVDIDKAVEWTLFGCFWTNGQICSATSRLLIHTKIAKKFNERMVAWAKNIKVSDPLEEGCRLGPVVSEGQYEKIKKFISNAKSQGATILTGGVRPAHLEKGFFIEPTIITDITTSMEIWREEVFGPVLCVKEFSTEDEAIELANDTQYGLAGAVISGDRERCQRLSEEIDAGCIWVNCSQPCFCQAPWGGNKRSGFGRELGEGGIDNYLSVKQVTEYISDEPWGWYQSPSKL

SEQ ID NO: 13798 - protein, 178 aa, Triticum aestivum
  unsure (1)..(178): unsure at all Xaa locations
MAPTVMASSATSVAPFQGLKSTAGLPVSRRSNGASLGSVSNGGRIRCMQVWPIEGIKKFETLSYLPPLSTEALLKQVDYLIRSKWVPCLEFSKVGFIFREXHNASPGYYDGRYWXTCGKLPMFGXTDATKGVQRRWRXAKKGLPDAFVRIIGFQKHXQVQXVRFIASXQPGWKESRKG

SEQ ID NO: 13799 - protein, 248 aa, Oryza sativa
MAAGGGIPATMRAVQYTGYGGGAGALKKGGGLAEYVAAPESLTVVRPAGVSAVDAAGLPVAGLTALKALMSIGTKFDGTGGTGANVLITAASGGVGTYAVQLAKLGNHRVTATCGARNMDLVRSLGADEVLDYNTPQGAALTSSASDEKYDYIINTAMNVNWSAMKPTLSSRGRVVDITPNPGNYVAAMLTMFARKKITMMALMSLGKEEMRFLMELVGEGKLRTVVDSRCPFEKAAQAWEKSMAAMP

SEQ ID NO: 13800 - protein, 488 aa, Zea mays
  unsure (1)..(488): unsure at all Xaa locations
MAPPQTIPRRGLFIGGAWREPCLGRRLPVVNPATEATIGDIPAGTAXRHWSRAPGAVRANFLRAIAAKIKDRKSELALLETLDSGKPLDEASGDMDDVAACFEYYADLAEALDGKQQSPISLPMENFKSYVLKEPIGVVGLITPWNYPLLMATWKVAPALAAGCTTILKPSELASVSCLELGAICMEIGLPPGVLNIITGLGPEAGAPLSSHSHVDKVAFTGSTETGKRIMISAAQMVKPVSLELGGKSPLIVFDDIGDIDKAVEWTMFGIFANAGQVCSATSRLLLHEKIAKKFLDRLVAWAKNIKVSDPLEEGCRLGSVISEGQYEKIKKFISTARSEGATILYGGGRPQHLRRGFFLEPTIITDVSTSMQIWQEEVFGPVICVKEFRTESEAVELANDTHYGLAGAVISNDQERCERISKALHSGIIWINCSQPCFVQAPWGGNKRSGFGRELGEWGLDNYLTVKQVTKYCSDEPWGWYQPPSKL

SEQ ID NO: 13801 - protein, 368 aa, Triticum aestivum
MALASPVDYAGIITSSQRQLSSVMPRCNGLQCTIGYGNKSRATGHLVVRAMSMDRPKLDFSNPNWKNQFQEDFDRRFSLPHLTDIIDVESRPAPFSLKSRTPLENVDGSLEESWNGYVNDDDRALLKVIKFASPTSAGAECIDPDCSWVEQWVHRAGPRKQIYFEPQCVKAGIVTCGGLCPGLNDVIRQIVLTLEKYGVKNIVGIQHGFRGFFEDHLAEVPLNRHVVQNINLAGGGASISDIVDSIQARRLDMLFVLGGNGTHAGADAIHGECRKRKLKVSIIGVPKTIDNDILLMDKTFGFDTAVEAAQRAINSAYIEAHSAFHGIGLVKLMGRSSGFITMHASLSSGQVDICLIPEVPFTLDGPNG

SEQ ID NO: 13802 - protein, 473 aa, Triticum aestivum
MDVPLASKTFPSPSPSKREQCNIDGHKSSSKHADLNPHVDDSVLGIILGGGAGTRLYPLTKKRAKPAVPLGANYRLIDIPVSNCLNSNISKIYVRTQFNSASLNRHLSRAYGSNIGGYKNEGFVEVLAAQQSPDNPDWFQGTADAVRQYLWLFEEHNVMEYLILAGDHLYRMDYEKFIQAHRETDADITVAALPMDEERATAFGLMKIDEEGRIIEFAEKPKGEQLKAMMVDTTILGLDDARAKEMPYIASMGIYVISKHVMLQLLREQFPGANDFGSEVIPGATSTGMRVQAYLYDGYWEDIGTIEAFYNANLGITKKPIPDFSFYDRSAPIYTQPRHLPPSKVLDADVTDSVIGEGCVIKNCKIHHSVVGLRSCISEGAIIEDTLLMGADYYETEADKKLLAEKGGIPIGIGKNSHIKRAIIDKNARIGDNVMIINVDNVQEAARETDGYFIKSGIVTVIKDALLPSGTVI

SEQ ID NO: 13803 - protein, 512 aa, Schizosaccharomyces pombe
MNSKDSNTVPVYTTNTGCPIFNPMAAARVGKGGPVLLQDSHLIDVFQHFDRERIPERVVHAKGSGAFGEFECTDDITKYTKHTMFSKVGKKTPMVARFSTVGGERGTPDTARDPRGFALKFYTDEGIFDMVGNNTPVFFLRDPAKFPLFIHTQKRNPQNDMKDATMFWDYLSQNAESIHQVMILFSDLGGTPYSYRFMDGFSSHTYKFVNDKGEFYYCKWHFITNQGTKGLTNEEAAALDGSNPDHARQDLFEAIERGDYPSWTLYVQVMTPQEAEKYRYNIFDLTKVWPHKDVPMQRVGRFTLNQNPTNFFADIEQAGFSPSHMVPGIEVSADPVLQVRTFSYPDTHRHRLGANFEQIPVNSPKCPVFNYSRDGPMNVNGNQGNWPNYPSSIRPLAKVQYEPDEGHEKWVGQVTYHMDEITDVDFEQPRAFWQNVLGKKPGQQDNFVKNVAGHLSGAISPVRERQYGVFTRVDSELGRRIREATEAEVKKMEEKAPKPINKGEPHMFQGSS

SEQ ID NO: 13804 - protein, 156 aa, Neurospora crassa
MGKITKFGDEGEEVTMKETPTSHQPEAQDDVSMADAGEEGEEGDEEYEEGEGTKVRLLPGSTPTAASFEFLDENHTLGNALRYVIMKNPDVEFCAYAIPHPSEAKMNVRIQTYEGTTAVEALRKGLRDIQDLCDVVSDKFLEARKDFTDKKAAASA

SEQ ID NO: 13805 - protein, 340 aa, Bacillus cereus ATCC 10987
MKAAVWYGERDIRIEERETKELQPNDVKVKVAWAGICGSDLHAYLHPGSVPINMNTVMGHEFSGEIAEVGSHVTKFKKGDRVCIYPMMLKDPSNAEIERFITLDAVGAQIDGGFAEYVILPQKTIFKIPDHLPLELAAMVEPAAVSFQSIKDSNVREGDTVVVYGAGPIGLFAVLGAKAAGASNIIVIDLFDSRLDKATEMGATHVFNAKEVNPVEEIRKLFPGGADVAIEAAGVESTFNQAIQSTKVRGTMMVISFHTQDIQFNVPASLIFSGAKLMGSVGYSNETYNEVIELFANGRLPAQSIITSKIDIDNIAEQGFEALIHDKSQAKILVKLSGAH

SEQ ID NO: 13806 - protein, 140 aa, Triticum aestivum
SSTLAEGYPEADPLFVSPLLENFKEDGVVKSYTEVLLVPLTTPDFSMPYNVITFTCTVLALYFGSLLNALRRRIGEEERGLKKADKRRGLIPLLIAKLRGQKVDPSESESTSPASLLRSKLLLKVVFVAVVAIVFHYLNS

SEQ ID NO: 13807 - protein, 187 aa, Eremothecium gossypii
MTVNVVRRKLVIIGDGACGKTSLLHVFTLGKFPEEYLPTVFENYVTDCRVDGIKVQLALWDTAGQEEYERLRPMSYSKADIILIGFAIDDPGSLSNAREKWTVEALRYCPNAPIILVGLKKDLRRPGTQCAMVAPSQAQEVVRAIGAKKYMECSALTGEGVDDVFELATRTSLLVNKEPGQGCCIIS

SEQ ID NO: 13808 - protein, 243 aa, Helicobacter hepaticus ATCC 51449
MSEKQEQIVNMFNDIAPSYDRANRVMSLGIDVSWRKEACKKAYEALGKDEIQCVLDVACGTGDMLLHWHNEAQKAHKHITQMRGIDPSSGMLDVARKKLTPFFTSDTLMLDIGEAKALCVESQSVDILSIAYGLRNVVELDKALDEFVRVLKSGGVLVILEFMNNKPRGLLDIFMRFYTRKILPVVGGIISRNYGAYKYLPNSIEGFVSSEELANKLLQRGVKSYFIKGYSANISTLYVGVKV

SEQ ID NO: 13809 - protein, 541 aa, Eremothecium gossypii
MAIPTPFSPWGKAARTLSRCLSKRNFSKLVIARRLNSTHHRGKPMRLERELRYAIIGGTLLLTYSYMSSCLSSDTIKGIKQYGAPARSLSTSSDGKANGNPDTISLLTDYEVNTKLRSLEESYYVNRGKGVLRYDVSQLPSNNPIEDSRVEQIITVPNEQTQAQEELYFFGIFDGHGGPYTSSKLSEALVPYVAHQLSKIYAQGNEALTSEAIDDAIEQGFLQLDNDIVQKTLGQFFENPSKESLIEALPAVSGACSLLAMYDSNNCTLKVALTGDSRALLGRVDENGKWTVQSLTIDQTGDNADEVARIRAEHPGEPNCVRNGRVLGSLQPSRAFGDYRYKVKEINGKNVYDLPSHLKIFFRKEPREFLTPPYVTAQPEITTAQIDSSARFMVIASDGLFELLTNEEIAGLVVKWMEKHPVKKGFETLKSSARDKIPPVHDTTVHAESQRPAFRYKDANKGSAGFLMEDNNVATHLIRNALSGGGDKRYVSTLISIPSPKSRSYRDDLTVTVVFFGEEQNQPDNQLILNHEATRPLEPKL

SEQ ID NO: 13810 - protein, 298 aa, SYNECHOCOCCUS SP. WH 8102
MAIAWVFPGQGSQKLGMADPVLSLSGASQRFAMASELLGRDLLAICQGNSVGGSGPDDLNDTRNTQPALFVVESLLVDNLIEQGRDAALVAGHSLGELVALYAAGVFDLETGLKLMQTRSELMAAAGGGAMTAVIGFDRSQLEALVNDTERVSIANDNSDAQVVISGQPDAVQSVSEKLKCKRAIPLAVSGAFHSPFMAEAAEAFATTLDGVSFRDARIPVLSNSDPSGCSDAALLKQRLKQQMTTGVRWRETMASMAEHGIDTLVEIGPGNVLSGLAKRSMNGVTTAQIASSGDLGQ

SEQ ID NO: 13811 - protein, 251 aa, Neurospora crassa
MTEGPAYSKKVVVVGDGGCGKTCLLISYSQGYFPEKYVPTVFENYITYPTHPPTGKTVELALWDTAGQEEYDRLRPLSYPETDLIFVCFAIDCPNSLENVMDKWYPEVLHFCPYTPLILVGLKSDLRNKKTCIDMLKTQGLTPVTTEQGLAVAKKMGAQYMECSSKEMKGVEEIFEQAILTVVANDRKTLEQEAANGMLGVGAGSGSGKGSGISFSSGDKAGSGIGPVKAAGVGGTIVPKTRKKKRKCGMM

SEQ ID NO: 13812 - protein, 567 aa, Zea mays
VLLKVYPRDYKRVLENMKLQKGVANHAKEPKMANGISVTTKKVQLDQSASRPTRVANAKKYRGFITYERESISYRDPKERVKDWKEVAIESTPGPLLNTQSARCMDCGTPFCHQESSGAGCPLGNKIPEFNELVHQNRWREALDRLLETNNFPEFTGRVCPAPCEGSCVLGIIENPVSIKSIECAIIDKGFEEGWMIPRPPLQRTGRKVAIVGSGPAGLAAADQLNKMGHFVTVFERADRIGGLMMYGVPNMKTDKIGIVQRRVNLMAEEGVTFVVNANVGSDPLYSIERLRSENDAVILACGATKPRDLTIPGRELSGVHFAMEFLHANTKSLLDSNLEDGKYISARGKKVVVIGGGDTGTDCIGTSIRHGCTSLVNLELLTKPPSNRAADNPWPQWPRIFRVDYGHQEAATKFGKDPRSGEVLTKRFIGDENGKVKALELVRVKWEKVDGRFQLKEIQGSEEIIEADLVLLAMGFLGPEASIAEKLGLEKDNRSNFKAQFGDFATSVDGVFAAGDCRRGQSLVVWAITEGRQAAAAVDKYISRHDQNVAGDITPFGAGLVQPVGA

SEQ ID NO: 13813 - protein, 223 aa, Triticum aestivum
  unsure (1)..(223): unsure at all Xaa locations
MAAAPPQPAAPAPGPANGGDAFRLGFVGAGNLAESIARGVAASGVLPASAVRTAPHRRPERGAAFASLGATILASNAQVVDGSDVIVISVKPQIVKQVLVELKPLLSEEKLLVSIAAGIKMKDLQDWSGQRRIIRVMPNTPSAVGQAASVMCLGDXQATEKDENRVKSLFSXAIGKAWTAEENILMPVLALVGMGPPFFFLGNKRPWLDGWLLLGFLRESCGP

SEQ ID NO: 13814 - protein, 241 aa, Saccharum officinarum
GIRHEVGTSTFSEYTVMHVGCVAKINPEAPLDKVCVLSCGISTGLGASINVAKPPKGSTVAIFGLGAVGLAAAEGARIAGASRIIGVDLNANRFEEAKKFGCTEFVNPTDHNKPVQEVLAEMTNGGVDRSVECTGNINAMIQAFECVHDGWGVAVLVGVPHKDAEFKTHPMNLLNERTLKGTFFGNYKPRTDLPNVVELYMKKELEVEKFITHSVSFAEINKAFDLMAKGEGIRCIIRMEN

SEQ ID NO: 13815 - protein, 139 aa, Triticum aestivum
  unsure (1)..(139): unsure at all Xaa locations
MSSSSSSAPAAAVATSTRLILVHGTGHGGWCWYKVATLLRAAGHRVDAPDLAACGADARRLSDAPTFEDYTRPLLDALRALPDGERAVLVGHSFGGMSVALAAEEFPDKVAAAXVFLTAFMPDCAGPRTRVIEQVPVSD

SEQ ID NO: 13816 - protein, 300 aa, Triticum aestivum
  unsure (1)..(300): unsure at all Xaa locations
RALGRAHRGPPHWXRFDHAGRAVALRGHSASLVVLGTFLLWFGWYGFNPGSFLTILKSYGPPGSIHGQWSAVGRAAVTTTLAGSTAALTTLFGKRLQTGHWNVLDVCNGLLGGFAAITAGCSVVDPWAAIICGFVSAWVLIGLNKLAARFKFDDPLEAAQLHGGCGAWGVIFTXALFARSEYVEQIYGAPGRPYGLFMGGGGRLLGAHVVLILVIAAWVSCTMGPLFLALNKLGLLRISAEDEMAGMDQTRHGGFAYAYTDEDSSSRPGRGAGGSVGGFMLKSAQTSQVAADATSPSSSV

SEQ ID NO: 13817 - protein, 485 aa, Bacteroides thetaiotaomicron VPI-5482
MDKTYKRHSFTKLWIATAMFIFCCFATSAFAQEAVDADTFMTTTETITEVKTTPEIAETATASAETTPDTIGELALGLNTVWMLLAAMLVFFMQPGFALVEAGFTRVKNTANILMKNFVDFMFGSLLYWFIGFGLMFGAGGLIGMPHFFDLSFLDSDLPREGFLVFQTVFCATAATIVSGAMAERTKFSMYLVYTIFISVLIYPISGHWTWGGGWLMNGEEGSFMMNLFGTTFHDFAGSTIVHSVGGWIALVGAAILGPRIGKYGKDGKSRAIPGHNLTVAALGVFILWFGWFGFNPGSQLAASTEADAMAISHVFLTTNLAACAGGFFALAMSWMKYGKPSLSLTLNGVLAGLVGITAGCDAVAPSGAVLIGAICGVVMIFAVDFIDKVLKIDDPVGASSVHGVCGFLGTVLTGLFSTSEGLFYGHGAGFLGAQLFGAVVVGVWAAGMGFIIFKVLDKIHGLRVPARVEEEGLDIYEHGESAYN

SEQ ID NO: 13818 - protein, 132 aa, Triticum aestivum
MAPGKKRGGKAKGAPAPAAAAAAGGAGAGGEFPGCLRLMPPSTVAISVHAKPGSKMATITEIGEEAVGVQIDAPARDGEANAALVDFISSVLGVKKREVSIGSGSKSREKVVLVQDATLKGVFEALNKACGP

SEQ ID NO: 13819 - protein, 429 aa, Thermoanaerobacter tengcongensis [sequence omitted]

SEQ ID NO: 13820 - protein, 523 aa, Bordetella bronchiseptica RB50
MPENAQPHAVIPAADLQLSAQNPQWRVFAAAAAGASLVARPLRVIEAAGIYVDLSMQRHSSALAQAGLALLQARDVLGARAALFAPGAPDAAHGRYPVLRAGYGAHPEEQCDIEVEIEYARMLEFVRELDRGGACPAVLYLGGGAGQWALRLALQAFGGPAQRRQLRFVSGGDAAALHEALAGLDPRRTLVVAASRGFEPSETLDNARAAIDWLRRAGIDDVSAHLVAVTGNESAARALGVAAARVFRLPSWLQPRHELWSVGALPVALALGVDMLKALRSGAAAMDQHFLQAAPTVNAPMQMALAAVANTSAMHWPTHALAVYSARLAALPACVQQLEMTLAGRAPASLPAYPVVWSPAGAPGPGAFFEWLHRAPAGAPVDFIAGLDEYPASPPAHRALLANCLAQREALLRGLPAGPGQPAAGGGRPSTLVVLRQVDPRAVGALLALYEHKAFVQAALWGAALGGADQAQACQRLAQDIARQLAVPPAAGPVDWGHDSSTAFWIDRYREQGGAGAAAGRTA

SEQ ID NO: 13821 - protein, 462 aa, Streptococcus agalactiae NEM316
MAVEIIMPKLGVDMQEGEILEWKKQVGDVVNEGDVLLEIMSDKTNMEIEAEDSGVLLKITHGNGDVVPVTETIGYIGAEGEEVTEASSSENTSVEENATQVTSEPEKVEETSEPSVPAATSGEKVRATPAARKLAREMSIDLALVSGTGANGRVHREDVESFKGAQPRITPLARRIAEDQGVDIAEITGSGIRGKIVKNDVLAAMSPQAAEAPVETKATPTTEEKQLPEGVEVIKMSAMRKAISKGMTNSYLTAPSFTLNYDIDMTEMMALRKKLIDPIMAKTGLKVSFTDLIGMAVVKTLMKPEHRYLNASLINDAQEIELHNFVNIGIAVGLDDGLIVPVVHNADQMSLSDFVIASKDVIKKTQEGKLKSAEMSGSTFSITNLGMFGTKTFNPIINQPNSAILGVGATIPTPTVVDGEIVARPIMAMCLTIDHRIVDGMNGAKFMVDLKNLMENPFGLLI

SEQ ID NO: 13822 - protein, 336 aa, Synechocystis sp. PCC 6803
MVQQLERSQQKLKITPFAKKLGSPLGKQTISTLQINLGKRCNLACSHCHVEASPKRTEEISPEVCEQLIAIIQKFPQIKVVDLTGGAPEMLYGFKPLVEASRKMRKEVIVRSNLTIYFEMGFGDIPAYCAQHQLRVVASLPCYLEDNVDKMRGNGVYEKSIKALQWLNNLGYGKDANLVLDLVYNPPLLTSDKFSLPPAQEPLEQDYKKFLKEHFDINFNHLLTITNLPIGRSKFHLDKHQLHQKYLTFLESNFNPDTVNNLMCRNELSIDYLGNVYDCDFNQMENIPAEDKSSHKLTVADLLRADNLDLIQQVKTADYCYGCTAGSGSSCGGALI

SEQ ID NO: 13823 - protein, 585 aa, Streptococcus agalactiae NEM316
MAFDVIMPKLGVDMQEGEILEWKKNEGDTVNEGDVLLEIMSDKTNMEIEAEDTGVLLKIVHQAGDVVPVTEVIAYIGEEGEEVGTSSPSADATITAEDGQSVSGPAAPSQETVAAATPKEELAADEYDIVVVGGGPAGYYAAIRGAQLGGKIAIVEKTEFGGTCLNVGCIPTKTYLKNAEILDGLKVAAGRGINLASTNYAIDMDKTVAFKNSVVKTLTGGVRGLLKANKVEIFNGLGQVNPDKSVVIGDKVIKGRNVVLATGSKVSRINIPGIESPLVLTSDDILDLREIPKSLAVMGGGVVGIELGLVWASYGVDVTVIEMADRIIPAMDKEVSLELQKILAKKGMKIKTSVGVSEIVEANNQLTLKLNNGEEVVADKALLSIGRVPQMNGLENLEPELEMERGRIKVNAYQETSIPGIYAPGDVNGTRMLAHAAYRMGEVAAENALGGNKRKAHLDFTPAAVYTHPEVAMVGMTEEQAREQYGDILVGKNSFTGNGRAIASNEAHGFVKVIAEPKYKEILGVHIIGPAAAELINEASTIMENELTVYDVAQSIHGHPTFSEVMYEAFLDVLGEAIHNPPKRK

SEQ ID NO: 13824 - protein, 485 aa, Nocardioides sp. KP7
MTTPRKFDEYRWNVLVDGVPLNVESRYPISDPSTGRYLTQVPDCAEADVDRAVQASRQAQAEWGALPPRARAAKLRELITLLREHREEFAMLDAIDGGFPISMMRNDVDAALELMDIFADMALDLGGKTIPVSTNLHFTTHEPFGVVARIGAFNHPFFFAASKVAAPLMAGNSVILKAPDQTPLSSLRLAEVAAEVLPQNLLITISGRGRVAGRAIVRHPQIKRIGFIGSTDTGRSIQRDAAEVAVKHISLELGGKNAQIVFADADLEQAALGAVNGMNFTWTAGQSCGSTSRLLVHESVADQVIARVVELVSAIAVGPPLDENAQMGPLVSQAQYDKSVHAIGEGIREGAKVVAGGGRPEGVGEGGWYLAPTVLADVRPGSFIEQNEIFGPVLSVIIFATDDEAVAIANGVEYGLTASVWTSDITRAHLIARRVEAGYVLVNGGSRHYWGLPFGGVKSSGVGSEESMEELISYTETKTTTVVLG

SEQ ID NO: 13825 - protein, 489 aa, Arabidopsis thaliana
MSTVESSKPKIINGSCGYVLEDVPHLSDYLPGLPTYPNPLQDNPAYSVVKQYFVDADDSVPQKIVVHKDGPRGIHFRRAGPRQKVYFESDEVHACIVTCGGLCPGLNTVIREIVSSLSYMYGVKRILGIDGGYRGFYAKNTVSLDSKVVNDIHKRGGTILGTSRGGHDTTKIVDSIQDRGINQVYIIGGDGTQRGASVIFEEIRRRGLKVAVIGIPKTIDNDIPVIDKSFGFDTAVEEAQRAINAAHVEAESIENGIGVVKLMGRYSGFIAMYATLASRDVDCCLIPESPFYLEGEGGLFEYIEKRLKESGHMVLVIAEGAGQDLMSKSMESMTLKDASGNKLLKDVGLWLSQSIKDHFNQKKMVMNLKYIDPTYMIRAVPSNASDNVYCTLLAQSAVHGAMAGYTGYISGLVNGRQTYIPFYRITEKQNHVVITDRMWARLLSSTNQPSFLGPKDVFDNKEKPMSALLDDGNCNGVVDVPPVTKEITK

SEQ ID NO: 13826 - protein, 187 aa, Methanothermobacter thermautotrophicus str. Delta H
MKVTFITGNKHKLSEAEKIFHGTGIELMHADLGYPELQGTLEEVARYGAEHAARIMDGPVIVEDAGLFIRALKWFPGPYSAYVQDTIGNRGILKLMENVEDRYAEFRSAVGFCTPNSEPEVFLGVVKGRIGTEERGTMGFAFDPLFYPEGMDKSFGELSTSEKNRFSHRSRALKKFAEWYIENYEVI

SEQ ID NO: 13827 - protein, 450 aa, Ipomoea batatas
LTVEAPILERRRANPKNVAAIILGGGAGTQLFPLTNRAATPAVPLGGCYRLIDIPMSNCINSGVNKIFVLTQFNSASLNRHISRTYFGNGVSFGDGFVEVLAATQTQGETGMKWFQGTADAVRQFTWVFEDAKNKDIDNIVILSGDQLYRMDYMDLVQNHIERNSDITLSCATVGDSRASDFGLVKIDRRGRVVQFCEKPKGTDLKAMQVDTTLLGLPPQDARLNPYIASMGVYVFKTDVLLRLLRWRYPTSNDFGSEILPAAVMEHNVQAYIFRDYWEDIGTIKSFYDANLALTEEFPKFEFYDPKTPFYTSPRFLPPTKIDNCKIKDAIISHGCFLRECSVEHSIIGERSRLDCGVELKDTLMMGADTYETESEIASLLADGKVPIGVGENTKIRNAIIDKNVRIGKDVVIMNKDGVQDSDRPDEGFYIRSGITIIMEKATIPDGTVI

SEQ ID NO: 13828 - protein, 135 aa, Oryza sativa
  unsure (1)..(135): unsure at all Xaa locations
MAPSVMASSATTVAPFQGLKSTAGMPVARRSGNSSFGNVSXNGGRIRCMQVWPIEGIKKFETLSYLPPLTVEDLLKQIEYLLRSKWVPCLEFSKVGFVXVRTTDSPXYYDGRYXWTMLEACPCFGCTXATQVLKE

SEQ ID NO: 13829 - protein, 57 aa, Candida albicans
MAPTFTNSNGQPIPEPFATQRVGQHGPLLLQDFNLIDSLAHFDRERIPERVVHAKGS

SEQ ID NO: 13830 - protein, 475 aa, Corynebacterium efficiens YS-314
MEVPFMAKRIVIIGGGPAGYEAALAGAKYGADVTLIEDFGIGGAAVTLDCVPSKSFIAGTGIKTDLRRADDMGLNRGLGKAHLEIDALNKRVKALANHQSGDIAGQLKRAGVRMIDGYGRFDDYNTKQTTHYVQVTHNGTGETESLECDLVLIATGATPRILKGAEPDGERILTWRQVYDIDELPTHLIVVGSGVTGAEFVSAFAELGVKVTMVASRDRILPHDDADAADVLETVLAERGVSLEKHARVDSVTRTPDGGVCVRTADGREIYGSHALMTVGSIPNTQNLGLENIGVELAPSGHIKVDRVSRTSVAGVYAAGDCTDLFPLASVAAMQGRIAMYHALGEGVSPIRLKTVATAVFTRPEIAAVGVTHAQVDAGEVTARTVVLPLVTNPRAKMRSLRHGFVKLFCRRNSGLIVGGVVVAPTASELILPIAVAVTNRLTVADLAETFAVYPSLSGSITEAARQLVQHDDLG

SEQ ID NO: 13831 - protein, 340 aa, Corynebacterium efficiens YS-314
MTTFRAALVESFDADIAVKDVERPTPGPNQALVKLIASGICHTDLHAAKGDWPVLPEPPFIPGHEGIGEIVELGPGEHDVAVGDIVGNAWLWSACANCEFCRTGRETFCPNAQYGGYTQNGSFGEYMLVDTRFAPRIPDGVDYLEAAPILCAGVTVYKALKVSNIRPGQFMVISGIGGLGHIAVQYAKAMGMRPIAVDIADSKLELAKSLGAEFTVNARDVDPAEAVREFTNGGAHGVLVTAVHEKAFGQALGMARTNGTIVFNGLPPGEFPVSVFDVVFRGLTITGSLVGTRQDMEEALDFYARGLIKPKVAECGLDDVADVFEKLESGGIDGRVAIRY

SEQ ID NO: 13832 - protein, 197 aa, Chromobacterium violaceum ATCC 12472
MFDQLVLASNNAGKLKEFGALFAELGVTVRPQRDFDVPECPEPHHTFLENALEKARHASRLTGLPALADDSGICVEALGGAPGVFSARFAGEPKSDARNNALLVEKLQGEANRRAWYYCVLVLVRHADDPQPLVADGIWLGEVRDEAAGEGGFGYDPHFHLPGYGVSVAELDAAEKNRVSHRGQALAALMAKLKALA

SEQ ID NO: 13833 - protein, 513 aa, Populus balsamifera subsp. trichocarpa
MDSLLQSLQTLPMSFFLIIISSIFFLGLISRLRRRSPYPPGPKGFPLIGSMHLMDQLTDRGLAKLAKQYGGLFHMRMGYLHMVAGSSPEVARQVLQVQDNMFSNRPANIAISYLTYDRADMAFAHYGPFWRQMRKLCVMKLFSRKRAESWESVRDEVDSMVKTVESNIGKPVNVGELIFTLTMNITYRAAFGAKNEGQDEFIKILQEFSKLFGAFNISDFIPWLGWIDPQGLTARLVKARKALDKFIDHIIDDHIQKRKQNNYSEEAETDMVDDMLTFYSEETKVNESDDLQNAIKLTRDNIKAIIMDVMFGGTETVASAIEWAMAELLKSPEDIKRVQQELADVVGLERRVEESDFDKLTFFKCTLKETLRLHPPIPLLLHETSEDAEVAGYYVPKKTRVMINAYAIGRDKNSWEDPDSFKPSRFLEPGVPDFKGNHFEFIPFGSGRRSCPGMQLGLYALDLAVAHLLHCFTWELPDGMKPSELDMTDMFGLTAPRATRLVAVPRKRVVCPL

SEQ ID NO: 13834 - protein, 559 aa, Bacteroides thetaiotaomicron VPI-5482
MCGIAGILNIKTQTKELRDKALKMAQKIRHRGPDWSGIYVGGSAILAHERLSIVDPQSGGQPLYSPDRKQALAVNGEIYNHRDIRARYAGQYDFQTGSDCEVILALYKDKGIHFLEEISGIFAFVLYDEEKDEFLIARDPIGVIPLYIGKDKDGKIYFGSELKALEGFCNEYEPFLPGHYFYSKEGKMKRWYTREWTDYESVKDNDAKVSDVKEALEDAVHRQLMSDVPYGVLLSGGLDSSVISAIAKKYAAKRIETDGASDAWWPQLHSFAIGLKGAPDLIKAREVAEYIGTVHHEINYTVQEGLDAIRDVIYFIETYDVTTVRASTPMYLLARVIKSMGIKMVLSGEGADEVFGGYLYFHKAPTPKDFHEETVRKLSKLHMYDCLRANKSLSAWGVEGRVPFLDKEFLDVAMALNPKAKMCPGKEIEKRIVREAFADMLPESVAWRQKEQFSDGVGYSWIDTLREITAAAVSDEQMEHAAERFPINTPLNKEEYYYRSIFEEHFPSESAARSVPSVPSVACSTAEALAWDVAFRNLNEPSGRAVRGVHEEAYAEEVK

SEQ ID NO: 13835 - protein, 171 aa, Arabidopsis thaliana
MCGGAIISDFIWSKSESEPSQLGSVSSRKKRKPVSVSEERDGKRERKNLYRGIRQRPWGKWAAEIRDPSKGVRVWLGTFKTADEAARAYDVAAIKIRGRKAKLNFPNTQVEEEADTKPGGNQNELISENQVESLSEDLMALEDYMRFYQIPVADDQSATDIGNLWSYQDSN

SEQ ID NO: 13836 - protein, 267 aa, Zea mays
LACLQSLPSGNLSLLCDVLVREVSELTGYDRVMAYKFHEDEHGEVISECRRSDLEPYLGLHYPATDIPQASRFLFMKNKVRMICDFSATPVLIIQDGSLAQPLSLCGSTLRASHGCHAQYMANMGSVASLVMSVTINDDEEEDGDTDSDQQPKGRKLWGLVVCHHTSPRFVPFPLRYACEFLLQVFGIQLSKEVELAAQAKERHILRTQTLLCDMLLRDALVGIFTQSPNVMDLVKCDGAALYYQNQVLVLGSTPSESEIKSIATWL

SEQ ID NO: 13837 - protein, 394 aa, Thermoanaerobacter tengcongensis
MKKKTVRDIDVSGKRVLVRVDFNVPMDENKNITDDRRIREALPTIEYLINHNAKVILVSHLGRPKGKFNPDYSLKPVAKRLSELLKKPVIMAEDVIGEDAKVKAAALKEGEVLLLENVRFHAEEEKNDPEFAKELASLADIYVNDAFGTAHRAHASTAGVAKYLPAVAGFLIEKELSIMGEALENPKRPFVAILGGAKVSDKIGVITNLLEKVDSLLIGGGMAYTFIKAKGYEIGKSLLEEDKIELAKEIMEKAKQKGVNFMLPVDTVIAKELKSGVPYEVVDIDKMPEDQIGVDIGPKTIEEYSKVIKHAMTVVWNGPMGVFEIPEFAKGTKAIAKALSECKGTTIVGGGDSAAAIEQLGYADKVTHISTGGGASLEFLEGKVLPGIDILNDK

SEQ ID NO: 13838 - protein, 426 aa, Mesorhizobium sp. BNC1
MPFTANRQFKQAPRMLVSAKDMHYTTDDGRKLLDGTAGLWCVNAGHCRPKITEAIRHQAGELDYAPAFQMGHPIVFEFASRLVDIAPEGMDHVFFTNSGSESVETALKIALAYHRAKGDGSRTRLIGRERGYHGVNFGGISVGGIVNNRKMFGTLLAGVDHLPHTYLPGKNAFSRGVPEHGVELADELERIVALHDASTIAAVIVEPVAGSAGVILPPKGYLKRLREICDKHGILLIFDEVITGFGRLGTPFAADYFGVVPDIMTTAKGITNGVIPMGAVFVKKEIHDAFMNGPEHMIEFFHGYTYSGNPIACAAGLATLETYREEGLLTRGEELGQHWEDALHSLKGEPHVIDIRNIGLVGAIEMEPIQGQPTKRAFSAFLKGFEKGLLIRTTGDIIALSPPLIITKGQIDEIVDHVREILRSID

SEQ ID NO: 13839 - protein, 392 aa, Stigmaphyllon puberum
DLEPVNPVDVPVTAAGALKSYKLAAKAISRLQSLPSGNISLLCDVLVKEVRDLTGYDRVVVYKFHEDEHGEVVSECRISDLESYLGLHYPATDIPQASRFLFMKNKVRMICDCLAPPVKVIQDERLPQPLSFCGSTLRSPHGCHAQYMTNMGTIASLVMSVTINEDDDTMDGDQQQMTRKLWGLVVCHHNSPQFVPFPLRYACEFLIQVFGVQINKEVELAAQVREKHILQIQTMLCDMLLRDAPVAIITQSPNVMDLVKCDGAALYFKNKIWLLGVTPSKEQIRDIAQWLLEYHSGNTGLSTDSLMEAGYPGASALGDAVCGMAAVSITSRDFLFWFRSHTAKAVKWGGAKHDPDDKDDLRKMHPRSSFKAFLEVVKWRSMPWEDVEMDAI

SEQ ID NO: 13840 - protein, 302 aa, Achromobacter denitrificans
MSLALIFSGQGMQHAGMLPWLARDDSVCAVADALGSDWRARLADPHWAGRNAHAQPLLVGLACAAWSQLAAHLPTPAVVAGYSVGELAAFAAAGVYGPATAIDLALRRAALMDREAGDAEAGLLAISGLAGPALEQLCGAAGLAIAIRNGLDSAVVGGPRVALAAATDTALRLGARCTPLINVNVASHTPWMAEAANGFARAISTLSFAAPRMTLLSNFSGGRVDQAQAHEALAAQIDHTVRWDECMEAIAARRVSCVLEIGPGQALARIWNERFAHVPARSADEFRSVAGIAAWVTRTIAP

SEQ ID NO: 13841 - protein, 392 aa, Mascagnia dipholiphylla
DLEPVNPADVPVTAAGALKSYKLAAKAISRLQSLPSGNISLLCDVLVKEVRDLTGYDRVMVYKFHEDEHGEVVSECRRSDWESYLGLHYPATDIPQASRFLFMKNKVRMICDCLAPPVKVIQDERLPQPLSLCGSTLRSPHGCHAQYMTNMGTIASLVMSVTINEDDDMMDGDQQQMTRKLWGLVVCHHAGPRFVPFPLRYACEFLIQVFGVQIHKEVELAAQVREKHILQIQTMLCDMLLRDAPVVIITQSPNVMGLVKCDGAALYFKNKIWLLGVTPAEEQIRDIAEWLLKYHSGNTGLSTDSLMEAGYPGASVLGDAVCGMAAVSITSRDFLFRFRSHTAKEIKWGGAKHDPDDKDDGRKMHPRSSFKAFLEVVKWRSTPWEDIEMDAI

SEQ ID NO: 13842 - protein, 402 aa, Bradyrhizobium japonicum USDA 110
MPIREVDMARKRIGILTGGGDVAGLNAVIKSVTYRGSEDDIEVVGLRRGWEALTHLNLDDPNSRSHYVIPLNRENTRTIDRRGGTVLHSSRVNPSKIQKLPGHLVGNEVPVSLSTNGGIATKTWDLTSRVLANLSGLGIEHLIAIGGDDTLSYAAKLNELGVKIIAIPKTMDNDVRNTEYCIGFSTAITRASDAIQRQRTTVGSHERIGIFRVFGRDAGFTALYTAYATSIRCLIPEHKVDLDKLIQLLIEDKRANPSNYALIVLSEGAQWEGYKLREYGEPDAYGHRKKANVAESLADEIKQRTGEETITSDLTYDLRSGDPDFIDKLVALTFGNMAYDAMLESKTGLMSALVEGRYDLVPIPDAKLGPRKLDVASSYNTERYRPIYANKQGLPIFLNRAS

SEQ ID NO: 13843 - protein, 421 aa, Bordetella bronchiseptica RB50
MKNRDLNTRRTLATPRGVGVMCDFYAVRAENSTLWDAEGKEYIDFAGGIAVLNTGHRHPKVKAAIAAQLDNFTHTAYQIVPYEGYVSLAERINAVAPIEGLKKTAFFTTGVEAVENAVKIARAYTGRSGVVAFSGAFHGRTMMGMALTGKVAPYKLAFGPMPGDVFHVPFPNATQAISVADSLKALDLLFKVDIDPKRVAAIIIEPVQGEGGFNVTPPELMQALRKVCDEHGILLIADEVQTGFARTGKLFAMQHHSVQADLITMAKSLGGGMPISGVVGRAEVMDGPAAGGLGGTYAGNPLAVAAAHAVLDVIAEEKLCERAAELGKRLMDRLEGLRAKCPAIADVRGLGSMVALELNDPATGKPDAEAVKRIQQQAIERGLILLSCGVYGNVLRFLYPLTIPDDQFARALDILAETIAA

SEQ ID NO: 13844 - protein, 825 aa, Hordeum vulgare subsp. vulgare
MAFSPRSPWSRSKKPDIYSTVVVHDDEDDAHGGGAARAEDDDDDDPSALPPLLQRLPKDFGGASFDDDDDPYSSDLDDASLSATVVIKRGAPASTSSSSRSPFLDLRRSSPRAAEADPYSTFVVHGTARSGGASSPRESVSGTFIRHSGGPPSPRESVSGTFIRHTRGSSSPRESYSGTFIHHTSGASSPRDPASGAGAGFGSSFMTPSTGQAEEDRQPSLLMQQQQSRRQASMSSVPDSVTREDPSTKYELLHELGKGSYGAVYKARDLRTQELVAVKIISLTEGEEGYEDIRGEIEMLQQCSHPNVVRYFGSYQGEEYLWIVMEYCGGGSVADLIGITEEPLDEPQIAYICRETLKGLAYLHTIFKVHRDIKGGNILLTEQGEVKLGDFGVAAQLTRTMSKRNTFIGTPHWMAPEVIQESRYDGKVDVWALGVSAIEMAEGMPPRSTVHPMRVIFMISSEPAPMLEDKEKWSLLFHDFIAKCLTKDARLRPAAIEMLKHKFIEKCNTGASKMLAKIKEAKIIRETAVQNQLPDSDDAMDATVRINEDYGETVPTNSQSTHETKNDGSGGDFGTMIVHPEDGDEAVESSIFPRAEFIPGLGSINSFTHDPKRAELISKFWAENTADSDATKGRDLDGLPDTQEPKAMPRSIGTFKHHKGVEGTVLRHDNTASPGVASTMTKLSSSPSRKAFSVQDKLWSIYAAGNTVPIPFLKAIDISPLALVSDSVAGNGPAGSSTTDALEAVRELFSGDGQAKKGRKGQNEVPLPPGVHDRLTTSPTLMNLAQALAYHKTCYEDMPLQDSQATEEQQTIQNLCDTLRTILRL

SEQ ID NO: 13845 - protein, 263 aa, Candida albicans
MPKNTLYVTGFSRESKAADLAPDFEKYGELVRLDIPPPRSDDGEKYAFVEYKDAESCERALELDGKTLPYSIKDGLVVQVARSDPYRVRQQFSGPRGGYRDGGYGGRGGYRDGGYGGRGGYRDGGYGGRGGYGGGRGGGYGGYRDGGRGGYRDGGRGGYGGYRDGGRGGGYGGYRDGGRGGGYRDGGYRDGGYRDGGRGGYGGGRGGYDRDREEGRGGYDREEDRGGYERDEGREPRVEERRYSRSPSRSPPRRDRSRSPERY

SEQ ID NO: 13846 - protein, 404 aa, Bradyrhizobium japonicum USDA 110
MSSSVIDYLATETRLGAHNYEPIGVVLSRGEGVWVWDTDGNRYLDCLSAYSAVSQGHCHPKILAAMVEQAHRLTLTSRAFHNDQLAPFYEEIAALTGSHKVLPMNSGAEAVESAIKSVRKWGYEVKGVPDDQAEIIVCADNFHGRTLGIVGFSTDPETRGHFGPFAPGFRIIPFGDAAALEQAITPNTVAFLVEPIQGEAGVIIPPAGYFTKVRELCTANNVMLVLDEIQTGLGRTGKLLAEQHEGIEADVTLLGKALAGGFYPVSAVLSNNEVLGTLRPGQHGSTFGGNPLACAVARAAMRVLVEEGMIENAARQGARLLEGLKDIRANTVREVRGRGLMLAVELHPEAGRARRYCEALQGKGILAKDTHGHTIRIAPPLVITSDEVDWALEQFATTLTQDFS

SEQ ID NO: 13847 - protein, 324 aa, Haemophilus ducreyi 35000HP
MKVTVLGAAGGIGQTLSLLLKLRLPAGADLALYDISPVTPGIAVDISHIPTSVNAIGYAGEDPSVALKDPSVALKDTNLVIITAGIARKPGMTRADLFNINAGIVKDLVEKVAEVCPMACIGIVTNPVNTLVPIAAEVLRKAGVYDKSKLFGVTTLDVVRAKTFVSELKHKNVETVTVPVVGGHSGTTILPLLSQALAEGRLLDFSQTEIESLTQRIKNAGTEVVEAKAGGGSATLSMAESGARFALAVFKALLGEDCVRYAYVQSKEGSGYPEFFAHPVRFGLKGIEEILPIAPLNEYEQTQFEELKPILEADIELGKKFVNP

SEQ ID NO: 13848 - protein, 397 aa, SYNECHOCOCCUS SP. WH 8102
MSETPMKAMILAAGKGTRVQPITHVIPKPMIPILQKPVMEFLLELLKEHGFNEVMVNVSHLAEEIENYFRDGQRFGVEIAYSFEGRIEDGELIGSALGSAGGLKKIQDFQNFFDDTFVVLCGDALIDLDLTEAVRRHREKGALASLVTKRVPKEQVSSYGVVVTDAEDRISHFQEKPKVEEALSDTINTGIYIFEPGIFDHIPSGVSFDIGSDLFPKLAELGAPFYAIPMDFEWVDIGKVPDYWQAIRSVLLGDVRQVGIPGKEIQPGVYTGLNVAANWDKINVSGPVYVGGMTKIEDGATIVGPAMIGPSCHICEGAVIDNSIIFDYSRIGAGVQLVEKLVFGRYCVGKDGDHFDLQEAALDWLITDARRQDLVEPSPQQKAMAELLGTELTQAAS

SEQ ID NO: 13849 - protein, 503 aa, Triticum aestivum
MVATAKIPQRQLFIDGDWRAPALGRRLPVINPTTEASIGEIPAGTSEDVDAAVAAARAALRRNRGRDWARAPGAVRAKYLRAIAAKMIERKSDLARLEALDCGKPLDEAAWDMDDVAGCFEFFAGHAEALDKRQNAAVALPENFKCHLKKEPIGVVALITPWNYPLLMAVWKVAPALAAGCTAVLKPSELASVTCLELGDVCKEIGLPSGVLNIVTGLGHEAGAPLSSHPDVDKVAFTGSYATGQKIMVAAAPTVKPVTLELGGKSPIVVFDDVDIDKAVEWTLFGCFWTNGQICSATSRLLIHKNIAKEFVDRMVAWSKNIKVSDPLEEGCRLGPVVSEGQYEKIKKFVANAKSEGATILTGGVRPKHLEKGFFIEPTIITDINTSMEIWREEVFGPVLCVKEFSTEEEAIELANDTHYGLAGAVISGDRDRCQRLAEEIDAGCIWVNCSQPCFCQAPWGGNKRSGFGRELGEGGIDNYLSIKQVTEYTSDAPWGWYKAPAN

SEQ ID NO: 13850 - protein, 453 aa, Eremothecium gossypii
MRGGSQESRLVCVGEHGDQHGASVPALYQSTTFKQRTLDGQAYDYTRSGNPTRTVAEGQVGRLYGVGPEQVMAVASGMTALDVVLRAVLRRGGRGTVIAGDDLYGGTQRLLGLLAETGQARVVHVDTADTAAFCAAVAAAGEVACVLLESPTNPLMKVADVPALVAHVKAHAPGCRVVVDNTMMSGLNCNPLRLGADYVYESATKYLNGHHDIMAGVIVAATRALAEEAYFVVNSVGAGLAPMDAWLLIRGLKTLSLRLYKQQHNAMVLAHWLREVCGFRAVGGNHALQTRFVGLRSHPQHKLHRSFNRGPGAVLSIQTGDTALSERIVCSKKLQFWGVTVSFGCVNSLISMPCRMSHASIDPELRKARQFPEDLIRLSCGVEDVEDLQQDLLAALEDAGAVVVRDGGRTIVNRLNGHIGTHVSSSEQRCIYRDFFGDSSNPSLEVGSLVAKL

SEQ ID NO: 13851 - protein, 133 aa, Zea mays
MASPRGRMSFPLRSFLMICLMAQLGASNVVLMANNTTLSFDDVEAIFTPAVKGSGVNGVLYAVEPMDACSPLKTKAIGGSVSPFALVIRGGCHFDDKVRNAQNAGFKAAVVYDTEDNGVLGFMAGSSSGVTYM

SEQ ID NO: 13852 - protein, 481 aa, Papaver somniferum
SLVAVVITTFLYLIFRDSSPKGLPPGPKPWPIVGNLLQLGEKPHSQFAQLAETYGDLFSLKLGSETVVVASTPLAASEILKTHDRVLSGRYVFQSFRVKEHVENSIVWSECNETWKKLRKVCRTDLFTQKMIESQAEVRESKAMEMVEYLKKNVGNEVKIAEVVFGTLVNIFGNLIFSQNIFKLGDESSGSVEMKEHLWRMLELGNSTNPADYFPFLGKFDLFGQSKDVADCLQGIYSVWGAMLKESKIAKQHNNSKKNDFVEILLDSGLDDQQINALLMEIFGAGTETSASTIEWALSELTKNPQVTANMRLELLSVVGKRPVKESDIPNMPYLQAFVKETLRLHPATPLLLPRRALETCKVLNYTIPKECQIMVNAWGIGRDPKRWTDPLKFSPERFLNSSIDFKGNDFELIPFGAGRRICPGVPLATQFISLIVSSLVQNFDWGLPKGMDPSQLIMEEKFGLTLQKEPPLYIVPKTRD

SEQ ID NO: 13853 - protein, 349 aa, Brassica napus
NNLSSYRNASSLGFSVKNLTRSRVSISVSAASHTAVNDSLFADYKPTSAFLFPGQGAQAVGMGKEALSVAAAGELYNKANHILGYDLVDVCVNGPKEKLDSTVISQPAIYVTSLAAVELLRVREGGEKIINSVDVTCGLSLGEYTALAFAGAFSFEDGLKLVKLRGEAMQAAADAAKSAMVSIIGLDSEKVQQLCDAANQEVDEADKVQIANYLCPGNYAVSGGLKGIEVVEAKAKSFKARMTVRLAVAGAFHTSFMEPAVSRLEAALAETEIRSPRIPVISNVDAQPHADPDTIKKILARQVTSPVQWETTVKTLLSKGLKSSYELGPGKVIAGIFKRVDKSASVENI

SEQ ID NO: 13854 - protein, 519 aa, Lactobacillus plantarum WCFS1
MKIKAQIGMVLNLDKCIGCHTCSVTCKNTWTNRPGAEYMWFNNVETKPGVGYPKRWEDEDHYKGGWELNSKGKLQLRAGNKVNKIALGKIFYQPDMPELDDYYEPWTYDYQTLFGPEKAHQPVARATSQITGLKMDLKTGPNWDDDLAGSPEYFKADPNMEKIETDIKANFEQAFMMYLPRLCEHCLNAPCVASCPSGAMYKRDEDGIVLVDQERCRGWRFCMTGCPYKKVYFNWKTHKAEKCTFCYPRIEEGEPTVCAETCVGRIRYIGAMLYDADRVEEAAETPEEDQLYQAQLDLFLDPNDPDIIEQALADGISEEMLEAAQNSPIYRMAVEEKIAFPLHPEYRTMPMVWYIPPLSPVMNYFEGRDSIKDPEMIFPGIDEMRIPVDYLASLLTGGNVPAIKGALYKLAMMRLYMRAKTGGKDFDAAKLQRVGLTENTATSLYRLLAIAKYEDRFVIPQNHKEQVEDAQSEQGGLGYDECAGCALAPQHGSMFKKAEAGESTNQIYAESFYGGIWRD

SEQ ID NO: 13855 - protein, 190 aa, Zea mays
ANLVAVRTALVALIAFMPTNPGGALGSLDYKPEDRRALAIKSREVPPKFGSPQRQKLIDEIHEQMLSKAPPIPQTLPNVPNEELAPDSCDEHADKVDEGGNTSKSMSGSSSGHPVPEAESLAAENTGEASAVEVANHQVPEASRRESIPRVPSSLQNAAIATQKPKHDRLLTLAAFGLTLAIMALVIKKS

SEQ ID NO: 13856 - protein, 410 aa, Pyrococcus furiosus DSM 3638
MFRLRDFEYYNRTVFLRVDLNSPMSNGKIISDARFRAVLPTIKYLIESGAKVVVGTHQGKPYSEEYSTTEEHARILSELLNMHVEYVEDIFGKYARERIKAMKPGEVIVLENLRFSAEEVKNATIEECEKTFFVRKLSQVIDLVVNDAFAAAHRSQPSLVGFARIKPMIMGFLMEKEVDALTKAYESEEKPRVYVLGGAKVDDSLKVAENVLRKEKADLILTGGLVGQLFTLAKGFDLGRENIKFLEKKGILKYVDWAEKILDEFYPYVRTPVDFAIDFKGERVEIDLLSDEKRLFDEYPILDIGSRTVEKYREILLKARIIVANGPMGVFEREEFAVGTIGVFKAIGESPAFSVIGGGHSIASIYKYNITGISHISTGGGAMLTFFAGEKLPVLEALKISYEKFSNLLS

SEQ ID NO: 13857 - protein, 261 aa, Pyrococcus furiosus DSM 3638
MKVAVIGAGTIGSAVAKALAESNYEVIATRRSIEKVKWLEKYGVKLEKDNKKASREADIVIIAVKPNKVGKVLEEIKEEVESKIVISLAAGIPIKLLKRFANAKFVRAMPNIAVLVKESFTAYATEDLSEEEIRTVEKIFESFGKYIRIDEEYMDAITGLSGSGPAYVSVFLEAMIYGGLRVGLPRDIAKLAAAQTLLGTAKLLLNFEGHPAEIRDMVITPGGTTIDGIFELEEGKIRTTIMKAIDAATKKSKILSTRLSP

SEQ ID NO: 13858 - protein, 380 aa, Oryza sativa
  unsure (1)..(380): unsure at all Xaa locations
KLSSSSHGGDDRVRQGAPDLRQQGQPHRRGRCVLLRWNLCKQKLGANAILAVSLAICKAGAIIKKIPLYQHIANLAGNKQLVLPVPAFNVINGGSHAGNKLAMQEFMILPTGAASFKEAMKMXVEVYHNLKSVIKKKYGQDATNVGDEGGFAPNIQENKEGLELLKTAIEKXAGYTGKVVIGMDVAASEFYNDKDKTYDLNFKEENNDGSQKISGDSLKNVYKSFVSEYPIVSIEDPFDQDDWEHYAKMTAEIGEQVQIVGXNDLLVTNPTRVAKAIQEKSCNALLLKVNQIGSVTESIEAVKMSKRAGWGVMTSHRSGETEDTFIADLAVGLATGQIKTGAPCRSERLAKYNQLLRIEEELGAAAVYAGAKFRAPVEPY

SEQ ID NO: 13859 - protein, 392 aa, Aspidopterys elliptica
DLEPVNPADVPVTAAGALKSYKLAAKAISRLQSLPSGNISLLCDVLVKEVRDLTGYDRVMVYKFHEDEHGEVVSECLRSDLESYLGLHYPATDIPQASRFLFMKNKVRMICDCVAPPVKVIQDERLPQPLSLCGSTLRSPHGCHAQYMTNMGIIASLVMSVTVNEDDDMVDGDQPQMARKLWGLVVCHHTSTRFVPFPLRYACEFLIQVFGVQINKEVELAAQVREKHILQIQTMLCDMLLRDAPVAIITQSPNVMDLVKCDGAALYFKNKTWLLGVTPTEEQIRDIAEWLLEYHSGNTGLSTDSLMEAGYPGASALGDAVCGMAAVSITSRDFLLWFRSHTAKEIKWGGAKHDPDDKDDGRKMHPRSSFKAFLEVVKWRSMPWEDIEMDAI

SEQ ID NO: 13860 - protein, 317 aa, Lycopersicon esculentum
MGKVGEELTEQETAIYDRQIRVWGVDAQRRLSKSHIFVSGLKGTVIEFCKNIVLAGVGSLTLNDDRLVTEELLSANFLVPSDENVTSGKSLAELCCESLKDFNPMVTVSVEKGVLANFHVEFFQKFDAVVISCCSLLTKKSVNAKCRKLPRRVAFYSVECRDSCGEIFVDLQSYSKKKNEETIECQLQYPSFEEAIAVPWRSLPKRMSKLYFAMRVLERFEVLEKQNPQDTSGDDLPNVLKLRKELCEAQCINESQIPVPLLQRLLAARVEFPSVCAIIGGVLGQVIKAISGKGDPLKNFFLFDAMDGKGIIEDISG

SEQ ID NO: 13861 - protein, 457 aa, Erwinia amylovora
MQKYLSEARQLLALAIPVILAQVAQTSMSFVDTVMAGAVSATDMAAVAVGTSIWLPAILFGHGLLLALTPVVAQLNGSGRRDLIAHQVRQAYWLAGMVSVLVMIVLYNAGYLIGSLHNVDPLLSQKAIGYLHALLWGAPGYLFFQVARDRCEGLSKTKPAMVVGFLGLLVNIPLNYVFIHGHLGMPALGGVGCGVATASVYWVMFIVIRAWTNRAKSMRDIQLPQRFSAPDWKAIGRLTGLGLPVALALFFEVTLFAVVALLVSPLGIVNVAGHQIALNFSSLMFVVPLSLGVATTIRVGHRLGQGSAEQAKVAAWTAQGIGICMACITALFTIAFRERIAQLYADDPEVITMAAQLMLLAAVYQLSDSVQVIGSGVLRGYKDTRAIFFITFIAYWILGLPIGYLLGMTNLLLPAMGPAGFWIGFIIGLTSSAIMMIWRMRRLQRQPNATVLARAAR

SEQ ID NO: 13862 - protein, 392 aa, Caucanthus auriculatus
DLEPVNPADVPVTAAGALKSYKLAAKAISRLQSLPSGNISLLCDVLVKEVRDLTGYDRVMVYKFHEDEHGEVVSECHRSDLESYLGLHYPATDIPQASRFLFMKNKVRMICDCVAPPVKVIQEERLPQPLSLCGSTLRSPHGCHAQYMTNMRIIASLVMSVTVNEEDDMVDGDQPQMARKLWGLVVCHHTSTRFVPFPLRYACEFLIQVFGVQINKEVELAAQVREKHILQIQTMLCDMLLRDAPVAIITQSPNVMDLVKCDGAALYFKNKTWLLGVTPTEEQIRDIAEWLLEYHSGNTGLSTDSLMEAGYPGASALGDAVCGMAAVSITSRDFLLWFRSHTAKEIKWGGAKHDPDDKDDGRKMHPRSSFKAFLEVVKWRSMPWEDIEMDAI

SEQ ID NO: 13863 - protein, 439 aa, Schizosaccharomyces pombe
MAIQKVFARQIYALGGNPTVEVDLTTETGIHRAIVPSGASTGIWEALEMRDGDKTKWGGKGVLKAVGNVNNIIAPAVVKANLDVTDQKAADEFLLKLDGTENKSKLGANAILGVSMAICRAGAAQKKLPLWKYIAENFGTKGPYVLPVPSFNVLNGGSHAGGDLAFQEFMILPTGAPSFSEAMRWGAETYQTLKSIAKKRYGSSAGNVGDEGGIAPDLQTPQEALDLIVEAINKAGYEGKIKIGLDVTSSEFYVDGKYDLDIKAAKPKPENKLTYQQLTDLYVELSKKYPIVSIEDPFDQDDWSAWTHMKAETDFQIVGDDLTVTNVKRLRTAIDKKCANALLLKVNQIGSVTESLNVVRMSYEAGWGVMVSHRSGGTADTFISHLTVGIGAGQLKSGAPCRSERLAKYNELLRIEEELGSRGVYAGAHAGKYIKAAKF

SEQ ID NO: 13864 - protein, 392 aa, Malpighia emarginata
DLEPVNPADVPVTAAGALKSYKLAAKAISRLQSLPSGNISLLCDVLVKEVRDLTGYDRVMVYKFHEDEHGEVVSECRRSDLESYLGLHYPATDIPQASRFLFMKNKVRMICDCVAPPVKVIQDDRLPQPLSLCGSTLRSPHGCHAQYMTNMGIIASLVMSVTVNEDDDMVDGDQPQMARKLWGLVVCHHTSTRFVPFPLRYACEFLIQVFGVQINKEVELAAQVREKHILQIQTMLCDMLLRDAPVAIITQSPNVMDLVKCDGAALYFKNKTWLLGVTPTEEQIRDIAEWLLEYHSGNTGLSTDSLMEAGYPGASALGDVVCGMAAVSITSRDFLFWFRSHTAKEIKWGGAKHDPDDKDDGRKMHPRSSFKAFLEVVKWRSMPWEDVEMDAI

SEQ ID NO: 13865 - protein, 392 aa, Madagasikaria andersonii
DLEPVNPADVPVTAAGALKSYKLAAKAISRLQSLPSGNISLLCDVLVKEVRDLTGYDRVMVYKFHEDEHGEVVSECRRSDLESYLGLHYPATDIPQASRFLFMKNKVRMICDCVAPPVKVIQDERLPQPLSLCASTLRSPHGCHAQYMTNMGIVASLVMSVTVNEEDDMVDGDQPQMARKLWGLVVCHHTSTRFVPFPLRYACEFLIQVFGVQINKEVELAAQVREKHILQIQTMLCDMLLRDAPVAIITQSPNVMDLVKCDGAALYFKNKTWLLGVTPTEEQIRGIAEWLLEYHSGNTGLSTDSLMEAGYPGASALGDAVCGMAAVSINSRDFLLWFRSHTAKEIKWGGAKHDPGDKDDGRKMHPRSSFKAFLEVVKWRSMPWEDMEMDAI

SEQ ID NO: 13866 - protein, 253 aa, Glycine max
  unsure (1)..(253): unsure at all Xaa locations
MSRRYDSRTTIFSPEGRLYQVEYAMEAIGNAGTAIGILSKDGVVLVGEKKVTSKLLQTSTSXSEKMYKIDDHVACAVAGIMSDANILINTPXVQAQRYTYAYQEPMPVEQLVQSLCDTKQGYTQFGGLXPFGVXSFLFAGWDKNFGFQLYTSDPSGNYGGWKAAAXIGANNQAAQSILKQDXKDDITREEAVQLALKVLSKTMDSTSLTSEKLELAEVFHLXSGKVKYQVCSPENLTKLLVKFGVTQPATDTA

SEQ ID NO: 13867 - protein, 487 aa, Streptomyces coelicolor A3(2)
MADPKGFLNHGREVARTRPVDERVKDWNEVYVPGSLLPIISKQASRCMDCGIPFCHNGCPLGNLIPEWNDYAYREDWSAASERLHATNNFPEFTGRLCPAPCESACVLGINQPPVTIKNVEVSIIDKAWETGDVAPRIPERLSGKTVAVIGSGPAGLAAAQQLTRAGHTVAVYERADRVGGLLRYGIPEFKMEKRHINRRIEQMRAEGTRFRTGVEIGRDLKATDLKKRYDAVVIAAGSTTARDLPVPGRELNGIHQAMEYLPLANKVQEGDYVAPPITAEGKHVVVIGGGDTGADCVGTAHRQGAASVTQLEIMPRPGEERDAVRQPWPTFPMLYKVTSAHEEGGERVYAVSTTHFEGDEDGNVQWLHMSEVEFVDGKLTSKPGTERKIPAQLVTLAMGFTGTDKDNGLVDQFGLELDERGNIARDADFQTNVPGVFVAGDAGRGQSLIVWAIAEGRSAARGADRFLTGASDLPAPIRPTDRALAV

SEQ ID NO: 13868 - protein, 642 aa, Lycopersicon esculentum
MSSQKNYKNKHVLFLVMIMCSLAFVTEANLSEPEVLLKFRESLKYDGDPFSTWDANVPPCVKDNNKPKWNNLFCESGKVYGLNLENLGLSGTIDLDILKELPNLRTISVFKNKFEGPLPILNKLPTLKSAYFSNNKFSGPIDQNIFEGMNSLKKLHLANNEFTGPLPPIFGDMPNLRELNIQNNKFEGPIPPSYSHLYLPAYDGNDGLCGPPLAKSCNKEDEKKKEESSSSSSSGWKIALIVVIVVVVIGIIVFVLINRRNKNHQQEVVLGGSSLTSSSPTSQDQKLIPQSHDHLNKMEQGQSSAASTPDRACNDGGKRAEVAGQKLLFLKDDIEKFDLPDLLKASAEVLGSGVFGSTYKAALSTGPVMVVKRFRHMNKVGKEDFHEHMRRLGRLSHKNLLPVIAFYYRKEEKLLVFEYVNNVSLAVYLHGNSKSRGNQSLDWPTRLKIVKGVSKGILYLYNELPSLTSPHGHLKSSNVLLTENFEAVLTDYALLPVVNAEHAHEHMISYKAPELKQSGKVNRKTDVWTLGMLILEILTGKFPSNLLGKGTQDSDDLATWVNTTLGGESSEKEVFDKEMKGTKDCESEMMKLLKIGLSCCEADVEKRCDIKEAVERIDEVKGKGDFSSNVASNEVDNMHTSR

SEQ ID NO: 13869 - protein, 137 aa, Glycine max
  unsure (1)..(137): unsure at all Xaa locations
GSRIKPSISMFLTSCNIKSTGHKMGISXKGSDQILERYLYLHNVPNNEDFDPDTRLKNHALHKYDSVPAIQLTFASGTHTRVLYLDKTTVTTSMNIDPDCXKRSRSDTGXILKCTPRRASXDEQHSYLPQPILYSQK

SEQ ID NO: 13870 - protein, 402 aa, Helicobacter hepaticus ATCC 51449
MFDEIEFDKIKRLPKYVFAAINEIKLEMRRNNEDVIDFSMGNPDGATPEHIIQKLCEAAQKGKNQGYSVSRGIYKLRLAICNWYKRTYGVELDPESEACVTMGSKEGYVHLVQAIANPGDNAIVAEPAYPIHYYAFILNGANVSTFGLKWNEQMELDVEDFFINIKRVLKEVMPRPKFVVVNFPHNPTTIVVYREFYERLVAFAKQERFYIISDIAYAELCFDGFKTPSILEIEGAKDVAVESYTLSKTYNMAGWRVGFVVGNKKIIQALQKIKSWIDYGIYTPLQIAATIALEGDQSCVKDIKNTYEKRMEILIKSFGEAGWEMKKPKASMFIWAKLPECVGDMGSLEFSKRLLKEAKIAVSPGVGFGDYGEGYVRIALIENEKRIRQAARNLKSFLKQFQ

SEQ ID NO: 13871 - protein, 155 aa, Oryza sativa
IKALHLYDCLRANKSTSAWGVEARVPFLDKNFINVAMDIDPEWKMIKRDLGRIEKWVLRNAFDDEEKPYLPKNAARLTVPGGPSVACSTAKAVEWDAAWSKNLDPSGRAALGVHDAAYEDTLQKSPASANPVLDNGFGPALGESMVKTVASATAV

SEQ ID NO: 13872 - protein, 669 aa, Lycopersicon esculentum
MSVAYRYSNHNRHHHHHHLLILFVLLLQVIVPIKSDNNEAEILLRFSKSLQKNDATANWNTKVSPCDKKTDRPNWDNVICENGFVFGLQLENKGLSGTIDVDALKDLPNFRTISVMNNNFEGPIPNLSKLAGLKTAYFTNNKFSGQIDNSFFEGMHWLKKLHLGNNQISGKIPSVFGQLPKLTELRLENNKFEGQIPDFNQERLIDMNFANNSLQGPIPHGLASLKPSAFEGNNLCDGPFSKCTSEPKVALWTIILVVIAVAAAVAAIVVVIIILRRGKQTPETETRPIPTPSGAAAGGATNQTGAPSAAELNKMEQGSNQAIAARDQSPEGTAVLNTNKRPEVQAVQQKLLFLKDDIEKFDLPDLLKASAEILGSGVFGSTYKAALSRGRVMVVKRFRQMNNVGKEDFHEHMRRIGRLSHKNLLPVVAYYYRKEEKLLVSEYVNNVSLAVHLHGNKSRGQPSLDWPTRLKIVKGVAKGLLYLYNELPSLTAPHGHLKSSNVLLNESYEPLLTDYALLPVVNLEHAQEHMIAYKSPEFKHNGRITRKNDVWTLGILILEMLTGKFPSNFLQQGKGSDTDLATWVRSVVNEDMTEVDVFEKEMRGTTNSEGEMMKLLKIALGCCDLDMKKRFDIKEAMERIEEVKERDGDDDFYSTRGLSDDYTQVSMNI

SEQ ID NO: 13873 - protein, 261 aa, Eremothecium gossypii
MPQNEYIEQHIKKHGRRLDHEERKRKREAREAHKISEKAQKLTGWKGKQFAKKRYAEKVAMRKKIKAHEQSKLKGAAKPLEDSGEALPAYLLDREQANSAKAISSSIKQKRLEKADKFSVPLPKVRGISEEEMFKVVKTGKSKTKSWKRMITKHTFVGEGFTRRPVKMERIIRPSALRQKKANVTHPELGVTVFLPILGVKKNPQSPMYTQLGVLTKGTIIEVNVSELGMVTSGGKVVWGKYAQITNEPDRDGCVNAVLLV

SEQ ID NO: 13874 - protein, 124 aa, Triticum aestivum
MALRAAAARLASSSLRRRHGHLLPAAASASHTAFLHSHATSFGFKQVREDEKSKLVGNVFSSVASSYDVMNDLMSAGLHRLWKDRLISKLNPFPGMKHLDVAGGTGDVAFRVVERIKSVSHRAT

SEQ ID NO: 13875 - protein, 423 aa, Haemophilus ducreyi 35000HP
MAKTIQAIRGMNDCATTESPLWQWVESNVRNVLASYGYSEVRMPIVESTPLFARAIGEVTDVVSKEMYTFWDNDEQLTLRPEGTAGCVRAAIQHGWIYNNEQRLWYMGPMFRHERPQKGRYRQFHQAGVEVFGIANPEIDAELILLTARLWQALGIEQHLSLQLNSIGSLAARANYRAALVDFLANHTALMNDEEKERLVKNPLRILDTKNQALQAVLNDAPKLLDYLDEESRQHFAQLCQLLDAMGIRYEVNPKLVRGLDYYNKTVFEWVTSALGSQGTVCGGGRYDGLVEQLGGHATQGVGFAIGLERLVLLVQEVNKTMSLPKAVDIYLVYAGDNTTLKAFQIAEQIRNALPQLRVMTHCSGGNFKKQFKRADKVEAKIALVIGESELATQTIVLKELQNSSEQISIDQADLLAELSKRF

SEQ ID NO: 13876 - protein, 276 aa, Bacillus megaterium
MNIGFIGTGNMGKILIDAFIESKAVRPSKITIMNRTKKRAKEIQQQHKKINVADTAEEVVHASKVIFICVKPLDIHPLLIKLEPLLTKDHCIVSITSPISVEQIERLIPSQAARIIPSITNRALAGVSLFTFGERCTPFYQNYLHELFSSMSKPVAIDQTITRVSSDIVSCGPAFFSFLLQRFIDAAVQETNISEEEATVMASDMIIGMGKLLEKEIFTLPTLQDKVCVKGGVTGEGIKVLEAELGEMFVHVFQKTHEKFDEDIELVHNQFDSLIP

SEQ ID NO: 13877 - protein, 254 aa, Glycine max
MEWEMRPGGMFVQRREAAADNGGGGNGNMTTTVLITVVHASSHYDLHLPTNSTFWDVKSLLVHRTGLQPEEQQLFFGGKEKDNEDNLHEEGVRDKSKLLLLEDASSEERKREEIRKHNEMLKASEAVAEVRAEVDKLAERVSVLEVAVDGGTRVSDKEFLMSTELLMRQLLKLDSIEAEGEVKLQRKAEVRRVQNFVDTLDSLKAKNSNPFTPIGKAVSVATQWETFDSGMGSLNAPTSMSSSRNVSQDWERLD

SEQ ID NO: 13878 - protein, 202 aa, Pseudomonas putida KT2440
MCVRRYPASSRIVMREKRVMRAHWLTVPVLALLASTSSWAADCPALLQGSLPELRGKGQVDLCERFAGKPLVVVNTASYCGFAPQFEGLEATYKEYHEQGLEMLGVPSNDFKQEDADSEKTAKVCYANYGVTFTMTKTQAVRGKDAIPLFAELASQSSAPKWNFYKYVVDRKGKVIGNFSSLTKPDDPAFRAAIEKAIASQP

SEQ ID NO: 13879 - protein, 108 aa, Glycine max
MEHGSVADSSASTFSIMEEDHTLANSVRFVLNQDPRVAFCGYSIPHPADNKVNIRVQTTGDPAKDVMKDALQDLMVMGQHVRGTFDKAVADFKSKMPAEQMDVDLNQQ

SEQ ID NO: 13880 - protein, 710 aa, Corynebacterium efficiens YS-314
MSANPGIPSSGTPEVNEPTTPVPPLPRKPDQATAEPYSPTGCPMHISPDVNAQQGEYLTTAQGGRLRDTDHSLKAGERGPLLMQDHHFREKITHFDHERIPERVVHARGAAAHGVFKANGAASSICRAGVFAEGKETPVFTRFSTVLGNRGSADTVRDTRGFAVKFYTDEGTWDLVGNNIPVFFIQDGIKFPDVIHAAKPHPDRDIPQAQSAHDTFWDFVTLHTEATHHTIWNMSDRGIPRSYRMMEGFGVNTFRMINDKGETSLVKFHWKPKLGVHSQVWEEAQITGGVDPDFHRRDLADAIESGAFPEWDLGLQVFPDNKEQMFEGIDLLDPTKIVPEELAPVQIVGTMTLNKNVSNFHEETEQVAFHPGHLPPGIDVTADPLLQGRLFSYLDTQISRLGGPNFAQLPINRPHAPVNDMFREGMHQQGQHIGVAPYQPNSLDGGNPFPAEPSNGALIDVPVPVEGEITRSAPASFDDHYSQARLFYVSLSPIEQKHVADAYTFELGKCYEKAIKERAVHVLSNVDHDLASTVAKGLGVPAPEKKDLPEPTPSPALSQVGKTWPIDGRQIGILVTDDLPEDQVADVASLSKAIEDAGMVPLVTSTSGGTIGEPEEATGVAVSRTYVTVRSIEFDAAVVVETPEQPEVSILLSEMIRHGKAVALVGDATAQVPDRMGDAPGVVTVNAAADALDVLTPMLKGHRTWAANPA

SEQ ID NO: 13881 - protein, 403 aa, Vibrio cholerae O1 biovar eltor str. N16961
MTVEMSVDRSSFDEVMVPCYNPMEFIPVKGFGSRIWDQQGHEYIDFAGGIAVSCLGHCHPVMVQALTTQANKLWHLSNVMTNEPALRLAKKLTQVSFAEKVFFANSGAEANEAALKLARRYAADVYGPEKSEIIAFNQGFHGRTFFTVSVGGQATYSDGFGPKPGDIVHLPYNDLAALQAQISDRTCAVMMEPLQGEGGIVSPSAEFVQAVRELCDKHNALLIFDEVQTGNGRTGDFYAYQGIGVTPDILATAKSLGGGFPIGAMLTTAKIAEHMKVGVHGSTYGGNPLACAVAEAVVDFVAQPEILAGVKQREQWMRAELEKINQKYQLFKEIRGKGLLLGAALNDEWQGRARDILVAAGKQGLMVLVAGASVVRFTPSLIISQQEIEEGMARLDKAIATLM

SEQ ID NO: 13882 - protein, 447 aa, Sinorhizobium meliloti 1021
MPINITMPALSPTMEEGNLAKWLVKEGDKVKSGDVIAEIETDKATMEVEAVDEGTVAKIVVPAGTEGVKVNALIAVLAAEGEDVATAAKGGNGAAGAVPAPKPKETAETAPAAAPAPAAAPAPQAAAPASPAPADGEGKRIFSSPLARRLAKEAGIDLSAIAGSGPHGRVVKKDVETAVSGGAAKPAGAPAAAPAPATLAKGMSEDAVLKLFEPGSYELVPHDGMRKTIAKRLVESKQTIPHFYVSVDCELDALMALRAQLNAAAPEKDGKPVYKLSVNDMVIKALALALRDVPDANVSWTDQNMVKHKHADVGVAVSIPGGLITPIVRQAELKSLSAISNEMKDLGKRAKERKLKPEEYQGGTTAVSNMGMMGVKDFAAVVNPPHATILAVGAGEDRVVVRNKEMVIANVMTVTLSTDHRCVDGALGAELLAAFKRYIENPMGMLV

SEQ ID NO: 13883 - protein, 174 aa, Glycine max
  unsure (1)..(174): unsure at all Xaa locations
MICSLAVTTANRAGAGMVAPFTGLNSMAGLPTTKTNTDITFIACIGGIEQCMQVWPPLGKKKLETLSYLPYLDDAQLAKEVKYLLRKGWIPCLEFNLDHSSVYREHNTSPRYYDRRYCTMSNLTMLGCTDASHVLNELHXAKTAYPNGSVRIIXFDNATQVQCITFIVYNTPAY

SEQ ID NO: 13884 - protein, 481 aa, Sinorhizobium meliloti 1021
MAENYDVIVVGSGPGGYVTAIRSAQLGLKTAIVEREHLGGICLNWGCIPTKALLRSAEILDHANHAKNYGLTLEGKITANVKDVVARSRGVSARLNGGVAFLMKKNKVDVIWGEAKLTKPGEIVVGAPSKPAVQPQNPVPKGVKGEGTYTAKHIIVATGARPRALPGIEPDGKLIWTYFEAMKPEEFPKSLLVMGSGAIGIEFASFYRSMGVDVTVVELLPQIMPVEDAEISAFARKQLEKRGLKIITDAKVTKVEKGANDVTAHVETKDGKVTPIKADRLISAVGVQGNIENLGLEALGVKTDRGCIVTDGYGKTNVAGIYAIGDVAGPPMLAHKAEHEGVICVEKIAGVPGVHALDKGKIPGCTYCDPQVASVGLTEAKAKELGRDIRVGRYSFGANGKAIALGEDQGLIKTIFDKKTGELIGAHMVGAEVTELIQGFVVAMNLETTEEELMHTVFPHPTLSEMMKESVLDAYGRVLNA

SEQ ID NO: 13885 - protein, 492 aa, Fusobacterium nucleatum subsp. vincentii ATCC 49256
MANYIIKETGEVGKKKGVAIAYDSRLDSVENAINTAMTLAGNGIKVYLFDGVRSTPELSFAVRELKAQAGIMITASHNPKEYNGYKVYWEDGAQIVDPQATGIVSSVGAVDIFNDIKLMDEKEAIDKGLLVYVGEKLDNRYIEEVKKNAINPNVENKNKIKFVYSPLHGVAARPVERVLKEMGYTNVYPVKEQEKPDGNFPTCDYANPEDTTVFKLSTELADKVGAKICIANDPDGDRMGLAVLDNDGKWFFPNGNQIGILFAEYILNHKKNIPENGTMITTVVSTPLLDTIVKKNGKKALRVLTGFKYIGEKIRQFENKELDGTFLFGFEEAIGYLIGTHVRDKDAVVASMVIAEMATTFENNGSSIYNEIIKIYEKYGWRLEITVPVTKKGKDGLEEIQKIMKSMRAKNHTEIAGIKVKEYRDYQKGVEGLPKADVIQIVLEDDTYLTVRPSGTEPKIKFYISVVDSDRKVAENKLAKMEKEFINYAENL

SEQ ID NO: 13886 - protein, 310 aa, Hevea brasiliensis
MDRGIEILSPASYLQNSNWLFPETRATKWTPEENKQFENALALYDKDEPDRWQKVAAVIPGKTVGDVIKQYRELEEDVSDIEAGLIPIPGYSSSDAFTLEWFNNNQGYDGFRHYYTPGGKRTTAARSSEQERKKGVPWTEEEHRQFLMGLQKYGKGDWRNISRNFVTTRTPTQVASHAQKYFIRQSTGGKDERRSSIHDITTVNLPDTKSPSPDEKKSSPDHSTTSLQSQPQQKMVGMAKGLIDWKPQNEGGGAAGVFSQANGNLLMAPLCGISSYGQRLQEQNLLRGTLPGYQFAPYNLIFQMQPMQRQ

SEQ ID NO: 13887 - protein, 568 aa, Oryza sativa
MASSALICDTEQWKGLQAHVGAIQKTHLRDLMDDAERCKAMTAEYEGIFLDYSRQRATGETMEKLFKLAEAAKLKEKIEKMFSGDKINSTENRSVLHVALRAPRDEVIKSDGVNVVPEVWGVKDKIKQFSETFRSGSWVGATGKALTNVVSVGIGGSFLGPLFVHAALQTDPEAAESAKGRQLRFLANVDPVDVARSIKDLDPETTLVVVVSKTFTTAETMLNARTLQWSGLSLLLGPDAVAKHMIAVSTNLELVEKFGIDPKNAFAFWDWVGGRYSVCSAVGVLPLSLQYGFPIVQKFLEGAASIDKHFRSSSFEKNIPVLLGLLSVWNVSFLGYPARAILPYSQALEKFAPHIQQLSMESNGKGVSIDGVQLPFESGEIDFGEPGTNGQHSFYQLIHQGRVIPCDFIGVVKSQQPVYLKGEIVSNHDELMSNFFAQPDALAYGKTPEQLHSEKVPEHLISHKTFQGNRPSLSLLLPSLSAYEIGQLLSIYEHRIAVQGFLWGINSFDQWGVELGKSLASQVRKSLHASRMEGKPVQGFNSSTASLLTRYLAVEPSTPYNTTTMPKV

SEQ ID NO: 13888 - protein, 340 aa, Streptococcus agalactiae NEM316
MKRIAVLTSGGDAPGMNAAIRAVVRKAISEGMEVYGINQGYYGMVTGDIFPLDANSVGDTINRGGTFLRSARYPEFAELEGQLKGIEQLKKHGIEGVVVIGGDGSYHGAMRLTEHGFPAVGLPGTIDNDIVGTDYTIGFDTAVATAVENLDRLRDTSASHNRTFVVEVMGRNAGDIALWSGIAAGADQIIVPEEEFNIDEVVSNVRAGYAAGKHHQIIVLAEGVMSGDEFAKTMKAAGDDSDLRVTNLGHLLRGGSPTARDRVLASRMGAYAVQLLKEGRGGLAVGVHNEEMVESPILGLAEEGALFSLTDEGKIVVNNPHKADLRLAALNRDLANQSSK

SEQ ID NO: 13889 - protein, 511 aa, Liquidambar styraciflua
MDSSLHEALQPLPMTLFFIIPLLLLLGLVSRLRQRLPYPPGPKGLPVIGNMLMMDQLTHRGLAKLAKQYGGLFHLKMGFLHMVAVSTPDMARQVLQVQDNIFSNRPATIAISYLTYDRADMAFAHYGPFWRQMRKLCVMKLFSRKRAESWESVRDEVDSAVRVVASNIGSTVNIGELVFALTKNITYRAAFGTISHEDQDEFVAILQEFSQLFGAFNIADFIPWLKWVPQGINVRLNKARGALDGFIDKIIDDHIQKGSKNSEEVDTDMVDDLLAFYGEEAKVSESDDLQNSIKLTKDNIKAIMDVMFGGTETVASAIEWAMTELMKSPEDLKKVQQELAVVVGLDRRVEEKDFEKLTYLKCVLKEVLRLHPPIPLLLHETAEDAEVGGYYIPAKSRVMINACAIGRDKNSWADPDTFRPSRFLKDGVPDFKGNNFEFIPFGSGRRSCPGMQLGLYALETTVAHLLHCFTWELPDGMKPSELEMNDVFGLTAPRAIRLTAVPSPRLLCPLY

SEQ ID NO: 13890 - protein, 471 aa, Pyrococcus furiosus DSM 3638
MCLITGGINLTKEEIVKMIITGKHRGPDSFGVWSDGLVIKSEDFSEIKEIRGGNVVLAQCRLAMTGSKNYTQPFYNDIVLVHNGEIYNHESLRKWLIERGASFESDVDSEVILRLLEYFIFDKKMKVEEAVKKAMLMLRGDYAVAFALNGKIYLFRDPIGVRPLYYSPRGRFGSEKKVLWSVGEEAIPVNPGELVKLPEEEKMKLLSPWDIKGSGKGYYDGLKNLLQDAVRIRTAKKVGVLFSGGLDSSLIALLASKYSKVVLYTAGTEDSKDVEWARKVSDELRLELREYIFTREEVEREIKNVMFAIEEPNPMNLAIAIPLYFATKLARKDDVKVLLSGQGADELFGGYAKYLENPSLMRKDIEEIAERNLGRDDKVGMLNGVEVRYPYLDLPFVSLALRVPLEEKIREGVRKAILRRIALDFGLPEEVAFREKKAAQYGSNAQKILSKIAKKSLREFAQKLFSEVFST

SEQ ID NO: 13891 - protein, 183 aa, Escherichia coli O157:H7 EDL933
MQDSILTTVVKDIDGEVTTLEKYAGNVLLIVNVASKCGLTPQYEQLENIQKAWADRGFVVLGFPCNQFLEQEPGSDEEIKTYCTTTWGVTFPMFSKIEVNGEGRHPLYQKLISAAPTAVAPEESGFYARMVSKGRAPLYPDDILWNFEKFLVGRDGLVIQRFSPDMTPEDPIVMESIKLALAK

SEQ ID NO: 13892 - protein, 755 aa, Pseudomonas putida KT2440
MTGAFSIMTADNSLADAMERCAQEPIQVPGSIQPHGFLLVLDATDLRVLQASENVEHWLGLPARELIGCHFADLVHEGFDLHAHLTRLPEDEVFPFHIGDVRLRQGAPISALLHMLVHCHDQVLIAEFEPPRLPADLVGQGDYYPLVRSFVASLQVASSIEDLLQQTVLQLKRITGFGRVKAYRFDAEGNGQVLAEVVDPGYPSYAGLCFPAADIPRQARELYRVNRIRVIEDANYQPSPLLPATNPRTGKPLDMSFAALRSVSPVHLQYMRNMGTLASMSLSIVVDGQLWGLISCHHQQPRPVDLRTRTACELLASVLSLQIESRESHASTRKLLTLRQHIVRMISSMADHDSVSDGLRDLPEVLLAFADAQGAAVISAERCDLIGQTPPEAQVTALVHWLGQRDEDKVFHSDNLRRDITELPELANHAGGVLAVAISQIHSHYLLWFRPEQIRTVNWAGQPTKQVGPQGNLDPRHSFERWQEEQRGYSQAWDPLVIEGVIELRAAVLGIVLRKAEELAQLAGELRRSNKELEAFSYSVSHDLRAPLRHIAGYTELLGEIEGQGLSERGKRFLQHIGEAAHFAGSLVDNLLNFSQMGRSALRLSDVDLNALVEAIRSELAPDYEGRAIVWDIAPLPKVIGDPAFINMALHNLIANAIKYTRGRTPARIEISAVQHPEETEVCIRDNGVGFDMAYANKLFGVFQRLHRMEDFEGTGIGLASVRRIIERHDGRVWATGQVDQGASFHFTLPRNTAT

SEQ ID NO: 13893 - protein, 600 aa, Halobacterium sp. NRC-1
MVINLTSHAAHADVTEACLAAGRHVFSEKPLAMDAARAADLVAAAERHDLGLGCAPITPGCDAQRHARALAADGRLGGVQFAAATANVGRVDEWHDRPASFLDVGPLYDGAVYPLALLVAWFGRVTEVRTADAVAAWPPAQRDGDDAPDGLPHVEATLSFSDGPVVSLRASFYVDHRSREFYGLELHGDDGTLYLRDTGALGAPRDAVTVRGGDREPTVAPQPQPRCSRAYAAGPERLADRVAGGCGSSARASARRGAHVVAVCNAIERAATDGGPVAVPEPGVSLARPEQRRPAPVAAAPSGFQPGGRALRLPPVGFGCSRYRDGTYVTPAMGAAVDAGYRLFDTAELYGNEWRLGDLVAAPGGPDRESVFLVGKPWRTNHGPGDLREACTGSLDELGVAAFDCYALHWPGAWAHRGALTRLSERPVEEQERLTMPTAADGTPARAPHGLVETWRRMEALHDDGLARSLGVCNVTLPQLAGLTDAARVRPALVQVECHPYRPRDALVSWCHRHGVRVVAHSPLSAPGLLDEPVVHAVADEHGVSPATAVLAWHCTRGVVPIPSTTTREHVVANLAAPRHSLTDDQRDRMAGLADPTFQR

SEQ ID NO: 13894 - protein, 139 aa, Glycine max
MIPQQWASPCGNQCTNKYAALTKIPWRVFCKKGCDSDGETWEECLEDCNQICYKDPVLKDQQWSAYIDRSPGAASYSEECFHACVSGCGYKFEVKPEEADKVSPNRQLKPETKPKPQPKPKPQPVCPIDPPSDIPDTSA

SEQ ID NO: 13895 - protein, 547 aa, Staphylococcus epidermidis ATCC 12228
MTQNSYKIPIQGMTCTGCEEHVTEALEQAGAKDVSADFRRGEAIFELSDDQIEKAKQNISAAGYQPGEEESQPSENSVDFNRDGDYDLLIIGSGGAAFSAAIKANENGAKVAMVERGTVGGTCVNIGCVPSKTMLRAGEINGLAQNNPFTGLQTSTGAADLAQLTEQKDGLVSQMRQEKYIDLIEEYGFDLIRGEASFIDDKTIQVNGQNITSKSFLIATGASPAVPEIPGMNEVDYLTSTSALELKEVPQRLAVIGSGYIAAELGQMFHNLGTEVTLMQRSERLFKTYDPEISEAIDESLTEQGLNLITGVTYQKVEQNGKSTSIYIEVNGQEQVIEADQVLVATGRKPNTETLNLESAGVKTGKKGEVLTNEYLQTSNNRIYAAGDVTLGPQFVYVAAYEGGIVANNALGLAKRKIDLRFVPGVTFTNPSIATVGLTEQQAKEKGYDVKTSVLPLDAVPRALVNHETTGVYKLVVNAQTQKLIGAHIVSENAGDVIYAATLAVQFGLTIEDLTDSFAPYLTMAEGLKLAALTFDKDVSKLSCCAG

SEQ ID NO: 13896 - protein, 458 aa, Nostoc punctiforme PCC 73102
METADVIVIGSGQGGIPLAADFASSGRNVVLFERDALGGSCINYGCTPSKAFLASAHAAGRARQATKLGIHAQVEVDFSAVMERVRSIRSQFNQGVKRRLDSAGVRVVCAEAAFTGERTVSGGGVTVQAPLIVINTGTSSTIPDFSGLVGTPYLTNRNFFDLQQIPPRLLVVGGGYIALELGQGMARLGSQTELIVRGERLLAQEESDVSAVLADAFEQDGIGLHFNVTVQQVAYTNRVFTLTLNNGEVLDGEALLIATGRKPNTQALNSAVTGVELDAQGFIKIDEQFQTTCAGIYAIGDAAKQPAFTHVSWEDYRRLKAILCGEHRTRNDRVLGYAVYTEPQVGRVGMTLEQAHKQGITASEVTLPMAHIARSIEWGHDLGFYRMVIDTQTNLILGATLVGYETAELVHVFLSLMEAKATWQVLEQSVHIHPTYGEALPSLARLLVGDDMPTCPNM

SEQ ID NO: 13897 - protein, 131 aa, Candida albicans SC5314
MSAEDIQMEDASNNSEQEQIQEQEYDINKIKILPGSSEDGTSASFQIIDEDHTLGNALRYIIMKNPEVEFCGYSIPHPSENKLNIRIQTYGNISAVEALHQGLDNLSELCGAIEDKFDDAIKAGGYSTKEP

SEQ ID NO: 13898 - protein, 326 aa, Escherichia coli
KTFSEAIISGEWKGYTGKAITDVLNIGIGGSDLGPYMVTEALRPYKNHLNMHFVSNVDGTHIAEVLKKVNPETTLFLVASKTFTTQETMTNAHSARDWFLKAAGDEKHVAKHFAALSTNAKAVGEFGIDTANMFEFWDWVGGRYSLWSAIGLSIVLSIGFDNFVELLSGAHAMDKHFSTTPAEKNLPVLLALIGIWYNNFFGAETEAILPYDQYMHRFAAYFQQGNMESNGKYVDRNGKVVDYQTGPIIWGEPGTNGQHAFYQLIHQGTKMVPCDFIAPAITHNPLFDHHQKLLFKFFAQTEALAFGKSREVVEQEYRDQGKDPAT

SEQ ID NO: 13899 - protein, 223 aa, Vibrio cholerae
AGSDLALYDIAPVTPGVAADLSHIPTPVTIKGYAGEDPTPALEGADVVLVSAGVARKPGMDRADLFNVNAGIVKALAEKIAVVCPKACVGIITNPVNTTVPIAAEVLKKAGVYDKRKLFGVTTLDVIRSETFVAALKDKDPGQVRVPVIGGHSGVTILPLLSQVEGVSFTDEEVAALTKRIQNAGTEVVEAKAGGGSTTLSMGQAACRFGLALVKALQGESDV

SEQ ID NO: 13900 - protein, 399 aa, ASPERGILLUS NIDULANS FGSC A4
MSPPASVHPATSALHADDYLNLVTDVAPPIHLSTTFRFPREPENLIPSEDPVEEFDGKNYVYSREFAPNATRFEAVLSELLKGYAVSYSTGLAALHAALVLLNPRRVSVGEGYHGSHEVIGVISRLSGLEKLPLDCPAESLGEGDVIILETPVNPLGTAFSIKEYAEKAHARGAYLIVDSTFAPPPLQDPFAWGADIVMHSGSKYFGGHSDLLCGVLVVKIKDWQKKLREDRLALGNVMGNMESWLGLRSLRTLDLRVQRASESSAKLVAWLHTALKTRGPATNSDEHLVQTVIKEMHHASLQDEPWLREQMPNGFGPVFSIILRSEDFARALPSKLALFQHATSLGGVESLIEWRALSDSRVDRKLLRISVGLENWEDLKNDLLHGFRSLLRERQGCS

SEQ ID NO: 13901 - protein, 274 aa, Arabidopsis thaliana
  unsure (1)..(274): unsure at all Xaa locations
MTSSFFKQGQASYMQTLKRQAKVDSGKRMSXNFVIRRDPTGQCIFRPIPFKGMRKVRKHVDDDEGWSGGSKKVKVRGLTSSSGDGDSLSYPFENETTIRNREKDRLMLEIFGPESTDDSDESGTEEEFMETNLMSLVSLQWGKRGKRSMRKGTWKRHILENHVGQHKNTQDEMDIQVLLVSMDASVIPNLQNPQVSCKPNVTLKSLCEMYVAPYVEAQAEKIEMYVVKELVAELTMIDPHRDRVEIVNKEDSVGGLRMYNFNNGYVIIGYMKTP

SEQ ID NO: 13902 - protein, 505 aa, Mesorhizobium loti
MNKVEFSRPVKAPFDKRYGNFIGGKWTEPRSGRYFENHSPVNGQLLCEVARSDADDIEAALDAAHAAKDAWGRTSVAERSLILNRIADRMEENLDLLACAETWDNGKPIRETTVADLPLAIDHFRYFASAVRGQEGSLSQIDDDTVAYHFHEPLGVVGQIIPWNFPLLMACWKLAPALAAGNCVVLKPAEQTPAAILLWADLIGDLLPPGVLNIVNGFGLEAGKPLASSPRIAKIAFTGETTTGRLIMQYASQNLIPVTLELGGKSPNIFFKDVVAEDDDFFDKAIEGFVMFALNQGEVCTCPSRALIHESIYDRFMERALKRVEAIVQGDPLDPATMIGAQASSEQLEKILSYIDIGRQEGAEVLTGGARNVLPGDLAGGYYVKPTVFRGHNKMRIFQEEIFGPVVSVTTFKDDDEALSIANDTLYGLGAGVWTRDGNRAYRFGRAIQAGRVWTNCYHAYPAHAAFGGYKQSGIGRETHKMMLDHYQQTKNMLVSYSPKKLGFF

SEQ ID NO: 13903 - protein, 472 aa, Salmonella typhimurium LT2
MVSINHDSALTPRSLRDTRRMNMFVSVSAAVAGLLFGLDIGVIAGALPFITDHFVLTSRLQEWVVSSMMLGAAIGALFNGWLSFRLGRKYSLMAGAILFVLGSLGSAFASSVEVLIGARVILGVAVGIASYTAPLYLSEMASENVRGKMISMYQLMVTLGIVLAFLSDTAFSYSGNWRAMLGVLALPAVLLIILVVFLPNSPRWLAQKGRHIEAEEVLRMLRDTSEKARDELNEIRESLKLKQGGWALFKANRNVRRAVFLGMLLQAMQQFTGMNIIMYYAPRIFKMAGFTTTEQQMIATLVVGLTFMFATFIAVFTVDKAGRKPALKIGFSVMALGTLVLGYCLMQFDNGTASSGLSWLSVGMTMMCIAGYAMSAAPVVWILCSEIQPLKCRDFGITCSTTTNWVSNMIIGATFLTLLDSIGAAGTFWLYTALNIAFIGITFWLIPETKNVTLEHIERKLMAGEKLRNIGV

SEQ ID NO: 13904 - protein, 469 aa, Glycine max
  unsure (1)..(469): unsure at all Xaa locations
APPPKLLQEDSKLQRLHKELVASGKLTESEFWATKKKMLDQDESRKLKQQIGFKNSLIFDTKPMSDGRINQVKFQLTPEIKYQIFALKPAVHQAFLNFVPRKMNEVDFWNKYFKAEYLHSTKNAVAAAAEAAEDEDLAVFLKDDEILEIEARKKVRRVDPTLDMEADQGDDYTHLPXMDHGIFRDGSKDISEAQNSLYKRTLLQDLNRQGAVVLEGKTLDMEMEHPRTVAEILARRKQECDGVVDEERRNRISKMTPIEDLQAQDNHPYAPLCIKDPRDYFDSQQANAVKTLDDSQAGMEQMKCSLGSEEAYDSLRASISKIKTTGLRDPLFSPDVALKVLNGLTKNITSTKYHLGKSSQESVLDILPNSTKEKLLDHWVCSQELLRHFWSSYPVSTQNLVSKTRRLKDSISQIYSKLEDIKVSAESDLRHHVSLVVHPMQQALNAALLHYEADIRKRNARGQKPNGYV

SEQ ID NO: 13905 - protein, 480 aa, Glycine max
  unsure (1)..(480): unsure at all Xaa locations
MSIPIPHRQLFIDGDWKVPVLKNRIPIINPSTQHIIGDIPAATKEDVDLAVAAAKAALSRNKGADWASASGSVRARYLRAIAAKITEKKPELAKLEAIDCGKPLDEAAWDIDDVAGCFEFYADLAEKLDAQQKAHVSLPMDTFKSYVLKEPIGVVALITPWNYPLPMATWKVAPALAAGCAAILKPSELASVTCLELAEICKEVGLPPGVLNILTGLGPEAGAPLAAHPXDVDKIAFTGSSATGSKIMTAAAQLIKPVSLELGGKSPIIVFEDVDLDKAAEWTIFGCFWTNGQICSATSRLIVHASFESIATEFLNRIVKWVKNIKISDPLEEGCRLGPIVSEGQYEKILKFISNAKSEGATILTGGSRPEHLKKGFFVEPTVITDVTTSMQIWREEVFGPVLCVKTFSTEEEAIDLANDTVYGXCSAVISNDLERCERITKAFNAGIGGIRYSEPCVTQSPWGGIITSGDVRRLEECGG

SEQ ID NO: 13906 - protein, 93 aa, Zea mays
MPGSHGRPLAIDGLGRPPPVDPFQGLKCTASLPDSARSFISLGNVSNGGRILCMQVWPDYGTKKFQTLSYLPQLTTEDLLKQMDSLLCNRWIP

SEQ ID NO: 13907 - protein, 1357 aa, Pseudomonas putida KT2440
MPGQPAPFCVFHRSPPMANSEVRSVCPYCGVGCGIVMSVADGKVGKISGDKLHPSNFGRLCTKGLTAHQPLSASGRMADAYLRQQRSQPPVRTSMDQAIAATAERLRGIIDQHGPDAVALYVSGQMSLEAQYLANKLAKGFIRTRHIESNSRLCMASASSGYKLSLGADGPPGSYQDFEHADVFLVIGANMADCHPILFLRLLDRVKAGAKLIVVDPRRSATADKADLFLQVRPGSDMALLNGLLHLLHRNGHTNPDFIARHTEGWDEMPAFLDDYTPERVAAITGLAEADIIKAAEWIGSANNWMSCWTMGLNQSIHGTWHSNAICNLHLATGAICRPGSGPFSLTGQPNAMGGRDMGYMGPGLPGQRSALVEDDRAFVERQWQLPPGSLRSEGGEGTVALFGQMKAGEVKACWVICSNPVASVANRQQVIDGLRKAELVITQDAFLDTETNRYADILLPAALWAEGEGVMINSERNLTLMPRAVEPPGQSLPDWQIIARVACAMGYADAFDYPNAEAVYEEIRRFHNPSTGYDLRGIGYAELRTQPRQWPCAPGSEQHRSPLRYLNDGSSQALLLDARGRRPALAFPTASGKAHFFARPWLPAAEVPDDDYPMVLNTGRVQHQWHTLTKTGKVPALNKLEPGPYLEIHPEDAARLGVAEKDQVAVRSRRGQAVLPARISDRVMPGNCFAPFHWNDLIGEQLAINAATCDAVDPLSLQPAFKHCAVALERVAGERIDALDLNTATVEPVRMPTATLSRLLGLHTLPVPVLAEEERHYLQGFLLGLDQARAEGVPRLPASAPLAASRRLFVDGLLAGLFAQPATAPIAAQAAPWHQVLWASQTGNGEQLAERCAARLRGAGLNVQLSCLEAVSPSQLQGAASVVLIASTFGDGDAPDSGAAFWQALQGEEGAHCAGLPYAVLALGDSSYDQFCGFGRKLDQRLAELGGHRLLARVDCEPDFDEAFAGWLEALLPALGTAAAPSPASEPAPVSAFSKQQPWMATVLENRLLNGPGASKETRQLVFDLGGSGFSYAAGDALGVWPRNCPALVEELLTLMQLDGQAMVELKGHSTMPLAEALRAHLEIAKVTAQQLQAFASNAPDLQRLLQPECKAELQDWLWGRQLVDVLRAFPQQLPLASWLELLKPLQPRLYSISSSPLAHPGQVHLTVSTVRYGERKGVCSSFLADRAQVQKVAIFPQVSKHFRLPEDDSVPVIMVGPGTGIAPFRAFLEEREARGAKGDNWLFFGEQYAATDFYYQEQLQAWQAAGHLRLDTAFSRDQVEKIYVQQRMLEQGALLWQWLEAGAYFYVCGDAQRMARDVDAALRVIVAEHGRMDAAAAAAYVEGLSKARRYRRDVY

SEQ ID NO: 13908 - protein, 267 aa, Pseudomonas putida KT2440
MSVPSFGLGTFRLTGQTVIDSVKSALAVGYRVIDTAQIYKNEAEVGQAIAESGVPRSELFITTKIWVDNYAADKLIPSLRDSLQKLRTDYVDLLLIHWPAPGNGVELPEYMKALADAKQQGLARQIGVSNFNIELTRQAIAVVGKGEIATNQIELSPYLQNSKLTAFLKEQGITVTSYMTLAYGKVLKDPVLAQIAAKHKATVAQVALAWALQLGYAVIPSSTKRENLASNLLARGLTLDTDDMARIAKLERNGREVSPDGLAPTWD

SEQ ID NO: 13909 - protein, 160 aa, Pyrococcus furiosus DSM 3638
MKKKYKKVVVGGTFDRLHLGHKALLRKAFEVGEIVYIGLTSDEMIKEKQYSERILPYEKRLLDLIKFLEVNKYRNYRIMKIHNAIGFTTKIKSLEAIVVSEETYKGAVLVNKAREELGLRPLDIVVIPIIRSRLGCKISSSLIRAGLIDPFGNPIRREEK

SEQ ID NO: 13910 - protein, 236 aa, Triticum aestivum
  unsure (1)..(236): unsure at all Xaa locations
MAATIQSVKARQIFDSRGNPTVEVDVCCSDGTFARAAVPSGASTGVYEALELRDGGSDYLGKGVSKAVNNVNSIIAPALVGKDPTAQTELDNFMVQQLDGTKNEWGWCKQKLGANAILAVSLAVCKAGASVKKIPLYQHIANLAGNKQLVLPVPAFNVINGGSHAGNKLAMQEFMILSTGATSFXGGMKMGREVYXNLKSVIKEEXTXQDATNVXNEVVLLLNLRETKEGLELLNT

SEQ ID NO: 13911 - protein, 236 aa, Triticum aestivum
  unsure (1)..(236): unsure at all Xaa locations
MDPDMGENFAYYWETQRYLESEELVDSIFVGATEDAISYYDSSSPDGSHSSSTPMGAAMPGAGMGMSGTGANKNILMERXDRRRKLNEKLYTLRSVVPNITKMDKASIIKDAIEYIQQLHAEERQMEAEVSALESATGAEDDYDGGLSVDQVSSAQRKKVKRALSVSSMNDALLAAAAAVASPPVEVLELRVSEVSEKVLVVSVTCNRQRDALTKVCPALEELXRLRVITANITFV

SEQ ID NO: 13912 - protein, 344 aa, Vantanea guianensis
DLEPVNPADVPVTAAGALKSYKLAAKAISRLQSLPSGNISMLCDVLVKEVSDLTGYDRVMVYRFHEDEHGEVVAECHRPDLEPYLGLHYPATDIPQASRFLFMKNKVRMICDCLALPVKVIEDKRLAQPLSLCGSTLRSPHGCHAQYMADMGSIASLVMSVTINEDDDEMDSDQQTGRKLWGLVVCHHTSPRFVPFPLRYACEFLIQVFGVLINKEVELAAQMREKHILRTQTVLCDMLLRDAPVAIITQSPNVMDLVKCDGAALYYRNKFWLLGVTPTEAQVRDIAEWLLEYRRGSTGLSTDSLMEAGYPGASVLGNAVCGMAAVSITSKNFLFWFRSITSEF

SEQ ID NO: 13913 - protein, 568 aa, Xanthomonas axonopodis pv. citri str. 306
MSHSVEDIKSESRRLRGSLEQSLADAVTGALREDDQTLIKYHGSYQQDDRDIRDERRRQKLEPAYQFMIRTRTPGGVITPTQWLALDGIATRYANHSLRITTRQAFQFHGVIKRELKATMQAINATLIDTLAACGDVNRNVQVAANPLLSQAHATLYADAARVSEHLLPNTRAYYEIWLDEERVSGSGSEDEPIYGERYLPRKFKIGFAAPPLNDVDVFANDLGFIAILRDGQLLGYNVSIGGGMGASHGDAETWPRVANVIGFVTREQLLDIATAVVTTQRDFGNRAVRKRARFKYTIDDHGLDTIVAEIARRAGFALQPAQPFAFDHNGDRYGWVEGEDGLWHLTLSLPAGRIADTDTAAHLSGLRAIAQLNVGEFRMTPNQNLVIAGVLASERARVDALVAHYGLDAGNQSATALARGAMACVALPTCGLAMAEAERYLPDFGAALQPLLQQHGLAETPIVLRLSGCPNGCSRPYLAEIALVGKAPGRYNLMLGGDRRGQRLNTLYRENITEPEILAALEPLLARYAAERDHANDEGFGDFLHRAGVIALPPYPTHRRLDLELLA

SEQ ID NO: 13914 - protein, 315 aa, Staphylococcus epidermidis ATCC 12228
MRKVSYNEHGGPKVLEYSDNNEVPSIESNEILVKVISTSFNPADAMIREGMLKDVLPIAFPFTPNVDVAGKIEKVGPDVKNFNVGDNIIGFLNMHENGAAADYVVTHPENLVLAPSNISIEDSGVIPSVSLTAWQALFDHYHLQSNDRILITGAAGGVGTFAVQLAKDRGAYVIGTASERSYELLQDINIDEIINYKTEEVTKDRTGKLDYILNLAPISSEGLEQLLPLLKKGGTLVSTLNTVTDQALDKYDVNVVRMAVTMNQEELDQIVNKIDNGNIKPIITKRDTLENLQMIHENRNDYNGKVLITVNEKND

SEQ ID NO: 13915 - protein, 267 aa, Triticum aestivum
MDPKLVEVTQLFDRFKAAFKASNFDVCSTLLSQLKVLLTKFPSLPPLFQQTPNAVEELKLAREIYEQAVILSVKMEDQDAFERDFCQLKPYYMDTCGIIPPSSEEYPIMGANLLRLLVQNRIAEFHTELELLPAKALDNAYIKHGVELEQSFMEGAYNRVLSARQTAPHETYIYFMDLLVKTVRDEIAGCSEKGYDYLSINDAKQMFKFSSDKELEQYIAEEHPEWDVKDGRVLFQKVKESQPCKEIPAAPVINQTLGYARELERIV

SEQ ID NO: 13916 - protein, 484 aa, Vibrio cholerae O1 biovar eltor str. N16961
MKQIHVDVAVIGGGTAGLGAYRAAKAYTPNVVMIEGGPYGTTCARVGCMPSKLLIAAAESVHQIEKAPGFGVYPQGEIVINGREVMDRVKRERDRFVGFVLEGVDSIPEQDKITGYAKFIDNHTLQVDDHTRIHAKRIVIATGSRPAYPAVWNELGDRLVVNDDVFEWDDLPQAVAVFGPGVIGLELGQSLHRLGVKVKVFGLGGQVGPLTDPDVMAYANRAFQQEFYLDADVKVESMKRIAGDKVEIQFINQQGELETFIVDYVLAATGRRPNVDKLALDNTDVALDERGVPKADHYTLQTSVPSIFIAGDASNQIPLLHEAADQGRIAGDNAGRFPDIRAGLRRSPISAVFSDPQIAMVGETYKQLTQRLGNCGCFAVGEVSFENQGRSRVMLRNKGLLHVYGEQGTGRFLGAEMMGPNAEHLAHLLAWAHQNQMTISQMLDMPFYHPVIEEGVRTALRDLNAKLHLGPEMIKHCLDCGPGC

SEQ ID NO: 13917 - protein, 199 aa, Brassica napus
MSGSRFVKCVTVGDGAVGKTCLLISYTSNTFPTDYVPTVFDNFSANVVVNGATVNLGLWDTAGQEDYNRLRPLSYRGADVFILAFSLISKASYENVSKKWIPELKHYAPGVPIILVGSKLDLRDDKQFFVDHPGAVPITTAQGEELRKLIDAPTYIECSSKSQENVKAVFDAVIRVVLQPPKQKKKKSKTQKACSIPVI

SEQ ID NO: 13918 - protein, 651 aa, Pseudomonas fluorescens PfO-1
MSELIRVPDIGSGEGEVIELFVKVGDRIEADQSILTLESDKASMEVPAPKAGVIKSLKVKLGDRLKEGDELLELEVEGAAQAAPAPAAAPAAKAEAAPAAAPAPAAPAAAPAAASVQQVHVPDIGSSGKAQIIEIQVKVGDTVEADQSLITLESDKASMEIPSPAAGVVKAISVKLNDEVGTGDLILDLEVAGAAAPAAAAPAQAAAPAAAPAPAAAPAAPVADSVQDIHVPDIGSAGKAKIIEVLVKAGDSVEADQSLITLESDKASMEIPSPAAGVVESISIKLDDEVGTGDLILKLKVKGAAPAAAPAPAAAAAPSAPAPAAAPAAAAPAAAAPVAAPAKPGAKVHAGPAVRQLAREFGVELSAVGASGPHGRILKEDVQTYVKAMMQKAKEAPAAAAGATGGAGIPPIPVVDFSRFGEIEEVPMTRLMQVGAANLHRSWLNVPHVTQFDSADITELEAFRTAQKSVAEKAGVKLTILPLLLKSCAHLLKELPDFNSSLAPSGKAIIRKKYVNIGFAVDTPDGLLVPVIKNVDQKSLLQLAAEAASLAEKARTKKLSSDEMQGACFTISSLGHIGGTGFTPIVNAPEVAILGVSKATIQPVWDGKAFQPKLMLPLSLSYDHRVINGAAAARFTKRLSDLLADIRTILL

SEQ ID NO: 13919 - protein, 326 aa, Escherichia coli
KTFSEAIISGEWKGYTGKAITDVVNIGIGGSDLGPYMVTEALRPYKNHLNMHFVSNVDGTHIAEVLKKVNPETTLFLVASKTFTTQETMTNAHSARDWFLKAAGDEKHVAKHFAALSTNAKAVGEFGIDTANMFEFWDWVGGRYSLWSAIGLSIVLSIGFDNFVELLSGAHAMDKHFSTTPAEKNLPVLLALIGIWYNNFFGAETEAILPYDQYMHRFAAYFQQGNMESNGKYVDRNGNVVDYQTGPIIWGEPGTNGQHAFYQLIHQGTKMVPCDFIAPAITHNPLFDHHQKLLSKFFAQTEALAFGKSREVVEQEYCDQGKDPAT

SEQ ID NO: 13920 - protein, 167 aa, Neurospora crassa
MSSATTIYDFKPLDKKGSELPLSTYQGKVVLIVNVASKCGFTPQYAGLEKVYKEIKEKYPDDFEILAFPCNQFGGQEPGTEEEIQSFCQLNYGVSFPIMKKVEVNGDNADPLYEWMKNEKPGLMGLKRIKWNFEKFLIGKDGKVKGRWASTTKPESLKEAILKELGE

SEQ ID NO: 13921 - protein, 223 aa, Vibrio cholerae
AGSDLALYDIAPVTPGVAADLSHIPTPVTIKGYAGEDPTPALEGADVVLVSAGVARKPGMDRADLFNVNAGIVKALAEKIAVVCPKACVGIITNPVNTTVPIAAEVLKKAGVYDKRKLFGVTTLDVIRSETFVAALKDKDPGQVRVPVIGGHSGVTILPLLSQVEGVSFTDEEVAALTKRIQNAGTEVVEAKAGGGSATLSMGQAACRFGLALVKALQGESDV

SEQ ID NO: 13922 - protein, 107 aa, Lilium longiflorum
RAAPAQASMVAPFVGLKSSSAFPVTQKPATGLPTLPSNGGRVQCMKVWPIVGKKKFETLSYLPTLPVEALLKQIEYLIRSGWVPCLEFSLVGFVSRDYHQSPGYYDG

SEQ ID NO: 13923 - protein, 557 aa, Sinorhizobium meliloti 1021
MYRYDEFDHAFVSARVEQFRDQVQRRLSGELAEDAFKPLRLMNGVYLQLHAYMLRVAIPYGTLSSRQMRMLAHIARKYDRGYGHFTTRQNIQYNWPRLSDTPDILQELASVEMHALQTSGNCIRNVTADHFAGAAADEVADPRPYAEILRQWSSVHPEFSFLPRKFKIAVTGAERDRAAIQVHDIGLHLKKDENGKLGFAVYVGGGQGRTPLIAKKIRDFLPEEDLLSYTTAIMRVYNLHGRRDNKYKARIKILVHETGAEELARQVELEFANLKDTELKLPDADIQAIAAYFAPATLPNRTEGWGSLARWKKADPEFARWVHQNVQPHKHPDYGMVTISLKPIGGIPGDASHEQMDAVADIAEEYAFDEIRVSHEQNLILPHVALADLEPVYRALVAAGLATANAGLITDIIACPGLDYCALANARSIPVAQEISNRFGSPERQAEIGELKIKISGCINACGHHHVGHIGLLGVEKKGAELYQITLGGSGDEHTSIGEIIGRGFEPERVTDAVETIVDTYLGLRRDKSETFLEAYRRVGPQPFKDALYGGGAQAAA

SEQ ID NO: 13924 - protein, 204 aa, Vibrio mimicus
AGSDLALYDIAPVTPGVAADLSHIPTPVTIKGYAGEDPTPALEGADVVLVSAGVARKPGMDRADLFNVNAGIVKALAETIAVVCPKACVGIITNPVNTTVPIAAEVLKKAGVYDKRKLFGVTTLDVIRSETFVAALKDKDPGQVRVPVIGGHSGVTILPLLSQVEGVTFTDEEVAVLTKRIQNAGTEVVEAKRGGGSATLSMGQ

SEQ ID NO: 13925 - protein, 291 aa, Oenococcus oeni PSU-1
MVQKVKKAVIPAAGLGTRFLPATKALAKEMLPIVDTPTIQFIVEEAIQSGIEDIVIVDGKSKRSIEDHFDSNTELEDNLSAKGKDKLLKLVQDTTDLNIYFIRQSHPHGLGDAVLKAKSFISNEPFVVMLGDDLMTDRVPLTKQLVDRYNETEQSTLAVMPVPHEETSKYGVIDPSKEVKPGLFEVKNFVEKPRPQDAPSDLAIIGRYLFTPTIFSELENTMPGKGNEIQLTDAIESLNHKEHVYAHQFDGKRYDIGSKIGFLETNIEFGLKHPDTGDELRKYIKELAKTL

SEQ ID NO: 13926 - protein, 402 aa, Bordetella parapertussis 12822
MDSILSFISGGLTQATWWQIVLFTLVVTHITIVSVTVFLHRSQAHRGLDLHPAVMHFFRFWLWMTTGMVTKEWVAIHRKHHAKCEKEGDPHSPMLFGIWKVLFRGAELYREESANKETMAKFGHGTPDDWLERNIYSKHSLAGVLTMLAIDLALFGAVGLTVWAVQMAWIPFWAAGVVNGIGHYWGYRNYNSPDTSTNVFPWGIIIGGEELHNNHHAHGTSAKFSAKWYELDIGWGYISILKFFGLAKVKKVAPKLKLESGSKGIDLSTLQGVITHRYEVMARYGDLVKRAAREELSKLKSSRQQDAANCRWTTLRRVRRWLHRNEEVLQPEQRAEVDQAIAQNQSLSTLVQMRRELGRLWESSSASSEQLLHDLQAWCQRAQQSGIAGLEQFALHLRRYAA

SEQ ID NO: 13927 - protein, 315 aa, Haemophilus ducreyi 35000HP
MNQLDALREMTVVVADTGDIEAIRQYQPQDATTNPSLILSASALSQYAPLIDDAIRYAKSKSGNKAQQLVDAEDKLAVNIGLEILKIVPGRISTEVDARFSYDTEKTIAKARKLIGLYNEAGVANNRILIKIAATWQGIRAAEILEKEGINCNLTLLFSQAQARACAEAGVYLISPFVGRILDWYKANEKKEYAAAEDPGVISVTAIYNYYKQYNYKTIVMGASFRNVGEITEIAGCDRLTIAPPLLKALAESNETLVRKLDYQGEILDRPAPLSEAEFYWQHNQDPMAVDKLAEGIRKFAIDQEKLEEMLSAKL

SEQ ID NO: 13928 - protein, 140 aa, Bordetella parapertussis 12822
MRRAALLLGLWLLLGAPAAADIAQRELRLAHSLRCLVCQNQTLAESNAPLAHDMRALIRQQLADGRSDEEVMQFFEDRYGDFVRYEPPFKPATWLLWLGPFALLLAGFVVLWRALARRPGAAPLTDAQRARAERFLDEES

SEQ ID NO: 13929 - protein, 254 aa, Caulobacter crescentus CB15
MSLFDLTGKVAIITGSSRGIGKAIAERMAEHGAKVVISSRKAGPCEEVASELNAKHGAGTAIAVPANIASKDELQNLVDETRKAFGKIDICVCNAASNPYYGPLAGIADDQFRKILDNNIISNHWLIGMVAPEMQARKDGSIIIISSIGGLRGNAIIGAYNISKAADFQLARNLAHEFGPDNVRVNCIAPGLIKTDFAKALWDNPETLKRSTTAVPLRRIGEPDEIAGAAVYLASKAGSFMTGQAMVVDGGATI

SEQ ID NO: 13930 - protein, 349 aa, Methanothermobacter thermautotrophicus str. Delta H
MILMAGIVGYGVYIPSYRIKVEEIARVWGDDPQAISRGLVVEEKSVPGPDEDTATISVEAARNALRRSQIDPSEIGAVYVGSESHPYAVKPTATIVAEAVEATPEMTAADLEFACKAGTAGIQACMGLVDSGIIKYGLAVGADTAQGAPGDALEYTASAGGAAYVIGGKNCLADIKETYSFTTDTPDFYRREGMPYPRHGGRFTGEPAYFKHVLGAARGMMEKTGLSADDFDYAVFHQPNGKFYLKAARKLGFESEQVKPGLLTPVIGNTYSGATPVGLAATLDVAEPGARILAVSYGSGAGSDAFIIEVNDLIEERRDLAPSVAEIIKNKRYVDYALYAKFKGKLRMA

SEQ ID NO: 13931 - protein, 299 aa, Ralstonia metallidurans CH34
MENRVTKAVFPVAGLGTRFLPATKASPKEMLPVVDKPLIQYAVEEAMAAGITEMIFVTGRSKRAIEDHFDKAYELEAELEAKNKQALLDVVRSIKPANVECYYVRQPEALGLGHAVLCAAKLVGDTPFAVMLADDLLDGGKDLPVMKQMVDIYNHYNCSVLGVEEIAPEQSRSYGVIDGREWDDRVIKMSAIVEKPAPEKAPSNLGVVGRYILTPRIFDHIRELKPGAGGEIQLTDAIQSMLDQEQVLAYRYKGVRYDCGSKLGYLKATVEFALRHPEVRDEFSAYLSQRCTSPSSVPA

SEQ ID NO: 13932 - protein, 753 aa, Escherichia coli O157:H7 EDL933
  unsure (1)..(753): unsure at all Xaa locations
MSQQNEKNPHQHQSPLHDSSEAKPGMDSLAPEDGSHRPAAEPTPPGAQPTASGSLKAPDTRNEKLNSLEDVRKGSENYALTTNQGVRIADDQNSLRAGSRGPTLLEDFILREKITHFDHERIPERIVHARGSAAHGYFQPYKSLSDITKADFLSDPNKITPVFVRFSTVQGGAGSADTVRDIRGFATKFYTEEGIFDLVGNNTPIFFIQDAHKFPDFVHAVKPEPHWAIPQGQSAHDTFWDYVSLQPETLHNVMWAMSDRGIPRSYRTMEGFGIHTFRLINAEGKATFVRFHWKPLAGKASLVWDEAQKLTGRDPDFHRRELWEAIEAGDFPEYELGFQLIPEEDEFKFDFDLLDPTKLIPEELVPVQRVGKMVLNRNPDNFFAENEQAAFHPGHIVPGLDFTNDPLLQGRLFSYTDTQISRLGGPNFHEIPINRPTCPYHNFQRDGMHRMGIDTNPANYEPNSINDNWPRETPPGPKRGGFESYQERVEGNKVRERSPSFGEYYSHPRLFWLSQTPFEQRHIVDGFSFELSKVVRPYIRERVVDQLAHIDLTLAQAVAKNLGIELTDDQLNITPPPDVNGLKKDPSLSLYAIPDGDVKGRVVAILLNDEVRSADLLAILXALKAKGVHAKLLYSRMGEVTADDGTVLPIAATFAGAPSLTVDAVIVPCGNIADIADNGDANYYLMEAYKHLKPIALAGDARKFKATIKVADQGEEGIVEADSADGSFMDELLTLMAAHRVWSRIPKIDKIPA

SEQ ID NO: 13933 - protein, 379 aa, Oryza sativa
  unsure (1)..(379): unsure at all Xaa locations
MAAEAAPEWVEKGDNAWPLAAATLVGLQSVPRLVILYGDCGAVKNLVRLRRGARSSAGAPGPSACRSATSSHPFVGRPDLSGLDQAGFLSRRGFAGAYHDXLFDRRHAWLECDGDGAMHHGQVGPRTEKDREAFPPNNVLLTLAGAGLLLWMGWTGFNGGAPYAANVDASVTVVNTHLCTATSLLVWLLLDSFVFGRLSVISAVQGMITGLVCVTPAARLVLHKRSRLLARVDDTLAVLHTHGVAGSLSGVLTGLLLLAEPRFARLFFGDDPRYVGLAYAVRDGRAGSGLRQVGVQLAGIAFVVALNVAVTSAVCLAVRVAVPQLAGGGDAIHGEDAYAVWGDGETYEQYSVHGGGSNHGGFPMTANPVASKADEMIWI

SEQ ID NO: 13934 - protein, 195 aa, Zea perennis
APLDKVCILSCGISTGLGASINVAKPPKGSTVAVFGLGAVGLAAAEGARIAGASRIIGVDLNPSRFEEARKFGCTEFVNPKDHNKPVQEVLAEMTNGGVDRSVECTGNINAMIQAFECVHDGWGVAVLVGVPHKDAEFKTHPMNFLNERTLKGTFFGNYKPRTDLPNVVELYMKKELEVEKFITHSVPFAEINKA

SEQ ID NO: 13935 - protein, 352 aa, Vitis vinifera
MKASLFRSAETALRRVSSPSASSHLLRRSYCVESKPERKVAVLGAAGGIGQPLALLMKLNPLVSSLSLYDIAGTPGVAADVSHINTRSQVAGYMGDDQLGQALEGADLVIIPAGVPRKPGMTRDDLFNINAGIVKSLCTAIAKYCPNALVNMISNPVNSTVPIAAEVFKKAGTYDEKKLFGVTTLDVVRAKTFYAGKAKVPVAEANVPVVGGHAGITILPLFSQATPKSNNLSDEDIVALTKRTQDGGTEVVEAKAGKGSATLSMAYAGAVFADACLKVLNGVPDVVECSFVQSTIVPDLPYFASKVKLGKNGVEEVLGLGPLSDYEKQGLESLKHELKASIEKGIKFATQS

SEQ ID NO: 13936 - protein, 195 aa, Zea perennis
APLDKVCVLSCGISTGLDASINVAKPPKGSTVAVFGLGAVGLAAAEGARIAGASRIIGVDLNPSRFEEAMKFGCTEFVNPKDHNKPVQEVLAEMTNGGVDRSVECTGNINAMIQAFECVHDGWGVAVLVGVPHKDAEFKTHPMNFLNERTLKGTFFGNYKPRTDLPNVVELYMKKELEVEKFITHSVPFAEINKA

SEQ ID NO: 13937 - protein, 197 aa, Brassica napus
MSASRFIKCVTVGDGAVGKTCLLISYTSNTFPTDYVPTVFDNFSANVVVNGATVNLGLWDTAGQEDYNRLRPLSYRGADVFILAFSLISKASYENVSKKWIPELKHYAPGVPVILVGSKLDLRDDKQFFVDHPGAVPITTAQGEELRKLIDAPTYIECSSKSQENVKAVFDAAIRVVLQPPKQKKKKSKAQKACSIQ

SEQ ID NO: 13938 - protein, 118 aa, Triticum aestivum
  unsure (1)..(118): unsure at all Xaa locations
MGGGGGTEEELTAQETALYDRQIRVWGVDAQKRLSKAHVLVCGVNGTTIEFCKNIVLAGVGSLSLMDDHIVTEDDLSANFLIPHDICMHGVSSRAEACCESLKDFNPMVRVAXAIGDP

SEQ ID NO: 13939 - protein, 197 aa, Brassica napus
MSGFRFVKCVTVGDGAVGKTCLLISYTSNTFPTDYVPTVFDNFSANVVVNGATVNLGLWDTAGQEDYNRLRPLSYRGADVFILAFSLISKASYENVSKKWIPELKHYAPGVPIILVGSKLDLRDDKQFFVDHPGAVPITTAQGEELRKLIDAPTYIECSSKSQENVKAVFDAAIRVVLQPPKQKKKKSKAQKACSIQ

SEQ ID NO: 13940 - protein, 131 aa, Triticum aestivum
  unsure (1)..(131): unsure at all Xaa locations
MAPTVMASSGTSVAPFQGLKSTAXLPVSRRSNXASLGSVSNGGRIRCMQVWPIEGIKKFETLSYLPPLSTEALLKQVDYLIRSKWVPCLEFSKVGFIFREHNASPGYYDGRYWXTMWKLAMFGCTDATQSD

SEQ ID NO: 13941 - protein, 326 aa, Escherichia coli
KTFSEAIISGEWKGYTGKAITDVLNIGIGGSDLGPYMVTEALRPYKNHLNMHFVSNVDGTHIAEVLKKVNPETTLFLVASKTFTTQETMTNAHSARDWFLKAAGDEKHVAKHFAALSTNAKAVGEFGIDTANMFEFWDWVGGRYSLWSAIGLSIVLSIGFDNFVELLSGAHAMDKHFSTTPAEKNLPVLLALVGIWYNNFFGAETEAILPYDQYMHRFAAYFQQGNMESNGKYVDRNGNVVDYQTGPIIWGEPGTNGQHAFYQLIHQGTKMVPCDFIAPAITHNPLFDHHQKLLFKFFAQTEALAFGKSREVVEQEYCDQGKDPAT

SEQ ID NO: 13942 - protein, 213 aa, Vibrio mimicus
AGSDLALYDIAPVTPGVAADLSHIPTPVTIKGYAGEDPTPALEGADVVLVSAGVARKPGMDRADLFNVNAGIVKALAETIAVVCPKACVGIITNPVNTTVPIAAEVLKKAGVYDKRKLFGVTTLDVIRSETFVAALKDKDPGQVRVPVIGGHSGVTILPLLSQVEGVTFTDEEVAALTKRIQNAGTEVVEAKRGGGSATLSMGQAACRFGLPL

SEQ ID NO: 13943 - protein, 197 aa, Brassica napus
MSASRFIKCVTVGDGAVGKTCLLISYTSNTFPTDYVPTVFDNFSANVVVNGATVNLGLWDTAGQEDYNRLRPLSYRGADVFILAFSLISKASYENVSKKWIPELTHYAPGVPIVLVGTKLDLRDDKQFFVDHPGAVPITTSQGEELMKLIGAPSYIECSSKSQENVKGVFDAAIRVVLQPPKQKKKKSKAQKACSIL

SEQ ID NO: 13944 - protein, 297 aa, Zea mays
MAAAAVTSNGGAVAANGPAPGRLASVYSEVQTSRLLHTLPLPSVLRSNFSVVDGPASSAAGNPDEIAKLLPNLVGQPSASLVPTAEPAATRPLKIGVVLSGGQAPGGHNVICGIFDYLQERAKGSTLYGFKGGPAGIMKCKYVELTSDFVYPYRNQGGFDMICSGRDKIETPEQFKQAEDTANKLDLDGLVVIGGDDSNTNACLLGEYFRSRNMKTRVIGCPKTIDGDLKCKGVPTSFGFDTACKIYSEMIGNVMTDARSTGKYYHFVRLMGRAASHITLECALQTHPNAALIGEEV

SEQ ID NO: 13945 - protein, 250 aa, Coxiella burnetii RSA 493
MNETEKSTHFGYQTVPTDQKTDKVKHVFESVAAKYDLMNDLMSLGIHRWWKDFAITQCRLRTGQRILDLAGGTGDLAKRISPLVGDEGEVVIADINAAMLNVGRRRLLDQGIFRNIQFIQADAEKLPFPNNFFDRIVIGFGLRNVTNQLAALQSMHRVIKPGGFVVILEFSKPTLAPLKAVYDAYSFQLLPRLGKLVAKDEESYRYLVESIRMHPDQEALLSKMTDAGFEDCDYHNLSGGIVAVHRGYKF

SEQ ID NO: 13946 - protein, 342 aa, Malassezia furfur
MFARAALRNSVRAPASARYFSQTAAANRKVAVLGASGGIGQPLSLLMKLNPKVTELRLYDIRLAPGVAADLSHINTPAVTSGYAQDDLEGAVDGAEIVLIPAGMPRKPGMTRDDLFNSNASIVRDLAKVVAKVAPKAYIGVISNPVNSTVPIVAEVFKKAGVYDPKRLFGVTTLDTTRAATFLSGIAGSDPQTTNVPVIGGHSGVTIVPLISQAAQGDKVQAGEQYDKLVHRIQFGGDEVVKAKDGAGSATLSMAYAAAVFTEGLLKGLDGEAVTQCTFVESPLFKDQVDFFASPVEFGPEGVKNIPALPKLTAEEQKLLDACLPDLAKNIKKGVAWAAENP

SEQ ID NO: 13947 - protein, 339 aa, Shigella flexneri 2a str. 301
MSMIKSYAAKEAGGELEVYEYDPGELKPQDVEVQVDYCGICHSDLSMIDNEWGFSQYPLVAGHEVIGRVVALGSAAQDKGLQVGQRVGIGWTARSCGHCDACISGNQINCEQGAVPTIMNRGGFAEKLRADWQWVIPLPENIDIESAGPLLCGGITVFKPLLMHHITATSRVGVIGIGGLGHIAIKLLHAMGCEVTAFSSNPAKEQEVLAMGADKVVNSRDPQALKALSGQFDLIINTVNVSLDWQPYFEALTYGGNFHTVGAVLTPLSVPAFTLIAGDRSISGSATGTPYELRKLMRFAARSKVAPTTELFPMSKINDAIQHVRDGKARYRVVLKADF

SEQ ID NO: 13948 - protein, 326 aa, Escherichia coli
KTFSEAIISGEWKGYTGKAITDVLNIGIGGSDLGPYMVTEALRPYKNHLNMHFVSNVDGTHIAEVLKKVNPETTLFLVASKTFTTQETMTNAHSARDWFLKAAGDEKHVAKHFAALSTNAKAVGEFGIDTANMFEFWDWVGGRYSLWSAIGLSIVLSIGFDNFVELLSGAHAMDKHFSTTPAEKNLPVLLALIGIWYNNFFGAETEAILPYDQYMHRFAAYFQQGNMESNGKYVDRNGKVVDYQTGPIIWGEPGTNGQHAFYQLIHQGTKMVPCDFIAPAITHNPLFDHHQKLLFKFFAQTEALAFGKSREVVEQEYCDQGKDPAT

SEQ ID NO: 13949 - protein, 396 aa, Mesorhizobium loti MAFF303099
MLAHRTNLFGTSGTAAARAAAKAAADAGKEIIDLTAGEIWSELAPTIRDGAIDAINKGVNRYTDTVGMVELREALARKISLDTGQIWKAEEVAVTSGAKQALFNAAMVLLNPGDEVIIPAPYWTTFPAQVLIAGGTPVFVDTRSNGYVPRPEHIKEAVTERTRAIVVNTPSNPAGAVYDVETLMAIAQLAVSHNLWIIFDECYGDFVHEDHTHHPIVSVAPEIRARALIVSSFSKSLALTGWRIGYLAGPKEVINAVNALQSHTTSNPNVIAQHAVLAHLQRGGSDYEGKLRSRLTSARRIGLDVLAWLTRVPVPRAQGGFYFYLDLSHLLRSASEDGASTTADDIVTALLAETGVAAVSGAAFGDPAGLRLSYGIPSEKLATGLARLVEFLNSWK

SEQ ID NO: 13950 - protein, 427 aa, Oryza sativa
MEGGRGGKRWRFATPNLAVAAAGERSIQRYLLQLHACLDENGPRPVIPLSHGDPSSSACFRTAPEAEEAVAAAVRSGDYNGYSSPATSLPARRSAIAEYLSCDLPYKLCTDDIFLTSGGTQAIEIVMSVFGQPGANILLPKPGYPKHEAHAVFHRMEVRLYDLVPERGWEINVEAVEALADENTVAIVITNPNNPCGNVYTYEHLSKIADTASKFGLLVIADEVYGHLVYGSTPFVPMGVFGETVPVLTLGAISKRWVVPGWRFGWIAICDPKGILKETKVVDSLRSFRNLTTGPATFIQGAIPHIMKNTNDEFFRKTLELLKETAEICFGEIKEIKCITCPHKPEGSFFMMVKLDISQLSDICDDIDFCSKLVKEESVVLLPGRALGMENWLRITFALDPPRLKQGLERVKSFCRRHQSHANMLNI

SEQ ID NO: 13951 - protein, 404 aa, Bordetella parapertussis 12822
MLKSCPMNPRLDALHPYPFEKLRALLADAGKPTHDLPPINLSIGEPKHAAPACVGQAIAANLAGLSVYPSTKGEPALRQAISQWLSRRYSIPAPDPESEVLPVLGSREALFAFAQTVIDPSAGALVVCPNPFYQIYEGAALLAGATPYYVNADPARDFGCDWARVPDEVWRRTQLVFVCSPGNPAGNVMSLEEWRTLFELSDRHGFVIAADECYSEIYLDEDNPPLGSLQAARRLGRDRYTNLVAFSSLSKRSNVPGMRSGFVAGDAALLARFLLYRTYHGSAMSPVVSAASIAAWSDETHVQENRRQYRAKFEAVLPILQNVLDVRAPQASFYLWAGTPGSDTAFARELYGRTGVTVLPGSLLAREAHNANPGQGRIRIALVAPLDQCVQAAERIAHFARTSI

SEQ ID NO: 13952 - protein, 630 aa, Mesorhizobium loti MAFF303099
MCGIFGIVLKNEGTPVCAAAVERCADALAHRGPDASGLYINQSVAFAHRRLSIVDAHSRANQPYRDANTGVVVTYNGEIFNYREIRTELRDMGFFFSTVSDTEVLILSYIAWGKSFLNRLDGIFAFALFDPRNSLVLIARDRLGVKPLYYTICDVGLLFASQPNALIRWPGVMRGPDMIGALSFLSYRAVVGARTLFAGISKLEPGHLLEIRNGRHTSERWWNLSERISRCKPDYSDIRRLLGSAVERQLVADVPVAALLSGGLDSSILAYEASARSQIRPICYTGKVETADYDETAYAMEVAAEFGLTHRVVPIGEPSDIYAVSELVRLRGHPLGMHNEIAMFTLAKAISKEHKVVLTGEGADEIFAGYSRLFRTPYDYNRSKIIAALPRALAQVARRRLGLDVHGSQLQFFLARYSYFPTDEIRSLVIDGRVRREHEMALFDHFSTQFAEAGGDFFSKISYVLVSTHLPALLEMVDNTTMAAGLEARVPYTDHQLVTAAMAMPGSQRLRWRSPIASVQALWHPVASFSERLDVSKFPLRREYRSVLPRSVLSRKKMGFPLPLGQWAVGEGATEYRRLLFDKDSPLGDLFDPAALRRWFEAGRRNPSDSFGRKFWLLANLGIFFKEVFS

SEQ ID NO: 13953 - protein, 831 aa, Bordetella parapertussis 12822
MSMARRDFIKQTAAAAAATVAGVPLTGYTQNIVTESEAAKLKWSKAPCRFCGTGCGVNVAVKDNQVVATHGDFNAEVNKGLNCVKGYFLSKIMYGSDRLTQPLLRIKDGKYAKDGEFAPVSWDQAFDVMAEQFKRVLKDKGPEAVGMFGSGQWTVWEGYAALKLMKAGFRTNNLDPNARHCMASAAVGFMRTFGADEPMGCYDDIENADAFVLWGSNMAEMHPILWTRVTDRRLSAPATKVAVLSTFEHRSYELADLTLTFEPQSDLAILNYIANHIIRTKRVNRDFVDKHTVFREGNADIGYGLRPEHPLQQAARNAGDAGGSKPITFDDFARFVSKYDLEYTAKLSGVPKNRLEELAELYADPKVRVTSFWTMGFNQHTRGVWCNNMVYNIHLLTGKISTPGNSPFSLTGQPSACGTAREVGTFSHRLPADLVVTNPEHRRHAEEIWKLPDGTIPSKVGAHAVLQNRMLKDGKINAYWVMVNNNMQAAANLMNEGLPGYRNPENFIVVSDAYPTVTTLSADLILPAAMWVEKEGAYGNAERRTQFWHQLVDAPGQARSDLWQLVEFSKRFKVEEVWPADLLAKKPEYRGKTLYDVLFANGKVNQFPNTELDPEYANQEAQAFGFYLQKGLFEEYAEFGRGHGHDLAPFDVYHKARGLRWPVVDGKETLWRYREGSDPYVKPGTGFQFYGNPDGKAVIFALPYEPPPEAPDKEYPFWLSTGRVLEHWHSGSMTRRVPELYKAFPEAVCFMHPDDAQALGVRRGVEVEVVSRRGKMRTRVETRGRDKPPRGLVFVPWFDAGQLINKVTLDATDPISFQTDFKKCAVKIVKV

SEQ ID NO: 13954 - protein, 482 aa, Pseudomonas aeruginosa PAO1
MEEKTRLTTAAGAPVVDNQNVQTAGPRGPMLLQDVWFLEKLAHFDREVIPERRMHAKGSAAYGTFTVTHDITPYTRAKIFSQVGKKTDMFLRFSTVAGERGAADAERDIRGFSMRFYTEQGNWDLVGNNTPVFYLRDPLKFPDLNHVVKRDPRTNLRNATFKWDFFSHLPESLHQLTIDFSDRGLPKSYRHIHGFGSHTFSFINANNERFWVKFHFKTQQGIENLTNAEAAEVIAQDRESSQRDLYESIEKGDFPRWKMYVQIMPEKEAATYRYNPFDLTKVWPHGDYPLIEVGFFELNRNPDNYFAEVEQAAFTPANVVPGIGFSPDKMLQGRLFSYGDAHRYRLGVNHHQIPVNAARCPHQVYHRDGGMRVDGNNAHQRVTYEPNSFNQWQEQPDFSEPPLSLEGAADHWNHRVDDDYYSQPAALFHLFTDEQKQRLFANIAEDIRDVPEQIQRRQIGLFLKVDPAYGKGVADALGLKLD

SEQ ID NO: 13955 - protein, 520 aa, Arabidopsis thaliana
MASVSAIGVLKVPPASTSNSTGKATEAVPTRTLSFSSSVTSSDDKISLKSTVSRLCKSVVRRNPIIVSPKAVSDSQNSQTCLDPDASSSVLGIILGGGAGTRLYPLTKKRAKPAVPLGANYRLIDIPVSNCLNSNISKIYVLTQFNSASLNRHLSRAYASNMGGYKNEGFVEVLAAQQSPENPNWFQGTADAVTDYLWLFEEHNVLEYLILAGDHLYRMDYEKFIQAHRETDADITVAALPMDEQRATAFGLMKIDEEGRIIEFSEKPKGEHLKAMKVDTTILGLDDQRAKEMPFIASMGIYVVSRDVMLDLLRNQFPGANDFGSEVIPGATSLGLRVQAYLYDGYWEDIGTIEAFYNANLGITKKPVPDFSFYDRSAPIYTQPRYLPPSKMLDADVTDSVIGEGCVIKNCKIHHSVVGLRSCISEGAIIEDSLLMGADYYETATEKSLLAAKGSVPIGIGKNSHIKRAIIDKNSRIGDNVKIINSDNVQEAARETDGYFIKSGIVTVIKDALIPTGTVI

SEQ ID NO: 13956 - protein, 195 aa, Zea perennis
APLDKVCVLSCGISTGLGASINVAKPPKGSTVAVFGLGAVGLAAAEGARIAGASRIIGVDLNPSRFEEARKFGCTEFVNPKEHNKPVQEVLAEMTNGGVDRSVECTGNINAMIQAFECVHDGWGVAVLVGVPHKDAEFKTHPMNFLNERTLKGTFFGNYKPRTDLPNVVELYMKKELEVEKFITHSVPFAEINKA

SEQ ID NO: 13957 - protein, 203 aa, Solanum demissum
MDILGNLYIDPLPLVIPTTTSSTTFDNNSNEKVMLLLASKIPKRRGDRKKFHETRHPVYRGVRWKNFEKWVSEVRVPAKKSRIWLGTFPNAEMAAKAHDVAVMALKGRSACLNFADSTWRLPVPASAAVKDIQKAAAEAAEAFRVSESLERENSEEVVINNDDHYVVDSGWRLVIPASAVARDIQKAVAEAFCPSESSKGEYF

SEQ ID NO: 13958 - protein, 288 aa, Mycobacterium smegmatis
MRGIILAGGSGTRLHPLTIGVSKQLLPVYDKPLVYYPLSTLIMAGIRDILVITTPADAPAFRRLLGDGSDFGVNLSYAAQNEPEGLAQAFLIGADHIGNDTVALALGDNIFYGPGLGTSLRRFEHVSGGAIFAYWVANPSAYGVVEFDADGKAVSLEEKPKTPKSHYAVPGLYFYDNTVIDIARSLKKSARGEYEITEVNQIYLNRGQLSVEVLARGTAWLDTGTFDSLLDASDFVRTIELRQGLKVGAPEEIAWRAGFIDDDQLATRAKELLKSGYGHYLLQLLDRE

SEQ ID NO: 13959 - protein, 240 aa, Halobacterium sp. NRC-1
MQAVVLAAGEGTRLRPLTEDKPKGMVEIAGKPILTHCFEQLVALGAEKIVAIVGYRKQNIISHYGDEFDGVPITYAHQREQNGLAHALLKAEEHVNEDFMLMLGDNIFRANLEDVVNRQQEERADAAFLVEEVDWDEASRYGVCDTNDYGEIQEVVEKPDDPPSNLVMTGFYTFSPAIFQACKLVQPSDRAEYELSDAIDLLIKSGRTIDAIPMEGWRIDVGYPEDRDEAEERIDAVSNE

SEQ ID NO: 13960 - protein, 195 aa, Zea perennis
APLDKVCILSCGISTGLGASINVAKPPKGSTVAVFGLGAVGLAAAEGARIAGASRIIGVDLNPSRFEEARKFGCTEFVNPKDHIKPVQEVLAEMTNGGVDRSVECTGNINAMIQAFECVHDGWGVAVLVGVPHKDAEFKTHPMNFLNERTLKGTFFGNYKPRTDLPNVVELYMKKELEVEKFITHSVPFAEINKA

SEQ ID NO: 13961 - protein, 391 aa, Xanthomonas axonopodis pv. citri str. 306
MSIVRMTDLDLSGKRVLIRQDLNVPIDNGQITSEQRITASVPTIKLALEKGAAVMVTSHLGRPKEGSWTEEDSLAPVATRLAALLGVDVPLVRDWVDGVEVAPGQVVLLENCRMNVGEGKDDETLARKYAALCDVFVMDAFGTAHRAQASTHGVIRFAPVAAGGPLLMAELDALAKALDNPAKPLLAIVAGSKVSTKLELLSNLVNKVDQLIVGGGIANTFIAAAGHAVGKSLNEPDLIPTANRIVADAKARGAEIPLPTDVVVAKQFLPDAQASVKSLDAVDADDLILDIGPQTAQRYAELIASAGTVVWNGPVGVFEFESFSHGTETLARAIASSKAFSIAGGGDTLAAVDKYDIAQDVTYISTGGGAFLEFLEGKTLPAVAALQARGQ

SEQ ID NO: 13962 - protein, 303 aa, Rosa hybrid cultivar
TKLVCKMPSRLINWQVQFFGREWDFMDLYHLTLFLGVPFVCLLAPFQFTWGALWVAISLYLVSGMGVTISYHRNLAHQSFKVPKWLEYSLAYCAVLSLQGSPLEWVSTHRYHHQFTEKLRDPHSPNKGFWFSHLNWLFDYHSRFGSYDGQLMKNVGDLECQLYYRFLHYTYFLHSVLLGVALYVAGGLPFVIWGMGVRVVVISQVTFSINSICHTWGKQIWDTGDASKNNWLFGLLAFGEGWHNNHHAFEYSARQGLERWQIDTSWYVIKFFQVVGLATHVKLPTEIQKKRKALAKNSIMKDK

SEQ ID NO: 13963 - protein, 227 aa, Ipomoea batatas
MAREKIKIKKIDNITARQVTFSKRRRGLFKKAEELSVLCDADVALIIFSSTGKLFDYASSSMKGILERRNLHSKNLEKMDQPSLELQLVENANHSRLSKEIADMTHRLRQMRGEDLQGMSIEELQQLERSLETGLSRVIEKKGEKIMKEINELQQKGMNLMEEKERLTQQVMAISNGQRVTAVINSDNMLNEEGLSSESITNVCNSTSPPQDYDDSSDTSLKLGLPY

SEQ ID NO: 13964 - protein, 229 aa, Ipomoea batatas
MAREKIKIKKIDNITARQVTFSKRRRGLFKKAEELAVLCDADVALIVFSATGKLFEFASSNMKDILGKYELHSSNLDQATQPSRELQLENSLHVRLSKEVADKTRELRQMKGEELQGLSLEELQKLEKRLENGLTRVLETKGERVVTEIATLQRKGAELMKENKQLKEKMARVNGEKFPVIADVEAAGLIPEEGQSSESITTNVCSCNSGPPPEDDCSDTSLKLGLPIN

SEQ ID NO: 13965 - protein, 464 aa, Glycine max
  unsure (1)..(464): unsure at all Xaa locations
MASSFLSAASHAVSPSCSLSTTHKGKPMLGGNTLRFHKGPNSFSSSRSRGRISMAVAVNVSRFEGIPMAPPDPILGVSEAFKADNSDVKLNLGVGAYRTEELQPYVLNVVKKAENLMLERGDNKEYLPIEGLAAFNKATAELLLGADNPAIKQQRVATVQGLSGTGSLRLGAALIERYFPGAKVLISAPTWGNHKNIFNDASVPWSEYRYYDPKTVGLDFEGMIEDIKSAPEGSFILLHGCAHNPTGIDPTPEQWEKIADLIEEKNHIPFFDVAYQGFASGSLDEDSPSVRLLXARGIQVLGAQSYSKNLGLYAERIGAINVISSSPESAARETSQLKRIARPMYSNPPVHGARIVADVVGNPXVLFNEWKAEMEMMAGRIKNVRQQLYDSITSKDKSGKDWSFILKQIGMFSFTGLNKNQSDNMTNKWHVYMTKDGRISLAGLSLAKCEYLADAIIDSYHNVS

SEQ ID NO: 13966 - protein, 326 aa, Escherichia coli
KTFSEAIISGEWKGYTGKAITDVLNIGIGGSDLGPYMVTEALRPYKNHLNMHFVSNVDGTHIAEVLKKVNPETTLFLVASKTFTTQETMTNAHSARDWFLKAAGDEKHVAKHFAALSTNAKAVGEFGIDTANMFEFWDWVGGRYSLWSAIGLSIVLSIGFDNFVELLSGAHAMDKHFSTTPAEKNLPVLLALIGIWYNNFFGAETEAILPYDQYMHRFAAYFQQGNMESNGKYVDRNGNVVDYQTGPIIWGEPGTNGQHAFYQLIHQGTKMVPCDFIAPAITHNPLFDHHQELLSKFFAQTEALAFGKSREVVEQEYCDQGKDPAT

SEQ ID NO: 13967 - protein, 543 aa, Arabidopsis thaliana
MRRFVIGQAKNLIDQSRRRQLHHHKNLSFVSLIPPFSAPSDSSSRHLSSSSSSDMSASDSSSSLPVTLDTINPKVIKCEYAVRGEIVNIAQKLQEDLKTNKDAYPFDEIIYCNIGNPQSLGQQPITFFREVLALCSYTALLDESATHGLFSSDSIERAWKILDQIPGRATGAYSHSQGIKGLRDAIADGIEARDGFPADPNDIFMTDGASPGVHMMMQLLITSEKDGILCPIPQYPLYSASIALHGGTLVPYYLDEASGWGLEISELKKQLEDARSKGITVRALAVINPGNPTGQVLSEENQRDVVKFCKQEGLVLLADEVYQENVYVPDKKFHSFKKVARSMGYGEKDLALVSFQSVSKGYYGECGKRGGYMEVTGFTSDVREQIYKMASVNLCSNISGQILASLIMSPPKPGDDSYESYIAEKDGILSSLARRAKTLEEALNKLEGVTCNRAEGAMYLFPCLHLPQKAIAAAEAEKTAPDNFYCKRLLKATGIVVVPGSGFRQVPGTWHFRCTILPQEDKIPAIVDRLTAFHQSFMDEFRD

SEQ ID NO: 13968 - protein, 326 aa, Escherichia coli
KTFSEAIISGEWKGYTGKAITDVLNIGIGGSDLGPYMVTEALRPYKNHLNMHFVSNVDGTHIAEVLKKVNPETTLFLVASKTFTTQETMTNAHSARDWFLKAAGDEKHVAKHFAALSTNAKAVGEFGIDTANMFEFWDWVGGRYSLWSAIGLSIVLSIGFDNFVELLSGAHAMDKHFSTTPAEKNLPVLLALIGIWYNNFFGAETEAILPYDQYMHRFAAYFQQGNMESNGKYVDRNGNVVDYQTGPIIWGEPGTNGQHAFYQLIHQGTKMVPCDFIAPAITHNPLFDHHQKLLSKFFAQTEALAFGKSREVVEQEYRDQGKDPAT

SEQ ID NO: 13969 - protein, 262 aa, Chromobacterium violaceum ATCC 12472
MAAIPGQARRRRREQGVNMDKTTHFGYKTVAESEKAGKVAEVFHSVASKYDVMNDLMSGGLHRVWKHFTLTTSGVRAGDKVLDIAGGTGDLSRGWAKRVGKTGEVWLTDINSSMLTVGRDRLLDEGVILPVSLADAEKLPFPDNYFDAVSVAFGLRNMTHKDAALKEMCRVLKPGGKLFVLEFSKVWKPLSPFYDFYSFKALPIMGKLVANDADSYQYLAESIRMHPDQETLKQMMLDAGFGKVDYHNLTGGVVALHKGVKF

SEQ ID NO: 13970 - protein, 242 aa, Candida albicans
SAPTFTNFSRNEERVKMNRMRLRIAERLKESQNTAASLTTFNEVDMSNLMDFRKKYKDEFIEKTGIKLGFMGAFSKASALALKEIPAVNAAIENNDTLVFKDYADISIAVATPKGLVTPVVRNAESLSILGIEKEISNLGKKARDGKLTLEDMTGGTFTISNGGVFGSLYGTPIINMPQTAVLGLHGVKERPVTVNGQIVSRPMMYLALTYDHRVVDGREAVIFLRTIKELIEDPRKMLLLE

SEQ ID NO: 13971 - protein, 326 aa, Escherichia coli
KTFSEAIISGEWKGYTGKAITDVVNIGIGGSDLGPYMVTEALRPYKNHLNMHFVSNVDGTHIAEVLKKVNPETTLFLVASKTFTTQETMTNAHSARDWFLKAAGDEKHVAKHFAALSTNAKAVGEFGIDTANMFEFWDWVGGRYSLWSAIGLSIVLSIGFDNFVELLSGAHAMDKHFSTTPAEKNLPVLLALIGIWYNNFFGAETEAILPYDQYMHRFAAYFQQGNMESNGKYVDRNGNVVDYQTGPIIWGEPGTNGQHAFYQLIHQGTKMVPCDFIAPAITHNPLFDHHQKLLSKFFAQTEALAFGKSREVVEQEYRDQGKDPAT

SEQ ID NO: 13972 - protein, 316 aa, Helicobacter hepaticus ATCC 51449
MAGGAAIDECGECLPMKSLQICKQSDSVLLGAVGGPKWDNEPSHNRPEKALLTLRKELGLFANIRPATLLPQLSKASPLKDEILNRGIDFIIVRELIGGVYFGEHKLEEINGEKVASDAMTYSASQIESIAKVAFNIARNRKKEIVCVDKANVLSSSRLWREVVDKVAQNYKDVHLSYMYVDNAAMQICRAPSQFDVILTENMFGDILSDEASIITGTIGVIPSASLSNGTLGMYEPIHGSAPDIAGQDKANPIGTILSAAMMLELSFGLTKESEVIQKAVQNALDKGYRTGDMMSEGMQLVGCEQMGDVILESVI

SEQ ID NO: 13973 - protein, 245 aa, Uncultured archaeon
MMPQMGYDRAITVFSPDGRLFQVEYAREAVKRGTTAVGIKAQDGVALLVDKRLTSRLLEGGSVEKIFRLDTHIGAATSGLVADARMLIDRGRIESQINKVVYDEPIAVETLAKKICDYKQAFTQYGGLRPFGTALLIGGVYNGDTYLFETDPSGALLEYKATAIGSGRSIVTELLEQQYKEGIKLEDAILLGLEALYKVTEGKIDITTVDVGLAESKTKTFRILEAKELEPYIKKVQERGKKAEE

SEQ ID NO: 13974 - protein, 564 aa, Zea mays
  unsure (1)..(564): unsure at all Xaa locations
MASSHIILPKEEEEEAAAAVAEAGLGAAVEADHDHRRYQEQAPGKAALPFSATCVRISRDSYPNLRALRNASTMSLHDDDAAFVKLEEGDYGYVLDDVPHLTDYLPDLPTFPNPLQDHPAYSTVKQYFVNADDTVPEKVVVQKNSPRGVHFRRAGPRQRVYFESEEAKACIVTCGGLCPGLNTVIRELVCGLSHMYNVSNVFGIQNGYKGFYSSNYLPMTPKSVNDIHKRGGTVLGTSRGGHDTKKIVDNIQDRGINQVFIIGGDGTQKGAYEIYKEIRRRGLQVAVAGIPKTIDNDIAVIDKSFGFDSAVEEAQRAINAAHVEASSAENGIGLVKLMGRYSGFIAMYATLASRDVDCCLIPESPFYLEGEGGLFEYIDRRLKENNHMVIVVAEGAGQDLIAQSIPAADQQDASGNKLLLDVGLWLTHKIKDYCKSKKMEMTIKYIDPTYMIRAIPSNASDNVYCTLLAHSAIHGAMAGYSFTVGMVNGRHAYIPFHRVTSTRNKVRITDRMWAXLLSSTNQPSFLSQKDIDAAREADKAANRMKSREDVSKKQSTPVLANGEK

SEQ ID NO: 13975 - protein, 230 aa, Uncultured archaeon
MVSLDKAVVARYRHGKKNFETLVDPELAYRIRSEGKGEVEPALAADEIFTDVSKGEKATDGDLMTAFSTTDVVEIAERIIKEGEVQLTAAQRRKKVEEKRKMVIDQIARISINPQTKTPHTPTRIEIAMTEAKVHIDPFKSVYELVSETVKAIRPIIPIKIEESEIAIKIPAAYTGRVYELKGNYSVIKEEWQGDGSFVAVVKIPAGMRDELFSFLNHITKGDVQTKIVK

SEQ ID NO: 13976 - protein, 192 aa, Welwitschia mirabilis
DDHGEVISEIRRSDLEPYLGLHYPATDIPQASRFLFMKNRVRMICDCYATPVRVIQDKKLPKDLSFCGSTLRAPHGCHAQYMANMGSVACVVMAVMINEREEEEGDSGGQGHQKGRRLWGLIVCHHTSPRFVPFPLRYACEFTMQVFSIQLNKEVELALQLREKNILRTQMLLCDMLLRESPLAIVTQKPNI

SEQ ID NO: 13977 - protein, 292 aa, Methylobacillus flagellatus KT
MRKGIILAGGSGTRLYPVTQAVSKQLLPVYDKPMIYYPLSTLMLAGIRDILLISTPQDTPRFEQLLGDGSQWGLNIAYAVQPSPDGLAQAFIIGKKFIGNDPSALVLGDNIFYGHDLAHDLAHADQRQHGATVFAYPVHDPERYGVVEFNDAGQAISLEEKPKEPKSRYAVTGLYFYDNQVVDIAASLKPSPRGELEITDVNKIYLERRSLNVELMGRGHAWLDTGTHESLLEASLFIETIEKRQGLKVACPEEIAYRKGYIDAEQVEKIAQPYLKNGYGQYLIRMLKEKVF

SEQ ID NO: 13978 - protein, 346 aa, Eremothecium gossypii
MSVQTSHETSESVTEMELPRQFLSCSRTYLVVLISRMLTSLIGMNDAQGDKSKPIKLTRFHSRVPPAISVYNYLIRLTKYSSLEHCVLLASVYYIDLLTNVYPEFRLDSLTVHRFLLTATTVASKGLCDSFCTNTHYAKVGGVQCSELNVLENEFLERVNYRILPRDDNIRRCSLERQERIFSYSNIPMDKDCALQDRNNGFGVLEKYYHRMIHLIGDFNMSPDKSCNLSFTLAESPTNSIQKTLPGGNDFQTAYPGNIDDGSKSCPNITSNNGSECQLASKEESRSLRSAHMDNNSSVNNSSPQSFSRKRNYSDSSINHLGMCTQLILSKKHSNSQNSHSPREIV

SEQ ID NO: 13979 - protein, 358 aa, Triticum aestivum
  unsure (1)..(358): unsure at all Xaa locations
MMDRSVSHIKNQHVPFHGCVPFEYIRTMNQGNHLLIRKEKNGILVPSSQYPLYSASIAHNGKYLVLYYCNESTGWGLEISDVKKHLEDARSKPMDVRALVGINPXNPTGKVLAEENXXDIVKFCKNEGLVLLADEVYQENIYADNKKFHSFKKIVRSLGYGEEDLPLVSYQSVSKGYYGECGKRGGYMEITGFSAPVREQIYKIASVNLCSNITGQILASLVMNPPKASDESYASYKAEKDGILASLARRAKALEVAFSKLEGITCNKAEGAMYLFPQICLPQKAIEAAKAANKAPDAFYALRLLESTGIVVVPGSGFGQVPGTWHFRCTILPQEEKIPAIISRFTVFHETFMAEYRD

SEQ ID NO: 13980 - protein, 258 aa, Zea mays
  unsure (1)..(258): unsure at all Xaa locations
MSLPPGPADSGTGTGDDWFLDCGILDDLPAAACGAFPWDASPSSSNPSVEVGSYVNANDAFKEPNDVFKEPGSSKRLRSGSSDMPTSKACRERMRRNKLNDRFLELGSALEPGKPVKADKAAILSDATRMVIQLRSESQQLKETNGSLEEKIKELKAEKDELRDEKQKLKLEKESLEHQMKLMASAPAYMPHPTPDGRRLFAQAPLAPFHAQGQAAGQXKLMMPFVGLPRVPQCWQFMXPPSEVDTSKDSEXACPPVA

SEQ ID NO: 13981 - protein, 306 aa, Lactobacillus plantarum WCFS1
MSKVRKAVIPAAGLGTRFLPATKAMPKEMLPIVDKPTIQFIVDEARKSGIEDIVIVTGKSKRSIEDYYDSNPELEDNLRAKHKEEMLKLVQETTDINLYFIRQSHPRGLGDAVLTAKAFVGDEPFVVMLGDDLMEDKVPLTKQLMNSYDKTHASTLAVMKVPHEEVSKYGVINPESEKEPGLYNVNNFVEKPSPEDAPSDLAIIGRYLLTPEIFDVLENQKPGKGDEIQLTDAIDTLNKTQRVFAHEFKGTRHDVGYKFGYLKTTIEYGLTHPDVKADLRTYIKDLGAKLSKEDSAAPKTTKKPTK

SEQ ID NO: 13982 - protein, 572 aa, Mesorhizobium sp. BNC1
MGNNNNHIFGWLDPSQEQEQQQQQQQREQQQQQQTQSSTNTNNNTNTTDSTSDSTSDSTAGANAASSATSTGDNTNLNGNGNLNGNLNGNLNTTTNDNTVTSNTNSTTTVTVDVGVDLTGYEPSDDDFADIDNSTIEGMFNINFENILNEALDGAGNDVANVISQAANISDDDTLNNAEVRNDDYFGQEIESHGGFAKADDGISAGGGGGDGGSDADADGGDGGFGGIAGATGGTGGNGSGTAVSGAAGGDAAGGAATGGSSTGGNGDSGRADGGRGDGGRGGDGGIGTGTGLGLGLGLGIGAALAGDGDDGGDTDGGDGGDGGSSGDANGGDTEDANGGDATAGDGVDAIDAIIPILNFGGDTGDAGAGGTNTAGTGGTTTGGAGGAGGAAGPGGAGGAGGAATGTGTGDGTGTGSGFGTGGAGGAGGAGTGGAAVSGAATGGDSTAGDATAGGGVGGGALSGAWVSGDGGDGLGGWASAGGGGAGGMGGTALTGAGGAGGDGGSWGTGNGDDGYVYGHSTASADSAVSTSAFNQEIVMGANLQQNAIDMTVVGGDLTSTVAGEDFDDATT

SEQ ID NO: 13983 - protein, 326 aa, Escherichia coli
KTFSEAIISGEWKGYTGKAITDVLNIGIGGSDLGPYMVTEALRPYKNHLNMHFVSNVDGTHIAEVLKKVNPETTLFLVASKTFTTQETMTNAHSARDWFLKAAGDEKHVAKHFAALSTNAKAVGEFGIDTANMFEFWDWVGGRYSLWSAIGLSIVLSIGFDNFVELLSGAHAMDKHFSTTPAEKNLPVLLALIGIWYNNFFGAETEAILPYDQYMHRFAAYFQQGNMESNGKYVDRNGNVVDYQTGPIIWGEPGTNGQHAFYQLIHQGTKMVPCDFIAPAITHNPLFDHHQKLLFKFFAQTEALAFGKSREVVEQEYCDQGKDPAT

SEQ ID NO: 13984 - protein, 342 aa, Oryza sativa
  unsure (1)..(342): unsure at all Xaa locations
MVRPPCCDKDGVKKGPWTPEEDLVLVSYVQEHGPGNWRAVPTRTGLMRCSKSCRLRWTNYLRPGIKRGNFTDQEEKLIVHLQALLGNRWAAIASYLPERTDNDIKNYWNTHLKRKLQGXGGAGGDGDGGAAGDAVSPKPAAQRPASSSKGQWERRLQTDIDMARRALREALTSLDDVKPPHQPDAANAAAGGGGATTGAAASAGADSPAASSTSGASQCSPSSAGYVLTTENISRMLDGWARKKGGGGGRRAAGSGPATPGATESASGSSEASEVSYGGTALSAAAAPASAFEYETKPTVTAAAAADAGDETQLSAIESWLFADADGIESGSLLDAAMDYTF

SEQ ID NO: 13985 - protein, 148 aa, Oryza sativa (japonica cultivar-group)
MASKRIQKELMDLRKDPPTSCSAGPAGEDLFHWQATIMGPSDSPYAGGVFFVNIHFPPDYPFKPPKVNFQTKVYHPNINSNGSICLDILKEQWSPALTISKVLLSISSLLTDPNPDDPLVPEIAHVYKSQRPRYEETARAWTQKYAMG

SEQ ID NO: 13986 - protein, 326 aa, Escherichia coli
KTFSEAIISGEWKGYTGKAITDVLNIGIGGSDLGPYMVTEALRPYKNHLNMHFVSNVDGTHIAEVLKKVNPETTLFLVASKTFTTQETMTNAHSARDWFLKAAGDEKHVAKHFAALSTNAKAVGEFGIDTANMFEFWDWVGGRYSLWSAIGLSIVLSIGFDNFVELLSGAHAMDKHFSTTPAEKNLPVLLALIGIWYNNFFGAETEAILPYDQYMHRFAAYFQQGNMESNGKYVDRNGKVVDYQTGPIIWGEPGTNGQHAFYQLIHQGTKMVPCDFIAPAITHNPLFDHHQKLLSKFFAQTEALAFGKSREVVEQEYRDQGKDPAT

SEQ ID NO: 13987 - protein, 417 aa, Oryza sativa
  unsure (1)..(417): unsure at all Xaa locations
RGGRKKKKKKKKKKKKKKKKKKKKKKKKLGKGVSKAVDNGNSVIAPALIGKDPTSQAELDNFMVQQLDGTKNEGGGGKQKLGANAILAGSLAICKVGAIIKKIPLYQHIANLAGNKQLVLPVPAFNVINGGSHAGNKLAMQEFMILPTGAASFKEAMKMGVEVYHNLKSVIKKKYGQDATNVGDEGGFAPNIQENKEGLELLKTAIEKAGYTGKVVIGMDVAASXFYNDKAKPYGLXLSRRRNNAWFHKRISGDSLKNVYKSFVSEYPIVSIEDPFDQDDWEHYAKMTAEIGEQVQIVGDDLLVTNPTRVAKAIQEKSCNALLLKVNQIGSVTESIEAVKMSKRAGWGVMTSHRSGETEDTFIADLAVGLATGQIKTGAPCRSERLAKYNQLLRIEEELGAAAVYAGAKFRAPVEPY

SEQ ID NO: 13988 - protein, 211 aa, Glycine max
MSRTLVQPIGQKRLTNVAVVRLKKHGMRFEIACYPNTVLSWRSGVEKDPDEVLQSHTVYTNVSKGVLAKSKDLISAFGTDDHSKICLDILKKGELQVAGKERESLLSSQFRDIATIVMHKTYNPETQRPYTISMIERLMREIHFAVDPHSTSKKQALELIQELQKHFPIKRCPLRIRATAPDDQVPELLGKLNEWNATVISKEDLLLVFLN

SEQ ID NO: 13989 - protein, 506 aa, Corynebacterium glutamicum
MADPQGFIKYSRREPAHRPVPLRLMDYSEVYEKAPAGQIEEQAARCMDCGVPFCHEGCPLGNIIPEWNDLVRQGRWKEAYDRLHATNNFPEFTGRLCPAPCEGACVLGINDDSVTIKNVELEIVEKAFREGWVQPVVASMSTGLSVAVVGSGPAGLAAAQQLTRAGHSVTVFERDDRLGGLMRYGVPEYKMENRWIDRRIEQMEAEGTTFQVGTSPRAAELALFDAILLATGTPVARELSVPGHDLNGIHAAMDYLTAQNRINEGDGEVSPINAKGKKVVIIGGGDTGTDCFGTALRQGAESVTQFDIRPRAPFQRADSTPWPMYPNLFRTATAHEEGEYIITGDESADEIAALGLAERAAGSTLGERKFAVNTVEFHGNNGHVTGLTGNQIRVVNGKREPIEGTEFPFEADLVLVALGFTGAEQGGLAHELGVGFDDRGRILRDSEYRSPTNSRVYIAGDNGRGQSLIVWAIAEGRACAAAIDADLMGETALPVAVAPQDVPLAV

SEQ ID NO: 13990 - protein, 283 aa, Pseudomonas putida KT2440
MTTALRQPTLSSQCLAEFLGTALLIFFGTGCVAALKVAGASFGLWEISIIWGVGVSMAIYLTAGISGAHLNPAVSIALTLFAGFDKRKLPFYMLAQVCGAFCGAALVYTLYSNLFFDFEQAHAMLRGSEGSLELASVFSTYPHPSLSTSQAFLVEVVITAILMAVIMALTDDNNGLPRGAMAPLLIGLLIAVIGSAMGPLTGFAMNPARDFGPKLMTFLAGWGEIAFTGGRDIPYFLVPVFAPILGACLGAASYRGLIARNLPMAPAATPETNDIRQGDTQAN

SEQ ID NO: 13991 - protein, 159 aa, Zea mays
  unsure (1)..(159): unsure at all Xaa locations
MPDRILCPCRYLSTHWRRRLTEMFSCDCMPPRDSCCTKKYSLRLQYIPCRVFCTXRCATRDRVHLRRVHSAKCTEICYKDPSLKDRQWRAYSDRSPGQDSYSLECFDACVSGXRFRFDIXRRRPNKSQPNRPSKPSAPEPEVKQTTNANCNEYVTCTSA

SEQ ID NO: 13992 - protein, 575 aa, Lactobacillus plantarum WCFS1
MSWQDTYNTWKNQATLETSLKQELTGMAGDDAALEDAFYEPMEFGTAGMRGVLGPGINRMNIYTVRQATEGLARFMDTLPAEVKERGVAISFDSRHHSEDFAHESARVLGQHGIKSYVFESLRPTPELSFTVRHLHTYAGIMITASHNPKQYNGYKIYGEDGGQMPPKESDLITSYIRKVDDVFAIAVADEQQLLADKTETIIGDDVDQDYLAKVKEVTINQKLVDEVGKDMKLVFTPLHGTGRMLGEKALKNAGFKNFSVVKEQAVADPEFSTVKFPNPEFPEAFKMAIDLGKKEGADVLIAVDPDADRLGTAVRQPNGEYVLLTGNQIAAVLLHYILQANKDAGTLPTNAAAVKSIVSSEFATKVAASYGVTMINVLTGFKYIAEQIEHFEATGEHTYMFGFEESYGYLIKPFVHDKDAIQTTVLLAEVAAYYKQQGKNLYDGLQDLFKEYGYFREQTTSEEFDGVGGSDKIAALMTKFRSEAPTAFAGYDVTGTEDFQSQTESFADGHTAPIALPKANVLKYHLNDGTWIAIRPSGTEPKIKFYIGTLGSTLEEANDKLAKFEDAIQAFIKE

SEQ ID NO: 13993 - protein, 386 aa, Bacillus anthracis str. Ames 0581
MISHLFQTYGRRTVEFVKGNGTKVIDNNGKQYLDFTSGIGVCNLGHCHPTVMKAVQEQLNDIWHISNLFTNSLQEEVASLLTENIALDYVFFCNSGAEANEAALKLARKHTGKSLVVTCEQSFHGRTFGTMSATGQNKVKEGFGPLLPSFLHTPFNDIKALKEVMNEEVAAVMVEVVQGEGGVIPADLSFLKEIETLCKKFGSLFIIDEVQTGIGRTGTLFAYEQMGIDPHIVTTAKALGNGIPVGAMIGRKELGTSFTAGSHGSTFGGNYVAMAAAKEVLQVSKRLSFLKEVQEKGEYVLQKLQEELQHVECIQNIRGKGLMVGIECTHEVASFIEQLEKEGLLVLQAGPNVIRLLPPLIVTNEELEQAVYMIKKVVCTKNVSII

SEQ ID NO: 13994 - protein, 544 aa, Acholeplasma laidlawii
MYEFKFADIGEGIHEGTVLQWNFKVGDKVKEGETLVIVETDKVNAELPSPVDGTIVSLGAKEGEEIHVGQIIVTIDDGTGTPAAAPAPAQVSAPTPAPAAAPQVAAPAASGDIYDFKFADIGEGIHEGTILQWNFKVGDKVKEGETLVVVETDKVNAELPSPVDGTILKLGKAEGEVIHVGETVVLIGQNGATLEQAQAPKAEAPVSEPKKGAGVVGEIEVSDDIIGGSEEVHVVATTGKVLASPVARKLASDLGVDIATIKGSGEQGRVMKDDVQNSKAPAEAQAPVQQTQAPAQAAASVAPSFAAAGKPQGDVEVVKITRLRKAVSNAMTRSKSIIPETVLMDEINVDALVNFRNEAKGLAESKGIKLTYMAFIAKAVLIALKEFPMFNASFNHDTDEVYIKKFINLGMAVDTPDGLIVPNIKNADRLSVFELASQVRSLADDTIARKISMDQQTGGTFTITNFGSAGIAFGTPVINYPELAILGIGKIDRKPWVVGNEIKIAHTLPLSLAVDHRIIDGADGGRFLMRVKELLTNPTLLLLS

SEQ ID NO: 13995 - protein, 212 aa, Schizosaccharomyces pombe
KARHLIKLYEAEGIGRERVLIKIASTYEGIQAAKQLEEEGIHCNLTLLFSFVQAVACAEANVTLISPFVGRILDFYKAKNNRDYTAQEDPGVVSVSNIFNYYKKFGYKTIVMGASFRNVGEIKELAGVDFLTISPALLEQLNNSTDAVPKKLDASKASSLNLEKVSYLTDEPKFRFDFNNDEMAVVKLSTGIAAFAKDADTLRTILKAKLEA

SEQ ID NO: 13996 - protein, 282 aa, Escherichia coli
ALLLKTQLPSGSKLSLYNIAPVTPGVAVDLSHIPTAVKIKGFSGEDATPALEGADVVLISAGVARKPGMDRSDLFNVNAGIVKNLVQQVAKTCPKACIGIITNPVNTTVAIAAEVLKKAGVYDKNKLFGVTTLDIIRSNTFVAELKGKQPGEVEVPVIGGHSGVTILPLLSQVPGVSFTEQEVADLTKRIQNAGTEVVEAKAGGGSATLSMGQAAARFGLSLVRALQGEQGVVECAYVEGDGQYARFFSQPLLLGKNGVEERKSIGTLSAFEQNALEGMLDT

SEQ ID NO: 13997 - protein, 282 aa, Escherichia coli
ALLLKTQLPSGSELSLYDIAPVTPGVAVDLSHIPTAVKIKGFSGEDATPALEGADVVLISAGVARKPGMDRSDLFNVNAGIVKNLVQQVAKTCPKACIGIITNPVNTTVAIAAEVLKKAGVYDKNKLFGVTTLDIIRSNTFVAELKGKQPGEVEVPVIGGHSGVTILPLLSQVPGVSFTEQEVADLTKRIQNAGTEVVEAKAGGGSATLSMGQAAARFGLSLVRALQGEQGVVECAYVEGDGQYARFFSQPLLLDKNGVEERKSIGTLSAFEQNALEGMLDT

SEQ ID NO: 13998 - protein, 282 aa, Escherichia coli
ALLLKTQLPSGSELSLYDIAPVTPGVAVDLSHIPTAVKIKGFSGEDATPALEGADVVLISAGVPRKPGMDRSDLFNVNAGIVKNLVQQVAKTCPKACIGIITNPVNTTVAIAAEVLKKAGVYDKNKLFGVTTLDIIRSNTFVAELKGKQPGEVEVPVIGGHSGVTILPLLSQVPGVSFTEQEVADLTKRIQNAGTEVVEAKAGGGSATLSMGQAAARFGLSLVRALQGEQGVVECAYVEGDGQYARFFSQPLLLGKNGVEERKSIGTLSAFEQNALEGMLDT

SEQ ID NO: 13999 - protein, 282 aa, Escherichia coli
ALLLKTQLPSGSELSLYDIAPVTPGVAVDLSHIPTAVKIKGFSGEDATPALEGADVVLISAGVRRKPGMDRSDLFNVNAGIVKNLVQQVAKTCPKACIGIITNPVNTTVAIAAEVLKKAGVYDKNKLFGVTTLDIIRSNTFVAELKGKQPGEVEVPVIGGHSGVTILPLLSQVPGVSFTEQEVADLTKRIQNAGTEVVEAKAGGGSATLSMGQAAARFGLSLVRALQGEQGVVECAYVEGDGQYARFFSQPLLLGKNGVEERKSIGTLSAFEQNALEGMLDT

SEQ ID NO: 14000 - protein, 265 aa, Zea mays
  unsure (1)..(265): unsure at all Xaa locations
MDPKMTEVTQMFARFKAAYTRNDLDACVTLLSQLKVHLTKFPSLPPSFEQTPNAVEELKLARDIYEHAVVLSVKLEDQDAFERDFCQLKPYYMDTCGIIPPSPEEYPILGLNLLRLLVQNRIAEFHTELELLPVKALEHPCIKHAVELEQSFMEGAYNRVLSARQAVPHETYVYFMDLLAKTVRDEIAGCSEKGYDSLSVSDAKQMLMFSSDQDLHEYITEEHPEWEFKNGAVFFRRQGSSLQGDPILQLINXTLSYARELERIV

SEQ ID NO: 14001 - protein, 294 aa, Synechococcus sp. PCC 7942
MTEARRGIILAGGSGTRLYPATYAVSKQLLPVYDKPMIYYPLSTLMLSGIREILIISTPQDTDRFAQLLGNGDRWGLSLSYAIQPAPEGLAQAFLIGESFLNGSPAALILGDNLFHGDDLAVQLQQASQRSQGATVFAYGVADPERYGVVEFDAQQRVLSIEEKPKKPRSRYAVTGLYFYDQQVVELAKQVRPSTRGELEITDLNNAYLQRGHLRVELLGRGMAWLDTGTHDSLLDAASFIQTLEKRQGLKIACPEEIAYRQGWITATQLEQLAEPLRKNGYGQYLLDLLHNPL

SEQ ID NO: 14002 - protein, 203 aa, Yersinia pestis biovar Medievalis str. 91001
MFYTYGETEINHLKRRDKKMAAAIERLGMLERPLSPDLFAALIRNIVDQQISVKAAQTVNTRLTLLLGSITPATVAAASAEAIQRCGMTMRKAGYIKGAADAAINGSLDLSVIAQLPDNEVITQLSRLDGVGVWTAEMLLISSLSRPDIVSWGDLAIRRGMMNLYRHKTLPRERFERYRRRYTPYGTTASLYLWALSHKTLED

SEQ ID NO: 14003 - protein, 116 aa, Arabidopsis thaliana
LVEKFGIDPNNAFAFWDWVGGRYSVCSAVGVLPLSLQYGFSMVEKFLKGASSIDQHFQSTPFEKNIPVLLGLLSVWNVSFLGYPARAILPYSQALEKFAPHIQQVSMESNGKGVSI

SEQ ID NO: 14004 - protein, 595 aa, Pseudomonas putida KT2440
MCGLAGELRFTPIDQAPRPADLAAVERITHHLAPRGPDAWGFHSQGPIALGHRRLKIMDLSDGSAQPMVDNTLGLSLAFNGAIYNFPELREELQALGYSFWSDGDTEVLLKGYHAWGAALLPKLNGMFALAIWERDNQRLFLARDRLGVKPLYLSRNGERLRFASTLPALLKGGDIDPMLDPVALNHYLNFHAVVPAPRTLLANVQKLEPGTWMRIDRHGEVERQVWWQLHYGPHPDERELDLEGWTTRVLDATRDAVAIRQRAAVDVGVLLSGGVDSSLLVGLLREVGVDDLSTFSIGFEDAGGERGDEFQYSDLIAKHYGTRHHQLRIAEHEIIDQLPAAFRAMSEPMVSHDCIAFYLLSREVAKHCKGVQSGQGADELFAGYHWYPQVDGADDAYAAYREAFFDRSHAEYRDTVQAPWLLETDAAGDFVREHFARPGAPAAVDKALRLDSTVMLVDDPVKRVDNMTMAWGLEARTPFLDYRLVELSARIPARFKLPDGGKQVLKQAARRVIPHEVIDRKKGYFPVPGLKHLEGATLGWVRELLTDPSQDRGLFNPTMLDRLLSNPHGQLTPLRGSKLWQLAALNLWLSEQGI

SEQ ID NO: 14005 - protein, 206 aa, Chlamydophila pneumoniae CWL029
MKIVIASSHGYKIRETKTFLKRLGDFDIFSLSDFPDYKLPQEQGDSITANALTKGIHAANHLGCWVIADDTMLRVPALNGLPGPLSANFAGVGAYDKDHRKKLLDLMSSLESLVDRSAYFECCVVLVSPNQEIFKTYGICEGYISHQEKGSSGFGYDPIFVKYDYKQTFAELSEDVKNQVSHRAKALQKLAPHLQSLFEKHLLTRD

SEQ ID NO: 14006 - protein, 223 aa, Zea mays
MGFPVGYSDSETLLPRVLLQALLLLGHLHRFLLWAFHAVGLGDLIDLGCNYPPPPPSASTAAAAVAAQEGRDVAAPLRHWRPEFRPVPAVRIEEALPVVRFDELAAAARGDGYGDCDCDCAVCLDGIGGGDEVRRLGNCRHAFHRACLDRWMAHGQRTCPLCRAPLVPGAAAAGDPWAEAPWLDAADYDVLPYPSTPLLMVPTPTLLRPHELLLVAGLGGGFQ

SEQ ID NO: 14007 - protein, 245 aa, Schizosaccharomyces pombe
KSFIKVSSLEQLKATGTVVVSDTGDFESIAKYKPQDATTNPSLILAASKKPQYAALVDAAVDYAKAKGGSINSQIEIAFDRLLIEFGTKILAIVPGRVSTEVDARYSFDTQTTIEKARHLIKLYEAEGIGRERVLIKIASTYEGIQAAKQLEEEGIHCNLTLLFSFVQAVACAEANVTLISPFVGRILDFYKAKNNRDYTAQEDPGVVSVSNIFNYYKNSVTRPLSWVLLSVTSVRSRNSLVLTF

SEQ ID NO: 14008 - protein, 246 aa, Oryza sativa
MAIAGVLFLLFLARQASAAGYGGWQSAHATFYGGGDASGTMGGACGYGNLYSQGYGTNTAALSTALFNDGAACGSCYELRCDNAGSSCLPGSITVTATNFCPPNYGLPSDDGGWCNPPRPHFDMAEPAFLHIAQYRAGIVPVSFRRVPCVKKGGVRFTVNGHSYFNLVLVTNVAGAGDVRSVSIKGSRTGWQPMSRNWGQNWQSNAFLDGQSLSFQVTASDGRTVTSNNVAHPGWQFGQTFEGGQF

SEQ ID NO: 14009 - protein, 469 aa, Triticum aestivum
  unsure (1)..(469): unsure at all Xaa locations
MDPTVPNSGDHAASTPTNTTVTLPPLTLRDAPRLPALPSGATTIPNPISSHPYFHPPPTFYISPGDVSLRHAFFDLSSGSPNPLVAYRRAGPRESLAVDPARARAALVTCGGLCPGLNTVLRELVVGLHELYGVLDVFGVAAGYRGFYGADDDHVRLDPASVDDWHKKGGTALKTTRGGFDLNKIVDGIVARGYTQVYAIGGDGTMRGAVAIFEEFKRRGLRISITGIPKTVDNDIGIIDRSFGFQTAWEIAQQAXXAAHVEAVSAVNGIGLVKLMGRSTGHIALHATLSSRDVDCCLIPEIDFHVEGKGGLFEFLYERIKKKGHAVVVVAEGAGQEVIPRTDDQKREQDEXGNMLFLDVGPWLKSELGRWWKREHPTELFXVKYIDPTYMIRXVPANATDNLYCTLLAHSAIHGIMAGFTGFVPGPINGNYSYIPLEDIAVAKNPVDVNDHKWAWVRSVTDQPDFLKP

SEQ ID NO: 14010 - protein, 512 aa, Shigella flexneri 2a str. 2457T; identical to SEQ ID NO: 338

SEQ ID NO: 14011 - protein, 298 aa, Thermoanaerobacter tengcongensis
MNQIIECVPNVSEGRDQEKISELIKEVVSTEGVKLLDYSSDKDHNRTVITFVGDKEGVKEAAFKLIKKASEIIDMRYHKGEHPRIGAVDVVPFVPVKNVTMEECVQIARELGERVGKELNIPVYLYEEAATTPERKNLENIRRGEYEGFFEKIKQPEWKPDFGPSEMNPKSGAIVIGARNFLIAFNVNLGTNDIEIANKIAKAVRFSSGGYRYVKAMGVELRERGIVQVSMNLTDFNKTPIYRVFETIKAEASRYGVNVVGSEIIGLVPSKALLDVADYYLRLENFSMDMVLENRIYE

SEQ ID NO: 14012 - protein, 497 aa, Staphylococcus xylosus
MELVKNLSRRQFIDGEWVESSNKETRKIINPFNQEVIFEVAEGTADDSERAILAARRAFEDGEWANETSENRGKKVRAISDLIVKHREELAKLETLDTGKTLEESYADMDDIANVFNFFAGLADKDGGEIIDSPIPNTESKVIKEPIGVVTQITPWNYPLLQASWKIAPALASGCSLVMKPSEITPLTTIRVFELMEEVGFPQGVINLVLGKGSEVGEPLSAHKEVDLVSFTGGIQTGKHIMKNAADHVTNIALELGGKNPNIIFDDADFDLAVDQALNGGFFHAGQVCSAGARIIVHNDIKEKFEAALIERIKNIKLGNGFDEDTEMGPVISAEHREKIENYMEVAKSENATIAIGGKRPEREDLQDGFFFEPTVITDCDTSMRIVQEEVFGPVVTIESFTTEAEAIKLANDSIYGLAGGVFTNDVGKAQRIANKLKMGTVWINDFHPYFAQAPWGGYKQSGIGRELGKAGLAEYQEEKHILRNTNPEPVNWFGKA

SEQ ID NO: 14013 - protein, 282 aa, Escherichia coli
ALLLKTQLPSGSELSLYDIAPVTPGVAVDLSHIPTAVKIKGFSGEDATPALEGADVVLISAGVARKPGMDRSDLFNVNAGIVKNLVQQVAKTCPKACIGIITNPVNTTVAIAAEVLKKAGVYDKNKLFGVTTLDIIRSNTFVAELKGKQPGEVEVPVIGGHSGVTILPLLSQVPGVSFTEQEVADLTKRIQNAGTEVVEAKRGGGSATLSMGQAAARFGLSLVRALQGEQGVVECAYVEGDGQYARFFSQPLLLGKNGVEERKSIGTLSAFEQSALEGMLDT

SEQ ID NO: 14014 - protein, 388 aa, Vibrio cholerae O1 biovar eltor str. N16961
MTTRKPATIAVRTGIESDTQYHAVVPPIYLSTNYGFPAFGEVPKYDYTRSGNPNRGLLEQTLYELECGEGAVVTNCGTSAINLWVTALLGPDDLIVAPHDCYGGTYRLLNTRAKKGDFKVQFVDQSNAAALTQALARKPKLLLIETPSNPLVRVVDIAHLCQLAKAQGTLVAVDNTFLTPVFQKPLTLGADFVLHSTTKYINGHSDVIGGVLICKHKQHAEELAWWGNCLGSTGTPFDSYMTLRGIRTLGARMRVHEESAQQILAYLQTQSLVSKIYHPSLPDHPGHEIAKKQQSGFGAMLSFEFAGSFEQLKFFVGKLALFSLAESLGGVESLICHPASMTHRAMGEEALAEAGISQQLLRLSVGLEDASDLIADLDQAFLHTLAAN

SEQ ID NO: 14015 - protein, 616 aa, Zea mays
MASISGAAAPPSSAVCRLRLRRHLLLRPSHLRLRAPHSIADLSRSSNSAPNPARPALGSGPENGSGGVRAVEKDPIKLWERYVEWLYQHKELGIFVDVSRMGFTEEFLRQMEPRMQQAFVDMRELEKGAIANPDEGRMVGHYWLRDPALAPNSFLRNKIETALDKILAFSQDVISGKILSPSGRFTSILSIGIGGSALGPQFVAEALAPDNPPLKIRFIDNTDPAGIDHQIAQLGPELATTLVIVISKSGGTPETRNGLLEVQKAFRDAGLQFSKQGVAITQENSLLDNTARIEGWLARFPMFDWVGGRTSEMSAVGLLPAALQGIDIKEMLVGAALMDEETRNTVVKANPAALLALCWYWASEGIGKKDMVVLPYKDSLLLLSRYLQQLVMESLGKEFDLDGNRVNQGLTVYGNKGSTDQHAYIQQLREGVHNFFVTFIEVLRDRPAGHDWELEPGVTCGDYLFGMLQGTRSALYANDRESISVTVQEVTPRAVGALIALYERAVGIYASLVNINAYHQPGVEAGKKAAGEVLALQKRVLTVLKEAICENPTEPLTLDEIADRCHCPEDIEMIYKIIQHMAANDRALIAEGSCGSPRSVKVYLGECSVDEDMQAA

SEQ ID NO: 14016 - protein, 363 aa, Helicobacter hepaticus ATCC 51449
MLLKENLTQAQSGQRITAKGYAVAHKSDTFKPFSFSRHALGETDILIEILYAGICHSDIHSAREEWHKGIFPMVPGHEIAGKVVAVGSKVSKFKVGDYAGVGCMVNSCGECEACKRSQEQFCENGKCVFTYDCHDCFHDNEPTYGGYSNNIVVSEKFAVNVPQDAPLEKVAPLLCAGITTYSPIKFSNVKAGDKVAVAGFGGLGVMALKYAIKMGAEVSVFARNKNKEKEALDLGAKALYTDTKGVSERFDFIISTIPTAYDVNAYAELLKFGGEMAIVGLPPADEKLSIDLTRLVFAAGKKVYGSLIGGIKETQEMLDFSLKHRIYPETEVISVEQINEAYENLTSGKAKFRYVIDMSSLKE

SEQ ID NO: 14017 - protein, 664 aa, ASPERGILLUS NIDULANS FGSC A4
MEIRTRKIIHRYVPRDGGGTCRRPKVLDRDEYYYRRNVQHIRPEQKNSPTYRIIETREPLRSRTSLNTLWRRDTSPIRSKPFKMRMPYTIRRVPSVPDDCGLEPRGRNRSPRPFIVDSAPEIQYAWPKSGRPRSLSPEIRPPPQRSISPSLRRETETTVFVEDNPRQSRSLERPKGPRPPRERTPVVEREPVRRRSRAVEIHQTPEQARGRTESAGRRQVRFAEDIDYEEYGTWPRRCNEYQLSESDDDFRDEFRRRIFERRVPRNVEDRPRYRRISPERSSYRTTDLPRATIRPNRLRPRIIQDGNREILEDGDRIYAKARRRRYEDRELPDLMSHSTARWRRRFDDIRDFSSDDDSYIRSAGSWRYGAAASLAPLHPSSRPEPLYNPSPLLRFQTGLIYDYVCEKEFGRSPTMPVSSHYRGISIETDVRSAHLYVFHQPTAQVLGLLPLPKEVKYDPNFHRPHISAIRPENAMELLCIAVDMLLAMSTTRALSGDASESGVRNEVSSGENTPTRVEELRFHPHGHDLTQQSLLCKRFLSKREPPITLKEYLTRFHHYCPLSTGVYIAASLYITRIAVVDSVISVNRKNMHRLVLAGLRVAMKTVEDLVYPHSRVAKVGGVTERELTRLEISFCFLADFDLRVDEQTLDNQAGILHWYMEHPT

SEQ ID NO: 14018 - protein, 490 aa, Helicobacter hepaticus ATCC 51449
MKTILVITDGIGYSDKTQYNAFYHAKKPTYDYLFKNVPYGMIDTFGLSVGLPQGQMGNSEVGHMCIGSGRVLYQDLVRISRAIEYDEIKDNPALVEVTQQSAVVHLCGLLSDGGVHSHIVHLKALAQILSTQGKRVYLHLITDGRDVLPKSALNYLADIESICEDNVSIASVSGRFYAMDRDKRWDRVQKAYESIALGKNPTNLSPKEYIQSQYDEGIFDEFLTPVSFGGFQGMNDDESFVFVNFRSDRAREIVDCLGNPQFKEFKRERYVKLHIATMTEYDATFPYPILFPKQNVQNTLAEVISSHRLKQFHTAETEKYAHVTFFLNGGREEAFIGEERVLIPSPNVKTYDLQPQMNASAVGDAVIKAVEQGYDFVVVNFANGDMVGHTGNLEAAIKAVEAVDKELGRIVESAQKHHYALFITSDHGNCEEMKDEKGNMLTNHTVGQVWCFGMIEGVSKIENGGLNNIAPSVLKAMNLPIPPEMDKPLF

SEQ ID NO: 14019 - protein, 487 aa, Streptomyces avermitilis MA-4680
MTQAPQKAPYTTNNVGIPVESDEHSLTVGPDGPILLQDHYLIEKMAQFNRERVPERVVHAKGSGAYGFFEVTNDVSQFTKADLFQPGKRTEMLARFSTVAGEQGSPDTWRDPRGFALKFYTEHGNYDMVGNNTPVFFVRDTIKFQDFIRSQKRHPVTGLRSNDMQWDFWTLSPESAHQVTWLMGDRGIPKTYRHMNGYSSHTYMWINGAGERFWVKYHFKTDQGIDFLTQAEADELAGSDADKHRRDLFESIESGNAPTWTLKVQIMPFEDAADYRFNPFDLTKVWPHGDYPLIDVGRMVLNKNPEDYFIHIEQAAFEPSNLVPGIGPSPDKMLLGRLFSYPDTHRYRIGPNYAQLPPNRPHAPVNSYAKDGPMRYVPSNAARPYAPNSYGGPAADYGQFGDPASWETAGELVREATKPHREDDDWGQPGTMVRQVLDDAARDRLVSNVSGHLKADVSRPVLDRAVQYWRNIDKEIGDRIASNVNGG

SEQ ID NO: 14020 - protein, 496 aa, Zea mays
MTMDPTKFRPSSSHDTTVTTTNAGAPVWNDNEALTVGPRGPILLEDYHLIEKVAHFARERIPERVVHARGASAKGFFECTHDVTSLTCADFLRAPGVRTPVIVRFSTVIHERGSPETIRDPRGFAVKFYTREGNWDLLGNNFPVFFIRDGIKFPDVIHAFKPNPRSHVQEYWRVFDFLSHLPESLHTFFFLFDDVGVPSDYRHMEGFGVNTYTFVSAAGKAQYVKFHWKPTCGVRCILTDEEAALVGGRNHSHATQDLYDSIAAGSFPEWTLYVQVMDPDTEEQYDFDPLDDTKTWPEDLLPLRPVGRLVLDRNVDNFFNENEQLAFGPGLVVPGIYYSDDKMLQCRVFAYADTQRYRLGPNYLMLPVNAPRCAHHNNHYDGAMNFMHRDEEVDYYPSRHAPLRQAAPPTPLPPRPVAGRREKATIRKPNDFKQPGERYRSWDADRQDRFVRRFADSLGHPKVSQELRSIWIDLLAKCDASLGMKIATRLNMKPNM

SEQ ID NO: 14021 - protein, 400 aa, Lactobacillus plantarum WCFS1
MAKLIVSDLDVKDKKVLIRVDFNVPIKDGKIGDDNRIVAALPTIKYVIEHDGKAILFSHLGRIKSEDDKKGLSLRPVAERLSNLLNKPVTFVPVTEGEQLETAINNMNDGDVLVVENTRFEDVVNGEQVKRESGNDPELGKYWASLGDVYVNDAFGTAHRSHASNVGIASNMDQVAAGFLMEKEIKFLGDAVDNPKHPFVAILGGAKVSDKIGVIDHLISKADKIIIGGGMTYTFYAAKGMGIGNSLVEKDKIELAKSIIEKAGDKLVLPSDSIVAEKFDNDVPSKVVEGSIPDGYMALDIGPKSIEEFEDVLRDAKTVVWNGPMGVFEMSNYAKGTLEIGKFLGTLSDATTIVGGGDSTAAVKQLGVGDKLTHISTGGGASLEYLEGKELPGIAAISEK

SEQ ID NO: 14022 - protein, 442 aa, Lactobacillus plantarum WCFS1 [sequence omitted]

SEQ ID NO: 14023 - protein, 402 aa, Thermobifida fusca
MTDRPRISARIGGISESATLAVDAKAKALKAAGHPVIGFGAGEPDFPTPDYIVEAAVAACRDSRFHRYTPAGGLPELKEAIAAKTLRDSGYRVEPNQVLVTNGGKQAIYEAFATLLDPGDEVIVIAPYWTTYPESIRLAGGTPVYVVTDESTGYLATVEQLEAARTDRTKVLLFVSPSNPTGAVYSPEQVREIGRWALEHNLWVLTDEIYEHLVYGDARFSSMPVEVPELADRTVVVNGVAKTYAMTGWRVGWLIGPVDVVKAATNLQSHATSNVANVSQAAALAAVSGDLSAVEEMKQAFDRRRQTIVRMLNEIPGVVCPEPQGAFYAYPSVKEILGKEIRGQRPQTSSELASLILEHAKVAVVPGEAFGTPGYLRLSYALSDADLVEGVSRIAKLLSEAH

SEQ ID NO: 14024 - protein, 90 aa, Triticum aestivum
  unsure (1)..(90): unsure at all Xaa locations
MALRGVHTVAPFQGLKCTAGMPVARRXGNSSFGNVSXGGRIRCMXVWPIEGIKKFETLYYLTPITVEDLLKQIENLLRSRGCLLEGPVPP

SEQ ID NO: 14025 - protein, 302 aa, Shigella flexneri 2a str. 2457T
MAAINTKVKKAVIPVAGLGTRMLPATKAIPKEMLPLVDKPLIQYVVNECIAAGITEIVLVTHSSKNSIENHFDTSFELEAMLEKRVKRQLLDEVQSICPPHVTIMQVRQGLAKGLGHAVLCAHPVVGDEPVAVILPDVILDEYESDLSQDNLAEMIRRFDETGHSQIMVEPVADVTAYGVVDCKGVELAPGESVPMVGVVEKPKADVAPSNLAIVGRYVLSADIWPLLAKTPPGAGDEIQLTDAIDMLIEKETVEAYHMKGKSHDCGNKLGYMQAFVEYGIRHNTLGTEFKAWLEEEMGIKK

SEQ ID NO: 14026 - protein, 514 aa, Arabidopsis thaliana
MDTATTTCSAVDLSALLSSSSNSTSSLAAATFLCSQISNISNKLSDTTYAVDNTYLLFSAYLVFAMQLGFAMLCAGSVRAKNTMNIMLTNVLDAAAGAISYYLFGFAFAFGTPSNGFIGRHHSFFALSSYPERPGSDFSFFLYQWAFAIAAAGITSGSIAERTQFVAYLIYSTFLTGFVYPTVSHWFWSSDGWASASRSDNNLLFGSGAIDFAGSGVVHMVGGIAGLCGALVEGPRIGRFDRSGRSVALRGHSASLVVLGTFLLWFGWYGFNPGSFLTILKGYDKSRPYYGQWSAVGRTAVTTTLSGCTAALTTLFSKRLLAGHWNVIDVCNGLLGGFAAITSGCAVVEPWAAIVCGFVASWVLIGFNLLAKKLKYDDPLEAAQLHGGCGAWGLIFTGLFARKEYVNEIYSGDRPYGLFMGGGGKLLAAQIVQIIVIVGWVTVTMGPLFYGLHKMNLLRISAEDEMAGMDMTRHGGFAYAYNDEDDVSTKPWGHFAGRVEPTSRSSTPTPTLTV

SEQ ID NO: 14027 - protein, 331 aa, Vibrio cholerae O1 biovar eltor str. N16961
MIFDSQSSRVSMIKKIGVLTSGGDAPGMNAAIRGVVRTALGAGLEVFGIYDGYQGLYEDRIKQLDRSSVSDVINRGGTFLGSARFPQFREVEVREKAIENLKKHGIEALVVIGGDGSYMGAKKLTEMGFPCIGLPGTIDNDIAGTDYTIGYLTALNTVIEAIDRLRDTSSSHQRISIVEIMGRHCGDLTLTSAIAGGCEYIITPETGLNMEQLISNIKDGIAKGKKHAIIALTELMMDANKLAKEIESATGRETRATVLGHIQRGGKPTAFDRVLASRMGNYAVHLLMEGHGGRCVGIQKEQLVHHDIIDAIENMKRPVRTDLYKVAEELF

SEQ ID NO: 14028 - protein, 383 aa, Thermus aquaticus
MRGLSQRVKSMKPSATVAVNARALELRRKGVDLVALTAGEPDFDTPEHVKEAGRRALAQGKTKYAPPAGIPELREAVAEKFRRENGLEVTPEETIVTVGGKQALFNLFQAILDPGDEVIVLAPYWVSYPEMVRFAGGVPVEVPTLPEEGFVPDPERVRRAITPRTKALVVNSPNNPTGVVYPEEVLRALAEMALQHDFYLVSDEIYEHLIYEGAHFSPGTLAPEHTITVNGAAKAFAMTGWRIGYACGPKAVIKAMADVSSQSTTSPDTIAQWATLEALTNREASMAFIAMAREAYRKRRDLLLEGLSRIGLEAVRPSGAFYVLMDTSPFAPNEVEAAERLLMAGVAVVPGTEFAAFGHVRLSYATGEENLKKALERFAQALQ

SEQ ID NO: 14029 - protein, 97 aa, Candida albicans
NNNFNSRLGKTVGRLFQSIFPHKPELQGRQVITLHNQRDYIFFRRHRYIFRNEEKVGLQELGPQFTLKLRRMQKGVRGDVVWEHRPDMERDKKKFYL

SEQ ID NO: 14030 - protein, 777 aa, Shigella flexneri 2a str. 301
MANSSSRYSVLTAAHWGPMLVETDGETVFSSRGALATGMENSLQSAVRDQVHSNTRVRFPMVRKGFLASPENPQGIRGQDEFVRVSWDEALDLIHQQHKRIREAYGPASIFAGSYGWRSNGVLHKASTLLQRYMALAGGYTGHLGDYSTGAAQAIMPYVVGGSEVYQQQTSWPLVLEHSDVVVLWSANPLNTLKIAWNASDEQGLSYFSALRDSGKKLICIDPMRSETVDFFGDKMEWVAPHMGTDVALMLGIAHTLVENGWHDEAFLARCTTGYAVFASYLLGESDGIAKNAEWAAEICGVGAAKIRELAAIFHQNTTMLMAGWGMQRQQFGEQKHWMIVTLAAMLGQIGTPGGGFGLSYHFANGGNPTRRSAVLSSMQGSLPGGCDAVDKIPVARIVEALENPGGAYQHNGMNRHFPDIRFIWWAGGANFTHHQDTNRLIRAWQKPELVVISECFWTAAAKHADIVLPATTSFERNDLTMTGDYSNQHLVPMKQVVPPRYEARNDFDVFAELSERWEKGGYARFTEGKSQLQWLETFYNVARQRGASQQVELPPFAEFWQANQLIEMPENPDSERFIRFADFCRDPLAHPLKTASGKIEIFSQRIADYGYPDCPGHPMWLEPDEWQGNAEPEQLQVLSAHPAHRLHSQLNYSSLRELYAVANREPVTIHPDDAQARGITEGDMVRVWNSRGQILAGAVISEGIKPGVICIHEGAWPDLDLTADGICKNGAVNVLTKDLPSSRLGNGCAGNTTLAWLEKYNGPELTLTAFEPPASS

SEQ ID NO: 14031 - protein, 232 aa, Oryza sativa
MTVVDAESRFHVLAVDDSLIDRKLIEMLLKNSSYQVTTVDSGSKALELLGLRDEGDDSSSSPSSSSPDHQEIDVNLIITDYCMPGMTGYDLLKRVKGSSSLKDIPVVIMSSENVPARINRCLEDGAEEFFLKPVKLADMKKLKSHLLKRKQQLPMAAAAPDKPPHKPDEAAASAAAIAEAATAQTDGIISDCSCSGSSKRKAAAMEQEVISSPDQRTKPRLSSTSSGLAVET

SEQ ID NO: 14032 - protein, 369 aa, Helicobacter hepaticus ATCC 51449
MNIDFPFQQPSLYGYKLNELKSILSPAFRAKQIYHWLYHRYENDAMRMDNISKTMQNYIREHFALSQIYPIRVEHSIDGSKKYLFETYDGHCFESVLIQMRDKKLGHKGEVVESEKWTMCLSSQIGCKVGCAFCFTAKGGFVRNLHASEIVEQVVIMKKDNQMAPHKRVNIVYMGMGEPLDNIENVTRAIEILSESEGLSISARRQTISTSGIAPKIKQLGKLNLGVQLAISLHAVDDKLRSQLIPMNKAYNISDILTEVRAFPIDTRKKVMFEYLMIKGVNDDLKSAKKLLQLLNGIKAKVNLILFNPHEGSTFKRPEINDVRAFADFLIKRGLLCTIRESRGIDISAACGQLREKVKAENVSCETLT

SEQ ID NO: 14033 - protein, 412 aa, Salmonella typhimurium LT2
MADFRPERRFTRIDRLPPYVFNITAELKMAARRRGEDIIDFSMGNPDGATPPHIVEKLCTVAQRPDTHGYSTSRGIPRLRRAISHWYQERYDVDIDPETEAIVTIGSKEGLAHLMLATLDHGDTVLVPNPSYPIHIYGAVIAGAQVRSVPLVEGVDFFNELERAIRESYPKPKMMILGFPSNPTAQCVELEFFEKVVALAKRYDVLVVHDLAYADIVYDGWKAPSIMQVPGARDVAVEFFTLSKSYNMAGWRIGFMVGNKTLVSALARIKSYHDYGTFTPLQVAAIAALEGDQQCVRDIAEQYKRRRDVLVKGLHEAGWMVEMPKASMYVWAKIPEQYAAMGSLEFAKKLLNEAKVCVSPGIGFGDYGDTHVRFALIENRDRIRQAVRGIKAMFRADGVLPSHPKPVEASTE

SEQ ID NO: 14034 - protein, 342 aa, Streptomyces coelicolor A3(2)
MKVGVLTGGGDCPGLNAVIRAVVRKGVQEYGYDFTGFRDGWRGPLEGDTVPLDIPAVRGILPRGGTVLGSSRTNPLKQRDGIRRIKDNLAALGVEALITIGGEDTLGVATRLADEYGVPCVGVPKTIDNDLSATDYTFGFDTAVGIATEAIDRLHTTAESHMRVLVVEVMGRHAGWIALHSGLAGGANVILIPEQRFDVEQVCSWVTSRFRASYAPIVVVAEGAMPRDGDMVLKDESLDSYGHVRLSGVGEWLAKQIEKRTGNEARTTVLGHVQRGGTPSAFDRWLATRFGLHAVDCVHDGDFGKMVALRGTDIVRVPIAEATARLKTVDPALYEEVGVFFG

SEQ ID NO: 14035 - protein, 261 aa, Triticum aestivum
MSGAAAAAAARVLPKAVTFVTGNAKEAGGSPRDSRLLRPLPRPQPRTAQHRMMSGAVAAARVLPKAVTFVTGNARKLEEVRVILASSIPLQSLKLDLPELQGEPEDISKEKARMAASQINGPVLVEDTCLCFNALKGLPGPYIKWFLEKIGHEGLNNLLIAYEDKSAFAMCIFSLALGPEEEPITFVGKTAGKIVPARGPADFGWDPVFQPDGFEQTYAEMPKSEKNEISHRARALALVKEHFASANYEVQSGLNSFSSTK

SEQ ID NO: 14036 - protein, 226 aa, Caulobacter crescentus CB15
MSRYVDATMAYGDVAALLIPSLPGRMRAAEVAGRLDGLMLTGSPSNLDPALYGEEIGDAPGPFDAARDGMTADLIKAMLDLGKPVFGICRGFQEINVAFGGTLRRDTSSSSDLIDHHAPEDVSFEAMFDHVHAVKLMRGGVLERAFGVQAAVVNSVHYQGVDRLGEGLSVEALSEDDLVEAFSATVNGAPVLAVQWHPEWKPAQNRQSQIFFEVFGRALRGAPLVA

SEQ ID NO: 14037 - protein, 370 aa, Pseudomonas aeruginosa PAO1
MIKSRAAVAFAPNKPLEIVEVDVAPPQKGEVLVRIVATGVCHTDAYTLSGQDSEGVFPCILGHEGGGIVEAVGEGVTSLQVGDHVIPLYTAECGKCKFCLSGKTNLCQAVRATQGKGLMPDGTSRFSYKGEPVFHYMGCSTFSEYTVLPEISLAKIPKDAPLEKVCLLGCGVTTGIGAVLNTAKVEEGATVAIFGLGGIGLAAIIGAKMAKAARIIAVDINPGKFDIARELGATDFINPKDYDKPIQDVIVELTDGGVDYSFECVGNVQLMRAALECCHKGWGESVIIGVAGAGQEISTRPFQLVTGRVWRGSAFGGVRGRSELPSYVEKAQKGEIPLDTFITHTMGLEDINEAFELMHEGKSIRTVIHY

SEQ ID NO: 14038 - protein, 710 aa, Bacillus subtilis subsp. subtilis str. 168
MTERLLRYFRDKQQDVQSEKTYDTQCPFCSMQCKMQLVEQTIVTRKKYTAIGIDNPTTQGRLCIKGMNAHQHALNSSRITRPLLKKNGEFMPVSWEEALNHIKDQVTMIQTEHGHDAMAVYGSASITNEEAYLLGKFARVGLQTKYIDYNGRLCMSAAATAANQTFGADRGLTNPLSDIPHTRVIILAGTNIAECQPTIMPYFEKAKENGAYFIAIDPRETATTKIADLHLKIKPGTDAALANGLVKIIIDEQLINEDFIQSRTNGFEELKQHTDSLDLNDIAEQTSVSLVDIRKAAVKFAKETSGMLFTARGIEQQTDGTAAVKGFLNMVLITGKIGKPYSGYGAITGQGNGQGAREHGQKADQLPGYRSIENEEHRAHIAKVWGIHQDDLPRKGVSAYEVMEKINDGDIKGLFLMCSNPAVSSPNANLVKKALRRLTFFVAIDLFISETAKYADVILPASSYLEDEGTMTNVEGRVTLREASRPCPGEAKHDWQIICDLASALGKGRYFSYTSAEDIFNELREASRGGIADYSGISYGRLRREGGIHWPCPESDHPGTGRLFTESFAHPDQKAALSVIPNEPPVPKEKPTADYPLYLTTGRVMSHYLTGVQTRKSAALAARHFESFMEIHPQTAATYNIEDRVLVKIESPRGSITVRSKLSEQIRKDTVFVPIHWADAQNVNDLIGEALDPACKMPGFKVCAVRIIPI

SEQ ID NO: 14039 - protein, 405 aa, Coxiella burnetii RSA 493
MAIEIKVPTLPESVSDATVAKWYKKEGDSISRDENLVDLETDKVMLEVPAPKDGVVEKIVAKEGEVVKADQILALLKEGGAVAKEKEKKDEKETKKEKEKKEEKKDKEKKEKTEEKESDLSPAVRRMVSEKDVDVEEIEGSGKGGRITKKDVEDYLEKQKEKPSEGKEGPADERTEKRVPLSRIRQRVAERLVQVQQEAALLTTFNEINMQLVMELRKKYREEFEKKFKVRLGFMSFFTKAVVEALKRFPMVNASIDGSDIIYHNYYDIGIAIGTERGLIVPILRNAEKMNMADIEKQIREYASRAQEGRLNIEELTGGTFTITNGGTYGSLLSTPIINPPQTAILGMHKIMDRPTVENGEVVVRPIMQVALSYDHRVIDGREAVLFLVTIKELLEDPARMILEC

SEQ ID NO: 14040 - protein, 298 aa, Burkholderia gladioli
MNHPDIDTHSRNAAAPLPFVLVHGAWHGAWAYERLGAALAARGHASVAHDLPAHGINARYPAAFWQGDAQALAQEPSPVAATTLDDYTGQVLRAIDAACALGHPRVVLVGHSMGGVAITAAAERAPERIAALVYLAAFMPASGVPGLDYVRAPENHGEMLASLICASPRAIGALRINPASRDAAYLATLKQALFEDVDEATFRAVTRLMSSDVPTAPFATPIATTAERWGSIARHYVTCAEDRVILPALQRRFIAEADAFLPERPTRVHALDSSHSPFLSQPDTLAELLTGIARNTAI

SEQ ID NO: 14041 - protein, 404 aa, Vibrio cholerae O1 biovar eltor str. N16961
MTIEILVPDLPESVADATVATWHKKPGDMVARDEVIVEIETDKVVLEVPAPDAGVLEAILEQEGATVLSKQLLARLKPGAVAGEPTQDTPDATEPSPDKRHKASLTEESNDALSPAVRRLLAEHNLEANQVKGSGVGGRITREDIEAHLAANKAKPAAKAEAPIAALAPVVGRSEKRVPMTRLRKRIAERLLEAKNNTAMLTTFNEVNMKPIMDMRKQYQDVFEKRHGIRLGFMSFYVKAVTEALKRYPEVNASIDGDDLVYHNYFDVSIAVSTPRGLVTPVLKNCDTLSLAQIEKGIKELAEKGRDGKLTVDELTGGNFTITNGGVFGSLMSTPIINPPQAAILGMHKIQDRAMVVDGKIEILPMMYLALSYDHRSIDGRESVGFLVTVKELLEDPARLLLDV

SEQ ID NO: 14042 - protein, 447 aa, Zea mays
IRLEWGLDGSVWFSSEMKALSDDCERFITFPPGHLYSSKTGGLRRWYNPPWFSETVPSTPYNALFLREMFEKAVIKRLMTDVPFGVLLSGGLDSSLVASVASRHLNETKVDRQWGNKLHTFCIGLKGSPDLKAAREVADYLSTVHHEFHFTVQEGIDALEEVIYHIETYDVTTIRASTPMFLMSRKIKSLGVKMVISGEGSDEIFGGYLYFHKAPNKKEFHEETCRKIKALHLYDCLRANKATSAWGVEARVPFLDKSFISVAMDIDPEWKMIKRDLGRIEKWVIRNAFDDDERPYLPKHILYRQKEQFSDGVGYSWIDGLKDHASQHVSDSMMMNAGFVYPENTPTTKEGYYYRMIFEKFFPKPAARSTVPGGPSVACSTAKAVEWDASWSKNLDPSGRAALGVHDAAYEDTAGKTPASADPVSDKGLRPAIGESLGTPVASATAV

SEQ ID NO: 14043 - protein, 211 aa, Glycine max
MHVNVTILPRVRPRVRPRVRGRVGGPRVRPRVRKKLGFVTLSFACESESNNNQSIIMSSAKKITLKSSDGEAFEVDEAVALESQTIKHMIEDDCADSGIPLPNVTSKILAKVIEYCKKHVEAANPEDKPSEDDLKAWDADFVKVDQATLFDLILAANYLNIKSLLDLTCQTVADMIKGKTPEEIRKTFNIKNDFTPEEEEEVRRENQWAFE

SEQ ID NO: 14044 - protein, 376 aa, Microbulbifer degradans 2-40
MTDTFIKSRAAVAWAAGEPLSIEEVDVMMPKAGEVLVKIVATGVCHTDAFTLSGEDPEGIFPAILGHEGGGIVEALGEGVTSVAVGDHVIPLYTPECGECKFCLSGKTNLCQKIRATQGKGLMPDGTTRFYKDGQPIYHYMGTSTFSEYTVLPEISLAKVNQKAPLEEVCLLGCGVTTGMGAVMNTAKVKEGDTVAIFGLGGIGLSAVIGATMAKASRIIAIDINESKFELAKKLGATDCINPKLYDKPIQDVIVELTDGGVDFSFECIGNVNVMRSALECCHKGWGESIIIGVAGAGQEISTRPFQLVTGRVWRGTAFGGVKGRSELPGIVEQYLAGDFKLDDFITHTMGLEDINTAFDLMHHGKSIRSVIHFNK

SEQ ID NO: 14045 - protein, 415 aa, Mycobacterium avium subsp. paratuberculosis str. k10
MAVHNLKDLLAEGVSGRGVLVRSDLNVPLDSDGEQGRITDPGRITASVPTLSALVEAGAKVVVAAHLGRPKNGPDPALSLAPVAAALGEQLGRHVQLASDVVGTDALARAEGLTDGDVLLLENIRFDARETSKDDAERLALARQLAELVGPTGAFVSDGFGVVHRKQASVYDVATLLPHYAGTLVAEEIAVLEQLTGSTKRPYAVVLGGSKVSDKLGVIESLATKADSIVIGGGMCFTFLAAQGFSVGKSLLETEMVDTCRRLLDTYVDVLRLPVDIVAADRFAADAAPQTVPADAIPDDLMGLDIGPGSVKRFTALLSNAETIFWNGPMGVFEFPAFAAGTKGLAEAIAAATGKGAFSVVGGGDSAAAVRALGIPESGFSHISTGGGASLEYLEGKALPGIEVLGRPQPTGGAA

SEQ ID NO: 14046 - protein, 442 aa, Methylobacillus flagellatus KT
MAIKDVLVPDIGNFDSVDVIEVLVSAGDTIAKDDSLITLESDKASMDIPAPFSGTVKEVKVKVGDKVAQGTLILTMDALEEGASAAPAPKEDAPPVQVAVPAPVPEATRPAPEPPPTIQPQATPNPIGASVATASGKLAHASPSVRKFARELGVNLALVTATGPKNRITQSDVQAYVKNELSKPRGGGIATGAGGLAVIPAPVIDFSQYGDTETKPLSRIKKLSGANLHRNWVTAPHVTQFDEADITDLEDFRKSMQSEAEKRGVKLTMLAFLIKASVNALRAYPNFNASLSADGESLILKQYYNVGFACDTPDGLVVPVIRDVNRKDVLEIAAELGELSAKARERKLKVEEMQGGCFTISSLGGIGGTAFTPIINCPEVAILGVSRSSIRPVYNSKTKEFEPRLVLPLSLSYDHRVIDGADGARFTSHLRMVLSDVRRLLL

SEQ ID NO: 14047 - protein, 588 aa, Methylobacillus flagellatus KT
MSKIIEVLVPDIGNFDSVDVIEVLVKAGDTIAKEDALITLESDKASMDIPSSHAGVVKEVKVKVGDKVAKGSLILLLEEAGTDQASTTADAAPAAKEESKPVPAATPAAPEPATGDSDINTEVVVLGSGPGGYTAAFRAADLGKQVVLIERYSTLGGVCLNVGCIPSKALLHTAKVITEAEETSLHGVSFGKPKIDLEALRAWKANDVVGKLTAGLAQMAKQRGVTVVQGVGKFTSPHQIAVTAADGKVTTVGFQNAIIAAGSQATKFPGAPEDERIMDSTGALALADVPKRLLVIGGGIIGLEMGTVYEALGSKVSVVEFMDGLIPGADRDLIRPLQKRMEKRFERIMLSTKVANIEAKKDGIHVSFEGENAPKEIEVYDRVLVSIGRRPNGKNIGAENAGVAVDDRGFITVDKQMRTNVPHIFAIGDIVGQPMLAHKATHEAKVAAEVIAGHKVEFQAMVIPSVAYTDPEVAWAGVTETEAKAKGLEIEKASFPWAASGRALSIARSEGATKLIFDKETHRVIGAGIVGTNAGELLAEAVLAIEMGADAHDLGLTIHAHPTLSETICFAAEIKEGTITDMLPPKKR

SEQ ID NO: 14048 - protein, 588 aa, Zea mays
MDMALASKASPPPWNATAAEQPIPKRDKAAANDSETQGSSETPRAGRGTPLRSVSHCPPITPPALSRPLPRARSDPPPMATAMGAMAATCMASIPAAATFPGDLGVGRRRAVVPGWRAGGRRLRATPPARRPFLFSPKGVSDSRSSQTCLDPDASTSVLGIILGGGAGTRLYPLTKKRAKPAVPLGANYRLIDIPVSNCLNSNVSKIYVLTQFNSASLNRHLSRAYGNNIAGYKNEGFVEVLAAQQSPENPNWFQGTADAVRQYMWLFEEHNIMEFLILAGDHLYRMDYQKFIQAHRETDADITVAALPMDEQRATAFGLMKIDDEGRIIEFAEKPKGEKLKAMMVDTTILGLDPERAKEMPYIASMGIYVFSKDVMLRLLRENFPAANDFGSEVIPGATEIGLRVQAYLYDGYWEDIGTIAAFYNANLGITKKPVPDFSFYDRSAPIYTQPRYLPPSKVLDADVTDSVIGEGCVIKNCTINHSVVGLRSCISEGAVIEDTLLMGADYYETENDKNVLSETGGIPIGIGKNSHIRKAIIDKNARIGENVKIINFDNVQEAVRETEGYFIKSGIVTVIKDALIPSGTII

SEQ ID NO: 14049 - protein, 429 aa, Pseudomonas aeruginosa PAO1
MAKIVDIKGREVLDSRGNPTVEADVILDNGIVGSACAPSGASTGSREALELRDGDKSRYLGKGVLKAVANINGPIRDLLLGKDAADQKALDHAMIELDGTENKAKLGANAILAVSLAAAKAAAQAKGVPLYAHIADLNGTPGQYSMPVPMMNIINGGEHADNNVDIQEFMVQPVGAKNFAEALRMGAEIFHHLKAVLKARGLNTAVGDEGGFAPNLSSNEDALAAIAEAVEKAGYKLGDDVTLALDCASSEFFKDGKYDLEGEGKVFDAAGFADYLAGLTQRYPIISIEDGMDESDWAGWKGLTDKIGAKVQLVGDDLFVTNTKILKEGIEKGIGNSILIKFNQIGSLTETLEAIQMAKAAGYTAVISHRSGETEDSTIADLAVGTAAGQIKTGSLCRSDRVSKYNQLLRIEEQLGAKAPYRGRAEFRG

SEQ ID NO: 14050 - protein, 496 aa, Caulobacter crescentus CB15
MTLPADMTERLAKLAPPSQAVIDGDLVEAASGATFHNVSPRDGQVLNLVTACQADDVERAVAGARAAFEDGRWRDQGPRQKKAVLFRLAELMERDADELALLESLDVGKPISDARNVDIPLAINTCRWYAEALDKVYGEVGTSPADRLSYAVHEPLGVIGAIVPWNFPLHMAMWKVAPALAMGNSVVLKPAEQSPLTALKLGALALEAGLPPGVLNVIPGLGGVAGEALALSMDVDMIAFTGSGPVGRRLMEYSARSNLKRVSLELGGKSPQIVFADCPDLEAAAQAAAWGVFYNQGEVCTAASRLLVEAPIKDAFLARVIEVAKGMKVGDPLDPSTQFGAMVSERQMNTALDYIATADSQGARRVLGGQRVRQEAGGFYVEPTIFDQVRPDQTLAREEVFGPVLGVMTFSSEDEAMRLANDTVYGLAAGLWTADVSKALRGARRLKAGLVWVNGWDACDITMPFGGFKQSGFGRDRSLHALHKYADLKSVSVTLR

SEQ ID NO: 14051 - protein, 110 aa, Oryza sativa
PRVREDKIKELKAKKAELCYEKQKLKVEKEPLEQQVKILIATPAYMPPPPLMPAPYPQAPLAPFPHAQGQTAGQKLIMPFVGNPGYPMWQFMPPSEVDPSKDSEGGPPFG

SEQ ID NO: 14052 - protein, 380 aa, Phaseolus acutifolius
MSSTAGQVIKCKAAVAWEAGKPLVMEEVEVAPPKAGEVRLKILYTSLCHTDVYFWEAKGQTPLFPRIFGHEAGGIVESVGEGVTHLKPGDHALPVFTGECGECAHCKSEESNMCDLLRINTDRGVMIHDSQTRFSIKGQPIYHSVGTSTFSEYTVVHAGCVAKVNPAAPLDKICVLSCGICTGLGATVNVAKPKPGSSVAIFGLGAVGLAAAEGARISGASRIIGVDLVSSRFEEAKKFGVNEFVNPKDHDKPVQEVIAEMTNGGVDRAVECTGSIQAMISAFECVHDGWGVAVLVGVPNKDDAFKTHPVNFLNERTLKGTFYGNYKPRTDLPLVVEQYMNGELELDKFITHTVPFSEINKAFDYMLKGESIRCIIRMGE

SEQ ID NO: 14053 - protein, 173 aa, Flaveria pringlei
MASIPATVATVAQANMVAPFTGLKANAAFPVTKKVNDFSTLPSNGGRVQCMKVWPPLGKKKYETLSYLPDLTEVQLAKEVDYLLRNKWVPCLEFELEHGFVYRENARSPGYYDGRYWTMWKLPMFGCTDSAQVMKELQECKKEYPQAWIRIIGFDNVRQVQCISFIASKPGGF

SEQ ID NO: 14054 - protein, 380 aa, Phaseolus acutifolius
MSSTAGQVIKCKAAVAWEAGKPLVMEEVEVAPPKAGEVRLKILYTSLCHTDVYFWEAKGQTPLFPRIFGHEAGGIVESVGEGVTHLKPGDHALPVFTGECGECAHCKSEESNMCDLLRINTDRGVMIHDSQTRFSIKGQPIYHFVGTSTFSEYTVVHAGCVAKVNPAAPLDKICVLSCGICTGLGATVNVAKPKPGSSVAIFGLGAVGLAAAEGARISGASRIIGVDLVSSRFEEAKKFGVNEFVNPKDHDKPVQEVIAEMTNGGVDRAVECTGSIQAMISAFECVHDGWGVAVLVGVPNKDDAFKTHPVNFLNERTLKGTFYGNYKPRTDLPLVVEQYMNGELELDKFITHTVPFSEINKAFDYMLKGESIRCIIRMGE

SEQ ID NO: 14055 - protein, 169 aa, Streptomyces avermitilis MA-4680
MTTDNAATSVLDTEIDALQGGSADLSQYAGKAVLIVNVASKCGLTPQYAGLERLQERYAAQGFTVLGVPCNQFLGQEPGTSEEIAEFCSATYGVTFPLTEKVEVNGDARHALYESLVGFADGEGHTGDIRWNFEKFLIGRDGKVVARFSPQTEPESAEVVTAVERQLAG

SEQ ID NO: 14056 - protein, 482 aa, Neisseria meningitidis
GSADAEYDVVVLGGGPGGYSAAFAAADEGLKVAIVERYKTLGGVCLNVGCIPSKALLHNAAVIDEVRHLAANGIKYPEPELDIDMLRAYKDGVVSRLTGGLAGMAKSRKVDVIQGDGQFLDPHHLEVSLTAGDAYEQAAPTGEKKIVAFKNCIIAAGSRVTKLPFIPEDPRIIDSSGALALKEVPGKLLIIGGGIIGLEMGTVYSTLGSRLDVVEMMDGLMQGADRDLVKVWQKQNEYRFDNIMVNTKTVAVEPKEDGVYVTFEGANAPKEPQRYDAVLVAAGRAPNGKLISAEKAGVAVTDRGFIEVDKQMRTNVPHIYAIGDIVGQPMLAHKAVHEGHVAAENCAGHKAYFDARVIPGVAYTSPEVAWVGETELSAKASARKITKANFPWAASGRAIANGCDKPFTKLIFDAETGRIIGGGIVGPNGGDMIGEVCLAIEMGCDAADIGKTIHPHPTLGESIGMAAEVALGTCTDLPPQKK

SEQ ID NO: 14057 - protein, 433 aa, Vibrio parahaemolyticus RIMD 2210633
MSKIVKVLGREIIDSRGNPTVEAEVHLEGGFVGMAAAPSGASTGSREALELRDGDKARFLGKGVLKAIEAVNGPIAEALVGKDAKDQAAIDAVMIELDGTENKSKFGANAILAVSLANAKAAAAAKGMPLYEHIAELNGTAGQFSMPLPMMNIINGGEHADNNVDIQEFMIQPVGAATLKEAVRMGAEVFHNLAKVLKSKGYNTAVGDEGGFAPNLKSNAEALEVIAEAVAAAGYELGKDVTLAMDCAASEFFDKEAGIYNMKGEGKTFTSEEFNHYLAGLVEQFPIVSIEDGLDESDWDGFAHQTQLLGDKIQLVGDDLFVTNTKILAEGIEKGIANSILIKFNQIGSLTETLAAIKMAKDAGYTAVISHRSGETEDATIADLAVGTAAGQIKTGSMSRSDRVAKYNQLIRIEEALGERAPFNGLKEVKGQA

SEQ ID NO: 14058 - protein, 87 aa, Glycine max
  unsure (1)..(87): unsure at all Xaa locations
ARGGGGGGGVGRRVNYAFXASEEEVIIKHRXLTRATSGEGEPPLRKRQRRGTTVGSERDKDEESNYNELEKRGXAGLRERRTFEIPL

SEQ ID NO: 14059 - protein, 361 aa, Ralstonia eutropha JMP134
MKAAVLHQPKSPLVIEDVAIGKPGPHEVLIRTAAVGVCHSDLHFLDGAYPHPMPAVLGHEAAGVVEQVGELVRTVRPGDHVITCLSAYCGHCEHCLTGHLSLCTEPDTRRGEDEPPRLTAHHGGPMNQFINLSAFAEQMLVHEHALVAIRRDMPLDRAALIGCAVTTGFGAVVHTARVQPGETVAVIGCGGIGLATINGAAIAGAGRIIAIDRVPGKLELARQFGATDVVQAGDDTVDAVRALTGGGVHHAFEAIGLKQTAEQAFAMLRRGGTATIIGMIAPGVKIELKGSDFLGEKKIQGSLMGSNRFPVDMPRMVDFYMAGRLKLDELISRRLPLEEINSAFDELRRGELARSVVVFGD

SEQ ID NO: 14060 - protein, 1012 aa, Desulfovibrio vulgaris subsp. vulgaris str. Hildenborough
  unsure (1)..(1012): unsure at all Xaa locations
MKTTRRSFLKLVGVSVVGLSLGQLGFDLEDAQAYAVKLKIEGAKEVGTVCPFCSVCCQVIAYVRNGKLVSTEGDPDFPVNEGALCAKGAALFSMYTNPHRLTKPLYRAPHSDKWVEKDWDWTLNQIARRVKDARDKDMILKNDKGQTVNRLESIFMMGTSHASNEECAVIHQAMRGLGVVHMDHQARVXHSPTVAALAESFGRGAMTNHWIDIKNTDAVLIIGSNAAEHHPVAFKWIMRARDNGAVLMHVDPKFSRTSARCDFHVPLRSGTDIAFLGGMVNHIIAKDLYFKDYVANYTNAAFVVGKDYAFEDGIFSGYDPKTRTYDRSKWEFEKGPDGGPVMDPTLKNERCVFNLMKKHYERYTLKNVSDVTGVSEENLLRVYDAFCATGRPDKAGTILYALGWTQHTVGVQNIRTSTLIQLLLGNIGVAGGGINALRGEPNVQGSTDHALLYHILPGYNAMPVAQWQTLADYNKANTPVTTLKNSANWWSNRPKYVASLLKGWFGDAATPENDFCYEYLPKLEKGEDYSYMYVMDRMYHGKLKGGFIFGVNPMNSFPNTNKMRAALDKLDWLVCSELHNSETTDNWKRPGVDPKACKTEVFLLPSAHRVEKAGTISNSGRWLQWFDKAVEPGQARNFADIFVPLVNKIRALYKAEGGTLPDPVLKLHWTDKFDPEEWTRRINGFFWADTKVGDKEYKRGQLVPAFGQLKDDGSTSSLNWLYTGSYTEEDGNKSKRRDARQTPMQANIGLFPNWSWCWPVNRRILYNRASVDVNGKPWNPKKAVIEWDGAKWVGDVPDGPWPPMADKEKGKLPFIMNKDGFAQFYGTGRMDGPFPEHYEPAETPLDSHPFSKQLSSPVYKFHTSDMDQIAKAADPKYPIVLTTYSLTEHWCGGGETRNVPNLLETEPQLYIEMSPELAEEKGIKNGDGVIVESIRGRAEAIAMVTVRIRPFTVMGKTVHLVGMPFAYGWTTPKCGDSTNRLTVGAYDPNTTIPESKACLVNVRKADKLTEIA

SEQ ID NO: 14061 - protein, 456 aa, Xanthomonas axonopodis pv. citri str. 306
MSARYDYDVVILGGGSGGLAAGFRAAKHGARVAIMEPDELGGTCVNLGCVPKKAMWLAADLAGKIELASALGFDVPRPTLVWQELVTHRQGYIANIHASYRRRLNEDGVVLIPQRGVLQDRHTVMGSDGVPVTAGHIVIATGAHALRPDVEGAEHGEVSDDFFNLCHAPEQVAIIGGGYIAVEIAGLLQALGSRVHLFVQGERLLERFDAELTLQLADNLRHLGVRLHFGFTTTALERDMHGALRVHGHSVHPREQGNDVFDKVFFAVGRRANTAGLGLDTVGVALGDKGEVVVDDRQTTNVPNIHAIGDVGGKVGLTPVAIAAGRKLMDRLFGHQPDARMDYENVPSVVFSHPPLGNVGLTEEQARARYNGAVRVYRSNFRPMLHALADAPQRSLFKLVCVGEEERVVGVHLLGESADEMLQGFAVAVKMGATKRDFDETVAIHPTSSEEIVLMH

SEQ ID NO: 14062 - protein, 548 aa, Vibrio cholerae O1 biovar eltor str. N16961
MAMHPRAGQKARQEDLHNIPALVANYYLLQPEAGNTAHKVEFGTSGHRGTADKTTFNEHHILAIAQAVADVRHEHGVTGPIFIGKDTHALSEPAFSSVLEVLIANGIEVIVQENNGYTPTPGISHAILTYNLKHADKADGIVITPSHNPPQDGGIKYNPPHGGPAEGELTQAIEDRANAYISQQLAGVKRMPIALAKQSELLKQVDLVKPYVDDLVNVVDMAAIQKAKLKIGVDPLGGSGIDYWRQIGNAYQLDLTLVSEAIDPSFQFMSLDKDGVIRMDCSSPYAMAGLLALKDEYDLAFGNDPDYDRHGIVTPKGLMNPNHFLAVCIDYLYRHRQGWAGHVAVGKTLVSSAMIDKVVADLGRELCEVPVGFKWFVDGLYSGRFGFGGEESAGASFLRQDGTPWSTDKDGIILCLLAAEITAVTGKNPQQYYDELAAKHGDFYYSRIQAVANGPQKNVLKKLSPEMVSAQTLAGDAITARLTHAPGNGAAIGGLKVTTDYGWFAARPSGTEDIYKIYCESFKGAEHLKQIESEAQQIVNQVFKDAGL

SEQ ID NO: 14063 - protein, 796 aa, Helicobacter pylori J99
MSISRRSILKKIPIALASTNVLKAVGVFEKVKSIPHATHFGPFIAKVQNGVIKDIVPQKSDYNPTMMLKAMADRVYSDSRVKYPCVRKSFLENKKNHKELRGREEFVRVSWDMALDLAAKKLKEIPKENIFNASYGGWGHAGSLHRCNNLAWRFFNTTLGGAIGTDGEYSNGAAARINPMIVGDMEVYSQQTTHEEMIKNCKVYVMWGADLFKCNRIDYFVPNHVNDSYYPKYKRAGIKFISIDPIYTETAQAFNAEWIPIRPNTDVALMLGMMHHLYTSNQYDKAFIAKYTDGFDRFLPYLLGESDKAPKTLEWASQITGVSAEKIKELADLFVSKRTFLAGNWAMQRAQHGEQPDWALIVLASMIGQVGLSGGGFGFSMHYGGNAQASSGARVVPMISQGNNAVKSVIPASRVSEAILNPDKEIDFKGKKLKLPKIKMIYNCGANLLGHEADTNELIRALRTLDCVIVHEPWWTPTAKFADIIFASTSTMERDDITFGGSYSKNVVYAMRKVVEPVYESKDDYEIFRQLALRVGGNETEQRFTESKSYMEWIKGLYEKSDGHTLKSFDQFWRDGFVEFEIPENARKFVPHAKFRQDPINNKVDTESGKIQIFFQKCADFKLADFKGHPTWFEPAEWLGSKMAEIYPFHLISPHPKYCVNSQLDNTWVRTTYKIQGRGPVMITELDANKLGIRHGEIVEVFNARGRLLAGAFVTKNIRQGVLSIQEGAWYDPEDVNTRNPRCNAGSVNTLTSSRPTSSMTQAISVNTALVNIRRLRKYELVKPYHSISTPSIIGA

SEQ ID NO: 14064 - protein, 191 aa, Triticum aestivum
GWLFVIYLFIFFVFISGGWIGGARSWVGGGGAGFRGRLGAGARWGRGARVPGSGGGRGWGPACPPPGARPRRGRRRPWGCWGRGATARVGVGVVPGRSPDVEPVRRFARRVSERGGGLRSVQAMGLAHGVGGAEVACNLLDLGSVGAEEVQGMVERLAGEEGLAVGEGYFTDFSQEKIVELYMEKSAQAEA

SEQ ID NO: 14065 - protein, 583 aa, Ustilago maydis 521
MSSASADQQKIAELQAARAEQDDKVQQLRAANTEPSTLKAEIGKLKKLEAQLAGMGLGSAKAGSSKQEVKFTLKTPKGTRDWEPLSMSLRKRIFSTIEDVFTAHGGVTIDTPVFELKEILSGKYGEDSKLIYDLQDQGGELCSLRYDLTVPFARFVAMNQSEYGNIKRYHIAKVYRRDQPAMSKGRFREFYQCDFDIAGIYDPMVPDSEALCVLVEALDALGIEAFTIKLNHRKILDGLFDICGVPADKIRTISSAVDKLDKSPWAEVKREMVSDKGLAEDVADRIGEYVKLKGGKDLLAKLKADHVMMAHPVASQGVKDIELLFDYLDVYGISDRMSFDLSLARGLDYYTGLIYEAVTAASAPPGFNAAEAASAGGADNKSKKPKKKGADGEEEVDESSVGVGSIAAGGRYDNLVGMFSGSKKPDAVPCVGISIGVERVFAIMMQRLKEKEGKGERSTVRSKETDVFVMSIGGEGLLKERMQVTKMLWDAGIKAEFMHKAKPKLPQQFGVVDKEAIPFAVILAPNEWNGETREVRVKQQKGKDSDEGQGQGDLVKLDNLVEYLKTLGAGKGAVALGQRESLI

SEQ ID NO: 14066 - protein, 357 aa, Glycine max
MGSLEAERTTVGLAARDPSGILSPYTYNLRNTGPDDVYIKVHYCGICHSDLHQIKNDLGMSNYPMVPGHEVVGEVLEVGSDVSRFRVGELVGVGLLVGCCKNCQPCQQDIENYCSKKIWSYNDVYVDGKPTQGGFAETMVVEQKFVVKIPEGLAPEQVAPLLCAGVTVYSPLVHFGLKESGLRGGILGLGGVGHMGVKIAKALGHHVTVISSSDKKKQEALEHLGADQYLVSSDVTAMQEAADSLDYIIDTVPVGHPLEPYLSLLKLDGKLILMGVINTPLQFVSPMVMLGRRSITGSFIGSMKETEEMLEFWKEKGLSSMIEVVNMDYINKAFERLEKNDVRYRFVVDVKGSKLVD

SEQ ID NO: 14067 - protein, 178 aa, Flaveria pringlei
MASISSTVATVSRAAPAQANMVAPFTGLKSNVAFPATKKANDFSTLPSNGGRVQCMKVWPPLGKKRYETLSYLPNLTEAQLAKEVDYLLRNKWVPCLEFELEHGFVYRENARSPGYYDGRYWTMWKLPMFGCTDSAQVMKELQECKKEYPQAWIRIIGFDNVRQVQCISFIASKPEGF

SEQ ID NO: 14068 - protein, 386 aa, Escherichia coli CFT073
MTNNPLIPQSKLPQLGTTIFTRMSALAQQHQAINLSQGFPDFDGPRYLQERLAYHVAQGANQYAPMTGVQALREAIAQKTERLYGYQPDVDSNITVTAGATEALYAAITALVRNGDEVICFDPSYDSYAPAIALSGGIVKRIALQPPHFRVDWQEFAALLSERTRLVILNTPHNPSATVWQQTDFAALWQAIAGHEIFVISDEVYEHINFSQQGHASVLAHPQLRERAVAVSSFGKTYHMTGWKVGYCVAPAPISAEIRKVHQYLTFSVNTPAQLALADMLRAEPEHYLALPDFYRQKRDILVNALNESRLEILPCEGTYFLLVDYSAVSTLDDVEFCQWLTREHGVAAIPLSVFCADPFPHKLIRLCFAKKESTLLAAAERLRQL

SEQ ID NO: 14069 - protein, 173 aa, Flaveria pringlei
MASIPATVATVAQANMVAPFTGLKSNAAFPVTKKVNDFSTLPSNGGRVQCMKVWPPLGKKRYETLSYLPNLTESQLAKEVDYLLRNKWVPCLEFELEHGFVYRENARSPGYYDGRYWTMWKLPMFGCTDSAQVMKELQECKKEYPQAWIRIIGFDNVRQVQCISFIASKPDGF

SEQ ID NO: 14070 - protein, 154 aa, Glycine max
MRKCELCNSPAKLFCESDQASLCWKCDAKVHSANFLVTKHPRILLCHVCQSLTAWHGTGPKFVPTMSVCNTCVNNNSTETCSQQNHEDDDDDGTGEDHAENDDGGVAEDDDDDDDEENQVVPWTSTPPPPASTSSNSVTTSSTRFSDVEEGGSD

SEQ ID NO: 14071 - protein, 178 aa, Flaveria pringlei
MASISSTVATVSRAAPAQANMVAPFTGLKSNAAFPATKKANDFSTLPSNGGRVQCMKVWPPLGKKKYETLSYLPNLTEAQLAKEVDYLLRNKWVPCLEFELEHGFVYRENARSPGYYDGRYWTMWKLPMFGCTDSAQVMKELQECKKEYPQAWIRIIGFDNVRQVQCISFIASKPDGF

SEQ ID NO: 14072 - protein, 173 aa, Flaveria pringlei
MASIPATVATVAQANMVAPFTGLKSNAAFPVTKKVNDFSTLPSNGGRVQCMKVWPPLGKKRYETLSYLPNLTEVQLAKEVDYLLRNKWVPCLEFELEHGFVYRENARSPGYYDGRYWTMWKLPMFGCTDSAQVMKELQECKKEYPQAWIRIIGFDNVRQVQCISFIASKPDGF

SEQ ID NO: 14073 - protein, 338 aa, Escherichia coli CFT073
MISSGQTGYIPLTSCLKRNTIMTDKLTSLRQYTTVVADTGDIAAMKLYQPQDATTNPSLILNAAQIPEYRKLIDDAVAWAKQQSNDRAQQIVDATDKLAVNIGLEILKLVPGRISTEVDARLSYDTEASIAKAKRLIKLYNDAGISNDRILIKLASTWQGIRAAEQLEKEGINCNLTLLFSFAQARACAEAGVFLISPFVGRILDWYKANTDKKEYAPAEDPGVVSVSEIYQYYKEHGYETVVMGASFRNIGEILELAGCDRLTIAPALLKELAESEGAIERKLSYTGEVKARPARITESEFLWQHNQDPMAVDKLAEGIRKFAVDQEKLEKMIGDLL

SEQ ID NO: 14074 - protein, 187 aa, Pisum sativum
MEFKATELRLGLPGITEEEEKKIIHGSSVVKNNNKRQLPQTSEESVSISKVTNDEHIVESSSAAPPAKAKIVGWPPIRSYRKNSLHEADVGGIFVKVSMDGAPYLRKIDLRVYGGYSELLKALETMFKLTIGEYSEREGYKGSEYAPTYEDKDGDWMLVGDVPWDVTSCKRLRIMKGTEAKGLGCGV

SEQ ID NO: 14075 - protein, 173 aa, Flaveria pringlei
  unsure (1)..(173): unsure at all Xaa locations
MASIPATVAAVAQANMVAPFTGLKANAAFPVTKKVNDFSTLPSNGGRVQCMKVWPPLGKKKYXTLSYLPNLTEAQLAKEVDYLLRNKWVPCLEFELEHGFVYRENARSPGYYDGRYWTMWKLPMFGCTDSVQVMKELQECKKEYPQAWIRIIGFDNVRQVQCISFIASKPDXF

SEQ ID NO: 14076 - protein, 151 aa, Magnaporthe grisea 70-15
MSDFGGDDDMGGGGGYHEEAAFDDVEPEEIFDEEVPLDDDEDNEDANVVVSGDPNAAARATGQKLSHKDKKIPNDKRTTTPFMTKYEKARILGTRALQISMNAPVLVDLEGETDPLQIAIKELAEKKIPLIIRRYMPDGYYEDWTCEELLQ

SEQ ID NO: 14077 - protein, 136 aa, Glycine max
  unsure (1)..(136): unsure at all Xaa locations
IRLEVHMFMIFSLHRPYVFPINDLGVRKGVHLLRXREDLPLPSQMDQLCDKWRPYRSVASWYMWRFVEAKGTPSSAVAVATGAGLQQQQHHQHHHQHQQQEQQQQQQQQQQHPPQPQLLDPINSMFNLGAACAWGQ

SEQ ID NO: 14078 - protein, 205 aa, Eucalyptus globulus
MGRGRVQLKRIENKINRQVTFSKRRCGLLKKAHEISVLCDADVALIVFSTKGKLFEYATDCCMERILERYERYSYAESQVLTNNAETNGNWTLEHAKLKARMEILQKNQKNLMGEELDSLSLKELQNLEHQLDTALKNIRSRKIQLMCESISELQRKDKALQEQNNMLAKKVKEKEKALAQQTQWDNPQDDGLTSSSGSLPSEWN

SEQ ID NO: 14079 - protein, 459 aa, Pyrococcus furiosus DSM 3638
MEYPKIITKLPGPKATEIIERESRILSPGIGVKLFPLVPKRGFGALIEDVDGNIFIDFLAGAAAASTGYSHPKLVKAVQEQVALIQHSMIGYTHNERAIRVAEKLAKISPIKNPRIIFGMSGSDAVDMAIKVSKFSTRRPWILSFIGAYHGQTLGATSIAAFQSSQKRGFSPLMPNVIWLPYPNPYRNIWGIDGYEEPNELINRFLDYLENYVFSHLSPSDEVAALFAEPIQGDAGIVVPPENFFKEVQKVLNDLGILLVMDEVQTGIGRTGKWFASEWFSVEPDLIIFGKGVASGMGLSGVIGRKELMDLTSGAALLTPAANPVVSAAAEATLEIIEEENLLENALKVGNFIKKRLEEMKEVFEVIGDVRGKGLMIGVEIVKDRESKKPDPELTGKICWRAFELGLILPSYGMFQNVIRITPPLVITQEIAEKGLEIMERAIKDALAGKVERKVVTWH

SEQ ID NO: 14080 - protein, 493 aa, Pirellula sp. 1
MSEESKCPFQTQQFGRAVDDNQHSQTAGPRGPVLMQDVHLVEKMAHFNRERIPERVVHAKGFGAFGTFTVTNDITKYCMADLFSEVGKKTETFARFSTVGGESGSADTARDPRGFSLKFYTDQGVWDLVGNNTPIFFIRDPLKFSDFIRTQKREPQNHLQPHWRRWDFWGEVPEALHQVMFLYSDRGTPKSARFMNGYGSHTFSMYNKDGVRHWVKFHLKTEQGSENFSADEAIKMAGEAPDYSTRDLFEAIEKGDFPRWRMHIQVMPESDAADYEWHPFDLTKVWPHDDYPLIEVGVFELNRNPSNYFQDVEQAAFEPGNLVEGIGISPDRMLQNRVLSYPDAHRYRLGVNYHQIPVNQPRCPYATYHRDGTMRVDGNGGGTVDYEPNKMNGPKETGRTMEPPMPVHGDGDRYDEFACDDKDYYGQPQMFWNKVLDEGARERLCTAISNSMADSPENIREKMLAQFGKVHPDFEEGVRSRLDAPKSQPIPIA

SEQ ID NO: 14081 - protein, 369 aa, Candida albicans SC5314
MTTDSVPAKFQGFASSNKNTWNKPKLVSYDRKQINPHDVVLENEVCGLCYSDIHTLQSNWGEYNRDDLVVGHEIVGKVIAVGDKVTEFKIGQRVGIGAASSACRECNRCKSDNEQYCAKAASTYNAPDVRSNNYVTQGGYSSHSIADEQFVFPIPDDLPSAYAAPLMCAGITVFSPLLRNLGSDAKGKTVGIIGIGGLGHLALQLAKALGAKVVAFSRTSSKKDQALKLGADEFIATNEEKDWSSKYHDTFDFILNCASGVDGLNLQDYLSVLKVDKKFISVGLPPATEQFGVSPFTFLKHGASFGSSLLGSKVEVLEMLKLAAKHNVKPWIEEVPLSEENCSKALNRCHDGDVRYRFVFTEFDKAFAK

SEQ ID NO: 14082 - protein, 654 aa, Leptolyngbya boryana
MTDTLAAPTLNKFEKLKAEKDGLAVKAELEHFARLGWEAMDETDRDHRLKWLGVFFRPVTPGKFMLRMRVPNGIITSGQTRVLGEILQRYGDDGNADITTRQNFQLRGIRIEDLPEIFRKFDQAGLTSIQSGMDNVRNITGSPVAGIDADELIDTRGLVRKVQDMITNNGRGNSSFSNLPRKFNIAIAGCRDNSVHAEINDIAFVPAFKDGTLGFNILVGGFFSGKRCEAAIPLNAWVDPRDVVAVCEAILTVYRNLGLRANRQKARLMWLIDEMGLEPFREAVEKQLGYAFTPAAAKDEILWDKRDHIGIHAQKQPGLNYVGLHVPVGRLYAQDLFDLARIAEVYGSGEIRLTVEQNVIIPNVPDSRVSALLREPIVKRFSIEPQNLSRALVSCTGAQFCNFALIETKNRAVALMQELEQDLYCPRPVRIHWTGCPNSCGQPQVADIGLMGTKVRKDGKTVEGVDLYMGGKVGKHAELGTCVRKSIPCEDLKPILQEILIEQFGARLWSDLPESARPNPTALITLDRPTVETPNGKSTTVQELNAQEFDYVLSAPPVVKAPTEIAAPATIRFAQSGKEITCTQDDLILDIADQAEVAIESSCRSGTCGSCKCTLLEGEVSYDSEPDVLDEHDRASGQILTCIARPVGRILLDA

SEQ ID NO: 14083 - protein, 271 aa, Zea mays
MATTTDLGFEATELRLGLPGGGGGGEPALGGEGRSSSSASGKRGFAETIDLKLKLEPAAVVEAEEEEEDHGVAVALEKEEEAGKMKRSPSQSSVAAAAAAVLADPAEKPRAAKAQVVGWPPVRSFRKNIMSVQSDKGAAAANGDKSSPAAGGGAAFVKVSLDGAPYLRKVDLKMYRSYQQLSKALENMFSSFTIGSCGSQGMNGMNESKLVDLLNGSEYVPTYEDKDGDWMLVGDVPWEMFVESCKRLRIMKGSEAIGLAPRAMEKCKNRS

SEQ ID NO: 14084 - protein, 268 aa, Photorhabdus luminescens subsp. laumondii TTO1
MSVPAFGLGTFRLKDDVVITSVKNALELGYRAIDTAQIYENEAAVGQAIEESGVAREDIYITTKIWTENLSKEKLIPSLKESIAKLRTDYVDLTLIHWPSPHNVVSVDETMNALLDAKNMGLTREIGVSNFTIDLMQQAIDAVGAEHITTNQIELSPYLQNCHVTAWAKDHGIHITSYMTLAYSKALQDEVIRRIATKHQATPAQVILSWAMALGYSVIPSSTKRENLQSNLRASVLKLDADDMAAIATLDHNERLVNPEGLAPQWDN

SEQ ID NO: 14085 - protein, 279 aa, Zea mays
  unsure (1)..(279): unsure at all Xaa locations
LGEQTKPALATASNERVGEGKGLGGYVKSLTDEQMEVLRKQISXYATICEQLXEMHRVLTEHQDIXAGMSVXNLYCDPLIIPGGHKITARQRWQPTPMQLQILESIFDQGNGTPSKQKIKEITAELSQHGQISETNVYNWFQNRRARSKRKQAAASLPNNAESEAEADEEPLADKKPKSDRPPPPPPPIQDNTKATGALSADRVSGGTRHLDTGHDQTSGVMYGCNDSGLLRSSGSSGQMSLYENFMSNPRIDRFPAKVESSRSFPHLQQHGEGFGMFG

SEQ ID NO: 14086 - protein, 188 aa, Lactococcus lactis subsp. cremoris
MAIIGILGTPYNTVERSPFWWNKVSYTRQSFIDVFQELGHTVIVLPVDKTENIKNYLPLVDKIVLTGGVDVSPYLYGEEPHAQLGTTDPIRDRFELAAIKAALEANKPILGVCRGLQLLNVYFGGTLYQDLSLTSSQIKHLQSPTPQEVPTHHISVEKEDSFRFLPENYMVNSFHHQVIKDLGQGLQA

SEQ ID NO: 14087 - protein, 298 aa, Neisseria meningitidis
MPSENPSQRKKEKMKGIILAGGSGTRLYPITRGVSKQLLPVYDKPMIYYPLSVLMLAGIRDILVITAPEDNASFKRLLGDGSDFGISISYAVQPSPDGLAQAFIIGEEFIGNDNVCLVLGDNIFYGQSFTQTLKQAAAQTHGATVFAYQVKNPERFGVVEFNENFRAVSIEEKPQRPKSDWAVTGLYFTTTAPSISPNSSNRPHAANWKFPTSTGCIWKTARSPFKYWDAVSRGWTPVRTKACTRRLRSSKPCKTSKTCTSPAWKKSLGATVGFPMKNWKNWRARWRKTNTANICCAC

SEQ ID NO: 14088 - protein, 389 aa, Escherichia coli
TLQNGKLNVPENPIIPYIEGDGIGVDVTPAMLKVVDAAVEKAYKGERKISWMEIYTGEKSTQVYGQDVWLPAETLDLIREYRVAIKGPLTTPVGGGIRSLNVALRQELDLYICLRPVRYYQGTPSPVKHPELTDMVIFRENSEDIYAGIEWKADSADAEKVIKFLREEMGVKKIRFPEHCGIGIKPCSEEGTKRLVRAAIEYAIANDRDSVTLVHKGNIMKFTEGAFKDWGYQLAREEFGGELIDGAPWLKVKNPNTGKEIVIKDVIADAFLQQILLRPAEYDVIACMNLNGDYISYALAAQVGGIGIAPGANIGYECALFEATHGTAPKYAGQDKVNPGSIILAAEMMVRHMGWTEAADLIVKGMEGAINAKPVTYDFERLMEGAKLL

SEQ ID NO: 14089 - protein, 389 aa, Escherichia coli
TLQNGKLNVPENPITPYIEGDGIGVDVTPAMLKVVDAAGEKAYKGERKISWMEIYTGEKSTQVYGQDVWLPAETLDLIREYRVAIKGRMTTPDGGGIRSLNVALRQELDLYICLRPVRYYQGTPSPVKHPELTDMVIFRENSEDIYAGIEWKADSADAEKVIKFLREEMGVKKIRFPEHCGIGIKPCSEEGTKRLVRAAIEYAIANDRDSVTLVHKGNIMKFTEGAFKDWGYQLAREEFGGELIDGGPWLKVKNPNTGKEIVIKDVIADAFLQQILLRPAEYDVIACMNLNGDYISDALAAQVGGIGIAPGANIGDECALFEATHGTAPKYAGQDKVNPGSIILSAEMMLRHMGWTEAADLIVKGMEGAINAKTVTYDFERLMEGAKLL

SEQ ID NO: 14090 - protein, 848 aa, ASPERGILLUS NIDULANS FGSC A4
MNNDSFSSFKFRRPSSKLHKDPPGYGSRALNSQQSTTSLKRHPSAPVYPRSSAAGSREHLRTRSNAYGSSSSSLDQNSAGASPVLGSSDSGHFHSSHSSRSRPPYSGRFSLNDQSSDELIGAPFDSRGMLSALEEHTAEPDNRSYQPPDPAERYTEKPPNFRSQTTPNPRALRQSASFTTLPPRMEAFPNAAGNDRPTNTKRFSDEATPVRPPGPSRSKKSSFSSFVNSMLGSPRGIKISAPENPVHVTHVGYDNQTGQFTGLPKEWQRLLQESGITQKEQEEHPQTMVDIMRFYEKNARGDDEVWHKFDHAYPQQPTAASPISQPAGSTTYGTQRTSPPTSPRFPQNHEGSFENPRAPPPIPRAAPIAAHAMSPPLGGLVPNRAPPKPPTAAANLVPSRPAPQPPTSSPYSNISTRPSPETQSPQFSTPPIPETEPLPSESQRSRSNSRTNGAQGPWPSVSPSHYQQQQEQAMAVAQQALANKQLERSRSQRQQQQSPRPDQMPIAQPALPQHAPSPEDVALTQASQTARAAPAARPRQRPRQSNAMDVRARLVAICTPGDPTKLYYNLNKIGQGASGGVFTAYEQHTNNCVAIKQMNLDLQPKKDLIINEILVMKDSKHKNIVNFLDSYLHGLDLWVVMEYMEGGSLTDVVTFNIMSEPQIAAVCRETLNGLQHLHSKGVIHRDIKSDNILLSLDGNIKLTDFGFCAQINDSQNKRNTMVGTPYWMAPEVVTRKEYGRKVDIWSLGIMAIEMIEGEPPYLTESPLRALYLIATNGTPKIKDEHNLSPVFKDFLHFALRVDPEKRASAHDLLKHPFMNLCAPLNHLSPLVKAARISRAQEKAQKGGV

SEQ ID NO: 14091 - protein, 173 aa, Flaveria pringlei
MASIPATVATVAQANMVAPFTGLKSNAAFPVTKKVNDFSTLASNGGRVQCMKVWPPLGKKRYETLSYLPNLTEVQLAKEVDYLLRNKWVPCLEFELEHGFVYRENARSPGYYDGRYWTMWKLPMFGCTDSAQVMKELQECKKEYPQAWIRIIGFDNVRQVQCISFIASKPDGF

SEQ ID NO: 14092 - protein, 208 aa, Kluyveromyces lactis
MSQAVGNVASIRRKLVIVGDGACGKTCLLIVFAKGKFPQVYVPTVFDNYVADVEVDGRRVELALWDTAGQEDYDRLRPLSYPDSNVVLICYSIDLPDSLENVMEKWISEVLHFCQGVPIILVGCKADLRNDPQVVEELRAQGLQPVSQAQAQEVADQIGAVDYIECSAKTGYGVREVFEAATRASLVGKQGKSKPKTKSSKKKKCVVL

SEQ ID NO: 14093 - protein, 332 aa, Bdellovibrio bacteriovorus HD100
MFAARYVPGKKELSLVEVPKPTPGPLDVILKIRAAGICHSDLHVLHGEVPYKESFTMGHEACGEVVEKGSEVFGTFNPGDLYAVHGPNPCGHCNYCRTGHDNLCNDPSRTFIGLGQDGAYAEYLKVPARNIVKVPKGISPEVAAVATDAVLTPYHAIKTKGGVGLGSKVLAIGLGGLGMNGVQIALALGAEVTAVDLKDANLETAKSFGVQKVLNSKQISSLTPLSFDVVVDFVGLESTFKDAQNFVKPGGTILLIGLGSAQVPLTTATAITFETKVQASFWGTHVEMQELYELIAEGKIKPQVETAPMKEVNHWLHELEAGRVKSRMALIP

SEQ ID NO: 14094 - protein, 266 aa, Oryza sativa (japonica cultivar-group)
  unsure (1)..(266): unsure at all Xaa locations
MAKRSSPDPASSSPSASSSPSSPSSSSSEDSSSPMSMPCKRRARPRTDKSTGKAKRPKKESKEVVDPSSNGGGGGGGGKRSSIYRGVTRHRWTGRFEAHLWDKNCSTSLQNKKKGRQVYLGAYDSEEAAARAYDLAALKYWGPETVLNFPLEEYEKERSEMEGVSREEYLASLRRRSSGFSRGVSKYRGVARHHHNGRWEARIGRVLGNKYLYLGTFDTQEXAAKAYDLAAIEYRXANAVTNFDISCYLDQPQLLAQLQXEPQLLA

SEQ ID NO: 14095 - protein, 1193 aa, Ustilago maydis 521
MWLRSRFSLKRAMRLNQSRIRNRGWLISANHTQATRDLTFTIPSQAASNHESRITNHESRITNHECRMPNARASQSPDLQLNDSVIHDSAFKIVIQLVRSRFRSLRGLLRHFQRCELTRDSLPISLRESFSTLTTTPCAHSAPRTPWHAVSGLKLPHNVAELQSNIPLIAATVTMGHAQSRQQHDDGQEPLDDHVVTSSHAASHRASQSNDSHAFHSANREAVSTTSRRKRRRDSASVASSSTIAHQPLSQRRRMSPRSDTQSRPATPLVSPDTDPIHLPTQSSHPEMDLDAAEPPIHSLHSAQARMQTAEASSTPTDTHHVFVAAQSRVDTPSVVQDGETPPPHLDALHDERERARRQILEALASTPRHTPSLTTPVESSDERLGQSTTMPGLDAPSIAAPSAAPSHPLASAAIAALLGAIATVPATDATGLVPATPDSAASLPHLQPPPQPQHPQPARPPTFRTPLQPEIISGTSMVVQGALVARTLANRPATSDPSSPTDSSQRFGTRRVTREPATTRSPSNATAEARTGADSFPDVPETSSEGDSQRGAVTLEEQAVMLSRILGIAAAATAASLLNTSEAQHVDPSLLQTSLRRPFERMNQTPSNRTERWLADWQRASSHDPLTSVTSRADPPSSHALGNGFRSRLASLSRRSQSASSRPGFHNAQPLSDASTRSAPDDGTVQDPAGRQEIISHLLSAAEREAASQRRTRLRSVDAPTTRTEAEASDAARASRTQHDTQRSSLSQLVRSTLGSLLHPGRLLPTRSTRSTDTQLPSSSSHRSDWTRSSAASSGLRPATRPSSDFSLGPNDVSGTLRQVRNGILPDGVPGSFGSFLNHLVNDLMAAVQLMRPSSEEPLASEIATQTAQTTNYFEHATEAQASSGAEVLDGETATTRSQPASSQDNSSGDSSAHPDQEDAETQARRQRDFQNGNLSFFRLFRFDPVAPSQLVPCIVVGVRSLNVTERFGEEIGGARAAGADRDLNGSRQQTSRPTTFGSAEPEEPESTSPRRRQRAHSEGASTLAPSQDGSDQTDGEELPASRFMLFVSGGRYPPNHPLLTSNPSTAGRDLMILMDLLSTMQAMQHKPSTVTQREIDASDLLKIKGCQVADQVRDGKITENTAERCLVCLEDWREDDDCRVLACRHAFHTLCVDRWLTSSSNTCPMCRRQGVSKDGRQAGAETADSRRAAQA

SEQ ID NO: 14096 - protein, 389 aa, Escherichia coli
TLQNGKLNVPENPIIPYIEGDGIGVDVTPAMLKVVDAAVEKAYKGERKISWMEIYTGEKSTQVYGQDVWLPAETLDLIREYRVAIKGPLTTPVGGGIRSLNVALRQELDLYICLRPVRYYQGTPSPVKHPELTDMVIFRENSEDIYAGIEWKADSADAEKVIKFLREEMGVKKIRFPEHCGIGIKPCSEEGTKRLVRAAIEYAIANDRDSVTLVHKGNIMKFTEGAFKDWGYQLAREEFGGELIDGGPWLKVKNPNTGKEIVIKDVIADAFLQQILLRPAEYDVIACMNLNGDYISDALAAQVGGIGIAPGANIGDECALFEATHGTAPKYAGQDKVNPGSIILSAEMMLRHMGWTEAADLIVKGMEGAINAKTVTYDFERLMEGDKLV

SEQ ID NO: 14097 - protein, 389 aa, Escherichia coli
TLQNGKLNVPENPIIPYIEGDGIGVDVTPAMLKVVDAAVEKAYKGERKISWMEIYTGEKSTQVYGQDVWLPAETLDLIREYRVAIKGPLTTPVGGGIRSLNVALRQELDLYICLRPVRYYQGTPSPVKHPELTDMVIFRENSEDIYAGIEWKADSADAEKVIKFLREEMGVKKIRFPEHCGIGIKPCSEEGTKRLVRAAIEYAIANDRDSVTLVHKGNIMKFTEGAFKDWGYQLAREEFGGELIDGGPWLKVKNPNTGKEIVIKDVIADAFLQQILLRPAEYDVIACMNLNGDYISDALASTVGGIGIAPGQTLGDECALFEATHGTAPKYAGQDKVNPGSIILSAKMMLRHMGWTETADLIVKGMEGAINAKTVTYDFERLMEGAKLL

SEQ ID NO: 14098 - protein, 291 aa, Zea mays
  unsure (1)..(291): unsure at all Xaa locations
MATKRSVGTLGEADLKGKKVFVRADLNVPLDDAQKITDDTRIRASIPTIKYLLEKGAKVILASHLGRPKGVTPKFSLKPLVPRLSELLGLEVVMAPDCIGEEVEKLAAALPDGGVLLLENVRFYKEEEKNDPEFAKKLASVADLYVNDAFGTAHRAHASTEGVTKFLMPSVAGFLMQKELDYLVGAVANPKKPFAAIVGGSKVSSKIGVIESLLAKVDILILGGGMIFTFYKAQGLAVGKSLXVEEDKLELATSLIETAKSKGVKLLLPTDVVXVADKFAADAESKIVPAL

SEQ ID NO: 14099 - protein, 134 aa, Circaea cordata
ERVRNGSWVGATGKVLKDVIAVGIGGSFLGPLFVHTALQTDPEAGKNARGRELRFLANVDPIDVARSISGLNPETTLVVVVSKTFTTAETMLNARTLREWISSALGSSAVAKHMVAVSTNLPLVEKFGIDPKNA

SEQ ID NO: 14100 - protein, 716 aa, Pseudomonas syringae pv. syringae B728a
MASKNAPPVTETPKSEMAGTDTLDRGNTNEKLESLEQFRSDATQQALRTNHGVKISDNQNTLKVGSRGPSLLEDFIMREKITHFDHERIPERIVHARGTAAHGYFQTYEDHGALSKAGFLRDPGKKTPVFVRFSTVQGPRGSGDTVRDVRGFAVKLYTDEGNFDLVGNNMPVFFIQDAIKFPDFVHAVKPEPHNEIPTGGSAHDTFWDFVSLVPESAHMVLWTMSDRAIPKSLRTMQGFGIHTFRFINTEGKSSFVKFHWKPKFGVCSLVWDEAQKLAGKDTDFHRRDLWESIEMGDYPEWELGVQIVAEEDEHKFDFDLLDPTKIIPEELVPVTPLGKMVLNRNPDNYFAETEQVAFCPGHIVPGIDFSNDPLLQGRLFSYTDTQISRLGGPNFHEIPINRPIAPNHNGQRDAQHRTTIDKGRASYEPNSIDGGWPKETPAGPVDGGFETYPERVEAHKVRERSESFGDHFSQATLFFQSMSHHEKEHIIAAYSFELGKVEREYIRARQVNEILANIDMDLAKRVAANLGLPAPAAGTVPARQTSVKESPALSQVNLLSGDIVSRKVAILVADGVDGKAVEAMKAALTAEGAHAKVLGPTSAPVKTADGKSLPVDASAEGLPSVAFDAVFVPGGKASIEALKGDGVALHFILEAYKHLKAISFAGEAKELLSLLRLEEDAGLLEVSDSTSFKPFFHAIAQHRVWDREAKAKAVPA

SEQ ID NO: 14101 - protein, 182 aa, Mesembryanthemum crystallinum
MASSMVSSAAVATVNRTPAQASMVAPFNGLKSVAAFPVTKKNNDITSVATNGGRVQCMQVWPPLGKKKFETLSYLPPLSEESLMKEVQYLLNNGWVPCLEFEPTHGFVYREHGNTPGYYDGRYWTMWKLPMFGCTDPSQVVAELEEAKKAYPEAFIRIIGFDNVRQVQCISFIAYKPASYDA

SEQ ID NO: 14102 - protein, 461 aa, Synechococcus elongatus PCC 7942
MTADVLLADAQVLPAGGPASDRFDWAEVWYPVHYLRDLNRDRPNAFTLLGRDLVIWWDRSAEQWRAFEDACPHRQVRLSEGRLDAEGRLECPYHGWAFTGTGDCAVIPQQATTGQAHTSDRACAKTLPTATAQGLLFVYAGTPERADRVPLPLVEPWGTDADWVCIDTFRDLPYDALTLLENVLDPSHLPFTHHGSVGNRANAGPMTDLKIVESDRQGFQGVWPEGPRRGKLGTQSTTFIAPSLMWHDLEADSLGRAMTVVYATPIRAGECRIFARFPFRFKSAIPRFFLRIAPTWFQHLGQNTVLEEDQIFLHHQERRIQQQGGSATYSRQCYLPTSADRFVLALHRWVDRYAGVPFPNEPLPASRSIPELLERYQSHTLHCRSCAAAWRRSKQGQTVAIAIAALSWTLAPILAVAGVSATTVILLAVLGLSAAAIAWGLKQLQRRFEQGPRQVRRNQKA

SEQ ID NO: 14103 - protein, 180 aa, Mesembryanthemum crystallinum
MASMMSNAAVVGRTTPAQASMVAPFTGLKSVSAFPVTKKSNDITSIASNGGRVQCMQVWPPLGKKKFETLSYLPPLSEESLMKEVQYLLNNGWVPCLEFEPTHGFVYREHGNTPGYYDGRYWTMWKLPMFGCTDPSQVVAELEEAKKAYPEAFTRIIGFDNVRQVQCISFIAYKPASYDA

SEQ ID NO: 14104 - protein, 183 aa, Mesembryanthemum crystallinum
MASSLMSNAATTMAAATTTAQANMVAPFNGLKSVSAFPVTRKNNDITSVASNGGRVQCMQVWPPLGKKKFETLSYLPPLSEESLMKEVQYLLNNGWVPCLEFEPTHGFVYREHGNTPGYYDGRYWTMWKLPMFGCTDPSQVVAELEEAKKAYPEAFIRIIGFDNVRQVQCISFIAYKPASYDA

SEQ ID NO: 14105 - protein, 162 aa, Triticum aestivum
  unsure (1)..(162): unsure at all Xaa locations
MAPAVMASSATTVAPFQGLKSTAGLPVSRRSSGSLGRVSNGGRIRCMQVWPIEGIKNSETLSYLPPLSTEASLKQVDYLIXRSKWVPCLXFNKVGFSFRXAXSPPGYNDXPYWTMLELAIFXXTDPASLNKVEESKRIPDPIPLIGXTQFILNSIKHGSREG

SEQ ID NO: 14106 - protein, 183 aa, Mesembryanthemum crystallinum
MASSLMSNAATTMAAATTTAQANMVAPFNGLKSISAFPVTRKNNDITSVASNGGRVQCMQVWPPLGMKKFETLSYLPPLSEESLLKEVQYLLNNGWVPCLEFEPTHGFVYREHGNTPGYYDGRYWTMWKLPMFGCTDPSQVVAELEEAKKAYPEAFIRIIGFDNVRQVQCVSFIAYKPASYGA

SEQ ID NO: 14107 - protein, 136 aa, Circaea cordata
VSIDGLPLPFESGEIDFGEPGTNGQHSFYQLIHQGRVIPCDFIGVMKSQQPVYLKGEVVNNHDELMSNFFAQPDALAYGKTPEQLKKENVSEHLIPHKTFTGNRPSLSILLPSLDAYRIGQLLAIYEHRVAVQGFI

SEQ ID NO: 14108 - protein, 258 aa, Streptomyces avermitilis MA-4680
MGKLDGRVVLISGAARGQGEQEARLFVEEGAKVVVADVLDDQGEALAKEIGARYVHLDVGREDDWQAAVTVAKDAYGHIDGLVNNAGILRFNDLVGTPLAEFQQIVQVNQVGVFLGIKTVAPEIEAAGGGTIVNTASYAGLTGMAYVGAYTATKHAIVGLTRVAALELAAKKIRVNAVCPGAIDTAMSNPSQLDPGADPEETARALSELYGRLVPLGRIGRPEEVARLALFLSGEDSSYITGQPFVIDGGWLAGVSVI

SEQ ID NO: 14109 - protein, 256 aa, Ralstonia eutropha JMP134
MEACLNAAARKPAAPAKTTSSRAAKGSAKEGKVALPEAEVLPLPVETVIDAVRPAYWDEACADLMKRDRILRKMIPTYGPAHLVSRGDPFITLARSVVGQQISVKAAQSVWERLVGACPKLTPAQFLRAGPEKLAACGLSRRKAEYITDLADHFKAGRVHVNEWAVMDDEAVIAELTQIRGIGRWTAEMFLMFNLMRPNVLPLDDIGLINAISANYFSGEPVTRSEAREVAANWEPWRTVATWYMWRSLDPLPVTY

SEQ ID NO: 14110 - protein, 74 aa, Glycine max
MGFWTLLEGFLLFANALAILNEDRFLARRGWTLAEMTGPQRNSLKGQVIGLIYACQFLRLPLILFNVITIIVKL

SEQ ID NO: 14111 - protein, 558 aa, Shigella flexneri 2a str. 301
MSAAFSTISVILARKFVIAVVKLLPTGEDFASHVYPCYTSHRKETIMTNNPPSAQIKPGEYGFPIKLKARYDNFIGGEWVAPADGEYYQNLTPVTGQLLCEVASSGKRDIDLALDAAHKVKDKWAHTSVQDRAAILFKIADRMEQNLELLATAETWDNGKPIRETSAADVPLAIDHFRYFASCIRAQEGGISEVDSETVAYHFHEPLGVVGQIIPWNFPLLMASWKMAPALAAGNCVVLKPARLTPLSVLLLMEIVGDLLPPGVVNVVNGAGGEIGEYLATSKRIAKVAFTGSTEVGQQIMQYATQNIIPVTLELGGKSPNIFFADVMDEEDAFFDKALEGFALFAFNQGEVCTCPSRALVQESIYERFMERAIRRVESIRSGNPLDSVTQMGAQVSHGQLETILNYIDIGKKEGADVLTGGRRKLLEGELKDGYYLEPTILFGQNNMRVFQEEIFGPVLAVTTFKTMEEALELANDTQYGLGAGVWSRNGNLAYKMGRGIQAGRVWTNCYHAYPAHAAFGGYKQSGIGRETHKMMLEHYQQTKCLLVSYSDKPLGLF

SEQ ID NO: 14112 - protein, 389 aa, Escherichia coli
TLQNGKLNVPENPIIPYIEGDGIGVDVTPAMLKVVDAAVEKAYKGERKISWMEIYTGEKSTQVYGQDVWLPAETLDLIREYRVAIKGPLTTPVGGGIRSLNVALRQELDLYICLRPVRYYQGTPSPVKHPELTDMVIFRENSEDIYAGIEWKADSADAEKVIKFLREEMGVKKIRFPEHCGIGIKPCSEEGTKRLVRAAIEYAIANDRDSVTLVHKGNIMKFTEGAFKDWGYQLAREEFGGELIDGRPWLKVKNPNTGKEIVIKDVIADAFLQQILLRPAEYDVIACMNLNGDYISDALAAQVGGIGIAPGANIGDECALFEATHGTAPKYAGQDKVNPGSIILSAEMMLRHMGWTEAADLIVKGMEGAINAKTVTYDFERLMEGAKLL

SEQ ID NO: 14113 - protein, 389 aa, Escherichia coli
TLQNGKLNVPENPIIPYIEGDGIGVDVTPAMLKVVDAAVEKAYKGERKISWMEIYTGEKSTQVYGQDVWLPAETLDLIREYRVAIKGPLTTPVGGGIRSLNVALRQELDLYICLRPVRYYQGTPSPVKHPELTDMVIFRENSEDIYAGIEWKADSADAEKVIKFLREEMGVKKIRFPEHCGIGIKPCSEEGTKRLVRAAIEYAIANDRDSVTLVHKGNIMKFTEGAFKDWGYQLAREEFGGELIDGGPWLKVKNPNTGKEIVIKDVIADAFLHQILLRPAEYDVIACMNLNGDYISDALAAQVGGIGIAPGANIGDECALFEATHGTAPKYAGQDKVNPGSIILSAEMMLRHMGWTEAADLIVKGMEGAINAKTVTYDFERLMEGAKLL

SEQ ID NO: 14114 - protein, 480 aa, Yersinia pestis biovar Medievalis str. 91001
MMSKKKGLTTAAGAPVVDNNNVITAGRRGPMLLQDVWFLEKLAHFDREVIPERRMHAKGSGAYGTFTVTHDITQYTRAKIFSEIGKKTDMFVRFSTVAGERGAADAERDIRGFAMKFYTEEGNWDLVGNDTPVFYLRDPLKFPDLNHVVKRDPRTNLRNPVYKWDFFSQLPEALHQLTIDFSDRGLPKSYRHMHGFGSHTFSLINANNERFWVKFHFRCQQGIENLMDDEAEKLIGSDRESSQRDLYEAIERGDFPRWKLQIQVMPEHEASQTPYNPFDLTKVWPHGDYPLIDVGYFELNRNPENYFAEVEQSSFNPANVVPGISFSPDRMLQGRLFSYGDAARYRLGVNHHQIPVNSAKCPFHNYHRDGAMRVDGNSGNGATYEPNSFGLFQEQPDFSEPPLTLEGAADHWNHREDTDYFSQPRALFNLLSEEEHQRMFTRIAGELSQVPEAIQRRQIALFTQVDPAYGAGVKKALGLN

SEQ ID NO: 14115 - protein, 1136 aa, Glycine max
  unsure (1)..(1136): unsure at all Xaa locations
MSTSRPSQSSSNSGRSRRSARAMALATVDAKLHATFEESGSSFDYSSSVRVSGTADGVNQPRPDKVTTAYLHHMQKGKMIQPFGCLLALDEKTRMHTAXVIAYSENAPEMLTMVSHAVPSVGDHPALGIGTDIKTLFTAPSASALQKALGCADVSLLNPVLVHCKTSGKPFYAIVHRVTGSVMVDFEPVRPYEVPMTAAGALQSYKLAAKAITRLQSLPSGNMERLCDTMVQEVFELTGYDRVMAYKFHEDDHGEVIREITKPCLEPYLGLHYPATDIPQASRFLFRKNKVRMIVDCHAKHVRVLQDEKLPFDLTLCGSTLRAPHSCHAQYMANMDSIASLVMAVVVNDNEEDGDTDAIQPQKRKRLWGLVVCHNTTPRFVPFPLRYACEFLAQVFAIHVNKEIELEYQIIEKNILRTQTLLCDLVMRDAPLGIVSESPNIMDLVKCDGAALIYRNKVWRLGVTPSEPQIREIALWLSEYHMDSTGFSTDSLFDAGFPSALSLGDVVCGMASVRVTAKDMVFWFRSHTAAEIRWGGAKHEAGEKDDSRRMHPRSSFKAFLEVVKARSLPWKEYEMDAIHSLQIILRNAFKEDTESLDLNAKAINTRLSDLKIEGINDLKIERMQELEAVTSEIVRLIDTATVPILAVDVDGLVNGWNIKIAELTGLPIGEATGKHLLTLVEDSSTDRVKKMLNLALLGEEEKNVQFEIKTHGSKMDSGPISLVVNACASRDLRDNVVGVCFVAHDITAQKNVMDKFIRIEGDYKAIVQNRNPLIPPIFGTDEFGWCCEWNPAMMKLTGWKREEVMDKMLLGEIFGTQMAPXGSETEKALLSTTPKLTKAMTGSETEKVPFGFFARNGKYVECLLSVSKKLDVEGLVTGVFCFLQLASPELQQALHIQRLSEQTASKRLNALSYMKRQIRNPLCGIVFSRKMLEGTDLGTEQKQLLRTSAQCQQQLSKILDDSDLDTIIDGYLDLEMAEFTLHEVLVTSLSQVMTKSNGKSIRIVNDVAGHIMMETLYGDSLRLQQVLADFLLISINFTPNGGQVVVAGSLTKEQLGKSVHLVKLELSITHGGSGVPEVLLNQMFGNNGLESEEGISLLISRKLLKLMNGDVRYLREAGKSAFILSAELAAAHNLKA

SEQ ID NO: 14116 - protein, 389 aa, Escherichia coli
TLQNGKLNVPENPIIPYIEGDGIGVDVTPAMLKVVDAAVEKAYKGERKISWMEIYTGEKSTQVYGQDVWLPAETLDLIREYRVAIKGPLTTPVGGGIRSLNVALRQELDLYICLRPVRYYQGTPSPVKHPELTDMVIFRENSEDIYAGIEWKADSADAEKVIKFLREEMGVKKIRFPEHCGIGIKPCSEEGTKRLVRAAIEYAIANDRDSVTLVHKGNIMKFTEGAFKDWGYQLAREEFGGELIDGGPWLKVKNPNTGKEIVIKDVIADAFLQQILLRPAEYDVIACMNLNGDYISDALAAQVGGIGIAPGANIGDECALFEATPGTAPKYAGQDKVNPGSIILSAEMMLRHMGWTEAADLIVKGMEGAINAKTVTYDFERLMEGAKLL

SEQ ID NO: 14117 - protein, 182 aa, Mesembryanthemum crystallinum
MASSLMSNAATTMAAATTTAQANMVAPFNGLKSISAFPVTRKNNDITSVASNGGRVQCMVWPPLGMKKFETLSYLPPLSEESLLKEVQYLLNNGWVPCLEFEPTHGFVYREHGNTPGYYDGRYWTMWKLPMFGCTDPSQVVAELEEAKKAYPEAFIRIIGFDNVRQVQCVSFIAYKPASYGA

SEQ ID NO: 14118 - protein, 186 aa, Mesembryanthemum crystallinum
MASSMLSNAAVATTAASRSAGAQASMVAPFTGLKSVSAFPVTRKSSNDLSTVPSNGGKVQCMQVWPPLGKKKFETLSYLPPLSEESLLKEVQYLLNNGWVPCLEFEPTHGFVYREHGNTPGYYDGRYWTMWKLPMFGCTDPSQVVAELEEAKKAYPEAFIRIIGFDNVRQVQCVSFIAYKPASYDA

SEQ ID NO: 14119 - protein, 389 aa, Escherichia coli
TLQNGKLNVPENPIIPYIEGDGIGVDVTPAMLKVVDAAVEKAYKGERKISWMEIYTGEKSTQVYGQDVWLPAETLDLIREYRVAIKGPLTTPVGGGIRSLNVALRQELDLYICLRPVRYYQGTPSPVKHPELTDMVIFRENSEDIYAGIEWKADSADAEKVIKFLREEMGVKKIRFPEHCGIGIKPSSEEGTKRLVRAAIEYAIANDPDSVALVHKGNIMKLTEGAFKDWGYQLAREEFGGELIDGGPWLKVKNPNTGKEIVIKDVIADAFLQQILLRPAEYDVIACMNLNGDYISDALAAQVGGIGIAPGANIGDECALFEATHGTAPKYAGQDKVNPGSIILSAEMMLRHMGWTEAADLIVKGMEGAINAKTVTYDFERLMEGAKLL

SEQ ID NO: 14120 - protein, 941 aa, Pichia pastoris
MPDASLFNGTSFITLFAPNISLLQASIDFYTNFLGFAIRKNSNQKLFWLQLEEDQNNVSIQLILDPEHAASVSQIDQNIRNLTRSLYRKDWRSIQSNIAFKSSSLSKLVKLLKDGGHPVQQSPNEISPFEVYTVDPLGSLIGFSGFKNPFAVNERSLLPKVSEEKAYRAEDDSEKLLNPVRKTIGVMTSGGDSPGMNPFVRAVVRAGIYKGCKVFCIHEGYEGLVRGGEKYIKETQWHDVRGWLVEGGTNIGTARCKEFRERSGRLKACKNMIDMGIDALIVCGGDGSLTGADRFRSEWPSLIEELLQTEQISQQQFNTHQNLNICGAVGSIDNDMSSTDATIGAFSSLDRICRAIDYIDATANSHSRAFIVEVMGRHCGWLGLLAGLATSADYILIPEKPASSREWQDQMCDIVGKHRARGKRKTIVIVAEGAISNDLSPISCDQVKDVLVNRLGLDTRVTTLGHVQRGGTAVAFDRIYATLQGVEAVNAVLECDADTPSPMIAIKEDQITRVPLVDAVELTQQVAKSIESRNFKKAISLRDSEFVEHMKNFISTNSADHVPPSLPLEKRKKIAIINVGAPAGGMNSAVYSMATYCMSRGHVPYAIHNGFSGLARHESVRSINWLDIEGWGSLGGSEIGTNRTLPNDADIGMIAYFFEKYGFDGLILVGGFEAFISLHQLERARINYPSLRIPLVLIPATISNNVPGTEYSLGSDTCLNSFMEYCDVIKQSAAATRNRVFVVEVQGGNSGYIATHAQLACGAQISYVPEEGISLAQLEMDINSLKESFANDQGKTKSGRLILKSENASKVLTTEVISTIIDDEASGRFDSKTAIPGHVQQGGIPSPMDRVRASRFAIRAVSFIERHSDRCQTFKNSISFRQTDEITSTAVVLGIHKSQLRFTPIRQLYDFESDVPRRMRKNIFWSNVREISDMLSGRTSL

SEQ ID NO: 14121 - protein, 590 aa, Oryza sativa
MNSAAAAAACASAPAWVVGGGAGGGARSARGPCGIRVCGLGGEAVALRSLRISQGAAVRRAAVAARAAAENGVAGSGGFDYDLVIIGAGVGGHGAALHAVEEGLKTAIIEGDVVGGTCVNRGCVPSKALLAVSGRMRELHDEHHMKSLGLQVSSPGYDRQAVADHANNLASKIRSNLTNSMKALGVDILSGFGAIVGKQKVRYGKVGFPDKEITARNIIIATGSVPFVPKGIEVDGKTVFTSDHALKLESVPDWIAIVGSGYIGLEFSDVYTALGSEVTFVEALDQLMPGFDPEIAKLAQRVLINPRNIDYHTGVFASKITPAKDGKPVQIELIDAKTKEHKETLEVDAALIATGRAPFTKGLGLENINVVTQRGFIPVDERMRVMDADGNVVPNLYCIGDANGKLMLAHAASAQGISVVEQISGRDHILNHLSIPAACFTHPEISMVGLTEPQAREKADKEGFEISVVKTSFKANTKALAENEGDGLAKLIYRPDTGEILGVHILGLHAADLIHEASNAIALGTRLQDIKFAVHAHPTLSEVLDELFKAAKLQPREGPERKPKHPPQPLLKVLSFVTRLLTSQKRNRQP

SEQ ID NO: 14122 - protein, 451 aa, Pirellula sp. 1
MSSEHFDLVVLGTGPSGGTVATKIAKAGKRVALVDSRTFGGVCALRGCNPKKVYVNAGQLVDQIHRGDGKLISDASVKIDWKQLHAFKMEFTQPVAEKKEQSFQEDGIETFHGVARFVSPDTIDVVGTKLTADRFLIGTGGRPRELSFDGAEHVTRSDEFLELESMPEHVVFIGGGYISMEFAGVVARAGSRVTVIEMNNQILSGFDPDLVNQLTDSLREHGIRFQMNAEIIGIDKSADGHLQVHLANEQSPIVCGLVVHGAGRVPNIDELCLSQGEIEHGEKGIAVNQFMQNPTNPRVFATGDCADNGMPRLTPVANEDARIAAKNLFSETLERTPDYGQVPKVAFTIPSIASVGLSEEAARDSNDNLTVLSDDISSWGSVRKTGPTVAGYKILIDSKTDAILGAHLLGPSAEETISLFALAMKFNLTATDMKSTLFAFPTFASDVRSML

SEQ ID NO: 14123 - protein, 328 aa, Pirellula sp. 1
MSASATEKKCETMNAVVYDDYGDANVLHSGVVPLPDRLPGQVLIDVRASSVNPIDYRIRRGEVKGLLPGGFPRVPGYDVAGVIADCEPDGPFEVGDRVMAFLDTMRGGASADFAVAAVDVTAAIPDSMSFNEAAAVPLAGTTALQSLRDHGNIAEGKRLLINGASGGVGMFAVQIAKAFHCHVDAVASGDNEKFCRSLGADHFYNYETTDFTESDERWDLIFDAAGKSGYWDVKKVLNDGGRYVSTEPDAKGMLMTLVTWPMSKSGTVMLAKPNADDLRTLIEMREKGQLQITIDAIYPFSQLSQAHQHVENGVERGKVVLTADGSGL

SEQ ID NO: 14124 - protein, 132 aa, Xanthomonas axonopodis pv. citri str. 306
MLASCAPTLPPSGGTIASFERIDRNLGTGAEATPGAMVTVHYTGWLYDEKAADKHGKKFDSSLDRAEPFQFVLGGHQVIRGWDDGVAGMRVGGKRTLMIPPDYGYGDNGAGGVIPPGASLVFDVELLGVQPR

SEQ ID NO: 14125 - protein, 342 aa, Oceanobacillus iheyensis HTE831
MKAVFVEDAEKIIVKDIEVPELKPNEVQIKVNVAGICGSDIHTYKGLHPFRKPPVVIGHEVAGEVVEVGSSVTKFKVGDRVTVEPQIGTGESEGVMTGNVNYSDTRLAPGMGDWLGTMAEYFASPEEQVIKLPDSVSYDQGVLVEPLAVGVHAAFKGDVQPTDRVAILGAGPIGLLTLIAVKAKGVKDIVVTDVLDYSLQVAKEMGASEVINIKDNSNWIHDAKQSLDKGSFDKVFITAGVPGIVNDSLNLLRKGGRVVTVAMFHGQQSVDIEQLQQNEKEIIGCMTYNRPDTEEALEIIASGKLDVEKVISHKLHYEEAAKGFTIVDKKKDKSVKVLVSFE

SEQ ID NO: 14126 - protein, 673 aa, Oceanobacillus iheyensis HTE831
MSNQEQNKKNQQLDQFRVNDKDKSLTTNQGLKMNEDEFSLKAGERGPSLLEDFHLREKITHFDHERIPERVVHARGFAAHGEFEVYESLAPYTKANFLGEAGKKTPVFVRFSTVAGSRGSGDMARDVRGFATKFYTDEGNYDLVGNNIPVFFIQDGIKFPDLIHAVKPEPHNEIPQAQSAHDTFWDFVANNQETAHMIMWHLSDRAIPRSFRMMEGFGVHTFRFVNEEGQAFFVKFHWKPVLGVHSVIWDEALKLNGNDPDFQRRDLYDAIENGQYPEYELGLQIIKEEDEFNFDFDVLDPTKIWPEEDVPVKIVGKMTLNQNIDNYFAETEQVAFHPGHVVPGIDFTNDPLLQARLFSYTDTQLIRLGGPNFHEIPINRPVCPFHNNQRDGYGRQTINSGQVSYHKNSLADNTPTPVSEENGGYKHYQEKVEGKKVRARSISFEDHFTQAALFWNSMSDVEKNHIIDAFSFELGKCKEVAIREQVLDMFSNVSHDLVTGIAENLGLAIPKKKEIDYTKSSPALSQANTKKKADTRKVGIIVADGFDEELFSHIKALNEANINPEIISDHQGSISSKEGNKIPVHHTFKTADSVLFDSILIASKEGTKPLFTKEAPNFVKEAYMHYKPISALQDGASVLHDLGLTDEKGVVTNNASQFVEAVAEARFWNRDGK

SEQ ID NO: 14127 - protein, 267 aa, Zea mays
MDPKMTEVTQMFARFKAAYARNDLNTCVTLLSQLKVHLTQFPSLPPLFQQTPNIVEELKLARDIYEHAVVLSVKLEDQDAFERDFCQLKPYYMDTCGIIPASPEEYPILGLNLLRLLVQNRIAEFHTELELLPVKALEHPCIKHAVELEQSFMEGAYNRVLSARQAVPHETYVYFIDLLAKTVRDEIAGCSEKGYDSLSVSDAKQMLMFSSDQDLHEYITEEHPEWEIKNGAVFFQKAKESQPCKEIPSLQLINQTLSYARELERIV

SEQ ID NO: 14128 - protein, 147 aa, Methylobacillus flagellatus KT
MLASAFVLAMLAMSGCSADTNSDKEKIVMSDNITELQKIDTLVGEGREAEAGLNVTVHYTGWLYDPSKPDGKGTKFDSSVDRREPFVFYLGGGQVIRGWDEGFAGMKVGGKRTLVIPPEYGYGARGAGGVIPPNATLLFDVELLGVK

SEQ ID NO: 14129 - protein, 404 aa, Oryza sativa (japonica cultivar-group)
MELFLQLGMASTVAINLIGAQAGIISKLRNCDITSYSGLKARSSISFESRSSFLGQNASLRSSISPRIVPKANSGSHISPEASYKVAVLGAAGGIGQPLGLLIKMSPLVSALHLYDIANVKGVAADLSHCNTPSQVLDFTGPSELANCLKGVDVVVIPAGVPRKPGMTRDDLFNINASIVKTLVEAVADNCPEAFIHIISNPVNSTVPIAAEVLKQKGVYNPKKLFGVTTLDVVRANTFIAQKKNLKLIDVDVPVVGGHAGITILPLLSKTRPSVTFTNEETEELTRRIQNAGTEVVEAKAGAGSATLSMAYAAARFVESSLRALAGDPDVYECTFVQSELTELLFFASRVKLGKNGVESIISSDLEGVTEYEAKALESLKPELKASIEKGIEFVHKQQAAATS

SEQ ID NO: 14130 - protein, 389 aa, Escherichia coli
TLQNGKLNVPENPIIPYIEGDGIGVDVTPAMLKVVDAAVEKAYKGERKISWMEIYTGEKSTQVYGQDVWLPAETLDLIREYRVAIKGPLTTPVGGGIRSLNVALRQELDLYICLRPVRYYQGTPSPVKHPELTDMVIFRENSEDIYAGIEWKADSADAEKVIKFLREEMGVKKIRFPEHCGIGIKPCSEEGTKRLVRAAIEYAIANDRDSVTLVHKGNIMKFTEGAFKDWGYQLAREEFGGELIDGGPWLKVKNPNTGKEIVIKDVIADAFLQQILLRPAEYDVIACMNLNGDYISDALAAQVAGMGIAPGANIGDECALFEATHGTAPKYAGQDKVNPGSIILSAEMMLRHMGWTEAADLIVKGMEGAINAKTVTYDFERLMEGAKLL

SEQ ID NO: 14131 - protein, 271 aa, Clostridium beijerinckii
MKNTWLNLEGKTAIVTGGASGIGKAVAQEFLNNGANVVVCDMNPNKPEFDDHNGHMEYIVTNVADRDSVEKMIEKAKEITGTIDIIVNNAGINIPRLLVDKKEPKGKFELDENVWDKVMNVNVKGVFLCAQVAAREMASQGKGVIINMSSESGLEGSEGQSVYAASKNAVNSLTRSWAKELGKLGIRVIGVAPGILEATGLRTLEYETALAYTRGITVEELRAGYSKTSTTPLGRSGKLSEVADLVCYLASDRASYIHGVTYNIAGGKTRG

SEQ ID NO: 14132 - protein, 578 aa, Ustilago maydis 521
MVGVATTRDHSHVAQALADHRLSMVGATGAKGLVKNARTLAIAVFASMGGLIYGYNQGMFGQILSMHSFSEASGVKGITNPTLAGFITAILELGAWVGVLMNGYVSDAFGRRKCVVFGVVWFILGAIIQACTRDGSYNYIIAGRTITGVGIGSLSMIVPLYNAELAPPEIRGSLVALQQQAIVAGVMISYWFTYGTNYIGGTGAAQSRAAWLIPITVQILPALMLAIGIFFLPESPRWLINVGREQESLKVIADLRRLPENDLLVQLEFLEVKAQKLFEDRVSAHDHPDLQDGSRSSNFKLGVAQYKSLVTNPANLRRTIVAVVTMLFQQWCGINFVLYYSPFIFKQIGLEGNTISLLASGVVGIVLFLATIPAVLYIDTWGRKPTLYVGCAIMGACHLAVAIIIATCSDNWPAHRAAGWVACVFVWIFAAGFGFSFGPIGWIIVAEVFPLGLRAKGVSIGAASNWLNNFAVAMSTPDFISAAPYGVFIFLGVMCFLAIAYVKFFVPETKMKSLDELDAVFGDNSGRSKWEAGMMLQAQRDVGLLRLAGIDEGKISAVTADDASDKDEKSSDIITSTV

SEQ ID NO: 14133 - protein, 325 aa, Triticum aestivum
  unsure (1)..(325): unsure at all Xaa locations
MKDFPGVFPRIFGHEAFGVVESTGEHVEGFAAGDAVVPTFLAQCSECADCRSSRSNVCSKYRFAVRPGMPRDGTTRFRDGDGNPIHHLSSADAWGEYTVVDVTQVVKVDPAVPPATACLLSCGATTGVGAAWKLAKVEPGSSVAIFGLGAXGLAVAEGARICGASKIIGVDLNPDKEELGKKSRASHFINPKELGEKTVSQVIIEMTDGGADYCFECIGLAALMNDAFQSSRAGWGKTIILGVERHGAPLTISSLEILHGKCVMGSLFGGVKPKQDIPILADKYLNKELELDKFITHEVGLKDINTAFDLLLQGKSLRCTIWMDK

SEQ ID NO: 14134 - protein, 389 aa, Escherichia coli
TLQNGKLNVPENPIIPYIEGDGIGVDVTPAMLKVVDAAVEKAYKGERKISWMEIYTGEKSTQVYGQDVWLPAETLDLIREYRVAIKGPLTTPVGGGIRSLNVALRQELDLYICLRPVRYYQGTPSPVKHPELTDMVIFRENSEDIYAGIEWKADSADAEKVIKFLREEMGVKKIRFPEHCGIGIKPCSEEGTKRLVRAAIEYAIANDRDSVTLVHKGNIMKFTEGAFKDWGYQLAREEFGGELIDGGPWLKVKNPNTAKKIVIKDVIADAFLQQILLRRPEYDVIACMNLNGDYISDALAAQVGGIGIAPGANIGDECALFEATHGTAPKYAGQDKVNPGSIILSAEMMLRHMGWTEAADLIVKGMEGAINAKTVTYDFERLMEGAKLL

SEQ ID NO: 14135 - protein, 177 aa, Glycine max
MGNYVSCTLAPPLMKNSKATRVIIPTGEVKQFREIVKAAELMLEHPSYFLVNSRSLHIGRRFSALGADEELESGNVYIFFPMRRVNSVVTPTDMAVLFLAANSAAKRLSGGKARVLPDNCDGGAWQHKEESSKDGSLSEIPRLSLEGVESGFQCRLNYCRSRKPVLETINEEPVRLR

SEQ ID NO: 14136 - protein, 369 aa, Caulobacter crescentus CB15
MKTRAAVAFEAKKPLEIVEVDLEGPKAGEVMVEIKATGVCHTDAYTLDGFDSEGIFPSILGHEGAGVVVEVGAGVTSVAVGDHVIPLYTPECRQCKSCLSGKTNLCTAIRATQGKGLMPDGTSRFSYKGQPIYHYMGCSTFSNYTVLPEIAVAKIRRDAPFKTACYCGCGVTTGVGAVTNTAKVEPGANAIVFGLGGIGLNVIQGLKLVGANMIVGVDINPDREEWGRKFGMTHFVNPKDVQGDLVAHLVALTDGGADYTFDATGNTGVMRTALEACHRGWGESIIIGVAEAGKEISTRPFQLVTGRVWKGTAFGGARGRTDTPKIVDWYMDGKIQIDPMITHVLPLEEINKAFDLMHAGESIRTVVTF

SEQ ID NO: 14137 - protein, 467 aa, Magnetococcus sp. MC-1
MEEMMATIWDLIVIGAGPGGYPAAIRAAQLGLSVLCIEKSPHPGGTCLNAGCIPTKALLASTHLYTQIRDQADLHGIEITTMQVNLARMQGRKERVVSQLRSGILGLFKKYGVTLLHDEAIVSGPGQITLAASGETLQAKAILLATGGQPRRPASMPVDGQVVITSEQAIALTRVPEHLIVIGSGAVGLELASIWVRLGAQVSVIEAQPEILPGWDATVARTAKRSLRQQGITFLTDHRVETVVRSGSRAAVTCLNSKGETLMLDGDQVLVAVGRQAQLCVAGIQNLELQQDEQGRLWVDAHYATSLAGLYAVGDLIAGPQLAHRATAEGLRVADYLAGRPLSPMGPIPSVVYTDPELAMVGLTEQQAKVAGYAVKCGQFPFMASGRARAQEQTEGLIKLVMDQTTGQLLGAHVVGGAGAEHLQLAMAAMLTQDRGQLLERLVMPHPSFGEALHEAWLVATQKPIHI

SEQ ID NO: 14138 - protein, 958 aa, Vibrio parahaemolyticus RIMD 2210633
MSTAFEVDNTIANIFSSQVPLVEGTYDLTPDQVLLEQAEHESEVRSYPRRLPIAIKQAYGCLVEDTRGQVFLDCLAGAGTLALGYNHPEINQALKEQLDSGLPYQTLDIATSAKTHFIKSVKSFLPQELGDNCVIQFCGPSGADAVEAAIKLAKQTTGRNTMFAFRGAYHGMTNGTMGMMGNLGTKARRTGLMSDVHFMPFPYNLRCPFGLGGDEGAKASIRYIERLLNDDEAGIMKPAAIIVEPVQGEGGVIPAPAFWLRELRRICDEHGILLIFDEIQCGVGKSGYNFAFEEAGIVPDVLCLSKAIGGGLPMSLLVINKQHDTWKPGEHTGTFRGNQLAMVSGAKALEIIQRDNLVEHANVAGQYLRFGLENIQKRVNCIAEVRGKGLMLGVEIKNPNGELNKFGEPLADGQLTLAIQRAALERGLMVEKGGREGSVIRFLPPLIISFEQIDFALRVLEEAIIAAGGSHVEAAPQEEWKKHFIHTGELGSAEFASVMSHTTSAMKSVFEQVNAPYSGMDPKALEDAINAVDLDNKNAPLKSVIDDVAELVAKNAIFTQHPDCIAHLHTPPLMPAVAAEAMIAALNQSMDSWDQASSATYVEQKVVNWLCDKYDLSEKADGIFTSGGTQSNQMGLMLARDWIADKLSGHSIQKLGLPDYADKLRIVCSKKSHFTVQKSASWMGLGEKAVMTVDANADGTMDITKLDEVIAQAKAEGLIPFAIVGTAGTTDHGAIDDLDFIADMAVKHDMWMHVDGAYGGALILSSHKSRLKGVERAHSISVDFHKLFYQTISCGALLVNDKSNFKFLLHHADYLNREHDELPNLVDKSIATTKRFDALKVFMTMQNVGPKALGDMYDHLLAQTLEVADMIRTNDQFELLAEPSLSTVLFRATHETADLDELNKALRLEALTRGIAVLGETIVDGKTALKFTILNPCLTTSDFESLLSKINMLAVELV

SEQ ID NO: 14139 - protein, 386 aa, Vibrio parahaemolyticus RIMD 2210633
MSVIKMTDLDLAGKRVFIRADLNVPVKDGKVTSDARIIASLPTIKHCLEAGAKVMVTSHLGRPTEGEYAEEFSLQPVVNYLNDALDCEVKLAKDYLDGLELNAGELVVLENVRFNKGEKKNEEELSKKYAALCDVFVMDAFGTAHRAQASTHGVGMHAPVACAGPLLANELEALGKAMDKPARPMVAIVGGSKVSTKLTVLESLSKIADQLVVGGGIANTFIAAAGHNVGKSLYEADLVDTAKKLMDECAIPVATDVACAKAFDENAEAEIKHVSEVQDDDMIFDLGPESTAALAEILKNAKTILWNGPVGVFEFKNFEAGTKGISEAIAASEGFSVAGGGDTLAAIDKFGIKADVSYISTGGGAFLEFVEGKVLPAVEMLEARAK

SEQ ID NO: 14140 - protein, 148 aa, Archaeoglobus fulgidus DSM 4304
MKVALGGTFEPLHEGHKKLIDVAIKLGGRDITIGVTSDRMARARIRSVLPFAIRAENVKRYVMRKYGFEPEIVKITNPYGKTLDVDFEYLVVSPETYEMALKINQKREELGKRKITIVKVDWMMAEDGKPISSTRIKRGEIDRYGGII

SEQ ID NO: 14141 - protein, 383 aa, Zea mays
DEKETTRLAAVSLTTRCPRPIGRTALWCTGVSRPSSLTPSPATPSSILPDGAPGSRNKMSNRATHWCYACRRPIRLRGQDIACPNCNDGFIQEISEMGGILNTYGLIEPDFEERRARRFGMMDAMSSLMRQRMEEMGRDGLFDIRGRQGTGTEYGRRPTAVPTLVFGGIPSPGVDSGDVNVVLRGGRRVGAAQPNFSSLVVGPSLEALFEQLLLQNNRQGPAPAPQSAIDSMPVVKINRRHLDDDPQCAVCKDKFEVGAEAREMPCKHLYHTDCIIPWLVQHNSCPVCRHPLPSQRSGSTSSARPSAYYNEAADPPGVTRADLEPAPRDGGRESQERRRSFSFLWPFGPSSSRSSSYQYEQNVDEPAVYDPNQIAYSEWHYDH

SEQ ID NO: 14142 - protein, 436 aa, Bacillus subtilis subsp. subtilis str. 168
MSQTTASITTAQWQQKRDQFVSKGVSNGNRSLAVKGEGAELYDLDGRRFIDFAGAIGTLNVGHSHPKVVEAVKRQAEELIHPGFNVMMYPTYIELAEKLCGIAPGSHEKKAIFLNSGAEAVENAVKIARKYTKRQGVVSFTRGFHGRTNMTMSMTSKVKPYKFGFGPFAPEVYQAPFPYYYQKPAGMSDESYDDMVIQAFNDFFIASVAPETVACVVMEPVQGEGGFIIPSKRFVQHVASFCKEHGIVFVADEIQTGFARTGTYFAIEHFDVVPDLITVSKSLAAGLPLSGVIGRAEMLDAAAPGELGGTYAGSPLGCAAALAVLDIIEEEGLNERSEEIGKIIEDKAYEWKQEFPFIGDIRRLGAMAAIEIVKDPDTREPDKTKAAAIAAYANQNGLLLLTAGINGNIIRFLTPLVISDSLLNEGLSILEAGLRA

SEQ ID NO: 14143 - protein, 404 aa, Streptococcus pneumoniae R6
MKEYNKSSKLEHVAYDIRGPVLEEAMRMRANGEKILRLNTGNPAEFGFTAPDEVIHDLIMNARDSEGYSDSKGIFSARKAIMQYCQLKKFPNVDIDDIYLGNGVSELIVMSMQGLLDNGDEVLVPMPDYPLWTAAVSLAGGNAVHYICDEAVEWYPDIDDIKSKITSNTKAIVLINPNNPTGALYPKELLLEIIEIARQNDLIIFADEIYDRMVMDGHVHTPVASLAPDVFCVSMNGLSKSHRIAGFRVGWMVLSGPKTHVKGYIEGLNMLSNMRLCSNVLAQQVVQTSLGGHQSVDELLLPGGRIYEQRNFIYNAIQDIPGLSAVKPKAGLYIFPKIDRNMYRIDDDEQFVLDFLKQEKVLLVHGRGFNWQEPDHFRIVYLPRVDELAQIQEKMTRFLKQYRR

SEQ ID NO: 14144 - protein, 289 aa, Populus alba
EENWAEEVREDWFQDELEGESYCSNNSNKLNTFPILLEQDLSWEDEELSSLFAKEEQNQLCKDLETNPSLARARCEAVEWILKVNEHYSFTALTAVLAVNYLDRFLFSVHLQKEKPWMAQLAAVSCLSLAAKVEETQVPLLLDFQVEDSKYVFEAKTIQRMEILVLSTLKWKMNPVTPISFLDYITRRLGLEHYLCLEFLKRCERMVLSILADSRSMPYVPSVMAAATMLYVIDNIKPSLAAEYQSQLLSILGIDKDKVEDCSKFLMEFALREHFKLLSNKRKFCSLPG

SEQ ID NO: 14145 - protein, 389 aa, Escherichia coli
TLQNGKLNVPENPIIPYIEGDGIGVDVTPAMLKVVDAAVEKAYKGERKISWMEIYTGEKSTQVYGQDVWLPAETLDLIREYRVAIKGPLTTPVGGGIRSLNVALRQELDLYICLRPVRYYQGTPSPVKHPELTDMVIFRENSEDIYAGIEWKADSADAEKVIKFLREEMGVKKIRFPEHCGIGIKPCSEEGTKRLVRAAIEYAIANDRDSVTLVHKGNIMKFTEGAFKDWGYQLAREEFGGELIDGGPWLKVKNPNTGKEIVIKDVIADAFLQQILLRPAEYDVIACMNLNGDYISDALAAQVGGIGIAPGANIGDECALFEATHGTAPKYAGQDKVNPGSIILSAEMMLRHMGWTEAADLIVKGMEGAINAKTVTYDFERLMDGAKLL

SEQ ID NO: 14146 - protein, 389 aa, Escherichia coli
TLQNGKLNVPENPIIPYIEGDGIGVDVTPAMLKVVDAAVEKAYKGERKISWMEIYTGEKSTQVYGQDVWFPAETLDLIREYRVAIKGPLTTPVGGGIRSLNVALRQELDLYICLRPVRYYQGTPSPVKHPELTDMVIFRENSEDIYAGIEWKADSADAEKVIKFLREEMGVKKIRFPEHCGIGIKPCSEEGTKRLVRAAIEYAIANDRDSVTLVHKGNIMKFTEGAFKDWGYQLAREEFGGELIDGGPWLKVKNPNTGKEIVIKDVIADAFLQQILLRPAEYDVIACMNLNGDYISDALAAQVGGIGIAPGANIGDECALFEATHGTAPKYAGQDKVNPGSIILSAEMMLRHMGWTEAADLIVKGMEGAINAKTVTYDFERLMEGAKLL

SEQ ID NO: 14147 - protein, 276 aa, Nostoc punctiforme PCC 73102
MMQTLRKHYPEYLMEAAGLGIFLISAVVVTTLLEHPASPIPQAISDPLLRRFIIGVAMGLIAICIIYSPWGKQSGAHLNPVVTFTFFRLGKIQPWDVIFYILAHFIGGLLGLLFAVVVFRDAVTNPSINYIVTIPGAGGAGVAFLAELVISFGVMLMILFASNTPKLAPFTGIFAGVMIATYITVEAPLSGTSMNPARTLASAIPSHNWTAIWVYFTAPLLGMLLAAELYIRLKGKRAVRCAKLHHHNNKRCIFRCGYRHPEVDKRWLLSDKLPNP

SEQ ID NO: 14148 - protein, 388 aa, Escherichia coli
TLQNGKLNVPENPIIPYIEGDGIGVDVTPAMLKVVDAAVEKAYKGERKISWMEIYTGEKSTQVYGQDVWLPAETLDLIREYRVAIKGPLTTPVGGGIRSLNVALRQELDLYICLRPVRYYQGTPSPVKHPELTDMVIFRENSEDIYAGIEWKADSADAEKVIKFLREEMGVKKIRFPEHCGIGIKPCSEEGTKRLVRAAIEYAIANDRDSVTLVHKGNIMKFTEGAFKDWGYQLAREEFGGELIDGGPWLKVKNPNTGKEIVIKDVIADAFLQQILLRPAEYDVIACMNLNGDYISYALAAQVGGIGIAPGANIGDECALFEATHGTAPKYAGQDKVNPGSIILSAEMMLRHMGWTEAADLIVKGMEGAINAKTVTYDFERLMEGAKL

SEQ ID NO: 14149 - protein, 389 aa, Escherichia coli
TLQNGKLNVPENPIIPYIEGDGIGVDVTPAMLKVVDAAVEKAYKGERKISWMEIYTGEKSTQVYGQDVWLPAETLDLIREYRVAIKGPLTTPVGGGIRSLNVALRQELDLYICLRPVRYYQGTPSPVKHPELTDMVIFRENSEDIYAGIEWKADSADAEKVIKFLREEMGVKKIRFPEHCGIGIKPCSEEGTKRLVRAAIEYAIANDRDSVTLVHKGNIMKFTEGAFKDWGYQLAREEFGGELIDGGPWLKVKNPNTGKEIVIKDVIADAFLQQILLRPAEYDVIACMNLNGDYISDALAAQVGGIGIAPGANIGDECALFEATHGTAPKYAGQDKVNPGSIILSAEMMLRHMGWTEAADLIVKGMEGAINAKTVTYDFERLMEGDKLL

SEQ ID NO: 14150 - protein, 445 aa, Candida albicans SC5314
MLVDNYIKASSIKFNISIAPCVEIARYLKSNQQQQVRLQPHEDPKQLLSHQQQQQPDTQYHYQNHHHNKQYRQRQRRQTQEHKQQQGTPRIRRPSSSLSPLYSPKTKKSTPNKTTKTLLHKSSTSPTSPPPPKKKKSKNRIIVPNEFINCDLDIIITLINRMLISLIKLNDNNINNNNNTTNINNPTPPTRFHSKTPPAISIFSYINRLTKFNNLKSSGLITMIYYIDILSYMYPHFQLNSWTIHRFLLVATMISQKAMEDYFYTNDHYAKVGGVSLEELNCLELDFLKRIDWRTIPINNPNVQQLYYNKLVEMTGKISNMVDNNNSGDSDNTDTRYKHTKFIMENEDPTDDEEEEEGDSEDSEEDLEDDDDEDDDDEDDEFYDSDEDINSEDNGDIEIDDYEMEEENNSNVPDLPNIPMYKYDNNGFSMDGSSSPHLKRRYSKD

SEQ ID NO: 14151 - protein, 389 aa, Escherichia coli
TLQNGKLNVPENPIIPYIEGDGIGVDVTPAMLKVVDAAVEKAYKGERKISWMEIYTGEKSTQVYGQDVWLPAETLDLIREYRVAIKGPLTTPVGGGIRSLNVALRQELDLYICLRPVRYYQGTPSPVKHPELTDMVIFRENSEDIYAGIEWKADSADAEKVIKFLREEMGVKKIRFPEHCGIGIKPCSEEGTKRLVRAAIEYAIANDRDSVTLVHKGNIMKFTEGAFKDWGYQLAREEFGGELIDGGPWLKVKNPNTGKEIVIKDVIADAFLQQILLRPAEYDVIACMNLNGDYISDALAAQVGGIGIAPGANIGDECALFEATHGTAPKYAGQDKVNPGSIILSAEMMLRHMGWTEAADLIVKGMEGAINAKTVTYDFERLMEGAKLL

SEQ ID NO: 14152 - protein, 593 aa, Dechloromonas aromatica RCB
MTMSNLVEVKVPDIGDFAEVPIIDLFVKVGDSIKVDDAICTLESDKATMDVPSPVAGVVKEVLVQLGAKVAEGSLLIKVESGAAAAAPAPQAAAPAAAPAAVPVAAPVAGSHAGGADIECEMLVLGAGPGGYSAAFRSADLGMKTVIVERYATLGGVCLNVGCIPSKALLHVAAVMEEAEHANDLGVTFAAPTVDIDKLRAHKDKVVGKLTGGLAGMAKGRKVEIVRGYGTFIDPHHIEVEVTDGTGQDKTGAKKIVKFQKCIIAAGSAAMHLPFIPKDPRIVDSTGALELRFVPEKMLVIGGGIIGLEMATVYSTLGAKVDVVEMMDGLMQGPDRDAVKVWEKQNAKRFDKIMLKTKTVAVDAKDDGLYVKFEGEGVSPEPVKYDMILQAAGRTPNGNKIGADKAGVAVTERGFINVDAQMRTNVPHIFAIGDLVGQPMLAHKAVHESHVAAEAAAGQKSAFDASVIPSVAYTHPEVAWVGVTEDQAKKDGRKIEAAKFPWAASGRAIANGADYGFTKLIFDAETHRVIGGAIVGPNAGDMIGEVCLAIEMGCDSVDIGKTIHPHPTLGETVGMAAEVAHGTCTDVPAPRKK

SEQ ID NO: 14153 - protein, 316 aa, Oryza sativa
MTIQVVIDILHLEQPLDHRACSKIPRFRMEDGGKHFVFVHGLGHGAWCWYRVVAALRAAGHRATALDMAAAGAHPARADEVGSLEEYSRPLLDAVAAAAPGERLVLVGHSLGGLSLALAMERFPDKVAAAVFLAACMPAAGKHMGITLEEVRQRDRLLHARLAQLHHFSELDQTSFMRRIKPDFFMDSKTIVLNTNQEPRTAVLLGPKLLAEKLYNRSPPEDLTLATMLVRPGTNYIDDPIMKDETLLTEGNYGSVKRVFLVAMDDASSDEEMQRWTIDLSPGVEVEELAGADHMAMCSKPRELCDLLLRIAAKYD

SEQ ID NO: 14154 - protein, 546 aa, Dechloromonas aromatica RCB
MSQIIEVTVPDIGDFDSVPVIDLFVKVGDTIKVDDAIVTLESDKATMDVPSTVAGVVKEVLVSLGSKVGEGALLIKVETGGAAAEPAAAPAPAAQAAAPAPAPAAAPVAAAPAAGGGVVEVKVPDIGDFAEVPVIELYVKVGDAIKVDDAIATLESDKATMDVPSTVAGTVKEVLVQIGSKVGEGTVLIKVESGASAPAAAPQAAAPAPAAAAPAPVAAPVAAPAAASPAALAPALAAGSKVHASPSVRAYARELGVDLNKVPATGPKNRIVKEDLTKYVKGVMSGAVAGPTAGGGASLGGGLDLLPWPKVDFAKFGEIEVKPLSRIKKISGQNLSRNWVMIPAVTYHEDADITDIEAFRVLLNKENEKGGGAKLTMLAFLMKACVKGLQKFPEFNSSLDGDNLVLKKYFNIGFAADTPNGLVVPVVKNVDKKSVFELAQESGDLAKQARDGKLKPADMSGACFTISSLGGIGGTYFAPIVNAPEVAILGVNKSAMKPVWDGKQFVPRLVLPLSLTADHRVIDGALATRFNVYIAQLLADFRRVAL

SEQ ID NO: 14155 - protein, 1126 aa, Marchantia paleacea var. diptera
MSTTKVTYSSGSSAKSKHSVRIVQTTADAKLQAVFEESGESGDSFDYTKSINASKSTGESVPAQAVTAYLQRMQRGGLTQTFGCMLAVEELTFRVLAYSENAPEMLDLMPQAVPCVGQQDVLGIGTDARTLFNSASAVALEKAAGALDVSMFNPISVQCKSSGKPFYAIVHRIDAGLVIDIEPVRPSDPSVSAAGALQSHKLAAKAISRLQSLPGGDIGLLCDTVVEEVRELTGYDRVMAYKFHEDEHGEVVAEIRRSDLEPYLGLHYPATDIPQASRFLFMKNRVRMICDCCAQPVQVIQDKELRQPLSLAGSTLRAPHGCHAQYMGNMGSIASLVMAVIINVNDEEYSSRGYHHKGRKLWGLVVCHHTTPRSVPFPLRSACEFLMQVFGLQLNMEVELAAQLREKRILRTQTLLCDMLLRDAPIGIVSQSPNIMDLVKCDGAALYYGKRYWVLGTTPTELQIKDIADWLLEYHKDSTGLSTDSLADAGYPGAASLGDAVCGMAAARITSKDFLFWFRSHTAKEIKWGGAKHDPDDKDDGRKMHPRSSFKAFLEVVKRRSLPWEDVEMDAIHSLQLILRGSFQDIDDSDTKTMIHARLNDLKLQGMDELSTVANEMVRLIETATAPILAVDSSGFINGWNAKVAELTGLPVSEAMGRSLVKDLALEESVETVERLLYLALQGEEEQNVEIKLQTYGAQKDKGAVILIVNACSSRDVTENVVGVCFVGQDVTGQKVVMDKFTRIQGDYKAIVQNPNPLIPPIFGSDEFGYCSEWNPAMEKLAGWKREEVIGKMLVGEIFGTQMMCCRLKGQDAMTKFMIVLNSAMDGQDSEKFPFAFFDRQGKFVEALLTANKRTDSEGAFTGVFCFLQIASMELLQALTVQRATEKVAFSKLKELAYIRQEIKNPLYGIMFTRNLVEDTNLTEEQKQFIETSALCERQLRRILDDMDLESIEDGYLELDTAEFIMGTVMDAVISQGMITSREKGLQLIWDTPRDTKNLCLFGDQVRLQQVLADFLLNAIRFTPSSEGWVGIKGVSSRHRQGGGVHVVHFEFRVTHPGAGLPEELVQEMFDRGRGMTQEGLGLNMCRKLLKLMSGDVQYIREAGKCYFLVNVELPIAQRDDAGSVK

SEQ ID NO: 14156 - protein, 352 aa, Bradyrhizobium japonicum USDA 110
MALMRRQSLVKFDAPLCETIVDTPKPKGAEVLVRIERCGLCHSDLHIQDGYADLGGGKKLDTTRGMTLPFTLGHEIAGVVDEVGPDVPGGLVGSKKAVFPWIGCGQCRDCANGDENLCVKQRFLGVSIDGGFATHVLVPDAKYLLDYDPLPVNQAATLMCSGVTAYGALKRLVDRPRQRNLLLIGLGGVGMMGLSFAQATFKQPITVADLSPAARDTALKNGAANAYDPAEPDVIKRILKETEGGFDEIVDFAGNEKSMAFAVAVAARGGKIVVSGLMGGQFTLPMVQWVYKRMTIEGFMVGTLAEAKELMALARAGKIKPTPMREEPMGDVQKWIDELRAGKVVGRIVLKN

SEQ ID NO: 14157 - protein, 390 aa, Trichodesmium erythraeum IMS101
MHLSKRLKPLSFNVFADMDRAKGRAKAAGQDLIDLSLGSSDLPAPRHALEAISQSLQDSNTHGYSLFSSTQAFREAVARWYSNKFDISLNPETEVLALIGSQEGTAHLPLAILDPGDFALLQDPGYPSHSGGVYLAGGQVYPMPLLAENKFLPVLGDIPQHVLAQAKMMILSYPHNPTTAIAPISFLQEAVAFCQKHNLVLVHDAPYLDFVFNSSSEAPSIFQADVEKSVSIEFFTMSKSYSMGGFRVGYAIGNAQLIQALRQVKACIDFNQYRGIFNGAIAALTGPQEVVRKTVDIFRQRRDIFIEALDNIGWTVPMPSATMYVWTKLPKLWSNDSVDFCVDLVENTGVAVAPGAGFGKAGEGYVRFALVHRPEVLSRAVEKISVFLQR

SEQ ID NO: 14158 - protein, 181 aa, Photorhabdus luminescens subsp. laumondii TTO1
MSKPKHIVEVMISELEVKQRIAELGKQITEHYRDSGSDLVLVGLLRGSFIFMADLCREIQIPHQVDFMTASSYGSGMNSTRDVKILKDLDEDIRGKHVLIVEDIIDSGNTLNKVREILALREPKSLAICTLLDKPSRREVGVPVEWIGYSIEDKFVVGYGIDYAQLYRHLPYIGHVILLEE

SEQ ID NO: 14159 - protein, 242 aa, Zea mays
MASLFKDPSKLSAYRDRRFKGTQEEYEAALLASTTLYIGNMSFYTTEEQAYELFSRAGEIKKIIMGLDKNSKTPCGFCFVLYYSREDAEDAVKYISGTMLDDRPIRVDFDWGFEEGRQWGRGRSGGQVRDEYRTDYDPGRGGYGKMVLRELEAQRELVDYGGSFQPNAPPPYERSERKRGHGDSHRNDRGDYQRKRYRNDDRSAPEESKRAPDSDPAEKNPRFREKGDSDEEEDDYDGQRRR

SEQ ID NO: 14160 - protein, 206 aa, Oryza sativa (indica cultivar-group)
MGRRACCAKEGMKRGAWTSKEDDVLASYIKSHGEGKWREVPQRAGLRRCGKSCRLRWLNYLRPNIKRGNIDDDEEELIVRLHTLLGNRWSLIAGRLPGRTDNEIKNSRSAARSAPPPPPPPAAAVAARRTPPERRTRRRPAPSCRRASSSSQPPAPTPTQQRQRRRRRRRRPPCGRPRPCGARAGSSSTTVKRRRSPRRRRRRQGN

SEQ ID NO: 14161 - protein, 349 aa, Streptomyces avermitilis MA-4680
MRGVVFDGKQTQVVDDLEIREPGPGEVAVAISAAGLCHSDLSVVDGTIPFPVPVVLGHEGAGVVEAVGSGVTHVRPGDHVALSTLANCGACAECDRGRPTMCRKAIGRPQQPFARGGRPLYQFAANSAFAERTVVKAVQAVRIPKDIPLPSAALIGCGVLTGVGAVLNRARVEHGDSVLVIGTGGIGLNVLQGARIAGALTIVAVDANPAKEAVARQFGATHFLTSTEGVRDILPTGADHAFECVGRAALIRQAVDLLDRHGQAVLLGVPPATAEASFLVSSLFLDKSILGCRYGSSRPQRDIALYADLYREGRLLLDELVTATYPVEDFEKAAADAHEGRVARAVLTF

SEQ ID NO: 14162 - protein, 183 aa, Photorhabdus luminescens subsp. laumondii TTO1
MVNFIMKHTVEVMISEQEVKQRIAELGKQITEHYCDSGSGLVLVGLLRGSFIFMADLCREIQIPHQVDFMTASSYGSGMNSTRDVKILKDLDEDIRGKHVLIVEDIIDSGNTLNKVREILALREPKSLAICTLLDKPSRREVDVPVEWIGYSIEDKFVVGYGIDYAQLYRHLPYIGHVVLLEE

SEQ ID NO: 14163 - protein, 442 aa, Treponema pallidum subsp. pallidum str. Nichols
MRVGSAVSPKVLKGFRDLLPDEEIERALLVEKLTVALRQMGFVPIDTPALEYTEVLLRKSEGDTEKQMFRFVDKGGRDVALRFDLTVPLARFVATHYARLYFPFKRYHFAKVWRGEKPQMGRYREFTQCDFDIVGSDSVCADFEILKSIRHMLYMAGAEHIRIHVAHRGLFDRFLRALSLSDQAEHILRIIDKRAKMAPHVLTAQLESLCDPVRVQKIMTYVSAGEVDGVAPSFEHTLSAIETLTGGVSEESTRLRKIYELLCAVNIQSSYVFDPSITRGFDYYTGMVCETFLTQLPHIGSVCSGGRYDHLTALYMKDAVSGVGASIGLDRLYAAFQQLGMSREHVCFVQALIFCQDSALMDVYQKLCSYFAVQVATEVFPDPRKLSQQYAFAEKKGIRWGIFVEQRNAVVEDCLLVLRDLSTRKDTRLPAHEVRRRMAAEG

SEQ ID NO: 14164 - protein, 562 aa, Shigella flexneri 2a str. 301
MRGTTKKKRKSGIGLPRAVVYFDLQRLFYRFSCSKITQILTLEYEVVAMSVSKKPMVLVILDGYGYREEQQDNAIFSAKTPVMDALWANRPHTLIDASGLEVGLPDRQMGNSEVGHVNLGAGRIVYQDLTRLDVEIKDRAFFANPVLAGAVHKAKNAGKAVHIMGLLSAGGVHSHEDHIMAMVELAAERGAEKIYLHAFLDGRDTPPRSAESSLKKFEEKFAALGKGRVASIIGRYYAMDRDNRWDRVEKAYDLLTLAQGEFQADTAVAGLQAAYARDENDEFVKATVIRAEGQPDAAMEDGDALIFMNFRADRAREITRAFVNADFDGFARKKVVNVDFVMLTEYAADIKTAVAYPPASLVNTFGEWMAKNDKTQLRISETEKYAHVTFFFNGGVEESFKGEDRILINSPKVATYDLQPEMSSAELTEKLVAAIKSGKYDTIICNYPNGDMVGHTGVMEAAVKAVEALDHCVEEVAKAVESVGGQLLITADHGNAEQMRDPATGQAHTAHTNLPVPLIYVGDKNVKAVAGGKLSDIAPTMLSLMGMEIPQEMTGKPLFIVE

SEQ ID NO: 14165 - protein, 270 aa, Zea mays
  unsure (1)..(270): unsure at all Xaa locations
MDPKMTEVTQMFAPASRRRYTRNDLDACVTLLSQLKVHLTKFPSLPPSFEQTPKAVEELKLARDIYEHAVVLSVKLEDQDAFERDFCQLKPYYMDTCGIIPPSPEEYPILGLNLLRLLVQNRIAEFHTELELLPVKALEHPCIKHAVELEQSFMEGAYNRVLSARQAVPHETYVYFMDLLAKTVRDEIAGCXSEKGYDSLSVSDAKQMLMFSSDQDLHEYITEEHPEWELKNGAVXFFQKAKESQPYKEIPSLQLINQTLSYARELERIV

SEQ ID NO: 14166 - protein, 280 aa, Oryza sativa (japonica cultivar-group)
MSGVGGGRSGGRDAEGEWEVRPGGMLVQRRDGDTGPAVRLRVSHGASFRDVAVPAHSTFGMILASSLLVKLAVGDCNEGELKGVLTQATGVEPERQRLFFRGKEKSDNEFLHTAGVKDGAKLLLLEKPAPANVEQRAEPVIMDESMMKACEAVGRVRAEVDRLSAKVCDLEKSVFAGRKIEDKDFVVLTELLMMELLKLDGIEAEGEARAQRKAEVRRVQGLVETLDKLKARNANPFSDQNKSVSVTTQWETFDNGMGSLNAPPPRVSSTQINTDWEQFD

SEQ ID NO: 14167 - protein, 445 aa, Zea mays
  unsure (1)..(445): unsure at all Xaa locations
MATALSSEELMRMEQDCSAHNYHPIPMVFSKGEGSHIVDPEGNKYIDFLSAYSAVNQGHCHPKVLRALIEQAERLTLSSRAFYNDKFPIFAEYLTSMFGYDMMLPMNTGAEGVETAIKXLARKWGYEKKHIPKNEALLVSCCGCFHGRTLGVISMSCDNDATRGFGPLVPGHLKVDFGDIDGLKKIFEELGDRICGFLFEPIQGEAGVVIPPDGYLKGARDLCSXHNVLMIADEIPTGIARTGKMLACDWENIRPDMVILGKALGAGVFPVSAVLADKGVMLCIRPGEHGSTFGGNPLASAVAVASLKVVRDEXLVERAAKLGQEFRDQLQKVQQKFPQILREVRGRGLLNAVDLNNDALSPASAYDICIKLKERGILPKPTHDTIIRLAPPLTISPEELAEASKALSDVLEHDLPQLQLQKQIKKPESEAEKPVCDRCGRDLYG

SEQ ID NO: 14168 - protein, 372 aa, Oryza sativa
DLVDAVVPFMGESITDGTLATFLKKPGDRVEADEPIAQIETDKVTMDVASPEAGIIEKVTKSLPLICGIVTPGVKVAIISKSAAQSKTHTQSSEDTSQKHSTKPPSTKENKVEAKPPKVESSTTHESKLTSSSEPQLPPKERERRVPMPRLRKRIANRLKDSQNTFAMLITFNEVDMTNLMKLLSDYKDQFVEKHGVKLGLMSCFVKAAVSALQNQPIVNAVIDGDDIIYREYIDISVAVGTSKGLVVLVIHDIDAMNFADIEKGINNLAKKATEGAQSINNMAGGTFTISNGGVYGSLISTPIINSPQSSILGMHSIVQRLVVVNGSVLARPMMYLALMYDHRLIDGREAVLFLRRIKDVVEDPRRLLLDI

SEQ ID NO: 14169 - protein, 306 aa, Pseudomonas fluorescens PfO-1
MSSLLVFPGQGAQQPGMLQRLPRETLIEASDSLGEDVLQLDSSEALRSTRAVQLCLLIAGVAASRRLLQDGLTADYVAGLSIGAYPAAVVAGALSFSDALHLVSLRGELMQQAYPQGFGMTAIIGLQLSTVETLLAQVHGAETPVYLANINADNQVVIAGSDKAMQAVAELARARGAGLAKRLAVSVPSHCPLLDEHAQTLAEAFTRVELKSPKIAYLSGSRARPVTQVEALRDDLAFNMCRVVDWRGTVQSAYERGVRLQIELPPGAVLTGLARRVFEQGTVAAFDSARLDTLQALLREEEGRRP

SEQ ID NO: 14170 - protein, 429 aa, Pseudomonas syringae pv. tomato str. DC3000
MSKSLQAIRGMNDILPEQTPLWRHFEGTVSRLLDNYGYRQIRMPVVEFTDLFKRSIGEVTDIVEKEMYTFADRNGDSLTLRPEGTAACVRAVLEHGITGGGQVQKLWYIGPMFRHERPQKGRYRQFHQIGVEVFNLDGPDIDAELIVMTWRLWGMLGIRNAVKLELNSLGTSEARARYRDALVEFLSAHLDQLDEDSQRRLKTNPLRVLDTKHPETQAVLVDAPKLADYLDDESRIHFEGLKARLDAAGIPYVINPKLVRGLDYYSKTVFEWVTDQLGAQGTVCAGGRYDGLVEQMGGKPTAGVGFAMGIERLVLLLETLEQVPEEIARQVDVYLCAFGEAAELAALALTEQVRDRLPNLRLQVNAGAGSFKSQFKKADKSGALYALILGEEELAAKIIGVKPLRGQGEQQNIAWDALSEHLASCVVQG

SEQ ID NO: 14171 - protein, 753 aa, Escherichia coli O157:H7
MSQQNEKNPHQHQSPLHDSSEAKPGMDSLAPEDGSHRPAAEPTPPGAQPTASGSLKAPDTRNEKLNSLEDVRKGSENYALTTNQGVRIADDQNSLRAGSRGPTLLEDFILREKITHFDHERIPERIVHARGSAAHGYFQPYKSLSDITKADFLSDPNKITPVFVRFSTVQGGAGSADTVRDIRGFATKFYTEEGIFDLVGNNTPIFFIQDAHKFPDFVHAVKPEPHWAIPQGQSAHDTFWDYVSLQPETLHNVMWAMSDRGIPRSYRTMEGFGIHTFRLINAEGKATFVRFHWKPLAGKASLVWDEAQKLTGRDPDFHRRELWEAIEAGDFPEYELGFQLIPEEDEFKFDFDLLDPTKLIPEELVPVQRVGKMVLNRNPDNFFAENEQAAFHPGHIVPGLDFTNDPLLQGRLFSYTDTQISRLGGPNFHEIPINRPTCPYHNFQRDGMHRMGIDTNPANYEPNSINDNWPRETPPGPKRGGFESYQERVEGNKVRERSPSFGEYYSHPRLFWLSQTPFEQRHIVDGFSFELSKVVRPYIRERVVDQLAHIDLTLAQAVAKNLGIELTDDQLNITPPPDVNGLKKDPSLSLYAIPDGDVKGRVVAILLNDEVRSADLLAILKALKAKGVHAKLLYSRMGEVTADDGTVLPIAATFAGAPSLTVDAVIVPCGNIADIADNGDANYYLMEAYKHLKPIALAGDARKFKATIKVADQGEEGIVEADSADGSFMDELLTLMAAHRVWSRIPKIDKIPA

SEQ ID NO: 14172 - protein, 389 aa, Escherichia coli
TLQNGKLNVPENPIIPYIEGDGIGVDVTPAMLKVVDAAVEKAYKGERKISWMEIYTGEKSTQVYGQDVWLPAETLDLIREYRVAIKGPLTTPVGGGIRSLNVALRQELDLYICLRPVRYYQGTPSPVKHPELTDMVIFRENSEDIYAGIEWKADSADAEKVIKFLREEMGVKKIRFPEHCGIGIKPCSEEGTKRLVRAAIEYAIANDRDSVTLVHKGNIMKFTEGAFKDWGYQLRREEFGGELIDGGPWLEVKNPNTGKEIVIKEVIADAFLQQILLGPAEYDVIACMNLNGDYISDALAAQVGGIGIAPGANIGDECALFEATHGTAPKYAGQDKVNPGSIILSAEMMLRHMGWTEAADLIVKGMEGAINAKTVTYDFERLMEGAKLL

SEQ ID NO: 14173 - protein, 382 aa, Pseudomonas syringae pv. tomato str. DC3000
MIDSKLPNVGTTIFTVMSQLAAETGAINLSQGFPDFDGPQALRDAVCRHITQGHNQYSPMTGLPALRQQVAAKIARSYGREINPDSEITITPGATQAIFCAIHSVIRPGDEVIIFDPCYDSYEPAVELAGGRCVHVQLGLDDFSIDWQKLSDALSPRTRMIVINSPHNPSGALISRAELDRLASLIADRDIYLLSDEVYEHLVFDGARHVSVLDHDELYQRAFVVSSFGKTYHVTGWKTGYVVAPPALTAELRKVHQYVSFCGVTPLQYALADFMAEHPEHIDELPGFYQAKRDYFCNQLAGSRFSFKPVGGTYFQLVDYSQIRPDLNDVDMALWMTREHGVASIPISVFYQSPPPGQRLIRLCFAKQEDTLRLAAEKLCAI

SEQ ID NO: 14174 - protein, 389 aa, Escherichia coli
TLQNGKLNVPENPIIPYIEGDGIGVDVTPAMLKVVDAAVEKAYKGERKISWMEIYTGEKSTQVYGQDVWLPAETLDLIREYRVAIKGPLTTPVGGGIRSLNVALRQELDLYICLRPVRYYQGTPSPVKHPELTDMVIFRENSEDIYAGIEWKADSADAEKVIKFLREEMGVKKIRFPEHCGIGIKPCSEEGTKRLVRAAIEYAIANDRDSVTLVHKGNIMKFTEGAFKDWGYQLAREEFGGELIDGGPWMKVKNPNTGKEIVIKDVIADAFLQQILLRPAEYDVIRCMNLNGDYISDALAAQVGGIGIAPGTNIGDECALFEPTPGTAPKYAGQDKVNPGSIILSAEMMLRHMGWTEAADLIVKGMEGAINAKTVTYDFERLMDGAKLL

SEQ ID NO: 14175 - protein, 316 aa, Salmonella typhimurium LT2
MNQLDGIKQFTTVVADSGDIESIRHYQPQDATTNPSLLLKAAGLEQYGHLIEDAIAWGKKHGGTQEQQVAAASDKLAVNFGAEILKSIPGRVSTEVDARLSFDKEKSIEKARHLVDLYQQQGVDKSRILIKLAATWEGIRAAGQLEKEGINCNLTLLFSFAQARACAEAGVYLISPFVGRIYDWYQARSPLEPYVVEEDPGVKSVRNIYDYFKQHRYETIVMGASFRRTEQILALTGCDRLTISPNLLKELKEKEEPVIRKLVPSSQMFHRPTPMTEAEFRWEHNQDAMAVEKLSEGIRLFAVDQRKLEDLLAAKL

SEQ ID NO: 14176 - protein, 414 aa, Methanococcus maripaludis
MFLTLDDFELEGKTVALRVDINSPIDVNTGDILDDTRIKACSDTIKSLSEKGAKVVILAHQSRPGKKDFTTLEAHAKKLSEVLNMEVTHVDGLICASAREAILAMDNGEIILLENVRLLAEEVLSDWKSWEEITPEKQAKTVMIKKLHPFFDYFVNDAFAAAHRAQPSLVGFSYYVPMLCGRVMEKELFTLTKVLKNPERPCVFALGGAKADDSIEVLKNVLEKQTADQVLTSGVVANIFLVAKGYKIGPNENVIADMGYTNQIEIAKELISKYGDKIVVPIDAALNVDGERVEKELDLNEEITYPIHDMGEKTMKLYEEILKDAKTVVANGPAGVFENKNFLKGTEELLKSTANSKGFSVIGGGHLSAAAEVVGLAGKMDHISTGGGACIEFLAGKKLPVIEMLSKSYEKHKL

SEQ ID NO: 14177 - protein, 293 aa, Ustilago maydis 521
MCNSDLPELVIITTGSATLRALRVLGAPSGAAFFLSRRKLESFLLSTFIRILDPSVPQEEPATMAKKKRKTLQLEAWCWYCDREFEDEKVLLQHQKSKHYRCPQCPRRLNTAGGLAVHLTQVHKADPEKIENTLPGRDSFEIEIYGMAGIPEKDLAEWKARRAAQRADGNVPTQNKRPRIEKLVLSKEQLRIQLEAHKALMSGKAPIPGMMPGMLSGFGAPGPYSVPPPTLPPVYGAPPPNFARPPPRQPPPGYRAAPSPTGGVSANVPPPNEQAALSGDGLETHKVRAADLF

SEQ ID NO: 14178 - protein, 389 aa, Escherichia coli
TLQNGKLNVPENPIIPYIEGDGIGVDVTPAMLKVVDAAVEKAYKGERKISWMEIYTGEKSTQVYGQDVWLPAETLDLIREYRVAIKGPLTTPVGGGIRSLNVALRQELDLYICLRPARYYQGTPSPVKHPELTDMVIFRENSEDIYAGIEWKADSADAEKVIKFLREEMGVKKIRFPEHCGIGIKPCSEEGTKRLVRAAIEYAIANDRDSVTLVHKGNIMKFTEGAFKDWGYQLAREEFGGELIDGGPWMKVKNPNTGKEIVIKDVIADAFLQQILLRPAEYDVIACMNLNGDYISDALAAQVGGIGIAPGANIGDECALFEATPGTAPKYAGQDKVNPGSIILSAEMMLRHMGWTEAADLIVKGMERAINAKTVTYDFERLMEGAKLL

SEQ ID NO: 14179 - protein, 389 aa, Escherichia fergusonii
TLQNGKLNVPENPIIPYIEGDGIGVDVTPAMLKVVDAAVEKAYKGERKISWMEIYTGEKSTQVYGQDVWLPAETLDLIREYRVAIKGPLTTPVGGGIRSLNVALRQELDLYICLRPVRYYQGTPSPVKHPELTDMVIFRENSEDIYAGIEWKADSADAEKVIKFLREEMGVKKIRFPEHCGIGIKPCSEEGTKRLVRAAIEYAIANDRDSVTLVHKGNIMKFTEGAFKDWGYQLAREEFGGELIDGGPWLKVKNPNTDKKIVIKNVIADAFLQQILLRPAEYDVIACMNLNGDYISDALAAQVGGIGIAPGANIGDECALFEATHGTAPKYAGQDKVNPGSIILSAEMMLRHMGWTEAADLIVKGMEGAINAKTVTYDFERLMEGAKLL

SEQ ID NO: 14180 - protein, 211 aa, Gossypioides kirkii
AKGQTPLFPRILAHEAGGIVESVGEGVTDLKPGDHVLPVFTGECGNCRHCKSKESNMCDLLRINADRGVMLSDGKTRFSINGKPIYHFLGTSTFSEYTVAHVGSVAKINLAAPLDKVCVLSCGISTGLGATLNVAKPTKGSTVAIFGLGAVGLPATEGARIAGASRIIGVDLNPNRFEEAKKFGCTEFVNPKDHNKPVQEVLAEMTNGGVD

SEQ ID NO: 14181 - protein, 201 aa, Glycine max
MSNEYDYLFKLLLIGDSSVGKSCLLLRFADDSYVDSYISTIGVDFKIRTVELEGKTVKLQIWDTAGQERFRTITSSYYRGAHGIIIVYDVTEMESFNNVKQWLNEIDRYANDTVCKLLVGNKSDLVDNKVVDSLTAKAFADELGIPFLETSAKDSINVEQAFLTMAAEIKKKMGSQTTTGKSAESVQMKGQPIPQKSNCCG

SEQ ID NO: 14182 - protein, 70 aa, Glycine max
  unsure (1)..(70): unsure at all Xaa locations
SITTGNRSGTSMVAPFTGTKSMADFCIRNTNDDITIIASNGAXVQCMHMWTPVSMKQIDTDSYLPDIDHA

SEQ ID NO: 14183 - protein, 306 aa, Mycoplasma hyopneumoniae
MSKILATPKARAMAKHANIDLADLKIQHRKIEASDVENYIKSLKSAQTSAEKVEVSSSQQAEKTSIPASIPPKLEGKREKIAPIRKAIARAMTNSWNSVAYVNLVNQIDVSDLWKLRKSVLDPVLKTSGVKLTFLAFIAKAILIALSEFPVMAAKYDEATSEIVYPDTLNLGLAVDTDAGLMVPVIKDAQKLSIVEIAKEIVRLAKAARERKIKPSEMQGGSFTITNYGSVGSLYGVPVINYPELAIAGVGAIIDSAEVKDGQIVASKIMHLTVAADHRWIDGATIGRFAARVKELLEKPEILGIL

SEQ ID NO: 14184 - protein, 615 aa, Mycoplasma hyopneumoniae
MYKFKFADIGEGLHEGVVAQIYKKEGETVNEGDSLFSVETDKITADIPSPKTGKIVKVLMAEGDTIHVGQEIYHIDDGSRAETEVEEAKSETEEKPAGGASVVGEVKVSDALLSFDFGPKKVKTTSPEKVLVPSDSKKVEDKIEKTTNSGKIYQGQIEKEFDVIVVGSGPGGYLAAAEAGNAGLSTLIVEKEFWGGVCLNVGCIPTKAMLKTAEVFDYLEQFSDFGLSGNSDLKISWEKMHQRKTEVVNKLVGGVKAIVRSAKATSIFGKAEFVGAREISVDGKVYRGKNVILATGSVDRKLNLPGFDKGYKSGKIITSKEAINLEQKIDSIVIIGGGVIGVEFAQIFSAAGIKVTILQNLPRLLANLDSEISQIITKNLVDKGVKVITNTNILRFEDDQIIYEFEGKTELITGEKILVSIGRQANSQGLAEVGIELDSRGSVIVDDQCRTNVDRVYAIGDLSAKAMLAHVAYRHAVVSVAAILGKTEKYQEKTVPACVYTHPEIAVVGLTEEQARQAGYDFVIGKASFSHIGKAIASGNAYGFAKLIIDKKYGEIIGAHIIGPVATDLISEIVIAMDSEVTVYELAAAIHPHPTYSEIIWEAARSAVTKLKKMK

SEQ ID NO: 14185 - protein, 272 aa, Oryza sativa (indica cultivar-group)
MGRRACCAKEGMKRGAWTSKEDDVLASYIKSHGEGKWREVPQRAGLRRCGKSCRLRWLNYLRPNIKRGNIDDDEEELIVRLHTLLGNRWSLIAGRLPGRTDNEIKNYWNSTLSRKIGTAATAAAGSRGGSTPDTARATDAASSSSVVPPGQQQQPASRADTDTATAAAAAAATTTTVWAPKAVRCTRGFFFHDRETAPLAAAAPAPAGELGDGDDVDCDYYCSGSSSAATTTSSSSLPVVVEPCFSAGDDWMDDVRALASFLDTDDAWNLCA

SEQ ID NO: 14186 - protein, 252 aa, Zea mays
  unsure (1)..(252): unsure at all Xaa locations
PSTSRLPALPQKKTARLLLLLRRAGITCGILAVLGCSDWSQAKRARILACSRRLKHRGPDWSGLYQHEGNFLAQQRLAVTKRHLVETEAAEKFGTELHSFVVGLEGSPDLKAAREVADYLGTIHHEFHFTVQDGIDAIEEVIYHDETYDVTTIRASTPMFLMARKIKSLGVKMVLSGEGSDELLGGYLYFHFAPNKEEFHRETCRKVKALHQYDCLRAXKATSAWGLEVRVPFLDKEFINVAMGMDPEWKMY

SEQ ID NO: 14187 - protein, 272 aa, Vibrio parahaemolyticus RIMD 2210633
MEHKKIAFIGAGNMVRAIVSGLVANGYPAQNIVATAPSEARRLPLEQDFGIRTTSDNMLAASEADVVVLSVKPQMMADVCKPLQSIDFSNKLVISIAAGINCSRLDEMLATKLNLVRVMPNTPSQLGLGMSGLFAPEHVKEQDRAFAAELMQAVGKVCWVEQESGINNVIAAAGSAPAYFFLFMEAMQAEAIAQGFDKETARLLVQQAALGAASMVVSNPDTELSTLRENVTSKGGTTAEALRTFNEHQLTDIVAKAMQAAVARAEEMEKLF

SEQ ID NO: 14188 - protein, 366 aa, Triticum aestivum
  unsure (1)..(366): unsure at all Xaa locations
MGKGGKGEAAAAVAGEGENMAAWLVAKNTLKIMPFKLPPLGPYDVRVRMKAVGICGSDVHYLKEMRIAHFVVKEPMVIGHECAGIIEEVGDGVKHLAVGDRVALEPGISCWRCRHCXKGGRYNLCDDMKFFATPPYHGSLADQIVHPGDLCFKLPDNVSLEEGAMCEPLSVGVHACRRADVGAEKSVLIMGAGPIGLVTMLSARAFGAPRIVIADVDDHRLSLAKSLGADAVVKVSGNAEDLAGEIERIQAAMGGDIDVSLDCAGFSKTMSTALEATRPGGRVCLVGMGHNEMTVPLTSAAIREVDVVGIFRYKDTWPLCLEFLRSGKIDVKPLITHRFGFSQGEVEEAFEVSARGRDAIKVMFNL

SEQ ID NO: 14189 - protein, 272 aa, Oryza sativa (indica cultivar-group)
MGRRACCAKEGMKRGAWTSKEDDVLASYIKSHGEGKWREVRQRAGLRRCGKSCRLRWLNYLRPNIKRGNIDDDEEELIVRLHTLLGNRWSLIAGRLPGRTDNEIKNYWNSTLSRKIGTAATAAAGSRGGSTPDTARATDAASSSSVVPPGQQQQPASRADTDTATAAAAAAATTTTVWAPKAVRCTRGFFFHDRETAPLAAAAPAPAGELGDGDDVDCDYYCSGSSSAATTTSSSSLPAVVEPCFSAGDDWMDDVRALASFLDTDDAWNLCA

SEQ ID NO: 14190 - protein, 272 aa, Oryza rufipogon
MGRRACCAKEGMKRGAWTSKEDDVLASYIKSHGEGKWREVPQRAGLRRCGKSCRLRWLNYLRPNIKRGNIDDDEEELIVRLHTLLGNRWSLIAGRLPGRTDNEIKNYWNSTLSRKIGTAATAAAGSRGGSTPDTARATDAASSSSVVPPGQQQQPASRADTDTATAAAAAAATTTTVWAPKAVRCTRGFFFHDRETAPLAAAAPAPAGELGDGDDVDCDYYCSGSSSAATTTSLSSLPAVVEPCFSAGDDWMDDVRALASFLDTDDAWNLCA

SEQ ID NO: 14191 - protein, 200 aa, Vibrio parahaemolyticus RIMD 2210633
MKKIVLATGNQGKVREMADLLSDFGFEVLAQSEFNVSEVAETGTTFIENAIIKARHAAQETGLPAIADDSGLEVDFLKGAPGIYSARYAGEKASDQENLEKLLAAMEGVPEAERTARFHCVLVLMRHENDPTPIVCHGKWEGRILTEAHGENGFGYDPIFFVPEDNCASAELEPARKKQLSHRGKALKSLFAQLSAQTAQ

SEQ ID NO: 14192 - protein, 208 aa, Zea mays
  unsure (1)..(208): unsure at all Xaa locations
MELDADNLSATELRLGLPGTTTSSSSSDDWQKKPSPSVGAKRALDDGTKSEASGTSTAAGDLDFDHDHDTAAPPKRKWVGWPPVRAYRKNTFQAAAAAKKVEQKQKQQQQGGLYVKVSMDGAPYLRKVDLRMYKGYRELREALDALFTNSFSAXRQRGGGDHHQHAIAYEDKDGDLMLXGDXVPWDMFISSCKKLRIMKGSASESEAR

SEQ ID NO: 14193 - protein, 272 aa, Oryza rufipogon
MGRRACCAKEGMKRGAWTSKEDDVLASYIKSHGEGKWREVPQRAGLRRCGKSCRLRWLNYLRPNIKRGNIDDDEEELIVRLHTLLGNRWSLIAGRLPGRTDNEIKNYWNSTLSRKIGTAATAAAGSRGGSTPDTARATDAASSSSVVPPGQQQQPASRADTDTATAAAAAAATTTTVWAPKAVRCTRGFFFHDRETAPLAAAAPAPAGELGDGDDVDCDYYCSGSSSAATTTSSSSLPAVVEPCFSAGDDWMDDVRALATFLDTDDAWNLCA

SEQ ID NO: 14194 - protein, 425 aa, Methylobacillus flagellatus KT
MLGGMLAAGSSLAEEVAEEAPAILNSGDTAWMIVATVLVIIMAVPGLAIFYGGMARSKNMLSVLMQVLVTFSLLSVLWAVYGYSLVFTEGNAFIGGLSKAFLSGITPDSLEGTIPELLFVTFQMTFAAITPALIVGGFAERIKFSAVLLFMVLWMTFSYLPMAHMVWGGGWIGEMGAADFAGGTVVHMNAGIAALVGALVLGKRIGFGKEAMPPHNMVLTMVGGSLLWAGWFGFNVGSELAADGMAGLAVVNTQLATASAVVGWVIAEWLSKGKPSMLGAISGAIAGLVAITPACGFVGPMGAIVLGFIASLISFWSVTKLKNALGYDDTMDVFGVHGIAGIVGALGTGIFMASSLGGVGYDEGVTMGHQLYVQAVSVGFTVVYVSIVSYILFKIVDLVVGLRVSEEEEREGLDTASHGERAYHS

SEQ ID NO: 14195 - protein, 383 aa, Thermobifida fusca
MAAFGETIFAEMTRLAEHTGAINLGQGFPDTDGPPFLLAEAARYLTEGVNQYPPGYGREELRTAIAADRQERYGLAYDPATEVYITVGATAGIAASILALVEPGDEVVLFEPMYDSYSAVIALAHGVRRPVTLRPSPDNGRYTFDPDELAAAITPRTRAIIVNTPHNPTGTVFTADELAWIARLCRENDLVAVTDEVYEHLTFDGTPHLPLAALPGMAERTLSVSSAGKTFSVTGWKIGWVTGPEPLVRAVATVNQYLTFTANGAQQLAVATALRHGMDWVSEQRDALHAKRDRLVAGLAAAGFQVHPPQGTYFVMADIRPLGYDDGLTFVRTLARRAGVVAIPAQVFYADERHGRHLVRFAFCKRDDVLDEAAARLRAWGDR

SEQ ID NO: 14196 - protein, 292 aa, Escherichia coli
MKVAVLGAAGGIGQALALLLKTQLPSGSELSLYDIAPVTPGVAVDLSHIPTAVKIKGFSGEDATPALEGADVVLISAGVARKPGMDRSDLFNVNAGIVKNLVQQVAKTCPKACIGIITNPVNTTVAIAAEVLKKAGVYDKNKLFGVTTLDIIRSNTFVAELKGKQPGEVEVPVIGGHSGVTILPLLSQVPGVSFTEQEVADLTKRIQNAGTEVVEAKAGGGSATLSMGQAATRFGLSLVRALQGEQGVVECAYVEGDGQYARFFSQPLLLGKNGVEERKSIGTLSAFEQNAL

SEQ ID NO: 14197 - protein, 502 aa, Capsicum annuum
MEIQFTNLVAFLLFLSSIILLLKKWKTQKLNLPPGPWKLPFIGSLHHLAVAGPLPHHGLKNLAKLYGPLMHLRLGEIPTVIISSPRMAKEVLKTHDLAFATRPKLVVADIVHYDSTDIAFSPYGEYWRQIRKICILELLSAKMVKFFSSIRQDELSMMVSSIRTMPNFPVNLTDKIFWFTSSVTCRSALGKICRDQDKLIIFMREIISLTGGFSIADFFPTWKMLHDVGGSKTRLLKAHRKIDEILEHVVNEHKQNRADGQKGNGEFGGEDLIDVLLRVRESGEVQISITDDNIKSILVDMFSAGSETSSTTIIWALAEMMKKPSVLAKAQAEVRQVLKEKKGFQQIDLDELKYLKLVIKETLRMHPPIPLLVPRECMKDTKIDGYNIPFKTRVIVNAWAIGRDPESWDDPESFSPERFENSSVDFLGSHHQFIPFGAGRRICPGMLFGLANVGQPLAQLLYHFDRKLPNGQSHENLDMTESPGISATRKDDLVLIATPYDP

SEQ ID NO: 14198 - protein, 439 aa, Triticum aestivum
  unsure (1)..(439): unsure at all Xaa locations
MASRLASRLLLRRPAAVLSLLQSSRHARHFSTQLLEGVPRLPKPTCERYFLRNASPYQIWSRSFASENGDLVEAVVPFMGESVTDGTLANFLKKPGDRVEADEAIAQIETDKVTIDVSSPEAGVIEKFIASEGDTVTPGTKIAVISKSAAPSEAHVAPSEETSQKETPPPPPAEKPKVEAKSPKVESVKPQASKLASPSEPQLPPKERERRVSMPRXLRKRIANRLKDSQNTFALLTTFNEVDMTNLMKLRTDYKDEFVKKHGVKLGLMSCFVKAAVSALQNQPIVNAVIDGDDIIYRDYIDVSVAVGTSKGLVVPVIRDTEGMNFADIEKGINSLAKKATEGALSIDEMAGGTFTISNGGVYGSLISTPIINPPQSAILGMHSIVQRPVVVDGSILARPMMYLALTYDHRLIDGREAVLFLRRIKDVVEDPRRLLLDI

SEQ ID NO: 14199 - protein, 292 aa, Escherichia coli
MKVAVLGAAGGIGQALALLLKTQLPSGSELSLYDIAPVTPGVAVDLSHIPTAVKIKGFSGEDATPALEGADVVLISAGVARKPGMDRSDLFNVNAGIVKNLVQQVAKTCPKACIGIITNPVNTTVAIAAEVLKKAGVYDKNKLFGVTTLDIIRSNTFVAELKGKQPGEVEVPVIGGHSGVTILPLLSQVPGVSFTEQEVADLTKRIQNAGTEVVEAKAGGGSATLSMGQAAARFGLSLVRALQGEQGVVECAYVEGDGQYARFFSQPLLLGKNGVEERKSIGTLSAFEQNAL

SEQ ID NO: 14200 - protein, 350 aa, Helicobacter pylori J99
MRVPSKGFAIFSKDGHFKPHDFSRHAVGPKDVLIDILYAGICHSDIHSAYSEWKEGIYPMVPGHEIAGVIKEVGKEVKKFKVGDVVGVGCFVNSCKTCKPCKEHQEQFCANHKTVFTYDCLDYFHDNEPHMGGYSNNIVVDENYVISVDKNAPLEKVAPLLCAGITTYSPLKFSKVTKGTKVGVAGFGGLGSMAVKYAVAMGAEVSVFARNDHKKQDALNMGVKHFYTDPKQCKEELDFIISTIPTHYDLKDYLKLLTYSGELALVGLPPVEVAPALNVFEFIHLGNRKVYGSLIGGIKETQEMMDFSIKHNIYPEVDLILGKDIDTAYHNLTHGKAKFRYVIDMKKSFD

SEQ ID NO: 14201 - protein, 211 aa, Gossypium robinsonii
AKGQTPLFPRIFGHEAGGIVESVGEGVAHLKPGDHVLPVFTGECGNCRHCKSKESNMCDLLRINTDRGVMLSDGKTRFSINGKPIYHFVGTSTFSEYTVAHVGSVAKINPAAPLDKVCILSCGISTGLGATLNVAKPTKGSTVAIFGLGAVGLAAAEGARIAGASRIIGVDLNPNRFEEAKKFGCTEFVNPKDHNKPVQKVLAEMTNGGVD

SEQ ID NO: 14202 - protein, 211 aa, Gossypium raimondii
AKGQTPLFPRIFGHEAGGIVDSVGEGVTHLKPGDHVLPVFTGECGNCRHCKSKESNMCDLLRINTDRGVMLSDGKTRFSINGKPIYHFVGTSTFSEYTVAHVGSVAKINPAAPLDKVCILSCGISTGLGATLNVAKPTKGSTVAIFGLGAVGLAAAEGARIAGASRIIGVDLNPNRFEEAKKFGCTEFVNPKDHNKPVQEVLAEMTDGGVD

SEQ ID NO: 14203 - protein, 111 aa, Triticum aestivum
  unsure (1)..(111): unsure at all Xaa locations
SATSVATFQGXKSTAGLPVSRRSNGASLGSVSNGGRIRSMQAWPIEGIKKFETLSYLPPLSTEALLKQDHYLIRSKRGPRLEISKAGHIFREHNASPGYYEGRDWTTGKLP

SEQ ID NO: 14204 - protein, 489 aa, Dechloromonas sp. RCB
MSQPQRIHHFINGEFTASPDPRYFDKRSPVDGRVIAHIAEAGQADVDAAVTAARAALKGEWGKLSTDQRVDLLYGVANEITRRFDDFVAAEMADTGQPSHVQTHVFIPRGAANFKVFADVIKNVAAESFRMATPDGKGALNYAIRNPKGVIGVISPWNAPFLLMTWKVGPALACGNTVVVKPSEETPLTATLLGEVMNSVGIPKGVYNVINGFGPDSAGAYLTQHPGVDAITFTGETRTGTAIMKAAAEGMRDVSFELGGKNAGIVFADCNFEAAVDGIFRSAFLNTGQVCLGTERVYVERPIFENFVQALKAKVEGVRYGRPEDHTSTYGPLISQEHRDKVLSYYKKAVDEGATVVTGGGVPDMPAELAGGSWVQPTIWTGLPETAAVVREEIFGPCCHIRPFDSEEEVIELANANDYGLATTIWTENLSRAHRVAERVEVGVTWVNSWFLRDLRTPFGGSKQSGIGREGGVHSLEFYTETRNVCIKL

SEQ ID NO: 14205 - protein, 211 aa, Gossypium hirsutum
AKGQTSLFPRIFGHEAGGIVESVGEGVTHLKPGDHVLPVFTGECGNCRHCKSKESNMCDLLRINTNRGVMLSDGKTRFSINGKPIYHFVGTSTFSEYTVAHVGSVAKINPAAPLDKVCILSCGISTGLGATLNVAKPTKGSTVAIFGLGAVGLAAAEGASIAGASRIIGVDLNPNRFEEAKKFGCTEFVNPKDHNKPVQEVLAEMTNGGVD

SEQ ID NO: 14206 - protein, 211 aa, Gossypium hirsutum
AKGQTPLFPRIFGHEAGGIVDSVGEGVTHLKPGDHVLPVFTGECGNCCHCKSKESNMCDLLRINTDRGVMLSDGKTRFSINGKPIYHFVGTSTFSEYTVAHVGSVAKINPAAPLDKVCILSCGISTGLGATLNVAKPTKGSTVAIFGLGAVGLAAAEGARIAGASRIIGVDLNPNRFEEAKKFGCTEFVNPKDHNKPVQEVLAEMTDGGVD

SEQ ID NO: 14207 - protein, 233 aa, Gossypium robinsonii
KILFTSLCHTDVYYWEAKGQTPVFPRIFGHEAGGVVESVGEGVTELKPGDHVLPVFTGECGDCGHCKSEESNMCDLLRINTDRGVMLSDGKTRFSINGKPIYHFVGTSTFSEYTVVHVGCVAKVNPAAPLDKICVLSCGISTGLGATLNVAKPTKGSTVAIFGLGAVGLAAAEGARIAGASRIIGVDLNPNRFEEAKKFGCNEFVNPKDYDKPVQEVLAEMTNGGVDRSVECT

SEQ ID NO: 14208 - protein, 481 aa, Oryza sativa
MEERIPLLSKRFPADGTAGVGGGREEEGGDRWWSGLAREAGKVGSMALPMAAMSVAQNAVQVASNMMVGHLPGVLPLSASAIATSLASVSGFSLLVGMASGLETLCGQAYGAKQYDKLGVQTYRAIVTLTVVTIPISLLWVFIGKLLTLIGQDPVISHEAGRYIVWLIPGLFAYAVCQPLTKFLQSQSLIFPMLWSSIATLLLHIPLSWLLVFKTSMGFTGAALAISISYWLNTFMLAAYIRFSCSCKVTRSPPTIEAFRGVGLFLRIALPSALMLCFEWWSFEILVLLSGLLPNPELESSVLSICTRVANELGAGNPEGARSAVHLVMSIAGTEAVLVTGMLFAAQRILGYAYSSDEEVVTYFTSMVPFVCISVAADSLQGVLSGIARGCGWQHLGAYVNLGSFYLVGIPVALLLGFGFKMEGKGLWLGIACGSVLQFLLLAVIAFFSNWQKMAEKARERIFGETPSEKQHLVLDATNSV

SEQ ID NO: 14209 - protein, 588 aa, Neurospora crassa
MISAYPSTYASDRSVVFLHTSRNKTSFTTSSVAMKPFLGLRGQPLNLAVGAVAGCDFLLFGYDQGVMGGILTLPEFLGYFEQINPDAPGLTPHESSMRSTYQGISVASYNLGCFIGAIITIFIGNPWGRKKIILLGTSIMIVGAILQASATTLGHFIIGRIITGIGNGGNTSTSQVPTWQSETSKAHKRGKMVMIEGSLVTAGIMLSYWIDLGLSFAPGSVAWRFPLAFQIIFCILILIFIPFLPESPRWLVFKGRDAEAKEILAALNDVELDDPIVDTEFHFIHDTVVEMSKGSFKDLFTMDKDRNFHRTLLAYLNQVFQQISGINLITYYAAVIYSGLGMSDFLARLLAALNGTEYFIASWPAVFLVERVGRRKLMLFGAIGQAATMAILAGVNSRPDDKPYQIAGIVFLFVFNTVFAVGWLGMSWLYPAEIVPLRIRAPANALSTSANWIFNFMVVMITPVAFNKIKYQTYIIFAVINAFIVPVVYFFYPETACRSLEEMDMIFHKVDGWKGYFTVVHQAKVEPKWYDKDGQRIGGADFEKTAGYQSHSIPESSGFEKPTKAHVESPRADDGITSSSSDGGNRES

SEQ ID NO: 14210 - protein, 450 aa, Bordetella bronchiseptica RB50
MAFDFDLYVIGAGSGGVRAARFAAGYGARVAVAESRYLGGTCVNVGCVPKKLLVYGAHFHEDFEQAAGFGWNPGRPEFDWPTLIANKNREIERLNGIYRNLLVNSGVALHEGHARIVDPHTVEINGQRHSAQHILVATGGWPFVPDIPGKEHAITSNDAFFLPELPRRVLVVGGGYIAVEFASIFNGLGAQTVQVYRRELFLRGFDGSVREHLRDELVKKGLDLRFNTDVERIDKRADGVLAVTLSDGSVLETDCVFYATGRRAMLDDLGLENTGVRLAESGYIEVDDEYRTSEPSILAIGDVIGRVPLTPVALAEGMAVARRLFRPQEYRKVDYDLIPTAVFSLPNIGTVGLTTEQALERGFRVTRYESRFRPMKLTLTQSQEKTLMKLVVDADSQKVLGCHMVGPDAGEIVQGLAVALKAGATKQVFDDTIGIHPTAAEEFVTMRTAT

SEQ ID NO: 14211 - protein, 416 aa, Escherichia coli
MESKVVVPAQGKKITLQNGKLNVPENPIIPYIEGDGIGVDVTPAMLKVVDAAVEKAYKGERKISWMEIYTGEKSTQVYGQDVWLPAETLDLIREYRVAIKGPLTTPVGGGIRELLVALRQELDLYICLRPVRYYQGTPSPVKHPELTDMVIFRENSEDIYAGIEWKADSADAEKVIKFLREEMGVKKIRFPDHCGIGIKPCSEEGTKRLVRAAIEYAIANDRDSVTLVHKGNIMKFTEGAFKDWGYQLAREEFGGELIDGGPWLKVKNPNTGKEIVIKDVIADAFLQQILLRPAEYDVIACMNLNGDYISDALAAQVGGIGIAPGANIGDECALFEATHGTAPKYAGQDKVNPGSIILSAEMMLRHMGWTEAADLIVKGMEGAINAKTVTYDFERLMDGAKLLKCSEFGDAIIENM

SEQ ID NO: 14212 - protein, 272 aa, Oryza rufipogon
MGRRACCAKEGMKRGAWTSKEDDVLASYIKSHGEGKWREVPQRAGLRRCGKSCRLRWLNYLRPNIKRGNIDDDEEELIVRLHTLLGNRWSLIAGRPPGRTDNEIKNYWNSTLSRKIGTAATAAAGSRGGSTPDTARATDAASSSSVVPPGQQQQPASRADTDTATAAAAAAATTTTVWAPKAVRCTRGFFFHDRETAPLAAAAPAPAGELGDGDDVDCDYYCSGSSSAATTTSSSSLPAVVEPCFSAGDDWMDDVRALASFLDTDDAWNLCA

SEQ ID NO: 14213 - protein, 416 aa, Escherichia coli
MESKVVVPAQGKKITLQNGKLNVPENPIIPYIEGDGIGVDVTPAMLKVVDAAVEKAYKGERKISWMEIYTGEKSTQVYGQDVWLPAETLDLIREYRVAIKGPLTTPVGGGIRSLLVALRQELDLYICLRPVRYYQGTPSPVKHPELTDMVIFRENSEDIYAGIEWKADSADAEKVIKFLREEMGVKKIRFPDHCGIGIKPCSEEGTKRLVRAAIEYAIANDRDSVTLVHKGNIMKFTEGAFKDWGYQLAREEFGGELIDGGPWLKVKNPNTGKEIVIKDVIADAFLQQILLRPAEYDVIACMNLNGDYISDALAAQVGGIGIAPGANIGDECALFEATHGTAPKYAGQDKVNPGSIILSAEMMLRHMGWTEAADLIVKGMEGAINAKTVTYDFERLMDGAKLLKCSEFGDAIIENM

SEQ ID NO: 14214 - protein, 537 aa, Oryza sativa
  unsure (1)..(537): unsure at all Xaa locations
MGLRATEAATGNGGGMRSLPDFLGRKSKYVRMDDVLPDEQGDGGGGGGVVRVRGGGGSGRYVFACSVFASLNHVLLGYDVGVMSGCIIFIQKDLHISEVQQEVLVGCLSFISLLGSLAAGRTSDAVGRKWTIGLAAAVFQAGAAVMTLAPSFAVLMMGRLLAGIGIGIGIMVAPVYISEITPATLRGSYASFPEIFISLGILLGYVSNLAFSGLPDHINWRVMLAAGIVPSISVAFVLLVIPESPRWLVMQGRAAKARAVLLKVTDGEDEAQERLAEIEEAARVTATGNGKAVWRELLRPSPVIRRMLVTGIGVQLFQQITGIDALVYYSPTIFRDAGITTESQLLAATVGVGLSKTVFIVIAIVLVDRVGRKPLLYVSTAGITACLAALAASLSLLAHGALPRAAAIGAAXILTVCGFVAFFSVGIGPINMVLSSEIYPLRLRAQAVALGFSVNRLTSGPVPMSFLSFCGXVSVPGAXFAAFAAFSALSVVFVHVFVPEMSGKSLEQIESLFGAGAGPGEVKLGNAEHLVQGKEMS

SEQ ID NO: 14215 - protein, 370 aa, Pseudomonas aeruginosa UCBPP-PA14
MSLPNANLIASSRKAAAQMATRDTSFIFNEWYVAAFAEEVGRELLARTLLGKRVVLYRTLAGQAVALEDRCAHRSFPLSRSRLEGDGIVCGYHGFRYDSQGELIETPSQKACPRGVGIRHYPLLERGPLVWIWLGDPRLADPKRLPQRPWLEDPGWACSKGYFLHPGNYVSMHENLMDLTHLTYLHANTIGTPDYAGAPYELDLKEGHYRLVRHVLPTTLSPVWGRTTGLDGCPTAARITTSEFLSPGLHQVSATFYDTALPAERRPEFHIRTAHILTPETHGSMHYFIVHGRDFAQDDETVGAFMHEQLFAAFVEDVEGLGALEKVLAEADEDSYEISVASDAPAVATRTYLKRRADEEAHQRAAHRVA

SEQ ID NO: 14216 - protein, 151 aa, Zea mays
  unsure (1)..(151): unsure at all Xaa locations
MDPYKHRPSSGSNSSFWTTNSGAPVWNNNSALTVGQRGPILLEDHHLIENLAHFDRYNIPERAVHARGASAKGFFEVTHDVSHLTCADFLRAPGVQTPVIVRFSTVVHERGSPETLRDPRGFAVKFYTKEGNFDLVGNNMPGFXIRDGMKF

SEQ ID NO: 14217 - protein, 203 aa, Gossypium raimondii
AKGQTPVFPRIFGHEAGGVVESLGEGVTDLKPGDHVLPVFTGECGDCRHCKSEESNMCDLLRINTDRGVMLSDGKTRFSINGKPIYHFVGTSTFSEYTVVHVGCVAKVNPAAPLDKIFVLSCGISTGLGAILNVAKPTKGSTVAIFGLGAVGLAAAEGARIAGASRIIGVDLNPNRFEEAKKFGCNEFVNPKDYDKPVQEVLA

SEQ ID NO: 14218 - protein, 272 aa, Pseudomonas fluorescens PfO-1
MSNTRIAFIGAGNMAASLIGGLRAKGLEAAHIRASDPGEETRAKVSAEHGIETFADNAQAIDGADVVVLAVKPQAMKLVCEAIRPSLKPNQLVVSIAAGITCASMTAWLGEQPIVRCMPNTPALLRQGVSGLYATGKVSAEQRQQAEELLSAVGIALWLNEEQQLDAVTAVSGSGPAYFFLLIEAMTAAGVKLGLPKETAEQLTLQTALGAAQMAVSSDVDAAELRRRVTSPAGTTEAAIKSFQAGGFEALVEKALGAAAHRSAEMAEQLGK

SEQ ID NO: 14219 - protein, 230 aa, Gossypium hirsutum
LFTSLCHTDVYFWEAKGQTPVFPRIFGHEAGGVVESVGEGVTELKPGDHVLPVFTGECGDCRHCKSEESNMCDLLRINTDRGVMLSDGKTRFSINGKPIYHFVGTSTFSEYTVVHVGCVAKVNPAAPLDKICVLSCGISAGLGATLNVAKPTKGSTVAIFGLGAVGLAAAEGARIVGASRIIGVDLNPNRFEEAKKFGCNEFVNPKDYDKPVQEVLAEMTNGGVDRSVEC

SEQ ID NO: 14220 - protein, 503 aa, Nostoc punctiforme PCC 73102
MNIRKVSTTPLSDQKPGTSGLRKSVKVFQQPHYLENFIQSIFDSVGDLHSQTLVLGGDGRYYNRQAIQIILKMAAANGIGRIKVGQRGILSTPATSAIIRKYQAIGGIILSASHNPGGPNGDFGVKYNISNGGPAPEKVTEAIYDRSKVIDSYQILEAPDVDLETLGESHLGETVVEVIDSVQDYQELMESLFDFERIQQLLTRGNFRFSIDALHAVAGPYAHAIFEQRLGAPVGTVQNGTPLEDFGGGHPDPNLVYAHDLVDILYGENAPDFGAAFDGDGDRNMILGRKFFVTPSDSLAVLAANAKLVPGYSEGLAGVARSMPTSQAVDRVAAQIGIESYETPTGWKFFGNLLDAGKATLCGEESFGTGSNHIREKDGLWAVLFWLNILAVRQQSVEQIVREHWQTYGRNYYSRHDYEEIQTEQGNTLIERLRSLLPNLKGKQFGNYQVEYSDDFSYTDPVDGSISEQQGVRIGFTDGSRIVVRLSGTGTQGATLRHHVKIT

SEQ ID NO: 14221 - protein, 128 aa, Coccidioides posadasii
MGADDKANHSTYRYNEVPVYTTSQGCPVMDPESSQRIGENGPLLLQDFHLIDLLAHFDRERIPERVVHAKGAGAHGEFEVTDDISDITTIDMLKGVGKKTKLVTRFSTVGGEKGSADSARDPRGFAVK

SEQ ID NO: 14222 - protein, 351 aa, ASPERGILLUS NIDULANS FGSC A4
MATPQLQTAAVLPSTGATLTSRLEIRHDRPIPSPAAGELLVKLEFSGVCHSDVHSVRGETPMLTDVAGHEGVGKVVKVGDGVDEGAWMGRRVGIRWLYSSCLECEICERNNTACPNQKNAGANVPGTFQQYIVSPAMHVTKIPPQLSPDEAAPLLCAGIAMYSSIMKTKTRPGDWIVFPGAGGGLGHMGVQIAVKKGLRVIAIDSGEKKQKLCLSLGATAFLDYKTDDVESAVKQLTSGLGAHAVICTANGEAAYEQSMRLLRRLGVLVCVGIPNLPFRLPATPFDMIVKGLTIVGNSAGTAEEMEELMEMAVAGDLKAHIECFEFDQIDDVIQRLGRSEIEGRAVMRIPE

SEQ ID NO: 14223 - protein, 230 aa, Gossypium hirsutum
LFTSLCHTDVYFWEAKGQTPVFPRIFGHEAGGVVESLGEGVTDLKPGDHVLPVFTGECGDCRHCKSEESNMCDLLRINTDRGVMLSDGKTRFSINGKPIYHFVGTSTFSEYTVVHVGCVAKVNPAAPLDKIFVLSCGISTGLGAILNVAKPTKGSTVAIFGLGAVGLAAAEGARIAGASRIIGVDLNPNRFEEAKKFGCNEFVNPKDYDKPVQEVLAEMTNGGVDRSVEC

SEQ ID NO: 14224 - protein, 273 aa, Nostoc sp. ATCC 53789
MLEDLQIAFIGGGTMGEMIMARLLSTKIVPKPDLIIVSDPVSARCLHLESEYGVSTTTCNIEAVVGASIVILAVKPQVLAEVLAILKGKISPDALVISIVSGASIPYLCEGLNHPAVVRTMPNIAVQVGHGTTVWSASSSVTEIQRSHTQVILQALGKEFPTQNEHYLDMATALSSAGTGFIFLYIEAMIDAGVQMGLTRTQAQELTLHTIAGSVELMFQTDEHASSLTKQGTSPGGVTAVGLYELEKGGMRTLISNAVLAALSRTQQLGTGV

SEQ ID NO: 14225 - protein, 368 aa, Nostoc sp. ATCC 53789
MPLAAVMTAPNQPVEVQQLPDPVLEKGGIILETLYSEVCGTDVHLLHGRLEGVPYPIIPGHFSVGRVVETGGAVSDVNGKLIQPGAIATFLDVHETCYNCWYCLVAKASTRCPKRKVYGVTYSAKDGLLGGWSELIYLKPGVKVLTLPEEVSPKQFIAGGCALPTALHAIDRAQIQIGDVVVVQGCGPVGLSVAILALLSGAGKVIVIDKFESRLVVAKSFGVDETLAIKADDPRQHIERVLELTNGHGADVTIEATGIPIAVKEGLNMTRNGGRYVIVGHYTNTGEILINPHLEINLKHIDIRGTWGIDFSHFYRMIELLKRHSDSSKNIAWSSIISRSYTLQQINQALADVEQGSVLKAVIQPNLS

SEQ ID NO: 14226 - protein, 1673 aa, Ustilago maydis 521
MAAATAAILPPATDFVNMDHRSADSHRMSPASFADASLANGRPLRSAKSVPSPSTPTSPFRLRGTPHSPSIPHRRVYNIDDESITSTSHSFASETRSSDASITPSQSASNVSAPASPRSYAHLALPLPPSSPGSPSRPLAHKKSAERRRKATRNQHLTNLEVASLSTPELHLASDPMLDTQEPSFLRKLVRGSRAHSNDAVSSAGSEGQTQASSHTDNASSRLGVSPGLAYSSFAAAMSAVDACEDSSQPDANPQVHCFRKKSTSTLRSADSEVSRASWSILNTSTDTLSPPKDINVRSSPTKSEPKSSAGTWFRRHRQQSDPSRKLNQNFDASGANSSTQVSVQRSQMSDATVGSGTTLLSQSNYTGLSSATTASFDLSELASPQAALESIRKARSFMIRELGRIAEPGDASDKPRISALVSQASLEVHDLHSEASSFWHSIADGVLLCLLANRLRPGSVDRIDRRDLEWVKSNNISRFLRAARDHLGLRSKDLFQTFDLTDSTVGGLLRVVHTLQATEKMARRSSKVTAARANAIKIEPRTTSMTPPTTPRAQDRKMLPVGNGDLECIENSSELFLNDDTPKRAVLSIQQNRREAERILIGKSDSSRYTSTSFDAKRRSIELGHPKPKGSSITFADSVKQNSYSADDDNRLPYRDRKLSESVISLTGVAEEPEDGVVTNDDSLPTAESFSTSSTPSVSMELSQVRRGSSESDKSTKSFAVKPPLLARSTSQKRISQELALGQLPRAVIGSTENLDDYLFISGSPTRHAPTRRHSARLYAGPSLLNPSRESLLNLGSQANGESDALASSRVPFPRGANDSPGARRMARHLSMNAGVSDTISTASGPSTAIATNGSSSSSKVSSRPHFRHMRYSSDLHLPSMSRPTSVGGRSPDPSVDERSYISTSRSRFDSEIGSIYTNTLGSLPTDESGSTTTRASRDATGPKHKIVVAEEGKPSVTYQLGNCIGRGQFGSVYRALNLNSGRMVAVKRIKLEGRTDEEINDLMGEVDLLKSLTHPSVVKYEGLVRGPDVVSIILEFVENGSLLHTLKAFGNFPEKLVASYVVKILEGLNYLHGQNVVHCDLKAANILTTKQGNVKLSDFGVSLNLKAVKKMGNKNDAIGTPNWMAPEVIELKGVTTAADIWSLGCTIIELLTGKPPYYDMLAMSAMFRIVEDDCPPIPEKCSDALRDLLMQCFNKDPAKRPSAEMLFEHEWMQQVWSGHKDLRELRPQDSVPFLRRISADARRLDPRIFEEDERAVQPAMERSTSSPAPTLQRPGLEALRANTSPAESLAAVATEMANGVSPTTSPAVHSNPLPSVDTSSKNQAQSPALTPANPTVFLPAGETSMLDLGLMAEEEAKPHAFVKSTFSKAVVCKICREPVKKHAVLCEECGLVCHARCAVHAPSPCNLRAQLLLFQQRASMDQTSPMSSAAQLAPVSPMLAGGAPNAAVPINFRFPFGMKRQSKSPTADSQPQLGLVASASSETEVRGSPSPPTGNGVTAAKPAKDQAAVRKRRISLIPGRQRSPSPPPAETPEAMRSPYGNGALHGTRRHSSMSYGSISGASSISSAGGILLGHSSSRGSSAQQHQAQQAHPHASTPVLPVEQLHARPSKERFRRRLSSGVVTSGARAEALSAKHTTKGGVSTGQVTPTPRSAIERQKSRRSSSKADCTIM

SEQ ID NO: 14227 - protein, 502 aa, Lotus japonicus
MAALPECSAANLAQLIGPNATDAAAVAGFICDQFTAVGQRFSDTAFAVDSTYLLFSAYLVFSMQLGFAMLCAGSVRAKNTMNIMLTNVLDAAAGGLFYYLFGFAFAFGAPSNGFIGRHFFGLKDVPTVAFDYSYFLYQWAFAIAAAGITSGSIAERTQFVAYLIYSSFLTGFVYPVVSHWFWSGDGWASATNTGNLLFGTGVIDFAGSGVVHMVGGVAGLWGALIEGPRIGRFDHAGRAVSLRGHSASLVVLGTFMLWFGWYGFNPGSFTKILSAYDSGNYYGQWSAIGRTAVTTTLAGCTAALTTLFGKRIISGHWNVTDVCNGLLGGFAAITAGCSVVEPWAAIVCGFVAAVVLIACNMLAEKVRYDDPLEAAQLHGGCGAWGIIFTALFAKEEYVNQVYPGKPGRPYGLFMGGGGKLLGAHVIQILVIIGWVSATMGPLFFILNKMKLLRISTEDELAGMDLTRHGGFAYAYEDDESHKPGIQLRKIEPNSSSTPSAES

SEQ ID NO: 14228 - protein, 338 aa, Caulobacter crescentus CB15
MAEETSDKTVLEGAGAYFLSVVEASQDCIRVISADGYLEYMNAQGKFLLEIEDFEGRNRHQYWPDMWPLESRDTVEQALRAAMAGNAVAFRAPCPTAKGAPRWWDTTVSPILEGGRVIRVLATSRDVTGERLAESHRQLLVNELNHRVKNTLATVQSIANQSLRNAGVDASVRDALEGRLMAIAATHNVLTDQNWSAASLRQIVDGSVTPYRANPGQLTISGDDLKVSPKPAVVMALAFHELAINALKYGALSAPDGHVDIHWSVDPDDQLLIEWAERGGPTVRPPERRGFGSRIVELALPNELGGKVDLDYRRDGLRCSIRSPLSALDKNDAFMPLG

SEQ ID NO: 14229 - protein, 460 aa, Bordetella bronchiseptica RB50
MPRSTARAAWKRELAATLALGLPLVLTNLAQMAMTVTDVIFIGRLGSQALAASALGANLFTAIEFFGLGLVAATAPMVAHALGRRGNAVRDVRRTVRQGLWTAVIYSVPGCLLLWHGEAILLAIDQPPELAAQAGAYLRALMWAMPPFLGFLVLRSFVAALQRPRSAFLIALAAIVLNVFGNWVLVFGNLGAPALGLVGAGLASALATLGLFLGMVGVVCLDRRFRRYHLFGDVWQPDWQRLAEFWKLGLPIGAATAFEVTIFNAAAFLMGWLGEPELAAHAIAIQIASVTFMIPYGIAQAATVRVGHAYGARQPDQVARAGWCAFSLGIGSMAIAAALMLLAPGLLVSAFLDIGDPANAQVLRLATAYLAVAALFQIVDGAQVLGAGMLRGLHDTRVPMLYAALGYWGVGLPSGAALAFWAGWRGVGVWSGLAIGLALVAVLMMQRWLRRDRVGLLRRA

SEQ ID NO: 14230 - protein, 188 aa, Juniperus phoenicea
DEHGEVVAEIRRSDLEPYLGLHYPATGIPQASRFLFMQNKVRMISDCRADPVRIIQAEELPQLLCLVGSTLRAPHGCHAQYMDNMGSIASLAMAVIVNNGNDEVGSSGRNTGKLWGLVVCHHTSPRAVPFPLRSACEFLMQTFSLQINMEMQLATQLTENNILRTQTLLCDMLLRDAPIGIVTQSPSI

SEQ ID NO: 14231 - protein, 272 aa, Oryza rufipogon
MGRRACCAKEGMKRGAWTSKEDDVLASYIKSHGEGKWREVPQRAGLRRCGKSCRLRWLNYLRPNIKRGNIDDDEEELIVRLHTLHGNRWSLIAGRLPGRTDNEIKNYWNSTLSRKIGTAATAAAGSRGGSTPDTARATDAASSSSVVPPGQQLQPASRADTDTATAAAAAAATTTTVWAPKAVRCTRGFFFHDRETAPLAAAAPAPAGELGDGDDVDCDYYCSGSSSAATTTSSSSLPAVVEPCFSAGDDWMDDVRALASFLDTDDAWNLCA

SEQ ID NO: 14232 - protein, 270 aa, Oryza glaberrima
MGRRACCAKEGMKRGAWTSKEDDMLASYIKSHGEGKWREVPQRAGLRRCGKSCRLRWLNYLRPNIKRGNIDDDEEELIVRLHTLLGNRWSLIAGRLPGRTDNEIKNYWNSTLSRKIGTAATAAAGSRGGSTPDTARATDAASSSSVVPPGQQQQPASRADTDTATAAAAATTTTVWAPKAVRCTRGFFFHDRETAPLAAAAPAPAGELGDGDDADCDYYCSGSSSAATTTSSSSFPAVVEPCFSAGDDWMDDVRALASFLDTDDAWNLCA

SEQ ID NO: 14233 - protein, 337 aa, Candida albicans SC5314
MVKVAILGAAGGIGQPLSLLTKLNPNVDELALFDVVNVPGVGADLSHINSDSKTQSYLPKDKEDKTALAAALKGSDLVIIPAGVPRKPGMTRDDLFNINASIVQGLAEGIAANSPKAFVLVISNPVNSTVPIVAETLQAKGVYDPARLFGVTTLDIVRANTFISQLFLDQTKPSDFNINVVGGHSGETIVPLYSLGNSKQYYDILSEEQKKELIKRVQFGGDEVVQAKNGAGSATLSMAYAGYRLAESILAAVNGKTDIVECTFLNLDSSIKGASEARKLVKDLDFFSLPVQLGKNGITEVKYDILNQISDDEKKLLEVAIEQLQKNIEKGVSFAKK

SEQ ID NO: 14234 - protein, 269 aa, Oryza glumipatula
MGRRACCAKEGMKRGAWTSKEDDVLASYIKSHGEGKWREVPQRAGLRRCGKSCRLRWLNYLRPNIKRGNIDDDEEELIVRLHTLLGNRWSLIAGRLPGRTDNEIKNYWNSTLSRKIGTAAAGSRGGSTPDTARATDAASSSSVVPPGQQQQPASRADTDTATAAAAAAATTTTVWAPKAVRCTRGFFFHDRETAPLAAAAPAPAGELGDGDDVDCDYYCSGSSSAATTTSSSSLPAVVEPCFSAGEDWMDDVRALASFLDTDDAWNLCA

SEQ ID NO: 14235 - protein, 290 aa, Magnetococcus sp. MC-1
MKGIVLAGGSGTRLHPVTIPISKQLLPIYDKPMIYYPLTTLMLAGIRDILIISTPQDTPRFEQLLGDGSNWGVSLSYAVQPSPDGLAQAFIIAEDFLDRQPCTMILGDNIFFGHDLSQVLQRVALRQQGATVFAYAVSDPERYGVVHFDSQGRALGIEEKPAKPKSRYAVTGLYCYDQHVVEYARALRPSPRGELEITDLNNRYLAEGSLSVERLGRGYAWLDTGTHDSLLRAATFVETLDKRQGVKIACPEEVSFRMGWIDQAQLRALAQPYLKNGYGQYLLRVCEEPD

SEQ ID NO: 14236 - protein, 170 aa, Zea mays
  unsure (1)..(170): unsure at all Xaa locations
MAPTVMMASSATAVAPFQGLKSAAXLPVARRSTRSLGNVSNGGRIRCMQVWPAYGNKKFETLSYLPPLSTDDLLKQVDYLLRNGWIPCLEFSKVGFVYRENSTSPCYYDGRYWTMWKLPMFGCNDATQVYKELQEAIKSYPDAFHRVIGFDNIKQTQCVSFIAYKPPGSD

SEQ ID NO: 14237 - protein, 460 aa, Bradyrhizobium japonicum USDA 110
MSMLPNSQEARDVAYQLHPYTNARAHQQAGPLVIERGEGPYVFDASGKRYFEAMAGLWSVGLGFNEKRLVEAAHKQMLALPFYHTFSAKSHGPSIDLAEKLVALAPVPMSKVFFTNSGSEANDTVLKLIAYRSNALGQPQRKKVISRMRAYHGVTIASASLTGLPNNHRSFDLPLPNILHTGSPHFYKDGAPGESEEAFATRRAEELDALIQKEGPDTIAAFFGEPVMGAGGVIVPPATYWDKIQAVLKKYDILLVADEVICGFGRTGKMFGCETYGIKPDAIVVSKQITSSYFPLSAILMNDRMFEPIADESNKIGVLGHGFTAGGHPVGSAIALENLKIIEERGLVAHAAELGGYMQGKLRELAGHPLVGEVRGVGMIAALELVLDKQRKTAAATPGAVGGIASRMLQERGVISRNMLDAIAICPPLIVNKTQIDELVAAISGVLEDMKAEVAKLTPA

SEQ ID NO: 14238 - protein, 446 aa, Methylococcus capsulatus str. Bath
MRNLSRRIQSHQIRLRPPPFGAKRPVRRSESTSPPPRRRLIVGKRNRSAQVQYSMSHGLTHLSFWPLLFATLALTHVTIVSVTIFLHRHQAHRALSLHPLASHFFRFWLWLTTATVTKEWVSIHRKHHARCETPDDPHSPQCLGIFTVLLRGWMLYRKEARNTATLAQFGNGTPDDWLERKLYSRFPDLGITLMLALNLLLFGIGGLGVWAVQMLWIPFWAAGVVNGLGHHLGYRNFETPDASTNLWPIGFIIGGEELHNNHHAYPASAKFSSRRWEIDIGWLYIRLMTLLKLAKIRNMPPKTIIHTAEPSVDMDTVKAVLRNRAHVLSLYGRRVIVPVLRSEQAKSPKAGRRLLRQTRPLLLREYIKADPAAWHNFSRMLEDSQTLATIFQFKQQLKAVWTDSFTSHEERLERLRAWCLQAKQSDLPWLQHFADTLSGYRLQPAH

SEQ ID NO: 14239 - protein, 130 aa, Mesorhizobium sp. BNC1
MVMNNMSADSSSLEGLRVFIVEDEALVAMNLEMILEDLGCLVVGPAMRFDRAEEMVDGDLAADIAILDVNVSGKQVFPLAHRLADRMPVIFATGYDQSGIPAEWHSRPMLQKPYTSDEVMRVLSQALGDK

SEQ ID NO: 14240 - protein, 436 aa, Prochlorococcus marinus str. MIT 9313
MTQLQSLRGMVDLLPEQTRCWQAVESVARDHFRRAGLQEIRTPLLEVTELFARGIGEATDVVGKEMYTFVDRGDRSCTLRPEGTASVVRAALQHGLLSQGPQRFWYGGPMFRYERPQAGRQRQFYQIGVEYLGVGSPRSDAEVIALAWALLVDLGVQGLVLEINSLGTLQDRQKYREELVAWLEARSEELDDDSRKRLYTNPLRILDSKHPAIKELLQDAPTLFEALSVESKARFEEVQVDLEALQIPFQLNPRLVRGLDYYGHTAFEITSDQLGAQATVCGGGRYDGLVEQLGGAPTPAFGWAFGMERLMLLLEAAASINPSGSAARLRASTRPDLYVVNRGEQAERVALVIAHQLRAAGLVVELDSSGAAFNKQFKRAGRSRATWALVIGDDEAERGEGRLKYLQEAKTQANPTPIDKLHRLDDVTGLVCLVRE

SEQ ID NO: 14241 - protein, 428 aa, Bordetella pertussis
MTQVFQKVSAIRGMNDVLPGPSARWEKFEEIVRGWLRSYGYRNVRTPVLEHTRLFARGIGEVTDIVEKEMYTFTDALNGDSLTMRPEMTAGIVRASIEHNMLYDRPHRVYAIGPVFRHERPQRGRYRQFHQIDVEALGFAGPDVDAEMIVMLARLWKLLGLQDVRLELNSLGQPAERAAHRAALIEHLERHQDVLDEDGRRRMYSNPLRVLDTKNPAMQEMADSAPRLFDFLGEASRSHFDGLCQRLADAGIEYRLNPRLVRGLDYYNLTVFEWVTDRLGAQGTVCGGGRYDGLVELLGGKPTPAVGFAIGMERLLDLWEQSVEIEQPAECEVYIVHQGEEGQRLAARVGEQLRDAGLDVIVHAGAAGFKAQFKRADASGARIAVILGGDEVASRTASIKHLRGPVGADAAQQQVPLAQLADVLKSKG

SEQ ID NO: 14242 - protein, 352 aa, Pseudomonas aeruginosa UCBPP-PA14
MKALRWHAARDLRLSELERQAPRPGEVELEVAYCGICGSDLHEYQSGPHSIPQAEAHPLSGCRAPLTLGHEFCGVVAALGPGVEGLRIGDRVAVEPEYRCGECRYCREGRYNLCESMGFIGLMGDGGFAERARVPAYMLHRLPDAVGFRQAAVLEPAAVALHALRRSSLAPGQRCAVFGLGPIGLLLVMLARLRGIEDIAAVDVSPERLALAGEFGASRALDARDGDTAARLREGGALDCAFEAAGSQASLDAALASLRKGGELVLVSLMGEVRLDAFDLVNRELRLLGSVGYRDAYPELIALLADGRLDLARAVTRSVPLEQAVEHGFEALLRDKSQVKVLVNPNPALADA

SEQ ID NO: 14243 - protein, 244 aa, Oceanobacillus iheyensis HTE831
MKLQDKVAVITGGVSGIGAATAKLFASEGAKLILVDMNEEKGASIEAELKSQGSEAIFIKADVTNEEQVKNIYTTAIDTFGKVDILFNNAGIGAVKPTEELTYAEWRKTVEVDLDGVFLVAQAAIKEFLKAGSGVIVNTASMYGWVGSPGSAAYNAAKAGVVNLTRSLGLEYAARNIRVNALCPGFIDTAILGDSDREALINTTPMNRLGKSEEMAKAVLFMASDDSSFMTGNSLIVDGGYTAQ

SEQ ID NO: 14244 - protein, 420 aa, Nitrosomonas europaea
MPEPIRAVRGMNDILPDESGLWAFFEDTIRTWLAAYGYRNLRTPIVEQTDLFVRSIGEVTDIVEKEMYTFVDHLNGENLTLRPEGTASCVRAVIEHNLLYAGPQRLYYSGPMFRHERPQKGRYRQFHQVGVEALGFAGPDIDAELIVMCARLWRLLGISDVRLEISTLGSTESRSVYRARLISYLEKFCDDLDEDARRRLKTNPLRILDSKNPAMREILAGAPRLFDDLDEDSLAHFEALQRILRNQDISFEINNRLVRGLDYYNRTVFEWVTDKLGAQGTICAGGRYDGLIAQIGGKPAPACGFAMGIERILALMGENGAVGAHAIPDIYVVHQGEAAAEFSWKVAESLRDDGLKVVLHSGGGNFKAQMKKADASGARFAAIIGEDEVVAGQISIKPLREAAEQIRVDLAGAAALLGNI

SEQ ID NO: 14245 - protein, 357 aa, Methylobacillus flagellatus KT
MATMKAAVFVSPGKIALRDKPVPEIGPLDALIRITTTTICGTDVHILKGEYPVAAGLTVGHEPVGIIEKLGSEVHGFKVGQRVIAGAITPSGHSNACLCGIGAQDGPDSPHGFKVAGGWKFGNTIDGSQAEFLRVPDAMANLSPIPDHLSDEQVLMCPDIMSTGFSGAERGNIKIGDTVVIFALGPIGLSAVAGAKLLGATKIIGVDSIPDRLNIARALGADHVINFKTHDPVQEILKLTDGRGVDVAIEALGVQQTFESSLRVLRPGGTLSSLGVYSSDLRLPLDAFGAGLGDFTIVSTLCPGGKERMRRLMEAVGSGRADLSNLVTHRFKLSEIEEAYDLFANQRDGVIKVAITP

SEQ ID NO: 14246 - protein, 413 aa, Rickettsia prowazekii
MIENLQPLRGMKDLLPNDYQIHNYIINKARDVGALYGYKQMSTPILEYTKVFNRSMGESSDVMSKEIYSFVDKSNNAVALRPEFTSGIIRSFISNGLQHKLPLKFFSTGPVFRYDRPQAGRQRQFHQLNYEYLGAKGAITDAETVKLAVDILKALEIEEDTTLELNSLGCHESRIVYQQKLVEYLNDFKDQLSGESRLRLNKNPMRILDSKSEIDQKIIAHAPILSEYHTNESKKYFDELQKYLDILGIKYSVNPRLVRGLDYYCHTVFEFTTKKLGSQSTILAGGRYDMLSRIMGNYDVHAIGFAAGIERIALMREYKISVIKPVFVLPIGKNNICYALDIVDKLRLQNIVSIIDPIGKIAKRIQRVLNEDAKFIIFIGDEEKMNNNLKFKDLKNQKEYIIDFEKVLELLKQ

SEQ ID NO: 14247 - protein, 198 aa, Pseudomonas fluorescens PfO-1
MINLKQLVLASHNAGKLKELQAMLGDSVQLRSIGEFSSVEPEETGLSFVENAILKARNAARISGLPALADDSGLAVDFLGGAPGIYSARYADGKGDAANNAKLLDALKDVPEAERGAQFVCVLALVRHADDPLPILCEGLWHGRILTAASGEHGFGYDPLFWVPERNVSSAELSPSDKNQISHRARAMDLLRQRLGLK

SEQ ID NO: 14248 - protein, 501 aa, ASPERGILLUS NIDULANS FGSC A4
MGQNDDQKTYRYNESPVYTTSNGCPVMDPQASQRVGPNGPLLLQDFNLIDLLAHFDRERIPERVVHAKGAGAYGEFEVTDDISDITVIDMLKGVGKKTKTFVRFSTVGGEKGSPDSARDPRGFACKFYTEEGNWDWVFNNTPVFFLRDPSKFPMFIHTQKRNPQTNLKDATMFWDYLSTHQEAVHQVMHLFSDRGTPYSYRHMNGYSGHTYKWIKPDGTFNYVQLHLKTDQGNKTFTDAEATRLAAENPDWHTQDLFNAIARGEYPSWTCYVQTLSPEQAEKFRWNIFDLTKVWPQSEVPLRRFGRFTLNKNPENYFAEVEQAAFSPSHLVPGVEPSADPVLQARLFSYPDTHRHRLGTSNYQSIPVNCPLRAFTPFHRDGAMSVNGNHGANPNYPSTFRPLQYKPVKASQEHEKWAGSVVTEQLPVTDEDFVQANGLWKVLGRQPGQQENFVGNVAGHLCNAHPRVRQATYGMFRRVNADLGKRIEKATEKKATEARARL

SEQ ID NO: 14249 - protein, 293 aa, Oryza sativa
MEAAADMGVLLDLYWHTPHIFDLAVADSLLMDGFGGGMYGPAAAPATPAMVEKEYDESLSELYAYTSQSRYADSSSPDVVNLCSTAVASAAAAASSKNIAMERDRRKRLNEKLFALRAVVPKITKMDKASIVRDAIAHIEKLQEEERQLLDEISVLQSAAAVAATAVEDVDDSGVTMPSMKKLRSTPPLDGGGGALRVASSPPLQILEVETKETEDFYGLILQTSQSWPSDPQLQVSKVGEKTVAVSIRCAKTRGAMAKVCHAVESLYLKVVSASVAAVDGTIVHTMFVEVTN

SEQ ID NO: 14250 - protein, 375 aa, Mycobacterium avium subsp. paratuberculosis str. k10
MKTKGALIWEFNQPWSIEEIEIGDPQAHEVKIQMEAAGMCHSDHHLVTGGIPMAGFPVLGGHEGAGIVTEVGPGVEDIAPGDHVVLSFIPSCGSCPTCQAGMRNLCDLGAGLLGGEAVSDGTFRIQARGQNVYPMTLLGTFSPYMVVHRSSVVKIDPSIPFEVAALVGCGVTTGYGSAVRTADIRPGQDVAIVGVGGVGMAALQGAVNAGARYIFAIDPVEWKRDQALKFGATHVYPDIMAAMAGMAEVTYGLMAHKVVVTVGELQGADVDNYLNITQKGGTCVLTAIGSLLDTNVTLNLAMLTLMQKNLQGTIFGGGNPQYDIPQLLSMYKAGKLNLDDMITRQYRLEQINDGYQDMLDGKNIRGVIRYTDADR

SEQ ID NO: 14251 - protein, 587 aa, Oryza sativa
  unsure (1)..(587): unsure at all Xaa locations
MVLFSVTKKATTPFDGQKPGTSGLRKKVTVFQQPHYLQNFVQSTFNALPADKVKGATIVVSGDGRYFSKDAVQIITKMAAANGVRRVWVGQNSLMSTPAVSAVIRERVGADGSKATGAFILTASHNPGGPTEDFGIKYNMEXGGPAPEFGTDKTFFNTTTITEYLIAKDLPDVDISVVGVTTFSGPEGPFEVXEVFDSTIDYIKLMKTIFDFESIKKLLASXPKFTFCYDALHGVAGTYATRIFVEELGAAESSLLNCVPKEDFGGGHPDPNLTYAKELVDRMGLGKSSNAEPPEFGAAADGDADRNMILGKRFFVTPSDSVAIIAAXNAVQSIPYFSSGLKGVARSMPTSAALDVVAKNLNLKFFEVPTGWKFFGNLMDAGMCSICGEESFGTGSDHIREKDGIWAVLAWLSILAFKNKDNLGGDKLVTVEDIVRQHWGTYGRHYYTRYDYENVDAGAAKELMANLVSMQSSLSDVNKLIKEIRSDVSDVVAADEFEYKDPVDGSVSKHQGVRYLFGDGSRLVFRLXGTGSVGATIRVYIEQXYEKNSSKTARDSQEXALALLVDVALKLSKMQEYTGRFAPTVIT

SEQ ID NO: 14252 - protein, 192 aa, Pirellula sp.
MSRFLLLTLALGCLMNAPQPVSAADSTADHECVLAHEAKTIEGKEVDLHDYEGKVVLIVNVASKCGYTKQYAGLQSLYEAHKDDGLVILGFPCNQFGSQEPGTNADILEFCSARYNVTFPMMGKVDVNGDDASPLYKQLTSVEAKPAGKGPISWNFEKFLIGRDGQVVGRYKSKVAPSDEELVSAIKSALKG

SEQ ID NO: 14253 - protein, 207 aa, Neurospora crassa
MVTGTIKYAKTNHPLSRECVVVGDGAVGKTCLLISYTTNKFPSEYVPTVFDNYAVTVMIGDEPYTLGLFDTAGQEDYDRLRPLSYPQTDVFLICFSVASPASFENVSQKWAPEVNHHCPGVPFLIVGTQKDLRSDKELRDKLAQRKQSMIEFKQGEKLAQDLDAVKYVECSALTQEGLKNVFDEAIVAALEPPQKKTSKRDKKCLIL

SEQ ID NO: 14254 - protein, 438 aa, Neurospora crassa
MPISKIHARYVYDSRGNPTVEVDVVTELGLHRAIVPSGASTGQHEACELRDGDKTKWGGKGVLKAVQNVNEVIGPALIKENIDVKDQSKVDKFLIDLDGTPNKTKLGANAILGVSLAVAKAGAAEKGVPLYAHISDLAGTKKPYVLPVPFMNVLNGGSHAGGRLAFQEFMIVPSAAPTFSEALRQGAEVYQILKSLAKKKYGQSAGNVGDEGGVAPDIQNPEEALDLITEAIEKAGYTGQVKIAMDVASSEFYKEDVKKYDLDFKNPESDPSKWLTYEELANLYSELCKKYPIVSIEDPFAEDDWEAWSYFYKTQDIQIVADDLTVTNPLRIKKAIELKAANALLLKVNQIGTLTESIQAAKDSYADGWGVMVSHRSGETEDVTIADIVVGIRSGQIKTGAPARSERLAKLNQILRIEEELADNAIFAGEKFRKAVEL

SEQ ID NO: 14255 - protein, 458 aa, Geobacillus stearothermophilus
MSGPNDIDEAVQAAKEAQRQWALVPAPKRAEILYKVGMLLKERKEQLARLLTMEMGKVIEEARGEVQEGIDMAFYMAGEGRRLFGDTTPSELKDKFAMSVRTPVGVVGIITPWNFPIAIATWKSFPAIVAGNAVVWKPAPETPIMAQELARIFEEAGLPPGVFHVVHGDGPTVGNALVEHPDVKVISFTGSNEVGRMIAEKCGRLLKKVSLEMGGKNAVIVMDDADLTLAVDGIIWSAFGTSGQRCTACSRVIVHERVKQEFERRLLEAVKTLKIGNGLDETVKVGPVIHEEALQKIDRYVRIGVEEGAKLLVGGYILREGDYARGFYYAPTIFTDVTPNMRIAREEIFGPVVSIISVRSLDEAIAVNNSVDYGLSSAIFTRDVNNVFRAMRDLDTGIVYVNAGTTGAEIHLPFGGTKGTGNGHRDSGVAALDVFTEWRSIYVDFSGKLQRAQIDTDD

SEQ ID NO: 14256 - protein, 552 aa, Edwardsiella tarda
MAGMVIYPIVNIDFLQFLEKTQLNKPSQHATTTEESAMNIVNGINGLIAKKNVLFFLTSLAISPSVLADTLTRDNGAPVGDNQNSQTAGPNGPVMLQDVQLLQKLQRFDRERVPERVVHARGTGAHGVFTPTADISDLTVAKVFTPGSTTPVFVRFSSVVHGTHSPETLRDPRGFATKFYTAEGNWDLVGNNFPTFFIRDAIKFPDMVHAFKPDPRTNLDNDARRFDFFSHLPESTRTLTLLYSNEGTPLSYRNMDGNSVHAYKLINDKGESPLCEVHWKTRQGIKNLDPQQVEQIQGKDYSHMTQDLVTAINRGDYPKWDLYIQVLRPADLKNFDFDPLDATKAWPDVPERKIGEMVLNKNPDNVFQETEQVAMAPSNLIPGIEPSEDKLLQGRLFAYADTQFYRIGANGLSLPINKPHSVVNNGNQDGQLNSGHTLDKGVNYQPSRIYPREELVSSRYSQTPLSGTTQQSKIQREQNFKQAGELYRSYSKKEQNDLINSLGTSLASADTVSKNIMLSYFYKADKDYGTRLTSVANGDLPTVKNLADKLQD

SEQ ID NO: 14257 - protein, 338 aa, Streptococcus pyogenes MGAS315
MKAVVVNQASTGVEVVEHDLPNVGHGEALVKVEYCGVCHTDLHVAHGDFGQVPGRILGHEGIGIVEEIGEGVTSLKVGDRVSIAWFFEGCGHCEYCTTGRETLCRSVKNAGYSVDGGMSEYAVVTADYAVKVPEGLDPAQASSITCAGVTTYKAIKEAGAAPGQWIVIFGAGGLGNLAVQYAKKVFNAHVVAVDINNDKLELAKEVGADIVVNGKEIEDVPGYIQEKTGGAHGVVVTAVSKVAFNQAIDSVRAGGTVVAVGLPSEYMELSIVKTVLDGIKVVGSLVGTRKDLEEAFAFGAEGLVVPVVEKVPVDTAPEVFDEMERGLIQGRKVLDFIS

SEQ ID NO: 14258 - protein, 302 aa, Daucus carota
MDNSCATLQEGCLVVQQQNTTAAATMATVDHSSSSTKAPVTRNSRWSLAGMTALVTGGTRGIGHAIVEELAELGACVYTCSRNEQELNERLEEWRAKGFDVTGSVCDVSSVTEREQLFQRISSCFGGKLHILINNVGTNIRRATENYTAEQYSIVMATNLEAPYHACQLAYPLLKASGSGCIVFNSSVAGLVHLGTPGSVYGAAKGAINQLTKNLACEWAKDNIRTNCVAPGYIKTPPVEKLFERKNFLDRLVSRTPLRRPGETEEVSSLVAYLCMPAASYITGQIIAIDGGLTVNCFERVV

SEQ ID NO: 14259 - protein, 741 aa, Oryza sativa
MESGGAGGEGETAGWRFGAANPALAVAGSQSIRAAVTRIYRCLDGSGDARPVAPLAHGDPSAFACFRAAPAATDAVAAAAASGKYNYYSPAVGIAPACSAVAAHLSRELPYAVSPADVVLTAGCNHAVEIMMSVLASPGANVLLPRPGYPLYASRAALSGLEFRHFDLLPDSEWEVDLAGVEALADANTVAMVIVNPNNPCGCVYSRDHLAKIAETARKLGIMVISDEVYDHFAFGSKPFVPMGVFGDVAPVMTLGGISKRWMVPGWRLGWIAATDPNGILRNKKIIDSVIDYRAISVDPVTFVQGALPDILAKTDDAFFTNALGVVKKAAEICYEKLKEIDCITCPHKPEGSMFVMAKLDLSSLDGIEDDVDFCSKLAKEESVVICPGSGLGMKNWLRITFAVDPQLLEDGLERTKCFCKRHVQIVNIFLDTVFSLGHQISDDDDASTVLTIGSPPSRFLSERQETLPYVLIEEGMASIYVQGLLKESDSRQKGKGEGLLSRRQVYIEVTGKRKANIHLAPEQSPNPVCESTLNKKGKYRDKDLEDENHLGFMHILEAKGHIAVIKKVVGHHFVPTCKFISRATAPPRRWDGAVGMGESGMRDGWICDGAVDSWPGPRDDDDDMEPSATRMIGCLVPLRGIEACQRPEAAESGSGYIAAAADISIDPPSQPTDRRRTMEEDDDTVAVDGGGRSMLKRRLAHGKRGGRHEDVYDSEAVTTATTTSIFGSVAGSGSYRGRSG

SEQ ID NO: 14260 - protein, 422 aa, uncultured proteobacterium EBAC31A08
MVLKILEIFGHLIFELKPRYNIFMKEIIKEYTNYMVPFYAPADFVVKKASGSHVWDLNNKKYIDFTAGIAVTNLGHSNKDLIKILKKQSEELWHLSNLYINEPSVTLARKLCKNSFADKVFFCNSGAESIEAAVKIARKFCSSTVNKNKNEVISFSTSFHGRTMLGIALAKAKHLTDGFAPLPRGIKNHPYNDITNLEKVFSDKTAAVILELVQWQSGITKADKKFIAKIKKLAKKHKALVIIDEVQSGIGRTGTLFAYEQFNITPDILCFAKGISNGFPLGGILTSDKVSKHMSAGSHGTTFGGGPIACAIGNEVIDTISKKSFLNKVLKKEVRFINLLNKINEKHKCFEKITSAGLWVGVEVSKDSKIQIDDLIKKSHHNGLMILKANASTVRFSPSLIIENELVDEGLKIFEKSIISLL

SEQ ID NO: 14261 - protein, 347 aa, Cytophaga hutchinsonii
MIQAKGYAAQNEKTDLAPWNFERRDVGPHDVQFDIHYCGVCHSDLHQIRNDWFKGIFPMVPGHEIVGKIVKVGAHVTKFKIGDLAGTGCLVDSCRTCDNCKDGLEQYCVNGNSGTYNSLEQDKKTPTYGGYSNTIVVHEDFVLHISDKLDLAAAAPLLCAGITTYSPLRHWKVGKGHKLAVLGLGGLGHMAVKFGVAFGAEVTVLSTSPNKEADAKKLGAHKFVVTSDAAQVNSVKGYFDFILDTVSAPHDVNMYMSLLKTNGVHICVGVPPTPYEVHAFSIIGGRKSLAGSNIGGLPETQEMLDFCAQHNITSDIERIDIKNIHASYERMLKGDVRYRFVIDMSTL

SEQ ID NO: 14262 - protein, 728 aa, Pseudomonas aeruginosa UCBPP-PA14
MTSITPVTLANCEDEPIHVPGAIQPHGALIALRADGMVLAASENIQALLGFVASPGSYLTPEQVGPEVLRMLEEGLTGNGPWSNSVETRIGEHLFDVIGHSYKEVFYLEFEIRTADTLSITSFTLNAQRIIAQVQLHNDTASLLSNVTDELRRMTGYDRVMAYRFRHDDSGEVVAESRREDLESYLGQRYPASDIPAQARRLYIQNPIRLIADVAYTPMRVFPALNPETNESFDLSYSVLRSVSPIHCEYLTNMGVRASMSISIVVGGKLWGLFSCHHMSPKLIPYPVRMSFQIFSQVCSAIVERLEQGRIAELLRVSTERRLALARRARDADDLFGALAHPDDGIAALIPCDGALVMLGGRTLSIRGDFERQAGNVLQRLQRDPERDIYHTDNWPQPSEDSPDGGDCCGVLAIRFHRQESGWIFWFRHEEVHRIRWGGKPEKLLTIGPSGPRLTPRGSFEAWEEVVRGHSTPWSETDLAIAEKLRLDLMELCLNHAAEVDRMRQRLIAVLGHDLRNPLQSISMAAALLSSSDTRTTELRQHISASSSRMERLVSQILDMSRLQSGIGLTVNPVDTDVSQLVQQIVCETDVAYPGLVIEIAIDPQVRAVVDPDRYAQVAANLLSNARHHGLPGRPVLVTLTRQGDEVCLSVLNETSGLSEAQLANLFEPFKRESADNQRNRNGLGIGLYISQAIAQAHQGRIDVDCRDDVITFCLRLPVRQAETGSSS

SEQ ID NO: 14263 - protein, 424 aa, Zea mays
ASERGAKRIRVHVLTDGRDVADGSSVRFVEMLEEDLARLREKGVDARIASGGGRMYVTMDRYEHLPVVVVVFVFVFLQNDWQVVKRGWDAHVLGEAPHRFRSALEALRKLREEDPKKASDQYLPPFVVVDGSGEPVGPVRDGDAVVTFNFRADRMVMLAKALEYEGFDRFDRVRFPRTRYAGMLQYDGELKLPRHYLVAPPEIQRTSGEYLARNGVRIYACSETVKFGHVTFFWNGNRSGYFDQNLEKYEEIPSDAGIPFNVQPKMKALEIAQKARDAILSQKFDQVRVNIANGDMVGHTGDMEATIVGCKAADEAVKIILDAVEQVGGVFVVTADHGNAEDMAKRDKSGEPLRDKDGKVQTLTSHTLNPVPIAIGGPGLAPGVRFRTDLASAGLANVAATVMNLHGFQAPDHYEPTLIQVVDE

SEQ ID NO: 14264 - protein, 309 aa, Enterococcus faecalis V583
MKTAILFSGQGAQYQGMGEELYHQEAIVRETFDEASHILGYEMAELCFTENERLNETEYTQPAILTVSVAFYRLLQQKGLTPDVVAGLSLGEYSALVASGALRFSEAVALVQKRGQYMTEAAPQGTGKMVAVMNAEREVIEKACQEASAFGIVAPANYNTPQQIVIGGEVAAVDQAMTLLKEAGVKRMIPLNVSGPFHTALLQPASKKLAQDLAKLNFQTMQIPVISNTTAEIMPQEAIQALLEKQVMSAVRFEDSIETMKAMNVGTMIEVGPGKTLTGFVKKIDKTIEMHRVEDVATLTETLTALTGR

SEQ ID NO: 14265 - protein, 1272 aa, Anabaena variabilis ATCC 29413
MVDQQLNPKKSVLQQTPIAIIGMSALFAKAENLQQYWENILAKINCISEVPETAWSLKDYYDPDPSTPDKTYARAGGFIPEIDFDPLEFGLPPDTLEALDSANLLALVLAKQALKDAGYGEGKEFNRETTGVILGASGLWKSITPLTARLQYPLWEKVLKNSGLSAEQTEKIIEKMQAAFVPWTENSFPGMLPNVVAGRITNRLDLGGTNCVVDAACASSLSALKMAISELIEGRCDMMLSGGFDTDNSILNYMCFSKTPAFSKKDYLNPFDATSDGMMVGEGLGMLVLKRLADAERDGDRIYAVIKGIGTASDGRYKSIYAPRTEGQVRALRRAYEDAGFSPATLGLMEAHGTGTPAGDFCEFTALNQVLTENQAGRQQIALGSVKSQIGHTKAAAGAASLIKATLALHHKILPPTINVTQPNPKFKIEESPFYINTETRPWIQNGDTPRRAGVSSFGFGGTDYHVVLEEYTPKFPQGGDRIHSTAQSILLWADTPQQLSQKCQATLEQLQSDNCGEQYHQLQHHSKTALIPETSARVGFVATSLEEAQKLLKAAIKQLQIQPQAEAWEHPQGIYYRQTGLSLKGKVVALFPGQGSQYLNMGREVSLNFPEIQQAYQALDQLMAQDNLPALSDIAFPIPAFNPEVIKQQSQQLQRTENAQPAIGALSLGLYKILQNVGFKPDFVAGHSFGELTALWAAGVFSDEDYCYLIKARGQAMTVPQGSHDCDRGTMLAVSGDVAKIKQLIAGMAKVQIANYNAPEQVVLSGSKPEIATLEKVLSKQGYTVTPLPVSAAFHTPFVHHASQPFAEALNRVTFNTPQIPVYANMTGNAYPTEATAIRKLLEAHLLNAVQFAQEIENLYAQGGYCFVEIGSRQILTNLVKQTLGDRPHVAIALNPSRQKDSDVQLRQGVIQLRVIGLSLKDLDASPRKLPAQKSKSKGLSIKLNATNYISDKTKAAFESAFKPEPVVQLASTPLDQVVSDAATVVLDSPAQTFVASTNDEVPITPVSVMEESVSLGEIYHQSDYQFIISKDETNIMNNSTHNTIAYLFQQFYQHQKEMLQVHEQYVKTQSQSFQAFLQLLQQQEVMIPQSSTIAEQTVVVPAPVVQLPKTPAAPIVEPPQTPVVPVAELPKTPVAPVVEPPQVTPVAEPVHISHIASYLEPRYSAPAPQPTPVVTETASPAANESYISRALMEVVSDKTGYPTEMLELEMDLEADLGVDSIKRVEIMGTLHESFPQLPKLSPEELAEKRTLAQIVQYLAGQIMVAEKKIA

SEQ ID NO: 14266 - protein, 561 aa, Mycobacterium tuberculosis CDC1551
  unsure (1)..(561): unsure at all Xaa locations
MFAGGGAGGLGRCVMSFVSVAPEIVVAAATDLAGIGSAISAANAAAAAPTTAVLAAGADEVSAAIAALFSGHAQAYQALSAQAAAFHQQFVQTLAGGAGAYAAAEAQVEQQLLAAINAPTQALLGRPLIGNGADGAPGTGQAGGAGGILYGNGGNGGSGAAGQAGGAGGPAGLIGHGGSGGAGGSGAAGGAGGHGGWLWGNGGVGGSGGAGVGAGVAGGHGGAGGAAGLWGAGGGGGNGGNGADANIVSGGDGGLGGAGGGGGWLYGDGGAGGHGGQGAGGGAGGAGGDGGQGGAGRGLWGTGGAGGHGGQGGGTGGPPLPGQAGMGAAGGAGGLIGNGGAGGDGGVGASGGVAGVXGAGGNAMLIGHGGAGGAGGDSSFANGAAGGAGGAGGHLFGNGGSGGHGGAVTAGNTGIGGAGGVGGDARLIGHGGAGGAGGDRAGALVGRDGGPGGNGGAGGQLYGNGGDGGPGGQGGQAFGANNIGGTGGAGGNGGPAILSGNGGNGGAGGAGGAGGAGGGAGGVGGAGGAPGTGGTLQAAVSGLVTALFGAPGQPGDTGQPG

SEQ ID NO: 14267 - protein, 473 aa, Nostoc sp. PCC 7120
MYNKITPPTTGEKITFKNGEPVVPDNPIIPFIRGDGTGIDIWPATEKVLDAAVAKAYQGKRKISWFKVYAGDEACDLYGTYQYLPEDTLTAIREYGVAIKGPLTTPVGGGIRSLNVALRQIFDLYACVRPCRYYAGTPSPHKNPEKLDVIVYRENTEDIYLGIEWKQGSEIGDRLISILNKELIPATPEHGKKQIPLDSGIGIKPISKTGSQRLVRRAIKHALTLPKDKQQVTLVHKGNIMKYTEGAFRDWGYELATSEFRQETVTERESWILSNKEKNPNISLEDNARQIDPGFDALTPEKKAQIVKEVETVLNSIWESHGNGKWKEKVLVNDRIADSIFQQIQTRPDEYSILATMNLNGDYLSDAAAAIVGGLGMGPGANIGDSCAVFEATHGTAPKHAGLDRINPGSVILSGVMMLEYMGWQEAADLIKKGLSDAIANSQVTYDLARLLEPPVEPLKCSEFADAIIKHFG

SEQ ID NO: 14268 - protein, 450 aa, Mesorhizobium sp. BNC1
MAQRHYEDGIVSGRFSPEDYAQNFSDLHPALDTHEARVEADRCYFCYDAPCMRACPTTIDIPLFIRQISTGNPLGAARTIFDQNIFGGMCARVCPTETLCEEACVREHAEGKPVQIGRLQRFATDAAMARGKRFYTRAAASGKKVAVVGAGPAGLACAHRLAMYGHEVTVYEARPKPGGLNEYGIAAYKTPGGFAQAEVDYILSIGGITIEHGKALGRDFTLAGLAAGSDAVFLAMGLAGVNALRCEGEEADGVENAVDYIATLRQADDLSKLPIGGRVVVIGGGMTAIDAAIQSRLLGAEEVTICYRRGKEHMNASEWEQELAAAKGVTIRHWMQPRRVIAEANRVSGIEMEYTAIVDGRLIGTGDTLILKADQIFKAIGQSFDPAVLNGGGDAIVFEKDRIRVDGEGRTSMPKVWAGGDCILGGDDLTVSAVAQGRDAAESIHRSLIA

SEQ ID NO: 14269 - protein, 415 aa, Saccharomyces cerevisiae
SLSSKLSVQDLDLKDKRVFIRVDFNVPLDGKKITSNQRIVAALPTIKYVLEHHPRYVVLASHLGQPNGERNEKYSLAPVAKELQSLLGKDVTFLNDCVGPEVEAAVKASAPGSVILLENLRYHIEEEGSRKVDGQKVKASKEDVQKFRHELSSLADVYINDAFGTAHRAHSSMVGFDLPQRAAGFLLEKELKYFGKALENPTRPFLAILGGAKVADKIQLIDNLLDKVDSIIIGGGMAFTFKKVLENTEIGDSIFDKAGAEIVPKLMEKAKAKGVEVVLPVDFIIADAFSADANTKTVTDKEGIPAGWQGLDNGPESRKLFAATVAKAKTIVWNGPPGVFEFEKFAAGTKALLDEVVKSSAAGNTVIIGGGDTATVAKKYGVTDKISHVSTGGGASLELLEGKELPGVAFLSEKK

SEQ ID NO: 14270 - protein, 189 aa, Bradyrhizobium japonicum USDA 110
MMNRRTMLIAALAGAVAPVTRAVAGGGMSRISAYAFSFPALSGDDIRLAAFTGKPLLVVNTASLCGYTPQYAGLQELWSEFGERGLTVIGVPSNDFGGQEPGGTSEITETAHHQYGVTFPIAAKATVIGARAHPFYKWAADARPKDVPRWNFHKYLIGRDGYIAEVFASNIEPTDTRIKTAIAKTLADT

SEQ ID NO: 14271 - protein, 503 aa, Glycine max
MSIPIPHRQLFIDGDWKVPVLKNRIPIINPSTQHIIGDIPAATKEDVDLAVAAAKAALSRNKGADWASASGSVRARYLRAIAAKITEKKPELAKLEAIDCGKPLDEAAWDIDDVAGCFEFYADLAEKLDAQQKAHVSLPMDTFKSYVLKEPIGVVALITPWNYPLLMATCCFVRCLVSSLLCCHVLLCAIFRTCLELAEICKEVGLPPGVLNILTGLGPEAGAPLAAHPDVDKIAFTGSSATGSKIMTAAAQLIKPVSLELGGKSPIIVFEDVDLDKAAEWTIFGCFWTNGQICSATSRLIVHESIATEFLNRIVKWVKNIKISDPLEEGCRLGPIVSEGQYEKILKFISNAKSEGATILTGGSRPEHLKKGFFVEPTVITDVTTSMQIWREEVFGPVLCVKTFSTEEEAIDLANDTVYGLGSAVISNDLERCERITKAFKAGIVWINCSQPCFTQAPWGGIKRSGFGRELGEWGLDNYLSVKQVTQYISDEPWGWYQSPSRL

SEQ ID NO: 14272 - protein, 383 aa, Zea mays
  unsure (1)..(383): unsure at all Xaa locations
PGYSVVEQYFVNPDDTVCQKIVVHKDGPRGNHFRRAGPRQKGGYRGFYARNTITLTPKSVNDIHKRGGTILGSSRGGHDTVKIVDSIQDRDINQVYVIGGDGTQRGAVLIFQQVRRRGLKVSVAGIPKTIDNDIPVIDKSFGFDTAVEEAQRAINAAHVEAVSAENGIGLVKLMGRHSGFIAHYATLARRDVDCCLIPESPIYLEGEGGLFRYIEKRLKDNGHMDIVVAEGAGQKLIAETMQSIGKDASGNELLLDVXLWLSQKINEHFKKNKMTINLKYIDPTYMIRAIPSNASDNVYCTLLAHSVVHGAMAGYTGLPXQVNGXTXTSIYRITEKQTXXITDRCXKXLSSTTPTPTNLRKEGHKTPTRLHKYSKGHWSTHAR

SEQ ID NO: 14273 - protein, 406 aa, Escherichia coli
MAIEQTAITRATFDEVILPIYAPAEFIPVKGQGSRIWDQQGKEYVDFAGGIAVTALGHCHPALVNALKTQGETLWHISNVFTNEPALRLGRKLIEATFAERVVFMNSGTEANETAFKLARHYACVRHSPFKTKIIAFHNAFHGRSLFTVSVGGQPKYSDGFGPKPADIIHVPFNDLHAVKAVMDDHTCAVVVEPIQGEGGVTAATPEFLQGLRELCDQHQALLVFDEVQCGMGRTGDLFAYMHYALAPDILTSAKALGGGFPISAMLTTAEIASAFHPGSHGSTYGGNPLACAVAGAAFDIINTPEVLEGIQAKRQRFVDHLQKIDQQYDVFSDIRGMGLLIGAELKPQYKGRARDFLYAGAEAGVMVLNAGPDVMRFAPSLVVEDADIDEGMQRFAHAVAKVVGA

SEQ ID NO: 14274 - protein, 242 aa, Zea mays
MFSHMIPRASRPLLRSANNTFRASPSTLYLVDKVQSRRSYATETEEKDLVIIGGGVAGYVAAIKAGQEGLKVACIEKRGSLGGTCLNVGCIPSKSLLNNSHLYHQILHDTKNRGIEVSDVKLNLKQMMKAKETSVNGLTKGIEFLFKKNNVEYIKGTGAFADEHAVQVNLTEGGETSVRGKNILIATGSEATPFPGLNIDEKKVITSTGAIALETVPKKMVVIGGGIIGLEMGSVWSRLGAE

SEQ ID NO: 14275 - protein, 811 aa, Oryza sativa
MTREHTCFTLVKATSLCSCSTYFREAQLDRVYYARLSIIQKARIITECLHRFCRDCIEKSMRLGNDECPACRTPASSHSLKVDPNFDALILTLYPDLHKDEEEELAFTEEKTCHKKIQASTDEAPHRRKEALGKKSSAAKAIGSSRSQGNMLARKRGHIDFPDIVPTKVRDFHNFEEGRSCKKFECGQIWALYSEVDKFPKLYGWIRKVKLQPFTVLLTWLEPCPQQEQEKRWLEQDIPISCGEIWSIYMNWTFDWTPSSKATCEFTIEERGGELCGFLELDPGSVPDIFLNREENNNDGCKGLSSVGDHSEGPKTKKARKFHVSQSSPAGHKVTSKVDSHEERMANRVAIRLKNIMKIFLCKKRADRQYNPPPMTRKVDIQGKGKTSDTDDKDNANAEATNTVRQNEHSCSLELPSPYPDFYDFEKLRDINMFSLGQIWALYDDLDGMPRFYARIEHFDASSFKAHLTWLEYNAASEEEKKWADEEQPVACGFSVNDGITVIPLVRIKGFVSLFAAAKDKSAVVIASSELLRFSHNIPCYRTTGNEKVIFRATHWLWFWAQLQSDVDKFPKFYGWISKVERQPFIVHLIWLEASPEYEQEKRWLEQDLPVSCGKFKIRDWKARAVFMPDKRNTVVEIPTRDRLRFSHRIPSFLLTEERGGRLRGFYELDPASVPDVFLYRNTVMGWSGMRGTDALNFIFFTYWNATEKRLAIGHSQCLPLNEPSFHSWLYDSHKKMVKEHRRGFDTIATLVAWTIWKERNNWVFNQKSRTWAEIARVMTGEAELWRLAKAAIPVVVVIVNGEGSPNLVGD

SEQ ID NO: 14276 - protein, 218 aa, Medicago sativa
MDHDAIIFEEECDYLFKAVLIGDSGVGKSNLLSRFAKDEFRLDSKPTIGVEFAYRNIKVRDKLIKAQIWDTAGQERFRAITSSYYRGALGALLVYDITRRSSYESVGRWLVELREFGGEEMVVILVGNKCDLGESREVEEEEAKGFAEAEGLCFMETSALKNLNVEQVFLQMITTIFDITNQRSLDAKMDETPINLSNGKEIHIADEVTATKQAPCCS

SEQ ID NO: 14277 - protein, 261 aa, Glycine max
MSKKQREQNHFVLVHGIGHGAWCWYKLKPLLESAGHKVTVLDLAASGIDTHDIEDIHTFSEYSKPLLDLLASLAPNEKVVLVGHSFGGISIALAMDKFPEKISLGIFLTAFVPDTQHKPSHVLEEYIDRYPYTGWMDTELWNSGGKTTLLFGIKFLSTKFYQLCSTEDLELVKTLRRKGSLFAEDLSKAENFSKEKDGSVPSAYIISNEDLVIPKEYQQWMIQNAGIDVVREIKGSDHMVMLSKPHKLCLSLLEIADKQVK

SEQ ID NO: 14278 - protein, 357 aa, Ustilago maydis 521
MPRGYGIADSKNWTDFKVYDFDLKKETDDDVDIAITHCGVCGSDVHTISGGWGPLKHDFCIPGHEIIGIATKVGKNVKDIKVGDRVGVGAQVDSCGECVPCQDEEEQYCRGNGTKKLVDTYNDTYSECGTKAMGGYSTHIRTQQQFVFPIPDKIKSEHAAPMLCGGLTLFSPLIRNGAGPGKRVGIVGIGGLGHFGVMFAHALGAEVVAISHSPRKREDALKMGAKEFVSTGENPNWAEEYKNKPFDLIINTASSNAVDLRTILTTLKVHGRLICVGMPEDVFKVRIQDFAGNGCLMGSSHIGSKKEALQMLELAAEKDIQPWVEILPMKDCSKAVKRVADNDIRYRFVLEQDLEKH

SEQ ID NO: 14279 - protein, 205 aa, Triticum aestivum
MSRRYDSRTTIFSPEGRLYQVEYALEAISHAGTAIGILAKDGIVLAAERKVTSKLLEQDTSAEKLYILNDNMICAVAGMTADANILINYARQAAQRYLLTYNEDIPCEQLVRRLCDLKQGHTQHGGLRPFGVSFIYAGWDPRRQFQLYLSNPSGNYGGWKGTSAGANNASAQSLLKQEYKEDCTLKEACGMAAKVLSKTMDSTKL

SEQ ID NO: 14280 - protein, 496 aa, Neurospora crassa
MAECRWWHDKTADAEERTKAKLMGKNIAALSTWSMMGCPASGILHGFLIFCTKIRQGRMAGSRGNSLFSSGSGAANRAKRRTPLDRRTGHGTGDCTRTTKTRQFSTELNSYYPSMVFTDTATGPSMAMMANTTIAAALPPLPAYETRPLPDLLPWISDFWLSLILPHIAYWVVSMFFHIIDVYDLFPQYRLHTPEEISQRNLASRYEVARDVLLEQAIQIGTSAVLNLLDDQQLTGHENYEVAVWATRIRLAQRGLPTILGFVGLNAGALSKNIAGSYPLLAGALAGGFYPSLFELDDMAGTAVPAFASWEILLAKAIYWIIIPCIKFWFAAFVLDSWQYLWHRAMHMNKWMYTKWHARHHRLYVPYAYGALYNHPVEGFVLDTLGAAIAYKCSFMTSREGMFFFVGSMMKTVDDHCGYALPWDPLQNITSNNAAYHDIHHQSWGIKTNFSQPFFTTWDRILGTMWKGDTSIKYERTRAAAANKKKGAKGEETKAE

SEQ ID NO: 14281 - protein, 421 aa, GIBBERELLA ZEAE PH-1
MLSRSIATASRMVPARVLRPRAHPLVMLPAMMQTVRTYADSVIKVPQMAESISEGTLKQFSKSIGDYVAQDEEIATIETDKIDVAVNATEAGTIKEFLVAEEDTVTVGQDLVRIELGGEPSGDKKEAPKEEPKKSESESKPEPKQESAPEPKKEPAAASSKPEAPRQPEKKESKSESSASSGSSMGNREERRVKMNRMRLRIAERLKQSQNTAASLTTFNEVDMSNIMEFRKLYKEDVLKKTGVKLGFMSAFSRACVLAMRDLPAVNASIEGPNGGDTIVYRDYVDISVAVATEKGLVTPVVRNVESMDMIGIEESIADMGKKARDNKLTIEDMAGGTFTISNGGVFGSLMGTPIINLPQSAVLGLHAIKERPVAVNGKIEIRPMMYLALTYDHRLLDGREAVQFLVKVKEYIEDPRRMLL

SEQ ID NO: 14282 - protein, 86 aa, Oryza sativa
TYHEGLTVWTMGPILMEDYHVIKTVAHFNLKRIPERVVHAHGAIHKDVLECNHNVTDITCVDLVRSRGAQTHEIVRFSTDIHERRR

SEQ ID NO: 14283 - protein, 288 aa, Enterococcus faecalis V583
MKGIILAGGSGTRLYPLTKATSKQLMPIYDKPMIYYPMSTLMLAGINEILIISTPEDTPRFESLFGDGHDLGIHIEYAVQESPDGLAQAFIIGEEFIGDDSVCLVLGDNIYYGGGLSKMLQRAASKESGATVFGYHVNDPERFGVVEFDEEMRALSIEEKPAQPKSNYAVTGLYFYDNEVVEIAKGIKPSERGELEITDVNKVYLEKNKLSVEVMGRGFAWLDTGTHESLLEASTFIETIEKRQNLKVACLEEIAYRMGYITKEQLVELAQPLKKNGYGQYLLRLAAE

SEQ ID NO: 14284 - protein, 400 aa, Streptomyces clavuligerus
MSNQEFAQRWQGVMIDSYGTPGLSFVRGEGSTLWDADGTAYTDFVSGLAVNALGHAHPAVVGAVSRQIASLGHISNFYSAEPTITLAERLIELFGRPGRVFFCNSGAEANETAFKIGRLTGRSRIVAAQSGFHGRTMGSLALTGQPAKREPFLPLPGDVTHVPYGDAEALRAAVTEDTAMVILEPIQGESGVVVPPKGYLRAAREITEATGTLLVLDEVQTGIGRTGHWFAAQAEGVEADVVTLAKGLGGGLPLGAAVAFGRAAELMTPGHHASTFGGNPVSCARTRVLDTIAADGLLDRVKQLGSAPDEWSVRDAAAIRWSPMSGAGLMLGIVLNEPLAPQVQLAAQKAGFLVNVPAPDVVRLIPPLVIEETEVDAFLQALPGLLDAVHERDREGQTGE

SEQ ID NO: 14285 - protein, 421 aa, Halobacterium sp. NRC-1
MAVTHAEGIEVTDAGGTTYLDCLAGAGTLALGHNHPAVTAELERLLAEDRPLHTLDITTPEKEAFVDALFDSLPASFANTAKVQFCSPAGTDAIEAALKLTKTATGNRSVLAFHGGYHGMTAGALSLMGDIDAKEPVSGLMPNVHHLPYPDQYRHPFGLPAGEHESIHTYIEHAISSPERGFTEPAAVVLELVQGEGGVNPAPDAWVQELRRITREHDIPLVVDEIQTGLGRTGETWSFEHAGIEPDVVTCSKAVGGGLPLAVVLYNEGLDVWEPGAHAGTFRGNQLAMAAGRVTIEHVIEQDLPAHADKTGARLRSALTDLEADFDVVGDVRGRGLMLGVEFVAPDAAGDERPPPDGDLAAAVKQACFERGLIIETGGRDSAVARFLPPLIVSSHQIDEIAARFSDAVTAVLSSSAEVSA

SEQ ID NO: 14286 - protein, 166 aa, Triticum aestivum
MGKKKKRVEKVFCYYCDREFDDEKILVQHQKAKHFKCHVCHKKLSTAGGMAIHVLQVHKESVTKVPNAKPERDSTEIEIFGMQGIPSDVLAAHYGEEEDPSSKVAKVEVPTIRPPIMPNYPIGMPFPPRPYGAARPMYNPAMMVRPPIWPLQQPQLGCSTTRFSSQ

SEQ ID NO: 14287 - protein, 508 aa, Nicotiana plumbaginifolia
MAAATIIAATVGILVAIFCGKFLYTIWWWPKMIEKKLKKEGIYGYPYKLLFGNLKEIMKMSKEAKKQPLLTHDIIPWVNPFLQHVANTYKKIFVLWYGPTPRVTVTDPKLIRELLNRYTEFHKPEANAFIHLFVTGLASYDGEKWDTHRKLLNPAFHVEKLKRMFPAFAMCCDEMLNRWEESVGKTGSCELDVLNEFLNLGGDVISRAAFGSNIAEGRSIFLLQKEQCELILASPFTLFFPSLRFLPTASNRKAKYIHKKVISLIRGIIEKREDAVRRGISDNDDILGLLLKARNADNKSRAGGLTTEDVIEECKEFYFAGQDTTTALLSWTMVVLSMHPEWQDKARNEVFQVIGKNKPKFDDLNQLKLMNMIFQEVLRLYPAIFLIRSTSKSTKLGDMTIPAGVQVCVPTHLVHRDPEVWGDDALLFNPERFSEGVSKAAKEQMYFPFGWGPRMCIGMNFGMLEAKLILSQILQRFWFELSPSYTHAPLLTLIMRPQYGAQIIVHKL

SEQ ID NO: 14288 - protein, 579 aa, Brassica napus
MNNNWLGFSLSPYEQNHHRKDVCSSTTTTAVDVAGEYCYDPTAASDESSAIQTSFPSPFGVVLDAFTRDNNSHSRDWDINGSACNNIHNDEQDGPKLENFLGRTTTIYNTNENVGDIDGSGCYGGGDGGGGSLGLSMIKTWLRNQPVDNVDNQENGNGAKGLSLSMNSSTSCDNNNYSSNNLVAQGKTIDDSVEATPKKTIESFGQRTSIYRGVTRHRWTGRYEAHLWDNSCKREGQTRKGRQVYLGGYDKEEKAARAYDLAALKYWGTTTTTNFPMSEYEKEIEEMKHMTRQEYVASLRRKSSGFSRGASIYRGVTRHHQHGRWQARIGRVAGNKDLYLGTFGTQEEAAEAYDIAAIKFRGLTAVTNFDMNRYNVKAILESPSLPIGSAAKRLKEANRPVPSMMMISNNVSESENNASGWQNAAVQHHQGVDLSLLQQHQERYNGYYYNGGNLSSESARACFKQEDDQHHFLSNTQSLMTNIDHQSSVSDDSVTVCGNVVGYGGYQGFAAPVNCDAYAASEFDYNARNHYYFAQQQQTQHSPGGDFPAAMTNNVGSNMYYHGEGGGEVAPTFTVWNDN

SEQ ID NO: 14289 - protein, 866 aa, Ustilago maydis 521
MAPSAFVSPAKRRKLTSSSPSKQAGPTGSAQPSLLSFFGNGRPTASSPISSDTLQYTKLELNQQQAHVQSQLKTQRTADCPICSRKVPFNTVEAHVNTCLDAAETVTSEPQILRDQVNVNPISPVDQPSPVRSCSPALPAGTSTPPTVSSAVAPRQTAKLTSISELASTLDATIAPTNAQYPSSSVSTTLVSPTQAGSSLVSSAKRVASSAFTVLMKSHSESKQWATADAVEAANYRGKARSRPEARTAPFYKALEGMPLTVDAFRFGKIEGCRGYFLTHFHSDHYGGMTANWNHGPIYCSVTTANLCRTHLGVDPQWLRPLPMEVAVPVPDSGGVMVTCIEANHCPGSCLFLFEGPQTSQLLSRNHASPYIGTGRIFRYLHCGDFRASPAHTNHPSVAGKKLDIIYLDTTYCNPRYCFPAQDQVIEACAELVRRIVPEAQLRANHAAIEHDKEAGEQEDWTQAQLRKTRSSIDTNSAAANAFKGWFNTKVENSDGTLSALRPSSISRDSSNRDLKIERGVNDVSVKQEEVQEERFDYDEENLFLGEQDEEDPVEEDSTCVSGEIGSEGSTLHRVMPERSENALLDVSYPSEKANGRVKAEETDSYVQGMQVQDDSRAEVKTTTPDDANASNWLTKHTELSREAASSMRRRDGGRLLVVIGTYTIGKERIVKAVARAMNSKIFCMDSRKYRVYAQLEDPELHSMLTRSPLASVHVTNLHAINGEALRDVVAALRTHGHDFTHAVAFRPTGWTYKPPAGMDTVSPSLDRLIQWNQSRSFTFHNLLPTRDSTPDYMIYGVPYSEHSSFFELTAFALSTRYDRIIATVNVGSPASRAKMAKWFEKWMLEKRRREKLGLVQLDARASTYW

SEQ ID NO: 14290 - protein, 481 aa, Arabidopsis thaliana
MSLKALDYESLNENVKNCQYAVRGELYLRASELQKECKKIIFTNVGNPHALGQKPLTFPRQVVSLCQAPFLLDDPNVGMIFPADAIARAKHYLSLTSGGLGAYSDSRGLPGVRKEVADFIERRDGYPSDPELIFLTDGASKGVMQILNCVIRGQKDGILVPVPQYPLYSATISLLGGTLVPYYLEESENWGLDVNNLRQSVAQARSQGITVRAMVIINPGNPTGQCLSEANIREILRFCCDERLVLLGDEVYQQNIYQDERPFISSKKVLMDMGAPISKEVQLISFHTVSKGYWGECGQRGGYFEMTNIPPRTVEEIYKVASIALSPNVSAQIFMGLMVSPPKPGDISYDQFVRESKGILESLRRRARMMTDGFNSCKNVVCNFTEGAMYSFPQIKLPSKAIQAAKQAGKVPDVFYCLKLLEATGISTVPGSGFGQKEGVFHLRTTILPAEEEMPEIMDSFKKFNDEFMSQYADNFGYSRM

SEQ ID NO: 14291 - protein, 579 aa, Brassica napus
MNNNWLGFSLSPYEQNHHRKDVYSSTTTTVVDVAGEYCYDPTAASDESSAIQTSFPSPFGVVVDAFTRDNNSHSRDWDINGCACNNIHNDEQDGPKLENFLGRTTTIYNTNENVGDGSGSGCYGGGDGGGGSLGLSMIKTWLRNQPVDNVDNQENGNAAKGLSLSMNSSTSCDNNNDSNNNVVAQGKTIDDSVEATPKKTIESFGQRTSIYRGVTRHRWTGRYEAHLWDNSCKREGQTRKGRQVYLGGYDKEEKAARAYDLAALKYWGTTTTTNFPMSEYEKEVEEMKHMTRQEYVASLRRKSSGFSRGASIYRGVTRHHQHGRWQARIGRVAGNKDLYLGTFGTQEEAAEAYDIAAIKFRGLTAVTNFDMNRYNVKAILESPSLPIGSAAKRLKEANRPVPSMMMISNNVSESENSASGWQNAAVQHHQGVDLSLLHQHQERYNGYYYNGGNLSSESARACFKQEDDQHHFLSNTQSLMTNIDHQSSVSDDSVTVCGNVVGYGGYQGFAAPVNCDAYAASEFDYNARNHYYFAQQQQTQQSPGGDFPAAMTNNVGSNMYYHGEGGGEVAPTFTVWNDN

SEQ ID NO: 14292 - protein, 351 aa, uncultured marine gamma proteobacterium EB000-45B06
MKSYQVFENAQPIKEVELDTPIPEGDEVLIKTIACGVCHTDIHIHDGFFDIGNGKKMTSRMVQPLAMGHEVFGEVVSFGENVKNIEVGKKFVVYPWIGCGECEPCKADNEHECGPLTAENIGVAVDGGYGEYVLVKHSKYLFDAGNTPDDLAGSYACRGLTAYSSLKKANLKPNENKLVIISAGGLGLLALKIAKAAFNVSPIVVDIDDSKLEIAKAAGASEVINSSHEGAKKRIMDLTEGGATTVIDYVGAEASIQFGYDLFGFNKNGLYILVGMLGGKFEVQLPLMTFSSRVLQGSYLGSIQEMKELMDLVRAGKIEPVPVEARHVSMANDTIADLKAGNIPGLVCLKH

SEQ ID NO: 14293 - protein, 390 aa, Candida albicans SC5314
MVKQEDFAVEQFMDKYETKIEWNMAETCTASLSFNELFELIPDKSVSQSLQQKVFDTRLTYGRIKGSPELKQVIAQLYNDEGGSITADDIVITNGAIGANFLTLYAIVDQGDKVIVVNPTYQQLASVSRVFSGASENIIPWNLNFEDNYLPNLDELQNLVDTHNPKLVIINNPNNPTGVVWGHTIMEKIVGICSAKGIYILCDEVYRPLYHSTDDKPKSIVNYGYEKTISTSSTSKAFALAGLRLGWIVTKDQDIIQKLYSKRDYNTISVSAIDDMLATVALSNYKHILARSYDICQTNLQILEKYIDSTPLLSWVKPKGGSICFVKVNIDNIDTMDMCVELVEKYKTLIVPGEVFDNKKGYLRIGFGNSTQDIKQGLARLSEYFESKSY

SEQ ID NO: 14294 - protein, 545 aa, Glycine max
MALPHSISALATTLTLSSPITKPHKVNPFPFSSNRNSQFLTKQTRPRSRRNLSLTPARVAAPPSTVEADRLYPEAENNETEEEFSDESSSSKFTWRDHWYPVSLIEDLNPLLPTPFQLLGREIVLWYDKSISQWVAFDDKCPHRLAPLSEGRIDEDGKLQCSYHGWSFDGCGSCVKIPQASSEGPEARAIGSPKACATRFPTLVSQGLLFVWPDENGWEKAKASKPPMLPDDFDKPEFATVNIQRDLFYGYDTLMENVSDPSHIEFAHHKVTGRRDRAKPLPFKMDSRGSWGFSGANEGNPQISAKFVAPCYMMNKIEIDTKLPVVGDQKWVVWICSFNVPMAPGKTRSIVCSARNFFQFSVPGPAWWQVVPRWYEHWTSNKVYDGDMIVLQGQEKIFLSETKEGGDINKQYTNITFTPTQADRFVLAFRNWLRRHGNGQPEWFGNSSDQPLPSTVLSKRQMLDRFEQHTLKCSSCKAAYEGFQTWQKVLIGATVVFCATSGIPSDFQLRVLLAGLAVVSAAIAFALNQLQKNFEFVDYVHAEID

SEQ ID NO: 14295 - protein, 259 aa, Oryza sativa
MAPPLLLLLASLLLVAARRALGLGLGQWQPGHATFYGGGDASGTMGGACGYGNLYSQGYGTSTAALSTALFNRGLSCGSCYELRCAGDHRRSCLPGGATVTVTATNFCPPNYALPSDGGGWCNPPRRHFDLAEPAFLRIARHAAGIVPVSFRRVACARKGGVRFTVNGHAYFNLVLVTNVGGAGDVRSLAVKGSGSGSRVGGRWQPMSRNWGQNWQSNAYLDGKALSFRVTAGDGRSLTCADVAPAGWQFGQTFEGRQF

SEQ ID NO: 14296 - protein, 414 aa, Zea mays
  unsure (1)..(414): unsure at all Xaa locations
MDWGKKSSCKIPRGFRASTPHDARIPAIRGPFAQSPGRDAGTRSRATHAQRQTQSEGDQGREGRGGGRRSSSSSCSCRAAGMEPHHANKPKPRPKLSAKHSKFISCKLYISESRDATAVDAVERASKSDPQVVVVSQFGDHHYNRFRYTLVSYIVVDDGGVDGGGGSSAAGEAIVVHSPIRKVLLAMMEAAFSSIDLESQSGAHXPRIGVVDDLSFHPVGQATIEDAASLARQVASDIACIAAVPVFLYAAAHPAGKSVGAVRRELGYYRPNYRGNQWSGSVLPNVLPVKPDVGPAHVVSHKRGATTVGVTPWIENYNVPVLCKDVATVRRITRGVTGRSGGLPTVQALALFHGDDCTEIACLLDPDHASAYQVQTVVEQIAGDQGLEVEQGYYTDITKDEALDKYLKIACADD

SEQ ID NO: 14297 - protein, 163 aa, Actinidia deliciosa
TMGGACGYGNLYSQGYGTNTAALSTALFNNGLSCGACFEIRCVSDPKWCLPGSIMVTATNFCPPNNALPNNAGGWCNPPQHHFDLAQPIFQQIAQYRAGIVPVSYRRVPCLKKGGIRFTINGHSYFNLVLITNVGGAGDVHAVSIKGSRTGWQPMSRNWGQNW

SEQ ID NO: 14298 - protein, 396 aa, Burkholderia fungorum LB400
MDDSLNFDTLAVRSGTVRSDFNEHSEAIFLTSSFVFASAADAAEKFRNSEDNYTYSRFTNPTVSMFQDRLAALEGGEACMATASGMAAIMSVVMSALQAGDHLVSSQALFGSTLGMFSQIFSKFGITTTFVDPTDLDAWKNAVRPETKMFFLETPSNPLTEVADIEAIGKIAKASNALFVVDNCFCSPALQQPLKLGADVVMHSATKFLDGQGRVLGGALVGSKQFIMEKVFPFVRSAGPTLSAFNAWVLLKGMETLSLRVEKQSANALEIARWLETHPAVNRVFYPGLESHPQHALAMRQQKAGGAILSFELKGDTPEQMRANAWRVIDNTKICSITGNLGDTRTTITHPATTTHGRVTSEARAAAGISEGLIRLAVGLENAGDIRGDLERGLAG

SEQ ID NO: 14299 - protein, 379 aa, Shewanella oneidensis MR-1
MSNEKPQFIKSKAAVAWGPRQPLKIEEVDVMLPKAGEVLVRIVATGVCHTDAFTLSGDDPEGVFPAILGHEGGGIVEQVGEGVTSVQVGDHVIPLYTPECGECKFCLSGKTNLCQKIRATQGKGLMPDGTTRFYKDGQPIFHYMGCSTFSEYTVLPEISLAKVNKTAPLKEICLLGCGVTTGMGAVMNTAKVEAGATVAIFGLGGIGLSAIIGATMAKASRIIAIDINESKFELARKLGATDCINPKNFDKPIQEVIVEMTDGGVDYSFECIGNVNVMRSALECCHKGWGESVIIGVAGAGQEISTRPFQLVTGRVWRGSAFGGVKGRSQLPKIVEQYLAGEFKLDDFITHTMGLEQVNEAFDLMHEGKSIRSVIHFDK

SEQ ID NO: 14300 - protein, 207 aa, Zea mays
MELDADNLSATELRLGLPGTSSSSSSDDWQKKPSPSVGAKRALDDGTKSEASGTSTAAGDLDFDHDHDTAAPPKAQVVGWPPVRAYRKNTFQAAAAAKKVEQKQKQQQQGGLYVKVSMDGAPYLRKVDLRMYKGYRELREALDALFTNSFSAAAEGGGDHHQHAIAYEDKDGDLMLAGDVPWDMFISSCKKLRIMKGSASDLRPGDR

SEQ ID NO: 14301 - protein, 120 aa, Zea mays
  unsure (1)..(120): unsure at all Xaa locations
MAATIQYNRSNPAVKRILQEVKEMQSNPSPDFMSLPLEEDIFEWQFAILGPRDSEFEGGIYHGRIQLPSDYPFKPPSFMLLTXRTALVALIAFMPTNPGGALGSLDYKPEDRRALAIKSR

SEQ ID NO: 14302 - protein, 311 aa, Neurospora crassa
MGISILSGILSSLSSIAQDPSPPPTNPPALPRHFIATVRSPSSVAKVESALSPLVKPSVSTLRVLQSTSNVSAAAEADIILLGCKPYMVSGLLSASGMKDALTVKHTEGHARSQKIIISICAGVTVPDLERVLREDVGLSADNLPIVVRAMPNTASKIRESMTVINTVDPPLPDTVTELLTWIFERIGEVVYLPPHLMDACTSLCASGTAFFALMMEAAADGGVAMGLPRAEANRMAAQTMRGAAGLVLEGEHPAILREKVSTPGGCTIGGLLVLEEGGVRAAVARAVREATVVASLLGGGGAKNVNGTRH

SEQ ID NO: 14303 - protein, 403 aa, Glycine max
  unsure (1)..(403): unsure at all Xaa locations
GPDSRVDPRVRDWRARQDVLTIMHLHEKVVEVLNPLAREYKSIGTLKKELAELQDELAQAHTQVHISEARVTTALDKLAYMEELVNDRLLQDRSTTDVAQTSSSPSTSANSLVTEKRRQPRKSLNVSGPVQSYHPHLKNFWYPVAXSNDLXDDTMIPIECFEEPWVIFRGKDGKPGCVQNTCAHRACPLHLGSVNEGRIQCPYHGWEYTTDGKCEKMPSTRLLNVKIKSLPCFETEGMIWVWPGNDPPTATLPSLLPPSGFEVHAEIVMELPIEHGLLLDNLLDLAHAPFTHTSTFAKGWSVPSLVKFLTPASGLQGYWDPYPIDMEFRPPCMVLSTIGISKPGKLEGQSTSQCATHLHQLHVCLPSSKQKTRLLYRFFLFFFFFFFFFFFFFFLAYSLVLIH

SEQ ID NO: 14304 - protein, 208 aa, Boechera drummondii
MATIEESSDLEAIQKHLFEDLMVSDGFMGDFDFDASFVSELWCIEPQVPKQEPDSPVFDPDSFVNEFLQVEAKSSPELNSSSSTYETDLSVKKAERFEEEEEEEEEEARHYRGVRRRPWGKFAAEIRDPAKKGSRIWLGTFESDVDAARAYDCAAFKLRGRKAVLNFPLEAGKYEAPANSGRKRKRSDVKEELQRTQSNSSSSSCDAF

SEQ ID NO: 14305 - protein, 100 aa, Bacteroides thetaiotaomicron VPI-5482
MNIYISGLSYGTNDADLTNLFAEYGEVSSAKVIFDRETGRSRGFAFVEMTNDAEGQKAIDELNGVEYDQKVISVSVARPRAEKPSYGGNRGGGYNNSRRY

SEQ ID NO: 14306 - protein, 394 aa, Ammophila arenaria
EPASTEDPAVSIAGAVQSQKLAVRAISRLQALPGGDVNLLCDTVVEHVRELTGYDRVMVYKFHDDEHGEVLAESRRADLEPYLGLHYPATDIPQASRFLFRQNRVRMIADCHAAPVRVIQDPAMPQPLCLVGSTLRSPHGCHAQYMANMGSIASLVMAVIISSGGEDEHSMGRGAVPSAMKLWGLVVCHHTSPRCIPFPLRYACEFLMQAFGLQLNMELQLAHQLSEKHILRTQTLLCDMLLRDSPTGIVTQSPSIMDLVKCDGAALYYHGKYYPLGITPTEAQIKDIIEWLTVCHGETTGLSTDSLADAGYPGATALGDAVCGVAVAYITPSDYLFWFRSHTAKEIKWGGAKHHPEDKDDGQRMHPRSSFKAFLEVVKSRSLPWENAEMDAIH

SEQ ID NO: 14307 - protein, 394 aa, Anisopogon avenaceus
EPARTEDPALSIAGAVQSQKLAVRAISRLQALPGGDVKLLCDTVVEHVRELTGYDRVMVYKFHDDEHGEVLAESRRADLEPYLGLHYPATDIPRASRFLFRQNRVRMIADCHAAPVRVIQDPAMPQPLCLVGSTLRSPHGCHAQYMTNMGSIASLVMAVIISSGGDQDHNIARGAIPSAMKLWGLVVCHHTAPRCIPFPLRYACEFLMQAFGLQLNMELQLAQHLSQNLILTTQTLLCDMLLRDSPTGIVPQSRSIMDLVKCDGAALYYHGKYYPLGVTPTEAQILDIIEWLTVCHGDSTGLSTDSLADAGYPGAASLGDAVCGMAVAYITPSDHLFWFQSHTAKEIKWGGAKHHPEDKDDGQRMHPRSSFKAFLEVVKSRSLPWENAEMDAIH

SEQ ID NO: 14308 - protein, 394 aa, Anomochloa marantoidea
EPARTEDPALSIAGAVQSQKLAVRAISRLQALPGGDVKLLCDTVVEHVRELTGYDRVMVYKFHDDEHGEVVAESRRADLEPYLGLHYPATDIPQASRFLFRQNRVRMIADCHAAPVRVIQNPSLTQPLCLVGSTLRAPHECHAQYMANMGSIASLAMAVIISSSGDDENNVGRCGISSTMKLWGLVVCHHTSPRCIPFPLRYACEFLMQAFGLQLNMELQLAHQLSEKHILRTQTLLCDMLLRDSPTGIATQSPSIMDLVKCDGAALYYHGKYYPLGVTPTESQIKDIIEWLGMCHGDSTGLSTDSLADAGYPGAASLGDAVSGMAVAYITPNDYLFWFRSHTAKEIKWGGAKHHPDDKDDGQRMHPRSSFKAFLEVVKSRSLPWENAEMDAIH

SEQ ID NO: 14309 - protein, 461 aa, Saccharomyces cerevisiae
MAPVVISESEEDEDRVAITRRTKRQVHFDGEGDDRVDQQQQQHSSSHRDRDKHVQRKKKKRLSNRNLQGSNGGYAWEDEIKRSWDLVKVDDEGDMASLVASIVEARKKRTAKKNITPYQRGIIRSLILTLGCSEAMLEKDLRPNRHAMIIQYAIDFVHEFFDQNPISQMGIIIMRNGLAQLVSQVSGNPQDHIDALKSIRKQEPKGNPSLQNALEMARGLLLPVPAHCTREVLIVFGSLSTTDPGDIHQTIDSLVSEKIRVKVLGLSAQVAICKELCKATNYGDESFYKILLDETHLKELFNEAVTPLPVNKINKGFTLVKMGFPTRIFEDTPTFCSCHSKLVYGGYFCPNCHSKVCSLPTVCPCCDLMLILSTHLARSYHHLMPLKTFAEVPTTEKFRSEDCFSCQSRFPILKNHKNGKLLTSSRYRCEDCKQEFCVDCDVFIHEILHNCPGCESKPVIT

SEQ ID NO: 14310 - protein, 304 aa, Aristida longiseta
QYMANMGSIASLVMAVIISSGGDDEQLGRGGISSAMKLWGLVVCHHTSPRFIPFPLRYACEFLMQAFGLQLNMELQLAHQLSEKHILRTQTLLCDMLLRDSPTGIVAQSPSIMDLVKCDGAALYYHGKYYPLGVTPTESQIKDIIEWLMLCHGDSTGLSTDSLADAGYHGAAALGDAVCGMAVAYITPSDYLFWFRSHTAKEIKWGGAKHHPEDKDDGQRMHPRSSFKAFLEVVKSRSLPWENAEMDAIHSLQLILRDSFRDAAEGTSNSKAMVNGQVQLGELELRGINELSSVAREMVRLIET

SEQ ID NO: 14311 - protein, 393 aa, Arundinella hirta
EPARTEDPALSIAGAVQSQKLAVRAISRLQALPGGDVKLLCDTVVEHVRELTGYDRVMVYRFHEDEHGEVVAENRRDNLEPYLGLHYPATDIPQASRFLFRQNRVRMIADCHATPVRVIQDPGLSQQLCLVGSTLRAPHGCHAQYMANMGSIASLVMAVIISSGGDDEQTGRGGISSAMKLWGLVVCHHTSPRCIPFPLRYACEFLMQAFGLQLNMELQLAHQLSEKHILRTQTLLCDMLLRDSPTGIVTQSPSIMDLVKCDGAALYYHGKYYPLGVTPTESQIKDIIEWLTVCHGDSTGLSTDSLADAGYLGAVALGDAVCGMTVAYITPSDYLFWFRSHTAKEIKWGGAKHHPEDKDDGQRMHPRSSFKAFLEVVKSRSLPWENAEMDAIH

SEQ ID NO: 14312 - protein, 582 aa, Populus tomentosa
MVLFNVSRVETTPFGDQKPGTSGLRKKVKVFKQPNYLQNFVQSTFNALTPQNVRGATLVVSGDGRYFSKDAIQIITKMAAGNGLRRVWVGQNGLLSTPAVSAVIRERVGVDGSKATGAFILTASHNPGGPNEDFGIKYNMENGGPAPEGITDKIYENTKTIKEYLTADLPDVDITTIGVTSFSWSEGQFDVEVFDSASDYIKLMKSIFDFESIRKLLSSPKFTFCYDALHGVAGAYAKRIFVEELGAQESSLLNCVPKEDFGGGHPDPNLTYAKELVARMGLGKSNSEVEPPEFGAAADGDADRNMVLGKRFFVTPSDSVAIIAANAVEAIPYFSAGLKGVARSMPTSAALDVVAKSLNLKFFEVPTGWKFFGNLMDAGLCSVCGEESFGTGSDHIREKDGIWAVLAWLSILAYKNRENLGGGKLVTVEDIVHNHWATYGRHYYTRYDYENVDAGAAKELMACLVKLQSSLTEVNEIVSGIQSDVSKVVHADEFEYKDPVDSSISKHQGIRYLFEDGSRLVFRLSGTGSEGATIRLYIEQYEKDPSKTGRDSQDALAPLVAVALGLSKMQEFTGRSAPTVIT

SEQ ID NO: 14313 - protein, 294 aa, Nicotiana tabacum
MDQYEKVEKIGEGTYGVVYKARDRVTNETIALKKIRLEQEDEGVPSTAIREISLLKEMQHANIVRLQDVVHSEKRLYLVFEYLDLDLKKHMDSSPEFSKDPRLVKMFLYQILRGIAYCHSHRVLHRDLKPQNLLIDRRTNALKLADFGLARAFGIPVRTFTHEVVTLWYRAPEILLGTRHYSTPVDVWSVGCIFAEMVTQRPLFPGDSEIDELFKIFRVMGTPNEDTWPGVTTLPDFKSAFPKWPSKDLATIVPNLDGAGLDLLDKTSRLDPSKRITARNALEHEYFKDIGYVP

SEQ ID NO: 14314 - protein, 370 aa, Zea mays
MRVLEDYELSEGRSPGETTLSDIDAVLARRKDMCDKMSLNESRIPTTLVERLLAHDLSSTANPDCRLRLGIRALAAMDGGGGAGGAEGELTAQETALYDRQIRVWGVDAQKRLSKAHVLVCGMNGTTIEFCKNIVLAGVGSLSLMDDNVVTEEDLNANFLIPPDESIYGGRSRAQVCCESLIDFNPMVRVFVEKGDPSLIDGEFLDKFDIVVLSRASLKTKKKPGGATEQQELTYSSLQEAISVPWNSLPKKTAKLYFAMRVLEDYELSEGRSPGETTLSDIDAVLARRKDMCDKMSLNESRIPTTLVERLLAAGKKEHPPVCAILGGILGQEVIKSISCKGDPVKNFFYFDVADGKGVIEDIPPPPPAK

SEQ ID NO: 14315 - protein, 84 aa, Dioscorea tenuipes
INCTENRSVLHIALRAARDKVIKSDGKNVVPDVWHVLDKIKEFSERIRSGSWVGATGKALTDVVAVGIGGSFLGPLFVHTALQT

SEQ ID NO: 14316 - protein, 455 aa, Methylobacillus flagellatus KT
MIALVSALGFSGLALAEEEVVIVDEAVSTEIAPAAAEAVDTATEAMLALSPGDTAWTIVATVLVLAMIIPGVALFYGGLVRTKNMVSILTQVFVTTALMSVIWVVYGYSLAFTDGGSLNAYIGGFSKTLLSGITPDTLLEGGTIPEYVFVTFQLTFAAITPALIVGGFAERMKFSAVLAFLALWVTFIYIPIAHMVWGGGFLGDLGAADFAGGTVVHMNAGIAALVGAIVVGKRLGYGKEAMPPHSITLTMVGASMLWVGWFGFNVGSELAADGIAGLALINTQAATGAAVLGWVFAEWLFKGKPSLLGAVSGAVAGLVAITPACGFLGPVGAIVLGFVASVIAFWAVTSLKVKLGYDDSLDVFGIHGVAGLIGAFGTGILMSADFGGIGYEEGTTMASQLYAQAVAIGVTIVWGGIGSYILFKIVDLFIGLRASEEAEREGLDTSEHGERAYHY

SEQ ID NO: 14317 - protein, 420 aa, Rhizobium tropici
MVEKRFPAAGRDAMAYVLAGGRGSRLKELTDRRAKPAVYFGGKTRIIDFALSNALNSGIRRIGVATQYKAHSLIRHMQRGWNFFRPERNESFDILPASQRVSETQWYEGTADAVYQNIDIIEPYGPEYMVILAGDHIYKMDYEWMLQQHVDSGADVTIGCLEVPRMEAVGFGVMHVDDKDRIIDFVEKPADPPGIPGNPDFALASMGIYVFHTKFLIECLKRDAADPNSSRDFGKDIIPHIVKNGKAVAHRFTQSCVRSDFEREAYWRDVGTIDAYWQANIDLTAVVPELDIYDKSWPIWTYAEISPPAKFVHDDEDRRGSAVSSVVAGDCIISGASLYNSLLFTGVRANSYSKLEGAVVLPSVKVGRRAQLKNVVIDHGVTIPEGLVVGEDPELDAKRWRRTESGICLITQSMIDKLDL

SEQ ID NO: 14318 - protein, 298 aa, Acidithiobacillus ferrooxidans
MAEVRKAVFPVAGLGTRFLPATKASAKEMMPIVDKPLIQYAVEEAIAAGCDQLIFISGRGKRAIEDHFDVSYELEIELEKRGKADLLKQVQGILPSHVSTIFLRQPYPLGLGHAVLMARPVVGDEPFAVLLADDLMLSESPVLAQMVEQYRRYQTGILGVEEIPREHSTRYGVVDARPWDDRIYQVSGIVEKPKPEDAPSNLGVVGRYILPARIFHFLEQTQQGAGGEIQLTDAIAHLLNERQVLAYLFSGQRFDCGDKLGYLKATIAFGKLHPEVGADFTRYMDSICEPQASAETLS

SEQ ID NO: 14319 - protein, 396 aa, Azotobacter vinelandii
MWYDGFLDPTPWQLIMVTLLITHLTVVSVTVYLHRYSAHRALELHPAVKHAFRFWLWLTTGMNTREWTAVHRKHHACCETPEDPHSPRYKGLANVLWRGAELYKAEAGNTETLRIYGKNCPDDWIERHVYSRFPNGGAMLMLLIDLALFGAFGLSVWAVQMLWIPFWAAGVVNGLGHAVGYRNFECRDAATNLVPWGILIGGEELHNNHHTYPGSAKLSVRPWEFDMGWAWIRLLVLLGLAEVKRTVPVAHRVADKRHLDMDTARAILNNRFQIMAHYRSRVIAPQVRMEAARAEASVRHLFHRAKGLLARESSLLEARQQARIQSLLEQSQTLRVVYERRLALQQVWTRTSANGHEMLAAIRAWVHEAEASGIQSLCEFAEHLKTYSLRPAPSLA

SEQ ID NO: 14320 - protein, 543 aa, Acidithiobacillus ferrooxidans
MAVLQIATRPFADQRPGTSGLRKKVKVFQQPHYLENFVQSIFNAIPDRAGKTLVLGGDGRFYNREAIQIILRMAAGNGWGKVVVGRGGLFSTPAVSTVIRARGAHGGIILSASHNAGGPDQDFGIKYNTANGGPAPEKLTDAIWTASRSIQGYQILDGADVDIDHAATFWLGDMQIEVCDPVAEYAELMARIFDFDALKRLMQGPFRMRFDALHAITGPYAHEIFEKQLGAPAGTVVNGTPLTDFGGGHPDPNLVYAKPLADELFAENAPDFGAASDGDGDRNMILGRHFFVTPSDSLAVLAAHATAIPAYRHGLKGIARSMPTSQAADVVAEALGIAHYETPTGWKFFGNLLDAGKITFCGEESFGTGSDHIREKDGLWAVLAWLSVIAHTGQPVAEIVTRHWQRFGRHYYTRHDYENLPAEIGEQIMHSIAAQLPVLPGQTLAGREILIADDFAYADPIDGSVSAHQGLRLLFADGARLIFRLSGTGTEGATLRIYHEHLEKDPLRQHQDPQRTLRDLIQVGRNLSRLETLTGRKTPTVIT

SEQ ID NO: 14321 - protein, 392 aa, Rhynchophora phillipsonii
DLEPVNPADVPVTAAGALKSYKLAAKAISRLQSLPSGNISLLCDVLVKEVRDLTGYDRVMVYKFHEDEHGEVVSECRRSDLESYLGLHYPATDIPQASRFLFMKNKVRMICDCVAPPVKVIQDERLPQPLSLCASTLRSPHGCHAQYMTNMGIVASLVMSVTVNEEDDMVDSDQPQMARKLWGLVVCHHTSTRFVPFPLRYACEFLIQVFGVQINKEVELAAQVREKHILQIQTMLCDMLLRDAPVAIITQSPNVMDLVKCDGAALYFKNKTWLLGVSPTEEQIRDIAEWLLEYHSGNTGLSTDSLMEAGYPGAAALGDAVCGMAAVSITSRDFLLWFRSHTAKEIKWGGAKHDPDDKDDGRKMHPRSSFKAFLEVVKWRSMPWEDMEMDAI

SEQ ID NO: 14322 - protein, 371 aa, Oryza sativa
  unsure (1)..(371): unsure at all Xaa locations
MPIYLETRGTSRISLVVHHIRRRTHSSSSSRLRFQRGGGAEQRRGMAAAQGSGVPAALALSSGHTMPSVGLGVWRMDSPAIRDLIHSALRIGYRHFDCAADYQNEAEVGDALAEAFQTGLVKREDLFITTKLWNSDHGHVVEACKDSLKKLRLDYLDLYLIHFPVATRHTGVGTTASALGDDGVLDIDTTISLETTWHAMEXLVSMGLVRSIGISNYDIFLTRDCLAYAKIKPAVNQIETHPYFQRDCLVKFCQKHGILVTAHTPLGGSTANTEWFGSVSCLDDPVIKSLAEKYGKTAEKYGKTPAQLVLRWGLQRNTVVIPKTSKEERLQENFAVFDFAISDEDMEKMRSIDRKYRTNQPAKFWGIDLFA

SEQ ID NO: 14323 - protein, 392 aa, Rhynchophora phillipsonii
DLEPVNPADVPVTAAGALKSYKLAAKAISRLQSLPSGNISLLCDVLVKEVRDLTGYDRVMVCKFHEDEHGEVVSECRRSDLESYLGLHYPATDIPQASRFLFMKNKVRMICDCVAPPVKVVQDERLPQPLSLCASTLRSPHGCHAQYMTNMGIVASLVMSVTVNEEDDMVDSDQPQMARKLWGLVVCHHTSTRFVPFPLRYACEFLIQVFGVQINKEVELAAQVREKHILQIQTMLCDMLLRDAPVAIITQSPNVMDLVKCDGAALYFKNKTWLLGVSPTEEQIRDIAEWLLEYHSGNTGLSTDSLMDAGYPGASALGDAVCGMAAVSITSRDFLLWFRSHTAKEIKWGGAKHDPDDKDDGRKMHPRSSFKAFLEVVKWRSMPWEDVEMDAI

SEQ ID NO: 14324 - protein, 392 aa, Microsteira sp. Davis et al. 38-01
DLEPVNPADVPVTAAGALKSYKLAAKAISRLQSLPSGNISLLCDVLVKEVRDLTGYDRVMVYKFHEDEHGEVVSECRRSDLESYLGLHYPATDIPQASRFLFMKNKVRMICDCVAPPVKVIQDERLPQPLSLCASTLRSPHGCHAQYMTNMGIIASLVMSVTVNEEDDMVDGDQLQMARKLWGLVVCHHTSTRFVPFPLRYACEFLIQVFGVQINKEVELAAQVREKHILQIQTMLCDMLLRDAPVAIITQSPNAMDLVKCDGAALYFKNKTWLLGVTPTEEQIRDIAEWLLEYHSGNTGLSTDSLMEAGYPGASALGDTVCGMAAVSITSRDFLLWFRAHTAKEIKWGGAKHDPDDKDDGRKMHPRSSFKAFLEVVKWRSMPWEDVEMDAI

SEQ ID NO: 14325 - protein, 392 aa, Mascagnia sepium
DLEPVNPADVPVTAAGALKSYKLAAKAISRLQSLPSGNISLLCDVLVKEVRDLTGYDRVMVYKFHEDEHGEVVSECRGSDLESYLGLHYPATDIPQASRFLFMKNKVRMICDCLAPPVKVIQDERLPQPLSLCGSTLRSPHGCHAQYMTNMGTIASLVMSVTVNEDDDMVDGDQPQMTRKLWGLVVCHHTSPRFVPFPLRYACEFLIQVFGVQINKEVELAAQVGEKHILQIQTMLCDMLLRDAPVAIITQSPNVMDLVKCDGAALYFKNKTWLLGVTPTEEQIRDIAEWLLEYHSGNTGLSTDSLMEAGYPGASALGDAVCGMAAVSITSGDFLFWFRSHTAKEIKWGGAKHDPDDKDDGRKMHPRSSFKAFLEVVKWRSMSWEDIEMDAI

SEQ ID NO: 14326 - protein, 354 aa, Ustilago maydis 521
MSGTHKFYTLPEPSARNGFSSLKLKEGPIPKPEANEVLIKVHAVSLNYRDLIIAKNGYPLHLKQGELIPASDGAGEVVSVGEKVTQWKQGDRVAGIFTQAHQHGSTPDKEEVKTALGGSIDGMLAQYVALSETGIVRIPSHLSYEEAATLPCAALTAYNALYGIPTQQLRAGDTVVAQGTGGVSIFALQLAVAAGAKVVITSSSDDKLQKAISLIPQAQRHLVTTVNYKTNPDWDKVALDVTNGVGVDHIVEVGGPGTLEKAFNSIKRGGVISTIGFVAQGDAPNVAYLALTTGAHFKGILVGSRDQFEHMNRIFQTHNIKPLVDKVFPFENAQDAYEYQWSQAHVGKVVISVS

SEQ ID NO: 14327 - protein, 295 aa, Burkholderia pseudomallei
MLKVTKAVFPVAGLGTRFLPATKASPKEMLPVVDKPLIQYAVAEAINAGITEMIFVTGRSKRAIEDHFDKSFEIESELEARGKEKLLELVRGIKPSHVDCFYVRQPAALGLGHAVLCAEKLVHGEPFAVILADDLLHGDQPVLKQLVDVFNHYHSSVIGVETIEREDSRSYGIVEGREWEEDIIKLSGIIEKPAPEHAPSNLGVVGRYVLMPSIFEHLLQIKRGAGGELQLTDAVQSLLTEEQVLAYRYYGTRFDCGSKLGYLKATVELALRHPEVGREFEAYLRNCLPALAAVA

SEQ ID NO: 14328 - protein, 394 aa, Brachypodium pinnatum
EPARTEDPALSIAGAVQSQKLAVRAISRLQALPGGDVKLLCDTVVEHVRELTGYDRVMVYKFHDDEHGEVLAESRRTDLEPYLGLHYPATDIPQASRFLFRQNRVRMIADCHAAPVRVIQDPAMPQPLCLVGSTLRSPHGCHAQYMANMGSIASLVMAVIISSGGEDEHNMGRGAIPSAMKLWGLVVCHHTSPRCIPFPLRYACEFLMQAFGLQLNMELQLAYQLSEKHILRTQTLLCDMLLRDSPTGIVTQSPSIMDLVKCDGAALYYHGKYYPLGVTPTEVQIKDIIEWLTVSHGDSTGLSTDSLADAGYSGATALGDAVCGMAVAYITPSDYLFWFRSHTAKEIKWGGAKHHPEDKDDGQRMHPRSSFKAFLEVVKSRSLPWENAEMDAIH

SEQ ID NO: 14329 - protein, 394 aa, Buergersiochloa bambusoides
EPARTEDPALSIAGAVQSQKLAVRAISRLQALPGGDVKLLCDTVVEHVRELTGYDRVMVYRFHDDEHGEVVAESRRADLEPYLGLHYPATDIPQASRFLFRQNRVRMIADCHAAPVRVIQDSALPQPLCLVGSTLRGPHGCHAQYMANMGSIASLVMAVIISSGGDDEHNSAQGGIPSAMKLWGLVVCHHTSPRCIPFPLRYACEFLMQAFGLQLNMELQLAHQLSEKHILRTQTLLCDMLLRDSPTGIVTQSPSIMDLVKCDGAALYYHGKYYLLDVTPTEAQIKDIIEWLTLCHGDSTGLSTDSLADAGYPGAAALGDAVCGMAVAYITPSDYLFWFRSHTAKEIKWGGAKHHPEDKDDGQRMHPRSSFKAFLEVVKSRSLPWENAEMDAIH

SEQ ID NO: 14330 - protein, 191 aa, Candida albicans SC5314
MQTIKCVVVGDGAVGKTCLLISYTTSKFPADYVPTVFDNYAVTVMIGDEPFTLGLFDTAGQEDYDRLRPLSYPSTDVFLVCFSVISPASFENVKEKWFPEVHHHCPGVPIIIVGTQTDLRNDDVILQRLHRQKLSPITQEQGEKLAKELRAVKYVECSALTQRGLKTVFDEAIVAALEPPVIKKSKKCTIL

SEQ ID NO: 14331 - protein, 393 aa, Capillipedium parviflorum
EPARTEDPALSIAGAVQSQKLAVRAISRLQALPGGDVKLLCDTVVEHVRELTGYDRVMVYRFHEGEHGEVVAESRRDNLEPYLGLHYPATDIPQASRFLFRQNRVRMIADCHATPVRVIQDPGLSQPLCLVGSTLRAPHGCHAQYMANMGSIASLVMAVIISSGGDDEQTGRGGISSAMKLWGLVVCHHTSPRCIPFPLRYACEFLMQAFGLQLNMELQLAHQLSEKHILRTQTLLCDMLLRDSPTGIVTQSPSIMDLVKCDGAALYYHGKYYPLGVTPTESQIKDIIEWLTVCHGDSTGLSTDSLADAGYLGAAALGDAVCGMAVAYITPSDYLFWFRSHTAKEIKWGGAKHHPEDKDDGQRMHPRSSFKAFLEVVKSRSLPWENAEMDAIH

SEQ ID NO: 14332 - protein, 386 aa, Chasmanthium latifolium
PALSIAGAVQSQKLAVRAISRLQALPGGDVKLLCDTVVEHVRELTGYDRVMVYRFHEEEHGEVVAESRRDGLEPYLGLHYPATDIPQASRFLFRQNRVRMIADCHATAVRVIQDPGLSQPLCLVGSTLRAPHGCHAQYMANMGSIASLVMAVIISSGGDDEQTSRGGMSSAMKLWGLVVCHHTSPRFIPFPLRYACEFLMQAFGLQLNMELQLAHQLSEKHILRTQTLLCDMLLRDSPTGIVTQSPSIMDLVKCEGAALYYHGKYYPLGVTPTESQIKDIIEWLMLCHRDSTGLSTDSLADAGYVSAAALGDAVCGMAVAYITPSDYLFWFRSHTAKEIKWGGAKHHPEDKDDGQRMHPRSSFKASLEVVKSRSLPWENAEMDAIH

SEQ ID NO: 14333 - protein, 393 aa, Chusquea oxylepis
EPARTEDPALPIAGAVQSQKLAVRAISRLQALPGGDVKLLCDTVVEHVRELTGYDRVMVYRFHDDEHGEVVAESRRADLEPYLGLHYPATDIPQAPRFLFKQNRVRMIADCHAASVRVIQGPALPQPLCLVGSTLRAPHGCHAQYMANMGSIASLVMAVIISSGGDDEHNMTRGGIPSAMKLWGLVVRHHTSARCIPFPLRYACEFLMQAFGLQLNMELQLAHQLSEKHILRTQTLLCDMLLRDSPAGIITQSPSIMDLVKCDGAALYYHGKYYPLGVTPTEAQIKDIIEWLTLCHGDSTGLSTDSLADAGYPGAALGDAVCGMAVAYITPSDYLFWFRSHTAKEIKWGGAKHHPEDKDDGQRMHPRSSFKAFLEVAKSRSLPWENAEMDAIH

SEQ ID NO: 14334 - protein, 393 aa, Danthoniopsis dinteri
EPASTEDPALSIAGAVQSQKLAVRAISRLQALPGGDVKLLCDTVVEHVRELTGYDRVMVYRFHEDEHGEVVAESRRDDLEPYIGLHYPATDIPQASRFLFRQNRVRMIADCHATPVKVIQDTGLSQPLCLVGSTLRAPHGCHAQYMANMGSIASLVMAVIISSGGDDEQTARGGISSAMKLLGLVVCHHTSPRFIPFPLRYACEFLMQAFGLQLNMELQLAHQLSEKHILRTQTLLCDMLLRDSPTGIVTQSPSIMDLVKCDGAALYYHGKYYPLGVTPTESQIKDIIEWLTLCHGDSTGLSTDSLADAGYLGAAALGDAVCGMAVAYITPSDYLFWFRSHTAKEIKWGGAKHHPEDKDDGQRMHPRSSFKAFLEVVKSRSLPWENAEMDAIH

SEQ ID NO: 14335 - protein, 293 aa, Nicotiana tabacum
MDQYEKVEKIGEGTYGVVYKARDRVTNETIALKKIRLEQEDEGVPSTAIREISLLKEMQHANIVRLQDVVHSEKRLYLVFEYLDLDLKNTWITTPEFSEDPRLVKMFLYQILRGIAYCHSHRVLHRDLKPQNLLIDRRTNALKLADFGLARAFGIPVRTFTHEVVTLWYRAPEILLGSRHYSTPVDVWSVGCIFAEMVTQRPLFPGDSEIDELSRFRVMGTPNEDTWPGVTTLPDFKSAFPKWPSKDLATIVPNLDGAGLDLLDKIVRLDPSKRITARNALEHEYFKDIGYVP

SEQ ID NO: 14336 - protein, 440 aa, Candida albicans SC5314 [sequence omitted]

SEQ ID NO: 14337 - protein, 178 aa, Glycine max
  unsure (1)..(178): unsure at all Xaa locations
MASSMISSPAVTTVNRAGAGMVAPFTGLKSMAGFPTRKTNNDITSIASNGGRVQCMQVWPPIGKKKFETLSYLPDLDDAQLAKEVEYLLRKGWIPCLEFELEHGFVYREHNRSPXYYDGRYWTMWKLPMFGCTDASQVLKELQEAKTAYPNGFIRIIGFDNVRQVQCISFIAYKPPGF

SEQ ID NO: 14338 - protein, 394 aa, Diarrhena obovata
EPARTEDPALSIAGAVQSQKLAVRAISRLQALPGGDVKLLCDTVVEHVRELTGYDRVMVYKFHDDEHGEVLAESRRADLEPYLGLHYPATDIPQASRFLFWQNRVRVIADCHAAPVRVIQDPAMPQPLCLVGSTLRSPHGCHAQYMANMGSIASLVMAVIISSGGEDEHNMARGAIPSAMKLWGLVVCHHTSPRCIPFPLRYACEFLMQAFGLQLNMELQLAHQLSEKHILRTQTLLCDMLLRDSPAGIVMQSPSIMDLVKCDGAALYYHGKYYPLGVTPTEAQIKDIIEWLTVCHGDSTGLSTDSLADAGYSGATALGDEVCGMAVAYITPSDYLFWFRSHTAKEIKWGGAKHHPEDKDDGQRMHPRSSFKAFLEVVKSRSLPWENAEMDAIH

SEQ ID NO: 14339 - protein, 394 aa, Ehrharta erecta
EPARTEDPALSIAGAVQSQKLAVRAISRLQALPGGDVKLLCDTVVEHVRELTGYDRVMVYRFHEDEHGEVVAESRRNDLEPYLGLHYPATDIPQASRFLFRQNRVRMIADCHAAPVRVIQDPGLPQQLCLVGSTLRSPHGCHAQYMANMGSIASLVMAVIISSAGDDENNMARGGIPSAMKLWGLVVCHHTSPRCIPFPLRYACEFLMQAFGLQLNMELQLAHQLSEKHILRTQTLLCDMLLRDSPTGIVTQSPSIMDLVKCDGAALYYHGKYYPLGVTPTESQIKDIIEWLTVCHGDSTGLSTDSLADAGYPGSAALGDAVSGMAVAYITPSDYLFWFRSHTAKEIKWGGAKHHPEDKDDGQRMHPRSSFKAFLEVVKSRSLPWENAEMDAIH

SEQ ID NO: 14340 - protein, 394 aa, Elymus sp. Kellogg s.n.
EPARTEDPALSIAGAVQSQKLAVRAISRLQALPGGDVKLLCDTVVEHVRELTGYDRVMVYKFHDDEHGEVLSESRRGDLEPYLGLHYPATDIPQASRFLFLQNRVRMIADCHAAAVRVIQDPAMPQPLCLVGSTLRSPHGCHAQYMANMGSIASLVMAVIISSGGEDEHNMTRGVIPSAMKLWGLVVCHHTSPRCIPFPLRYACEFLMQAFGLQLNMELQLAHQLSEKHILRTQTLLCDMLLRDSPTGIVTQTPSIMDLVKCDGAALFYHGKYYPLGVTPTESQIKDIIEWLTVCHGDSTGLSTDSLADAGYPGATALGDAVCGMAVAYITPSDYLFWFRSHTAKEIKWGGAKHHPEDKDDGQRMHPRSSFKAFLEVVKSRSLPWENAEMDAIT

SEQ ID NO: 14341 - protein, 361 aa, Pyrococcus furiosus DSM 3638
MQAVVLAGGKGTRLLPLTVYRPKPMIPFFNRPIMEYIVESLVKFGVDEIIVLVGYLKERIFEYFGNGEEFGVEIKYSNGENLKLGTAGALKKAEKLIQDTFLVVSGDILTNLDFRSLVEYHKKKGGPATIALTKVEDPSAYGVAVLDKEGRISYFKEKPKREEAPSNLVNAGIYVFEPEIFDLIPKGKNFDFSLDLFPKMLNENIPIYGYPFDEYWNDIGRPSTYLQATEDVFLGKLRLPQINVGSLKGNIEKGGSLFTGSRCILRRPRIIGFAVLGNNVEISKDVTIERSVIFSNVTIEEGAEIREAIIGENVYIGKGVVIEPGSVIGDNSIIEDFSKVGANVKIWADSRIGKESIILPD

SEQ ID NO: 14342 - protein, 546 aa, Enterococcus faecium
MNKFKINIQGMTCTGCEEHVAVALENVGAKNIEASFRRGEAVFELPDDIGVESAKKAIDEAKYQPGEIEEVQSEEKIVLGDEGDYDLLIIGSGGAAFSAAIKSVEYGAKVAMIERGTVGGTCVNIGCVPSKTLLRAGEINHLAKVNPFIGLQTSAGKVELAPLVKHKDELVSELRNQKYVNLIDEYGFELIEGEAIFVDENTVEVNGKKLSAKRFLIATGVSPSLPPISGLEKVDYLTSTTLLELKTVPKRLTVIGSGYIGMELGQLFHNLGSEVTLMQRSERLLKEYDQEISEAVEKALIEQGINLVKGATFERVEQEGQIKKVHVTVDGKKKVVESEQLLVATGRKPNTDALKLSAAGVEVGKRKEILINDYARTSNEKIYAAGDVTLGPQFVYVAAYEGGIVADNAIGGLNKKLDLSVVPGVIFTNPSIATVGLTEEQAKEKGYEVKKSVLPLDAVPRAIVNRETTGVFKLVADAKTSKLLGVHIVSENAGDVIYAATLAVKFGLTVEDLKDSLAPYLTMAEGLKLAALTFDKDVSKLSCCAG

SEQ ID NO: 14343 - protein, 351 aa, Clostridium beijerinckii
MKGFAMLGINKLGWIEKERPVAGSYDAIVRPLAVSPCTSDIHTVFEGALGDRKNMILGHEAVGEVVEVGSEVKDFKPGDRVIVPCTTPDWRSLEVQAGFQQHSNGMLAGWKFSNFKDGVFGEYFHVNDADMNLAILPKDMPLENAVMITDMMTSGFHGAELADIQMGSSVVVIGIGAVGLMGIAGAKLRGAGRIIGVGSRPICVEAAKFYGATDILNYKNGHIVDQVMKLTNGEGVDRVIMAGGGSETLSQAVSMVKPGGIISNINYHGSGDALLIPRVEWGCGMAHKTIKGGLCPGGRLRAEMLRDMVVYNRVDLSKLVTHVYHGFDHIEEALLLMKDKPKDLIKAVVIL

SEQ ID NO: 14344 - protein, 273 aa, Oryza sativa
ELEKFDGVSSGKYTIGLGQTKMAFCDDREDIYSLALTATSNLLKKYAIDTNSVGRLEVGTETLLDKSKSVKSVLMQLFGDNTNIEGVDTVNACYGGTNALINSVNWIEGSGWDGRDAIVVSGDIALYAKGNARPTGGAGCVAMLVGPDAPIVVEPGLRGSFMQHAYDFYKPDLASEYPYVDGHFSLTCYTKALDGAYRAYNKREAQLQNGHANGNGAADSSKTPLDRFDYIAFHSPTCKLVQKSYARLLYHDYLANPDHPAFAEVPGELRDMD

SEQ ID NO: 14345 - protein, 277 aa, Burkholderia fungorum LB400
MLPIVDKPLIQYAVEEAIAAGITEMIFVTGRSKRAIEDHFDKSYEIEAELEARNKQKLLDLVRSIKPANVDCFYVRQAEALGLGHAVLCAEKLVGDSPFAVILADDLLHSSKPVMSQLVDTFNHYHSSVIGVETIAREDSRSYGVVDGREWEDNVIKLSGIVEKPAPDKAPSNLGVVGRYVLMPTIFKHIRALKPGAGGELQLTDAVQSLLTEEQVLAYRYFGTRFDCGSKLGYLKATVEFALRHPEVKAEFEAYLQAYMQTNMQEGVPAQYAAEAA

SEQ ID NO: 14346 - protein, 155 aa, Zea mays
MVRPPCCDKEGVKKGPWTPEEDLVLVSYIQEHGPGNWRAVPARTGLMRCSKSCRLRWTNYLRPGIKRGNFTEQEEKLIVHLQALLGNRWAAIASYLPERTDNDIKNYWNTHLKRKLQSGGDGAAKPPAHRPPSSSKGQWEKRLQTDINLARRALR

SEQ ID NO: 14347 - protein, 657 aa, Arabidopsis thaliana
MPPMQARTLSVYNVMVPLVCLLLFFSTPTHGLSDSEAILKFKESLVVGQENALASWNAKSPPCTWSGVLCNGGSVWRLQMENLELSGSIDIEALSGLTSLRTLSFMNNKFEGPFPDFKKLAALKSLYLSNNQFGGDIPGDAFEGMGWLKKVHLAQNKFTGQIPSSVAKLPKLLELRLDGNQFTGEIPEFEHQLHLLNLSNNALTGPIPESLSMTDPKVFEGNKGLYGKPLETECDSPYIEHPPQSEARPKSSSRGPLVITAIVAALTILIILGVIFLLNRSYKNKKPRLAVETGPSSLQKKTGIREADQSRRDRKKADHRKGSGTTKRMGAAAGVENTKLSFLREDREKFDLQDLLKASAEILGSGCFGASYKAVLSSGQMMVVKRFKQMNNAGRDEFQEHMKRLGRLMHHNLLSIVAYYYRKEEKLLVCDFAERGSLAINLHRKPSLDWPTRLKIVKGVAKGLFYLHQDLPSLMAPHGHLKSSNVLLTKTFEPLLTDYGLIPLINQEKAQMHMAAYRSPEYLQHRRITKKTDVWGLGILILEILTGKFPANFSQSSEEDLASWVNSGFHGVWAPSLFDKGMGKTSHCEGQILKLLTIGLNCCEPDVEKRLDIGQAVEKIEELKEREGDDDDFYSTYVSETDGRSSKGESCESISFA

SEQ ID NO: 14348 - protein, 453 aa, Arabidopsis thaliana
MASLMLSLGSTSLLPREINKDNVKLGTSASNPFLKAKSFSRVTMTVAVKPSRFEGITMAPPDPILGVSEAFKADTNGMKLNLGVGAYRTEELQPYVLNVVKKAENLMLERGDNKEYLPIEGLAAFNKATAELLFGAGHPVIKEQRVATIQGLSGTGSLRLAAALIERYFPGAKVVISSPTWGNHKNIFNDAKVPWSEYRYYDPKTIGLDFEGMIADIKEAPEGSFILLHGCAHNPTGIDPTPEQWVKIADVIQEKNHIPFFDVAYQGFASGSLDEDAASVRLFAERGMEFFVAQSYSKNLGLYAERIGAINVVCSSADAATRVKSQLKRIARPMYSNPPVHGARIVANVVGDVTMFSEWKAEMEMMAGRIKTVRQELYDSLVSKDKSGKDWSFILKQIGMFSFTGLNKAQSDNMTDKWHVYMTKDGRISLAGLSLAKCEYLADAIIDSYHNVS

SEQ ID NO: 14349 - protein, 479 aa, Botryotinia fuckeliana
MAQTNGVLQEPAITTMNGAPVLKPASTQRIGNQLRATLLLQDINLLELIQHITHERIPERVVHARGTSAHGYFEVTDDISDVTSAAFLNRVGKQTDIFCRFSTVAGRAESAETVRDTRGFAFKMFTEEGNLDWLFLSTPVFPIRDGAKFPSFTHATKKNPRSGLPDHKAFWDYFTHNQEGIHFLMFLFSDRATPVDFQHADIFSINTYKFTKSDGSFTYVKIHLKTNQGVKNFTQDEANQKAGVDPDFQTRSLYEDIENQKYPTWDVFAQIIDPVKAENYHINIFDATKTFPFSEFPLRKFGKITLNRNVDNFFAEQEQSAFSPTNLVPGWALTPDPIIQTRALAYADTQRYRLGANFVQLPVNAPYKKPFTPLIRDGAATVNGNLGGTPNYFPSSFYNVGAATQYAQPDEEQFQGTVVNFESEVVDADYVQPRIFWEKTLAEEPGQQDNLISNVAGHLSAVTGDKGLGSSTSGLCNVR

SEQ ID NO: 14350 - protein, 1080 aa, Nicotiana tabacum
MLPVKRTVEVGGENDTVSVDPLTKKHKATAAAAGDSSTVTMGGAGSAITGDVNANGNATNGKSPIDARNSPDIDEDLHSRQLAVYGRETMRRLFASNVLVSGLQGLGAEIAKNLILAGVKSVTLHDEGMWNCGIYLAILFLQRKMLGRIGHLLLSRKLQELNNAVIISTLTDALTKEQLSNFQAVVFTDISLEKAVKFDDYCHQHQPPIAFIKAEVRGLFGSVFCDFGPEFTIADVDGEDPHTGIIASISNDNPALVGCIDDERLEFQDGDLVIFSEVRGMTELNDGKPRKIKNARPYSFTIEEDTSNYAAYERGGIVTQVKEPKVLKFKPLREAIKDPGDFLLSDFSKFDRPPILHLAFQALDRFVSESGRFPLAGSEEDAQRLISFVTDLNNSLSDGKLEEIDQKLLRNFAFGARAVLNPMAAMFGGIVGQEVVKACSGKFHPLYQFFYFDSVESLPTAPLDPNDLKPLNSRYDAQISVFGNKLQKKLEEAKAFVVGSGALGCEFLKNLALMGVCCGDKGKLTITDDDVIEKSNLSRQFLFRDWNIGQAKSTVAAAAASLINPRIHIEALQNRASPETESVFDDTFWENLSVVINALDNVNARLYIDQRCLYFQKPLLESGTLGAKCNTQMVIPHLTENYGASRDPPEKQAPMCTVHSFPHNIDHCLTWARSEFEGLLEKTPTEVNAYLINPSDYISAMQKAGDAQARDTLDRVLECLDKERCDTFQDCITWARLRFEDYFADRVKQLTFTFPEEATTSSGAPFWSAPKRFPRPLQFSVDDASHLQFLLAASILRAETFGILIPDWVKSPQKLAEAVDKVIVPDFQPKKDVKIVTDEKATSMAASSIDDAAVINELVMKLETCRQKLPSGYKMNPIQFEKDDDTNYHMDLIAGLANMRARNYSIPEVDKLKAKFIAGRIIPAIATSTAMATGLVCLELYKVLDGGHKVEDYRNTFANLALPLFSMAEPVPPKVVKHQDMNWTVWDRWILKDNPTLRELLQWLQNKGLNAYSISYGSCLLYNSMFPKHKERMDRKLVDLAREVAKADLPPYRKHFDVVVACEDEEDNDVDIPQMSIYFR

SEQ ID NO: 14351 - protein, 524 aa, Oryza sativa (japonica cultivar-group)
MATCSWAATTAAAAPPRPPARCRSRVAALRRTAAASAAAASCVLAEAPKGLKVEQADAVEPAAAAAARRDVGPDTVASIILGGGAGTRLFPLTRTRAKPAVPVGGCYRLIDIPMSNCINSKINKIYVLTQFNSQSLNRHIARTYNIGEGVGFGDGFVEVLAATQTTGESGKRWFQGTADAVRQFLWLFEDARLKRIENILILSGDHLYRMDYMDFVQKHVDKGADISVACVPVDESRASDFGLMKTDKNGRITDFLEKPKDESLKSMQLDMGTFGLRPEVADTCKYMASMGIYVFRTDILLRLLSLRYADTLSLCSVSFRGHYPTANDFGSEVIPMAAKDYNVQAYLFDGYWEDIGTIKSFFEANLALTDQSPNFYFYDPVKPIFTSPRFLPPTKVENCKVLNSIVSHGCFLTECSVDRSVIGVRSRLEPGVQLKDTMMMGADYYQTEAERFSELSDGKVPVGVGENTIIRNCIIDKNARIGKNVMIMNSQNVQEAERPLEGFYIRSGITVVLKNAVIPDGTVI

SEQ ID NO: 14352 - protein, 83 aa, Methanosarcina mazei Go1
MSNLSCFSIIGTHRSVFKFKGDLLVKENYTRFERARIVGARALQIAMGAPVLVEDDGRLDPLGVAIEELKAGVIPITVKRKKS

SEQ ID NO: 14353 - protein, 394 aa, Eremitis sp. nov. Doell
EPARTEDPALSIAGSVQSQKLAVRAISRLQALPGGDVKLLCDTVVENIRELTGYDRVMGYRFHDDEHGEVVAESRRADLEPYLGLHYPATDIPQASRFLFRQNRVRMIADCHTAPVRVIQDPVLPQPLCLVGSTLRAPHGCHAQYMANMGSIASLVMAVIISSGGDDSHNSSRGGIPSAMKLWGLVVCHHTSPRCIPFPLRYACEFLMQAFGLQLNMELQLAHQLSEKHILRTQTLLCDMLLRDSPTGIVTQSPSIMDLVKCDGAALYYHGKYYPLGVTPTEAQIKDIIEWLTLCHGDSTGLSTDSLADAGYPGAAALGDAVCGMAVAYITPSDYLFWFRSHTAKEIKWGGAKHHPEDKDDGQRMHPRSSFKAFLEVVKSRSLPWESAEMDAIH

SEQ ID NO: 14354 - protein, 394 aa, Glyceria grandis
EPARTEDPALSIAGAVQSQKLAVRAISRLQALPGGDVKLLCETVVEHVRELTGYDRVMVYKFHDDEHGEVLAESRRPDLEPYLGLHYPATDIPQASRFLFRQNRVRMIADCHAAPVRVIQDPAMPQPLCLVGSTLRSPHGCHAQYMANMGSIASLVMAVIISSGGDDEHHMARGNIPSAMKLWGLVVCHHTSPRCIPFPLRYACEFLMQAFGLQLNMELQLAHQLSEKHILRTQTLLCDMLLRDSPTGIVTQSPSIMDLVKCDGAALYYHGKYYPLGVTPTEAQIKDIIEWLTACHGDSTGLSTDSLADAGYSGATVLGDAVCGMAVACITPSDYLFWFRSHTAKEIKWGGAKHHPEDKDDGQRMHPRSSFKAFLEVVKSRSLPWENAEMDAIH

SEQ ID NO: 14355 - protein, 393 aa, Hakonechloa macra
EPARTEDPALSIAGAVQSQKLAVRAISRLQALPGGDVKLLCDTVVEHVRELTGYDRVMVYRFHEDEHGEVVAESRRADLETYLGLHYPATDIPQASRFLFRQNRVRMIADCHATPVRVIQDPGLPQPLCLVGSTLRAPHGCHAQYMANMGSIASLVMAVIISSGGDDEQTARGGISSTMKLWGLVVCHHTSPRFIPFPLRYACEFLMQAFGLQLNMELQLAHQLSEKHILRTQTLLCDMLLRESPTGIVTQSPSIMDLVKCDGAALYYHGKYYPLCVTPTESQIKDIIEWLTVCHGDSTGLSTDSLADAGYLGAAALGDAVCGMAVAYITPSDYLFWFRSHTAKEIKWGGAKHHPEDKDDGQRMHPRSSFKAFLEVVKSRSLPWENAEMDAIH

SEQ ID NO: 14356 - protein, 392 aa, Lithachne pauciflora
EPARTEDPALSIAGAVHSQKLAVRAISRLQALPGGDVKLLCDTVVEHVRELTGYDRVMVYRFHEDEHGEVVAESRRADLEPYLGLHYPATDIPQASRFLFRQNRVRMIADCHAAPVRVIQDPALQQPLCLVGSTLRAPHGCHAQYMANMGSIASLVMAVIISSGGDDEHNITRGGIPSAMKLWGLVVCHHTSPRCIPFPLRYACEFLMQAFGLQLSMELQLAHQLSEKHILRTQTLLCDMLLRDSPTGIVTQSPSIMDLVKCDGAALYYHGKYYPLGVTPTEAQIKDIIEWLTLCHGDSTGLSTDNFADAGYPGAAALGDAVCGMAVAYITPSDYLFWFRSHTAKEIKWGGAKHHPEDKDDGQRMHPRSSFKAFLEVVKSRSLPWENAEMDA

SEQ ID NO: 14357 - protein, 535 aa, Schizosaccharomyces pombe
MAKILTIVMLVFVSMAGWMFGADTGSIGGITNMRDFQSRYADRYDPVTDTYSYSSARQGLLVGMVNTGTTVGCLLSSPLGDRFGKRKCIMGWTLVYITGVIVQLTTIPSWVQMMVAKIWTGLGIGALSVIAPGYQSESSPPHIRGAIVTTYQLFITLGIFIAACINMGTHKYTTHPEAQWRVPIGINLLWGILMFFGMLFLPESPRYLAVKGRNEECMKILTRNAGLPADHPIMQKEYNAIQADVEAELAGGPCSWPQIFSNEIRYRTLLGMGVMAFQQLTGNNYFFYYGTQVFRGTGLNSPFLAALILDAVNFGCTFGAIFVLEYFGRRGPLIVGGVWQSICFFIYASVGDRALTRPNGTSNHRAGAVMIVFSCLFIFSFAQTWAPAAYVIVGESYPIRYRSKCAAVATASNWFWNFMISFFTPFISNSIGFKYGYVFAACNLCAAIIIFLFAKETKGLTLEEINQLYLSNIKPWNTGAYQRDREDIKQSDSEKERGPTSKLHEYVEHAPNSYASTHSTESENYPQQVTNPVGL

SEQ ID NO: 14358 - protein, 392 aa, Lolium perenne
TGYDRVMVYKFHDDEHGEVLAESRRADLEPYLGLHYPATDIPQASRFLFRQNRVRMIADCHAAPVRVIQDPAMPQPLCLVGSTLRSPHGCHAQYMANMGSIASLVMAVIISSGGEDEHNMGRGAVPSAMKLWGLVVCHHTSPRCIPFPLRYACEFLMQAFGLQLNMELQLAHQMSEKHILRTQTLLCDMLLRDSPTGIVTQSPSTMDLVKCDGAALYYHGKYYPLGITPTEAQIKDIIKWLTVCHGDSTGLSTDSLADAGYPGATELGDAVCGMAVAYITPSDYLFWFRSHTAKEIKWGGAKHHPEDKDDGQRMHPRSSFKAFLEVVKSRSLPWENAEMDAIHSLQLILRDSFRDAGEGTSNSKAIVNGHVQLGELELRGIDELSSVAREMV

SEQ ID NO: 14359 - protein, 394 aa, Lygeum spartum
EPARTEDPALSIAGAVQSQKLAVRAISRLQALPGGDVKLLCDTVVEHVRELTGYDRVMVYKFHDDEHGEVLAESRRTDLEPYLGLHYPATDIPQASRFLFRQNRVRMIADCHAAPVKVFQDPAMPQPLCLVGSTLRSPHGCHAQYMANMGSIASLVMAVIISSGGDDEHNMSRGVIPSAMKLWGLVVCHHTSPRCIPFPLRYACEFFMQAFGLQLNMELQLAHQLSEKHILRTQTILCDMLLRDSPTGIVTQSPSIMDLVKCDGAALYYHGKYYPLGVTPTESQIKDIIDWLTVCHGDSTGLSTDSLADAGYPGAAALGDAVCGMAVAYITPSDYLFWFRSHTAKEIKWGGAKHHPEDKDDGQRMHPRSSFKAFLEVVRSRSLPWENAEMDAIH

SEQ ID NO: 14360 - protein, 416 aa, Oryza sativa (japonica cultivar-group)
MAKRRSNGETAAASSDDSSSGVCGGGGGGEVEPRRRQKRPRRSAPRDCPSQRSSAFRGVTRHRWTGRFEAHLWDKNTWNESQSKKGRQGAYDGEEAAARAYDLAALKYWGHDTVLNFPLSTYDEELKEMEGQSREEYIGSLRRKSSGFSRGVSKYRGVARHHHNGKWEARIGRVFGNKYLYLGTYATQEEAAVAYDIAAIEHRGLNAVTNFDINLYIRWYHGSCRSSSAAAATTIEDDDFAEAIAAALQGVDEQPSSSPATTRQLQTADDDDDDLVAQLPPQLRPLARAASTSPIGLLLRSPKFKEIIEQAAAAAASSSGSSSSSSTDSPSSSSSSSLSPSPLPSPPPQQQPTVPKDDQYNVDMSSVAAARCSFPDDVQTYFGLDDDGFGYPEVDTFLFGDLGAYAAPMFQFELDV

SEQ ID NO: 14361 - protein, 394 aa, Melica cupanii
EPARTEDPALSIAGAVQSQKLAVRAISRLQALPGGDVKLLCDTVVEHVRELTGYDRVMVYKFHDDEHGEVLAESRRADLEPYLGLHYPATDIPQASRFLFRQNRVRMIADCGAAPVTVIQDPAMPQPLCLVGSTLRSPHGCHAQYMANMGSIASLVMAVIISSGGDDDHNMVRGSIPSAMKLWGLVVCHHTSPRCIPFPLRYACEFLMQAFGLELNMELQLAHQMSEKHILRTQTLLCDMLLRDSPTGIVTQSPSIMDLVKCDGAALFYHGKYYPLGVTPTEAQIKDIIEWLTVCHGDSTGLSTDSLADAGYSGATALGDAVCGMAVAYITPSDYLFWFRSHTAKEIKWGGAKHHPEDKDDGQRMHPRPSFKAFLEVVKSRSIPWENAEMDAIH

SEQ ID NO: 14362 - protein, 437 aa, Oryza sativa (japonica cultivar-group)
MAGPPGPAPGTSSSSSSLPSRRRRRPPPRLGRRRGGDDQQPPHPPKASSEALPCAASPPARCRGGDHQPPHPPEAALEALRGAASPPARRRGGDLHPSHPPEAASEALRGAASPPERRRGGDRQPSHPTEAASEAPSGSASPPARRRGGDQQPPPAVAVAVTSEGGVGPRRSFRISLRHRVRVVPWVKPPVARKPKDPAKPPRPSIEALAAEWAKEKAASGAPEEECVLPFLQKDAPKKEAFRRLPLPHTFQEFNIDPIKKEELDNGTEPPPYVHMKHECTNKPFRRQKKIEIVKTQYCGWGSRALEAIEKDDFVIEFVGEVIDDETCEERLEDMRRRGDKNFYMCKVKKDFVIDATFKGNDCRFFNHSCEPNCQLQKWQVNGKTRLGVFASKAIEVGEPLTYDYRFEQHYGPEIECFCGAQNCQGNMSIVGGCFYT

SEQ ID NO: 14363 - protein, 393 aa, Miscanthus sinensis
EPARTEDPALSMAGAVQSQKLAVRAISCLQALPGGDVKLLCDTVVEHVRELTGYDRVMVYRFHEDEHGEVVAESRRDNLEPYLGLHYPATDIPQASRFLFRQNRVRMIADCHATPVRVIQDPGLSQPLCLVGSTLRASHGCHAQYMANMGSIASLVMAVIISSGGDDEQTGRGGISSAMKLWGLVVCHHTSPRCIPLPLRYACEFLMQAFGLQLNMELQLAHQVSEKHILRTQTLLCDMLLRDSPTGIVTQSPSIMDLVKCDGAALYYHGKYYPLGVTPTESQIKDIIEWLTVCHGDSTGLSTDSLADAGYLGAAALWDAVCGMAVAYITPSDYLFWFRSHTAKEIKWGGAKHHPKDKDDGQRMHPRSSFKAFLEVVKSRSLPWENAEMDAIH

SEQ ID NO: 14364 - protein, 352 aa, Haloferax mediterranei
MSTDSDAETVDLADGVDHQVAMVMDLNKCIGCQTCTVACKSLWTEGGGRDYMYWNNVETKPGKGYPRNWEESGGGWKSSEHKERKPGQIPDKEDYGDAWEFNHEEIMYNGSDRPLRPDSDPEWGPNWDEDQCTGEYPNSYYFYLPRICNHCTHPSCVGSLPRKAIYKREEDGIVLIDQERCRGYRYCVEGCPYKKVYYNATQKTSEKCIFCYPRIEGEGPDGKTFAPACAEDCPPQLRLVGFLDDEQGPIHKLVEEYEVALPLHPEYQTQPNVYYIPPFAPPQHSEDGESVDVDRIPRNYLEELFGERVHDALRHIEREREKSHRGGGSELLDMLTDTNPARKFRLEVFDDD

SEQ ID NO: 14365 - protein, 205 aa, Schizosaccharomyces pombe
MSSCFGSKKKPIYRKIVILGDGAAGKTSLLNVFTKGYFPQVYEPTIFENYIHDIFVDGNSIELSLWDTAGQEEYDQLRSLSYSDTHVIMICFAVDSRDSLENVITKWLPEVSSNCPGVKLVLVALKCDLRGADEEQVDHSKIIDYEEGLAAAKKINAVRYLECSAKLNRGVNEAFTEAARVALAAQPRGTKDGADESHGTGCIIA

SEQ ID NO: 14366 - protein, 388 aa, Molinia caerulea
EDPALSIAGAVQSQKLAVRAISRLQALPGGDVKLLCDTVVENVRELTGYDRVMVYRFHEDEHGEVVAESRRADLEPYLGLHYPATDIPQASRFLFRQNRVRMIADCHATPVRVIQDPGLSQPLCLVGSTLRAPHGCHAQYMANMGSIASLVMAVIIIIGGDDEQTARGSISSAMKLWGLVVCHHTSPRFIHFPLRYACEFLMQAFGLQLNMELQLAHQLSEKHILRTQTLLCDMLLRDSPSGIVMQSPSIMDLVKCDGAALYYHGKYYPLGVTPTESQIMDIIEWLTMCHGGSTGLSTDSLADAGYLGAAALGDAVCGMAVAYITSSDYLFWFRSHTAKEIKWGGAKHHPEDKDDGQRMHPRSSFKAFLEVIKSRSLPWENAEMDAIH

SEQ ID NO: 14367 - protein, 387 aa, Nardus stricta
PALSIAGAVQSQKLAVRAISRLQALPGGDVKLLCDTVVEHVRELTGYDRVIVYKFHDDEHGEVLAESRRTDLEPYLGLHYPATDIPQASRFLFRQNFVRMIADCHAAPVRVIQDPAMPQPLCLVGSTLRSPHGCHAQYMANMGSIASLVMAVIISSGGDDEHNMARGVVPSAMKLWGLVVCHHTSPRCIPFPLRYACEFLMQAFGLQPNMELQLAHQMSEKHILRTQTLLCDMLLRDSPTGIVTQSPSIMDLVKCDGAALYYHGKYYPLGVTPTESQIKDIIEWLTVCHGDSTGLSTDSLADAGYPGAAALGDAVCGMAVAYITQSDYLFRFRSHTAKEIKWGGAKHHPEDKDDGQRMHPRSSFKAFLAVVKSRSLPWENAEMDAIH

SEQ ID NO: 14368 - protein, 428 aa, Phaseolus vulgaris
PERVVHARGASAKGFFEVTHDISHLTCADFLRAPGVQTPLIVRFSTVIHERGSPETLRDPRGFAVKFYTREGNFDLVGNNFPVFFVRDGLKFPDMVHALKPNPKSHIQENWRILDFFSHHPESLHMFSFLFDDVGIPQDYRHMDGFGVNTYTLISKAGKPHYVKFHWKATCGEKCLLDEEAVRVGGFNHSHATQDLHDSIAAGNYPEWKLYIQTLDPEQEDKFDFDPLDVTRICPEDVLPLQPVGRMVLNKNIDNFFAENEQLAFCPAIIVPGVYYSDDKLLQTRIFSYADSQRHRLGPNYLQIPANAPKCAHHNNHHEGFMNFMHRDEEVNYFPSRYDPVRHAERIPVPPRILDGKREKCMIEKENNFKQPGERYRSWASDRQERFLRRWVDALSEPRVTHEIRSIWISYWSQADRSLGQKIASHLN

SEQ ID NO: 14369 - protein, 474 aa, Ralstonia metallidurans CH34
MSKQFDVLVIGAGPGGYIAAIRAAQLGLNVACLEGNAYDDPKGEARLGGTCLNVGCIPSKALLASSEEFENASHHLADHGITVGDVKVDVAKMLKRKDDIVSKMTKGIEFLFRKNKVTLFKGYGKFTGKAAEGFQVEVNGETLTAKQVIIATGSKARHLPGVAVDNNLISDNEGALKFGTVPKKLGVIGAGVIGLELGSVWRRLGAEVTVLEALPAFLGAADEGVAKEAQKLLTKQGLQFHLSVKVDEVKTGKDNVTVNYTDKDGKAQTLEVDRLIVSVGRVPNTDNLGLDAVGLGVDQRGFIEVDDHCQTKVPGIWAIGDVVRGPMLAHKAEDEGVAVAERIVGQKPHIDFNTVPWVIYTFPEIAWVGKTEQQLKAEGREYKSGQFPFMANGRALGMGASDGFVKMLADARTDEILGVHIVAANASDLIAEAVVAMEFKAASEDIGRVCHPHPSMSEVMREAALAVDKRQLNM

SEQ ID NO: 14370 - protein, 423 aa, Triticum aestivum
  unsure (1)..(423): unsure at all Xaa locations
MQSAAAIGLLRPCAARPILKSPSPGAARLPASRAALRLSAAAPRAGLVAAAGLGRIGLVPASPEQEKRSDCLVAAAAAGKASAGEEAGEEGGTALAKTLQLGVFFGLWYLFNIYFNIYNKQVLKVFPYPINITTVQFAVGTTISLFMWATGILKRPKISGAQLLAILPLAIVHTMGNLFTNMSLGKVAVSFTHTIKAMEPFFSGLLSAMFLGELATPWVGLSLLPNCGPTPPPPAPPSPPWCPPSSPQRXGGALASISDARSNRAGFLSAMASNVTFQSRNVLSKKLMLKKEXALDNINLFSIITVMSFFLLAPVTLLTEGVKVTPTYLQSAGLNLQQVYTRSLIAAFCFHAYQQVSYMILARVSPVTHSVGNCVKRVVVIVTSVLFFKTPVSPINSIGTAIALAGVFLYSQLKRLQPKPKTA

SEQ ID NO: 14371 - protein, 409 aa, Ralstonia metallidurans CH34
MSESVAEATMLNWKKKPGEAVAQDEILIEIETDKVVLEVPAPSAGVLSQIIKNDGDTVVADEVIAKIDTAATAGAVAPAAAAPAPAAAAPAPAAAAPAAAASAGAIAMPSAAKLMAEGGLSASQVAGTGKDGRITKGDVLAAGSAPAPAAKAAPAPAAAKPALPQVSAQVDFAALGDRPEERVPMSRLRARIAERLIQSQSTNAILTTFNEVNMKPVMDLRAKYKDRFEKEHGVKLGFMSFFVKAAVHALKKYPVINASVDGNDIVYHGYFDIGIAVGSPRGLVVPILRNADQMSLADIEKKIAEFGTKARDGKLSLEELTGGTFSISNGGTFGSMLSTPIINPPQSAILGVHATKDRAVVEDGQIVIRPMNYLAMSYDHRIIDGREAVLGLVAMKEALEDPARLLLDL

SEQ ID NO: 14372 - protein, 220 aa, Thermus thermophilus HB27
MFSEIAPRYDLLNRLLSFGADLRWRRRAVDLALEKAPKRILDLATGTGDLALMLKERAPGAEVVGADFAPPMLAIARRKAEARGLEVRFLEADALALPFPDGAFDAVTIAFGFRNFADYEKALGELYRVLAPGGRLVVLEFPPPPKGAFGLVYRVYFQRVLPFLGGLISGNFGAYRYLPESVEAFPAPEALKAMMAAAGFSVRYELLTFGVAAIHVGDRP

SEQ ID NO: 14373 - protein, 234 aa, Arabidopsis thaliana
MVSPENANWICDLIDADYGSFTIQGPGFSWPVQQPIGVSSNSSAGVDGSAGNSEASKEPGSKKRGRCESSSATSSKACREKQRRDRLNDKFMELGAILEPGNPPKTDKAAILVDAVRMVTQLRGEAQKLKDSNSSLQDKIKELKTEKNELRDEKQRLKTEKEKLEQQLKAMNAPQPSFFPAPPMMPTAFASAQGQAPGNKMVPIISYPGVAMWQFMPPASVDTSQDHVLRPPVA

SEQ ID NO: 14374 - protein, 1383 aa, Burkholderia fungorum LB400
MVLHVEDGQVVKISGDKEHPANFGRLCTKGQSAHVALRKSGRLEGAFVRHARGRDPAPLPMTQAISATAARLRGLLDEHGPDALSFYVSGQMSIEAQYLVNKLAKGFVGTNNIESNSRLCMASAGSGYKLSLGADGPPGSYEDIDHADLFFVIGANMADCHPILFLRMMDRVKAGAKLIVVDPRRNTTAEKADLFMQIKPGTDLALLNGLLHLLHENGHTDAAFIAEATEGWEAMPAFLADYTPEKAAQITGLAVEDIRAAAQMIGSANEWISCWTMGLNQSTHGTWHTNAICNLHLATGKICRRGSGPFSLTGQPNAMGGREMGYMGPGLPGQRSVLVEEDRAFIEDLWRIPKGTLKPEAGNGTIDMFTRMAAGEIKACWIICTNPVASVANRQNAIDGLRAAQLVIAQDAFLDTETNRYADVLLPGALWAEAEGVMINSERNLTLMQKGVEPPGAALPDWQIIARIACEMGYAEGFTYASAEEVFAEITRVSNPKTGYDLRGASHRRLKETPLQWPLASDESAERNPVRYLNDGVSQTLKELADGSRPRLVFPTASCKAVFFARAYAAPAELPDREFPIVLNTGRLQHQWHTMTKTGKVAMLNKLNPAPFVEIHPEDATTLGIKAQDPVEIRSRRGRAVLPAVVTERVSAGSCFAPMHWNDVFGDDLCINAVTSDAVDPISQQPELKFCAVALSPVAADSRQPLLTDDDATITDASVAVAVSAAPGNTVSASAEDLDMPRIDALTSLLQLPPTPAPSFNDQQRLYLAGFVSGLRSAEAKGIDSTPVLPGNAPFDTTSRLYVDGLLAGLYSRSAMVPAASAPTLAVSHAETSHASGVRIVRARPKVTLLWASQTGNTESLTEGYATRLMESGFEIRTSCMADYPASALAKAQYVLLMTSTFGDGDPPDNAQSFWTQLSGEGAPRLDGVRFAVLALGDRNYDQFCGHGRRLDERLAGQGAQRLMDRVDCDSEYQASADAWLERIIVRIKEEDAALYAVPAGGMVNAVVPGTVPTKTRPAASRLVSNLRLNKQGAAKDTRYVSLHTGDSGLEYEAGDALGVWPSNCPELVDELIGLSGLHADAAVNVAGAGEMRLADALGKHYEIARPNPDLLAFVAARSNNGALRDLLAPDRKADLKQWLWGQQIADVLHEFPVSLTASELTGMLKRLQPRLYSIASSPKAHAGEVHLTVAAVRYSNGRRHRKGVSSTFLADRAGDVNVPVFVQKSAHFRPPHGSETPMIMVGPGTGVAPFRGFLHERRARGDTGRNWLFFGEQHAASDFYYRDELESMRDSGVLTRLDVAFSRDQADKVYVQDRMREQGAQLWAWLEDGAHFYVCGDANRMAKDVDAALKEVVARHGGMSDDKALEYVSRLAQEKRYARDVY

SEQ ID NO: 14375 - protein, 226 aa, Arabidopsis thaliana
MVSPENTNWLSDYPLIEGAFSDQNPTFPWQIDGSATVSVEVDGFLCDADVIKEPSSRKRIKTESCTGSNSKACREKQRRDRLNDKFTELSSVLEPGRTPKTDKVAIINDAIRMVNQARDEAQKLKDLNSSLQEKIKELKDEKNELRDEKQKLKVEKERIDQQLKAIKTQPQPQPCFLPNPQTLSQAQAPGSKLVPFTTYPGFAMWQFMPPAAVDTSQDHVLRPPVA

SEQ ID NO: 14376 - protein, 485 aa, Candida tropicalis
MAPTFTNSNGQPIPEPFATQRVGQHGPLLLQDFNLIDSLAHFDRERIPERVVHAKGSGAYGVFEVTDDITDVCAAKFLDTVGKKTRIFTRFSTVGGELGSADTARDPRGFATKFYTEEGNLDLVYNNTPVFFIRDPSKFPHFIHTQKRNPETHLKDANMFWDYLTSNEESVHQVMVLFSDRGTPASYREMNGYSGHTYKWSNNKGEWFYVQVHFISDQGIKTLTNEEAGSLAGSNPDYAQEDLFKNIAAGNYPSWTCYIQTMTEAQAKEAEFSVFDLTKVWPHGKYPMRRFGKFTLNENPKNYFAEVEQAAFSPAHTVPHMEPSADPVLQSRLFSYADTHRHRLGTNYTQIPVNCPVTGAVFNPHMRDGAMNVNGNLGNHPNYLASDKPVEFKQFSLQEDQEVWHGAATPFHWKATPADFKQATELWKVLKKYPNQQEHLAHNVAVHASAADAPIQDRVIAYFTKVHPDLGDLIKKEILELSPRK

SEQ ID NO: 14377 - protein, 546 aa, Schizosaccharomyces pombe
MGKNLTIVMLVFVSMAGWMFGADTGSIGGITNMRDFQSRFADRYNPVTDSYSYSSARQGLITGMVNVGSFFGCFLSSPLMDRIGKRTSIMFWTIVYLIGIILQVTAVPSWVQIMVAKIWTGLSIGALSVLAPGFQSEVAPADLRGTIVTTYQLAVTGGIFIAACINMGTHKLHKTAQWRVSMGINLLWGIITFIGISFLPESPRYLISVGRDEEALQIMAKNNDLPIEHEVIQTEYHVIKSDCEAELAGGPATWPEIFGPDIRYRTFLGLGVMSLQQLTGDNYYFYYGFEVFEGTGMNSPYLSALILDAVNFGCTFGGLFVLEFFGRRMPLIIGALWQSITFFIYAAVGNRALTRKNGTSNHRAGAVMIVFSCLFIFSFAQTWGPAAYVIVGESYPIRYRSKCAAVATTGNWLWGFLISFFTPFITNSIGFKYGYIFAACNLCAACIIFLFAHETKGLTLEEINELYISGAKPWMPRPKNLGNFTKQQEEVREKSRGVQGESAAHLENVDGEEGIEDSSNDISSTTSSDGRAKPESSYHDQEEQFA

SEQ ID NO: 14378 - protein, 317 aa, Escherichia coli
  unsure (1)..(317): unsure at all Xaa locations
MTDKLTSLRQYTTVVADTGDIAAMKLYQPQDATTNPSLILNAAQIPEYRKLIDDAVAWAKQQSNDRAQQIVDATDKLAVNIGLEILKLVPGRISTEVDARLSYDTEASIAKAKRLIKLYNDAGISNDRILIXLASTWQGIRAAEQLEKEGINCNLTLLFSFAQARACAEAGVFLISPFVGRILDWYKANTDKKEYAPAEDPGVVSVSEIYQYYKEHGYETVVMGASFRNIGEILELAGCDRLTIAPALLKELAESEGAIERKLSYTGEVKARPARITESEFLWQHNQDPMAVDKLAEGIRKFAIDQEKLEKMIGDLL

SEQ ID NO: 14379 - protein, 228 aa, Gossypium marchantii
FTSLCHTDVYFWEAKGQTPLFPRIFGHEAGGIVESVGEGVTHLKPGDHVLPVFTGECGNCRHCKSKESNMCDLLRINTDRGVMLSDGKTRFSINGKPIYHFVGTSTFSEYTVAHVGSVAKINPAAPLDKVCILSCGISTGLGATLNVAKPAKGSTVAIFGLGAVGLAAAEGARIAGASRIIGVDLNPNRFEEAKKFGCTEFVNPKDHBKPVQEVLAEMTNGGVDRSVE

SEQ ID NO: 14380 - protein, 451 aa, Thermoanaerobacter tengcongensis
MKKLISFDYSKALPFIHPHEIEYMEKHAKLSLEMVLKANAQGNGFLGWVNLPRDYDRAEFERIKKAAHKIQSDSDVLVVIGIGGSYLGARAAIEMLSHSFYNLLPKGKRNTPEIYFAGNSISSTYLKDLLELIADKEVSINVISKSGTTTEPAIAFRVFRDFMEKKYGKDKARSRIYVTTDREKGALKKLADSEGYETFVIPDDVGGRYSVLTAVGLLPIAVAGINIDEMMEGAYEASTVYTKEDLSENISMQYAILRNILYRKGKAIEILVNYEPRLHYFAEWWKQLFGESEGKDQKGIYPASVDFTTDLHSMGQFIQEGSRNIFETVLNVEKPAKDIIINEDRDNIDGLNFLAGKTIDFVNKKAFEGTLLAHTDGGVPNLVVNIPEITPFYFGNLVYFFEMACAISGYINGVNPFDQPGVEAYKKNMFALLGRPGFEKEREELERRLRG

SEQ ID NO: 14381 - protein, 494 aa, Secale cereale
MDPCKFRPSSSFDTKTTTTNAGQPVWNDNEALTVGPRGPILLEDYHLLEKIAHFARERIPERVVHARGASAKGFFECTHDVTGLTCADFLRAPGARTPVIVRFSTVIHERGSPETIRDPRGFAVKFYTREGNWDLLGNNFPVFFIRDGIKFPDVIHAFKPNPKSHVQEYWRVFDFLSHHPESLHTFFFLFDDVGIPTDYRHMDGFGVNTYTFVTRAGKSHYIKVHWRPTCGVSCLMDDEATLVGGKNHSHATQDLFDSIDAGNFPEWKLFVQVIDPEEEDRFDFDPLDDTKTWPEDLVPLQPVGRLVLDRNVDNFFNENEQLAFGPGLVVPGIYYSDDKMLQCRVFAYADTQRYRLGPNYLMLPVNAPKCGFKNNHYDGAMNFMHRDEEVDYYPSRHAPLRQAEPASFPVPTRPVVGKREKTRIKKENDFVQPGERYRSWAPDRQDRFVRRFADALAHPKVSHELRVIWIDFLSKCDKSCGMKVANRLNVKPSM

SEQ ID NO: 14382 - protein, 394 aa, Nassella viridula
EPARTEIPALSIAGAVQSQKLAVRAISRLQALPGGDVKLLCDTVVEHVRELTGYDRVMVYKFHDDEHGEVLAESRRADLEPYLGLHYPATDIPQASRFLFRQNRVRMIADCHAAPVRVIQDPAMQQPLCLVGSTLRSPHGCHAQYMANMGSIASLVMAVIISSGGDDEHNMGRGTIPSAMKLWGLVVCHHTSPRCIPFPLRYACEFLMQAFGLQLNMELQLAHQLSEKHILRTQTLLCDMLLRDSPTGIVMQSPSIMDLVKCDGAALYYHGKYYPLGVTPIEAQIKDIIEWLTVCHGDSTGLSTDSLADAGYSGATALGDAVCGMAVAYITPSDYLFWFRSHTAKEIKWGGAKHHPEDKDDGQRMHPRSSFKAFLEVVKSRSLPWENAEMDAIH

SEQ ID NO: 14383 - protein, 1476 aa, Neurospora crassa
MASTTQIKTPQEAVARIAYLASDVVVSVQPSLAAESDFSATLKSLASSRTQSLVAKAADAVTEIIPVRHNNDPLLSVFTPIRSGRLVSVTTTSEVLLPSIAHLYKLAQLPVVLHVALGPKSLPDYTAITSIRNSGWTFLQSNSLQEAQDLALTAHALAVQSGKGVIHFFDPSSSASEQPIAAEDLSLVQEILNLDNVRRFQSASISGSSIYANDGRVAVVSEQSEPVASQTVLDARQVEAATATATDSLAPAQDGSDDAFEYSGPSNAENALFVFGSGSPLFAQAIAQAQSDDSFAKAGVLTARLYRPWLGAKLLEAIPKSVKRVAVLEQVSRKTTKWGPLLIDVLTSVKSGPGGVQTIVGHQLGYISQETVVQALRGIFQNLTSEKPVQNLEVGEREAPKEASEYGLEKPKLETAYTKILDQLFGERAYIANSIEKDNAGISNTISATPEYGFGALLARKERKQKFVSEVKEAASNGQFSSDAPKQALAKWVANAEDSKKVEEVASEAVSKLSEDGSDLSKSLLEYKQFFRKQSLWLVGSDAWSYDLGNSGVHHVLASGENVNLLIIDSTPYSERAAADANRRKKDIGLYAMNFGNAYVASTAVYSSYTQVLQAMDEADKFNGPSVVLAYLPYFGEHDSALTVLQETKKAVDIGYWPLYRWNPENEKKGEPSFSLDSERIKKELKEFLDRDNHLTQLMKKEPSFGAVLSEDFGTEIRAQQKRKAKDAYNQLLEGLFGAPLTILYASDNGNAISLSKRLGNRGRARGLKTTVMSMEDYPVEDLATEENIVFITSTAGQGEFPQNGLSFWHAVKDNTSLDLANVRYSVFGLGDSHYWPRKEDKIYYNKPAKDLDRVLANFGAKPLAPIGLGDDQDPDGFQTGYSEWEPKLWEALGVANVDGLPEEPAPRTNEDIKIESNYLRGTIVQGLNDTSTLAISPDDCQLTKFHGTYMQDDRDIRDERKAQGLEPAYSFMIRCRLPGGVSTAKQWVQMDDIANELGNETMKLTTRQTFQFHGVVKSKLKPAMQAINRALMTTIAACGDVNRNVMCSPLPAHSKYHRAVHACAKRISDHLLPNTTAYHEIWLTDDDGAKTQVGGNAVQDFEPLYGPTYLPRKFKVSIAIPPHNDVDVYAHDIGLIAIKNEDGSLAGFNLLAGGGMGATHNNKKTYPQTGRMLGFVTAADVHLACEKVMLVQRDNGDRKNRKHARLKYTIDDMGVDVFKAKVEEYWGQKFEEPRAFHFDSNVDTFGWTKDETGLNHFTMFIENGRIEDTAEFQMKTGLREIAKVHKGEFRLTPNQHLILSNVADEDKPELEKLLAQYKLDNLHHSGLRLSSSACVAFPTCGLAMAESERYLPVLITKLEGVLEEVGLKQDSIVMRMTGCPNGCARPWLAEVAFVGKAYGAYNMYLGGGYHGQRLNKLYRSSIKEEEILTIMKGLLRRYAKEREEGERFGDWTIRAGIIKATTDGRNFHEGVSEIF

SEQ ID NO: 14384 - protein, 547 aa, Schizosaccharomyces pombe
MGKTLTIVMLVFVSMAGWMFGADTGSIGGITNMRDFQSRFADRYNPVTDTYSYSSARQGLITGMVNVGSMTGCILSSPLMDRIGKRVSIMFWTIVYLIGIILQVTAVPSWVQIMVAKIWTGLAIGALSVLAPGFQSEVAPATLRGTIVTTYQLAVTGGIFIAACINMGTHKLHKTAQWRVSMGINLLWGIIMFIGISFLPESPRYLIAIGKDEEALDIMCKNNVLPREHEIIQTEYHVIKTDCEAEMAGGPATWGDILGADIRYRTFLGLGVMSLQQLTGDNYYFYYGFEVFEGTGMNSPYLSALILDAVNFGCTFGGLFVLEFFGRRMPLIIGGVWQSITFFIYAAVGNRALTRKNGTSNHRAGAVMIVFSCLFIFSFAQTWGPAAYVIVGESYPIRYRSKCAAVATTGNWLWGFLITFFTPFISDSIGFKYGYIFAACNLCAACIIFLFAHETKGLTLEEINELYLSGAKPWMPRPENLGQAAKQQQEVLEKSRGVQGESAAHLENVDNEGMEDTSSNDITSSTSSSEGRAKPESNYVDEQDRYA

SEQ ID NO: 14385 - protein, 394 aa, Olyra latifolia
EPARTEDPALSIAGAVQSQKLAVRAISRLQALPGGDVKLLCDTVVEHVRELTGYDRVMVYRFHEDEHGEVVAESRRADLEPYLGLHYPATDIPQASRFLFRQNRVRMIADCHAAPVKVIQDSALQQPLCLVGSMLRAPHGCHAQYMANMGSIASLVMAVIISSGGDDEHNITRGGIPSAMKLWGLVVCHHTSPRCIPFPLRYACEFLMQAFGLRLNMELQLAHQLSEKHILRTQTLLCDMLLRDSPTGIVTQSPSIMDLVKCDGDALYYHGKYYPLGVTPTEVQIKDIIEWLTVCHGDSTGLSTDSLADAGYPGAAALGDAVCGMAVAYITPSDYMFWFRSHTAKEIKWGGAKHHPEDKDDGQRMHPRSSFKAFLEVVKSRSLPWENAEMDAIH

SEQ ID NO: 14386 - protein, 557 aa, Schizosaccharomyces pombe
MSKTLTITMLLFVSMAGWMFGADTGSIGGITNMRDFQSRFADRYNPVTDTYSYSSARQGLITGMVNVGSFFGCLISSPTTDRIGKRNSIIGFCVIYLIGVIIQVTAVPSWVQIMVAKIWTGLGIGALSVLAPGYQSEVAPPHIRGTIVVTYQLCVTAGIFIAACINMGTHKLYKTAQWRVSIGINLLWGIITLVGVSFLSESPRYLVSIGKDDEAIQVMCKNAELPPDSDIIQTEYKQIKSDCEAAVEGGPCTWPEIFGKEIRYRTFLGMAIMSFNQLTGCNYYFYYGTQVFKGTGMESPYLASLILDAVNFGCTFGGLFVLEYCGRRVPLIIGGVWQSICFFIYAAVGNRALTRKNGTSNHRAGAVMIVFSCLFIFSFAQTWGPAAYVIVGESYPIRYRSKCAAVATTSNWLWNFLISFFTPFITNSIGFKYGYIFASCNLCASIVTFLFAHESKGLTLEEINELYLSDAKPWMSRPKNLSEMAEAKEVEREETRPKGESARYLEHADSNSDSEDLSSSANNDVHEPVARQDPFNENEVEKSRTRPSQESYTTSSN

SEQ ID NO: 14387 - protein, 393 aa, Panicum capillare
EPARTEAPALSIAGAVQSQKLAVRAISRLQALPGGDVKLLCDTVVEHVRELTGYDRVMVYRFHEDEHGEVVAECRRDNLEPYLGLHYPATDIPQASRFLFRQNRVRMIADCHATPVRVIQDPGLSQPLCLVGSTLRAPHGCHAQYMANMGSIASLVMAVIISSGGDDEQTARGGISSAMKLWGLVVCHHTSPRFIPFSLRYACEFLMQAFGLQLNMELQLAHQLSEKHILRTQSLLCDMLVRDSPTGIVTQSRSIMDLVKCDGAALYYHGKYYPLGVTPTESQIKDIIEWLTVCHGDSTGLSTDSLADAGYHGAAALGDAVCGMAVAYITPSDYLFWFRSHTAKEIKWGGAKHHPEDKDDGQRMHPRSSFKAFLEVVKSRSLPWENAEMDAIH

SEQ ID NO: 14388 - protein, 394 aa, Pariana radiciflora
EPARTEDPAISIAGSVQSQKLAVRAISRLQALPGGDVKLLCDTVVEDIRELTGYDRVMVYRFHEDEHGEVVAESRRADLEPYLGLHYPATDIPQASRFLFRQNRVRMIADCHTAPVRVIQDPALPQPLCLVGSTLRAPHGCHAQYMANMGSIASLVMAVIISSGGDDSHNSSRGGIPSAMKLWGLVVCHHTSPRCIPFPLRYACEFLMQAFGLQLNMELQLAHQLSEKHILRTQTLLCDMLLRDSPTGIVTQSPSIMDLVKCDGAALYYHGKYYPLGVTPTEAQIKDIIEWLTLCHGDSTGLSTDSLADAGYPGAAALGDAVCGMAVAYITPSDYLFWFRSHTGKEIKWGGAKHHPEDKDDGQRMHPRSSFKAFLEVVKSRSLPWENAEMDAIH

SEQ ID NO: 14389 - protein, 353 aa, Pennisetum alopecuroides
TGYDRVMVYRFHEDQHGEVVAECRRDNLEPYLGLHYPATDIPQASRFLFRQNRVRMIADCHATPVRVIQYPGLSQPLCLVGSTLRAPHECHAQYMANMGSIASLVMAVIISSGGDDEQTTRGGISSAMKLWGLVVCHHTSPRFIPFPLRYACEFLMQAFGLQLNMELQLAHQLSEKHILRTQTLLCDMLLRDSPTGIVTQSPSIMDLVKCDGAALYYHGKYYPLGVTPTESQIKDIIEWLTVCHGDSTGLSTDSLADAGYHGAAALGDAVCGMAVAYITPSDCLFWFRSHTAKEIKWGGAKHHPEDKDDGQRMHPRSSFKAFLEVVKSRSLPWENAEMDAIHSLQLILRDSFR

SEQ ID NO: 14390 - protein, 629 aa, Mycoplasma capricolum
MFKVKFADIGEGLTEGTVAEVLVKVGDVVKEGQPLYFVETDKVNSEIPSPVAGKIAIINISTGQEIKVGDVVIEIDDGSSTSTASTSKVEVVEENASVVGATPVSNDVLPSRAPKPKAEAKVEVVEENASVVGATPVSNDVLPSRAPKPKVEAPKVDVQIEDTFDVCVVGAGIGGYVTAIKSAQLGLKTLIIEKEYYGGVCLNVGCIPTKTLLKTSHVYHDIVHKAKELGIVLQNTENVVIDWAQALERKNGVVKKLTGGVKYLLDKNKVTQIKGEAIALDKNTISVNNKNYRVNNLVIASGSTPNHLPLPGFDQGRKDGIIIDSTGILSVPKIPETLVVIGGGVIGIEFSCLFASLGTKVTVLQGLPTILEMLDKDIIDAMTKELKNRYNIQVITNASVKEFKDGSVVYQIDGQDQMIKGEYVLESVGRKTSLTGFENIGLELTPRKGVVVNEYQETNLDGVYAIGDVVGKSMLAQTAVKGAIVAANRIAKKANKAHAEDIVMNYDKVPSCIYTHPEVSMIGKTEQQLKQENIEYKAFKFPFSAIGKALADDDTSGFVKIIVEPKYKTILGAHIIGNRATEMISEITAVIECEGTITEIANTIHPHPTMSEAIGEAAEALETGKAIHF

SEQ ID NO: 14391 - protein, 395 aa, Peridictyon sanctum
EPARTEDPALSIAGAVQSQKLAVRAISRLQALPGGDVKLLCDTVVEHVRELTGYDRVMVYKFHDDEHGEVLAESRRVDLEPYLGLHYPATDIPQASRFLFRQNRVRMIADCHAAPVRVIQDPAMPQPLCLVGSTLRSPHGCHAQYMANMGSIASLVMAVIISSGGEDEHNMTRGVIPSAMKLWGLVVCHHTSPRCIPFPLRYACEFLMQAFGLQLSMELQLAHQLSEKHILRTQTLLCDMLLRDSPTGIVTQSPSIMDLVKCDGAALFYHGKYYPLGVVTPTEAQIKDIIEWLTVCHGDSTGLSTDSLADAGYPGATALGDAVCGMAVAYITPSDYLFWFRSHTAKEIKWGGAKHHPEDKDDGQRMHPRSSFKAFLEVVKSRSLPWENAEMDAIE

SEQ ID NO: 14392 - protein, 510 aa, Saccharomyces cerevisiae
MPTSGTTIELIDDQFPKDDSASSGIVDEVDLTEANILATGLNKKAPRIVNGFGSLMGSKEMVSVEFDKKGNEKKSNLDRLLEKDNQEKEEAKTKIHISEQPWTLNNWHQHLNWLNMVLVCGMPMIGWYFALSGKVPLHLNVFLFSVFYYAVGGVSITAGYHRLWSHRSYSAHWPLRLFYAIFGCASVEGSAKWWGHSHRIHHRYTDTLRDPYDARRGLWYSHMGWMLLKPNPKYKARADITDMTDDWTIRFQHRHYILLMLLTAFVIPTLICGYFFNDYMGGLIYAGFIRVFVIQQATFCINSLAHYIGTQPFDDRRTPRDNWITAIVTFGEGYHNFHHEFPTDYRNAIKWYQYDPTKVIIYLTSLVGLAYDLKKFSQNAIEEALIQQEQKKINKKKAKINWGPVLTDLPMWDKQTFLAKSKENKGLVIISGIVHDVSGYISEHPGGETLIKTALGKDATKAFSGGVYRHSNAAQNVLADMRVAVIKESKNSAIRMASKRGEIYETGKFF

SEQ ID NO: 14393 - protein, 394 aa, Phalaris arundinacea
EPASTEDPALSIAGAVHSQKLAVRAISRLQALPGGDVKLLCGTVVEHVRELTSYDRVMVYKFHDDEHGEVLAESRRADLEPYLGLHYPATDIPQASRFLFRQNRVRMIADCHAAPVRVIQDPAMPQPLCLVGSTLRSPHGCHAQYMANMGSIASLVMAVIISSGGEDEHSMGRGAVPSAMKLWGLVVCHHTSPRCIPFPLRYACEFLMQAFGLQLNMELQLAHQLSEKHILRTQTLLCDMLLRDSPTGIVTQSPSIMDLVKCDGAALYYHGKCYPLGITPTEAQIKDIIEWLTVCHGETTGLSTDSLADAGYPGATALGDAVCGMTVAYITPSDYLFWFRSHTAKEIKWGGAKHHPEDRDDGQRMHPRSSFKAFLEVVKSRSLPWENAEMDAIH

SEQ ID NO: 14394 - protein, 394 aa, Pharus lappulaceus
EPARTEDPALSIAGAVQSQKLAVRAISRLQALPGGDVKLLCDTAVEHVRELTGYDRVMVYRFHDDKHGEVVAESRRDDLEPYLGLHYPETDIPQASRFLFRQNRVRMIADCHAAPVRVIQDPALPQPLCLVGSTLRAPHGCHAQYMANMGSIASLVMAVIISSGGDDEHNVARGAISSAMKLWGLVVCHHTSPRCIPFPLRYACEFLMQAFGLQLNMELQLAHQLSEKHILRTQTLLCDMLLRDSPTGIVTQSPSIMDLVKCDGAALYYHGKYYPLGVTPTEAQIKDIIEWLTLCHGDSTGLSTDSLADAGYPGAAALGDAVCGMAVAYITPSDYLFWFRSHTAKEIKWGGAKHHPEDKDDGQRMHPRSSFKAFLEVVKSRSLPWENAEMDAIH

SEQ ID NO: 14395 - protein, 179 aa, Mortierella sp. strain M10
HRLWSHRSYNAGPAMSFVLALLGAGAVEGSIKWWSRGHRAHHRWTDTEKDPYSAHRGLFFSHLGWMLIKRPGWKIGHADVDDLNKNKLVQWQHKNYLALIFLMGVVFPTAVAGLGWGDWRGGYFYAAILRLVFVHHATFCVNSLAHWLGEGPFDDRHSPRDHFITAFMTLGEVYHNFHH

SEQ ID NO: 14396 - protein, 388 aa, Phragmites australis
EDPALSIAGAVQSQKLAVRAISRLQALPGGDVKLLCDTVVEHVRELTGYDRVMVYRFHEDEHGEVVAESRRADLETYLGLHYPATDIPQASRFLFRQNRVRMIADCHATPVRVIQDPGLPQPLCLVGSTLRAPHGCHAQYMANMGSIASLVMAVIISSGGDDEQTARGSISSTMKLWGLVVCHHTSPRFIPFPLRYACEFLMQAFGLQLNMELQLAHQLSEKHILRTQTLLCDMLLRDSPTGIVTQSPSIIDLLKCDGAALYYHGKYYPLGVTPTEFQIKDIIEWWTVCHGDSTGLSTDSVADAGYLGASALGDAVCGMAVAYITSSDYLFWFRSHTAKEIKWGGAKHHPEDKDDGQRMHPRSSFKAFLEVVKSRSLPWENAEMDAIH

SEQ ID NO: 14397 - protein, 394 aa, Pseudosasa japonica
EPARTEDPALSIAGAVQSQKLAVRAISRLQALPGGDVKLLCDTVVEHVRELTGYDRVMVYRFHDDEHGEVVAESRRADLEPYLGLHYPATDIPQASRFLFGQNRVRMIADCRAAPVGVIQDPVLPQPLCLVGSTLRAPHGCHAQYMANMGSIASLVMAVIISSGGDDENNITRGGIPSAMKLWGLVVCHHTSPRCIPFPLRYACEFLMQAFGLQLNMELQLAHQLSEKHILRTQTLLCDMLLRDSPTGMVTQSPSIMDLVKCDGAALYYHGKYFLLDVTPTEAQIKDIIEWLTMCHGDSTGLSTDSLADAGYPGAAALGDAVYGMAVAYITPTDYLFWFRSHTAKEIKWGGAKHHPDDKDDGQRMHPRSSFKAFLEVVKSRSLPWENAEMDAIH

SEQ ID NO: 14398 - protein, 349 aa, Thermoproteus tenax
MAQIYTGPKTVYISIRGREIQRKKLVRAAQRLLRESEANGLLSRYNIVERFQRKNLILRSAIFVGVRVAVIPVGGEAVRLRPLTVETSKAMVRILNRPLMELTVVGLARQGVEEVIMGVRGYYNYKDIYDYFGEGHWIEKEYGVRVRLRYMPRAETRGNAEAVKISLEYYGIREPVLVVQGDNLFEIDLADFYRYYRSKKAFMAIALKEEERLEEFGVAAVDEDMRILKFVEKPKRREDAPSKLVNTGLYLLSEDFLSFFEGEVGSKLLREGKMDFGSNVIPAAIEAGLPVYGYHTKGYWFDVGTPERYLAAAQYLLAKLSPADLSSEEVLPKVYIQGTSPESLAFKRS

SEQ ID NO: 14399 - protein, 492 aa, Leptolyngbya boryana
MGKPTGFIEYLRELPSELAPLDRIRNWDEFHLSMPEENLRTQGARCMDCGIPFCHTGTLISGMASGCPINNLIPEWNDLIYRGLWKEALDRLHKTNNFPEFTGRVCPAPCEGSCVLGIHNPPVTIKNIEYSIAEKGWNEGWIKPEPPAKRTGKKIAIVGSGPAGLSAAAQLNKVGHWVTVFERADRPGGLLMYGIPNMKLDKQEVVMRRLNILEAEGVKFVCNTEIGKDLPAEDLLRDFDAVVLCTGATKPRDLPIEGRQLKGIHFAMDFLTANTQAVLDQTEPAITAQGKDVVIIGGGDTGTDCVGTSIRHGCNGLVQLEILPQPPEERAPNNPWPEYPKVYKMDYGQEEAAAKFGGDPRAYLRTATHFEGDEQGNVKAVHTVEVQWERNEQGQFIPKQIPGTEKIIPAQLVLLAMGFLGPEQPLLDAMGLDRDARSNIKSEYGRYTTSIPKVFAAGDCRRGQSLVVWAFNEGRGAARECDLYLMGETNLP

SEQ ID NO: 14400 - protein, 372 aa, Corynebacterium efficiens YS-314
MSSSEKNGSLDASAGASVDVDAVILVGGKGTRLRPLTNNTPKPMLPTAGHPFLKHLLARIKAAGITHVVLGTSFKAEVFEDYFGDGSDLGLEIEYVVEDQPLGTGGGIRNVYDKLRHDTAVVFNGDVLSGADLGDILATHREKEADLTMHLVRVANPRAFGCVPTDADGRVLEFLEKTEDPPTDQINAGCYVFQRELIASIPADRVVSVERETFPQLLQEGRRVYGHVDTSYWRDMGTPQDFVRGSSDLVRGIAFSPLLEGQTGEELVDPSAGVRDGVILLGGTVVGRGTEIGAGCRLDGTVVFDGVTIEPGAFIENSIISSGVRIGANAHISGCVIGEGAQIGARCELSSGMRVFPGVVIPDGGIRFSSDQ

SEQ ID NO: 14401 - protein, 183 aa, Rhizobium etli
EVQKQAARCMDCGIPYCHGPTGCPVHNQIPDWNDLVYNNNWEAAIQNLHSTNNFPEFTGRVCPAPCQEACTLNLEDAPVAIKTVEQAIADKAYELGFIRPQPATVHTGKKVAVIGSGPAGMAAAQQLGRAGHEVHVYERETKPGGLLRYGIPDFKMEKNFIDRRVEQMKGEGVTFHCGVNVGV

SEQ ID NO: 14402 - protein, 214 aa, Paeonia rockii
IVESVGEGVTDLKPGDHVLPVFTGECKECRHCKSEESNMCDLLRINTDRGVMLNDGKSRFSINGQPIFHFVGTSTFSEYTVVHVGCVAKINPEAPLDKVCVLSCGISTGLGATLNVAKPKKGSSVAIFGLGAVGLAAAEGARIAGASRIIGVDLNPKRFEEAKKFGVTEFVNPKDYNKPVQEVIAEMTGGGVDRSVECTGSIMAMMSAFECVHD

SEQ ID NO: 14403 - protein, 217 aa, Solanum demissum
MSTKGRKFAVKGETVASHYAFGPLEDDIIIKHRLLTRTTTTRGEPPLKKLQKKFTTFALEIEKEADNYNDCERLAKAFLQELNTFEIPLLKSKVVIDANVREKENFNDLKGEINKQIVQAQADIEDLKRQLEESKVERKHKEEGEAIRKLIAMQPPRSETQKVITELEKEIAMLEAENTASSRTLDLRKKQFALLLHVVYHNRGRAKEFGRRDEECS

SEQ ID NO: 14404 - protein, 593 aa, Neisseria meningitidis
MALVELKVPDIGGHENVDIIAVEVNVGDTIAVDDTLITLETDKATMDIPAEVAGVVKEVKVKVGDKISEGGLIVVVEAEGAATAPKAEAPATPAQEAPKAAAPAPQAAQFGGSADAEYDVVLGGGPGGYSAAFAAADEGLKVAIVERYKTLGGVCLNVGCIPSKALLHNAAVIDEVRHLAANGIKYPEPELDIDMLRAYKNGVVSRLTGGLAGMAKRRKVDVIQGDGQFLDPHHLEVSLTAGDAYEQAAPTGEKKIVAFKNCIIAAGSRVTKLPFIPEDPRIIDSSGALALKEVPGKLLIIGAGIIGLEMGTVYSTLGSRLDVVEMMDGLMQGADRDLVKVWQKQNEYRFDNIMVNTKTVAVEPKEDGVYVTFEGANAPKEPQRYDAVLVAAGRAPNGKLISAEKAGVAVTDRGFIEVDKQMRTNVPHIYAIVDIVGQPMLAHKAVHEGHVAAENCAGHKAYFDARVIPGVAYTSPEVAWVGETELSAKASGRKITKANFPWAASGRAIANGCDNGFTKLIFDAETGRIIGGGIVGPNGGDMIGEVCLAIEMGCDAADIGKTIHPHPTLGESIGMAAEVALGTCTDLPPQKKK

SEQ ID NO: 14405 - protein, 423 aa, Zea mays
  unsure (1)..(423): unsure at all Xaa locations
MSSCVAPRVLIVSRRTVRKNKFVDFVGEYHLDLIVGYGAVPVIVPRVAGVDALLDSFEPIHGVLLCEGEDVDPSLYESADDADGSLSPEQLEAMRRLHPSDVAIDREKDSIELRLARRCLERNIPYLGICRGSQVLNVACGGSLYQDLEHELVRPAAQVQHINYGDYDGHRHPVRVLSGTPLHEWFARDLADGAQLMVNSYHHQGVRRLAQRFVPMXAIAPDGLVEGFYDPDTYNPGEGRFIVGLQFHPERMRKPGSDEFDYPGCARAYQEFVRAVVAYQEKTAAPPHLPLSAPLPASPKLSKEMMRRRKVIPRSFSLAMDMYLSDSHTKPAEKRDHEAGAEFLESNTASVSAWQEKRLKQMGATARNASGYLNGVKVNGVREAAARALMAEMSVNQLSDLATFYQTMGKICSEVLDTKLQAC

SEQ ID NO: 14406 - protein, 321 aa, Thermoanaerobacter tengcongensis
MKTIGILTSGGDAPGMNAAIRAVVRTGIYYGLKVKGIMRGFAGLVEDEVIDLGLSSVGDIIQKGGTILRTARCEEFKQKEVRKKAYETLQKHGIEGLVVIGGDGSFRGAQLLSEEWNVNTICIPGTIDNDIPCTDYTIGFDTACNTVIDAINKIRDTATSHERANIIEVMGRNSGYIALYAGVAGGAEMIILPEVEWSIDELCDKITYGIKRGKLHHIIVLAEGVMSAPELAKMIKERLPKLDLRYTILGHIQRGGAPTVMDRVLASQMGARAVELLLENKTKRVISIRNNQIVDDDIDEALSMKKEFNRKLYELSKILSI

SEQ ID NO: 14407 - protein, 219 aa, Lilium longiflorum
VEQFSPVPYLATLLNCMLWVVYGLPLVHPHSTLVLTINGLGLIIELTYVLLFLLYSNGRARIRVLAMLLTEIVFVGLITVIVLSTAHTLVTRSLIIGVLCVFFGTMMYAAPLSVMKLVIQTKSVEYMPLFLSVASFLNGICWTTYALIRFDLFITIPNALGTMFAVAQLILHAMYYKSTKIQMEAQKRKLEMGFEEVMAPVENTEKIRGASQTGKYPPV

SEQ ID NO: 14408 - protein, 500 aa, Zea mays
RVGFLVLCAIVCLMARMGDANVVLMGNNLTLSFADIEASFSPGVKGSGVNGIVYASEPLNACSPLTIKAVKGPPSPFALIVRGGCTFDEKVKNAQDAGFKAAIVYDNENSGVLVSMAGSSSGIHIYAVFVSKASGEVLKKSSGHTDVEVWILPTFDNSAWSIMAISFISLLAMSAVLATCFFVRRHRIRRDHPRIPEAREFHGMSSQLVKAMPSLIFTKVQEDNCTSSMCAICLEDYSVGEKLRVLPCRHKFHAACVDLWLTSWRTFCPVCKRDATSGVSELPATEATPLLSSAVRLPSQPSSFRSSVAASPPRPISRHPSSHSVSRAYSVSSTPHSPNPFRSHTNLPGVIHASRSTTDLANMSSPHPRISHLSSSTHSLVGSHLSPPISIRYPLPHSRHESPSPHVSSPYISNSGYGSSSYYYLGGSSQHGSYLRRCGESGPSLSTMVPRSSQQQFQSEANVAAGASSAQSSRQSYLRRCGDSDASLSDMASAQSLPGC

SEQ ID NO: 14409 - protein, 375 aa, Shigella flexneri 2a str. 2457T
MLNTGHLHPKVVAAVEAQLKKLSHTCFQVLAYEPYLELCEIMNQKVPGDFAKKTLLVTTGSEAVENAVKIARAATKRSGTIAFSGEYHGRTHYTLALTGKVNPYSAGMGLMPGHVYRALYPCPLHGISEDDAIASIHRIFKNDAAPEDIAAIMIEPVQGEGGFYAASPAFMQRLRALCDEHGIMLIADEVQSGAGRTGTLFAMEQMGVAPDLTTFAKSIAGGFPLAGVTGRAEVMDAVAPGGLGGTYAGNPIACVAALEVLKVFEQENLLQKANDLGQKLKDGLLAIAEKHPEIGDVRGLGSMIAIELFEDGDHSKPDAKLTAEIVARARDKGLILLSCGPYYNVLRILVPLTIEDAQIRQGLEIIGQCFDEAKQ

SEQ ID NO: 14410 - protein, 749 aa, Mycobacterium tuberculosis CDC1551
  unsure (1)..(749): unsure at all Xaa locations
MMTSSDWLPTACILCECNCGIVVQVDDRRLARIRGDKAHPGSAGYTCNKALRLDHYQNNRARLSSPMRRRADGTYEEIDWDTAIVEIAEGFKQIRDTHGGDKIFYYGGGGQGNHLVGAYSGAFLKALGSRYRSNALAQEKTGEAWVDFQLYGGHTRGEFENAEVSVFVGKNPWMSQSFPRARVVLNEIAKDPGRSMIVIDPVVTDTAKMADFHLRVQPGCDAWCLAALAAVLVQENLCNEAFLAAHVHGVDTVRAALQEVPVADYAQRCGVDEELLRAAARRIGTAASVSVFEDLGIQQAPNSTVCSYLNKLLWILTGNFAKKGGQHLHSSFAPLFSQVSGRTPVTGAPIIAGLIPGNVVPEEILTEHPDRFRAMIVERGNPAHSLADSAACRAAFQALELMVVVDVAMTETARLAHYVLPAASQFEKPEATFFNFEFPRNGFQLRRPLFPPLPGTLPEPEIWARLVRALGVVDEADLRPLREAAAQGRQAYTEAFLAAAATNPTVAKLTAYVLYETLGPTLPDGLAGAAALWGLAQKTAMAYPDAVRRAGHADGNALFDAILERPSGVTFTVHNYEDDFALISHPDHKIALEIPEMLAEIRSLTQTPSRLTTPQLPIVLSVGERRAYTANDIFRDPSWRKRDANGALRVSVEDAQALGLADGCLARITTAAGSAEATVEVTETMLAGHAALPNGFGLDXTGDDGRTVVAGVAPNALTSTRWRDPYAGTPWHKHVPAAIRRADAESPIW

SEQ ID NO: 14411 - protein, 483 aa, Schizosaccharomyces pombe
MLSANMLRRMHHGVAVTRMLLVSNGKVQVKKSALYPVMAKLARTYATKNYPAHTVINMPALSPTMTTGNIGAFQKKIGDKIEPGDVLCEIETDKAQIDFEQQDEGYLAKILIETGTKDVPVGKPLAVTVENEGDVAAMADFTIEDSSAKEPSAKSGEEKSAPSSEKQSKETSSPSNVSGEERGDRVFASPLARKLAEEKDLDLSQIRGSGPNGRIIKVDIENFKPVVAPKPSNEAAAKATTPAASAADAAAPGDYEDLPLSNMRKIIASRLAESKNMNPHYYVTVSVNMEKIIRLRAALNAMADGRYKLSVNDLVIKATTAALRQVPEVNAAWMGDFIRQYKNVDISMAVATPSGLITPVIRNTHALGLAEISTLAKDYGQRARNNKLKPEEYQGGTFTISNLGMFPVDQFTAIINPPQACILAVGTTVDTVVPDSTSEKGFKVAPIMKCTLSSDHRVVDGAMAARFTTALKKILENPLEIML

SEQ ID NO: 14412 - protein, 184 aa, Yersinia pestis biovar Medievalis str. 91001
MSHPIYAISVQTIDHQLVKLAKYKGSVLLVVNVASQCGLTQQYEGLESLYKTYQKQGFEVLGFPSNEFAGQEPGSDEEIHAFCRGTFGVDFPMFSKIEVNGPHRHPLYQHLVTAKPVAVKPEGSEFYQRLASKGREPKQPGDILWNFEKFLISRDGTVLARFAPDMAPEAPILINAINQALASH

SEQ ID NO: 14413 - protein, 560 aa, Zea mays
  unsure (1)..(560): unsure at all Xaa locations
MGSSGFSWTLPDHPKLPKGKPVAVVVLDGWGEANPDQYNCIHVAQTPVMDSLKNXGAPEKWRLVKAHGTAVGLPSDDDMGNSEVGHNALGAGRIFAQGAKLVDQALASGKIYDGDGFNYIKESFESGTLHLIGLLSDGGVHSRLDQLQLLLKGVSERGAKKIRVHILTDGRDVLDGSSIGFVETLENDLLELRAKGVDAQIASGGGRMYVTMDRYENDWDVVKRGWDAQVLGEAPYKFKSALEAVKTLRAQPKANDQYLPPFVIVDDSGNAVGPVLDGDAVVTINFRADRMVMLAKALEYADFDNFDRVRVPKIRYAGMLQYDGELKLPSRYLVSPPEIDRTSGEYLVKNGIRTFACSETVKFGHVTFFWNGNRSGYFDATKEEYVEVPSDSGITFNVAPNMKALEIAEKARDALLSGKFDQVRVNLPNGDMVGHTGDIEATVVACKAADEAVKIILDAVEQVGGIYLVTADHGNAEDMVKRNKSGKPLLDKNDRIQILTSHTLQPVPVAIGGPGLHPGVKFRNDIQTPGLANVAATVMNLHGFEAPADYEQTLIEVADN

SEQ ID NO: 14414 - protein, 476 aa, Glycine max
  unsure (1)..(476): unsure at all Xaa locations
MAAMQRPLKRTIAIAKLRACFSSLRPAAAADIVASPPPQLPPFDHQPHPYNGPFADEVLAKRKTFLGPSVFHYYKKPLNIVEGKMQYLYDDSGRRYLDAFAGIVTVSCGHCHPEILNAITEQSKLLQHATTIYLHHTIGDFAESLAAXKMPGNLKVVYFVNSGSEANELAMMMARLYTGSLGMISLRNAYHGGSSSTLGLTALNTWKYPIPEGHVHHVMNPDPYRGAFGADAASYANDVQDHIDYGTSGKVAGFIAETMQGVGGAVELAPGYLKLVYDIIHKAGGVCIADEVQTGFGRTGSHYWGFETQGVIPDIVTMAKGIGNGLPLGAVVTTPEIASVLAQKIQFNTFGGNPVCSAGGLAVLRVLDKEKRQAHCADVGSHLLERLRFLMERHDIIGNVRGRGLMVGIELVTDRDNKTPAKAETAVVFEKLRELGVLVGKGGLHGNVFRIKPPMCFSKDDADFLVDALDYSLSKL

SEQ ID NO: 14415 - protein, 381 aa, Oryza sativa
  unsure (1)..(381): unsure at all Xaa locations
MAAASSPAAAITCRAAVAWAPGQALVMEEVEVAPXVAMVFRVMVVSTSICRSVVTQWLSTAHTDLFPXIFGHDASGVVESVGEGVTEFEVGDHVLTVFIGECMSCKHCVSGKSNMCQKLGLERRGVMHSDQKTRFSLRGKPVYHYCAVSSFSEYTVVHSGCAVKVGPTVPMDRICLLSCGVSAGLGAAWKVADISKGSSVVIFGLGTVGLSVAQGAKLRGASIIIGVVTFPEKQEKGKAFGVTDFINPEELNEPVQQVVKRLTNGGADYSFECVGDTGVVSTALQSCSDGWGLTVTLGVPKAKPEVSAHYALLLSGRTLKGSLFGGWRPKSDLPLLVDKYANKEIQVDDLVTHDLSFDYINKALELMLENKCLRCVIHMPQ

SEQ ID NO: 14416 - protein, 297 aa, Glycine max
  unsure (1)..(297): unsure at all Xaa locations
MVEQSVLALEKQQGSNPVLSEGIHDWVFECHGFLHNAGLIIASFLFLLYLALQAKKXFLKLSHGRSYIIISYYASLWLVSILNLLWCFSQAWECSPGKEFAWNLLSLXTTSGMLFLEVSLLAFLLQGNSTTGLEGVDTKLXYIKGLLVGFDILLKDQYICLHLGFPIFINSDYPTPHVKWNLWVAHELLLTLVYGFILFMYHSRWRERLPARPAYYKYVTIMLILNAIALFACGITGNGTAFGFWLYHFTVVCYHAAYLPLLYITFLADFFQEEDLHLENVYYSEMKDAGFFEADWN

SEQ ID NO: 14417 - protein, 502 aa, Paracoccidioides brasiliensis
MGADVASSTYRYTETPTYTTSNGCPVMDPESSQRVGMKGPLLLQDFHLIDLAHFDRERIPERVVHAKGAGAYGEFEVLDDISDITVIDMLLGVGKKTKCITRFSTVGGEKGSADSARDPRGFSTKFYTEQGNWDWVFNNTPVFFLRDPSKFPIFIHTQKRNPQNNLKDATMFWDYLSTHQESANRSCMHLFSDRGTPILPTGTCNGILGHHITQWTKPDGTFNYVQIHCKTDQGNKTFNNEEATKMAADNPDWHTEDLFKAIERGEYPSWTCTFRSSAPSRLEIRWNVFDLTKVWPQAEVPLRRFGRFTLCENPQNYFAEIEQAAFSPSHMVPGVEPSADPVLQSRLFSYPDTHRHRLGVNYQQIPVNCPLRAFNPYQRDGAMAINGNYGANPNYPSTFRPMEFKPVKACQEHEQWAGAALSKQIPVTDEDFVQPNGLWQVLGRQPGQQENFVHNVSVHLCGAQEKVRKATYCMFSRINADLGARIEKATERLVASQPQSHL

SEQ ID NO: 14418 - protein, 387 aa, Coxiella burnetii RSA 493
MTANNNKKSHIDTRVIHAGQKPDPLTGAVMTPIYTASTYAQKSPGVHQGYEYSRSQNPTRFAYERCVADLESGQHGFAFASGMAATATILELLQPGDHVVVMDDVYGGSYRLFENVRKRSAGLSFSFVDFTDENKVREAVTAKTKMLWVESPSNPRLKIVDLAKIAEIAKEKNIIAVADNTFATPIIQRPLELGFDIVTHSATKYLNGHSDIIGGVAVVGDNKTLAEQLKYLQNAIGAIAAPFDSFMVLRGLKTLAIRMERHCENAMQLAQWLEKHPKVKRVYYPGLPSHPQHSIAKKQMRYFGGMISVELKCDLNETKKVLERCQLFTLAESLGGVESLIEHPAIMTHASIPQAERQKLGITDGFIRLSVGIEAITDLRHDLEAAL

SEQ ID NO: 14419 - protein, 359 aa, Oryza sativa
MDKHTCKLCFRRFHNGRALGGHMRSHVMAAAAAAAYCPSSPAMSLASTSSTEIEMDEKKEMTKKTEQEKTLTSYVLRENPKRSYKVSAGEFSGGGGGGGGRGKSSVVQDGESDTESSPPRGGAGSFFAVSRRRSKRARRRRRAPDPEPASSVSDATTEEDVAMSLLMLSRDSWTRSRSEHETHHRGASSEAEQNNNNVVNVFDEEDEDARDVAGEDHDEELSYGGGEAAAARHRTSRFQCGACRKVFRSYQALGGHRASLKRGKGGGCVPPPRPAPASSAAAPAIHECPFCFRVFDSGQALGGHKRAHMPSGGARPSPSPSPAKCGESSGSIDLNMPATMEDDFELSAVYDAEFASTRQ

SEQ ID NO: 14420 - protein, 356 aa, Citrullus lanatus
MQPIPDVNQRIARISAHLHPPKSQMEESSALRRANCRAKGGAPGFKVAILGAAGGIGQPLAMLMKMNPLVSVLHLYDVVNAPGVTADISHMDTGAVVRGFLGQQQLEAALTGMDLIIVPAGVPRKPGMTRDDLFKINAGIVKTLCEGIAKCCPRAIVNLISNPVNSTVPIAAEVFKKAGTYDPKRLLGVTMLDVVRANTFVAEVLGLDPRDVDVPVVGGHAGVTILPLLSQVKPPSSFTQEEISYLTDRIQNGGTEVVEAKAGAGSATLSMAYAAVKFADACLRGLRGDAGVIECAFVSSQVTELPFFASKVRLGRNGIEEVYSLGPLNEYERIGLEKAKKELAGSIEKGVSFIRS

SEQ ID NO: 14421 - protein, 427 aa, Triticum aestivum
  unsure (1)..(427): unsure at all Xaa locations
MTTVASLSLVPHLLIKPSLRCLSRKGVGRYGGIKVYAVLRDDSADYLKDNHHWEALFHVDGPGPRVPIEKGQYLEAKQALDVVRFDIQYCDWRARQDLLTIMVLHNKVVEVLNPLARDFKSVGNLRKDLDGLQEELAKAHYQLYLSESTVSSALAQMETVVNERLLSDGSAFANTADCASLDPSTSLDTTPRPSSTVRLGPKNPERRSLIMAGPLTPHRAILYRGWFPAACSTGLQDGSRVPIDSGGEQSVRFRXKTXRPGCVQNTCAHRACPLDLGSVNEGRITCPYHGWEYSTDGKCEKMPSTKMLNVRIRALPCFEQEGMVWIWPGDDTPTPTIPSLLPPSGFTIHAEIVMELPVEHGLLLDNLLDLAHAPFTHTSTFAKGWSVPSFVKFLTPTSGLQGYWXPYPIDNGVTDPPXHWFLSNHLG

SEQ ID NO: 14422 - protein, 270 aa, Populus tremula x Populus tremuloides
MGRSPCCEKAHTNKGAWTKEEDDRLVAYIRAHGEGCWRSLPKAAGLLRCGKSCRLRWINYLRPDLKRGNFTEAEDELIIKLHSLLGNSRWSLIAGRLPGRTDNEIKNYWNTHIRRKLLNRGIDPATHRPLNEPVQEATTTISFTTTTTSVEEESRGSIIKEEIKEKLISATAFVCTEAKTQVQERCPDLNLELGISLPSQNQPDHHQPFKTGGSRSLCFACSLGLQNSKDCSCNVIVSTVGSSGSTSTKNGYDFLGMKSGVLDYRSLEMK

SEQ ID NO: 14423 - protein, 234 aa, Triticum aestivum
MCPPRSDHRKEKSLGLLTQNFVKLFLTMEVETVSLDEAARLLLGERHAESNMRTKVRRLYDIANVLSSLNLIEKTQQVDSRKPAFRWLGQAKRKEGATVTVALPPSRKIMSSKRAFGTDITNIDNKRGKLVLETENKPKLMQGGSSMLKTFESQLGQGKSSGFVYGPFHPAGARKHEVDDQTVRENEMKNIQDWENLAVSFRPQYQNHALNDLFGHYVEAWKSWYLDLTRESTS

SEQ ID NO: 14424 - protein, 428 aa, Panicum miliaceum
MAALSRAASCLTRRPQMQPSRLQAARAMASSLFGHVEPAPKDPILGVTEAYLADPSPDKVNVGVGAYRDDNGKPLVLDCVREAERRIAGNLNMEYLPMGGSVKMIEESLKLAYGEDSELIKDKRIAAVQALSGTGACRLFADFQKRFLPDSQIYIPTPTWSNHHNIWRDAQVPQKAYTYYHPESRGLDFAGLMNDIKNAPDGSFFMLHACAHNPTGVDPTEEQWREISHQFKVKKHFPFFDMAYQGFASGDPERDAKAIRIFLEDGHQIGCAQSYAKNMGLYGQRVGCLSILCEDEMQAVAVKSQLQQIARPMYSNPPVHGALVVSIILNDPELKSLWLKEVKGMADRIIGMRTALKENLEKLGSSLSWEHITNQIGMFCYSGMTPEQVDRLTNEFHIYMTRNGRISMAGVTTRNVGYLANAIHEVTK

SEQ ID NO: 14425 - protein, 409 aa, Panicum miliaceum
MASQVASVFAGIAQAPEDPILGVTVAFNKDPSPVKINLGVGAYRTEEGKPLVLNVVRRAEQMLINDPSRVKEYLPITGLAEYNKLSAKLIFGADSPAIQENRVATVQCLSGTGSLRVGGEFLAKHYHERTIYIPVPTWGNHPKVFTLAGLTVRSYRYYDPATRGLDFNGLLEDLSSAPLGSIVLLHACAHNPTGVDPTIDQWEQIRQLMRSKSLLPFFDSAYQGFASGSLDKDAQPVRMFIADGGELLMAQSYAKNMGMYGERVGALSIVCGSADVAARVESQLKLVIRPMYSSPPLHGPSVVATILKDSEMFHEWTVELKAMADRIISMRQQLFDALKSRGTPGDWSHIIKQIGMFTFTGLNSEQVAFMRQEYHIYMTSDGRISMAGLNMKNVPHLADAIHAAVTQLK

SEQ ID NO: 14426 - protein, 402 aa, SYNECHOCOCCUS SP. WH 8102
MAKRSLASLNAGDLSGKRVLVRVDFNVPLNEAGAITDDTRIRAALPTINDLIGKGAKVILSAHFGRPKGQVNDAMRLTPVAARLSELLGKPVAKTDSCIGPDAEAKVNAMADGDVVLLENVRFFAEEEKNDAGFAEKLAGLAEVYVNDAFGAAHRAHASTEGVTKFLKPAVAGFLMEKELQYLQGAVDEPKRPLAAIVGGSKVSSKIGVLEALIDKCDKVLIGGGMIFTFYKARGLSVGKSLVEEDKLELAKELEAKAKAKGVELLLPTDVVLADNFAPDANSQVADVTAIPDGWMGLDIGPDAVKVFQDALGDCQTVIWNGPMGVFEFEKFATGTNAIATTLAELSGKGCCTIIGGGDSVAAVEKAGLADKMSHISTGGGASLELLEGKVLPGVAALNDAA

SEQ ID NO: 14427 - protein, 517 aa, Ralstonia metallidurans CH34
MKIRAQVAMVLNLDKCIGCHTCSVTCKNVWTSREGVEYAWFNNVETKPGVGFPKEWENQDKWQGGWKRNADGSLTPRQGGKTKILANIFANPNLPQIDDYYEPFTFDYEHLQNAPLMQTPPTARPVSAITGKKMEKIEWGPNWEDDLGGEFDQRSRDKLFEDIQKDMYSTFENTFMMYLPRLCEHCLNPTCVASCPSGSVYKREEDGIVLVDQDKCRGWRMCVSGCPYKKIYFNWQTGKAEKCVFCYPRIEAGQPTVCSETCVGRIRYLGVMLYDADRIEQAASVADERDLYQSQLDVFLDPHDPKIQAEALRQGIPQSWLDAAVKSPVYKMACEWKVAFPLHPEYRTLPMVWYIPPLSPIQSAAESGFMGMNGVIPDVKSLRIPVKYLANLLTAGDVNPVLSALERMLAMRAYKRSESVDGLQDLAVLEQVGLTPAQVEDMYQIMAIANYEDRFVVPSSHKEMAEDSFDEKGSCGFSFGNGCSGGTSDGSLFGTKKPKPEVSYADLPRSRRKAITG

SEQ ID NO: 14428 - protein, 439 aa, Thermoproteus tenax
MSDYLEKIKAQIPNIQPFAGKYAEPVEGSYITYTGPGQLKVPDKVVIGYIEGDGTGPEVAYAAIKVANAAVERAYGKSRRVLWYEVLVGSKAEKILGSRLPDQSVEVLKKIRVFLKAPLETPVGGGFRSLNVTLRQIFDLYANIRPVKYFPGLPSPLKRPESVDLVIFRENTEDVYMGIEWPWNSPEAAKVREFLRRELKVDIRDDAGIGIKPISKFGTQRIARLALKFAVENKRRVVTIMHKGNIQKYTEGAFRDWAYEVAKNEFRDHVVLEEELAQYGGKVPPGKILVNDRIADNMLQQLLTRTGEYDVILAPNLNGDYVSDEAAGLVGGLGVAPGIDVGDWGMMAEPVHGTAPKYTGKNYVNPTATILALELLFRFIGWREAADLITRGVSKAYSEGYFTGDLARQMTDEERKVVKEVLGTQEFAEKVAEIIKTEL

SEQ ID NO: 14429 - protein, 197 aa, Zea mays
MELDADNLSATELRLGLPGTSSSSRSDDWQKKPSPSVGAKRVLDDGTKSEASGTSTAAGDLDFDHDTAAPPKAQVVGWPPVRAYRKNTFQAAAAKKVEQKQQQGGLYVKVSMDGAPYLRKVDLRMYKGYRELREALDALFTNSFSAAAAEGGGDHQHAIAYEDKDGDLMLAGDVPWDMFISSCKKLRIMKGSASEAR

SEQ ID NO: 14430 - protein, 317 aa, Pichia guilliermondii
MSIKLNSGYDMPSVGFGCWKVDNATCADTIYNAIKVGYRLFDGAEDYGNEKEVGDGINRALDEGLVARDELFVVSKLWNSFHDPKNVEKALDKTLSDLKVDYLDLFLIHFPIAFKFVPFEEKYPPGFYCGDGDKFHYEDVPLIDTWRALEKLVEKGKIRSIGISNFSGALIQDLLRSAKIKPAVLQIEHHPYLQQPRLVEYVQSQGIAITAYSSFGPQSFVELDHPRVKDVKPLFEHDVIKSVAGKVKKTPAQVLLRWATQRGLAVIPKSNNPDRLLSNLKVNDFDLSQEDFQEISKLDIELRFNNPWDWDKIPTFI

SEQ ID NO: 14431 - protein, 1471 aa, Ustilago maydis 521
MSRKSPQSPPGTEEGLGTPPLPSPPTDSQPFASQTRSSLDPALTQRPFSPLTLDELGLHPPATPSALLDIITPVNLAVHRDSVSTVQTSKEPLSRSLSNAVFESEASEYCRDKTHKQGTSPVNTQQPTADLNQSASTALATESQELFLTSFLQSLTEDGMMSESQSSMLAVTSSHASDTAAVPSVDSIKPQLGVTSFNGYSVQTEPMSKSVVPSVHLTKPPSLSNNTPAGNEESNLASETIAPHFPNKTQTTDFHRFFLAPATTIGGTAQVQTSSSLSSSVKHSSLTADVRLGINGSVAEHGSFSNKLQTQNTHKSWTSAASVGSGESFLTSTPLEGSKISTTAYDGVQTGNPAHLTPIRVGSAKFNPDWSPGLSNLGRFSLPQAPPLQPEHRYPISILETDANYETDLDTDRESDISPSGTNSFCVTPTSAVQVSATRKRKSLDPSQCDDHSGQSSKAHNTSPSFDWQIRPGDSASDRRNAFSLEGSKSPLKIVPLSNIVRSRSWSNASQSSTSTQGVTPWVVRSVKEVGPERHEHSLPSREESSPSSIDVAQPSTNQVDAKASPKPAAGPFTTLAARNENRGASYDFTRQALLELIRRTNLGMTNNTFSGRTADLPSDKNSSTSKENDFATGTASGSVSAPPVSSSSSVPADLQARLQSWQHHRKRQKLLSEPSNGTSRDRAAPQTSTSRTGSSDTSLPSSKTLLNELKVGENSWSDKVGSAEEQQQKMRRHEHYQRLLLQLNAQMQMKMRMDLQKQKEKETLDATQHQSVVNPRETPNKRPEFRKPSPPSKTIAANKSDSDGFNISNQRRDGPKALESVAVLVQKASQSGRSRHRKPQSNVSSMSVAKIEPPTVKSNERAARAMSVTNDILTSGSNIVLASPLSSTWPTNDDTTSSGLNSTPTSSSWLPESRTSYAPWGTIFANHATGYAATSSSGDLRAGQPAFCQPSWYSSFTGKPDDSVTSQATTTTDWTARSNIGVSDTSNSLSAVDLLMKHSNWRRDMNTGVTQYGSNFKMPHYTTSFSTSTAAVNARMTMGTSQGGADHAFQSSSVGAAAEHKKPFSIGAEVVFWAIKGEHSVKLVGKVESLTDNSATILVSPNDTGSSETNKSGSEISSTDQGSPDQPTRQNVYQDIPFANIISKDQAAMLGFLLGAGGLNTPSSSITFIHYPKLALSLDKNLDVLAPRSTNSIKFTDLLKAQYLDAEMDISTLHKSLVTAFSSADSKPDQVRSLLTKLKIGLTENNLLVPSSSSASSSAELVLAREVLEIGAFYSVRIGDIAAFDRYISLLTPFYDASLPASAHYEPLLGLRLLRLLSSNQISAFHTLIETLPNGLVNGSKFLQHPVSLERWLMEGSYSKVWRLSREAPPQDEYRFFVDLLMDMIRNEIASCEEKAYDSLALHDAATLLFFDNLEQVLGFAQSRGWQVNPKTQVVSFTALNANATSTTSIPKKATIANNLVFAKELESIV

SEQ ID NO: 14432 - protein, 334 aa, Nannochloris bacillaris
MLIYIKTPPIIIFLPYLIKNSYFLSLQVLEEDFAQDDGDGGPSTQEVALRASKLRKRPPVWQLIAKNIYMHRERKQLDEDEVMICQCKPIWGTDTTTIGCGENCLNRMLNIECVAKYCPCGERCTNRGFSKRAYAKLEIRRAGAKGFGLFAAEDVKAGQFIVEYVGEVLEEEEYARRKEFYIATGQRHYYFMNVGNGEVIDAARRGGLGRFINHSCEPNCETQKWVVRGELAIGLFALEDVPAGSVLTFDYNFERYGDKPMKCLCGSKACRGVIGGSQETAARMTETIVAPEEEEEQDLEPIMVTEKEADAAVSAILDRAVGLGWEDGFDARLQ

SEQ ID NO: 14433 - protein, 318 aa, Mortierella sp. strain M10
HRAHHRWTDTEKDPYSAHRGLFFSHIGWMLIKRPGWKIGHADVDDLNKNKLVQWQHKHYLPLVLFMGVIFPTIVAGLGWGDWRGGYFYAAILRLVFVHHATFCVNSLAHWLGEGPFDDRHSPRDHLITAFMTLGEVYHNFHHQFPQDYRNAISLLPVRPHQSGSSPSAPFFGLASHLKTFPENEVRKGQLQMIEKKVLEKKTKLQWGTPIADLPVLSFEDYQHACKNDGKKWILLEGVVYDVAEFMNEHPGGEKYIKMGVGKDMTAAFNGGMYDHSNAARNLLSLMRVAIVEFGGEVEAQKKNPSVPVYGDDHHSKSE

SEQ ID NO: 14434 - protein, 348 aa, Mycobacterium smegmatis
MSTVSAYAATSATEPLTKTTITRRAVGPHDVAFDIHFAGICHSDIHTVKAEWGVPNYPVVPGHEIAGVVTEVGSEVTKYKVGDRVGVGCFVDSCRECDNCKAGLEQYCTGTGMVGTYNAIDRDGTPTHGGYSGAIVVDENYVRIPDSLSLDAAAPLLCAGITTYSPLRHWNAGPGKKVAVIGLGGLGHVAVKLAKAMGADVTVLSQSLKKMEDGLRLGRSAYYATSDPETFDKLAGSFDLILNTVSANLDLGAYLGLLKLDGALVELGLPEHPMEVPAFPLLAQRRNLTGSMIGGIPETQEMLDFCAEHDVRPEIEIITPDYINEAYERVLASDVRYRFVIDTASLRS

SEQ ID NO: 14435 - protein, 464 aa, Arabidopsis thaliana
MSRLLQTPFLPSVSLPTKTRSSVTGFRVKPRIIPIQAKIREIFMPALSSTMTEGKIVSWVKSEGDKLNKGESVVVVESDKADMDVETFYDGYLAAIMVEEGGVAPVGSAIALLAETEDEIADAKAKASGGGGDSKAPPPASPPTATVVAPVAVEKKIAAPPVAIKAVAASAVHPASEGGKRIVASPYAKKLAKELNVELAGLVGSGPMGRIVAKDVEAVAAGGGVQAAVAVKEVVAVPGVELGSVVPFTTMQGAVSRNMVESLAVPTFRVGYTISTDALDALYKKIKSKGVTMTALLAKATALALAKHPVVNSSCRDGNSFVYNSSINVAVAVAIDGGLITPVLQNADKVDIYSLSRKWKELVDKARAKQLQPQEYNTGTFTLSNLGMFGVDRFDAILPPGTGAIMAVGASQPSVVATKDGRIGMKNQMQVNVTADHRVIYGADLAQFLQTLASIIEDPKDLTF

SEQ ID NO: 14436 - protein, 169 aa, Triticum aestivum
  unsure (1)..(169): unsure at all Xaa locations
MAPTVMASSATSVAPFQGLKSTAGLPVSRRSNGASLGSVSNGGRIRCMQVWPIEGIKKFETLSYLPPLSTEALLKQVDYLIRSKWVPCLEFSKVGFIFREHNASXPGYYDGRYWTMWKLPMFGCTXDATQVINXVEXVKKEYLTLFAYRIDTCSSCVTHRKHGLQDPQG

SEQ ID NO: 14437 - protein, 206 aa, GIBBERELLA ZEAE PH-1
MSKLFIGGLAWHTEEATLRQKFEEFGPVEEAVVVKDRDTGRSRGFGFVRYTQEGDAQNAIAAMNNVEYESLWFLVIQQRCYRIILRDLTMYRFDGRNIRVDKASDNGPRGGFGRGGGGGGGGGYGRNFGGPMPYGMGPPGPGYQMPAPNMYAPMPYGRGYPPQQGYGGPPQGYMPPQQQYGYHDPSQQIPPQQQQQQQHHQGGRGY

SEQ ID NO: 14438 - protein, 264 aa, Triticum aestivum
  unsure (1)..(264): unsure at all Xaa locations
MATKRSVGTLGEADLKGKKVFVLADLNVPLDDAQKITDDTRIRASIPTIKYLLEKGAKVILASHLGRPKGVTPKFSLKPLVARLSELLGLEVVMAPDCIGEEVEKLAAALPDGGVLLLENVRFYKEEEKNDPEFAKKLASVADLYVNDAFGTAHRAHASTEGVTKFXRPSVAGFLMQKELDYLVGAVQPKKXFAAIXGGSKXLNPXRIGVNXXLLXAKXDILNLXGGMIFTFXKARITWEPVGENTNSPRYRIAHTPRVPTTPR

SEQ ID NO: 14439 - protein, 318 aa, Ralstonia metallidurans CH34
MNELEQLRQFTTVVADTGDFQLMKQYKPQDATTNPSLIFKAVQKPEYRPLLEQAVRDHHGNSGLDGVMDQLLIAFGCEILAIVPGRVSTEVDARLSFDTEATVAKARHLIGLYEQRGVARERVLIKIASTWEGIRAAEVLQRENIRCNMTLLFSLAQAVACAEAGAQLISPFVGRILDWYKKQAGEKWDPVANGGENDPGVRSVRQIYDYYKKFGYATEVMGASFRGTDQILSLAGCDLLTISPELLEQLAGGQSAVALKLSVEQAQAGNVARIAADEPAFRWQLNEDAMATEKLSEGIRLFAADAVKLEKLVGELAS

SEQ ID NO: 14440 - protein, 388 aa, Staphylococcus aureus
  unsure (1)..(388): unsure at all Xaa locations
MTIGIDKINFYVPKYYVDMAKLAEARQVDPNKFLIGIGQTEMAVSPVNQDIVSMGANAAKDIITDEDKKKIGMVIVATESAVDAAKAAAVQIHNLLGIQPFARCFEMKEAXYAATPAIQLAKDYLATRPNEKVLVIATDTARYGLNSGGEPTQGAGAVAMVIAHNPSILALNEDAVAYTEDVYDFWRPTGHKYPLVDGALSKDAYIRSFQQSWNEYAKRQGKSLADFASLCFHVPFTKMGKKALESIIDNADETTQERLRSGYEDAVDYNRYVGNIYTGSLYLSLISLLENRDLQAGETIGLFSYGSGSVVEFYSATLVEGYKDHLDQAAHKALLNNRTEVSVDAYETFFKRFDDVEFDEEQDAVHEDRHIFYLSNIENNVREYHRPE

SEQ ID NO: 14441 - protein, 495 aa, Escherichia coli
SYYHHHHHHLESTSLYKKAGLMQHKLLINGELVSGEGEKQPVYNPATGDVLLEIAEASAEQVDAAVRAADAAFAEWGQTTPKVRAECLLKLADVIEENGQVFAELESRNCGKPLHSAFNDEIPAIVDVFRFFAGAARCLNGLAAGEYLEGHTSMIRRDPLGVVASIAPWNYPLMMAAWKLAPALAAGNCVVLKPSEITPLTALKLAELAKDIFPAGVVNILFGRGKTVGDPLTGHPKVRMVSLTGSIATGEHIISHTASSIKRTHMELGGKAPVIVFDDADIEAVVEGVRTFGYYNAGQDCTAACRIYAQKGIYDTLVEKLGAAVATLKSGAPDDESTELGPLSSLAHLERVGKAVEEAKATGHIKVITGGEKRKGNGYYYAPTLLAGALQDDAIVQKEVFGPVVSVTPFDNEEQVVNWANDSQYGLASSVWTKDVGRAHRVSARLQYGCTWVNTHFMLVSEMPHGGQKLSGYGKDMSLYGLEDYTVVRHVMVKH

SEQ ID NO: 14442 - protein, 185 aa, Xylella fastidiosa 9a5c
MMSNFTISQILARADLLVDRPSIDVAIAHIADDIAQDYQGDVPLFVTIMHGGLPFAGQLALELGQRGQDIELDSLHATRYRGEQTGGALVWSHYPVSAMSGRRVILVDDILDEGHTLSEIRQWCLKQGATDVSLVVLMVKCHDRCIPNMRADYYGVEVPDRYVFGFGMDIAGQLRGIPAIYAMRQ

SEQ ID NO: 14443 - protein, 481 aa, Lycopersicon esculentum
MAAVNGVGLSWPSKLTKNQTPKWGFSPSHRRCNPSSSSSATIRMTASVDEKKKTFTLEKSEEAFSKAKELMPGGVNSPVRAFKSVGGQPIIIDSVKGSRMRDIDGNEYIDYVGSWGPAIIGHADDEVLAALAETMKKGTSFGAPCLLENTLAEMVISAVPSIEMVRFVNSGTEACMGVLRLARAFTCRPKIIKFEGCYHGHADPFLVKAGSGVATLGLPDSPGVPKAATIDTLTAPYNDISAVESLFEEHKGEIAAVILEPVVGNAGFIPPKLEFLAAIRKITKENDALLIFDEVMTGFRLAYGGAQEYFGITPDLTTLGKIIGGGLPVGAYGGRRDIMEMVAPAGPMYQAGTLSGNPLAMTAGIHTLKRLQGQGTYEHLDKITAELTQGILDAGKKTGHAMCGGSIRGMFGFFFADGPIYNFSDAKKSDTEKFGRFYRGMLEEGVYFAPSQFEAGFTSLAHTPEDIQRTVAAAEKVLKQI

SEQ ID NO: 14444 - protein, 487 aa, Streptococcus mutans
MPITNKTMLITYADSLGKNLKELNENIENYFGDAVGGVHLLPFFPSTGDRGFAPIDYHEVDSAFGDWDDVKRLGEKYYLMFDFMINHISRQSKYYKDYQEKHEASAYKDLFLNWDKFWPKNRPTQEDVDLIYKRKDRAPKQEIQFADGSVEHLWNTFGEEQIDLDVTKEVTMDFIRSTIENLAANGCDLIRLDAFAYAVKKLDTNDFFVEPEIWTLLDKVRDIAAVSGAEILPEIHEHYTIQFKIADHDYYVYDFALPMVTLYSLYSGKVDRLAKWVKMSPMKQFTTLDTHDGIGVVDVKDILTDEEITYTSNELYKVGANVNRKYSTAEYNNLDIYQINSTYYSALGDDDQKYFLARLIQAFAPGIPQVYYVGFLAGKNDLELLESTKEGRNINRHYYSSEEIAKEVKRPVVKALLNLFTYRNQSAAFDLDGRIEVETPNEATIVIERQNKDGSHIATAEINLQDMTYRVTENDQTISLSMISCQT

SEQ ID NO: 14445 - protein, 516 aa, Vicia faba
MPAAGIPIGAGNKEYPGNLTPFVTITCVVAAMGGLIFGYDIGISGGVTSMNPFLEKFFPAVYRKKNAQHSKNQYCQYDSETLTLFTSSLYLAALLSSVVASTITRRFGRKLSMLFGGLLFLVGALINGLAQNVAMLIVGRILLGFGIGFANQSVPLYLSEMAPYKYRGALNIGFQLSITIGILVANILNYFFAKIKGGWGWRLSLGGAMVPALIITIGSLILPDTPNSMIERGDRDGAKAQLKRIRGVEDVDEEFNDLVAASETSMQVENPWRNLLQRKYRPQLTMAVLIPFFQQFTGINVIMFYAPVLFNSIGFKDDASLMSAVITGVVNVVATCVSIYGVDKWGRRALFLEGGVQMLICQVAVAVSIAAKFGTSGEPGDLPKWYAIVVVLFICIYVAGFAWSWGPLGWLVPSEIFPLEIRSAAQSVNVSVNMLFTFLVAQIFLTMLCHMKFGLFLFFAFFVVVMTIYIYTMLPETKGIPIEEMDRVWKSHPYWSRFVEHDDNGVEMAKGGVKNV

SEQ ID NO: 14446 - protein, 331 aa, Oryza sativa (japonica cultivar-group)
MAAGGRPATMRAVQYGGYGGGAATLKFVEIPVPSLKKNEILIKIEAASLNQADWRIQKGLMRPFHPKFPFIPVTDVSGEVIEVGSAIHEFKVGDKVVSKLNLWKAGGLAEYVAASESDTVSRPAGISAADAAGLPVAGLTALQALSSIGTKFDGSGTGADVLITAASSGVGTYAVQLAKLGNHRVTTTCGARNLDLVGSLGADEVLDYATPEGAALASPSGRKYDYIINLTDRGKWSVFRPQLSSNGGRVVDVSPNLGNFLASVMTLFSRRKRLSLVILTLGKKELGFLLELMREGKLKTVVDSRHPFEKAAEAWERSMSGHATGKVIVEM

SEQ ID NO: 14447 - protein, 502 aa, Atriplex hortensis
MAFPIPARQLFIDGEWREPLLKNRIPIINPSTEEIIGDIPAATAEDVEVAVVAARKAFKRNKGRDWAALWSHRAKYLRAIAAKITEKKDHFVKLETLDSGKPRDEAVLDIDDVATCFEYFEYFAGQAEALDAKQKAPVTLPMERFKSHVLRQPIGVVGLISPWNYPLLMDTWKIAPALAAGCTTVLKPSELASVTCLEFGEVCNEVGLPPGVLNILTGLGPDAGAPIVSHPDIDKVAFTGSSATGSKIMASAAQLVKPVTLELGGKSPVIMFEDIDIETAVEWTLFGVFWTNGQICSATSRLLVHESIAAEFVDRMVKWTKNIKISDPFEEGCRLGPVISKGQYDKIMKFISTAKSEGATILCGGSRPEHLKKGYYIEPTIITDITTSMQIWKEEVFGPVICVKTFKTEDEAIELANDTEYGLAGAVFSKDLERCERVTKALEVGAVWVNCSQPCFVHAPWGGVKRSGFGRELGEWGIENYLNIKQVTSDISDEPWGWYKSP

SEQ ID NO: 14448 - protein, 105 aa, Zea mays
MGIGAVSDELLGTFVPIAVYWLYSGLYVALDGVGRLDGYRLHTREEAATKNVVSRAAVVRGVLLQQVFQVAVSLTLFAVVSSSSSAPAVPLSVPRNSRIVFVVGH

SEQ ID NO: 14449 - protein, 564 aa, Saccharomyces cerevisiae
MSSAQSSIDSDGDVRDADIHVAPPVEKEWSDGFDDNEVINGDNVEPPKRGLIGYLVIYLLCYPISFGGFLPGWDSGITAGFINMDNFKMNFGSYKHSTGEYYLSNVRMGLLVAMFSIGCAIGGLIFARLADTLGRRLAIVIVVLVYMVGAIIQISSNHKWYQYFVGKIIYGLGAGGCSVLCPMLLSEIAPTDLRGGLVSLYQLNMTFGIFLGYCSVYGTRKYDNTAQWRVPLGLCFLWALIIIIGMLLVPESPRYLIECERHEEARASIAKINKVSPEDPWVLKQADEINAGVLAQRELGEASWKELFSVKTKVLQRLITGILVQTFLQLTGENYFFFYGTTIFKSVGLTDGFETSIVLGTVNFFSTIIAVMVVDKIGRRKCLLFGAAGMMACMVIFASIGVKCLYPHGQDGPSSKGAGNAMIVFTCFYIFCFATTWAPVAYIVVAESFPSKVKSRAMSISTACNWLWQFLIGFFTPFITGSIHFYYGYVFVGCLVAMFLYVFFFLPETIGLSLEEIQLLYEEGIKPWKSASWVPPSRRGISSEESKTEKKDWKKFLKFSKNSD

SEQ ID NO: 14450 - protein, 456 aa, Haemophilus ducreyi 35000HP
MSKHYDYIAIGGGSGGIASINRAASYGKKCAIIEAKQLGGTCVNVGCVPKKVMFYGAHIADAINHYAEDYGFDVSLKQFDFKKLVASRQAYISRIHSSYQQVLSKNNVDVFNGFARFVDPKTIEVHYPDGSTENLTADHILIATGGRPTIPEVIGAEYGIDSNGIFALTELPKRVAIVGAGYIAVELAGVFNSFGVETHLFVRQHALLRTQDPLIVDTLLAVLAQQNIKLHTQAISKQVVKNADGSLTLTLQDGRQTEVDCLVWAIGREPTTDVINLAAAGVETNSRGFIKVDKFQNTNVTGIYAVGDIIEGGIELTPVAVAAGRRLAERLFNNKPNEHLDYSLVPTVVFSHPPIGTVGLTEPQAIEQYGAENVKVYTSSFTAMYTAVTQHRQPCRMKLVCIGEQEKIVGLHGIGFGVDEMIQGFAVAIKMGAVKADFDNTVAIHPTGSEEFVTMR

SEQ ID NO: 14451 - protein, 470 aa, Mesorhizobium sp. BNC1
MPDTYDVVVIGTGPGGYVCAIKAAQLGLKTAVVEKRTNHGGTCVNVGCIPSKALLHATEMFAEAGHSFADLGIDVGTPKLDLKKMLAHKEKTVDQNVKGLDFLFKKNKIDVFRGAGRIAAAGKVVVTGEDGKEQTVETKNIVIATGSDVAGIPGVDVDFDERVIVSSTGALELPAVPARMVVVGGGVIGLELGSVWSRLGAKVTVIEYLDTILGGMDGEVAKQFQRMLAKQGFGFKLGAKVTGIAKTEGGASVTFEPAKGGEAETIDADVVLVATGRKPYIDGLGLKEAGVEVDERGRVKTDGHLRTNVPGIYAIGDVITGPMLAHKAEDEGVAVAEIIAGQAGHVNYDVIPSVVYTSPEVASVGKTEEELKKAGIEYNAGKFPFSANGRARSMLHTDGFVKVLADKKTDRVLGVHILGFGAGEMIHEAAVLMEFGGSSEDLARTCHAHPTMSEAVKEAALATFYKPIHS

SEQ ID NO: 14452 - protein, 393 aa, Clostridium perfringens str. 13
MEGRLVSKKEIVAMILAGGQGSRLGVLTKNLAKPAVPFGGKYRIIDFPLSNCSNSGIYTVGVLTQYKPLKLNEHIGIGDTWDLDRRDGGVSILPPYQKEKGGDWYKGTANAIYQNIEFIERYDPEYVLILSGDHIYKMDYDKMLEMHKQKEADATIAVINVPMHEASRFGIMNTNEDLSIYEFEEKPEHPKSTNASMGIYIFNWKILKKFLEEDELDQSSSNDFGKNIIPKMLNSGKKLIAYPFNGYWKDVGTIESLWEANMDLLKYEDELSLYDSEWKIYSANPVRPAQFIGKDAEIKSSLTVEGCIVHGKVENSVLFQGVYVGKGAIVKDAVIMPNTKIEDNVLIEKAIIGSEAIVCKGCKIGDGNKISVIASKEVVIGSKEVIEECAMVK

SEQ ID NO: 14453 - protein, 428 aa, Mesorhizobium sp. BNC1
MATEIRVPTLGESVTEATIGRWFKKVGDAIAADEPVVELETDKVTVEVPAPSAGTLQEIAVKEGDTVEVGALLGSIGEGAAAAPAKAAPAAREKKEAVAQAAGASGAGSTGEAIEKTANVGGEPPIEERKRPPAPSAAKLLAENRLSTDEVAGSGKDGQVLKGDVLAAIERGGRGAPSQPAELPKVARAPSAPEDEVREERVKMTRLRQTIARRLKDAQSNAAMLTTFNEVDMTAVMDLRKKYKDLFEKKHGVKLGFMGFFTKAVCHALKEIPAVNAEIDGTDIIYKNFCHIGVAVGTERGLVVPVVRDADRMTIAEIEKEIGRLGAEARDGKLALADMQGGTFTISNGGVYGSLMSTPILNAPQSGILGMHKIQERPMVVGGQIVVRPMMYLALSYDHRIVDGKEAVTFLVRVKDVLEDPERLVLDL

SEQ ID NO: 14454 - protein, 430 aa, SYNECHOCOCCUS SP. WH 8102
MIDSLDLVIDTIVAREVLDSRGNPTVEAEVLLEGGAMGRAIVPSGASTGAHEAHELRDGGDRYMGKGVSQAVTHIEERIAPTLCGLSALDQAAVDAAMLELDGSDNKSSLGANAILAVSMATARAAANGLGLPLYRYLGGPMANLLPVPLMNVINGGAHAANSLDFQEFMLVPHGAPSFREALRMGTEVFHTLKGLLKAKGMSTSVGDEGGFAPDLGNVEAGEILVEAITKAGYKPGEQISLALDVASTEFFENGRYAFDGGNYDSAEMVGQLEQLVEKFPIVSIEDGLAEDDWEGWKLLTERLGGKVQLVGDDLFVTNTKRLQQGIDNSTANSILIKVNQIGSLTETLQAIDLAGRSGYTSVISHRSGETEDTTIADLSVATRAGQIKTGSLSRSERVAKYNQLLRIEDELGSQAVYAGAVGQGPRGNA

SEQ ID NO: 14455 - protein, 368 aa, Clostridium perfringens str. 13
MNNCIGIINLDENESKIGELAKNRPLAAVPIAGRYRIIDFILSNMTNAGIESLGILSKNKSRSLVDHLTNGRPWDLHRKRDGLRVFNFGERDPYYDDITNLYENLEFLTKSRREYVIMSPSYMICNIDLKEALEYHKKNDNDITVIYKKVKDADSNFIDCDVLNFDECGFIKSIGKNLGREEESNISLEMYILRTDLLIEIIYECIRRGSHRKFKSYLKEFLDEIKVGGFEFKGYLSCVNSLKSYYKANMDLLEEKVYKELFIDNNPIYTKSRDEGPTHYTKNSEVTNSIIANGSYIEGKVENSIIGRRVYVGPEAVIKNCIIMQETVIGENAHLDKIITDKAAVIRDDEKIVGLEYCPMVLSKPNII

SEQ ID NO: 14456 - protein, 386 aa, Staphylococcus aureus subsp. aureus MW2
MTLSKETEVIFDWRRGVEYHSANPPLYDSSTFHQTSLGGDVKYDYARSGNPNRELLEEKLARLEQGKFAFAFASGIAAISAVLLTFKSGDHVILPDDVYGGTFRLTEQILNRFNIEFTTVDTTKLEQIEGAIQSNTKLIYIETPSNPCFKITDIKAVSKIAEKHELLVAVDNTFMTPLGQSPLLLGADIVIHSATKFLSGHSDLIAGAVITNNEAISEALYLIQNGTGNMLSAQDSWTLAKHLKTFPIRFKQSVENAQKIVSFLIKQDEISEVYYPGLTTAHLEQAKNGGAVIGFRLADESKAQQFVDALTLPLVSVSLGGVETILSHPATMSHAALPEEVRQERGITFGLFRLSVGLEDPDELIADIKYALKEAFNESIPHTIER

SEQ ID NO: 14457 - protein, 120 aa, Oryza sativa
MLFMKGVILLLLVCAVISPHPVIGKNPICTHANMIEIVRKCEKFIRVQRPVPTFLCTPNSPCCEAVRKVRDRDMHCVYFLIGLDKQRVKLYSERMILRLSDLCAPVPSRPPPPPHRQVLV

SEQ ID NO: 14458 - protein, 367 aa, Staphylococcus aureus subsp. aureus MW2
MKDTQLAQITLTDDSTGAIANPIHLSTAYKHPKLGQSTGFDYTRTKNPTRSTFETCFAKLEHGIASFATSSGMSAIQLICNLFKPHDEILVSFDLYGGTFRLFEFYEQQYNIKFKYVDFTDYEQVEKEITDKTVALFIEPISNPQMIAIDVKPYYQLCKAKGLLSIIDNTFLTPYLSTPLAEGADIVLHSATKYIGGHNDVLAGVVTVKDESLAQQLFDFHNMTGATLSPIDSYLLLRGLKTLHLRIERAQSNARKLAKKCQSLQAIDEVLYSGQTGMLSLRLNKAYSVAKLLENLDICIFAESLGGTETLVTFPYTQTHVDMPDAEKDKRGIDEYLIRLSLGVENYEDIERDIIQALDKAQIGEIV

SEQ ID NO: 14459 - protein, 476 aa, Saccharopolyspora spinosa
MPAQAAVIDGKLVEGPETLDVLDPSTGTLLDRTLRGTGEHVDAAVAAARAASREWAHTPYSERSAILRRIGELIRRDRGEFALLESQDTGKPLAQACADTDVAARYFEYYANTMEAFFGHSLPPNGDFVAYTRHVPFGVTGHIIPWNYPLQIGCRTIAPAIAVGNCAVVKPAEEAPLSVLKVARTALEAGLPAGVLNVVPGLGAQAGAALAGHAGIDHLSFTGSVPVGAAVAHAAAENVIPVVLELGGKSPNIVFPDADLDAAIPVIVKSMLQNAGQTCSAGSRLLVHEEVRDEVLARIDEALRGVRIGPGPQDLDLGPLISAKQRDRVTQMVQRAADSGARQLGGPGQVELPEGGFYFPPTVFTDVDPAQEIAQEEVFGPVLAAMSFGTVDEAIQLANGTQYGLIAAAWTRNLDVAHVMAEEIRAGQVYLNTYGGGGGVEYTFGGFGKSGYGREKGFEALKGFCQTKTIVTKVTR

SEQ ID NO: 14460 - protein, 502 aa, Mycoplasma penetrans
MKKGPVLLAVLDGYGFSKDTKGNAILNAKTPFMDNLVKEYDHCYIEASGEYVGLPDGQIGNSEVGHLTIGAGRIVYTGLSLINQDIKTKKFDSNKTLLEAINHAKKNNSNIHIMGLLSPGGVHSNEQHIFEMIRIVSENGLKPVIHVFGDGRDVAPQSIISSLERLNDVLKKYPGTIATISGRFYSMDRDKRWERTKQAYDNLLGISNNYFDNPIDYVNKQYSENIFDEFLVPARINDSNVVIKDNDAVIHANFRPDRARQISHLFCGSTVYEEKNDHPLKNLYYAIMMTYEGITPTSILFPTVVVKNTFGEVVANSGLTQLRIAETEKYAHVTFFFDGGVEVDLKNESKILVDSKKVKTYDEVPAMSAVEITDKLIENLDKFDVIVLNFANADMVGHTGKYNEAVLAIEALDSQLARIDQKIKELNGTMFITADHGNAEVMLDDDNNPVTKHTTNPVIFISNNKDVKFNKPGSLGNVAPTILDFMGLEIPADMDKKSLLKK

SEQ ID NO: 14461 - protein, 306 aa, Sporothrix schenckii
MDGKRQLNSFQQLEKLGEGTYATVFKGRNRHTGEFVALKEIHLDSEEGTPSTAIREISLMKELKHENIVALHDVIHTESKLMLVFEYMDGDLKKYMDTNGERGALKPMLIKSFMYQLLKGIDFCHQNRVLHRDLKPQNLLINGKGQLKLGDFGLARAFGIPVNTFSNEVVTLWYRAPDVLLGSRTYNTSIDIWSVGCIMAEMYTGRPLFPGTTNEDQMLRIFRIMGTPTEHNWPGISQFPEYKATAPRYATQDLRQILPQIDATGIDLLQRLLQLRPELRISAHDALQHPWFHDILQYQHCQQAAG

SEQ ID NO: 14462 - protein, 526 aa, Malus x domestica
MADRRAEENAVTGGPQNTSIEDFDPPMKPKTSKFAIACALLACTTSVLLGYDIGVMSGASLYIQKNLKISDVQVEVLAGTLNIYSLLGSAFAGRTSDWIGRKYTIVLAGVIFLVGALLMGFATNYAFLMVGRFVAGVGVGYGMMIAPVYTAEISPASFRGFLTSFPEVFVNVGILLGYIANYAFSKLPLHLGWRFMLGVGGVPAIFLTVGVLFMPESPRWLVMQGRLGDAKKVLQRTSESKEECQLRLDDIKEAAGIPPHLNDDIVQVTKSSHGEGVWKELILHPTPAVRHILIAAVGIHFFEQASGIDTVVLYSPRIFAKAGITSSNHKLLATVAVGFTKTVFILVATFFLDKFGRRPLLLTSVGGMVFSLMFLGVGLTIVDHHKGSVPWAIGLCMAMVYFNVAFFSIGLGPITWVYSSEIFPLKLRAQGVSIGVACNRVTSGVVSMTFISLYKAITIGGAFFLYAGISAAAWIFFYTMLPETQGRTLEDTEVLFGKYHRWRKANAMLKERKQVDGDDNNNAQVF

SEQ ID NO: 14463 - protein, 350 aa, Pseudomonas putida KT2440
MYTAIGYAAQTPTSPLAPMTFQRRSPRPDDVAIDILYCGVCHSDIHQARNEWGIAVYPLMPGHEIIGRVTAVGDKVTAHKVGDLVGVGCMVDSCRTCEACAKDLEQYCLEGPTMTYATPDRVDGSNTMGGYSSSIVVSEHFVVRIPAGMDLPSAAPILCAGITTYSPLKHHGVGPGHKIGILGMGGLGHMGIKLAKALGAEVTLFTRSQAKAEEARRQGADHVIVSTDAEQMRAAAGRFDFLLDTIPVQHDLNPYLETLKFDGVHILVGLIEPIDPALHAANLVMKRRVLAGSLIGGIAETQEVLDFCAEHDIRCDIEMLDIRNINQAYERMIAGDVKYRFVIDMATLQG

SEQ ID NO: 14464 - protein, 491 aa, Malus x domestica
MTSILLGYDIGVMSGAAIYIEKDLKVTDTQIEILLGILNLYSLIGSAMAGRTSDWVGRRYTIVISGAIFFTGAILMGLSTNYTFLMCGRFVAGLGVGYALTIAPVYAAEVSPASSRGFLTSFPEVFVNVGILLGYISNYAFSFCALDVGWRLMLGVGAIPSVILAIGVLAMPESPRWLVMQGRLGDARQVLDKTSDSKEESMLRLADIKEAAGIPEDCNDDIVQVTGHSHGEGVWKELFVHPTPTVLHIVIAALGFHFFQQASGIDALVLYSPRVFEKAGITNSNQLLLCTVGVGLSKTVFTFVATFFLDRVGRRPLVLTSMAGMVASLVCLGTSLTIVDQHEGARMTWAVVLCLCCVLAFVGFFSTGIGPIAWVYSSEIFPLRLRAQGCGMGVAVNRVMSGVLSMTFISLYKAITMGGAFFLYAAIGAVGWIFFFTMLPETQGRTLEDMEVLFGKFHKWRKANKLLEKERQVARGDGGTSDPDNRVNLLA

SEQ ID NO: 14465 - protein, 460 aa, Kurthia sp. 538-KA26
MNSHDLEKWDKEYVWHPFTQMKTYRESKPLIIERGEGSYLFDIEGNRYLDGYASLWVNVHGHNEPELNNALIEQVEKVAHSTLLGSANVPSILLAKKLAEITPGHLSKVFYSDTGSAAVEISLKVAYQYWKNIDPVKYQHKNKFVSLNEAYHGDTVGAVSVGGMDLFHRIFKPLLFERIPTPSPYTYRMAKHGDQEAVKNYCIDELEKLLQDQAEEIAGLIIEPLVQGAAGIITHPPGFLKAVEQLCKKYNILLICDEVAVGFGRTGTLFACEQEDVVPDIMCIGKGITGGYMPLAATIMNEQIFNSFLGEPDEHKTFYHGHTYTGNQLACALALKNIELIERRDLVKDIQKKSKQLSEKLQSLYELPIVGDIRQRGLMIGIEIVKDRQTKEPFTIQENIVSSIIQNARENGLIIRELGPVITMMPILSMSEKELNTMVETVYRSIQDVSVHNGLIPAAN

SEQ ID NO: 14466 - protein, 825 aa, Haemophilus influenzae R2866
MKKNNVNEQRRDFLKKTSLGVAGSALSGGMVGVVSKSAVAKEAEMKTVVTAAHWGSIGVVVQDGKVVKSGPAIEPAVPNELQTVVADQLYSEARVKYPMVRKGFLANPGKSDTTMRGRDEWVRVSWDEALDLVHNQLKRVRDEHGSTGIFAGSYGWFSCGSLHASRTLLQRYMNATGGFVGHKGDYSTGAAQVIMPHVLGTIEVYEQQTSWESILESSDIIVLWSANPLTTMRIAWMSTDQKGIEYFKKFQASGKRIICIDPQKSETCQMLNAEWIPVNTATDVPLMLGIAHTLVEQGKHDKDFLKKYTSGYAKFEEYLLGKTDGQPKTAEWAAKICGVPAETIKQLAADFSSKRTMLMGGWGMQRQRHGEQTHWMLVTLASMLGQIGLPGGGFGLSYHYSNGGVPTATGGIIGSITASPSGKAGAKTWLDNTSKSAFPLARIADVLLNPGKKIHYNGTEITYPNIKAVYWAGGNPFVHHQDTNTLVKAFQQPDVVIVNEVNWTPTARMADIVLPATTSYERNDLTMAGDYSMMSVYPMKQVVPPQFEAKNDYDIFVELAKRAGVEEQYTEGKTEMEWLEEFYNAAFTAARANRVAMPRFDKFWAENKPLSFEAGEAAKKWVRYGEFREDPLLNPLGTPSGKIEIFSDVIEKMHYNDCKGHPSWMEPEEFAGNVTEEYPLALVTPHPYYRLHSQLAHTSLRQKYAVNDREPVMIHPEDAAARGIKNGDIVRIHSKRGQVLAGAVVTENIIKGTVALHEGAWYDPMYLGESEKPLCKNGCANVLTRDEGTSKLAQGNSPNTCIVQIEKFTGVALEVTVFKQPKQVA

SEQ ID NO: 14467 - protein, 535 aa, Malus x domestica
MADRTTDDNTVSSQPQKTIADFDPPQKPKRNKYAFACAILASMTSILLGYDIGVMSGAAIYIKDDLKISDVEVEVLLGILNLYSLIGSAAAGRTSDWVGRRYTIVLAGAIFFVGALLMGFATNYSFLMFGRFVAGIGVGYALMIAPVYTAEVSPASSRGFLTSFPEVFINSGILLGYVSNYAFSKLPTHLGWRLMLGVGAIPSIFLAVGVLAMPESPRWLVMQGRLGDATRVLDKTSDSKEESMLRLADIKEAAGIPEHCTDDVVQVPKRSQGQDVWKELLLHPTPAVRHILICAIGIHFFQQASGIDAVVLYSPRIFEKAGITNSDKKLLCTVAVGFVKTVFILVATFFVDKVGRRPLLLASVAGMILSLTGLGLGLTIIDQNHERILWAAVLCLTMVLLYVAFFSIGMGPITWVYSSEIFPLKLRAQGCSLGVAMNRVVSGVLSMTFISLYEAITIGGAFFLYAAIASVAWVFFFTMLPETHGRTLEDMEVLFGKFHKWRKANALLKQKKNASHGDGITNNGQVQLGTRGQVN

SEQ ID NO: 14468 - protein, 424 aa, Yersinia pestis KIM
MAKNIQAIRGMNDYLPADTAIWQRIESILKQVLSGYGYSEIRMPIVEQTPLFKRAIGEVTDVVEKEMYTFDDRNGESLTLRPEGTAGCARAGIEHGLLYNQEQRLWYIGPMFRYERPQKGRYRQFHQLGAEVFGLPGPDIDAELILLTARWWRALGIFEHVKLELNSIGSLAARADYREALVAFLEQHVEVLDEDCKRRMYSNPLRVLDSKNPDVQQLLDDAPKLSDYLDEESKQHFAGLCELLDKASIPYTVNERLVRGLDYYNRTVFEWVTHSLGAQGTVCAGGRYDGLVEQLGGRATPAVGFAMGLERLVLLVQAVNADFQVPATVDAYVISSGEGAQSAAMLLAESLRDALPTLKIMTNYGGGNVKKQFTRADKWGARVALMLGESEVAAQQVVVKDLRNGEQETLAQADVAARLALMLG

SEQ ID NO: 14469 - protein, 315 aa, Neurospora crassa
MVIQQPSNQIKLTNVSLVRLKKGKKRFEVACYKNKVLEWRSGIETDLDNVLQIPNVFLNVSKGQTAPTAELQKAFGKDTSVNDIILEILKKGEMQVGEKERSAQLERVHNEVVSIVASKLVDPRTKKVYTTGMIDKALDMLSSQAHQLQEKEKEKKDAAASGTASPATGESGEAKPQPTKSLPIWTGVSTNKSAKSQALEAMKALVAHQPIPVARARMRLRITCTTNVLKQAVKAPKGEANKDGEEGEKKAPGTVKDKILSFVEQVESQDVMGQEWELVGFVEPGAFKILSDFIGSETKGQGRVEVLDMAVTHED

SEQ ID NO: 14470 - protein, 128 aa, Triticum aestivum
MAPTVMASSATSVAPFQGLKSTAGLPVSRRSNGASLGSVSNGGRIRCMQVWPIEGIKKFETLSYLPPLSTEALLKQVDYLIRSKWVPCLEFSKVGFIFREHNASPGYYDGRYWTMWKLPMFGCTDATQ

SEQ ID NO: 14471 - protein, 417 aa, Candida albicans SC5314
MSLSNKLSVKDLDVAGKRVFIRVDFNVPLDGKTITNNQRIVAALPTIKYVEEHKPKYIVLASHLGRPNGERNDKYSLAPVATELEKLLGQKVTFLNDCVGPEVTKAVENAKDGEIFLLENLRYHIEEEGSSKDKDGKKVKADPEAVKKFRQELTSLADVYINDAFGTAHRAHSSMVGLEVPQRAAGFLMSKELEYFAKALENPERPFLAILGGAKVSDKIQLIDNLLDKVDMLIVGGGMAFTFKKILNKMPIGDSLFDEAGAKNVEHLVEKAKKNNVELILPVDFVTADKFDKDAKTSSATDAEGIPDNWMGLDCGPKSVELFQQAVAKAKTIVWNGPPGVFEFEKFANGTKSLLDAAVKSAENGNIVIIGGGDTATVAKKYGVVEKLSHVSTGGGASLELLEGKDLPGVVALSNKN

SEQ ID NO: 14472 - protein, 384 aa, Synechocystis sp. PCC 6803
MGTKRIGILTSGGDCPGLNAVIRAVVKASALKGWEVYGIPYGTDGFVEVAHGKYQAEDLLLTKHGYALPGMLKGLDVLQFLSGSVLGSLSKGHPEQPAIAEAILKGYAILDLEALIVIGGDGSLDIIYDLAQKGNWHIIAIPKTIDNDVPFTDLAVGFSTAVDIVTQALYDLTFTAASHERIIIVQVMGRDAGHLTLHAGIAGGADIILIPEITPCLTSEIIRNCCYQLMNLRKSGRHFALIVISEGVHDQNNKKNKHIADYLAEEISETSQHLCDIKDPAFCDLISLDIRATTLGHLQRSGTPLSFDRLLATVFGIRAVELIEQEIYDQVVIWRSGKVEHADLKPIISIIKECHQENRCPFPVDRDGFMVKTAKSLGIYLGED

SEQ ID NO: 14473 - protein, 783 aa, Mycobacterium tuberculosis CDC1551
MSFVLAMPEVLGSAATDLAALGSVLGAADAAAAATTTGIVAAAQDEVSAAIAALFSAHGRAYQVASAQAAAVHAQFVEALSAGAGAYASAEAAGAAVLANPAQSVQQDLLAAVNAQSVALTGRPLIGNGANGAPGTGANGAPGGWLLGNGGAGGSAAAGSGLPGGAGGAAGLFGTGGAGGAGGSSTVGDGGAGGAGGSGGWLLGTGGVGGVGGLGAGAGGAGGVGGAGGLLGAGGHGGAGGLGAVTGGVGGAGGAGGLLAGLMAGPGGAGGTGGRGFLNDGGVGGAGGNAGLLFGAGGTGGSGGAGLGGDGGAGGAGGNAGVLFGNAGSGGTGGFGDTDGGAGGAGGDAGWLGSGGVGGAGGFGETGDGGVGGAGGKAGLLIGNGGAGGAGGQGAVTGGTGGAGGDGVLIGNGGNAGIGGTGPTAGDTGAGGISGLLLGADGFNAPASASPLHTLKQQALAAINAPTQTLTGRPLIGNGTPGAVGSGATGAPGGWLLGDGGAGGSGAAGSGAPGGAGGAAGLWGTGGAGGAGGSSAGGGGAGGAGGAGGWLLGDGGAGGIGGASTVLGGTGGGGGVGGLWGAGGAGGAGGTGLVGGDGGAGGAGGTGGLLAGLIGAGGGHGGTGGLSTNGDGGVGGAGGNAGMLAGPGGAGGAGGDGENLDTGGDGGAGGSAGLLFGSGGAGGAGGFGFLGGDGGAGGNAGLLLSSGGAGGFGGFGTAGGVGGAGGNAGWLGFGGAGGVGGSAGLIGTGGNGGNGGTGANAGSPGTGGAGGLLLGQNGLNGLP

SEQ ID NO: 14474 - protein, 309 aa, Yersinia pestis biovar Medievalis str. 91001
MSKFAMVFPGQGSQSLGMLADLAAQFPIVEATFSEASSVLGYDLWQLVQQGPAEELNKTWQTQPALLTASVAIWRIWQHQGGKLPSLMAGHSLGEYSALVCAGVLDFKQAVSLVELRGKLMQEAVPEGTGAMYAIIGLDNESIAKACEESAQGQVVSPVNFNSPGQVVIAGNKDAVERAGAACKAAGAKRALPLPVSVPSHCALMKPAADKLAVALEKIDFQEPLFPVVNNVDVKAEVSPVAIRSALVRQLYNPVRWTESVEFIAAEGVELLLEIGPGKVLTGLTKRIVDSLAAAAVNDVVTLNSALEH

SEQ ID NO: 14475 - protein, 447 aa, Ralstonia metallidurans CH34
MSEDKTKAVKALQGVKGMNDMLPTDAPLWDMFESAARSMLRAYGYQQIRTPIVEHTQLFVRGIGEVTDIVEKEMYSFTDSLNGENLTLRPEGTAAAVRSTIEHNLLYDGPKRLWYIGPMFRHERPQRGRYRQFHQLGAEALGFAGPDVDAEIILMCQRLWDDLGLTNVRLELNSLGQAHERAAHREQLIKYLEGFQDILDEDSKRRLYTNPLRVLDTKNPALQEMAANAPKLIDFLGEESLAHFEGVQRILLANNIPFKINPRLVRGLDYYNLTVFEWITDKLGAQGTIAGGGRYDPLIQQMGGKPAPACGWAMGIERIIELIREENLVPDTQGCDVYMVHQGELANQQAMIAAERLRDAGLDVVLHATPDGKSGSFKSQMKRADASGASFAVIIGDDEIAAGTVQVKQLRGGNVAEGGQQTTVPAEQVVEFIIDAMVDEIEGDDEQ

SEQ ID NO: 14476 - protein, 175 aa, Oryza sativa
  unsure (1)..(175): unsure at all Xaa locations
IVDFFSHHPESLHMFSFLFDDVGIPLNYRHMEGFGVNTYTLINKDGKPHLVKFHWKPTCGVKCLLDDEAVTVGGTCHSHATKDLTDSIAENEQLAFCPAIIVPGIHYSDDKLLQTRIFXSYADTQRHRLGPNYXLMLPVNAPKCAYHNNHHDGXSMNFMHRDXEVNLLPXRFDAA

SEQ ID NO: 14477 - protein, 412 aa, Thermoproteus tenax
MDTTIEELLARRILTGRGDQTIEVEVYTADGFGKAAAPAGASKGKHEVAFLPEGGIDAALSAFERLVSPELAGVDAAEQYAVDGKLEEVDGTGRFERIGGAVAIAVSMAAARAAANTLGIPLFRHLGGAPARTLPLPLGNAIGGGKHSRGLGPDLQEFLVIPLNPPDIATAVLANLEVHKRALKYIVKADPHFTGGKNDEGAWTPRISAETALKILKESAAEVSKEIGVEIGLGVDAAASSLWNGSKYVYQNEGKERGPREQLEYMARLLDEFGLVYLEDPFHEDDFQSFAELTSRFKDRLIVGDDLYVTNAARIERGGREGATTAALIKPDQTGTLTRAHEAVKTARRYGMRIVVSHRSGDTEYDTLAHIAVAFGAEVIKTGIVGGERTAKLNELIRIGDYLGKWGRISSL

SEQ ID NO: 14478 - protein, 184 aa, Zea mays
  unsure (1)..(184): unsure at all Xaa locations
MGRRWTTTTIERTLTEAHLKANKEIVRADLNVPLXRAQNITCDTRIRSSFPTVKFLLDKGALVILDMSPGLSVGRSRPLTPRMLLFHICLNSLIVVSSMLSDDCIXVTSCYIGCRFDDSRLLLLENVVFYNEEENNEPEDADRVASVXADLYVHDAFGTGRXAHASSEGVTXISTLSAAGFLMQ

SEQ ID NO: 14479 - protein, 95 aa, Zea mays
  unsure (1)..(95): unsure at all Xaa locations
YVGNSRXETLIIDSKSIQLHAIVPIPGGSVDKDISLSPDGQYVLTNSNDRFIRVYRNILPAKGSREEIRNMSTHSYECGGQFDSIKVHGTCCLIF

SEQ ID NO: 14480 - protein, 387 aa, Corynebacterium efficiens YS-314
MRSQSSCHPGDNTGPGVKLGHVLPSDVESEHLNMTTPHHPTPVRAWGVTAFAQPLESLTITRRELRADDVSIDIEYAGICHSDIHTATGDWGEREYPLVPGHEIVGRVSAVGDAVTKHRVGDRVGVGCFVNSCGHCEPCRAGEHSYCDTGAVLTYGSEDRYADGEYTQGGYSQAIVVKEDFVVRVPESLDPAAATPLLCAGITTYSPLKHHGAGPGKKVGIIGLGGIGHVAVKIAVAMGAEVVVFSHSTSKREDALKFGATEHVSTADPTFAETWGGQFDLILNTVSVNLDTATYLSLLCFDGALVALGLPNDPMEVPTRMLTSKRRTLTGSLVGGIPETQEMLDFCAEHNITAEIELIDATSINEAYERTINSDVRYRFVIDAATF

SEQ ID NO: 14481 - protein, 443 aa, Mesorhizobium sp. BNC1
MAGAGALALAAFAAVPAFAQEAAETAAEAAAPVMDKGDVAWMMTSTLLVLFMTLPGLALFYGGLVRAKNALSVLMQCTMIAAVVMVVWVLWGYSFAFGGGTSPFWGGFGKLFLSGVTMDSTAATFTDGVVIPEYVFICFQMTFAVITPALIVGAFAERIKFSAVVLFTVLWVTFVYFPVAHMVWDGSGYLFNLGALDFAGGTVVHINAGIAALVGCMIVGKRSGYGKDILAPHSMTLTMVGGSILWVGWFGFNAGSNLEATGGAALAMINTFTATAGAIIGWSVIEALHRGKASMLGAVSGLVAGLVAVTPACGSVGPVGAIVLGAIASAVCYFFVAVVKNKFGYDDTLDVFGIHGVGGIVGALGTGIFTAPWLGGTGADDFSIASQLWVQFVAVLVTVAWCGVVSAILYKLVDAIVGLRPEKEAETQGLDLTSHGEAAYHYS

SEQ ID NO: 14482 - protein, 282 aa, Escherichia coli
ALLLKTQLPSGSELSLYDIAPVTPGVAVDLSHIPTAVKIKGFSGEDATPALEGADVVLISAGVARKPGMDRSDLFNVNAGIVKNLVQQVAKTCPKACIGIITNPVNTTVAIAAEVLKKAGVYDKNKLFGVTTLDIIRSNTFVAELKGKQPGEVEVPVIGGHSGVTILPLLSQVPGVSFTEQEVADLTKRIQNAGTEVVEAKAGGGSATLSMGQAAARFGLSLVRALQGEQGVVECAYVEGDGQYARFFSQPLLLGKNGVEERKSIGTLSAFEQNALEGMLDT

SEQ ID NO: 14483 - protein, 282 aa, Escherichia coli
ALLLKTQLPSGSELSLYDIAPVTPGVAVDLSHIPTAVKIKGFSGEDATPALEGANVVLISAGVARKPGMDRSDLFNVNAGIVKNLVQQVAKTCPKACIGIITNPVNTTVAIAAEVLKKAGVYDKNKLFGVTTLDIIRSNTFVAELKGKQPGEVEVPVIGGHSGVTILPLLSQVPGVSFTEQEVADLTKRIQNAGTEVVEAKAGGGSATLSMGQAAARFGLSLVRALQGEQGVVECAYVEGDGQYARFFSQPLLLGKNGVEERKSIGTLSAFEQNALEGMLDT

SEQ ID NO: 14484 - protein, 348 aa, Corynebacterium glutamicum ATCC 13032
MVGGKGTRLRPLTVNTPKPMLPTAGHPFLTHLLARIKAAGITHVVLGTSFKAEVFEEYFGDGSEMGLEIEYVVEDQPLGTGGGIRNVYDKLRHDTAIVFNGDVLSGADLNSILDTHREKDADLTMHLVRVANPRAFGCVPTDEDGRVSEFLEKTEDPPTDQINAGCYVFKKELIEQIPAGRAVSVERETFPQLLEEGKRVFGHVDASYWRDMGTPSDFVRGSADLVRGIAYSPLLEGKTGESLVDASAGVRDGVLLLGGTVVGRGTEIGAGCRVDNTVIFDGVTIEPGAVIENSIISSGARIGANAHISGCIIGEGAQVGARCELNAGMRVFPGVVIPDSGIRFSSDQ

SEQ ID NO: 14485 - protein, 177 aa, Zea mays
  unsure (1)..(177): unsure at all Xaa locations
AVLDCSDCLLAKMARILACSRKXKHRGPDXCVTVHSTRCNFLMPQRLAAVSPLSVDRXLFNVDRTDVVPAIGEIYXHKNGRKHITGTHNFSTSSDCEVIMPLYDKYGENFGYMLDGELAFVLYYTRDRTYVASRDAIGVNPLYIGXSSDGSDWIASEMKALNEDCVRFEIFPSSHLY

SEQ ID NO: 14486 - protein, 282 aa, Escherichia coli
ALLLKTQLPSGSELSLYDIAPVTPGVAVDLSHIPTAVKIKGFSGEDATPALEGADVVLISAGVARKPGMDRSDLFNVNAGIVKNLVQQVAKTCPKACIGIITNPVNTTVAIAAEVLKKAGVYDKNKLFGVTTLDIIRSNTFVAELKGKQPGEVEVPVIGGHSGVTILPLLSQVPGVSFTEQEVADLTKRIQNAGTEVVEAKAGGGSATLSMGQAAARFGLSLVRALQGEQGVVECAYVEGDGQYARFFSQPLLLGKNGVEERKSIGTLSAFEQSALEGMLDT

SEQ ID NO: 14487 - protein, 282 aa, Escherichia coli
ALLLKTQLPSGSELSLYDIAPVTPGVAVDLSHIPTAVKIKGFSGENATPALEGANVVLISAGVARKPGMDRSDLFNVNAGIVKNLVQQVPKTCPKACIGIITNPVNTTVAIAAEVLKKAGVYDKNKLFGVTTLDIIRSNTFVAELKGKQPGEVEVPVIGGHSGVTILPLLSQVPGVSFTEQEVADLTKRIQNAGTEVVEAKAGGGSATLSMGQAAARFGLSLVRALQGEQGVVECAYVEGDGQYARFFSQPLLLGKNGVEERKSIGTLSAFEQSALEGMLDT

SEQ ID NO: 14488 - protein, 283 aa, Physcomitrella patens
MGRGKIEIKKIENTTSRQVTFSKRRGGLLKKAHELAVLCDAEVALVIFSSTGKLFEYASSGSMRDIIERYKKSPNGAMKSGASTDFLGREVVKLQEQVERLKSSQRRMLGEDLSALKVPDLLQLEQQLDLGASRVRARKNQLILEEIEGLQKKEQELMVANEDLRKKIADAEAVARANLSEARPESPRHLARTLSRDVSASSHPAATVYPHPNLRDVQRSQTSLQLGMFSSESYPPSSSRWPSEQQFPSASEGCAGESSMKWDHPHYHIQNRLHANILPSVRI

SEQ ID NO: 14489 - protein, 785 aa, Mycobacterium tuberculosis CDC1551
  unsure (1)..(785): unsure at all Xaa locations
MSWVMVSPELVVAAAADLAGIGSAISSANAAAAVNTTGLLTAGADEVSTAIAALFGAQGQAYQAASAQAAAFYAQFVQALSAGGGAYAAAEAAAVSPLLAPINAQFVAATGRPLIGNGANGAPGTGANGGPGGWLIGNGGAGGSGAPGAGAGGNGGAGGLFGSGGAGGASTDVAGGAGGAGGAGGNASMLFGAAGVGGVGGFSNGGATGGAGGAGGAGGLFGAGGEGGSGGSGNLTGGAGGAGGNAGTLATGDGGAGGTGGASRSGGFGGAGGAGGDAGMFFGSGGSGGAGGISRSVGDGAAGGAGGAPGLIGNGGNGGNGGASTGGGDGGPGGAGGIGVLIGNGGNGGXGGTGATLGKAGIGGTGGVLLGLDGFTPPASTSPLHTLQQDVINMVNDPFQTLTGRPLIGNGANGTPGTGADGGAGGWLFGNGGNGGQGTIGGVNGGAGGAGGAGGILFGTGGTGGSGGPGATGLGGIGGAGGAALLFGSGGAGGSGGAGAVGGNGGAGGNAGALLGAAGAGGAGGAGAVGGNGGAGGNGGLFANGGAGGPGGFGSPAGAGGIGGAGGNGGLFGAGGAGGNGGLFGAGGTGGAGSHSTAAGVSGGAGGAGGDAGLLSLGASGGAGGSGGSSLTAAGVVGGIGGAGGLLFGSGGAGGSGGFSNSGNGGAGGAGGDAGLLVGSGGAGGAGASATGAATGGDGGAGGKSGAFGLGGDGGAGGATGLSGAFHIGGKGGVGGSAVLIGNGGNGGNGGNSGNAGKSGGAPGPSGAGGAGGLLLGENGLNGLM

SEQ ID NO: 14490 - protein, 390 aa, Mesorhizobium sp. BNC1
MRKIARPVSKGAVFKVHEGSMATRKLFLLPGDGIGPEAMAEVSKLIAVLNSEFGAGFETEAGLVGGIAYDTHGKAISDEDMARALAADAVLLGAVGGPKWDGVPYDVRPEAGLLRLRKDMELFANLRPAICYPALAESSSLKKEAVEGLDILIVRELTGGVYFGEPKEIIDLGNGQKRGIDTQVYDTFEIERISGVAFELARTRGNKVCSMEKHNVMKSGVLWKEVVTATHRAKYSDVELTHMLADAGGMQLVRWPKQFDVIVTDNLFGDMLSDVAAMLTGSLGMLPSASLGAPDPKNGKRKALYEPVHGSAPDIAGKGIANPIAMISSFAMCLRYSLNMVAEADRLEKAIAAVLDDGLRTRDILSEGMREVSTSAMGDAVARKFRELAP

SEQ ID NO: 14491 - protein, 112 aa, Arabidopsis lyrata subsp. petraea
LVEKFGIDPNNAFAFWDWVGGRYSVCSAVGVLPLSLQYGFSVVEKFLKGASSVDQHFQSTPIEKNIPVLLGLLSVWNVSFLGYPARAILPYSQALEKFAPHIQQVSMESNGK

SEQ ID NO: 14492 - protein, 135 aa, Glycine max
  unsure (1)..(135): unsure at all Xaa locations
LAVSGCSFTNRGLINYGGDTSIDNPAVYQAHQNVNEMHSGPSDDYMSLTLEAHIFEWLFAIRGPRNTDLCGGMYHXPLQLPSEYPIKPPSFMLLTPTSRFETQSMMCLSTSDHHPEHWHPSSSITTALLALIAFM

SEQ ID NO: 14493 - protein, 293 aa, Mesorhizobium loti MAFF303099
MKGIILAGGSGTRLYPLTLAVSKQILPIYDKPMIYYPLSVLMLAGIREILIVSTPRDLPAFRDLLGDGSEFGLAFSYAEQPHPNGLAEAFIIGRDFIGKDSVSMILGDNIYFGDGLSQLCRAAAARDAGASVFAYHVEDPERYGVVSFDKATGTALTIEEKPQKPKSNWAVTGLYFYDNEVVDIAPTIRPSARGELEITAVNNVYLERGKLHVHRLGRGYAWLDTGTHDSLHEASSFVRTIEHRQGIKVACPEEIAFEQGWLTAEQVLQRATRLGKNEYAAYLRRRVADLLEG

SEQ ID NO: 14494 - protein, 252 aa, Bordetella parapertussis 12822
MGRLSGRNALITGAAVGIGAAMARRFCAEGASVLLGDIDAERGQALAAELAATGARARFARLDVTDEDSVRQALELAEAEHGPLHILVNNAGGSSLNDRSVVEFALEEFWRAINIDLLGTVLCCRHAIPRIAAAGGGAVVNMGSIAALRGLKGRDAYTAAKGGVHALTRSMAVEFAEQRVRCNAIAPGAVLSERMARFIDEDPRVAAAVSRHLLGLPEPDEIAAMAVFLASEESRHVTGSIFQIDGGRAAAA

SEQ ID NO: 14495 - protein, 584 aa, Mycobacterium tuberculosis CDC1551
MSFVIVARDALAAAAADLAQIGSAVNAGNLAAANPTTAVAAAAADEVSAALAALFGAHAREYQAAAAQAAAYHEQFVHRLSAAATSYAVTEVTIATSLRGALGSAPASVSDGFQAFVYGPIHATGQQWINSPVGEALAPIVNAPTNVLLGRDLIGNGVTGTAAAPNGGPGGLLFGDGGAGYTGGNGGSAGLIGNGGTGGAGFAGGVGGMGGTGGWLMGNGGMGGAGGVGGNGGAGGQALLFGNGGLGGAGGAGGVDGAIGRGGWFIGTGGMATIGGGGNGQSIVIDFVRHGQTPGNAAMLIDTAVPGPGLTALGQQQAQAIANALAAKGPYAGIFDSQLIRTQQTAAPLANLLGMAPQVLPGLNEIHAGIFEDLPQISPAGLLYLVGPIAWTLGFPIVPMLAPGSTDVNGIVFNRAFTGAVQTIYDASLANPVVAADGNITSVAYSSAFTIGVGTMMNVDNPHPLLLLTHPVPNTGAVVVQGNPEGGWTLVSWDGILVGPASLPTALFVDVRELITAPQYAAYDIWESLFTGDPAAVINAVRDGADEVGAAVVQFPHAVADDVIDATGHPYLSGLPIGLPSLIP

SEQ ID NO: 14496 - protein, 405 aa, Halobacterium sp. NRC-1
MGPMETYVVTEPALVERLLVSDAAEFRKPEFQADAIDDLLGDGLLLSEGESWREQRGRANPAFSMARVAGFDADIAAHAADRVDDWPVGDTVDVEAAMTHITLDVILDVMLGVSLPEARVDAIGDALEPVGARFEPDPVRFAVPEWLPMPDDREYAAAVATLDDLVDDIVAAREGTASGGDGDDPMDLLSVLLRARDRGEQSLDRLRDEVMTTLLAGHDTTALTLTYTWFLLSEHPDVEARLHAELDGALDDGAQPTVAQLQDLDYLEWVLQESMRLYPPVYNVFRTPIEPVELAGSEVPAGAPIMLPQWAIHRSPDHWDDPEAFDPERWRPERRADRPRFAYFPFGGGPRHCIGKQLALLEAKLIVATVASDYRLRYEGDTPLSFVPSLTIHPEQEMRMRVEPR

SEQ ID NO: 14497 - protein, 260 aa, Haemophilus ducreyi 35000HP
MQNTLKGACIAECIGTGLLIFFGVGCVAAAQLAGATLGLWEISIIWGIGVALAVYATAGVSGAHLNPAVTIALWKFACFDGKKVLPYIIAQCLGAFLAAALVYFLYKDLFIVAETAKNIVRGESVGFASVFSTYPNPNISVLQAFFVETVITMVLMGLILALTDDGNGLPKGPIAPFLIGLLIATLGGAFGPLTGFAMNPARDFGPKVFAFLAGWGEVAFTGAREIPYFIVPIFAPIIGALLGAWGYQRFIGKNLPCNCK

SEQ ID NO: 14498 - protein, 1140 aa, Oryza sativa
MPMATVRRDIELSLIYADSRRKHLPRVEKDGLLREEEEPDDVPRIPLTHPTHQPPPRLAVVVAVAPSPRRLCVVNMQRGRFVQPFGCLLAVHPETFALLAYSENAAEMLDLTPHAVPTIDQREALAVGTDVRTLFRSHSFVALQKAATFGDVNLLNPILVHARTSGKPFYAIMHRIDVGLVIDLEPVNPVDLPVTATGAIKSYKLAARAIARLQSLPSGNLSLLCDVLVREVSELTGYDRVMAYKFHEDEHGEVIAECKRSDLEPYLGLHYPATDIPQASRFLFMKNKVRMICDCSATPVKIIQDDSLTQPISICGSTLRAPHGCHAQYMASMGSVASLVMSVTINEDEDDDGDTGSDQQPKGRKLWGLMVCHHTSPRFVPFPLRYACEFLLQVFGIQINKEVELAAQAKERHILRTQTLLCDMLLRDAPVGIFTQSPNVMDLVKCDGAALYYQNQLWVLGSTPSEAEIKNIVAWLQEYHDGSTGLSTDSLVEAGYPGAAALGDVVCGMAAIKISSKDFIFWFRSHTAKEIKWGGAKHEPIDADDNGRKMHPRSSFKAFLEVVKWRSVPWEDVEMDAIHSLQLILRGSLQDEDANKNNNAKSIVTAPSDDMKKIQGLLELRTVTNEMVRLIETATAPILAVDITGSINGWNNKAAELTGLPVMEAIGKPLVDLVIDDSVEVVKQILNSALQGIEEQNLQIKLKTFNHQENNGPVILMVNACCSRDLSEKVVGVCFVAQDMTGQNIIMDKYTRIQGDYVAIVKNPSELIPPIFMINDLGSCLEWNEAMQKITGIKREDAVDKLLIGEVFTHHEYGCRVKDHGTLTKLSILMNTVISGQDPEKLLFGFFNTDGKYIESLMTATKRTDAEGKITGALCFLHVASPELQHALQVQKMSEQAAMNSFKELTYIRQELRNPLNGMQFTRNLLEPSDLTEEQRKLLASNVLCQEQLKKILHDTDLESIEQCYTEMSTVDFNLEEALNTVLMQAMPQSKEKQISIDRDWPAEVSCMHLCGDNLRLQQVLADFLACMLQFTQPAEGPIVLQVIPRMENIGSGMQIAHLEFRLVHPAPGVPEALIQEMFRHSPGASREGLGLYISQKLVKTMSGTVQYLRESESSSFIVLVEFPVAQLSTKRCKASTSKF

SEQ ID NO: 14499 - protein, 561 aa, Ralstonia metallidurans CH34
MTHLKITGMTCDSCAAHVKEALEKVPGVQSALVSYPKGTAQLAIVPGTSPDALTAAVAGLGYKATLADAPLADNRVGLLDKVRGWMAAAEKHSGNEPPVQVAVIGSGGAAMAAALKAVEQGAQVTLIERGTIGGTCVNVGCVPSKIMIRAAHIAHLRRESPFDGGIAATVPTIDRSKLLAQQQARVDELRHAKYEGILGGNPAITVVHGEARFKDDQSLTVRLNEGGERVVMFDRCLVATGASPAVPPIPGLKESPYWTSTEALASDTIPERLAVIGSSVVALELAQAFARLGSKVTVLARNTLFFREDPAIGEAVTAAFRAEGIEVLEHTQASQVAHMDGEFVLTTTHGELRADKLLVATGRTPNTRSLALDAAGVTVNAQGAIVIDQGMRTSNPNIYAAGDCTDQPQFVYVAAAAGTRAAINMTGGDAALDLTAMPAVVFTDPQVATVGYSEAEAHHDGIETDSRTLTLDNVPRALANFDTRGFIKLVIEEGSHRLIGVQAVAPEAGELIQTAALAIRNRMTVQELADQLFPYLTMVEGLKLAAQTFNKDVKQLSCCAG

SEQ ID NO: 14500 - protein, 355 aa, Thermus thermophilus HB27
MAASHALKPILELLPEELPGEGYRRAQIAHWLYAKGARDFSEMTDLPKALREALAREWRLSEFSLVQAFPSQDGSVKYLFTLLDGKKTEAVYMPYENRKTVCLSTMVGCPAGCTFCATGALGFGRNLTAAEILDQLLTIAYHQGLSPREIRNVVLMGMGEPLLNLRNVLKAVRIMLHKKALALSPRRVTLSTVGIPKGIYRLAEEDLGVRLALSLHAPDDETRRKIIPTAHRYPIAEIMEAVRHYHAKTKRRVTFEYTLLKGVNDHLWQARLLAKLLKGLSAHVNLIPFNPWEGAPVAGTPKAGVLAFAEELKRLGVPTSIRWSRGQDVGAACGQLALKVPRPLTLTPLPEGAGR

SEQ ID NO: 14501 - protein, 531 aa, Zea mays
  unsure (1)..(531): unsure at all Xaa locations
MEAVGVTPAPVAAPEKKKLLDLKDPFPAAANGGAKASPAAKWAMKKKLVGGDAGYVLEDVPHLTDYMPQLPTYPNPLQDNPAYSVVKQYFVNPDDTVTQKIVVHKTSARGTHFRRAGPRQRVYFQSDEVNAAIVTCGGLCPGLNTVIRELVCGLYDMYGVSSVVGIEGGYKGFYSKNTVALTPKSVNDIHKRGGTVLGTSRGGHDTAKIVDCLQDRGINQVYIIGGDGTQKGASVIYEEVRRRGLKCSVVGVPKTIDNDIAVXDKSFGFDTAVEEAQRAINAAHVEAESAENGIGVVKLMGRNSGFIAMYATLASRDVDCCLIPESPFYLEGKGGLLEFVERRLKDNGHMVIVVAEGAGQDLIARSMNFVDTQDASGNKLLLDVGLWLSQKIKDHFKKKPSFPITLKYIDPTYMIRAVRSNASDNVYCTLLAHSALHGAMAGYTGFTVAPVXGRHAYIPFYRITEKQNKVVITDRMWARVLCSTNQPCFLSHEDVENMKHDDDEHHHMHNTQLLEGGSSPVSKCNGSAAAV

SEQ ID NO: 14502 - protein, 154 aa, Triticum aestivum
  unsure (1)..(154): unsure at all Xaa locations
SATSVAPFQGLKSTAGLPVSRRSNGASLGSVSNGGRIRCMQVWPIEGIKKFETLSYLPPLSTEALLKQVDYLIRSKWVPCLEFSKLGSSSXEHNASPGYYDGRYWXTMWXLPXFGCTDXTQVIXRLEGVKEGYPDPKSDHRQMVSACVTSSPTT

SEQ ID NO: 14503 - protein, 508 aa, Corynebacterium efficiens YS-314
MSDPHGFQKYTRAEPAHRPVPLRLMDFHEVYEAAPAGQIEEQAARCMDCGVPFCHQGCPLGNIIPEWNNLVREGRWKEAYDRLHATNNFPEFTGRLCPAPCEGACVLDINDDAVTIKNVELEIVERAFAEGWVEPVRASLDTGLTVAVVGSGPAGLAAAQQLTRAGHRVTVFERSDRLGGLMRYGVPDYKMENRWIDRRLDQMRAEGTVFRVGVSPKAAELALFDAVVLATGTPVARELGIPGAELAGVHPAMDYLTAQNRANEGDGPVPAEFDARGRRVVIIGGGDTGTDCFGTALRQGAASVTQFDIRPRGPVLRAEETPWPMYPNQFRTATAHEEGSYVLRGDESVAEIEALGLGTRAVGEPLGERRFAVNTVALHGDDRGRVTGLTGCQIKVVGGRREPVEGTEFPFDADLVLVALGFTGAEQGGLAHELGVGFDTRGRMIRDAGYRSPTNSRVYIAGDNGRGQSLIVWAIAEGRACAAAVDADLMGETALPVAVTPQDMPMAV

SEQ ID NO: 14504 - protein, 207 aa, Xanthomonas axonopodis pv. citri str. 306
MGSTGAKAMKQLVLASGNAGKLEELRAMLAGLPLRVVAQGELGVEDVPETGLTFVENALIKARHASAVTGLPALADDSGLIVDALDGAPGLYSARYAGSPTNALANNAKLLDAMREVPSDRRSARFYAVIVLLRHPEDPQPLIAEGSWEGVITTQPRGDGGFGYNPVFLDPVYGLTAAEMDTALKNRLSHRAVALATLQHKLHAMSL

SEQ ID NO: 14505 - protein, 428 aa, Chlamydophila pneumoniae CWL029
MFEAVIADIQAREILDSRGYPTLHVKVTTSTGSVGEARVPSGASTGKKEALEFRDTDSPRYQGKGVLQAVKNVKEILFPLVKGCSVYEQSLIDSLMMDSDGSPNKETLGANAILGVSLATAHAAAATLRRPLYRYLGGCFACSLPCPMMNLINGGMHADNGLEFQEFMIRPIGASSIKEAVNMGADVFHTLKKLLHERGLSTGVGDEGGFAPNLASNEEALELLLLAIEKAGFTPGKDISLALDCAASSFYNVKTGTYDGRHYEEQIAILSNLCDRYPIDSIEDGLAEEDYDGWALLTEVLGEKVQIVGDDLFVTNPELILEGISNGLANSVLIKPNQIGTLTETVYAIKLAQMAGYTTIISHRSGETTDTTIADLAVAFNAGQIKTGSLSRSERVAKYNRLMEIEEELGSEAIFTDSNVFSYEDSEE

SEQ ID NO: 14506 - protein, 282 aa, Escherichia coli
ALLLKTQLPSGSELSLYDIAPVTPGVAVDLSHIPTAVKIKGFSGEDATPALEGANVLLISAGVARKPGMDRSDLFNVNAGIVKNLVQQVAKTCPKACIGIITNPVNTTVAIAAEVLKKAGVYDKNKLFGVTTLDIIRSNTFVAELKGKQPGEVEVPVIGGHSGVTILPLLSQVPGVSFTEQEVADLTKRIQNAGTEVVEAKAGGGSATLSMGQAAARFGLSLVRALQGEQGVVECAYVEGDGQYARFFSQPLLLGKNGVEERKSIGTLSAFEQNALEGMLDT

SEQ ID NO: 14507 - protein, 282 aa, Escherichia coli
ALLLKTQLPSGSELSLYDIAPVTPGVAVDLSHIPTAVKIKGFSGENATPALEGADVVLISAGVARKPGMDRSDLFNVNAGIVKNLVQQVAKTCPKACIGIITNPVNTTVAIAAEVLKKAGVYDKNKLFGVTTLDIIRSNTFVAELKGKQPGEVEVPVIGGHSGVTILPLLSQVPGVSFTEQEVADLTKRIQNAGTEVVEAKAGGGSATLSMGQAAARFGLSLVRALQGEQGVIECAYVEGDGQYARFFSQPLLLGKNGVEERKSIGTLSAFEQNALEGMLDT

SEQ ID NO: 14508 - protein, 406 aa, Triticum aestivum
  unsure (1)..(406): unsure at all Xaa locations
PSQFFLYSGSHFGPCLKQQLVTADLTSIIIQLISTAGSMLPSMKTPLLSSNPAVRQLNTPGSPMGFGSIVNQRPSTIREEVVNDISKTSDYEELMNTLNTAHDEKDDLIKCPNPCVGEGPEPVPMEDHDVKESDDGGEAEHLPPGSYVVLQLEKEEILAPHTHFCVICGKGFKRDANLRMHMRGHGDEYKTPAALAKPMRDSGSDPTPVTRYSCPYVGCKRNKEHRKFQPLKTILCVKNHYKRSHCDKRYTCSRCNTKKFSVIADLKTHEKHCGRDKWLCSCGTTFSRKDKLFGHVALFQGHTPALPMDDIKASGALEQPQGSQAMDDMVASTGYNFPGSTSDGIPNLDMKVADDTRGYFSPLNFDPCFGALDDFARPGFDISXNPFSFLPSGPGSCSFGQLSGDS

SEQ ID NO: 14509 - protein, 112 aa, Arabidopsis lyrata subsp. lyrata
LVEKFGIDPNNAFAFWDWVGGRYSVCSAVGVLPLSLQYGFSVVEKFLKGASSIDQHFQSTPFEKNMPVLLGLLSVWNVSFLGYPARAILPYSQALEKFAPHIQQVSMESNGK

SEQ ID NO: 14510 - protein, 632 aa, Oryza sativa
MAALLGILLAAFLAAAAVLFALRLLHSFLWVPRRLERRFRRQGIRGPPRRPLSGNAAGYRDLLAAAQSAPLASFHHAVVARVAPHHREWPERYGRPFVFWLGPRPRLVVSDPEVVKAVLTDTTGTFGKAGPGGNNPLARQLFSEGLVGLTGEAWARHRRVIAPAFNMERVKAWIPEITSITSSMLDKWELQDEVRTEFEIDVNKEFHTLIADVISCVAFGSSYEEGKRVFQLQEEQLKLVILAMRTVYIPGFRFVPTKKNQRRKIVNQEIRNSLRKLIEINGRKCEDSNNLLGMMLSASKIDSEFKMGIEEIIDECKTFYFAGKETTATLLTWATLLLALHQEWQNKARDEVLQVCGKYEHPKAENLSELKIVNMVLKETLRLYPPAVFLNKIANRDVKLGKLDIPAGTQLQLPILDIHHDVSIWGADADEFDPSRFAEGKSYHLGAYFPFGIGPTICVGQNLAMVEAKSHSNPSMVLKFLSIRFETSMDLCVDFWVFAITESPEDPNKANVILSLIDLLSYDRLQITGTRSRFSPTFALDKNGRQGRQIEADIPAMRRWRMARQLLATVADATAAGNVMVSGSCREPNGCRRQQVEARKESDSEGGDWVRVRARRRRRKRATVTERRHGRR

SEQ ID NO: 14511 - protein, 436 aa, GIBBERELLA ZEAE PH-1
MASPSPTESGNEGHDLPPSPAPSSPRTGRKRYALATELVYTDSKDQYGASSVPIYQSATFKQTSASGGQQEYDYTRSGNPTRTHLERHIAKIMNAQRALAISSGMGALDVITRLLRPGDEVITGDDLYGGSHRLLTYLAANQGIVVHHVDTTTVDSVRARLSEKTAMVLLETPTNPLIKVVDIPSIARLVHDVNPKALVVVDNTMLSPMLFNPLDVGCDIVYESGTKYLSGHHDIMAGVIAVNDSQIGDKLFFVINSTGCGLSPNDSFLLMRGVKTLAIRMEKQQANAQAIAEFLESRGFRVRYPGLKSHPQYDLHWSMARGAGAVLSFETGDPAVSERIVEAARLWAISVSFGCVNSLISMPCQMSHASIDAKTRAERQMPEDIIRLCVGIEDPTDLIEDLSRALVQAGAVTVTMDGFHATGAAKELGETPLVFQ

SEQ ID NO: 14512 - protein, 195 aa, Zea mays
  unsure (1)..(195): unsure at all Xaa locations
DAWADAWADAWADAWALLPIVGGVALASLTEASFNWAGFWSAMASNVTFQSRNVLSKKLMVKKEESLDNINLFSIITVMSFFLLAPVTLLTEGVKASPPVLHPAGLNLKQVYTRSLIAXFCFHAYQQVSYMILARVSPATHSVGNCVERPTVIVTSVLFFRTPVFPINSLGTGIALAGVFLYSQLKRLKPKPKTA

SEQ ID NO: 14513 - protein, 675 aa, Mesorhizobium loti MAFF303099
MCGIAGIVALNAAAASPSREALMRMVGTLAHRGPDEHGLYRDKRAGLAHARLSVVDLSSGQQPLADTGDTSWIVFNGEIFNYVELREKLIALGHRFRTRSDTEVALHAYRAWGEAAFERMNGQWAIAIWDSIAGRLVLSRDRFGICPLHFCEHAGRLYFASEVKAIFAADPTIPRAFDPAGLDQTFTLWTVVPPQGVFQGIHELVPGHVRIYQDGTVREQVFWQPSYPENIGALQGEFTGSCDDAVDRVRDALEAATALRMVRADVPVGCYLSGGLDSSLVATLGRRFAGRRFQTFSLRFADAEYDETRFQRLVAEATGSEHHEVVVSRGDIAAIFPEVIHHTERPILRTAPAPLFLLSRLVRERGIKVVLTGEGADEMFAGYDLFREAKVRRFWGRQPASTRRSRLLERLYPYLTRSPVQQQAMARQFFGRGIEAYDAPGFAHDTRWRSTGAIKRLFSADLRAESQRRDAVSELLARLPAAFSRWSHLAQDQYLEVQTLMSGYLLSSQGDRMLMAHSVEGRFPFLDDELVRLANSLPPSYKLRVLDEKHVLKRVAQPIVPSEIVTRKKQPFRAPNALCFAADAAPEYIREALSETAIRKANVFDPVSVTRLLDKCQARTGDGDLSNADNMALVGVLSTQLLHQQFVASCPSATHVRGLSVDVDREHREERLHVA

SEQ ID NO: 14514 - protein, 293 aa, Pseudomonas putida KT2440
MARKGIILAGGSGTRLHPATLSVSKQLLPVYDKPMIYYPLSTLLLAGIRDILIISTPQDTPRFEQLLGDGSQWGLNLSYAIQPSPDGLAQAFTIGADFIGNDPSALVLGDNIFYGHDFQALLLNADKRESGASVFAYHVHDPERYGVAEFDDSGRVLSLEEKPAVPKSSYAVTGLYFYDNQVVNLARELKPSPRGELEITDLNNLYLQQQQLQVEIMGRGYAWLDTGTHDSLLEASQYIATMERRQGLKVACPEEICYRAGWINAEQLECLAQPLLKNGYGKYLQNLLKEKVF

SEQ ID NO: 14515 - protein, 350 aa, Oryza sativa
MALTTNSLEEMQRNGVMECSVCHSKVVAPSPRSVSRAYDKHRSKISSKYRALNFLLVSGDCILVGLQPILVFMSKVDGKFQFSPISVNFLTEVTKVIFAIVMLIIQAARNNALLAVPALLYAINNYLKFIMQLYFSPATVKMLSNLKWEALALLLIGISVNQLSSIPDGTKSFGLAVTTIAYIYTLIFNLFLYGYGAIFNFLGILGTVIFQGPESFDILRGHSRATMFLICNNAAQGILSSFFFKYADTILKKYSSTVATIFTGLASAAFLGHTLTVNFLLGISIVFISMHQFFSPLAKVKDDKPAGALEPEDAQNHRSSDSSFVNMTAGAADDVGIEEILFAMNHTEFM

SEQ ID NO: 14516 - protein, 349 aa, Xylella fastidiosa 9a5c
MFINAYGAHAGDKPLESMQIARRVPGAHDVQIDIHYCGVCHSDIHQVRSEWAGTLFPCVPGHEIVGRVSAIGTHVKGFKTGDLVAVGCMVDSCKDCQECNAGLENYCDGMIGTYNFPTHDAPGHTLGGYSQKIVVDERYVLRIRHPEAQLAAVAPLLCAGITTYSPLRHWNAGPGKKVGIVGIGGLGHMGIKLAHAMGAHVVAFTTSESKRQDAKALGADEVVVSRDEESMAAHVKSFDLILNTVAASHSLDPFLTLLKRDGTLTLVGAPATPHPSPQIFNLIFKRRSIAGSLIGGIAETQEMLDFCAENGIVADIELIRADGINEAYERMMKGDVKYRFVIDNATLAA

SEQ ID NO: 14517 - protein, 865 aa, Methanothermobacter thermautotrophicus str. Delta H
MTVLEAALANDIYIPHLCFREGIEPFGGCRLCLVENTDGRLVTACETPVEDGAEFISESERINNIRRTVVSLLISEHSRDCLSCPSSGDCSLQEVSSYLNLTEDDLSRLRQDLPESEPDESNPFFIRNHDKCILCGLCVRVCRATGAEAIDFAYRGHDTRISTFMDRAITESSCVSCGECVEVCPVGALVSREEKPFTEVKTVCPYCGAGCGIYLGVRGDRVVSSRGDPDNPVNRGKLCVKGRFALKFVNSPERLKKPLIKVDGRFVEVEWDEALSTVAERLSEYSGEEFAAVASAKCTNEENYILQKFTRAVMLSGNIDHCARLCHAPSVRSLSMTLGSGAMTNSIAELEDSACILAVGTNPTETHPLTAYSVIRAIRSGAKLVVIDPRRTRISELADIHLQNRPGSDIPLIMAMCRFIIEEGLHDTEFIESRTENFDEFRDAVMALDLEEVESLTGVGVEDMRRAAITYASKKPASIIYSMGITQHAHGTDNVIALSNLALLTGNLGKPSAGINPLRGQNNVQGACDMGALPDLLPGYQTLDDSFRFSDKWGSTIPGPGMTLPEMFDAALEGRLRAMYIMGENPLLSEPETEKTRKALESLDFLVVQDIFMTETAELADVVLPACAWAEKDGTFTNTERRVQLIRKALDAPGEARTDWEIICMLAEKMGAEGFDYASSSEIFKEIAALVPSYAGISHERLQDGGIQWPCTSYEHGGTQYLHSERFSTPTGRASFLLPGYHVGEVSEEYPMVLVTGRNLYQYHTRSMTGRVPELDSFSDREELLINPLDAAKLGVEDGGTVLVKSEGGSLEVRARVSGDVMEGVVFMTFHFAETPANVLTGGDRDPVSGMPELKFTPVSIRPVE

SEQ ID NO: 14518 - protein, 325 aa, Triticum aestivum
MATPTTTPATMRAVQYDACGGGAAGLKHVEVPVPSAKKNEVLLKLQAATINPVDWKIQKGDLRPLLPRRLPFIPVTDVAGVVVDVGPGVKGLTAGDQVVAMLNSFNGGGLAEYAVASANLTVKRPAEVSAAEGAGLPIAAGTALQALRSIGAKFDGTGKPLNVLVTAASGGVGLYAVQLAKLANLHVTATCGARNMDLVKSLGADEVMDYRTPEGASLQSPSGRKYDGVVHCTVGVSWSSFQPLLSDAGRVIDITPNFSAILTSALHRMTFSKKRLVPLLLSPNKADLELLVGLLKEGKLKTVVDSKFPLSEADKAWQSSIDGHW

SEQ ID NO: 14519 - protein, 706 aa, Oryza sativa
  unsure (1)..(706): unsure at all Xaa locations
MICRSLLLLRSNAASKASNIVKHVAATGCLPKYSSEAPARYFSSEPSLQVDSTEENGFKGHGMLAPFTAGWQSTDLHPLVIDRSEGSYVYDINGKKYIDALAGLWSTALGGNEPRLIKAATDQLNKLPFYHSFWNRTTKPSLDLANEILSMFTAREMGKIFFTNSGSEANDSQVKLVWYYNNALGKXTNKKKFIARSKSYHGSTLVSASLSGLPALXQKFDLPAPFVLHTDCPHYWRFHLPDETEEEFATRLATNLENLILKEGPETIAAFIAEPVMGAGGVIPPPKTYFEKIQAVLKKYDILLIADEVITAFGRLGTMFGCDMYDIKPDLVSIAKALSSAYMPIGAILVSPEITDVIYSQSNKLGSFAHGFTYSGHPVSCAVAIEALKIYKERNIIEHVQKIAPRFQEGIKAFSGSPIVGEIRGLGLILGTEFVDNKSPNDPFPAEWGVGSLFGAECEKRGMLIRVAGDNIMLSPPLIMTPDEVEEIICKYGDALKATEERIAELKAKRVIDDGDDKLTMFNVYRVVSSVDANNELLFELADFESFADALGGYLLLLLVATWEMEMDCLGASWRSDRYAWVVGDGGSREETQRPRGSMNTQDSKRMRSLGKVLGSRVAGRRQEVHVARGYGKKMATKGRKYDMRSGGGRGGTWRRVTVMNDISHLYKIALLLILGWMYSLHSARTGYMGLTYSILVNLDTYSNLY

SEQ ID NO: 14520 - protein, 300 aa, Bacillus anthracis str. A2012
MGEKMLGIINATGSFPSLKKVTGHRSLAALPFGGRYRLIDFMLSNMVNSNIHSVAVFTSHKNRSLMDHVGSGKQWDLDRKRDGLFLFPPNCQCDQDEFGSFAHFRRHIDYFLRSREEYVVITNSHLVTALNFQAVLERHIHTAADITEVCHEGVSLQTYVLKKQLLLDLFEAYKDMEQYSLFDVVREKRGKSLHIATYEHTEYVAIIDSIESYYKHSLEILQPAIWKQVFKKEAPIFTKVKDEPPTRYVKGAAVKNTMIANGSIIEGEVENSVVSRSVKIGKGSIVRLALNAMRKLEITV

SEQ ID NO: 14521 - protein, 217 aa, Mesorhizobium sp. BNC1
MKFFVDTADVNEIRELSETGLLDGVTTNPSLIMKSGRPILEVTREICEIVDGPVSAEVTAVDFKEMMREADILSKIADNIAIKVPLTMDGLKACKALTSSGRMVNVTLCFSANQALLAAKAGATFISPFIGRIDDMGIDGMELIAEIRTIYDNYDFDTEILAASIRSVNHVKQAAIIGADVATVPPAVLKSLVKHPLTDKGLEAFLADWAKTGQKIG

SEQ ID NO: 14522 - protein, 489 aa, Glycine max
  unsure (1)..(489): unsure at all Xaa locations
MGRVQVNNKEEFSQMENDDFSDSQLVRHFRGVLVAVTTGDRENYDELVGYLHPKKNLNPDEVAILVTTLKALSGAVSYIDSVHHESLLFAVSRMSLWNYGIDIMDALLELIISLAASNGKYIDWCLEMLVKHFVPPFYLLDSLRQENGIDRKNKVLSRVHAALKEIADLVPLAPLRLSPIVIQKMPSVFSKETEIVMYVENMLRLESGAIGETVGSIMLPALVDRLLELDVEIGWDGILQEDAKGIFEMELEDVTEFADEDENCDSMPPSELLNRKNLQGNLVVEKLDSLMVLAFLHLESCQSSGRLTEVFDTLLASFQRTVLNAYKSKFTQYVMFYACALDPEGCGVKFAMVLADMFGCDVNPPITRMSAAAYLASYLTRAKFLSAALVTNIIQSLVDWCYAYCKLRDFDMNPRAHQVFYSGCQAIMYIMCFRMRSLMDIPRLKLQLLNMPMEAILKHKLSPLKVCLPTVVVEFLXQAKAAQLFMASE

SEQ ID NO: 14523 - protein, 425 aa, Xylella fastidiosa 9a5c
MMSNSPQTPLATRQRLSEVRYEIRGELARRARELEAEGRKLIKLNIGNPGAFGFRAPEHLQRAIADDMGRTDPYTHQQGLPIAREAIAAAYVRRHYPDADADRVFVGNGVSELIDLSLRALLNPGDEVLVPSPDYPLWSAATILNDGRPVYYRCAPENGFQPDAVEIETLVSSRTRAIVLINPNNPSGANYSQELLERIVAIAVKHHLLLLVDEIYDQILYDGAVFVPVAPLAGTHPCITFSGLSKVHRACGWRVGWALLSGSSIQIDNLRNAMDLLGALRLCANVPGQYAIDAAVNGPDTITPLCSPGGPLYETRRAVIEACVVSEHLSLVVPAGALYAFPSVVGPAARHFDDYAFALELMNDEGVLVVPGSSFNVPYRDHFRVTLLPDAALIREVFSRIDRALSRRAEVAEKVVPLKSRSAAA

SEQ ID NO: 14524 - protein, 211 aa, Zea mays
MRRRGVAAADADGDVELRFRGVRKRPWGRYAAEIRDPAKKARVWLGTFDSAEDAARAYDAAARMLRGPKARTNFPLPAAAALHHPHMPAAAAAAAPPYTTYPTATGVVSTPPVARPACSSLSSTVESFSGARPRPVLPPRFPPPSIPDGDCRSDCGSSASVVDDDCTDAAASASCPFPLPFDLNLPPGGGGAGVGFYADEEDELRLTALRL

SEQ ID NO: 14525 - protein, 274 aa, Coxiella burnetii RSA 493
MNTSNITFIGGGNMARNIVVGLIANGYDPNRICVTNRSLDKLDFFKEKCGVHTTQDNRQGALNADVVVLAVKPHQIKMVCEELKDILSETKILVISLAVGVTTPLIEKWLGKASRIVRAMPNTPSSVRAGATGLFANETVDKDQKNLAESIMRAVGLVIWVSSEDQIEKIAALSGSGPAYIFLIMEALQEAAEQLGLTKETAELLTEQTVLGAARMALETEQSVVQLRQFVTSPGGTTEQAIKVLESGNLRELFIKALTAAVNRAKELSKTVDQ

SEQ ID NO: 14526 - protein, 486 aa, Oryza sativa (japonica cultivar-group)
MSYNHSPSITAETINQKVRIFTYEPCGEIVRHARRLEKEIYENPGSLPFQEIIYCNLGNPQALGQRPINFFREVLSLCDNPSLIDRDEARALFSPCALKRARKIIESLPGRDSGSYTSSQGVRGLREAVADGIAARDGFPSKPDNIFLTDGASSAINMMMQILIRSHEDGILCPLPEYPLYSASIILHGGTMVPYNLTEDSIWGLEIFEVKRCLEDARASGLTIRAMVVINPGNPTGQVLSITNQEEIVEFCRKEGLVILADEVYQENVYTENKRFNSFKKVARSLGYDHHDLSIVSFHSVSMGYYGECGRRGGYMEICGFGDDVIDEMYKLASLTICPNIAGQILISLVMDPPKLGDEAFEIFMVEKEETYSSLLKRAKALQKAFNGLEGVSCNKFEGAMYLFPRLRLPQAAIKAAQLEGVSPDVFYAHRLLDATGIAVVPGSGFHPVSGTSHIRCTILPGEETITAMVPSLQAFHEAFMDEFRG

SEQ ID NO: 14527 - protein, 516 aa, Candida albicans SC5314
MFTNSIISKSTTRLTQLSRQLSTTTMAPTSTKNSIKHFDYLVIGGGSGGVASARRAAKYGAKVLLIESNFKKFGGTCVNVGCVPKKVMWYTADLAHKKHDLYAYGLDKEPDSIKYGDFDWAKLKHKRDAYVTRLNGIYENNLKREKVDYAYGFAKFINSEGEVEVTLSGDQELPFLDEGKTYKKGEKLVFSADKTLIATGGTAIVPPSVPGAELGTTSDGFFALEKQPKKVAIVGAGYIGVELSGVFSSLGSETHFFIRGDTVLRSFDEVIQNTVTDYYIDNLGINIHKQSTITKIEGSKDGKKVVHLKDGTSVEVDELIWTVGRKSLIDIGLDKVDVKINDKQQIVADEYQVTNNPKIFSLGDVVGKVELTPVAIAAGRRLSNRLFGGPEFAKDKLDYNNIPSVIFSHPEAGSIGLSTKEAIEKYGEENLKIYQSKFTAMYYAMMDDQKDKSPTVYKIICAGPEEKVVGLHIVGDSSAEILQGFGVAIKMGATKKDFDNCVAIHPTSAEELVTMT

SEQ ID NO: 14528 - protein, 112 aa, Arabidopsis lyrata subsp. lyrata
LVEKFGIDPNNAFAFWDWVGGRYSVCSAVGVLPLSLQYGFSVVEKFLKGASSIDQHFQSTPFEKNIPVLLGLLSVWNVSFLGYPARAILPYSQALEKFAPHIQQVSMESNGK

SEQ ID NO: 14529 - protein, 489 aa, Mycobacterium tuberculosis CDC1551
MALWGDGISALLIDGKLSDGRAGTFPTVNPATEEVLGVAADADAEDMGRAIEAARRAFDSTDWSRNTELRVRCVRQLRDAMQQHVEELRELTISEVGAPRMLTASAQLEGPVGDLSFAADTAESYPWKQDLGEASPLGIATRRTLAREAVGVVGAITPWNFPHQINLAKLGPALAAGNTVVLKPAPDTPWCAAALGEIIVEHTDFPPGVVNIVTSSSHALGALLAKDPRVDMISFTGSTATGRAVMADAAATIKKVFLELGGKSAFVVLDDADLAAASAVSAFSACMHAGQGCAITTRLVVPRARYEEAVAIAAATMSSIRPGDPNDPGTVCGPLISARQRDRVQGYLDLAVAEGGRFACGGARPADREVGFYIEPTVIAGLTNDARVAREEIFGPVLTVIAHDGDDDAVRIANDSPYGLSGTVYGADPQRAARIASRLRVGTVNVNGGVWYCADAPFGGYKQSGIGREMGLLGFEEYLEAKLIATAAN

SEQ ID NO: 14530 - protein, 794 aa, Psilotum nudum
GSIGSLVMAVIVNDNDAEPSGRGNQPKNRRLWGMVVCHHTTPRAVPFSLRSACEFLMQVFGLQLNMEIELAAQMREKHILRTQTLLCDMLLRDAPIGIVTQSPNIMDLVKCDGAALYYGKKFWLLGTTPTEAQIKDLADWLLDVHRDSTGLSTESLADAGFPGAAALGDAVCGMAAVKITPRDYLFWFRSHTAKEIKWGGAKHNPDDKDDGKKMHPRSSFKAFLEVVKWRSSPWEDVEMDAVHSLQLILRGSFQDIDDSESKTMIHHRLNDLNLHGMDELSTVANEMVRLMETATAPILAVDSSGFINGWNGKAAELTGLPLEDAMNKSLVRDLVVDESVSTVERLLYLALQGEEERNVEIKLKTFGTQADKGPVILVVNACASRNITANVVGVCFVGQDVTGEKVVMDKFTRIQGDYRTIVQSPNPLIPPIFGSDEFGYCSEWNPAMVKLSGWKMEEVLGKMNVGEIFGSEMACCRLRGQDAMTKFMIVLNSAMGGQDSDRFPLGFFDRQGKYVEALLIANKRTDGAGAITGVFCFLHIASAEVQQALQVQKRSARTALDKLKEVAYMRQEIRNPLYGIMFTRRLLEGTNLSEEQKQIIDTSAVCEKQLHQILDEDNFENLDHGNIDLDTIEFTMGTVMDAVISQGMIRSREKGLQLIRETPVDIKNMRLYGDQLRLQQVLADFLTTAVRFTSSSDGWVGIKVVPTMKGLGGGLHVMRFDYRISHPGKGIPEDLVQQMFDCSREITQEGMGLSVSRKLVRLMNGDVSYIREAGVCYFLVNVEFPLADRDDSQN

SEQ ID NO: 14531 - protein, 665 aa, Mesorhizobium loti MAFF303099
MCGIAGILLAPDAANTNALRAIGPMMMALRHRGPDGEAFWMSREAGIAFGHRRLAIVDLSEAGRQPMHSASGRYVITFNGEIYNFRDLRRELEGAGHHFRGTSDTEVMLCAIESWGLEAALARFAGMFAFGLWDLKNRTLHLARDRMGKKPLYVASTPEALVFASELKAITCFPGFTPELDVDAAATMLSKGWVPDDRCIWQGVFKLPPGSVLSVTAADFANARGAGSLAHRIRRWWSLADVACKAQRDPIAGSDEDLTTELDSLLRLAVKERMVADVPLGAFLSGGIDSSTVVALMQAQSPTPVRTFTIAFGESGFDEAPHAAAVARHLGTDHTELHLSPAAALEVIPELPRIWDEPFADESQIPTLLVSRLARRHVTVALSGDGGDECFAGYSRHFLATRLRRQHELPSSFRRMLAAGAGLLAQASQKDIFGSLPLSANMRHGLRGDRLNRLARLFAAANEDQLLQRLTESSTNKLIHHKPAASNASATQLDGLLSRLLFDDMTGYLPGDILVKLDRATMANSLEGRCPILDHRVVEFAWRLPTDAKVRSGKGKWILRQLLDRYVPRRLVDRPKQGFDVPVGAWLRGPLRDWATDIIATTRLSGDGVIDCAKVDACWRDHLHGNQDHFRDLWPLLMFQAWRNDAMRPSAPATHASYDIELTGD

SEQ ID NO: 14532 - protein, 553 aa, Ralstonia metallidurans CH34
MTCDSCAAHVKEALEKVPGVQSALVSYPKGTAQLAIVPGTSPDALTAAVAGLGYKATLADAPLADNRVGLLDKVRGWMAAAEKHSGNEPPVQVAVIGSGGAAMAAALKAVEQGAQVTLIERGTIGGTCVNVGCVPSKIMIRAAHIAHLRRESPFDGGIAATVPTIDRSKLLAQQQARVDELRHAKYEGILGGNPAITVVHGEARFKDDQSLTVRLNEGGERVVMFDRCLVATGASPAVPPIPGLKESPYWTSTEALASDTIPERLAVIGSSVVALELAQAFARLGSKVTVLARNTLFFREDPAIGEAVTAAFRAEGIEVLEHTQASQVAHMDGEFVLTTTHGELRADKLLVATGRTPNTRSLALDAAGVTVNAQGAIAIDQGMRTSNPNIYAAGDCTDQPQFVYVAAAAGTRAAINMTGGDAALDLTAMPAVVFTDPQVATVGYSEAEAHHDGIETDSRTLTLDNVPRALANFDTRGFIKLVIEEGSHRLIGVQAVAPEAGELIQTAALAIRNRMTVQELADQLFPYLTMVEGLKLAAQTFNKDVKQLSCCAG

SEQ ID NO: 14533 - protein, 198 aa, Glycine max
  unsure (1)..(198): unsure at all Xaa locations
MSFAYQTDGYQLVASQAPPIFMRKGKSIVLGVFVLLRWYSVPLAAGLSEGISLGMHEALVLRDGRSDYLGKGVXKAVDYANTDLGPALIGKDPPEQTDIDNLMVXQLDGTANERGRSKLKLGTNAILXKCVEICINEASMLKNPIYKHIVNIXGDKKPDLPVPASKVNKGGSHAXDKLAMNEGIALPVGATYVKETMM

SEQ ID NO: 14534 - protein, 398 aa, Halobacterium sp. NRC-1 [sequence omitted]

SEQ ID NO: 14535 - protein, 172 aa, Triticum aestivum
  unsure (1)..(172): unsure at all Xaa locations
ASSATSVAPFQGLKSTAGLPVSRRSNGASLGSVSNGGRIRCMQVWPIEGIKKFETLSYLPPLSTEALLKQVDYLIRSKWVPCLEFSKVGFIFREHNASPGYYDGRYWTMWKLPXFGCTDATQXINEVEEXKKEYPDAYVRIIGQHRSYFIASSTGARVARLTTTRAHVHSFT

SEQ ID NO: 14536 - protein, 389 aa, Streptomyces sp. CL190
MSISIGIHDLSFATTEFVLPHTALAEYNGTEIGKYHVGIGQQSMSVPAADEDIVTMAATAARPIIERNGKSRIRTVVFATESSIDQAKAGGVYVHSLLGLESACRVVELKQACYGATAALQFAIGLVRRDPAQQVLVIASDVSKYELDSPGEATQGAAAVAMLVGADPALLRIEEPSGLFTADVMDFWRPNYLTTALVDGQESINAYLQAVEGAWKDYAEQDGRSLEEFAAFVYHQPFTKMAYKAHRHLLNFNGYDTDKDAIEGALGQTTAYNNVIGNSYTASVYLGLAALLDQADDLTGRSIGFLSYGSGSVAEFFSGTVVAGYRERLRTEANQEAIARRKSVDYATYRELHEYTLPSDGGDHATPVQTTGPFRLAGINDHKRIYEAR

SEQ ID NO: 14537 - protein, 519 aa, Solanum tuberosum
MDALCASMKGTAQLVAICNQESAFWGEKISGRRLINKGFGVRSCKSFTTQQRGRNVTPAVLTRDINKEMLPFEESMFEEQPTADPKAVASVILGGGVGTRLFPLTSRRAKPAVPIGGCYRLIDVPMSNCINSGIRKIFILTQFNSFSLNRHLATYNFGNGVGFGDGFVEVLAGTQTPGDGRKMWFQAADAVREFIWVFENQKNKNVEHIIILSGDHLYRMNYMDFVQKHIDTNADITVSCVPMDDGRASDFGLMKIDETGAIIQFAEKPKGPALKAMQVDTSILGLSEQEASNFPYIASMGVYVFKTDVLLNLLKSAYPSCNDFGSEIIPSAVKDHNVQAYLFNDYWEDIGTVKSFFDANLALTKQPPKFDFNDPKTPFYTSARFLPPTKVDKSRIVDAIISHGCFLRECNIQHSIVGVRSRLDYGVEFKDTMMMGADYYQTECEIASLLAEGKVPIGVGPNTKIQNCIIDKNAKIGKDVVILNKEGVEEADRSAEGFYIRSGITVIMKNATIKDGTVI

SEQ ID NO: 14538 - protein, 430 aa, Bacillus anthracis str. Ames 0581
MTTGEKITVTNGVMNVPNNPIIPFIEGDGIGPDIWAAASRVLEAAVEKAYDGEKKIVWKEVLAGEKAFNQTGEWLPEETLNLIREYLIAIKGPLTTPVGGGIRSLNVALRQELDLYVCLRPVRYFEGVPSPVKRPEDTDMVIFRENTEDIYAGIEYAQGSPEAEKVLAFLKEAMGVNKIRFPETSGIGIKPISEEGTKRLVRAAIQYAINEKRSSVTLVHKGNIMKFTEGAFKNWGYEVAEQEFGDKVFTWAEYDRIVEKDGKDAANKAMADAEVAGKIIVKDSIADIFLQQILTRPREFDVVATMNLNGDYISDALAAQVGGIGIAPGANINYVTGHAIFEATHGTAPKYAGLDKVNPSSVLLSGVLLLEHLGWNEAAKLVTASVEKTIASKVVTYDFARLMEGATEVKCSEFANELIKNMDVAIIKNA

SEQ ID NO: 14539 - protein, 236 aa, Thermobifida fusca
MIRAELDKDPRDVAAMFDSIADRYDLLNRVLSLGRERYWRQATVAAVDAYSGELVLDLAAGTGTSSESFTRRGARVIACDFSFGMLRVGAERRGGASRKGVTVVAGDALHLPFADQTFDAVTISFGLRNVHDVDRALAELLRVTKVGGRLVICEFSHLPVQPLDRMLGWGMKIGLPWVARQFSDNPDAYAYLSESIAAWPDQAGLARKISAAGWSRVAWRNLTFGVVALHRAYRER

SEQ ID NO: 14540 - protein, 501 aa, Chromobacterium violaceum ATCC 12472
MQSLKPGFELKSRYANYIGGRWVPPVNGRYFENVTPITGKPLCEIPRSDEQDVELALDAAHAARYAWGHTPVTERAIALNRIADRMEANLALLAEVETWDNGKPIRETRAADIPLAIDHFRYFASCVRAQEGSLGEIDANTVSYHFHEPLGVVGQIIPWNFPILMAAWKLAPALAAGNCVVLKPAEQTPLSILVLMELIGDLLPPGVLNVVNGFGVEAGKPLASSKRIAKIAFTGETGTGRLIMQYASQNLIPVTLELGGKSPNIFFGDVAAKDDAFLDKAIEGFVMFALNQGEVCTCPSRALIHESIYDRFMEKALARVAAIKQGNPLDPATMIGAQASQEQMDKIQSYLAIGRDEGAKVLAGGARAQLDGDLAGGFYIQPTVFHGHNKMRIFQEEIFGPVVSVTTFQDRDEALAIANDTLYGLGAGVWTRDMNTAFFMGRHIEAGRVWTNCYHAYPAHAAFGGYKQSGIGRETHKMMLEHYQQTKNLLVSYAEDKLGFF

SEQ ID NO: 14541 - protein, 267 aa, Ralstonia metallidurans CH34
MSIPSFGVGTFRLTGQVVVDSVRNALDVGYRAIDTAQIYGNEADVGQAIAESGVERGELFVTTKIWTANYAADKLVPSLRESLDKLRTDYVDLTLIHWPAPGNGVALSEYMAALAEAKALGLTRQIGVSNFNIELTRQAIEAVGKGEIATNQIELSPYLQSRKLTAFLKEQGIAVTSYMTLAYGKVLKDPVLGQIAAKHHATVAQVALAWALQLGYAVIPSSTKRENLASNLLARDLKLDADDMALIASLERNGREVSPEGLAPVWD

SEQ ID NO: 14542 - protein, 245 aa, Lilium longiflorum
MGRGKIEIKRIENTTNRQVTFCKRRNGLLKKAYELSVLCDAEVALIVFSTRGRLYEYANNSVKGTIERYKKASSDAFNTGSVSEANAQYYQQESSKLRNQIVSLQNAHRSMLGESIGSMGTQGTEIHGEKAGKMDNNKIRTKKNELLFAEIEYMQKREAELQNNSMFLRTKIAENERSQQQQMDMERSQQQHMDMDRSHQRHLEMLPTTSAFETMPTFDSRNFFDINLIEAHHHYQQQQTALQLG

SEQ ID NO: 14543 - protein, 188 aa, Zea mays
MAKPRGGGGLLDLEGHYAFYGAYHSNPVNVGIHELFVWPIFLTALMLLHLTAPSTHAAGISAAVYAAYYFLLDRRAGALAALFCYLCWAASGALSARLGFSVGWKVVVVAQLFCWIMQFIGHGVFEKRAPALLDNLVQAFLMAPFFVLLEILHTFGGYEPYPGFHDKVSKLIEEARKEWEDKKSKKSS

SEQ ID NO: 14544 - protein, 438 aa, ASPERGILLUS NIDULANS FGSC A4
MVPPMTSAVLHRDTRFVPKKAVGGKGSYLLLEDGTKFLDSTGGAAVSCLGHGHEKIIQAITEQFTKVEYCHTAFFGTEASENLASLLVDSTGGKLSKLFVVSSGSEAVEAALKLARQYFLELPTPQPQRTRFIARKPSYHGTTLGALGVGGHALRRQPFEPILSQNVSHVSPCYAYRGKNDGESDADYVARLAGELDAEFRRVGPDTVCAFIAEPIVGAALGCVPAVPGYFAAMKTICEKHGALFILDEIMCGMGRCGTLHAWEQEDVTPDLQTIGKALGGGYAPVSGLLISDKVVQTVDKGTGAFRHGQTYQGHPISCAAALAVQTVIVEEQLLDNVKSMGEYLEKRLRGTLEGMQYVGDIRGKGLFWGVEFVKNKATKEPFSSETALAFKIQETGTVNGTRGDHIILAPAYNVTKEEIDIIVDTTAKVLAEVFAQL

SEQ ID NO: 14545 - protein, 477 aa, Methanosarcina acetivorans C2A
MWEEGGSILDYGEPETLEKWRNSEKTEKSEDPMRKQETELDFFEQEIGLLDVVGPRAREIIGQDCKVMSACVSRPYPLVVDRAKGSVIKDIDGKEYIDFIAGIAVMNSGHSNPEVNAAISAQLEKMVHCGYGDFFAEPPLKLAKKLRELSGYSKVFYCNSGTEAVEAAMKLALWKTKRPNFIAFYNAFHGRTLGALSLTCSKVRQKEHFPTMRTVHTHYAYCYRCPLNLEYPSCGVECAKQIENLIFRKELSPEDTAAVFIEPVQGEGGYIVPPQEFHKEVKRICTDNDVLLIADEVQTGCFRTGPFLAMENFEVRADITCLAKALGAGLPIGAMLADSTLMDWPPGVHSNTFGGNLLSSASALASLEFLEKENMENRVREMGTHIRQRLRELQENCPCIGDVRGLGLMIGAEIVKSDKSIDPIRRDRIVREAFKEGVLLLPCGDSVIRFSPPLVMTDEEADLGLDKFEKALRRAAK

SEQ ID NO: 14546 - protein, 503 aa, Methanosarcina acetivorans C2A
MVLYSLFQGDFVVQEYKLHIGGESRDSATGETFDNINPATLENLATVQVAGSEDVDRAVEAAEEGFRVWSEVPAPRRAEVLFRTARILQERKEDLARLMTEEMGKVLPETRGDVQEAIDIAIYAAGEGRRMFGETTTSELKDKFCMTVLRPIGVVGMITPWNFPLAIPGWKIMPALIAGNAIVFKPASDTPLLAIKLVEILMEAGLPPGVVNLVTGPGGSTGKAIVQHPRIKAISFTGSLETGKWIMEECAKTMKRVSLELGGKNPVIIMDDADLELALEGVLWGAFGTTGQRCTATSRLILHEKIKDEFTARLLAKTKLLRVGNGLLPETDIGPIINKAQLEKIERYVRIGMEEGATLLLGGKAIDPGLPGYFFEPTVFTDVRPDMRIAQEEIFGPVLSIITVSGLEEAIEVANNTRYGLSSAIYTENVGKAFRAVKKIEAGITYVNAPTIGAEVHLPFGGVKGTGNGFREAGTEAIKEFTEIKAVYIDYSGRLQRAQIDME

SEQ ID NO: 14547 - protein, 531 aa, Oryza sativa (japonica cultivar-group)
MEAVGVAPAPAGVPEKKLLEVKESRKAAPAAPSTSMAAKWAMKKKLVGGDAGYVLEDVPHLTDYLPELPTYPNPLQDNPAYSVVKQYFVNTDDTVTQKIVVHKTSARGTHFRRAGPRQRVYFQSDEVNAAIVTCGGLCPGLNTVIRELVCGLYDMYGVTSVVGIEGGYKGFYSRNTVALTPKSVNDIHKRGGTVLGTSRGGHDTGKIVDSIKDRGINQVYIIGGDGTQKGASVIYEEVRRRGLKCSVVGVPKTIDNDIAVIDKSFGFDTAVEEAQRAINAAHVEAESAENGIGVVKLMGRNSGFIAMYATLASRDVDCCLIPESPFYLEGKGGLLEFIEKRLKDNGHMVIVVAEGAGQDLIAKSMNFVDTQDASGNKLLLDVGLWLSQKIKDHFKKKRNFPITLKYIDPTYMIRAVRSNASDNVYCTLLAHSALHGAMAGYTGFTVAPVNGRHAYIPFYRITEKQNKVVITDRMWARVLCSTNQPCFLSHEDVEHLKHDDDEHHLHNTQLLEGESSPVKDSSKCNGTAAPV

SEQ ID NO: 14548 - protein, 580 aa, Mesorhizobium loti MAFF303099
MGSYLRWLKSNVSSTPLAHVASLLVLAGSVILEAINTIYVDQGVTFIAFIPVIIVIVYLEGRLVAIAATVLMAAAGLWMRRVLNAQLSAEDWTSAIFLLVSGGLIASVFHRLRQDLRGALEVAETRLAAIDAAESRYRWAFERAALGFANANRHGELLQSNRRLFEMTGYGEKELAQLKLEGLVLPDDRDAVRALLKDLDNGAASSAADIRVLRKDGKAFWARMALSSSRPDEASTESVFVVVDDISERRAAREALRAQKEWLDLALSAGRLGTWRIDIKEGTVAGSGKFWDILGLPSKPVRPLEELSAVVHPADWPKLAASAKPSSAVNYDVEIRVRRTDGHIRWVALRGRQEEHGDRAVRIGVAADLTERRQTTLLRAAVKKRERIMLEDRHRFSNLFPVIMALVKMINVPENDVAKYKEMLIDRIRTLEATHLILSRHTSLSGMLHDLVAQELQPFKETRDVTISGPSLTVPSGVAESFAMILHELTTNSVKHGALGDSQGKVEVKWQFASDGAGNDLVFDWVESGRRKNSKVVRHGFGSMIIGVDGTPLVGHSPKLEISEYGLRYSLRLSRKEIEN

SEQ ID NO: 14549 - protein, 341 aa, Anabaena variabilis ATCC 29413
MLAALLYGQEDLRLEQLADPSPEVGEVVIKVGAATTCGTDLKVWRRGGHAKMLKLPTLFGHEAAGEIVAVGAGVTGWQIGDRVVANNSAPCMKCFFCQRQEYSLCPNLTWNNGTFAEYLKIPAPIVQHNLLQIPDELPLPLAAMTEPLACVLHGVARSQIKPQDKVVVLGDGAIGLMFVATLADNVEVLLWGGNDQRLEIGQKLGAAKTFNYHQNPDIPGTVKDLTQGWGADVVIEATGVPKVWETALACARPGAIVNLFGGCPRDTTITVNTEQMHYSELTLKGVFHNTPEYVRAALALIASRKIPFELLISEQRPLKDLEQVFDDMKARKVIKVAMVSS

SEQ ID NO: 14550 - protein, 229 aa, Chloroflexus aurantiacus
MMTKQSKRTTIDGHRLHPESLMMSYGYVPALSEGAIKCPIFQTSTFVFQTAEEGKAFFELAYGLRHPREGEEIGLIYSRLNNPDLEILEDRLTLWDQAEAAAVFASGMAAITTTLLTFLRPGDVIVHSEPVYGGTDYLLKHVLPSLGIRRFGFMSGVSPEQVEVQLRRAGLFDAVGMIYLETPANPTNALVDIAGFAALAKRMPRRVLTAVDNTFLGPLWQHPWPNVQV

SEQ ID NO: 14551 - protein, 504 aa, Candida boidinii
MSNPPTYTTSQGCPVSDAFSTQRISGTKISIKTPVGPLLLQDFKFLDSLAHFDRERIPERVVHAKGAGAYGVFEVTEDISDICSAKFLDTVGKKTKIFTRFSTVGGEKGSSDSARDPRGFATKFYTEEGNLDLVYNNTPIFFIRDPTKFPHFIHTQKRNPATNCKDANMFWDYLTNNPESLHQIMYLFSNRGTPTSYRKMNGYSGHSYKWYNAKGEWVSSVHFISNQGVHNMTDEEAGDLSGKDPDFQTMDLYKAIEQGDYPSWECYVQTMTLEEAKKQPFSVYDLTKVWPHKDFPLRHFGKFTLNENAQNYFAEVEQAAFSPSHTVPGMEPSNDPVLQSRLFSYPDTHRHRLGVNYSQIPVNCPMRAVFAPQIRDGSMMVNGNLGGTPNYAGAYNCPVQYQAPIKASSKTPEEQYEGETLSYDWTEVNEYDFYQPGRFWEVLGKTKGEQEALVHNVANHVSGADEFIQDRVFAYFSKANPVIGDLIRKEVLKKSPRGASKNKF

SEQ ID NO: 14552 - protein, 233 aa, Zea mays
  unsure (1)..(233): unsure at all Xaa locations
NSARGPPTGPILFLPLVFLFLFTTAAASATAPEDEKFTEELLLRPLPDRKALAHFHFRSSAPPAASVGRHHHLFPKAISQLVKKYHISELELSFTQGRWNYEQWGGFDPMSTNNAKPPGVELWAVFDLPLSEIDATWKNLTHTLSGLFCASINFLESSTAFSAPRWGFKLNEGNLRYGALPREAXPSIYKGYYHSQKLKLRSSQSLGIILDQTLTVVLPPNNVHWRTATFQSW

SEQ ID NO: 14553 - protein, 666 aa, Methanothermobacter thermautotrophicus str. Delta H
MKVLTTCTRDCPGSCGLTVNVSRGKVNSIEGSSIHPHTRGFICKNTARYHVRRLYSDRRVLKPLKRDGRQWKTISWDEALHVISDKLNECMDEHGAESIVYYQGFGARTALRLLNRRFFNLIGATTLRGTLCGGAAIAAQSKDFGRRLSHDPSDHLNSRNIFIWGRNPAVTDINLWRIIKRAQKHGTRVITIDPIRTQTAVKSDIHCQIEAGKDLYLAIAMAKIIMAEELHDSGFIEKHAENFDSYIEILDEFNLNQLSELSGVPLKIISKLAHLYSDGPSSIILGWGLQRYFNSYMACRFIDALAAISGYIGVSGGGVSSGFDEYGAFDESVTLEGAGNGRKVSMPLFGREIVNMNSPTVNCVFITAGNPVTLGPNSIQTLNALREVDFVVMVDLFLNDTAHTADLFLPATTFLEETDLVGSYGHPYVSPVNAAVKPLGESHSEFWILQRLSEIMGFADMEGTRMEWLEIIASKVLDYHGIEICDLLEKPYRSPGFPPVPFEGPLFYTDNGRFNLPSDRPYEMEQHDGAHPENSIRLLTVMSPQWVGSVEPTFHKGLVEIYLNPGTLSQLGFNDGEISVAESNAGKSCVIVRSSEDVHPLCALSFRGTWLSKGGCINTVIEDRETIMGHGTAYNETRIKLKKVSGGVSVHEMCHETHKYKSRHYE

SEQ ID NO: 14554 - protein, 294 aa, Leptospira borgpetersenii
MKSRKGIILAGGSGTRLYPVTYVVSKQLLPVYDKPMIYYPLTTLMLAGIKEILLISTPQATPMYKELLGDGKQWGISIEYAVQPEPGGLAQAYWIGENFVNGHPSVLILGDNIYFGHNLAVLLENASKKTKGSTVFAYPVHDPERYGVVEFDSERRAVSIEEKPSKPKSNYAVTGLYFYDEEVVSIAKSIKPSARGELEITDVNRIYLERGILNVQVMGRGYAWLDTGTHESLLEASVFIETIEKRQGLKVACPEEIAFRKGFIDGSQLEKLIVPLKKTGYGEYLVKILQEKIY

SEQ ID NO: 14555 - protein, 554 aa, Pseudomonas putida KT2440
MAFYRTPHDVTALPAWKALQQHREAMRGFSMSEAFAADAKRFDQFSLSACGLFLDYSKNLITEQSRDLLVNLANEVGLQDAIKSMFSGEIINASEGRPVLHTALRRPVGDKLSVNGVNVMPEVHKVLNQITELVGRIHDGLWRGYSEKPITDVVNIGIGGSFLGPELVSEALLPYAQRGVRCHYLANIDGSEFHELSANLRAETTLFIVSSKSFNTLETLKNAMAARTWYLAQGGSEAELYRHFIAVSSNKAAAVAFGIREENIFPMWDWVGGRYSLWSAIGLPIALAIGTANFKELLSGAYTMDQHFQTAPFDKNMPVLLALLGVWYGNFWDANSHAILPYDHYLRNITKHLQQLDMESNGKSVLQDGTPVKTDTGPVIWGGVGCNGQHAYHQLLHQGTQLIPADFIVPVVSFNPVADHHQWLYANCLSQSQALMLGKTREEAEAELRAKGLNEADIEKLAPHKVIPGNRPSNTLVVERISPRRLGALVAMYEHKVFVQSVIWGINAFDQWGVELGKELGKSVYQRLVGSLEDSAEDGSTQGLINYFRGKHRG

SEQ ID NO: 14556 - protein, 408 aa, Xanthomonas axonopodis pv. citri str. 306
MSTAADSPLSLAHYYLPVYRPRQVVLERGQGSRVWDDAGREYLDLSSGIAVSGLGHNDPDLVAALTEQAGKLWHTSNVFFSAPPLKLAEELVSASRFAHKVFLCNSGTEANEAAIKLVRKWASSQGRPADKRVIVTFRGSFHGRTLASVTATAQPKYQEGYEPLPGGFRYVDFNDVAALEAAMAGGDVAAVMVEPIQGEGGVMPAAPGFLSRVRALCDQHDALLVLDEIQCGMGRTGTLFAHWQEQVTPDIVTLAKALGGGFPIGAMLAGPKVAQTMQFGAHGTTFGGNPLAAAVARVALRKLASPQIADNVVRQSAALRAGLEALNAEFGLFAQIRGRGLMLGAVLAPEHAGQAGAILDLAAKHGLLLLQAGPDVLRFVPALNLTDAELADGLARLRLATAEYVAQP

SEQ ID NO: 14557 - protein, 552 aa, Ricinus communis
MATPNSGRAASVYSEVQSSRIEHVLPLPSVLNHPFKIVQGPPSSAAGNPDEIAKLFPNLFGQPSAMLVPDVADSLDSNQQLKIGLVLSGGQAPGGHNVISGIFDYLQDRAKGSILYGFRGGPAGIMKCNYVQLTADYIHPYRNQGGFDMICSGRDKIETPEQFKQAEETAGKLDLNGLVVIGGDDSNTNACLLAENFRSKNLKTRVIGCPKTIDGDLKCKEVPTSFGFDTACKIYSEMIGNVMIDARSTGKYYHFVRLMGRAASHITLECALQTHPNITIIGEEVAAKKLALKDVTDYIVDVICKRADLGYNYGVILIPEGLIDFIPEVQNLIAELNEILAHDVVDEGGLWKKKLTSQSLQLFEFLPVAIQEQLMLERDPHGNVQVAKIETEKMLIQMVETELEKRKQQGTYKAHFKGQSHFFGYEGRCGLPTNFDSTYCYALGYAAGALLHSGKTGLISSVGNLGAPVAEWTVGGTALTSLMDVERRHGKFKPVIKKAMVELEGAPFKKFASLREEWALKNRYVSPGPIQFMGPGSDAASHTLLLELGSVA

SEQ ID NO: 14558 - protein, 403 aa, Zea mays
  unsure (1)..(403): unsure at all Xaa locations
MASTVTFNPVSAQTALIQKGKKSXSIKYAVLKKAESVSSGSESTFLDWNASLHVADTPRIVXPKANTGSQMSPHESYKVSLLRAEXGIPQPLGLLXIRCLPLVSELHLYDIANVNGDDADLXSHCNTPAQVLDFTGPSELASCLKRGGDVVVIPCRGPKXKPGMTRDDLFNINASIVKSLVEAVADNCPXEAFIHIISNPVNSTVPIAAEVLKQKGVYNPKKLFGVTTLDVVRANTFVAQKKNLKLIDVDVPVVGGHAGITILPLLSKTRPSVTFTDEEAEELTKRIQNAGTEVVEAKAGAGSATLSMAYAAARFVESSLRALAGDPDVYECTFIQSEATDLPFFASRVKLGKSGVESIVSADLEGVTECEAKALDALKAELKGSIEKGVAFASKQQEAAASV

SEQ ID NO: 14559 - protein, 516 aa, Oryza sativa (japonica cultivar-group)
MASSGFSWTLPDHPKLPKGKTVALVVLDGWGEANADKYNCIHVAQTPVMDSLKNGAPERWRLVKAHGTAVGLPSEDDMGNSEVGHNALGAGRIFAQGAKLVDLALASGKIYDGEGFNYIKECFDKGTLHLIGLLSDGGVHSRLDQVQLLLKGASERGAKRIRVHILTDGRDVLDGSSVGFVETLESDLSQLRDKGIDARIASGGGRMYVTMDRYENDWDVVKRGWDAQVLGEAPYKFQNAVEAVKTLRAETKASDQYLPPFVIVDESGKSVGPVVDGDAVVTFNFRADRMVMLAKALEYADFDKFDRVRVPKIRETVKFGHVTFFWNGNRSGYFDETKEEYVEIPSDIGITFNVKPNMKALEIAEKARDAILSGKFDQVRVNLPNGDMVGHTGDIEATVVACKAADEAVKIILDAIEQVGGIYLVTADHGNAEDMVKRNKSGQPLLDKNGGIQILTSHTLQPVPVAIGGPGLHPGVKFRSDIQTPGLANVAATVMNFHGFEAPADYEPTLIEVVDN

SEQ ID NO: 14560 - protein, 547 aa, Haemophilus ducreyi 35000HP
MRNINPTDTMAWQALVQHKAEHLSIPQLFAENEDRFATYNLSFEDQILVDYSKNAINQKTLTLLRQLAKECDVDGARQAMFSGEKINRTENRAVLHIALRNRANKAIFVDGKDVMPAVNAVLAKMKAFSEKVIKGDWKGYTGKAITDVINIGIGGSDLGPYMVTEALRPYKNHLNMHFVSNVDGTHIAEVLRKVNPETTLVLVASKTFTTQETMTNAFSAREWLLADAKDQSAVAKHFVALSTNSETVAKFGIDTENMFEFWDWVGGRYSLWSAIGLSIVLSIGFANFEQLLEGAYAMDKHFYHTADEQNIPLTLALVSIWNNNFLGAQTEAILPYDQYLHRFAAYFQQGNMESNGKYIGRDGKAVNYQTGPIIWGEPGTNGQHAFYQLIHQGTTLIPCDFIAPAQTHNPLSDHHNKLLSNFFAQTEALAFGKSKAQVELEFTQQGKSLDEVKDIVPFKVFTGNKPTNSILLKKVTPYSLGALIAMYEHKIFVQGVLFNIYSFDQWGVELGKQLANRILPELEDDQPVVSHDSSTNGLINQFKAWRE

SEQ ID NO: 14561 - protein, 363 aa, ASPERGILLUS NIDULANS FGSC A4
MFAARNFATPARQCLRSTRVAPNLASTRLQGKYTVTLIEGDGIGPEISQSVKDIFSAANAPIKWESVDVTPILKDGKTAIPDAAIDSVRKNYVALKGPLATPVGKGHVSLNLTLRRTFNLFANLRPCRSVAGYKTPYDNVDTVLIRENTEGEYSGIEHVVVDGVVQSIKLITREASERVLRFAFQYARSINKKKVRVVHKATIMKMSDGLFLNTAREVAKDFPDVEFDAELLDNSCLKITTDPTPYNDKVLVMPNLYGDILSDMCAGLIGGLGLTPSGNIGDECSIFEAVHGSAPDIAGKGLANPTALLLSSIMMLQHMGLNEHASRIQKAIFDTLAEGKTLTGDLGGKAKTHEYADAIIKRL

SEQ ID NO: 14562 - protein, 473 aa, Caulobacter crescentus CB15
MIEEAPPHPSAPMAASPSVTTALKHAPLGIAIFDNQMRYLAASRQYLTDQHLPPDLPLIGRLHYDAFPEVPQKWRDLHARVLAEGVELRHEGDPYVDREGRTQWIRWSMAPWRTDGGGIGGLVLYTEVVTAGILARRALEAAEARYRAVFDQTAMGVARLAQDGAILEANDSFCAILRRPREQLLGSRITTLVHEHDLAQALADGEALTRGAIDTYTADRRFRGEQPDEILWLNLTVSKVSPAEEPPYLVVILSDISHRKLAESAQQHHQAQLRLLINELNHRVKNTLATVQSMAAQTLRNEPSPAVAFEKFEARLMGLSGVHDILTRESWHGAPLREVAERALRPFDEGGTRIEIAGPPIRLQPGGALTMALILHELATNALKYGALSCAEGRVRLFWGYDADSRTLDCQWIEAGGPPVVAPTRKGFGSRLIERSLRGELKGEATMDYHPDGLRCVLRAHIPETAQDKGSTL

SEQ ID NO: 14563 - protein, 516 aa, Thermus thermophilus
MTVEPFRNEPIETFQTEEARRAMREALRRVREEFGRHYPLYIGGEWVDTKERMVSLNPSAPSEVVGTTAKAGKAEAEAALEAAWKAFKTWKDWPQEDRSRLLLKAAALMRRRKRELEATLVYEVGKNWVEASADVAEAIDFIEYYARAALRYRYPAVEVVPYPGEDNESFYVPLGAGVVIAPWNFPVAIFTGMIVGPVAVGNTVIAKPAEDAVVVGAKVFEIFHEAGFPPGVVNFLPGVGEEVGAYLVEHPRIRFINFTGSLEVGLKIYEAAGRLAPGQTWFKRAYVETGGKNAIIVDETADFDLAAEGVVVSAYGFQGQKCSAASRLILTQGAYEPVLERVLKRAERLSVGPAEENPDLGPVVSAEQERKVLSYIEIGKNEGQLVLGGKRLEGEGYFIAPTVFTEVPPKARIAQEEIFGPVLSVIRVKDFAEALEVANDTPYGLTGGVYSRKREHLEWARREFHVGNLYFNRKITGALVGVQPFGGFKLSGTNAKTGALDYLRLFLEMKAVAERF

SEQ ID NO: 14564 - protein, 393 aa, Halobacterium sp. NRC-1
MSGNDDADDAADRFQTRAIHAGQAPDSETGALMTPIFANSTYVQDGPGDHRGYEYSRTGNPTRTDLEANLASLEGGEHGRAFASGMAAINTVLNLLAAGDHVVAGDDVYGGTHRIFTQVYEDYDIDFDFVDTTDHDAVREAMGEATELLWVETPTNPLLNVNDIGALADIAHEHDALCAVDNTFATPYLQRPLEFGADIVSHSLTKYLGGHSDLVAGALITDDDDLDEQFGFYQNSVGATPSPFDCFLVLRGTKTLGVRMDRHCETAMELAAWLADHEHVSQVHYPGLESHPDHELAAAQMDGFGGMVSFELDATLEAASAFVEETDVFTLAESLGGVESLIEQPAAMTHAAIPKAEREAAGLTDGLIRASIGVEHVDDLKADLQQAIEAALQ

SEQ ID NO: 14565 - protein, 289 aa, Gluconacetobacter xylinus
MIKPLKKAVLPVAGLGTRFLPATKCVPKEMLTVVDRPLIQYAIDEAREAGIEEFCLVSSRGKDSLIDYFDISYELEDTLKARKKTSALKALEATRVTPGSMLSVRQQEPLGLGHAIWCAREFIGNDPFAILLPDDVVQSEKSCIGQLVEVYNKTGGNVLAVTEVPREQTGSYGILDVGADDGKTVEVKGLVEKPDPKDAPSTLSVIGRYVLTADVLKHLAKLEKGAGGEVQLTDAMAKTIGHVPFHGYRYEGKRFDCGSKPGFLEAQIAFALAREDLAGDVREFLKKYK

SEQ ID NO: 14566 - protein, 253 aa, Methanothermobacter thermautotrophicus str. Delta H
MMEMRITFLGGGRVVRIILGGLQRAGKLPREVMVCDPDEDSLRSLEDEFGVKTSADCSSMEGDVIFLALHPPVLKDVLNKMESPSPESLIVSLAPRIRIEEIQQALDHPKVARVIPNALSLVNRGYNPFSAADELTGTDLEILQSLFEPLGKFPEVSEDKLEAYAVITAMGPTYLWFQLAELEKLAVEFGMSPDEAATAVHSMASGAVEALYSHPNRDMVMDLIAVKPLEDAEDDIRAIYRKSLMRIYQSLTE

SEQ ID NO: 14567 - protein, 347 aa, Lactobacillus plantarum WCFS1
MKSTIFEKAGLVSVQEVDKPTLQSDDDVIVRIVRTCVCGSDLWSYAHGDDKAAHSINEGHEAIGIVEAIGSAITTVKPGDFVITPFTHGCGECAACLAGFDGTCDRHPGHTNWSNGFQAEYIRFTYGNWALVKIPGQPSDYTEGMLKSLLTLADVMPTGYHAARCANVQKGDKVVVIGDGAVGQCAVIAAKLRGAAQIVLMSRHEDRQQMALASGATAVVAERGDEGIAKVREILGGGADAALECVGTEAAIDQALGVLHNGGRVGYVGVPHYNNRPLGSTFAQNIAVAGGSASVTTYDKQFLLKAVLDGNINPGRVFTQTYPLADINQAYQDMQNRKTIKAMITID

SEQ ID NO: 14568 - protein, 409 aa, Chromobacterium violaceum ATCC 12472
MLIEVKVPQLPESVSEARLMSWHKKVGEFVKRDENLIDLETDKVVLELPAPQAGVVVEIIEQDGATVTSGQLIAKIDTAAKAGDAAPAAAAAAPVQAAPAAGAAAMPSAAKLAAETGVDLSKVAGSGRDGRVLKEDVQAAAKSAAPSQAGPVLAPASAGAALSATPAAVNVAGILSGRAEQRVPMSRLRQRVAERLVMSQQTNAILTTFNEVNMKPVMDLRAKYKDRFEKEHGIKLGFMGFFVKAVVAALKKYPIVNASVDGNDIVYHGYFDVGVAVGSPRGLVVPVIRNADQLSLAEIEKQIADFGKRAQEGKLTVEELTGGTYTISNGGTFGSMMSTPIINPPQSAILGMHATKERAVVENGQVVVRPMMYLAQSYDHRIIDGREAVLSLVAIKDAIEDPARLLLDL

SEQ ID NO: 14569 - protein, 477 aa, Chromobacterium violaceum ATCC 12472
MSQQFDVVVIGGGPGGYVAAIRAAQLGFSAACVDAFKNPEGKPSLGGTCLNVGCIPSKALLQSSENFHAVQHDFAKHGISVSGAKMDVGQMLSRKTDIINKNAAGIGFLFKKNKVANIHGLAAFKGRQGEKWVIEVTDGGKVVDTLEAVHVIVATGSSPRALPGLATDNQLVLDNEGALALTAVPKRLGVIGAGVIGLEMGSVWKRLGAEVTILEAAPTFLAAADQQIAKEAFKTLTKDTGLDIKLGVKIGEVKAGKKSVSVSYELNGEAVKAEFDKLIVSIGRVPNTQGLGAETVGLALDERGFVAVDDHCHTNLPNVWAIGDVVRGPMLAHKASEEGVAVAERIAGQKPHVDFGVIPWVIYTSPEIAWVGKTEEQLKAEGVEYKKGTSGFGANGRALGLGQAQGTVKILADAKTDRILGLHMIGPMVSELVSEGVVSMEFKAASEDLARIVHAHPSLSEVIHEAALAADKRALHG

SEQ ID NO: 14570 - protein, 194 aa, Mirabilis jalapa
MMKNDMNKSGGGVIAKDVNDNTKVNGANNNADLAKPPAKAQVVGWPPVRSYRKNMLAVQKSTGAPESESEKPAANGGLVKVSMDGAPYLRKVDLKLYKSYQDLSDALGKMFSSFTLGNYGSQGMIDFMNESKLMDLINGSDYVPTYEDKDGDWMLVGDVPWEMFVESCKRLRIMKGKEAAGLAPRAMEKCKNRI

SEQ ID NO: 14571 - protein, 347 aa, Sinorhizobium meliloti
MKAVRLESVGNISVRNVGIPEPGPDDLLVKVEACGICGTDRHLLHGEFPSTPPVTLGHEFCGIVVEAGSAVRDIAPGARITGDPNISCGRCPQCQAGRVNLCRNLRAIGIHRDGGFAEYVLVPRKQAFEIPLTLDPVHGAFCEPLACCLHGVDLSGIKAGSTVAILGGGVIGLLTVQLARLAGATTVILSTRQATKRRLAEEVGATATVDPSAGDVVEAIAGPVGLVPGGVDVVIECAGVAETVKQSTRLAKAGGTVVILGVLPQGEKVEIEPFDILFRELRVLGSFINPFVHRRAADLVATGAIEIDRMISRRISLDEAPDVISNPAAAGEVKVLVIPSAERVAQQ

SEQ ID NO: 14572 - protein, 467 aa, Sinorhizobium meliloti
MLTATKDLVLAQSDNSWPTHFRASLYLGVPFIGAQLAQLAINTTDVLMVGQLGATQLAAIILATQVFFTIFIFGSGFANAVVPMVAQAQGRGDQVSVRRSVRMGMWVVLLYGVLTAPVLWMAEPILLFAGQKPEVAALAGEYLHIAQWAIFPSLIFMVLRAFLSGLERAGVILYVTLVTLVLNAALCYVLIFGHFGFPELGIFGAAVAALGVALLGAALTIGYIRRQPELHRFELFVRFWRPDWPAFGEVVHLGIPISVTILAEVSLFTVASLLMGTIGTIELAAHGIALQFASIAFMIPLGLAQAGTVRIGLAYGSGDMVGVKRAAIAVLTLGVGFAAVGSTIFALFPHELAGLYLDTRRPDAAEVLAFAGPLIVIAGAFQLVDGLQAIAAGMLRGLKDTTIPMILAMIAYWPIGFFCAWAFAFPLGFGGVGVWFGFVLGLASAALLLNWRFFRLLRRVSAAPAAS

SEQ ID NO: 14573 - protein, 501 aa, Glycine max
  unsure (1)..(501): unsure at all Xaa locations
MAMASLARRKGYAVVLSSRSSFCLTSWRGFASGSDENDVVVIGGGPGGYVAAIKAAQLGLKTTCIEKRGTLGGTCLNVGCIPSKALLHSSHMYHEAKHAFANHGVKFSSVEVDLPAMMAQKDKAVSNLTKGIEGLFKKNKVNYVKGYGKFVSPSEVSVDTTEGGNTVVKGKHIIIATGSDVKSLPGVTIDEKKVVSSTGALXALTEIPKRLVVIGAGYIGLEMGSVWGRLGTEITVVEFASEIVPTMDAEVRKQFQRSLEKQGLKFKLKTKVVGVDTSGDGVKLTLEPAAGGDQTTLEADVVLVSAGRTPFTAGLGLDKIGVETDKIGRILVNERFATNVSGVYAIGDVIPGPMLAHKAEEDGVACVEYIAGKVGHVDYDKVPGVVYTMPEVASVGKTEEQVKELGVEYRVGKFPFMANSRAKAIDNAEGLVKILAEKETDKILGVHIMAPNAGELIHEAAIALQYDASSEDIARVCHAHSTMSEAVKEAVMVSYDKPIHI

SEQ ID NO: 14574 - protein, 350 aa, Escherichia coli O157:H7
MRFLLGVLMLMISGSALATIDVLQFKDEAQEQQFRQLTEELRCPKCQNNSIADSNSMIATDLRQKVYELMQEGKSKKEIVDYMVARYGNFVTYDPPLTPLTVLLWVLPVVAIGIGGWVIYARSRRRVRVVPEAFPEQSVPEGKRAGYVVYLPGIVVALIVAGVSYYQTGNYQQVKIWQQATAQAPALLDRALDPKADPLNEEEMSRLALGMRTQLQKNPGDIEGWIMLGRVGMALGNASIATDAYATAYRLDPKNSDATLGYAEALTRSSDPNDNRLGGELLRQLVRTDHSNIRVLSMYAFNAFEQQRFGEAVAAWEMMLKLLPANDTRRAVIERSIAQAMQHLSPQESK

SEQ ID NO: 14575 - protein, 198 aa, Oryza sativa
MDPCMVRPPSSFDTKTTTTNAGAPVWNDNEALTVGPRGPILLEDYHLIEKVAHFARERIPERVVHARGASAKGFFECTHDVTDITCADFLRSPGAQTPVIVRFSTVIHERGSPETIRDPRGFAVKFYTREGNWDLLGNNFPVFFIRDGIKFPDVIHSLKPNPRSHVQEYWRVFDFLSHHPESLHTFFFLFDDVGWAGG

SEQ ID NO: 14576 - protein, 380 aa, Lotus corniculatus var. japonicus
MSTTAGQVIKCRAAVSWEAGKPLVIEEVEVAPPQAGEVRLKILYTSLCHTDVYFWEAKGQTPLFPRIFGHEAGGIVESVGEGVTHLKPGDHALPVFTGECGECPHCKSEESNMCDLLRINTDRGVMISDNQSRFSIKGKPIYHFVGTSTFSEYTVLHAGCVAKINPAAPLDKVCILSCGICTGFGATVNVAKPKPGSSVAIFGLGAVGLAAAEGARVSGASRIIGVDLVSSRFEGAKKFGVNEFVNPKDHDKPVQEVIAEMTNGGVDRAVECTGSIQAMISAFECVHDGWGVAVLVGVPNKDDAFKTHPVNFLNERTLKGTFYGNYKPRTDLPNVVEMYMRGELELEKFITHTVSFSEINKAFDYMLKGESIRCIIRMEE

SEQ ID NO: 14577 - protein, 477 aa, Bordetella parapertussis 12822
MRTITSLIDGQWAGGAGDSENINPSDLSAPVCLVAQASAQQAAQAVEAARRAQPGWAATGLAARAQILKDIGRGIVANSQQLAHILASEQGKTLPEARGEVQRAADIFDYYAGEVFRLGGEMFPSIRAGVEVEISREPLGVVALITPWNFPIAIPAWKTAPALACGNAVVLKPSEFTPATAVMLAEIIRAAGVPDGVFNLVLGTGADVGQVLTGHPAVAGVSFTGSSATGRKIAASAVAGHKKLQMEMGGKNPLVVLDDADLEIALACALDGAFHATGQRCTASSRLIVTPGIHDRFVQELAQRVMALNVGHALDERSQIGPVSNGAQFDKDLSYIALARDEAQRVIGGAALQRAQRGYYLQPCLALDVSLDARIAREEVFGPLACVLRAQDYEHALAIANDTEYGLSAGICTQSLKHATHFRRHVQSGLAMVNMPTSGVDFHVPFGGRGASSYGSSEQGHYAREFFTSLKTSYIRP

SEQ ID NO: 14578 - protein, 465 aa, Yersinia pestis biovar Medievalis str. 91001
MKIVNHWIDGKNITSNDYFTTINPATGEVLADVASGGIKEINQAVAAAKSAFPHWANLPMKVRARLMRRLGELIEQQIPEIAQMETQDTGLPIYQTQNALIPRAAHNFEFFAEICQQMNGQTYPVDDQMLNYTLVQPVGVCALVSPWNVPFMTATWKVAPCLALGNTAILKMSELSPLTADKLGELALEAGIPAGVLNVVQGYGATVGDALVCHQDVRAISFTGGTATGNRIMQRAGLKKYSMELGGKSPVLIFDDADIERAMDAALFSIFSLNGERCTAGSRIFIQESLYSAFIQRFAERASRLRVGDPQDLDTQVGALISKPHWDKVSGYIQLGIEEGATLLAGGPDKPIDLPAHLRGGHFLRPTVLADVDNRMRVAQEEIFGPVACLIPFKNEDAGLRLARSIEAGMVFVNTQNVRDLRQPFGGIKASGTGREGGKYSFDVFAEVKNVCISMGEHPIPRWGM

SEQ ID NO: 14579 - protein, 568 aa, Xylella fastidiosa Ann-1
MSSSSIEDIKGQSHRLRGSLLESLANPTTGALGESDQTLIKYHGSYQQDDRDLREERRRQKLEPAYQFMIRTRTPGGVITPQQWLQLDAIATRYANHSLRVTTRQAFQFHGVIKRELKTTMQAINAALIDTLAACGDVNRNVQVAANPLISRAHADLYTDAAHLSEHLLPNTRAYYEIWLDEKKVAGAGEEEEPIYGPHYLPRKFKIGFAAPPINDVDVFANDLGFIAVIVDNTLLGYNVTIGGGMGTTHGDPDTWPRIGNIIGFITRADLIIISTAIVTTQRDFGNRTLRKRARFKYTIDDRGLDCIVGEIQQRAGIILQPARPFVFEHNGDRYGWIEGEDGHWHLTLSLPAGRIADTESSPLLSGFRAIAQLGIGQFRMTPNQNVVIAGISPGQRAAIDALVTQYGLDTGNRAPTALARHAMACVALPTCGLAMAEAERYLPDFNAKLQPILEKYGLAETPILLRISGCPNGCSRPYLAEIALVGKAPGRYNLMLGGDQRGQRLNTLYRENITETEILTALEPLLGRYQQERIPSEGFGDFLHRTGIIALPPYPTHRHVISSTLQA

SEQ ID NO: 14580 - protein, 403 aa, Streptomyces avermitilis MA-4680
MQVIQSTKLANVCYEIRGPVLEEAMRLEAAGHRILKLNTGNPAAFGFECPPEILEDILRNVSSAHGYGDAKGLLAARRAVVMHNQTLGIETDVEHVFVGNGVSELIVMAMQGLLDDGDEVLVPAPDYPLWTASVSLSGGTAVHYHCDEQSDWMPDLADVERKVTDRTKAIVIINPNNPTGAVYDEAMLRGLTDIARRHNLLVCSDEIYDKILYDGATHTPTAAVAPDLLTLTFNGMSKAYRVAGYRVGWMAISGPRAHADSYIEGLTILANMRLCANMPGQHGVVAALSGRQTINELVLPGGRLKEQRDVAHELLTQIPGVSCVKPKGALYLFPRLDPKVFKIKDDRQMVLDLLRREKIMVVQGTGFNWPDPDHFRVVTLPTVGDLTSAITRIGNFLDGYSQP

SEQ ID NO: 14581 - protein, 497 aa, Oryza sativa
MQGTWNARPHSGSRRRSSPSRNSPRQTGQSVAPSMPAPYVAVPREGNGFDRGLIELLLLVLVPTVDEAVDFLNDDEAVDGRVRGAATRRRRPCRCWPSHYASYGVINMSDISALSYLKVFMDAHCQLGDLVDAVVPFMGESITDGTLATFLKKPGDRVEADEPIAQIETDKVTMDVASPEAGIIEKFVASEGGIVTPGVKVAIISKSAAQSKTHTQSSEDTSQKHSTKPPSTKENKVEAKPPKVESSTTHESKLTSSSEPQLPPKERERRVPMPRLRKRIANRLKDSQNTFAMLITFNEVDMTNLMKLLSDYKDQFVEKHGVKLGLMSCFVKAAVSALQNQPIVNAVIDGDDIIYREYIDISVAVGTSKGLVVLVIHDIDAMNFADIEKGINNLAKKATEGAQSINNMAGGTFTISNGGVYGSLISTPIINSPQSSILGMHSIVQRLVVVNGSVLARPMMYLALMYDHRLIDGREAVLFLRRIKDVVEDPRRLLLDI

SEQ ID NO: 14582 - protein, 310 aa, Lactobacillus plantarum WCFS1
MKTAILFSGQGQQFADMGADLYQTLPAYQATIDEANQVLDWDLRVTADWIDDAQRMPVAITAMNMGLYRALTALLNECPTVLAGLSLGEYAALIAAGVLPFADGLKLVADRARYMQRAGLQHPGEMVAALKVTPALVAAACQSAQAVGVAYPANYNLADQIVIGGDAAGIQAARTYLKTHGVKRVVPLDVAVASHTPLMAAASEALAQRLRFVNIAAPQIPVISNTTVTPFSQETVKETLVKQLVSPTHFAACLQRIATYEVDEIIQVGPGHSLATFAKQTLPGVRVWSIEDVTDWQNYCQDTEEVRERG

SEQ ID NO: 14583 - protein, 429 aa, Ralstonia eutropha JMP134
MSAIVDIIGREVLDSRGNPTVECDVLLESGVMGRAAVPSGASTGSREAIELRDGDKSRYLGKGVLKAVEHINTEISEAIMGLDASEQAFLDRTLIDLDGTENKSRLGANAMLAVSMAVAKAAAEEAGLPLYRYFGGSGAMQMPVPMMNIVNGGAHANNSLDIQEFMVMPVSATSFREALRCGAEVFHALKKILADKGMSTAVGDEGGFAPNFSSNEECLNTIVQAVEKAGYRMGEDVLLALDCAASEFYHEAEDVYVLEGEGLKLSSTQFADYLANLCDKFPIVSIEDGMAEGDWDGWKTLTDKLGKRVQLVGDDLFVTNTKILKEGIDKGIGNSILIKINQIGTLTETFAAIEMAKRAGYTAVISHRSGETEDSTIADIAVGTNAGQIKTGSLSRSDRISKYNQLLRIEEDLGDIASYPGKSAFYNLR

SEQ ID NO: 14584 - protein, 384 aa, Glycine max
  unsure (1)..(384): unsure at all Xaa locations
MASAAAPTTFSLLHSTTPASSSSATSASPSRVQLSSSLRSRPLARRLGFAAADPLLAANVAARVAAVRGGKGARXVVSMAKKSVGELSAADLKGKKVFVRADLNVPLDDNQNITDDTRIRAAIPTIKHLIQNGAKVILSSHLGRPKGVTPKYSLAPLVPRLSELIGIXVVKAEDSIGPEVEKXLVASLPXGGVLLLEMGRFYKEEERNDPEHAKKLASLADLFVNDAFGTAHRAHASTEGVTKYLKPSVAGFLLQKVVPAXSAIPDGWMGLDIGPDSVKSFSEALDTTQTIIWNGPMGVFEFTQVCWFGTEAIAKKLADLSGKGVTPIIGGGXDSVAPVEKVGVASVMSHISTGGGASLEIIGRRKKLPGGPWLSSETSPRFPL

SEQ ID NO: 14585 - protein, 423 aa, Methanothermobacter thermautotrophicus str. Delta H
MQAVILTAGEGTRMRPLTLTRPKTMLPVAGKPILQYSVDALRDNGVHDIVMITGYHEEAVRSHFGDGSGSGVNITYVRQEERLGTAHAIGQASELIDDEFIVLNGDIITDPGLMGDLIGSYHERKPETLMVLREVPDPSSFGVVKVEGDRVREIIEKPGPDAGAGNLINTGIYVFSPAVFDYIERTPLSRRGEYEITDTIMMQVRDDLPVRAIISDRDWIDVGRPWELLEASERLMKDLEDSVEGDVEDGVTIHGPVAIGEGTIIRSGTYIQGPVYIGRNCDIGPNSYLRAHTCIGDGVSIGNAVEVKNSIIMDGTNINHLSYVGDSVIGMNCNIAAGTNIANLRFDDGPVRMVVKDDVVETGRRKLGAVFGDGVKTGINSSFNPGVKVGKDSCIGAGCVISRDVPSDRLVILRQEHTTMEYR

SEQ ID NO: 14586 - protein, 212 aa, Glycine max
  unsure (1)..(212): unsure at all Xaa locations
AELGEPWVLPCVRKTELLMAQNDSLNHEYLPVLGFEPFCKAAVTLLLGDVETSTPLAEGRAFGVQTLSGTGALRVAAEFLSKILKYTTFYVSNPTWENHRLVFFNGGFKQCMEYRYWNEEKRGLDIEGMIEDLRAALTYXLIILHDSAHNPTGCDPTKDQWKIIADIGQEKKLFPLFDYVYQGFATGDAENDAWAVRYXANERNIELICCPS

SEQ ID NO: 14587 - protein, 324 aa, Bacillus cereus
CIGCHACSVTWKKTWTNRPGAEYMYFNNVETKPGIGYPKQWENQEKYKGGWELKNGEIQLKSGSKMKRLMNIFHNPDQPTIDDYFEPWNYDYETLTNSPQRKHQPVARPKSAITGEFIDKIEWGPNWEDDLAGGHITGLQDPNVKKMEEGIKTDFENVFMMYLPRICEHCMNPSCVSSCPSGAMYKREEDGIVLVDQNACRAWRFCVSSCPYKRVYLNLQTNKAEKCTMCFPRIEAGMPTICSETCVGRIRYIGVMLYDADKVKEAASAPNEKDLYESQLTVFLDPNDPEVAAEAKKQGIPEEWIKAAQESPIYKMIIDCASAA

SEQ ID NO: 14588 - protein, 563 aa, Triticum aestivum
  unsure (1)..(563): unsure at all Xaa locations
MAAAAVASNGGAAPVPGRLASVYSEVQTSRIAHALPLPSVLRSHFTLADGPASTAAGSPDEIAKLFPCLYGQPSAAVVPSAEAXETKPLKIGVVLSGGQAPGGHNVICGIFDYLQERAKGSTMYGFKGGPAGVMKGKYVELTTDFVYPYRNQGGFDMICSGRDKIETPEQFQQAEDTVNRLDLDGLVVIGGDDSNTNACLLGEYFRGRNLKTRVIGCPKTIDGDLKCKEVPTSFGFDTACKIYSEMIGNVMTDARSTGKYYHFVRLMGRAASHITLECALQTHPNVALIGEEVAEKKETLKNVTDYITDVVCKRAELGYNYGVVLIPEGLIDFIPEIQKLIAELNEILAHDVVDEAGAWKASKLEPASRELFDFLPKTIQEQLLLERDPHGNVQVAKIETEKMLIAMVETELEKRRAAGKYSAHFRGQSXTHFFGYEGRCGLPTNFDSSYCYALGYGAGALLQFGKTGLISSVGNLAAPVEEWTVGGTALTALMDVERRHGKNKPVIKKAMVELDAAPFKKFASLRDEWASKNRYISPGPIQFSGPGSDASNHTLMLELGAEI

SEQ ID NO: 14589 - protein, 557 aa, Oryza sativa
MRLLIWTACEDLFSHAAVLSDRMRRSIFACGCDGRMRKWRGHGLQWHQPLHTRAPPAGKEANADADMQRLASSRRLLQAALAPVRAQSSLSAAAAAAAPAPENAFAAAPKMPPFDYTPPPYDGPRAEEISRKRAEFLSPSLFHFYDRPLNIVDGKMQYLFDEDGRRYLDAFGGIATVCCGHCHPDVVEAMVNQAKRIQHSTVLYLNHAIADFAEALAAKMPGDLKVVFFTNSGTEANELALMIARLYTGCHDIISLRNGYHGNAAGTMGATAQCNWKFNVVQTGVHHALNPDPYRGAFGSDGEKYARDVQEIIDFGTTGRVGGFISEAIQGVGGIVELAPGYLPAVFNMVRKAGGLCIADEVQAGVARTGSHFWGFESHGVIPDIVTMAKGIGNGIPIGAVVTTPEIAQVLTRRSYFNTFGGNPVSTAGGHAVLKVLEKEKLQENAFVVGSYLKERLNKLKEKHDIIGDVRGKGFLLGVELVTDRQKKTPAKVEIGHVMNHMKDMGVLVGKGGFYGNVFRVTPPLCFTKEDSDFFIEAMDISLSKLFRNDVVQKLFQ

SEQ ID NO: 14590 - protein, 252 aa, Terrabacter sp. DBF63
MSNSLDGKVALVTGGGGGIGRETAKVLVDHGARVVVADLSEDAGNGTLEYIDGGDAVAFVRADVTDLASMQHLVQAAVDRYGRLDIAHNNAGIEVTGPDLADVTVEQFDKVIAVNLTGVFISMKAEIPQMLAQGGGSIINTASSLGQAALAHQSAYVTSKHGVIGLTRAAAVEYSDKGIRVNAVLPGVIQTPMIDALEETYPGFKDALLTKHPIGRLGTPHDIAEMVAWLGSDAAAFATGSQFAVDGGYLAI

SEQ ID NO: 14591 - protein, 342 aa, Azotobacter vinelandii
MAQTMKAAVVVEFGKPLEIREVPVPTPGPGQLLVKIAACGVCHTDLHAAEGDWPVKPEPPFIPGHEGVGQVVAVGAGVGHVKEGDRVGIPWLHSSCGHCEHCLGGWETLCLAQSNTGYSVNGGFAEYALADAEYVGHLPDNADFIEIAPILCAGVTVYKGLKMTDTRPGQWVAISGIGGLGHMAVQYARAMGLNVAAVDVDDAKLELARRLGASLTVNARDQDPTAFLHKEIGGMHGVLVTAVSPKAFEQALGMARRGGTVALNGLPPGEFSLSIFDMVLNGTTVRGSIVGTRLDLQEALDFAGQGKVRATVASEPLENINDIFARMHKGQIEGRIVLDLAA

SEQ ID NO: 14592 - protein, 258 aa, Shigella flexneri 2a str. 2457T
MRLSMENIMNNPVIGVVMCRNRLKGHATQTLQEKYLNAIIHAGGLPIALPHALAEPSLLEQLLPKLDGIYLPSSPSNVQPHLYGENGDEPDADPGRDLLSMAIINAALERRIPIFAICRGLQELVVATGGSLHRKLCEQPELLEHREDPELPVEQQYAPSHEVQVEEGGLLSALLPECSNFWVNSLHGQGAKVVSPRLRVEARSPDGLVEAVSVINHPFALGVQWHPEWNSSEYALSRILFEGFITAWQHHIAEKQRL

SEQ ID NO: 14593 - protein, 260 aa, Dechloromonas aromatica RCB
MSRRPLRIGLSARIYHPQPGATGLQSKSLQYLEQSVAHWVMSREVMVFMIPSVSGDGIVHRSSIRLSDYPQYLDGLVLQGGADISPQSYGEQPLQAEWAGDRLRDAYEMELLHEFMEAGRPVLGICRGAQLINVALGGTLYQDIATQYEAPQIHVNEDYDKHAHNITWEAGSGLAKLYPEPGSSKVISIHHQAIKALGKGLRVEARSAEDGLIEAIRLEGKPYVLGLQWHPEFHPPGALDLLNCNPILDEFLSAARGRRW

SEQ ID NO: 14594 - protein, 417 aa, Thermoanaerobacter tengcongensis
MLTKAPRGTKDVLPSESYKWQYVENLMREICEFYGYKEIRTPGFEHTELFLRGVGESTDIVRKEMYTFNDRSGRSITLKAEGTSPAVRAFIEHGLYAETQPTKLYYITPVYRYEKPQAGRLREHHQFGVEIFGAKSASADAEVISIAMTLLKKLGLNNLELRINSVGCPVCRKNYNKVLKEFLKEHLDELCDDCKVRYEVNPLRVLDCKVESCRRVTGEAPLITDYLCDDCRNHFEELKKYLDAMGYDYIVDPRIVRGLDYYTKTAFEIISKDIGAQGTVCGGGRYDGLIEECGGPSMPGVGFGMGIERLLLTLEQNGIEIPKPEGPDLFIAYIGDEAKLFTFTLANKLRFNGLKVEIDHMERSLKAQMKYANKLNAKFAVVIGEEELESKKVKLKNMATGEETEILIDEIEKAIKN

SEQ ID NO: 14595 - protein, 289 aa, Fusobacterium nucleatum subsp. vincentii ATCC 49256
MKKPIIGISASMIYEEKDQLFLGDKYSCVAYSYIDAVYKSWGIPITLPILKDVSAIREQVKLLDGLILSGGRDVDPHFYGEEPLEKLEAIFPERDVHEMALIKAAIDLKKPILAICRGMQILNVTYGGTLYQDISYAPGEHIKHYQIGSPYQATHSIKIDKNSILFKMADKSEIERVNSFHHQALKQVAKGLKVVATAPDGIIEAVEAEDEDGTFVMGVQFHPEMMFDKSTFIRGMFKRFINICIDSRPAEVVLKNEIHHTEEHEEKNIDEKIKEIEDEEKKEFFKGDL

SEQ ID NO: 14596 - protein, 465 aa, Klebsiella pneumoniae
MHDKYDVLIIGGGPGGYVAAIRAGQLGLRTVLVEKQHLGGICLNWGCIPTKALLHGAEVAHTITHASQLGISVGEVNVDLQKLVQFSRTVSQQLTAGVAYLLKKNGVRVIDGTARLRGKGQITVEDARGEARDYRADHVILATGARPRALPGIAPDGEHIWTYFEALRPKLLPKSLLIIGSGAIGVEFASLYNDLGCKVTLVELASQILPVEDAEVSAAVRKSFEKRGIQIHTQTLVTQVQLTDTGVRCTLNNTGGEYSQDVERVLLAVGVQPNIEDLGLETLGVELDRGFIKTDAACRTNVFGLYAIGDVAGPPCLAHKASHEGVLCVETLAGVEGAHPLDRDYVPGCTYARPQVASLGLTESTALARGRPIRIGKFSYQSNGKALVSGETEGFVKTIFDAETGELLGAHMVGAQVTEQIQGFGIARHLEATDESLLSMIFAHPTLSEAMHESILAACDQPLHQ

SEQ ID NO: 14597 - protein, 508 aa, Xylella fastidiosa Ann-1
MVSAWNEEVTESLFMSRKHAFQFLDLPRQMPQRIPVELRTSGDWRELYGKFDKGEAQYQAGRCLDCGNPYCSWKCPVHNAIPQWLQLVQENRIDEAAALCHSTNPLPEVCGRVCPQDRLCEGSCTLEEFGAVTIGAVEKYIVDTALQQGWRPDLSHVQPTGWRVAVVGAGPAGLACADRLARAGVQAVVYDRYEQIGGLLQFGIPSFKLDKAVMSTRRQVLEGMGVEFRLGVEIGKDLGIEALLEDYDAVFLGVGAYRYTDGGLPGQDLKNVLPALPFLVQNGRIVSGNDPYGRPIAGWEDQVQLPDVAGKSVVVLGGGDTGMDCVRSAIRLGATKVTCIYRRDEANMPGSAREVANAREEGVRFLFNRQPLSIQSGTDKQAIGVTVVETKLAEPDANGRRNAVPIQGTEAVLEADVVIIAFGFSPMLLEWLTAQGVQASSNGRIVVALSDTGDRLTYQTTHPKLFAGGDCVRGADLVVTAVAEGRDAAESIVRWLRATAQVMDVAVI

SEQ ID NO: 14598 - protein, 284 aa, Xylella fastidiosa Ann-1
MPHVTLLPSPSPIAFIGGGNMARSLIAGMIRQGAPSTSICVIEPIAALRDALIADFNIKAVTTATEAATDTSTWVLAVKPQVMPDVCATLPLPVQPNTPLVISIAAGITTCKLKHWLGDTCAIVRAMPNTPALLGAGVTGLFTTSQTTGTQRTIAEELFNSVGKTLWITEEALMDAVTAVSGSGPAYAFLLAEAMETAAIMQGLSTANARTLVQQTLLGAARMMTESGETPAALRHRVTSPHGTTEAAITTFQENDFQALVAKAIDAATRRARALGKINDTDPT

SEQ ID NO: 14599 - protein, 392 aa, Ruegeria sp. PR1b
MLSDLGSVPSDEILTLMQMHREDPRRDKIDQTVGVYRNELGQTPVMQAVKAAEYKIWQDQTSKSYTGLLGDPEFLEVMQALVLGPEAPPCTAAAVPGGSGACRQAFELIRQATPGARVYVSDPTWANHTTMLAHTGLARETYRFRDPATGGLNFDGMMQDLGTARAGDVVLLHGCCHNPTGISLTRTQWRALADRMAKNGLVGMIDLAYLGFGDGLEEDAWGTRHLAETLDECLIAVSCSKNFGLYRERAGALLVTARNPALLAHTREVLAYLNRQAYSFPPDHGARIVTSILKDPALREVWTQELHGIRNSIAALRLQLCNAFAEKTGTRRFDYIREHKGMFSCLGATPEQVRTLRAKHGIYMVTDSRLNFASLSQQNVERIVDAVTDVGI

SEQ ID NO: 14600 - protein, 1164 aa, Arabidopsis thaliana
MVSGGGSKTSGGEAASSGHRRSRHTSAAEQAQSSANKALRSQNQQPQNHGGGTESTNKAIQQYTVDARLHAVFEQSGESGKSFDYSQSLKTAPYDSSVPEQQITAYLSRIQRGGYTQPFGCLIAVEESTFTIIGYSENAREMLGLMSQSVPSIEDKSEVLTIGTDLRSLFKSSSYLLLERAFVAREITLLNPIWIHSNNTGKPFYAILHRVDVGILIDLEPARTEDPALSIAGAVQSQKLAVRAISHLQSLPSGDIKLLCDTVVESVRDLTGYDRVMVYKFHEDEHGEVVAESKRNDLEPYIGLHYPATDIPQASRFLFKQNRVRMIVDCYASPVRVVQDDRLTQFICLVGSTLRAPHGCHAQYMTNMGSIASLAMAVIINGNEEDGNGVNTGGRNSMRLWGLVVCHHTSARCIPFPLRYACEFFMQAFGLQLNMELQLALQVSEKRVLRMQTLLCDMLLRDSPAGIVTQRPSIMDLVKCNGAAFLYQGKYYPLGVTPTDSQINDIVEWLVANHSDSTGLSTDSLGDAGYPRAAALGDAVCGMAVACITKRDFLFWFRSHTEKEIKWGGAKHHPEDKDDGQRMNPRSSFQTFLEVVKSRCQPWETAEMDAIHSLQLILRDSFKESEAMDSKAAAAGAVQPHGDDMVQQGMQEIGAVAREMVRLIETATVPIFAVDIDGCINGWNAKIAELTGLSVEDAMGKSLVRELIYKEYKETVDRLLSCALKGDEGKNVEVKLKTFGSELQGKAMFVVVNACSSKDYLNNIVGVCFVGQDVTGHKIVMDKFINIQGDYKAIIHSPNPLIPPIFAADENTCCLEWNTAMEKLTGWPRSEVIGKLLVREVFGSYCRLKGPDALTKFMIVLHNAIGGQDTDKFPFPFFDRKGEFIQALLTLNKRVSIDGKIIGAFCFLQIPSPELQQALEVQRRQESEYFSRRKELAYIFQVIKNPLSGLRFTNSLLEDMDLNEDQKQLLETSVSCEKQISKIVGDMDVKSIDDGSFLLERTEFFIGNVTNAVVSQVMLVVRERNLQLIRNIPTEVKSMAVYGDQIRLQQVLAEFLLSIVRYAPMEGSVELHLCPTLNQMADGFSAVRLEFRMACAGEGVPPEKVQDMFHSSRWTSPEGLGLSVCRKILKLMNGGVQYIREFERSYFLIVIELPVPLMMMMPSS

SEQ ID NO: 14601 - protein, 828 aa, Escherichia coli O157:H7
MKLSRRSFMKANAVAAAAAAAGLSVPGVARAVVGQQEAIKWDKAPCRFCGTGCGVLVGTQQGRVVACQGDPDAPVNRGLNCIKGYFLPKIMYGKDRLTQPLLRMKNGKYDKEGEFTPITWDQAFDVMEEKFKTALKEKGPESIGMFGSGQWTIWEGYAASKLFKAGFRSNNIDPNARHCMASAVVGFMRTFGMDEPMGCYDDIEQADAFVLWGANMAEMHPILWSRITNRRLSNQDVTVAVLSTYQHRSFELADNGIIFTPQSDLVILNYIANYIIQNNAINQDFFSKHVNLRKGATDIGYGLRPTHPLEKAAKNPGSDASEPMSFEDYKAFVAEYTLEKTAEMTGVPKDQLEQLAQLYADPNKKVISYWTMGFNQHTRGVWANNLVYNLHLLTGKISQPGCGPFSLTGQPSACGTAREVGTFAHRLPADMVVTNEKHRDICEKKWNIPSGTIPAKIGLHAVAQDRALKDGKLNVYWTMCTNNMQAGPNINEERMPGWRDPRNFIIVSDPYPTVSALAADLILPTAMWVEKEGAYGNAERRTQFWRQQVQAPGEAKSDLWQLVQFSRRFKTEEVWPEELLAKKPELRGKTLYEVLYATPEVSKFPVSELAEDQLNDESRELGFYLQKGLFEEYAWFGRGHGHDLAPFDDYHKARGLRWPVVNGKETQWRYSEGNDPYVKAGEGYKFYGKPDGKAVIFALPFEPAAEAPDEEYDLWLSTGRVLEHWHTGSMTRRVPELHRAFPEAVLFIHPLDAKARDLRRGDKVKVVSRRGEVISIVETRGRNRPPQGLVYMPFFDAAQLVNKLTLDATDPLSKETDFKKCAVKLEKV

SEQ ID NO: 14602 - protein, 391 aa, Streptococcus agalactiae 2603V/R
MTLEKRFNKYLDRIEVSLIRQFDQSISDIPGMVKLTLGEPDFTTPDHVKEAAKSAIDANQSYYTGMSGLLALRQAAADFAKDKYNLTYNPDCEILVTIGATEALSASLIAILEAGDVVLLPAPAYPGYEPIVNLVGADIVEIDTRENDFRLTPEMLETAIIQQGEKLKAVLLNYPTNPTGITYSRQEIAALAEVLKKYDIFVISDEVYSELTYTGQQHVSIAEYLPNQTILINGLSKSHAMTGWRVGLVYAPEAFIAQIIKSHQYMVTAASTISQFAGVEALSVGKNDTLPMRQGYIKRRDYIIDKMSKLGFKIIKPSGAFYIFAKIPDSYPQDSFKFCQDFAYQQAVAIIPGVAFGKYGEGYIRLSYAASMEVIETAMARLKVFMESYEG

SEQ ID NO: 14603 - protein, 486 aa, Streptomyces coelicolor A3(2)
MSGRTPAADRSLETGVAHMHGGRDVANDASTVFDLVILGGGSGGYAAALRGAQLGLDVALIEKNKLGGTCLHNGCIPTKALLHAGEVADQSRESEQFGVKTSFEGVDMAGVHKYKDEVIAGLYKGLQGLVASRKITYIEGEGRLSSPTSVDVNGQRVQGRHVLLATGSVPKTLPGLEIDGNRIISSDHALTLDRVPKSAIVLGGGVIGVEFASAWKSFGSEVTVIEGLKHLVPVEDENSSKLLERAFRKRGIKFNLGTFFQKAEYTQDGVKVTLADGKEFEAEVLLVAIGRGPVSQGLGYEENGVATDRGFVLVDEYMRTNVPTISAVGDLVPTLQLAHVGFAEGILVAERLAGLKTVPVDYDGVPRVTYCHPEVASVGLTEARAKEVYGADKVVSIKFPLGGNGKSRILKTAGEIKLVQVKDGAVVGVHMVGDRMGEQVGEAQLIYNWEALPAEVAQLIHAHPTQNEALGEAHLALAGKPLHMHD

SEQ ID NO: 14604 - protein, 519 aa, Glycine max
MPAVGGISNGGGKEYPGSLTPFVTVTCIVAAMGGLIFGYDIGISGGVTSMDPFLLKFFPSVFRKKNSDKTVNQYCQYDSQTLTMFTSSLYLAALLSSLVASTVTRRFGRKLSMLFGGLLFLVGALINGFAQHVWMLIVGRILLGFGIGFANQSVPLYLSEMAPYKYRGALNIGFQLSITVGILVANVLNYFFAKIHGGWGWRLSLGGAMVPALIITIGSLVLPDTPNSMIERGDREKAKAQLRRVRGIDDVEEEFNDLVAASESSRKVEHPWRNLLQRKYRPHLTMAVLIPFFQQLTGINVIMFYAPVLFSSIGFKDDSALMSAVITGVVNVVATCVSIYGVDKWGRRALFLEGGVQMVICQAVVAAAIGAKFGIDGNPGDLPKWYAVVVVLFICIYVSAFAWSWGPLGWLVPSEIFPLEIRSAAQSINVSVNMFFTFLIAQVFLTMLCHMKFGLFIFFAFFVLIMTFFIYFFLPETKGIPIEEMNQVWKAHPFWSRFVENDDYGNGVEMGRGTAIKEV

SEQ ID NO: 14605 - protein, 590 aa, Streptomyces coelicolor A3(2)
MAVSVTLPALGESVTEGTVTRWLKAEGERVEADEPLLEVSTDKVDTEIPAPASGVLSSIKVAEDETVEVGAELALIDDGSGAPAAAPAPQAEQVAEPAPEPAPAAPSTEQAAPAPAPTADAAAGGSAQGTDVVLPALGESVTEGTVTRWLKSVGDSVEEDEPLLEVSTDKVDTEIPAPASGTLLEIVVGEDETAEVGAKLAVIGAAGAAPAAAPAAPAAPAQEAPAAPAQPEPTPAPAPAQAAPAPAPQAPAAPAPQPAAPAPAPAPAAAPAAPAAAQPVDDGAYVTPLVRKLAAENGVDLSTVKGTGVGGRIRKQDVAAAAEAAKAAAPAPAAAPAAPAAKKAPVLEASPLRGQTVKMPRIRKVIGDNMVKALHEQAQLSSVVEVDVTRLMKLRARAKDAFAAREGVKLSPMPFFVKAAAQALKAHAPVNAKINEAEGTITYFDTENIGIAVDSEKGLMTPVIKNAGDLNLAGIAKATADLAGKVRASKISPDELAGATFTISNTGSRGALFDTIIVPPGQVAILGIGATVKRPAVIETEDGPVIGVRDMTYLTLSYDHRLVDGADAARYLTAVKAILEAGEFEVELGL

SEQ ID NO: 14606 - protein, 322 aa, Zea mays
AANSSHPISSISEQRQRNPAKRRFFLALFGTGHRHRARRRNRRRLSFFFVFPGRAQVAMAFAVSDELLGTFVPIAVYWLYSGLYVVLDGLGMDDYRLHPKGEEEAKNIVSRSTVVRGVLVQQAFQIAVSLLLFTVLGDENEAARKQPPALVLALQFIVAMFVMDTWQYFMHRYMHINKFLYKHVHSKHHTLVVPYAFGALYNHPLEGLILDTIGGALSFLISGMTPRTGIFFFSFATIKTVDDHCGLWLPGNILHVFFSNNSAYHDIHHQLYGNKYNFSQPFFVMWDKILGTYMPYTLETRKGGGLEARPVKLNQAQQTKAD

SEQ ID NO: 14607 - protein, 126 aa, Bacillus licheniformis
CIGCHTCSVTCKNTWTNRSGAEYMYFNNVETKPGIGYPKQWENQDKYKGGWELKKGKLQLKSGAKATRLMNLFYNPYQPTIDDYYEPWNYDYETLTNSPEKKHQPVARPKSSITGDFMNLEWGPNW

SEQ ID NO: 14608 - protein, 260 aa, Pyrococcus furiosus DSM 3638
MPCYNLKNKVAIVTGGGQGIGAAIAQLFAENGAKVVLAEIDEEAGLEREAMLRERGLDVTFIKTDVADEESVKNMVKKTVELYGGVDILVNNAAIMSVKSIFERTLEEWERVIRVNLTGPYICSRYAAEEMIKRGGGVIINIASTRALMSEPDTEPYSASKGGLLALTHSLAISLAKYRIRVVAVSPGWIETSRWKKSKLRSEPKLRPIDHEQHPAGRVGDPMDIAHICAFLADNEKAGFITGVNFVVDGGMTVKMIYAD

SEQ ID NO: 14609 - protein, 495 aa, Shigella flexneri 2a str. 2457T
MNFHHLAYWQDKALSLAIENRLFINGEYTAAAENETFETVEPVTQAPLAKIARGKSVDIDRAVSAARGVFERGDWSLSSPAKRKAVLNKLADLMEAHAEELALLETLDTGKPIRHSLRDDIPGAARAIRWYAEAIDKVYGEVATTSSHELAMIVREPVGVIAAIVPWNFPLLLTCWKLGPALAAGNSVILKPSEKSPLSAIRLAGLAKEAGLPDGVLNVVTGFGHEAGQALSRHNDIDAIAFTGSTRTGKQLLKDAGDSNMKRVWLEAGGKSANIVFADCPDLQKAASATAAGIFYNQGQVRIAGTRLLLEESIADEFLALLKQQAQNWQPGHPLDPATTMGTLIDSAHADSVHTFIREGEGKGQLLLDGRNAGLAAAIGPTIFVDVDPNASLSREEIFGPVLVVTRFTSEDQALQLANDSQYGLGAAVWTRDLSRAHRMSRRLKAGSVFVNNYNDGDMTVPFGGYKQSGNGRDKSLHALEKFTELKTIWISLEA

SEQ ID NO: 14610 - protein, 421 aa, Shigella flexneri 2a str. 2457T
MSNNEFHQRRLSATPRGVGVMCNFFAQSAENATLKDVEGNEYIDFAAGIAVLNTGHRHPDLVAAVEQQLQQFTHTAYQIVPYESYVTLAEKINTLAPVSGQAKTAFFTTGAEAVENAVKIARAHTGRPGVIAFSGGFHGRTYMTMALTGKVAPYKIGFGPFPGSVYHVPYPSDLHGISTQDSLDAIERLFKSDIEAKQVAAIIFEPVQGECGFNVAPKELVAAIRRLCDEHGIVMIADEVQSGFARTGKLFAMDHYADKPDLMTMAKSLAGGMPLSGVVGNANIMDAPAPGGLGGTYAGNPLAVAAAHAVLNIIDKESLCERANQLGQRLKNTLIDAKESVPAIAAVRGLGSMIAAEFNDPQTGEPSAAIAQKIQQRALAQGLLLLTCGAYGNVIRFLYPLTIPDAQFDAAMKILQDALSD

SEQ ID NO: 14611 - protein, 506 aa, Brucella melitensis 16M
MVMSTIVKPQPLTGLEVREFSMLIDGKWVGSDSGKSIERVAPGHGVTVSRYPAGNKANVERAVSAARKAFDDGRWSSKTASQRSLVLLKAADLIEARAEELAYLDAIEAGKPISQVRGEISGSVDIWRYAAALARDLHGESYNTLGDGTLGVVLREAIGVVSIITPWNFPFLIVGQKLPFALAAGCTAVVKPSELTSGSTLLLGEILAEAGVPDGVVNIVTGTGADVGQHMSTHPHVDMVSFTGSTGVGKLTMANAAQTLKKVSLELGGKNPQILFPDADMDAFIDAAVFGAWFNAGECCNAGSRLIVHRSVVDAIVGRVADLSKKVIVGDPLDASTQVGAIITPQHLTKVGAYVDQARKAGAAIAHGGEVLDLGLGQYMGPTILAGVKADMAVAREEVFGPVLSVLSFDTVEEAISIANAVDYGLSAGVWSRDFDTCMTIGRKVRAGTVWMNTFMDGTPELPFGGYRQSGLGRELGRHAVEDYTETKTLNMHIGARTGWWMPQAK

SEQ ID NO: 14612 - protein, 176 aa, Triticum aestivum
  unsure (1)..(176): unsure at all Xaa locations
MAPTVMASSATSVAPXQGLKSTAGLPVSRRSNGASLGSVSNGXGRIRCMQVWPIEGIKKFETLSYLPPLSTEALLKQVDYLIRSKWVPCLEFSKVGFIFREHNASPGYYDGRYWTMWKLPMFGCTDATQVINEVEEVKKEYPDAYVRIIGFDNMRQVQCVSFIAFKPPGCEESGKA

SEQ ID NO: 14613 - protein, 215 aa, Fagus sylvatica
MARRADEEYDYLFKVVLIGDSGVGKSNLLSRFTRNEFCLESKSTIGVEFATRTLQVEGRTVKAQIWDTAGQERYRAITSAYYRGAVGALLVYDVTKPTTFEQVWLKELRDHADSNIVIMLIGNKTDLKHSRAVRTEDAQGFMLRKKALSFIETSALKATNVEKAFQTILCLRFTGIISKKSLSSDEPAPSVIKEAVKHIVVGGSEANTKKPCCSN

SEQ ID NO: 14614 - protein, 297 aa, Escherichia coli
MTNLKAVIPVAGLGMHMLPATKAIPKEMLPIVDKPMIQYIVDEIVAAGIKEILLVTHASKNAVENHFDTSYELESLLEQRVKRQLLAEVQSICPPGVTIMNVRQGEPLGLGHSILCARPAIGDNPFVVVLPDVVIDDASADPLRYNLAAMIARFNETGRSQVLAKRMPGDLSEYSVIQTKEPLDREGKVSRIVEFIEKPDQPQTLDSDIMAVGRYVLSADIWPELERTQPGAWGRIQLTDAIAELAKKQSVDAMLMTGDSYDCGKKMGYMQAFVKYGLRNLKEGAKFLKNIEQLLAK

SEQ ID NO: 14615 - protein, 368 aa, Papaver rhoeas
MATYVDPPNGTGSPGKHYYSMWQTVFEIDTKYVPIKPIGRGAYGIVCSSVNRETNDKVAIKKIQNAFENRIDALRTLRELKLLRHLRHENVIALRDVMMPTHRRSFKDVYLVYELMDTDLHQIVKSSQPLSNDHCQYFLFQLLRGLKYLHSANILHRDLKPGNLLVNANCDLKICDFGLARTCSGKGQFMTEYVVTRWYRAPGLLLCCDNYGTSIDVWSVGCIFAELLGRKPIFPGTECLNQLKLIINVLGSQSEADLEFIDNPKARKYIKSLPYSPKTPFARIYPNASPLAIDLLQKMLVFDPSKRISVTEALQHPYMSPLYDPNADPPAQVPVDLDIDEEDLGEETIREMMWTEMLHYHPEAVSSN

SEQ ID NO: 14616 - protein, 560 aa, Arabidopsis thaliana
MGSSGDVNWKLADHPKLPKGKTIGLIVLDGWGESDPDQYNCIHKAPTPAMDSLKDGKPDTWRLIKAHGTAVGLPSEDDMGNSEVGHNALGAGRIYAQGAKLVDLALASGKIYEDEGFKYISQSFEKGTVHLIGLLSDGGVHSRLDQVQLLLKGFAERGAKRIRVHILTDGRDVLDGSSVGFVETLEADLAALRAKGVDAQVASGGGRMYVTMDRYENDWSVVKRGWDAQVLGEAPHKFKSALEAVKTLRAEPGANDQYLPSFVIVDDNGKAVGPIVDGDAVVTFNFRADRMVMHAKALEYKDFDKFDRVRVPDIRYAGMLQYDGELKLPSRYLVSPPLIDRTSGEYLAHNGVRTFACSETVKFGHVTFFWNGNRSGYFNEKLEEYVEIPSDSGISFNVQPKMKALEIAEKARDAILSGKFDQVRVNLPNGDMVGHTGDIEATVVACEAADRAVRTILDAIEQVGGIYVVTADHGNAEDMVKRDKSGKPALDKEGNLQILTSHTLKPVPIAIGGPGLSAGVRFRQDIETPGLANVAATVMNLHGFVAPSDYETSLIEVVEK

SEQ ID NO: 14617 - protein, 365 aa, Arabidopsis thaliana
MGESITDGTLATFLKKPGERVQADEAIAQIETDKVTIDIASPASGVIQEFLVNEGDTVEPGTKVAIISKSEDTASQVTPSQKIPETTDTKPSPPAEDKQKPRVESAPVAEKPKAPSSPPPPKQSAKEPQLPPKERERRVPMTRLRKRVATRLKDSQNTFALLTTFNEVDMTNLMKLRSQYKDAFYEKHGVKLGLMSGFIKAAVSALQHQPVVNAVIDGDDIIYRDYVDISIAVGTSKGLVVPVIRGADKMNFAEIEKTINSLAKKANEGTISIDEMAGGSFTVSNGGVYGSLISTPIINPPQSAILGMHSIVSRPMVVGGSVVPRPMMYVALTYDHRLIDGREAVYFLRRVKDVVEDPQRLLLDI

SEQ ID NO: 14618 - protein, 632 aa, Escherichia coli CFT073
MVSYFYPSLKSPHSIKPVKNYRSINKYTQKPSPFSSISNRHYVFYFSTAKSLAHRAALRHFFNKQTQHAVNTRLTEKVMCSIFGVFDIKTDAVELRKKALELSRLMRHRGPDWSGIYASDNAILAHERLSIVDVNAGAQPLYNQQKTHVLAVNGEIYNHQALRAEYGDRYQFQTGSDCEVILALYQEKGPEFLDDLQGMFAFALYDSEKDAYLIGRDHLGIIPLYMGYDEHGQLYVASEMKALVPVCRTIKEFPAGSYLWSQDGEIRSYYHRDWFDYDAVKDNVTDKNELRQALEDSVKSHLMSDVPYGVLLSGGLDSSIISAITKKYAARRVEDQERSEAWWPQLHSFAVGLPGSPDLKAAQEVANHLGTVHHEIHFTVQEGLDAIRDVIYHIETYDVTTIRASTPMYLMSRKIKAMGIKMVLSGEGSDEVFGGYLYFHKAPNAKELHEETVRKLLALHMYDCARANKAMSAWGVEARVPFLDKKFLDVAMRINPQDKMCGNGKMEKHILRECFEAYLPASVAWRQKEQFSDGVGYSWIDTLKEVAAQQVSDQQLETARFRFPFNTPTSKEAYLYREIFEELFPLPSAAECVPGGPSVACSSAKAIEWDEAFKKMDDPSGRAVGVHQSAYK

SEQ ID NO: 14619 - protein, 384 aa, Streptomyces avermitilis MA-4680
MSDRHISQHFETLAIHAGNTADPLTGAVVPPIYQVSTYKQDGVGGLRGGYEYSRSANPTRTALEENLAALEGGRRGLAFASGLAAEDCLLRTLLSPGDHVVIPNDAYGGTFRLFAKVVSRWGVEWSVADTSDPEAVRAAITPKTKAIWVETPSNPLLGITDIPAIAQIAREAGAKLVVDNTFATPYLQQPLALGADVVVHSLTKYMGGHSDVVGGALVVSDQELGEELAYHQNAMGAVAGPFDSWLVLRGTKTLSVRMDRHSENATKVTEMLTRHARVTRVLYPGLPEHPGHEIAAKQMRAFGGMVSFQVEGGEEAAVEVCNRAKVFTLGESLGGVESLIEHPGRMTHASAAGSALEVPADLVRLSVGIENVDDLLQDLQQALG

SEQ ID NO: 14620 - protein, 197 aa, Triticum aestivum
DSDEAEDQYDFDPLDDTKTWPEDLLPLQPVGRLVLDKNVDNFFNENEQLAFGPGLVVPGIYYSDDKMLQCRVFAYADTQRYRLGPNYLMLPVNAPRCAHHNNHYDGAMNFMHRDEEVDYYPSRHAPLRQAPPVPIPARPVVGKRQKETIRKPNDFKQPGERYRSWDADRQERFVRRFADSLGHPKGSQELRSIWIDL

SEQ ID NO: 14621 - protein, 702 aa, Thermoplasma acidophilum
MKIGYQLIINTYYAASSVCFRRNIFKSRQNSKIMTLTVCPYCGTGCQIEVDYSGDHYTVHGYTRSAVNEGKLCIKGYQGLSYASSHDRITSPMLRSGDTWVKVSWDEAIDYVVKRLKEIRDRYGPDAIAFQASAKCTNEENYLLQKIARMIGTNNVDHCARSCHSSTVAGLIRTLGTAAATGSIKSLKSTQTFFVIGSNTTEQHPIIGTTIIKQKKAGKKLIVADPRRTKLASIADVFLQFKPGSDVALLNSMMFVILKRGLIDSEFIKSRTEGFEAFAEEIEKYPPELTEQITGVPPDLVEKAAEIYASNRPSAILYGMGITQHIHGTENVMSVSNLALMTGNLGRYGSGIFPLRGQNNVQGSSDMGALSEFYPGYVPPDSPGVEKFERIWEAKLPRKVGLMLSEMFDAAIDGRVKAIYLMGENPVITEANLSDVERGLKNLELFVVQDIFMTDTARYAHVILPATSALEKEGTFTNTERRIQRVVPVKDPPGDARPDWWILSQIYSKIFDREAYRSPEDIFNEIRLAIPNYSGVRYSDLYPDGKQWPINDQHPEGAEILHVDKFARGLGRFMAIPYKSPSESPDEEYPFILTTGRNYYHWHSGTMTRRSEILERESPNPYVEISVNDAKKLSIRNGQTITIESRHGSIKLPAMVTSKIPDGIVFVPFHFKEARVNLLVGENLDPYSKIPEFKVVAVKVKA

SEQ ID NO: 14622 - protein, 471 aa, Chloroflexus aurantiacus
MKLAWRTKIGLGLGFGLGLWLVGTGRAFAQEGPTTAELAVAMNTFFLIVAAALVFFMQAGFAMLTAGLTRSKNTTNILFKNLMDFVMCSIAFWAVGWGIAYGTSAGGFIGTDQFFLSPVTAEGEVPVMASWFFQVVFAGTAATIVAGAMAERTKFAAYLIYSFIISLFIYPVVVHWVWSGAGWLNTYSGSTEGNWGFTDFAGSTVVHSVGGWASLVGAMILGPRLGRFGPDGKPRVIPGHNMSLAALGTFILWLGWFGFNPGSQLAIASQANADAVALVAVTTNLAAAAGALGALFTAWLRYGKPDLGQTLNGVLGGLVAITAGCAYVDPLSSIIIGFIAGPIVVFSAELLEKLKIDDPVGAVPVHLVNGIWGTLAVGLFASVPGNTGTTGLFYGGGLTLLISQFVGVVAIGLWTVATAALMFFAIKATIGLRVSKAEEEAGLDIGEHGMVAYPDLSGAPAGGEVSGALAR

SEQ ID NO: 14623 - protein, 533 aa, Corynebacterium efficiens YS-314
MTENSAADQIIDRGMRPKVAGNTTRHNGAPVASENISVTAGPQGPNILNDIHLIEKLAHFNRENVPERIPHAKGHGAFGELHITEDVSQYTKADLFQPGKVTPMGVRFSTVAGEQGSPDTWRDVHGFALRFYTQEGNYDIVGNNTPTFFVRDGMKFPDFIHSQKRLNKNGLRDADMQWDFWTRAPESAHQVTYLMGDRGTPKTTRHMNGYGSHTFQWVNKDGEAFWVKYHFISRQGVENFTDAEAAEMAGINADYHREDLYNAIERGDYPIWDVKVQIMPFAEAENYRWNPFDLTKVWSKKDYPRIDVGYFILNRNPRNFFAQIEQIALDPGNIVPGVGLSPDRMLQARAFAYADQQRYRIGPNYRDLPINRPINEVNTYSREGHMQYVFDAEGEPSYSPNRYTKGAGYLDDGETSSSNHTSYGQASDIYVNPDPHGTDLVRAAYVKHQDDDDFMQAGILYREVYNDEEKARLADNISNAMQGISEETEPRVYEYWTNVDENLGARVKELYLQKKAAGAAEHTSSTGDDIDKK

SEQ ID NO: 14624 - protein, 335 aa, GIBBERELLA ZEAE PH-1
MPNSMALTPYGSNGSTDLTMAVLGCGTMGVAILSGILNSLAEMQGPKPLQTLTSSPGDEVPDRLPSRFVASVATPAGAKRVKGALWEHSSILKVVHNDNIGAVQQSEVVILACKPWMVKEILTEPGISKALHGKLLISVCAGITVEDIEIALHGAVPCKDPEEDGRCRIVRAMCNTAAVIRESMTVIASPNSPLDHATESLVTWIFKRIGDVVYLPTRHMDASTALCASGPAFFALVLEAAIDGAVAMGIPRPDAQRMATQSMRGTAGLVQNGEHPALLREKVCTSGGCTIGGVLVLEEGKVRGTVSRAVREAAVVAGQIGKGADGVNGTRFHYE

SEQ ID NO: 14625 - protein, 403 aa, Corynebacterium glutamicum ATCC 13032
MNPLRTNQWGIKYSSCMSNDFVVSRLRPFGETIFATMTQRAVEAGAINLGQGFPDEDGPRRMLEIASEQILGGNNQYSAGRGDASLRAAVARDHLERFDLEYNPDSEVLITVGATEAITATVLGLVEPGDEVIVLEPYYDAYAAAIALAGATRVAVPLQEVENSWDVDVDKLHAAVTKKTRMIIVNSPHNPTGSVFSKKALKQLAGVARAYDLLVLSDEVYEHLVFDDQKHVSVAKLPGMWDRTVTVSSAAKTFNVTGWKTGWALAPEPLLEAVLKAKQFMSYVGATPFQPAVAHAIEHEQKWVSKMSKGLELKRDILRTALDKAGLKTHDSMGTYFIVADIGDRDGAEFCFELIEKVGVAAIPVQAFVDHPKKWSSKVRFAFCKKEETLREAAERLKGIKKL

SEQ ID NO: 14626 - protein, 444 aa, Escherichia coli
  unsure (1)..(444): unsure at all Xaa locations
MGLVKQGARVAVIERYQNVGGGCTHWGTIPSKXLRHAVSRIIEFNQNPLYSDHSRLLRSSFADILNHADNVINQQTRMRQGFYERNHCEILQGNARFVDEHTLALDCPDGSVETLTAEKFVIACGSRPYHPTDVDFTHPRIYDSDSILSMHHEPRHVLIYGAGVIGCEYASIFRGMDVKVDLINTRDRLLAFLDQEMSDSLSYHFWNSGVVIRHNEEYEKIEGCDDGVIMHLKSGKKLKADCLLYANGRTGNTDSLALQNIGLETDSRGQLKVNSMYQTAQPHVYAVGDVIGYPSLASAAYDQGRIAAQALVKGEATAHLIEDIPTGIYTIPEISSVGKTEQQLTAMKVPYEVGRAQFKHLARAQIVGMNVGTLKILFHRETKEILGIHCFGERAAEIIHIGQAIMEQKGGGNTIEYFVNTTFNYPTMAEAYRVAALNGLNRLF

SEQ ID NO: 14627 - protein, 257 aa, Triticum aestivum
  unsure (1)..(257): unsure at all Xaa locations
MGSITDMAVIKMLLLPALFALLLRAASAAQWTPAHATFYGGGDASGTMGGACGYGNLYDAGYGTQTTALSTALFNNGASCGACFTIACDARKSRLCKPGTSITVTATNFCPPNYAXPGDNAGWCNPPRQHFDMAQPAWETIAVYXAGIVPVNYRRVRCQRSGGMRFTINGHSYFELVLVTNVGGSGGVAQMWIKGSRTNWMEMSRNWGANWQSNANLDGQSLSFRVKSDDGRVVTANDVAPPGWWFGGTYTSGAQLY

SEQ ID NO: 14628 - protein, 173 aa, Triticum aestivum
  unsure (1)..(173): unsure at all Xaa locations
RGGPSRAINVVLTADDVAVDGFCMSRCGSHGASPRSRAGRFAYVWVGNPATQCAGQCAWPYHRLTSXYRASPLAPPNGDVGVDGMVVSLASMIVGTVTNPFGNGFFQGPAEAPLEAATACAGVYGKGAYPGYAGSLLVDPATGASFNANGAHGRKYLVPALVDPDTSACSTLG

SEQ ID NO: 14629 - protein, 292 aa, Shigella flexneri 2a str. 2457T
MKTRKGIILAGGSGTRLYPVTMAVSKQLLPIYDKPMIYYPLSTLMLAGIRDILIISTPQDTPRFQQLLGDGSQWGLNLQYKVQPSPDGLAQAFIIGEEFIGGDDCALVLGDNIFYGHDLPKLMDTAVNRESGATVFAYHVNDPERYGVVEFDDNGTAISLEEKPQEPKSNYAVTGLYFYDNDVVEMAKNLKPSARGELEITDINRIYMDQGRLSVAMMGRGYAWLDTGTHQSLIEASNFIATIEERQGLKVSCPEEIAHRKGFIDAEQVKVLAEPLKKNAYGQYLLKMIKGY

SEQ ID NO: 14630 - protein, 297 aa, Shigella flexneri 2a str. 2457T
MTNLKAVIPVAGLGMHMLPATKAIPKEMLPIVDKPMIQYIVDEIVAAGIKEILLVTHASKNAVENHFDTSYELESLLEQRVKRQLLAEVQSICPPGVIIMNVRQGEPLGLGHSILCARPAIGDNPFVVVLPDVVIDDASADPLRYNLAAMIARFNETGRSQVLAKRMPGDLSEYSVIQTKEPLDREGKVSRIVEFIEKPDQPQTLDSDIMAVGRYVLSADIWPELERTQPGAWGRIQLTDAIAELAKKQSVDAMLMTGDSYDCGKKMGYMQAFVKYGLRNLKEGAKFRKGIEKLLSE

SEQ ID NO: 14631 - protein, 487 aa, Sinorhizobium meliloti
MRAQPKASHFIDGEYVEDAAGTVIESIYPATGEIIARLHAATPGIVEKAIAAAKRAQPEWAAMSPTARGRILKRAAELMRQRNRELSELETLDTGKPIQETIVADPTSGADSFEFFGGVAPAALNGDYIPLGGDFAYTKRVPLGVCVGIGAWNYPQQIACWKGAPALVAGNAMVFKPSENTPLGALKIAEILIEAGLPKGLFNVIQGDRATGPLLVNHPDVAKVSLTGSVPTGKKVAGAAAAELKHVTMELGGKSPLIVFDDADLESAIGGAMLGNFYSTGQVCSNGTRVFVQRKIKEPFLARLKERTEAIVIGDPLDEATQLGPMVSAAQRDKVFSYIGKGKAEGARLVTGGGIPNNVSGEGTYIQPTVFADVTDGMTIAREEIFGPVMCVLDFDDEVEVIARANATEFGLSAGVFTADLTRAHRVADRLEAGTLWINTYNLCPVEIPFGGSKQSGFGRENSVAALNHYTELKTVYVGMGPVEAPY

SEQ ID NO: 14632 - protein, 464 aa, Pseudomonas syringae pv. tomato str. DC3000
MAVYNYDVVVLGSGPAGEGAAMNAAKAGRKVAMVDSRREVGGNCTHLGTIPSKALRHSVKQIIQFNTNPMFRAIGEPRWFSFPDVLKNAEMVISKQVASRTSYYARNRVDVFFGTGSFADETSVNVVCANGVVEKLVANQIIIATGSRPYRPADIDFSHKRIYDSDTILSLGHTPRKLIIYGAGVIGCEYASIFSGLGVLVELVDNRDQLLSFLDSEISQALSYHFSNNNVMVRHNEEYERVEGLDNGVVLHLKSGKKIKADALLWCNGRTGNTDKLGLENIGLKANGRGQIEVDEAYRTSVSNVYGAGDVIGWPSLASAAYDQGRSAAGSMVDNGSWRYVNDVPTGIYTIPEISSIGKNEHELTQAKVPYEVGKAFFKGMARAQISGERVGMLKILFHRETLEVLGVHCFGDQASEIVHIGQAIMSQPGEANTIKYFVNTTFNYPTMAEAYRVAAYDGLNRLF

SEQ ID NO: 14633 - protein, 151 aa, Zea mays
  unsure (1)..(151): unsure at all Xaa locations
MGSSXFSWTLPDHPKLPKGKPXAVVVLDGWGEANPDQYNCIHVAQTPVMDSLKNGAPEKWRLVKAHGTAVGLPSDDDMGNSEVGHNALGAGRIFAQGAKLVDQALXASGKIYDGDGXNYIKESFESGTLHLIGXSSXGGVXSRLDQLQILL

SEQ ID NO: 14634 - protein, 395 aa, Salmonella typhimurium LT2
MTDKQLDTKLVNAGRSKKYTLGSVNSVIQRASSLVFDTVEAKKHATRNLANGELFYGRRGTLTHFSLQEAMCELEGGAGCALFPCGAAAVANTILAFVEQGDHILMTNTAYEPSQDFCSKILGKLGVTTSWFDPLIGADITQHIQPNTKVVFLESPGSITMEVHDIPSIVSAVRRVAPEAVIMIDNTWAAGVLFKALEFDIDISIQAGTKYLIGHSDAMVGTAVANARCWEQLRENAYLMGQMLDADTAYMTSRGLRTLGVRLRQHQESSLKIAAWLANHPQVARVNHPALPGSKGHAFWKRDFTGSSGLFSFVLNKKLTEAELSAYLDNFSLFSMAYSWGGYESLIIANQPEQIAAIRPAGGVDFTGTLVRVHIGLESVDDLIADLAAGFARIV

SEQ ID NO: 14635 - protein, 539 aa, Arabidopsis thaliana
MASRIINHSKKLKHVSALLRRDHAVAVRCFSNSTHPSLVGREDIFKARLNYSSVERISKCGTGNVTMLSGISTTSTKLSSPMAGPKLFKEFISSQMRSVRGFSSSSDLPPHQEIGMPSLSPTMAEGNIARWLKKEGDKVAPGEVLCEVETDKATVEMECMEEGFLAKIVKEEGAKEIQVGEVIAITVEDEDDIQKFKDYTPSSDTGPAAPEAKPAPSLPKEEKVEKPASAPEAKISKPSSAPSEDRIFASPLARKLAEDNNVPLSSIKGTGPEGRIVKADVEDFLASGSKETTAKPSKQVDSKVPALDYVDIPHTQIRKVTASRLAFSKQTIPHYYLTVDTCVDKMMGLRSQLNSFQEASGGKRISVNDLVIKAAALALRKVPQCNSSWTDEYIRQFKNVNINVAVQTENGLYVPVVKDADKKGLSTIGEEVRFLAQKAKENSLKPEDYEGGTFTVSNLGGPFGIKQFCAVINPPQAAILAIGSAEKRVVPGTGPDQYNVASYMSVTLSCDHRVIDGAIGAEWLKAFKGYIETPESMLL

SEQ ID NO: 14636 - protein, 154 aa, Schizosaccharomyces pombe
MVISQPVGQIRLTNVSVVKYKKGGKRFEVACYKNKVTEWRNKIETDLDEVLQIHNVFNNVSKGHVASRQDLKKAFGTDDIDKIILEILQKGDFQVGEKERHHQMSSTYRDIVSHVTAMCMDPNSKRPYPASIIEKALSDCGFSVSTSKTAKSQA

SEQ ID NO: 14637 - protein, 204 aa, Zea mays
MASSMLSSAAVATSPAQATMVAPFTGLKSSAAFPVTRKSNTDITSIASNGGRVSCMKVWPPVGKKKFETLSYLPDLTDVELAKEVDYLLRNKWIPCVEFELEHGFVYREHGSTPGYYDGRYWTMWKLPLFGCTDSAQVLKEVQECKTEYPNAFIRIIGFDNNRQVQCISFIAYKPPSFTGCLISFQKQPKKNPNPFPFPMAGFT

SEQ ID NO: 14638 - protein, 196 aa, Zea mays
RRKIAQKMAESKHLIPHFSYVEEIDVTELEDLRVSLNAKFGESRGKLTLLPLLARAMVIALRDFPQINARYDDEAGQVTRYGAVHIGIATQSDGGLMVPVMRHAETRDLWSMAAEIGRLAQAVRSGGAGRDELSGSTITITSLGPLGGIVTTPVINHPEVGIVGVNRIVERPAFRNGAVVARKLMNLSSSFDHRER

SEQ ID NO: 14639 - protein, 635 aa, Zea mays
MSGAIGGAEVHGFRGAAAQLPRSRVLGRPIRVAPPAAARPGGASAGSIRAVSAPAKKDASEVKRSKVEIIKEKSNFLRYPLNEELVSEAPNINESAVQLIKFHGSYQQTDRDVRGQKNYSFMLRTKNPCGKVPNQLYLAMDTLADEFGIGTLRLTTRQTFQLHGVLKKNLKTVLSTVIKNMGSTLGACGDLNRNVLAPAAPYVKKDILFAQQTAENIAALLTPQSGAYYDLWVDGEKIMSAEEPPEVTKARNDNSHGTNFPDSPEPIYGTQYLPRKFKVAVTAAGDNSVDILTNDIGVVVVSDDAGEPIGFNIYVGGGMGRTHRVETTFPRLADPLGYVPKEDILYAIKAIVVTQRENGRRDDRKYSRMKYMIDRWGIDRFRAEVEKYYGKKFESFRPLPEWQFNSYLGWQEQGDGKLFYGVHVDNGRVGGQAKKTLREIIEKYNLDVSITPNQNLILCGIDQAWREPITTALAQAGLLEPKDVDPLNLTAMACPALPLCPLAQTEAERGILPILKRIRAVFNKVGIKDSESVVVRITGCPNGCARPYMAELGFVGDGPKSYQIWLGGTPNQSTLAESFMDKVKLDDIEKVLEPLFTYWNGTRQEGESFGSFTNRTGFDKLKEVVNKWAESPSAA

SEQ ID NO: 14640 - protein, 128 aa, Triticum aestivum
  unsure (1)..(128): unsure at all Xaa locations
FARGEDEECCINSSMDETAGTVLVMSFVSLVVIMSVLASFLFARNCRLLRHGVDNHPPYVKKQVVEKFPCSAYSAPCSSEDNFQEACAICLEDYNNGDMLRXSPCKHEFHKIXIDXWLTKWGTXAXAS

SEQ ID NO: 14641 - protein, 263 aa, Holcus lanatus
MASSSLVLLVVALFAVFLGTAHGIAKVPPGPNITATYGDKWLDAKSTWYGKPTGAGPKDNGGACGYKDVDKPPFSGMTGCGNTPIFKSGRGCGSCFEIKCTKPESCSGEPIVVHITDDNEEPIAAYHLDLSGKAFGAMAKKGEEQKLRSAGELELKFRRVKCEYPKGTKVTFHVEKGSNPNYLALLVKYVDGDGDVVAVDIKEKGKDKWIELKESWGAVWRVDTPDKLTGPFTVRYTTEGGTKVEAEDVIPEGWKADTAYESK

SEQ ID NO: 14642 - protein, 212 aa, Triticum aestivum
  unsure (1)..(212): unsure at all Xaa locations
KPYVLPVPFMNVLNGGSHAGGRLAFQEFMIVPSSAPSFSEALRQGAEVYQILKGLAKKKYGQSAGNVGDEGGVAPDIQTAEEALDLITDAIEAAGYTGKMFIAMDVASSEFYKEDAKKYDLDFKNPESDPTKWLTYVELXDKYQTLXKTYPIGKNXDSFAEDDREPGASLQSHSAFRRGRAALACYKSLSYSDTAPGAMALPSPCARRETGG

SEQ ID NO: 14643 - protein, 347 aa, Streptomyces avermitilis MA-4680
MTTTVAAYAAPAAKAPLERTTIERREVGEFDVLIDIKFAGICHSDIHQARDGWGEGIFPMVPGHEIAGIVAEVGSGVTKFQVGDRVGVGCMVDSCRECENCKAGLEQYCVGGNVGTYNALDKNGEPTYGGYSEKVVVDENYTVRIPDGLALDVAAPLLCAGITTYSPLKHWNAGPGKKVAVLGMGGLGHMGVKIAHALGAEVTVLSQSLRKKDDGLKLGADHYYATSDPKTFEELAGTFDIILSTVSAPLDFGAFLSLLRTDGALVNVGAPEEPISINLFSVIAGRKTLAGSGIGGIQETQEMLDFCAEHGLGAEIELISASEINDAYERVLNSDVRYRFVIDTATI

SEQ ID NO: 14644 - protein, 1214 aa, Thermobifida fusca
MSSEASQPLTDFGPNEWLVDELHRKYLADPNSVDKAWWNFFADYKSGTAADGSTSPAKSTVAGNGAGGAVRAAASKAAARPATATTPDGSDDALAVSQERLRGASARTAANMESSLTLPTATSVRAVPVKLLFDNRIVINNHLRRARGGKVSFTHLIGYAMVKALESVPVMNYSYTEIDGKPAVAKPKHVNFGLAIDLAKPDGSRQLVVPNIKAADTMNFKEFWSACEELVRKARSNKLTVADFQGTTITLTNPGGIGTVHSVPRLMPGQGTILGVGAMEYPAEFQGASPATLNELAVSKVMTLTSTYDHRIIQGAESGEFLRRIHQLLLGEDGFYDEIFESLRIPYEPVRWVQDISVNRDNQLDKATRVQELIHAYRVRGHLMADTDPLEYKQRRHPDLDVLEHGLTLWDLDREFPTGGFGGKPVMKLREILGILRDSYCRTVGIEYMHIQSPEEREWIQARVEREPEKLSREEQLHILKLLNSAEAFETFLQTKYVGQKRFSLEGGESLIPLLDGVITKAARAQLDEVVIGMAHRGRLNVLANICGKSYAQIFGEFEGNLDPRSAHGSGDVKYHLGTEGTFTTITGEKIAISLAANPSHLETVNPVAEGIVRAKQDILNKGATGFTVLPILIHGDAAFAGQGVVAETLNLSQLRGYRTGGTIHIIVNNQVGFTTSPKDSRSSVYATDVARMVQAPIFHVNGDDPEAVVRVARLAFAYRQEFNKDVVIDLVCYRRRGHNEADNPSFTQPLMYDIIDAKRSTRKLYTEALIGRGDITLEEAEEALRDYQEQLERAFAETREAAKKPIEPGSVIKPEVFTEAPIDHSATPTAVSEEVIKRVAETQVTFPEGFTVHPRLLPQLQRRVRMVEENAIDWAMAETLAFGSLLIDGHPVRLVGQDSRRGTFGQRHAVLVDRKTGEEYTPLKVFDRGTAKFHVHDSLLSEYAALGFEYGYSLERPDALVAWEAQFGDFVNGAQTVIDEYISSGEQKWGQKSSVTLLLPHGYEGQGPDHSSARIERFLQLCAQENMTVTIPTTPANYFHLLRWQVKSPYRRPLIVFTPKSMLRHKAAVSAVSEFTSGSFRPLIPDTSGIAPEDVRRVILCAGKIYYELDAARKRTGDQHTAIIRVERLYPLPIDEIRQQLRSFPNAGEVLWVQEEPANMGPWPFVALVFAEQLDRPFTRISRSASSSPATGSAKRHEVEQQALVNTVFPPTE

SEQ ID NO: 14645 - protein, 402 aa, Zea mays
MATKRSVGTLGEADLKGKKVFVRADLNVPLDDAQKITDDTRIRASVPTIKFLLEKGAKVILASHLGRPKGVTPKYSLKPLVPRLSELLGVEVVMANDCIGEEVEKLAAALPEGGVLLLENVRFYKEEEKNEPEFAKKLASVADLYVNDAFGTAHRAHASTEGVTKYLKPAVAGFLMQKELDYLVGAVANPKKPFAAIVGGSKVSSKIGVIESLLAKVDILILGGGMIYTFYKAQGYSVGKSLVEEDKLELATSLIEKAKAKGVSLLLPTDIVVADKFAADAESKIVPATAIPDDWMGLDVGPDATKTFNEALDTTKTVIWNGPMGVFEFEKFAAGTEAIAKKLAELTTTKGVTTIIGGGDSVAAVEKAGLADKMSHISTGGGASLELLEGKTLPGVLALDDA

SEQ ID NO: 14646 - protein, 398 aa, Halobacterium sp. NRC-1
MAIRTLDDLAAANRAIGVRVDINSPLTAAGGLADDARLRAHVDTLAELLAADARVAVLAHQGRPGGDEFARLERHADRLDALLDAPVSYCDATFSTGARDAVADLAPGEAVVLENTRFYSEEYMAFAPERAADTALVDGLAPALDAYVNDAFAAAHRSQPSLVGFPEVLPSYAGRVMEAELDALSGVADTPTPRTYVVGGAKVPDSVEVAAHALSHGLADNVLVTGVVANVFLAATGVDLGRASTDFIHERDYGTEIARAADLLAAHNDALHLPVDVAVERDGARCELSTDALPPAGDEAVCDIGSDTVDAYADVLADSETVVVNGPAGVFEDDLFADGTRGVFDAASEVEHSIVGGGDTAAAIRRFDITGFDHVSTGGGAAINLLTDADLPAVAALR

SEQ ID NO: 14647 - protein, 390 aa, Trichodesmium erythraeum IMS101
MKLAARVGKVPLSLTLAISAKARAMKADGKDVCSFSAGEPDFDTPEHIKVAAQKALDSGYTKYGPAAGEPKLREAIAHKLSQENGLNYKAENIIVTNGGKHSLFNLMLALIEPGDEVIIPAPYWLSYPEMVKLAGGEPIILTTDPETGYKVTPEQLRQSITDKTKLFVLNSPSNPTGMVYQPAEIKALAEVLVEKDILVVSDEIYEKIIYDDAEHLSIGAVNSEIFKNTIISNGFAKAYSMTGWRIGYLAAPVELINATVKIQGHSTSNVCTFAQYGAIAALESSQDCVEQMRQAFAKRRKIIYDLLKTLPGISCNQPEGAFYMFVNISKISSSSLEFCNALLEDQNVAVIPGIAFGADDHIRISYATDLETIEKGMDRLERFIRSQSSG

SEQ ID NO: 14648 - protein, 181 aa, Archaeoglobus fulgidus DSM 4304
MYFITSNEGKFREVREMASKYGIEIEWLKMEYIEPQGSSLEEIARLSAEMLAEKVEGEFVIEDSGLFVEALKGFPGPYSSYVFKTIGNEGILKLMEGVENRKAYFMAVVAYFDGKEVRTFTGKVEGEISREMRGTQGFGYDPIFLYGNKTFAEMATEEKNQVSHRRKAFEEFFRWLKENKI

SEQ ID NO: 14649 - protein, 351 aa, Arabidopsis thaliana
LKALILVGGFGTRLRPLTLSMPKPLVDFGNKPMILHQIEALKGAGVTEVVLAINHQQPEVMLNFVKEYEKKLEIKITFSQETEPLGTAGPLALARDKLVDESGQPFFVLNSDVICEYPLLEMIEFHKTNRAEASIMVTEVDDPSKYGVVVTEEGTARVESFVEKPKHFVGNKINAGIYLLSPSVLDRIELRRTSIEKEIFPKIASEKKLYAMVLPGFWMDIGQPKDYITGQRMYLNSLREKTPQELATGDNIIGNVLVHESAVIGEGCLIGPDVVIGPGCVIDSGVRLFGCTVMRGVWIKEHACISNSIVGWDSTVGRWARVFNITVLGKDVNVADAEVYNSGVVIEEQGL

SEQ ID NO: 14650 - protein, 401 aa, Chromobacterium violaceum ATCC 12472
MNPRLDQLHPYPFQRLAALLADAKPPASLPHISLAMGEPKHPAPQLVKDALCANLAGLSGYPATQGTPALRQACADWAERRYGVRLDPASEVLPVNGSREALFSLTQCLIDAGGAAKPVVVSPNPFYQIYEGAALLAGAEPHYLNCEAENRFQPDWDGVPDEVWRRAQLVIVCSPGNPTGAVMDLAAWDKLFALSDRYGFVIASDECYSEIYFDQPPLGGLSAARALGRGLERLVMLTSLSKRSNVPGMRSGFVAGDAAILKQFLLYRTYHGSAMSLTVQAASVAAWNDEAHVESNRAAYAAKFAAVLPLLQPVLEVERPEAGFYLWAKVPDGDDAAFARALFQQRHVTVLPGSYLARDAHGANPGRGYVRIALVAEQAECVAAAQRIVEFTQTQRAATPA

SEQ ID NO: 14651 - protein, 339 aa, Escherichia coli
MSMIKSYAAKEAGGELEVYEYDPGELRPQDVEVQVDYCGICHSDLSMIDNEWGFSQYPLVAGHEVIGRVVALGSAAQDKGLQVGQRVGIGWTARSCGHCDACISGNQINCEQGAVPTIMNRGGFAEKLRADWQWVIPLPENIDIESAGPLLCGGITVFKPLLMHHITATSRVGVIGIGGLGHIAIKLLHAMGCEVTAFSSNPAKEQEVLAMGADKVVNSRDPQALKALAGQFDLIINTVNVSLDWQPYFEALTYGGNFHTVGAVLTPLSVPAFTLIAGDRSVSGSATGTPYELRKLMRFAARSKVAPTTELFPMSKINDAIQHVRDGKARYRVVLKADF

SEQ ID NO: 14652 - protein, 169 aa, Zea mays
  unsure (1)..(169): unsure at all Xaa locations
MAATNEHTVLQFIAPSSTVSTTTQVLTARIHPLVIFNVCDCYKRQPDSGEQVIDTLLGSILRDGTVDIHNTYAVAQHESSDQVAVDIDYHHXMLASHLTVYPYAVIVGMDSTRYWVXSRSALIHDFFAREAPXPIHLNVDTGFTNGGGTIKGXVSPNLSVGDRQLAAQF

SEQ ID NO: 14653 - protein, 518 aa, Arabidopsis thaliana
MESCFPAMKLNQCTFGLNNEIVSERVSAFWGTQVVKPNHLRTTKLRSAPQKKIQTNLIRSVLTPFVDQESHEPLLRTQNADPKNVASIILGGGAGTRLFPLTSKRAKPAVPIGGCYRLIDIPMSNCINSGIRKIFILTQFNSFSLNRHLSRTYNFGNGVNFGDGFVEVLAATQTSGDAGKKWFQGTADAVRQFIWVFEDAKTKNVEHVLILSGDHLYRMDYMNFVQKHIESNADITVSCLPMDESRASDFGLLKIDQSGKIIQFSEKPKGDDLKAMQVDTSILGLPPKEAAESPYIASMGVYVFRKEVLLKLLRSSYPTSNDFGSEIIPLAVGEHNVQAFLFNDYWEDIGTIGSFFDANLALTEQPPKFQFYDQKTPFFTSPRFLPPTKVDKCRILDSIVSHGCFLRECSVQHSIVGIRSRLESGVELQDTMMMGADFYQTEAEIASLLAEGKVPVGVGQNTKIKNCIIDKNAKIGKNVVIANADGVEEGDRPEEGFHIRSGITVVLKNATIRDGLHI

SEQ ID NO: 14654 - protein, 482 aa, Hordeum vulgare subsp. vulgare
MAATVAVDNLNPKVLKCEYAVRGEIVIHAQRLQEQLKTQPGSLPFDEILYCNIGNPQSLGQQPVTFFREVLALCDHPDLLQREEIKTLFSADSISRAKQILAMIPGRATGAYSHSQGIKGLRDAIASGIASRDGFPANADDIFLTDGASPGVHLMMQLLIRNEKDGILVPIPQYPLYSASIALHGGALVPYYLNESTGWGLETSDVKKQLEDARSRGINVRALVVINPGNPTGQVLAEENQYDIVKFCKNEGLVLLADEVYQENIYVDNKKFHSFKKIVRSLGYGEEDLPLVSYQSVSKGYYGECGKRGGYFEITGFSAPVREQIYKIASVNLCSNITGQILASLVMNPPKASDESYASYKAEKDGILASLARRAKALEHAFNKLEGITCNEAEGAMYVFPQICLPQKAIEAAKAANKAPDAFYALRLLESTGIVVVPGSGFGQVPGTWHFRCTILPQEDKIPAVISRFTVFHEAFMSEYRD

SEQ ID NO: 14655 - protein, 240 aa, Rhodopseudomonas palustris CGA009
MNTNKYLAEMIGTFWLTFAGCGSAVIAAGFPQVGIGLVGVSLAFGLSVVTMAYAIGHISGCHLNPAVTLGLAAGGRFPVKQIAPYIIAQVLGAIAAAALLYLIASGAAGFDLAKGFASNGYGAHSPGQYNLVACFVMEVVMTMMFLFVIMGSTHGKAPAGFAPLAIGLALVMIHLVSIPVTNTSVNPARSTGPALFVGGWAIGQLWLFWVAPLLGGVLGGVIYRVLSPEPTGVVEGVKAR

SEQ ID NO: 14656 - protein, 315 aa, Digitalis purpurea
MAEEIRFFKLNTGAKIPSVGLGTWQSSPGDAAQAVEVAIKCGYRHIDGARLYENEKEIGVVLKKLFDDGVVKREDLFITSKLWSTDHAPEDVPVALDKTLEDLQLDYIDLYLIHWPVRLKKGSVGLDPENFIPTDIPGTWKAMEALYDSGKARAIGVSNFTLKKLSDLLDVARIPPAVNQVGCHPSCAQTKLRAFCKSKGVHLSGYSPLGSPGTPWVKHDVLENPILVDVAEKLGKTPAQVAIRWGLQMGHSVLPKSVHESRIKENIDVFSWCIPDDLFAKFSEIEQVSPGKPEFPVHPEISQYKTVEEMWDGGI

SEQ ID NO: 14657 - protein, 315 aa, Digitalis purpurea
MAEEIRFFELNTGAKIPSVGLGTWQSSPGDAAQAVEVAIKCGYRHIDGARLYENEKEIGVVLKKLFDDGVVKREDLFITSKLWSTDHAPEDVPVALDKTLEDLQLDYIDLYLIHWPVRLKKGSVGLDPENFVPTDIPGTWKAMEALYDSGKARAIGVSNFTLKKLSDLLDVARIPPAVNQVGCHPSCAQTKLRAFCKSKGIHLSGYSPLGSPGTPWVKHDVLENPILVDVAEKLGKTPAQVALRWGLQMGHSVLPKSVHESRIKENIDVFSWCIPDVLFAKFSEIEQVSPGKPEFPVHPEISQYKTVEEMWDGGI

SEQ ID NO: 14658 - protein, 219 aa, Coxiella burnetii RSA 493
MYRYGNLFQTPILRSPLEDQFSDYVLWRLDCEPFVEVLERTCRMNDEKLRTQNVEATLFDSAKKPEISFADYIWRIVAYARLTHSQMIHTLIYLDRCQENFFLTSLNFYRLFLVAALVAQKFHQDDSFSNKSFADLVGITVKELNILEAKFLFAISFSLYVLPKTYKEYNRIVGGQRINRQLVEARRSNLSFFSLFPHTVNTFPHRKRNSYHFLHRPRF

SEQ ID NO: 14659 - protein, 309 aa, Pseudomonas syringae pv. tomato str. DC3000
MTSKLDQLKKFTTVVADTGDFGAIKSLKPQDATTNPSLLLKAASSESNDQMLADAFSGAKGDIGLACDRFAVAIGQEILKVVPGRVSTEVDARLSFDTDALIERSERIIGLYDTAGISRDRVLIKLAATWEGIRAAEKLEKDGIQTNLTLLFSFAQAVACAEAGVFLISPFVGRIYDWYKKSSGTDYVGADDPGVQSVTRIYNYYKANDFKTVVMGASFRNLNQIEQLAGCDRLTISTELLKQLAEDTGTLEQKLAPGNAGEARQSLTESQFRWASNEDAMATEKLAEGIRQFARDQEKLEALLSAKKS

SEQ ID NO: 14660 - protein, 587 aa, Nicotiana tabacum
MASFSIKFLAPSLPNPARFSKNAVKLHATPPSVAAPPTGAPEVAAERLEPRVEEKDGYWILKEQFRKGINPQEKVKIEKEPMKLFMENGIEELAKIPIEEIDQSKLTKDDIDVRLKWLGLFHRRKNQYGRFMMRLKLPNGVTTSAQTRYLASVIRKYGKEGCADITTRQNWQIRGVVLPDVPEILKGLAEVGLTSLQSGMDNVRNPVGNPLAGIDPEEIVDTRPYTNLLSQFITGNSRGNPAVSNLPRKWNPCVVGSHDLYEHPHINDLAYMPATKDGRFGFNLLVGGFFSAKRCDEAIPLDAWVPADDVVPVCKAILEAFRDLGFRGNRQKCRMMWLIDELGVEGFRAEVEKRMPQQQLERASPEDLVQKQWERRDYLGVHPQKQEGYSFIGLHIPVGRVQADDMDELARLADEYGSGEIRLTVEQNIIIPNIETSKIEALLKEPVLSTFSPDPPILMKGLVACTGNQFCGQAIIETKARSLKITEEVQRQVSLTKPVRMHWTGCPNTCAQVQVADIGFMGCLTRDKNGKTVEGADVFLGGRIGSDSHLGEVYKKAVPCDDLVPLVVDLLVNNFGAVPREREETED

SEQ ID NO: 14661 - protein, 459 aa, Bacillus cereus ATCC 10987
MSKLVVIGGGPAGYVAAITAAQSGKEVTLIDEADLGGTCLNVGCMPTKSLLESAEVHDIVRKANHYGVMLNEGSISVDWKQMQARKSQVVTQLVQGIQYLMKKNKIKVIQGKAKFETDHRVRVTHGGKEIVVDGEQFIIAAGSEPTELPFATFDGKWILNSSHAMSLENIPKSLLIVGGGVIGCEFASIYSRLGTKVTIVEMAPQLLPGEDEDIAHILRGKLENDGVEIFTGAALKGLNNYKKQASFEYEGSTQVVNPEFVLVSVGRKPRVQQLDLEKAGIQYSNKGISVNEHMQTNASHIYAAGDVIGGIQLAHVAFHEGTTAALHASGEDVKVNYHAVPRCIYTAPEIASVGLSEKLAREQYGDILIGEFPFSANGKALIIGEQTGKVKVIVEPKYQEIVGISIIGPRATELIGQGTVMIHTEVTADIMRDYIAAHPTLSEAIHEALLQAVGHAVHA

SEQ ID NO: 14662 - protein, 502 aa, Brassica rapa subsp. pekinensis
MARKMLSDGELNKAAAAGEEATTETHYDFDLFVIGAGSGGVRAARFSANNGAKVGICELPFHPISSEEIGGVGGTCVIRGCVPKKILVYGATYGGELEDARNYGWEINGNVDFNWKKLLQKKTDEILRLNNIYKRLLANAAVKLYEGEGRIVGPNEVEVRQIDGTKISYTAKHILIATGSRAQKPNIPGHELAITSDEALSLEEFPKRAIVLGGGYIAVEFASIWRGMGATVDLFFRKELPLRGFDDEMRALVARNLEGRGINLHPQTSLAELIKTDDGIKVISSHGEEFVADVVLFATGRIPNTKRLNLEAVGVELDQAGAVKVDEYSRTNIPSIWAVGDATNRINLTPVALMEATCFANTVFGGKPAKADYTNVACAVFCIPPLAVVGLSEEEAVEKATGDILVFTSGFNPMKNTISGRQEKSLMKLIVDEKTDKVIGASMCGPDAAEIMQGIAIALKCGATKAQFDSTVGIHPSSAEEFVTMRTVTRRIAYKAKPQTSL

SEQ ID NO: 14663 - protein, 584 aa, Nicotiana tabacum
MASFSVKFSATSLPNHKRFSKLHATPPQTVAVAPSGAAEIASERLEPRVEEKDGYWVLKEKFRQGINPAEKAKIEKEPMKLFMENGIEDLAKISLEEIEGSKLTKDDIDVRLKWLGLFHRRKHHYGRFMMRLKLPNGVTTSSQTRYLASVIRKYGKDGCADVTTRQNWQIRGVVLPDVPEILKGLDEVGLTSLQSGMDNVRNPVGNPLAGIDPHEIVDTRPYTNLLSQYVTANFRGNPAVTNLPRKWNVCVIGSHDLYEHPQINDLAYMPATKDGRFGFNLLVGGFFSPKRCAEAVPLDAWVPADDVVPVCKAILEAYRDLGTRGNRQKTRMMWLVDELGVEGFRAEVVKRMPQQKLDRESTEDLVQKQWERREYLGVHPQKQEGYSFVGLHIPVGRVQADDMDELARLADEYGSGELRLTVEQNIIIPNVKNSKIEALLNEPLLKNRFSTDPPILMKNLVACTGNQFCGKAIIETKARSMKITEEVQLLVSITQPVRMHWTGCPNSCAQVQVADIGFMGCLTRKEGKTVEGADVYLGGRIGSDSHLGDVYKKSVPCEDLVPIIVDLLVDNFGAVPREREEAED

SEQ ID NO: 14664 - protein, 275 aa, Sinorhizobium meliloti
MHAVSSNGANIPALGFGTFRMSGAEVLRILPQALKLGFRHVDTAQIYGNEAEVGEAIQKSGIPRADVFLTTKVWVDNYRHDAFIASVDESLRKLRTDHVDLLLLHWPGSDVPMAERIGALNEVRNAGKVRHIGISNFNTTQMEEAARLSDAPIATNQVEYHPYLDQTKVLQTARRLGMSLTSYYAMANGKVPADPLLTEIGGRHGKTAAQVALRWLVQQQDVIVLSKTATEARLKENFAIFDFALTREEMAAVRELARPNGRIVNPQGLAPEWDA

SEQ ID NO: 14665 - protein, 399 aa, Bacillus cereus ATCC 10987
MAVEVVMPKLGMAMKEGIITSWNIKAGDHVSKGELIASINSEKIETEIEAPADGTVLDIAVSEDEGVPPGTVICYIGKLNEKVEINESINVVEEKAPNLEPKKVQHPEPYAKEVAKQRIKISPVAKKIAKSENLDIKALVGTGPGGRITKVDVLKAIEERVTIPEVLEQEESKVIPVTGMRKAIANRMHASLQNSAQLTLTMKVDVTDLVALHKEIAAVVQKRYDNKLTITDFVSRAVVLALGEHKEMNSAYMDDTIHQFEHVHLGMAVALEKGLVVPAIRFANNLSLVELSKQIKNVAQKAREGSLSSDDMQGTTFTISNLGSFGIEYFTPVLNTPETGILGVGAIEHVPVYKGKKIKKGSMLPLSLTFDHRVLDGAPAAAFLRTIKRYLEEPVTILL

SEQ ID NO: 14666 - protein, 587 aa, Nicotiana tabacum
MASFSVKFSATSLPNPNRFSRTAKLHATPPQTVAVPPSGEAEIASERLEPRVEEKDGYWVLKEKFRQGINPAEKAKIEKEPMKLFMENGIEDLAKISLEEIEGSKLTKDDIDVRLKWLGLFHRRKHHYGRFMMRLKLPNGVTTSAQTRYLASVIRKYGKDGCGDVTTRQNWQIRGVVLPDVPEILKGLDEVGLTSLQSGMDNVRNPVGNPLAGIDPHEIVDTRPYTNLLSQYVTANFRGNPAVTNLPRKWNVCVIGSHDLYEHPHINDLAYMPASKDGRFGFNLLVGGFFSPKRCAEAVPLDAWVPADDVVPVCKAILEAYRDLGTRGNRQKTRMMWLVDELGVEGFRAEVVKRMPQQKLDRESTEDLVQKQWERREYLGVHPQKQEGYSFVGLHIPVGRVQADDMDELARLADNYGSGELRLTVEQNIIIPNVENSKIESLLNEPLLKNRFSTNPPILMKNLVACTGNQFCGQAIIETKARSMKITEEVQRLVSVTKPVRMHWTGCPNSCGQVQVADIGFMGCLTRKEGKTVEGADVYLGGRIGSDSHLGDVYKKSVPCEDLVPIIVDLLVNNFGAVPREREEAED

SEQ ID NO: 14667 - protein, 1110 aa, Pseudomonas fluorescens
MSIVFMFSGQGSQYRHMGRALYERHAGFGRHMRALDEVVRQTGGYSVLDGLYGDQPQAAALDDILVTHPAIFMVEYALAQSLIEHGVYPDHVLGSSLGEVAAAAVSGALDAEQALGFVVRQARLFHEHCPAGGMTAVLADIAVFEQLQADGIEVELAAINYPQHLVISGTVSALAAAQMQLARRNVVFQRLDVNRPFHSSHMDPLRDAFIQTSQALQLRTPRMGYVSSTLGGPVSQFAPEHLWHVVRSTLQLAPAIEYLEGLGPHEYLDAGPSGSMANFAKRCRSAHSASTDSLILSPFDTSARSFERRITSSAQRVVSAEIMAMKQSKTVYMFPGQGSQFRGMGEGLFERFAELTACADRVLGYSIRELCENDPRNELGQTRFTQPALYVVNVLSYLAQAGDAAPPDYVLGHSLGEFCALFAAGAYDFETGLRLVKRRGELMSEATGGGMSAVLNLDLATIKQVLRQAGSTQLDFANFNAPQQTVLAGPLDALESVRTQIEDASGICVALNVSAPFHSRYMRGAQEAFAAELARVTFKPLTLPVIANVDARPYEQEAIASQLARQMTSSVQWVESIEYLLQAGITQFKEIGPGNVLTNLQAKIEKNRSPAQPVVASAVVAPLPLAARHDDGVPGLALTAEGLGSAAFRQAYNLRYAYMAGGMYKGIASVELVVKLVNSGYLAFFGAGGLSTAAVEQAIVEIAQRTQPRAFGMNLVCNLSNPHKEIELVELFMRKGVTVIEAAAFMQITPALALYRLRGLIKVGDRIEARHRIVAKVSRPEVAQQFLDPAPARVVEKLLAQGLVTPEQAQWAQSVPMADDLVVEADSGGHTDMGVTVVLLPTIIRLRDSLCQAAGYTERVRVGAAGGIGSPESVAAAFMLGADFVVTGSINQCTPEAGTSDVVKTLLQDINVQDTDYAPAGDMFELGARVQVLKRGVFFPARANKLYDLWRRYDSLDELDEKTARQIQDSFFKRSFDEVFEETRAYYSKVAPQEIDKALSNPKHKMALVFRWYFIHSTRLAMTGSEAQRVDYQVHCGPSMGAFNQWVKGTDLEDWRNRHVDLVAERLMNAAAAYLNTRLRAMLTPAAPAQTEGRPAYEGAPLRIAGSVRT

SEQ ID NO: 14668 - protein, 483 aa, Glycine max
MASAAAPTTFSLLHSTTPASSSSATSASPSRVQLSSSLRSRPLARRLGFAAADPLLAANVAARVAAVRGGKGARGVVSMAKKSVGELSAADLKGKKVFVRADLNVPLDDNQNITDDTRIRAAIPTIKHLIQNGAKVILSSHLGRPKGVTPKYSLAPLVPRLSELIGIQVVKAEDSIGPEVEKLVASLPDGGVLLLENVRFYKEEEKNDPEHAKKLASLADLFVNDAFGTAHRAHASTEGVTKYLKPSVAGFLLQKELDYLVGAVSSPKRPFAAIVGGSKVSSKIGVIESLLEKVDILLLGGGMIFTFYKAQGLSVGSSLVEEDKLDLATSLLAKAKEKGVSLLLPSDVVIADKFAPDANSKVVPASAIPDGWMGLDIGPDSVKSFSEALDTTQTIIWNGPMGVFEFDKFAVGTEAIAKKLADLSGKGVTTIIGGGDSVAAVEKVGVASVMSHISTGGGASLELLEGKELPGVLALDEAVPVAV

SEQ ID NO: 14669 - protein, 185 aa, Dechloromonas aromatica RCB
MFSSLKRCFGIAALITVGVVPVAAAAECPPLLNHSFASLQDGKPMPLCQYAGKVILVVNTASYCGFTSQYDGLEKLYARLKDKGLVVLGFPSNDFGEQEPGSEKEIADFCRLTYGVEFPMVSKTVVKGKGAHPFYLKLAEITGSKPKWNFHKYLINRDATQVVAYTSFTKPDDKDLLKKIDEFLK

SEQ ID NO: 14670 - protein, 490 aa, Yersinia pestis biovar Medievalis str. 91001
MSRYGLQKLYINGAYTDSTSGDTFDAVNPANGECIAQLQAANAQDVDKAVAAAKQGQPVWAAMTAMERSRILRRAVDILRDRNDELAAIETADTGKPLSETRSVDIVTGADVLEYYAGLIPALEGQQIPLRGSAFVYTRREPLGVVAGIGAWNYPLQIALWKSAPALAAGNAMIFKPSEVTSLTALKLAGIYTEAGLPAGVFNVLTGSGDQVGQMLTEHPGIAKVSFTGGIASGKKVMANAAGSTLKDVTMELGGKSPLIIFADADLDKAADIAMMANFYSSGQVCTNGTRVFVPQALQAAFEQKIVERVKRIHIGDPSDERTNFGPLVSFQHRDSVMRYIDSGKREGATLLIGGYSLTEGALAHGAYVAPTVFTHCRDDMQIVREEIFGPVMSILSYQSEEEVIRRANDTEYGLAAGVVTQDLNRAHRVIHQLQAGICWINTWGESAPEMPVGGYKHSGVGRENGISTLEHYTQIKSIQVELGSFNSVF

SEQ ID NO: 14671 - protein, 522 aa, Uromyces viciae-fabae
MPAVMAGPVSFAPPEGKSSKVAIVIAVFAAFGGFLYGYDTGYIAGVKAMPFWLRSAGQRGPDGKYMITTSQDSMVTSILSVGTFVGALLAYPIGDRFGRRIGIMIACAIFSVGVALQTASTKIPMFVVGRVFAGLGVGVASCLVPMYQSECAPKWIRGGIVACYQWAITIGLLVASITVNATKDFDSANSYRIPIGIQFIWAAILTIGLLVLPESPRYLLLKGREDEAWKSLSRLYSAPYDDPDVQAEFSEIMASLEKERSFGKTTLLDCFKTDKRKNLQRTLTGLGVQGWQQASGINFFFYYGTTFFKNAGIENAFLVTVATNVVNVVMTIPGIWAVDKVGRRTMMICGAAMMFTCELILACVGTFTATSNLASQKVLVAFSCIFIGLFAATWGPIPWVVTSEIYPLATRGKQMAMSTASNWAVNFFIGFITPYLVDSGAGQAGLGVKVFWLWAALCFGAMVFSFLLIPETKGLSLEQVDLLYTNSTVLKSNTYRSQLIANNLHEGMTPAEKAYQEKLEHI

SEQ ID NO: 14672 - protein, 113 aa, Pseudomonas aeruginosa PAO1
MNDRLQIEDLLLGDGKEVVKGALITTQYKGTLEDGTLFDSSYERGRPFQCVIGTGRVIKGWDQGLMGMKVGGKRRLFVPSHLAYGERQVGAHIKPHSNLLFEIELLEVLTRDD

SEQ ID NO: 14673 - protein, 381 aa, Oryza sativa
MAGQIPQPIRCKAAVCRAAGEPLAVEEIVVDPPKAHEVRIKIVCTSLCHSDVTFWRMQDFPGVFPRIFGHEAFGVVESVGEHVEGFAAGDPVVPTFLGQCTECVDCASERSNVCSTYRFAVRPGMPRDGTARFRDRHGAPIHHFLGVSSFSEYTVVDATRPPTRPPAVPPATASLLSCGATTGVGAAWKLAKVEPGSSVAIFGLGAVGLAVAEGARICGASTIIGVDLNPEKHELGKKFGVTHFINPQELGDKPVSQAIIEMTDGGADYCFECIGLASVMSDAFRSSREGWGKTIILGVEMHGAPLSIPSLEILNGKCVMGSLFGGVKPKQDIPILADKYLNKELELDKFITHEVPLKDINTAFDLLLQGKSLRCTIWMDK

SEQ ID NO: 14674 - protein, 338 aa, Streptococcus agalactiae 2603V/R
MKAVVVNQASTGVEVVEHDLPKVGHGEALVKVEYCGVCHTDLHVAHGDFGQVPGRILGHEGIGIVEEIGEGVTSLRVGDRVSIAWFFEGCGHCEYCTTGRETLCRSVKNAGYSVDGGMSEYAIVTADYAVKVPEGLDPAQASSITCAGVTTYKAIKEAGAAPGQWIAVYGAGGLGNLAVQYAKKVFNAHVVAVDINADKLQLAKEVGADLTVNGKEIKDVAAYIQEKTGGCHGVVVTAVSKVAFNQAIDSVRAGGTVVAVGLPSEYMELSIVKTVLDGIRVVGSLVGTRKDLEEAFAFGAEGLVVPVVEKVPVDTAPQVFDEMERGLIQGRKVLDFTK

SEQ ID NO: 14675 - protein, 389 aa, Trichodesmium erythraeum IMS101
MAKNLLEQLRKVTIVVADTGDIQAIEKFQPRDATTNPSLITAAAQMPQYQEIVDETLKTARQELGTDATASDVANLAFKRLAVAFGLKILQIVPGRVSTEVDARLSYDTEATIAQGRDLIAQYEEAGVSRDRILIKIASTWEGIKAAEVLEKEGIHCNLTLLFGLHQAIACAEAGATLISPFVGRILDWYKKETGRDSYPPAEDPGVLSVTKVYNYYKKFGYKTEVMGASFRNTGEITELAGCDLLTISPGLLGELESTIGELPTKLSDEKAAQSDAEKILMDKETFDQMHAEDRMASQKLDEGIKGFSKALESLEKLLAERLTRLEGVTHAAEDIFYIYDLDGDGFITREEWAGSDAVFDALDINKDGKISPAEMASGLGAVFELAKV

SEQ ID NO: 14676 - protein, 397 aa, Xanthobacter flavus
MIAFRTLDDAVDLADKRVLVRVDLNVPMESGRVTDATRLKAILPTIRDITGKGGKAVLLAHLGRPKGRDESQSLAPVAKALEGELGRKVAFASDCIGDEAKSAVSRLASGEVIVLENTRFHAGEEKNAPDFIEALASLGDIYVNDAFSTAHRAHASTEGLARKLPAYAGRSMESEIEALTKALEAPQRPVLAVVGGSKVSSKLELLGNLVKKVDILVIGGGMANTFLAALGKKVGKSLCEHDLANTARDILKKAEAAGCEIVLPVDAVVATEFKANAAHRVTSVDDVKDDEMMLDAGPETVGIVKQKLDGAKTVVWNGPFGAFEMTPFDAATVAVARYVGDLTHKGRLLSVAGGGDTVAALNHAGTAERFSYVSTAGGAFLEWLEGKALPGVEALRR

SEQ ID NO: 14677 - protein, 398 aa, Streptomyces avermitilis MA-4680
MAAMTSSARPLLNRRLAEFGTTIFAEMSALAMSTGAINLGQGFPDTDGPEEIREAAVRALRDGRGNQYPPGPGVPELRTAIAAHQQRRYGLTYDPDTEVLVTAGATEAIAATLLALLEPGDEVIAFEPYYDSYAACIAMAGGTRVPVTLRPHPEDGRFRLDLDELRDAVTDRTRLLLVNTPHNPTGTVLTREELTAIAELAVERDLLVVTDEVYEHLVFDDAEHLPLATFPGMRERTVSISSAGKTFSFTGWKVGWVTGAPGLVTAVRSAKQFLTYVASGPFQYAVAEALALPDTYFEAFRADMLAKRDLLAAGLTAAGFEVFRPAGTYFITTDIRPLGERDGFAFCRALPERAGVVAIPNAVFYDHREAGAPFVRFAFCKRTDVLEEAAKRLGTLRG

SEQ ID NO: 14678 - protein, 407 aa, Nicotiana tabacum
FAWSTLIANKNAELQRLTGIYKNILKNAGVTLIEGRGKVVDPHTVDVDGKLYSAKNILISVGGRPFIPDIPGSEYAIDSDAALDLPTKPNKIAIVGGGYIALEFAGIFNGLKSEVHVFIRQKKVLRGFDEEIRDFVGEQMSLRGIEFHTEESPQAIIKSADGSLSLKTSRGTVEGFSHIMFATGRRPNTKNLGLETVGVKMTKNGAIEVDEYSRTSVPSIWAVGDVTDRINLTPVALMEGGALAKTIFADEPTKPDYRNVPAAVFSQPPIGQVGLMEEQAIKEFGDVDVYTANFRPLKATISGLPDRVFMKLIVCAKTSKVLGLHMCGDDAPEIVQGFAIAVKAGLTKADFDSTVGIHPTSAEEFVTMRTPTRKVRSSPSEVSNSPEIAVHSSLGKAEHDIKAAAGV

SEQ ID NO: 14679 - protein, 363 aa, GIBBERELLA ZEAE PH-1
MTSTQSVKAVRYHGQQDIRLESVPVKPLDPTTVRIAPKFCGICGTDVHEYLGGNNLIPKPGTPHGITGETSPLTLGHEFSGIVEEVGSEVTRLQKGDRVCVQPIIYDNECRSCKRGLQNCCDQNGFIGLSGWGGGLAESTVVPQDAVKKLPDNVSLEVGALVEPLAVGWHATKISPYEDGNSAFVVGGGPIGLAVVQALVGRGCKNIMLTEVSSKRREFAKKFGAHHVFDPTKDDVVAMVKKLTGGLGADVGFDAAGSQHAIDVAFDCLKARAVLVNIAVWEKRAQLNMNQIVFRERSYVGCATYALGDFEEVIDALSNGKIKPEGMITKVIKMDKVVEEGFQTLINDKDNHVKILVDVSAGV

SEQ ID NO: 14680 - protein, 260 aa, Lycopersicon esculentum
MCGGAILADIIPPRDRRLSSTDLWPTDFWPISTQNVPLNPKRARPSTGGEQMKKRQRKNLYRGIRQRPWGKWAAEIRDPRKGVRVWLGTFNTAEEAARAYDREARKIRGKKAKVNFPNEDDDHYCYSHPEPPPLNIACDTTVTYNQESNNCYPFYSIENVEPVMEFASYNGIEDGGEEMVKNLNNRVVEEEEKTEDEVQILSDELMAYESLMKFYEIPYVDGQSVAATVNPAAETAVGGGSMELWSFDDVSRVQPSYNVV

SEQ ID NO: 14681 - protein, 570 aa, Saccharomyces cerevisiae
MSQDAAIAEQTPVEHLSAVDSASHSVLSTPSNKAERDEIKAYGEGEEHEPVVEIPKRPASAYVTVSIMCIMIAFGGFVFGWDTGTISGFINQTDFIRRFGMKHKDGTNYLSKVRTGLIVSIFNIGCAIGGIILSKLGDMYGRKVGLIVVVVIYIIGIIIQIASINKWYQYFIGRIISGLGVGGIAVLSPMLISEVSPKHLRGTLVSCYQLMITAGIFLGYCTNFGTKNYSNSVQWRVPLGLCFAWALFMIGGMTFVPESPRYLAEVGKIEEAKRSIAVSNKVAVDDPSVLAEIEAVLAGVEAEKLAGNASWGELFSSKTKVLQRLIMGAMIQSLQQLTGDNYFFYYGTTIFKAVGLSDSFETSIVLGIVNFASTFVGIYVVERYGRRTCLLWGAASMTACMVVYASVGVTRLWPNGQDQPSSKGAGNCMIVFACFYIFCFATTWAPIPYVVVSETFPLRVKSKAMSIATAANWLWGFLIGFFTPFITGAINFYYGYVFMGCLVFMFFYVLLVVPETKGLTLEEVNTMWEEGVLPWKSASWVPPSRRGANYDAEEMAHDDKPLYKRMFSTK

SEQ ID NO: 14682 - protein, 469 aa, Staphylococcus epidermidis ATCC 12228
MQMKLGWHNVLLVKGGIYYMSKSYDLIVIGAGPGGYVAAIRGAQLGKNVAVIEKNNAGGTCLNVGCIPSKTLLEHGEKAHSIRVANDWGITTKDLKIDFTQFVQRKKKVVQTLTGGVKQLLKKNKVTYIEGEARISKNLKVDVNNETYQAKDIILATGSQPFIPPIDGLDQVNYETTDTFFDLEKLPKQLAVIGGGVIATELASSMADLGVRVTIIEVADDILLTEINETREMLKAHLDNQGIKILTKAKIKQVKESKIILDGQDDVSFDTLLVATGRQPNTQVAKDLNLEMDGKFFKVNEHYETSQKHVYAIGDLIKGYQLAHAASAHGIHVVETIMNKQPSLVRQEDITRCIYTRLEAASVGLSEAQAKEAGYDVKVTQSAFQGNAKALIKGENEGFIKLVVDKKYGEVLGAFIVGPHATDIIGELLSVKASEGTIHELSQIIQPHPALLEAIGESADAFFDSAIHM

SEQ ID NO: 14683 - protein, 425 aa, Staphylococcus epidermidis ATCC 12228
MSENIIMPKLGMTMKEGTVEEWFKSEGDTVKQGESIVTISSEKLTNDVEAPASGTLLEIKVQAGEDAEVKAVLGIIGEEGEAIDKDEDDLASEKVKEDNEHEKETQEVKDTSQQSSDNKDNSPKSAARERIFISPLARNMAEDKGLDINKIKGTGGNHRITKLDIQRVEANGYDYASDTTSNEDTSHVPTQTVDTSAIGEGLNPMRQRIAQNMRQSLNSTAQLTLHRKVDADRLLDFKDRLATELKQADQDVKLTVTTLLAKAVVLALKEYGAMNARYEQGELTEYEDVHLGIATSLDEGLMVPVINHADTKSIGTLAHEIKSSAEAVREGNTGAVQLEGATFTITNMGASGIEYFTPILNLGETGILGVGALTKEVVLEADNIKQVSKIPLSLTFDHQILDGAGAADFLKVLAKYIENPYLLML

SEQ ID NO: 14684 - protein, 515 aa, Oryza sativa
MAPTASLLLSPRPLPASRRVPSLPALSASGRLRLRRARADTRLRVAAPPSVPGEADQAPGETEPSTSSADEKFVWRDHWYPVSLVEDLDPSVPTPFQLLNRDLVIWKDPKSGEWVALDDRCPHRLAPLSEGRIDETGCLQCSYHGWSFDGSGACTRIPQAAPEGPEAKAVRSPKACAIKFPTLVSQGLLFVWPDENGLPKEFEDPAFSTVTIQRDLYYGYDTLMENVSDPSHIEFAHHKVTGRRDRARPLPFKMESSGAWGYSGSNSGNPRISATFVAPCYALNKIEIDTKLPIFGDQKWVIWICSFNIPMAPGKTRSIVCSARNFFQFSMPGKAWWQLVPRWYEHWTSNLVYDGDMIVLQGQEKIFLSASKESSADINQQYTKITFTPTQADRFVLAFRAWLRKFGNSQPDWFGNPSQEVLPSTVLSKREMLDRYEQHTLKCSSCKGAYNAFQTLQKVFMGATVAFCATAGIPADVQFRLLLAAAALVSAAVAYAFYTLQKNFVFVDYVHAEID

SEQ ID NO: 14685 - protein, 796 aa, Nocardioides sp. JS614
MTTFPLTLTHWGAYRMRHVPGGATEALPFENDPDPSSLGRSMAGAWNSQARILRPAVRQGYLKYGPGAGVRGKEPFVEVPWELAVELVSGELTRVTKAFGSEAIFGGSYGWSSAGRFHHAQGQLHRFLNCAGGYTSSVNTYSVAAGEVILPHVLGLDPQDMMYNGMQPSWKDMAENAELVVAFGGMSMKNRQVGAGGPVRHLASSAVKSISDAGVRFVNVSFTRDDAPPLDKMTHFAVRPCTDVPLMLALAHTIIVEGLFDEQFVARCTVGFDEFLPYLMGVSDGIPKDAAWASGVCGCSAGSIRALARDMARSRTLITAAMSLQRQEHGEQTWWMAVVLAALLGQIGLPGRGIGFGYASLSPVGNDETPTAWPHLPQGLNAVKTFIPVARMADMLLNPGGHHQYNGRELTFPDIRLVWWAGGNPFHHHQDLNRLIKAWQKPETVIAHEVFWNAHARHADIVLPATTALERNDLGCAHLDPHLIAMKQMSEPLGEAQSDYAILTQIARAVGIADEYTEGRNEAEWLRYLYKQLEHSPALGGKTIPSFDEFWDQGWLEVPFDRAGQRERLGEALRRDPDANPLDTPSGRIEIFSSTIDGFGYADCPGHPMWLEPLEWPGADIAARFPLYLSSNQPAHRLHSQYDQGVVSVDAKVEGRERIRLSIQDAAERSIENGMIVRVFNDRGACLAAAWVDEGLEAGVVQLPTGAWYFPSVSDTGPIESHGNPNVLTADRPTSRLAAGPSINALVQVEAWTYPLPDLAPFEAPQFVVPRTFPANAWARRTGLAPLSVIPSSRQP

SEQ ID NO: 14686 - protein, 426 aa, Streptococcus dysgalactiae subsp. equisimilis
MKLQKPKGTQDILSVAAAKWQYVEGVARETFKQYHYGEIRTPMFEHYEVISRSVGDTTDIVTKEMYDFYDKGDRHITLRPEGTAPVVRSYVENKLFAPEVQKPVKLYYIGSMFRYERPQAGRLREFHQIGVECFGSANPATDVETIAMAYHLFERLGIKGVTLHLNSLGNAASRAAYRQALIDYLSPMRDTLSKDSQRRLDENPLRVLDSKEKEDKIAVANAPSILDYQDEESQAHFDAVRSMLEALAIPYVIDTNMVRGLDYYNHTIFEFITEVDQSELTICAGGRYDGLVEYFGGPATPGFGFGLGLERLLLILDKQGVELPVEEGLDVYIAVLGADANVAALALTQAIRRQGFTVERDYLGRKIKAQFKSADTFKAKVVITLGESEIKAGQAVLKHNQTRQEMTVSFDQIQTDFASIFAECVQ

SEQ ID NO: 14687 - protein, 180 aa, Bacillus cereus ATCC 14579
MMNQDIEKVLISEEQIQEKVRELGAIIAEDYKNTVPLAIGVLKGAMPFMADLLKRTDTYLEMDFMAVSSYGHSTVSTAEVKILKDLDTSVEGRDILIVEDIIDSGLTLSYLVDLFKYRKAKSVKIVTFLDKPTGRKVDLKADYVGFTVPHEFVVGYGLDYKEQYRNLPYVGVLKPSVYSN

SEQ ID NO: 14688 - protein, 297 aa, Streptomyces caeruleus
MRGILLAGGTGSRLWPVTRAISKQLIPVFDKPMIYYPLTTLMMAGVREILVITRPDDQRQFRHLLGDGSQLGLRLEYAVQERPEGIAQAFVLGAEFIGDQSVALVLGDNIFHGAGLGTRLRQYNDPAGARIFAYVVADPKAYGVVEFDEAGRAVSIEEKPARPKSRYAVPGLYFYDNRVLDVVHGLVPSRRGELEITAVNETYLKWGQLRVTTLDRGTAWLDTGTFASLVQASEYVRVVEERQGLKIGCVEEVAWRCGFIGNDQLRDLSRPLLKSGYGRYLLDLLADHEELKEVKPS

SEQ ID NO: 14689 - protein, 192 aa, Larix decidua
DEHREVVAEMRRPDLEPYLGLHYPATDIPQASRFLFMKNRVRMICDCCAPPVKVIQDKRLRQPLSLCGSTLRAPHGCRGQYMVNMGSIASLVMSVTTNENGDDSEDIGQRQPQKGRRLWGLVVCHHTSPRVIPFPLRYACEFLMQVFGIHLNKEVELAAQLREKHILRVQTVLCDMLLRDAPVGIVSQTPNI

SEQ ID NO: 14690 - protein, 779 aa, Bordetella parapertussis 12822
MSSASDSAPSASRPGDPEHPHSAHWGAFYAAFDGQAVRVRPHPDDPDPSPLIDNFTNALRHPVRVTAPMVRRGWLERGPGADQARGADEFVAVSWDEALDLVARELARVRDAHGPQAVFGGSYGWSSAGRFHHAQSQVHRFLNTALGGYVRSVNNYSAGASAVILPHVLGPLDDVARRNVTWQQIVEHTDVVLAFGGMALRNTQVASGGVSRHTERGAMRAAARRGCRFVCISPLRDDLPEEAAASWLPARPGTDAALMLALLHVLVDEGLHDRAFVARYCAGWETFEDYLMGRADGQPKNPAWAAALTGLAEADIAALARMLPSRRVLVVVSHSLQRAEHGEQPVWLGAVLAAALGQVGLPGGGYNYALGTLAHYGKRNNAVPIAALPQGRNGVDAYIPVARIADMLLKPGEPFDYNGQRLRYPHVRLAYWAGGNPFHHHQDLARLRAAFRRLDTLIVHETVWTATARHADIVLPCTMTLEREDIGGTPTDPLLVAMHRVAPPVGLARDDYDIFADLAGRLQRRAAFTEGRDSRGWLRHIYETTRAALAARGDEAPDFDTFWARGELRLPQADDDGGLLRAFRQDPQGRPLPTPSGRIQVSSPTVASFGYADCPGHPAWLAPADAPDAQWPLYLVANQPATRLHSQLDFGAHSAAAKRHGREVCQVHPADAAARGIADGDVVRLFNARGACLAAARVTDAIMRGVVQLPTGAWYDPQDVHAERPMCMHGNPNVLTRDVGTSSLAQGCTGQLTAVQMERYDGPLPPVRAYEPPVPAARG

SEQ ID NO: 14691 - protein, 454 aa, ASPERGILLUS NIDULANS FGSC A4
MTSNGTNGSATAYHASSTQEAIQAENDFAAHNYHPLPVVFARAQGTSVWDPEGRHYLDFLSAYSAVNQGHCHPKLVAALVDQASRLTLSSRAFYNDVFPKFAEMVTKYFGFDMVLPMNTGAEAVETGIKIARKWGYKVKGIPENEAIILSAENNFHGRTMAAISLSSDPESRENYGPYVPNIGCTIPGTEKPITYNDKAALREAFEKAGSNLAAFLVEPIQGEAGIIVPDDDYLQLARSLCDQHNVLLICDEIQTGIARTGKLLCHEWSGIKPDMVLLGKAISGGMYPVSCVLGRKDVMLTVEPGTHGSTYGGNPLACAVAIRALEVVQEENMVERAEKLGQAFRSGLEAIQNPIIQTVRGKGLLNAIVIDESKTNGHTAWDLCMLMKEKGLLAKPTHQNIIRLAPPLVITEEEIAKALEIIKAAVAELPNLKGAAEDKVVPPPEKKVKITLEN

SEQ ID NO: 14692 - protein, 563 aa, Escherichia coli CFT073
MRRFAELSKTLQTKDKAMAIHNRAGQPAQQSDLINVAQLTAQYYVLKPEAGNAEHAVKFGTSGHRGSAARHSFNEPHILAIAQAIAEERAKNGITGPCYVGKDTHALSEPAFISVLEVLAANGVDVIVQENNGFTPTPAISNAILVHNKKGGPLADGIVITPSHNPPEDGGIKYNPPNGGPADTNVTKVVEDRANALLADGLKGVKRISLDEAMASGHVKEQDLVQPFVEGLADIVDMAAIQKAGLTLGVDPLGGSGIEYWKRIGEYYNLNLTIVNDQVDQTFRFMHLDKDGAIRMDCSSECAMAGLLALRDKFDLAFANDPDYDRHGIVTPAGLMNPNHYLAVAINYLFQHRPQWGKDVAVGKTLVSSAMIDRVVNDLGRKLVEVPVGFKWFVDGLFDGSFGFGGEESAGASFLRFDGTPWSTDKDGIIMCLLAAEITAVTGKNPQEHYNELAKRFGAPSYNRLQAAATSAQKAALSKLSPEMVSACTLAGDPITARLTAAPGNGASIGGLKVMTDNGWFAARPSGTEDAYKIYCESFLGEEHRKQIEKEAVEIVSEVLKNA

SEQ ID NO: 14693 - protein, 191 aa, Larix decidua
DDHGEVISEIRRSDLEPYLGLHYPATGIPQASRFLFMRNGVRMICDCCAPPITVIQDKRLPRDLSFCGSTLRAPHGCHAQYMANMGSIASLVMAVVISEKEEDADSDGQIQQKGRRLWGLVVCHHTSPRYVPFPLRYACEFLMQVFGIHLNKEVELAVQMSEKRILRTQTLLCDMLLRDAPLGIVSQKPNI

SEQ ID NO: 14694 - protein, 752 aa, Chlamydomonas reinhardtii
MDKAERAAGGPNAASEDDWLLEFWPEPAADFPAPVAPMLSQHQDAAQLPEAMPQQQGLALGGYGLTQQPSDFMQTGMPGFDAFSSGKAATLGLPLLADPQRASTDGASALMNAAQQSSEYMLAPGMGGMPHLLAPSVGTALPGTGHTGFADLSMGGMAGGIPGLGGPGIMHGQYFMQPQRAATGPAKSRLRWTPELHNRFVNAVNSLGGPDKATPKGILKLMGVDGLTIYHIKSHLQKYRLNIRLPGESGLAGDSADGSDGERSDGEGGVRRATSLERADTMSGMAGGAAAALGRAGGTPGGALISPGLAGGTSSTGGMAAGGGGGGGLVTEPSISRGTVLNAAGAVATAAPAAAAPAGGSAAVKRPAGTSLSSGSTASATRRNLEEALLFQMELQKKLHEQLETQRQLQLSLEAHGRYIASLMEQEGLTSRLPELSGGAPAAAPVAAGGAAGGMIAPPPPQQQLQHQPQLLQPQGSLPAGGSSEAHAAAGAGTMVVHQQQQQHVHHHHQQQQVQMQQHARHCDTCGAGGAGGAPSGGSSMQQLQAAEQQRTELVVAGRLGSMPAPASSSPLAGQAHQQQPLAGGAAHLVHVHSHTPGGQPHVQHQDAFAGAATAAAHASPGLPQSHSHLLPADLSSNAGPDTSAGQIKPEPDMSQQQQQQEQQEAEQLAQGLLNDSSAGAGAVSGSDGGGLGDFDFGDFGDLDGGAQGGLLGPGDLIGIAELEAAAAHEQQQEQEHDPLDADRAKRQRVEP

SEQ ID NO: 14695 - protein, 192 aa, Macrozamia communis
DDHGEVVAEIRRSDLEPYLGLHYPATDIPQACKFLFMKNRVRMICDCCPAPVRVVQDKKLARDLTLCGSTLRAPHGCHSQYMSNMGSIASLVMAVIINEKEEEEGDNGDQQQLKGRRLWGLVVCHHASPRFVPFPLGYACEFLMQVFGIQLNKEVELAAQLREKHILRTQTLLCDMLLRDAPIGIVTQSPSI

SEQ ID NO: 14696 - protein, 284 aa, Pseudomonas putida
MTTSTGKINLLGLTQPEMEQFFDSIGEKRFRAGQVMKWIHHFGVSDFAAMTNVGKVLREKLEAVAEIRPPEVVSEDISADGTRKWVIRVASGSCVETVYIPTDDRGTLCVSSQAGCALDCSFCSTGKQGFNSNLTAAEVIGQVWLANKSFGTVPAKVDRAITNVVMMGMGEPLLNFDNVIAAMKIMMDDLGYGISKRRVTLSTSGVVPMIDELAKHIDVSLALSLHAPNDELRNKLVPINKKYPLKMLLESCMGYMSTLGASACSPSSTPCSRTSTTSPSMPRR

SEQ ID NO: 14697 - protein, 416 aa, Ralstonia eutropha JMP134
MFRSVWLPALLSSQLQEPGGSPVRLKLLGEELVAFRTKKGEVGITQANCAHRLAPLYYGRVEDDGIRCNYHGWLYNSKGQCLEMQNEPDKAICSKVKIKAYPVAEKADIVWIYMGEGEAPELPKFPWIDLPKSQRNATVWIQESNWLQGMEGELDSSHVSILHTNPATLATSPVHRPYSAVDLTPKLYAKDTPIGILGVARRNADDQYYWRVSQFMVPAFSSIPSVDFPVGGRAFIPIDDYNTYTWDFNYYFKGDLPQDFLDYTGKGLAFPPESNYQSYRLNTGTIIDAFVPVRTAENNYLINRNGGSLSSPSGIHGLNDQDRAMQEGMLATEGSEGRIVDREKEFLVATDIAIVRARRRILSIVQSEDSLEQFRQTIKDGTAYSVEPLDVLSQIDDVDSFVREYKTQLGPQKAGA

SEQ ID NO: 14698 - protein, 364 aa, Desulfovibrio vulgaris subsp. vulgaris str. Hildenborough
MTDILNLTYEELEAFMTAELGEPRFRARQVWQWLWQKCARSFDEMTNVSKATRARLAEKAVITWPEVETVQKSADGTTKFLLRLADGALVETVLIPSASREGTLRITQCLSCQVGCAMGCTFCSTGTMGFERNMTMGEILGQVLVARAHLGDSRPDHPILRNLVFMGMGEPLLNLNEVMRSLRTLNDEFGLSFSPRRITVSTCGIEKGLRELGESGLAFLAVSLHAPNQEIRKRIMPKAAHWHLDDLITALESYPLKTRERVTFEYLLLGGVNDGIEHARELVRLVSRTKGKLNLIVYNPAEGDPYDAPTPERILAFEQYLWSKNITAIIRKSKGQDIKAACGQLKASELQRGTASAGADAPEA

SEQ ID NO: 14699 - protein, 406 aa, Rhodopseudomonas palustris CGA009
MEEFYRIRRLPPYVFEQVNRAKAAARNAGADIIDLGMGNPDLPAPPHVLEKLKDTLGKPRTDRYSASRGITGLRRAQAAYYDRRFGVKLNPDTQVVATLGSKEGFANVAQAITAPGDVVLCPNPSYPIHAFGFLMAGGVIRSVPSEPTPDFFAAAERAIIHSIPKPIALIACYPSNPTAYVASLDFYKDLVAFAKKHEIMILSDLAYAEVYFDDNNPPPSVLQVPGAMDVTVEFTSMSKTFSMAGWRMGFAVGNERIIAALARVKSYLDYGAFTPVQVAATAALNGPDDCIKEMRETYKKRRDILVESFGRAGWEIPPPSASMFAWAPLPPAFREIGSMQFATLMVEKCGVVVSPGVGFGEHGEGFVRIAMVENEQRIRQAARGVRRFLESGVETLHNVVPLAAQR

SEQ ID NO: 14700 - protein, 390 aa, Ralstonia eutropha JMP134
MSADSTLAPLTPPVSRLPSVGTTIFTVMSALAAEKNAVNLGQGFPDFDCDPRIVDAVTHAMRTGHNQYPPMAGVPRLRQAIADKIATLYGHRYSWESEITVTAGATQGILTAILCAVHPGDEVIVLEPCYDSYLPAIELAGATAVPVTLEAPDFRVPFDRLAAAITPRTRMILINTPHNPTGTIWRAADMDKLAQLLAGTDILLLSDEVYEHMVYDREPHASVSRHPELARRSFVISSFGKTYHVTGWKVGYVAAPAALSAEFRKVHQFNVFTVNTPVQHGLADYMADPAPYLELSAFYQAKRDYFRAGLANTRFKLLPSEGTYFQCVDYSAISDLSEAEFSMWLTREIGVAAIPVSAFYTQPRESGVVRFCFAKKEETLSRALERLAKL

SEQ ID NO: 14701 - protein, 489 aa, Mycobacterium avium subsp. paratuberculosis str. k10
MALLADGVSELFIDGKMSAGNAGTFPTVNPATEEVLGVAANADAADMDRAIDAARRTFDETDWSRNTELRVRCVRQLRDAMREHIEELRDITIAEVGAPRMLTSAAQLEGPVGDLSFAADTAESYEWNQDLGQASPMGIPTRRTIAREAVGVVGAITPWNFPHQINLAKLGPALAAGNTVVLKPAPDTPWCAAVLGQLIAEHTDFPPGVVNIVTSDDHGVGALLSKDPRVDMVSFTGSTATGRSVMSDAAATIKRVFLELGGKSAFVVLDDADLGGACSMSAFTAAMHAGQGCAITTRLLVPRDRYDEAVAAAAGTMGSIKPGDPNDPGTVCGPVISARQRDRVQSYLDLAIAEGGTFACGGGRPADKDVGFFIEPTVIAGLTNDARPAREEIFGPVLTVIAYDGEEDALRIANDSPYGLSGTVFSADPERAANFASRMRVGTVNVNGGVWYSADAPFGGYKQSGNGREMGLAGFEEYLEIKTIATAVQ

SEQ ID NO: 14702 - protein, 357 aa, Pinus radiata
MGSLETEKTVTGYAARDSSGHLSPYTYNLRKKGPEDVIVKVIYCGICHSDLVQMRNEMGMSHYPMVPGHEVVGIVTEIGSEVKKFKVGEHVGVGCIVGSCRSCGNCNQSMEQYCSKRIWTYNDVNHDGTPTQGGFASSMVVDQMFVVRIPENLPLEQAAPLLCAGVTVFSPMKHFAMTEPGKKCGILGLGGVGHMGVKIAKAFGLHVTVISSSDKKKEEAMEVLGADAYLVSKDTEKMMEAAESLDYIMDTIPVAHPLEPYLALLKTNGKLVMLGVVPEPLHFVTPLLILGRRSIAGSFIGSMEETQETLDFCAEKKVSSMIEVVGLDYINTAMERLEKNDVRYRFVVDVAGSKLDN

SEQ ID NO: 14703 - protein, 295 aa, Helicobacter hepaticus ATCC 51449
MGKEFYDNFAVAKELFEEASDSLGLDMKHLLFEENDKLNLTLYTQPAIFLVSAIAHSVFQSECPLMPKVAMGHSLGEVSAVVLSEGMSFSQGIKLTHKRGELMTQACEGKDAGMMVIVGVEDKKLEDFSQEAQKNGKSIWCANYNGNGQVVLAGCKKDLSEAESTLKALGAKRALLLPMSVASHCPMLESALPAFTQLLDESLNEHLSTPILSNATLETYNTKAQAKSLLSKQLTHPVLYKQSILRLNDEVDAFIEFGNGSVLRGLNKRLSTLPTWNIENLASLKECIDSIKSGV

SEQ ID NO: 14704 - protein, 538 aa, Oryza sativa
MNGGDAAAAAATPSHRRLPDFLQSVNLKYVKLGYHYLITHLLTLLLLPLMAVIVLEAGRTDPDDLRQLWLHLQYNLVSVLVLSAVLVFGATVYVLTRPRPVYLVDFACYKPPDKLKVRFDEFLHHSKLCGFSDDCLEFQRKILERSGLSEETYVPEAMHLIPPEPTMANARAEAESVMFGALDKLFKFTGVKPKDVGVLVVNCSLFNPTPSLSAMIVNKYKLRGNIKSFNLGGMGCSAGVIAVDLARDMLQVHRNTYAVVVSTENITQNWYFGNRKSMLIPNCLFRVGGAAVLLSNRGADRRRAKYALKHVVRTHKGADNKAFNCVYQEQDDEGKTGVSLSKDLMAIAGGALKTNITTLGPLVLPFSEQLLFFATLVAKKLFNAKIKPYIPDFKLAFEHFCIHAGGRAVIDELEKNLQLQPVHVEASRMTLHRFGNTSSSSIWYELAYMEAKGRVRRGHRIWQIAFGSGFKCNSAVWHALRNVNPSPESPWEDCIDRYPVELVDGFATQSSVGLPIVVLCTLHFVVSLAIASDCHLLH

SEQ ID NO: 14705 - protein, 352 aa, Streptococcus pneumoniae R6
MKAYTYVKPGLASFVDVDKPVIRKPTDAIVRIVKTTICGTDLHIIKGDVPTCQSGTILGHEGIGIVEEVGEGVSNFKKGDKVLISCVCACGKCYYCKKGIYAHCEDEGGWIFGHLIDGMQAEYLRVPHADNTLYHTPEDLSDEALVMLSDILPTGYEIGVLKGKVEPGCSVAIIGSGPVGLAALLTAQFYSPAKLIMVDLDDNRLETALSFGATHKVNSSDPEKAIKEIYDLTDGRGVDVAIEAVGIPATFDFCQKIIGVDGTVANCGVHGKPVEFDLDKLWIRNINVTTGLVSTNTTPQLLKALESHKIEPEKLVTHYFKLSEIEKAYEVFSKAADHHAIKVIIENDISEA

SEQ ID NO: 14706 - protein, 557 aa, Pseudomonas fluorescens PfO-1
MYEYDDYDRALVFERVAQFRDQVERFMAGELSEEEFLPLRLQNGLYMQKHAYMLRVAIPYGTLSAEQMRTLASIARDYDRGYGHFTTRQNMQFNWIELHEVPDILERLAQVNMHAIQTSGNCVRNITTEAFAGVAADELIDPRPLAEILRQWSTINPEFLFLPRKFKIAICSAKQDRAAIMMHDIGLYLYPGRDGQMLLRVIVGGGLGRTPILGLQIRDGLPWQHLLSYVEAVLRVYNRHGRRDNKYKARIKILVKALGIEAFAKEVEEEWQHLKDGPAQLTEDEYQRVASAFVPPSYRTLAGTDLDFGTHLAENPAFARWVARNVQPHKVPGYTSVVLSTKPGLAAPPGDVTDAQMQAVADWSERFGFGEIRIAHEQNIVLPDVPKSELFALWQQAKEQGLGAANVGLLTDIIACPGGDFCALANAKSIPIAQAIQARFDNLDYLHDLGDISLNISGCMNACGHHHIGNIGILGVDKNGSEWYQITLGGAQGKNSALGKVIGPSFSAAEVPQVIERIIGTFVRYREAEEQFVETVARIGLEPFKERVYPKALEVSA

SEQ ID NO: 14707 - protein, 537 aa, Oryza sativa
  unsure (1)..(537): unsure at all Xaa locations
MATCAADLAPLLGPVAANATDYLCNRFADTTSAVDATYLLFSAYLVFAMQLGFAMLCAGSVRAKNTMNIMLTNVLDAAAGALFYYLFGFASLXVAFGTPSNGFIGKQFFGLKHMPQTGFXDYDFFLFQWAFAIAAAGITSGSIAERTQFVAYLIYSAFLTGFVYPVVSHWIWSADGWASASRTSGPLLFGSGVIDFAGSGVVHMVGGVAGLWGALIEGPRIGRFDHAGRSVALKGHSASLVVLGTFLLWFGWYGFNPGSFTTILKTYGPAGGINGQWSGVGRTAVTTTLAGSVAALTTLFGKRLQTGHWNVVDVCNGLLGGFAAITAGCSVVDPWAAIICGFVSAWVLIGLNALAARLKFDDPLEAAQLHGGCGAWGILFTALFARQKYVEEIYGAGRPYGLFMGGGGKLLAAHVIQILVIFGWVSCTMGPLFYGLKKLGLLRISXAEDETSGMDLTRHGGFAYVYHDEDEHDKSGVGGFMLRSAQTRVEPAAAGCLQQQQPSVTNPERTTSQRRKKSRVSLPLRSRSSRHKFDPHI

SEQ ID NO: 14708 - protein, 129 aa, Oryza sativa
VLNELNEGISRSRRLNLKNPQDSLLGQIPRRTRDELMDHWAAIQELLQHFWSSYPITTSVLYNKVQRIKDAMTQIYQKLQDIKESAQPDVRHEISQLVKPMTQALDAAFNHDLEQQQKSSKSGNKPNGF

SEQ ID NO: 14709 - protein, 544 aa, Zea mays
  unsure (1)..(544): unsure at all Xaa locations
MEEQQPRPRPSIMFVLSSLAKNNPESVLALIAVLTVVALRHLISSWRQQARLPPSPTSLPVIGHLHLLRPPVHRTFQELASRIGPLMHIRLGSTHCVVASTPEVASELIRGHEGSISERPLTAVARQFAYDSAGFAFAPYNTHWRFMKRLXMSELLGPRTVEQLRPVRRAGXVSLLADLLASSARGETVDLTRHLIRLSNTSIIRMVASTVPGSVTDEAQEVVKDVAELVGAFNVDDYISLVRGWDLQGLRRRAAGVHRRFDALLEDILRHKEEARAARRLDQDDDGRGSSKQDKKQATHSKDLLDILMDKADDPAAEIKLTRENIKAFIIDVVTAGSDTSAAMVEWMLAELMNHPETLRKVAEEIDAVVGGDRIASEADLPQLPYLMAAYKETLRLHPAAPIAHRQSSEEMVVRGFTVPPQTAVFINVWAIGRDPAYWEEPLAFRPERFMPGGAAESLEPRGQHFQYMPFGSGRRGCPGMGLALQSVPAVLAALVQCFHWAXVDGDGGVNKIDMSESDGLVCARKKPLLLRPTPRLTPFPAVV

SEQ ID NO: 14710 - protein, 477 aa, ASPERGILLUS NIDULANS FGSC A4
MNLSLVDPFVLAQDYPDTLSEKLRSGHATCLRFNRKGDYLASGRVDGTVVIFDVETNGVARKLKGHIRQIQSLSWSRDGRYLLSSSQDWKCILWDLKDGSRVRTVRFEAPVYIAELHPYNHLLFVASLFEDQPVLVDISSPKPVKRILPSAPFRAAPSKDEEIDPAVAAKQAAQDAKHSTCVTIFTALGNHIIAGTSKGWINIIETQTCTTIHSTKLCAGVIILLRLASNGRDLLVNSSDRVIRTILMPDLSQLGIDLEPTNIKLQVEHKFQDVVNRLSWNHVAFSSTGEFVTASTFMNPDIYVWERSHGSLVKILEGPREELGVVEWHPTRPFVVACGLESGCIYTWSIVTPQKWSALAPDFGEVEENVIYVEREDEFDIHPAEEIHQRRLDAEDEEPDVLTIEPSKSGDDIESFRMPVLLDISDSESEEDIVAVGPGTMRRRSPGTGRDKSNANGDGEKDGRNGTTGRGAKGRRR

SEQ ID NO: 14711 - protein, 187 aa, Macrozamia communis
DEHGEVVAEIRRSDLEPYLGLHYPATDIPQASRFLFMQNRVRMICDCRATPVRVIQAAELRQPLCLVGSTLRAPHGCHAQYMANMGSIASLVMAVVINGNDEAGGSGRSSMKLWGLVVCHHTSPRAVPFPLRYACEFLMQAFGLQLNMELQLAAQLTEKHILKTQTLLCDMLLRDAPIGIVTQSPSI

SEQ ID NO: 14712 - protein, 475 aa, Streptomyces avermitilis MA-4680
MIIGGGPGGYEAALVAAQLGAEVTVVDCDGLGGASVLTDCVPSKTLIATAEVMTTFDSSYEELGIIVADDTPPMEQAARVVGVDLGKVNRRVKRLALAQSHDITASVTRAGARVMRGRGRLDGMQSIDGSRKVVVRAADGAEETLVADAVLIATGGHPRELPDAQPDGERILNWTQVYDLDELPDELIVVGSGVTGAEFAGAYQALGSKVTLVSSRDRVLPGEDPDAAAVLEDVFRRRGMNVMARSRAESAKRIGDRVEVTLSDGRVISGSHCLMAVGAIPNSSGMGLEEAGVKLRDSGHIWTDKVSRTTAPGVYAAGDVTGVFALASVAAMQGRIAMYHFLGDAVAPLNLKTVSSNVFTDPEIATVGYSQADVDAGKIDARVVKLPLLRNPRAKMQGIRDGFVKIFCRPGTGIVVGGVVVAPRASELIHPISIAVDNNLTVEQIANAFTVYPSLSGSIAEVARQLHTRKTAGDA

SEQ ID NO: 14713 - protein, 189 aa, Macrozamia communis
DDHGEVVAEIRRSDLEPYLGLHYPATDIPQASRFLFMRNRVRMICDCSSPPVKVVQDKRCPKPLSLCGSTLRAPHGCHAQYMANMASIASLVMAVTINDDDDDIGSSGQQKGRRLWGLMVCHHTSPRFVPFPLRYACQFLMQVFGIQLNREVELAAQLREKHILRTQTVLCDMLLRDAPDGIVAQTPNI

SEQ ID NO: 14714 - protein, 192 aa, Pinus sylvestris
DEHGEVVAEVRRPDLEPYLGLHYPATDIPQASRFLFMENRVRMICDCCAPPMKVIQDKRLRRPLSLCGSTLRAPHGCHAQYMANMGSIASLVMSVTINENGDDSEGNGLQQQQKGRKLWGLVVCHHTSPRVIPFPLRYACEFLMQVFGIQLNREVELAAQLREKHILRVQTVLCNMLLHDALVGIVSQTPNM

SEQ ID NO: 14715 - protein, 485 aa, Thermobifida fusca
MADPKGFLKITERELPSHRPVPVRIQDWREVYEDFDRAALIRQASRCMDCGIPFCHNGCPLGNLIPEWNDLVYRHDWRDAIERLHATNNFPEFTGRLCPAPCESACVLGINQPAVTIKNVEVSIIDRAWEEGWVRPQPPAQHTGKKVAVVGSGPAGLAAAQQLTRAGHTVTVYERADRIGGLLRYGIPEFKLEKRHLERRLAQMRAEGTEFRTGVNVGVDLTADQLRADHDAVILAGGATVWRDLPIPGRHLAGVHQAMEYLPLANRVQEGDFATPPITAEGKHVVVIGGGDTGADCVGTAHRQGARSVTQLEIMPKPPTTRPPHQPWPTMPLLYKVTSAHEEGGERLYSVNTLEFLDDGTGAVRGLKVVDVTRTAEGFAPVPGTEREIPAQLVVLALGFLGPQREGLLEQLGVALDERGNVQRGPDYATSVPGVFCAGDMGRGQSLIVWAIAEGRSAAAAVDAYLCGETALPTAIPPTARPLTL

SEQ ID NO: 14716 - protein, 396 aa, Caulobacter crescentus CB15
MTFRTLDTADLAGKRALVRVDFNVPVDGGKVADDTRLKAALPTIRFLADKGAKVVLLAHFDRPKGKVVPEMSLAFVAEPLAALLGAPVAFVGDCVGPAAAEVVNGLADGGVALLENVRFHAGEEKNDAEFAKALAANGDVYVNDAFSAAHRAHASTEGLAKLLPAYPGVSMQRELEALDAALGNPKKPVIGIVGGSKVSTKLDLLNNLVAKLDRLAIGGGMANTFLFAQGHDVGGSLCEKDLADTAREIMEKAKAAGCELLLPVDVVVAKKVAPGVETAVRSLSEVQADDLILDAGPESAKRLLAAMDQSLTLIWNGPLGVFEVPPFDEATVSAAKHAASLAKSGKIVAVAGGGDTVAALNHAGVSADFTFVSTAGGAFLEWMEGKTLPGVAALES

SEQ ID NO: 14717 - protein, 433 aa, Photorhabdus luminescens subsp. laumondii TTO1
MSKIVKVIGREIIDSRGNPTVEAEVHLEGGFVGLAAAPSGASTGSREALELRDGDKSRFMGKGVLKAVDAVNGPIAQAVIGQDAKDQANIDKIMIDLDGTENKSQFGANAILAVSLANAKAAAAAKGMPLYEHIAELNGTPGKFSMPLPMMNIINGGEHADNNVDIQEFMIQPIGAKTLKEAVRIGSEVFHNLAKVLKAKGMSTAVGDEGGYAPNLESNAAALAAIKEAVEQAGYVLGKDVTLAMDCAASEFYNPETGNYELKGEGKTFTSQEFTHYLEDLTRKYPIVSIEDGLNESDWEGFAYQTKVLGEKIQLVGDDLFVTNTKILKEGIEKGIANSILIKFNQIGSLTETLAAIKMAKDAGYTAVISHRSGETEDATIADLAVGTAAGQIKTGSMSRSDRVAKYNQLIRIEEALGNRAPFYGLKEVKGQA

SEQ ID NO: 14718 - protein, 229 aa, Methylobacillus flagellatus KT
MNRYGAEFLGTFWLVLGGCGSAVLAAAFPEVGIGLHGVSLAFGLTVLTMAFAIGHISGCHLNPAVSIGLWAGGRFAGSQLLPYIVAQVLGAIAAGGVLYLIASGQAGFDVTAGFASNGYGEHSPGGYTMTAALVAEVVLTAFFLFIIMGATDQRAPAGFAPIAIGLTLTLIHLISIPVTNTSVNPARSTGVAVYAGGWAVDQLWLFWIAPIVGGVIGAWVYRAVAGSKA

SEQ ID NO: 14719 - protein, 477 aa, Arabidopsis thaliana
MNDEEPSNRTKRGMLDLGNMSMSASVALTCCPSFLPAASGPELAKSINSPENLAGECNGKHLPMIPPEEEVKDIKIANGVTAFTRKQNPSDRVKKGFVLDDHVKDWVKRRVASGVSESTCFLPFLVGAKKMVDCLVCHKPVYPGEDLSCSVRGCQGAYHSLCAKESLGFSKSSKFKCPQHFLIEWSMQECFVCKQRTQWRCVKCPMAAHDKHSPWSKEILHLKDQPGRAVCWRHPTDWRLDTKVDFLVYRFHKILLEASYDLYFHRVLLTGLTKSLLIEQHAVAQSEIEGCSCPESCGNRPFRKEKKIKIVKTEHCGWGVEAAESINKEDFIVEYIGEVISDAQCEQRLWDMKHKGMKDFYMCEIQKDFTIDATFKGNASRFLNHSCNPNCVLEKWQVEGETRVGVFAARQIEAGEPLTYDYRFVQFGPEVKCNCGSENCQGYLGTKRKEPNCLVVSWGAKRRRLFHRPIARKPQQD

SEQ ID NO: 14720 - protein, 1135 aa, Nicotiana plumbaginifolia
MASGSRTKHSHQSGQGQGQVQAQSSGTSNVNYKDSISKAIAQYTADARLHAVFEQSGESGKSFDYSQSVKTTTQSVVPEQQITAYLTKIQRGGHIQPFGCMIAVDEASFGVIAYSENACEMLSLTPQSVPSLERPEILTVGTDVRTLFTPSSSVLLERAFGAREITLLNPIWIHSKNSGKPFYAILHRVDVGIVIDLEPAKTEDPALSIAGAVQSQKLAVRAISHLQSLPGGDVKILCDTVVESVRELTGYDRVMVYKFHEDEHGEVVAESKRPDLEPYIGLHYPATDIPQASRFLFKQNRVRMIVDCHATPVRVVQDESLMQPLCLVGSTLRAPHGCHAQYMANMGSIASLTLAVIINGNDEEAVGGRSSMRLWGLVVGHHTSARCIPFPLRYACEFLMQAFGLQLNMELQLASQLSEKHVLRTQTLLCDMLLRDSPTGIVTQSPSIMDLVKCDGAALYCQGKYYPLGVTPTEAQIKDIVEWLLTYHGDSTGLSTDSLADAGYPGAALLGDAVCGMAVAYITSKDFLFWFRSHTAKEIKWGGAKHHPEDKDDGQRMHPRSSFKAFLEVVKSRSLPWENAEMDAIHSLQLILRDSFKDAEASNSMAVVHAQLGEMELQGIDELSSVAREMVRLIETATAPIFAVDVDGRINGWNAKVAELTDLSVEEAMGKSLVHDLVHEESQETAENLLFNALRGEEDKNVEMKLRTFGSEQPKKAVFVVVNACSSKDYTNNIVGVCFVGQDVTGQKVVMDKFIHIQGDYKAIVHSPNPLIPPIFVSDENTCCSEWNTAMENLTGWSRGEIIGKMLVGETFGSCCRLKGPDAMTKFMIVLHNAIGGQDTDKFPFSFSDRNGKYVQALLTANKRVNMEGQIIGAFCFIQIASPELQQALRVQRQQDKKCYSQMKELAYLCQEIKSPLNGIRFTNSLLEATDLTEDQKQYLETSTACERQMSKIIRDVDLENIEDGSLTLDKEEFFLGSVIDAVVSQVMLLLRERSVQLIRDIPEEIKTLTVHGDQVRIQQVLADFLLNMVRYAPSPDGWVEIQLQPNMKQISDEVTVVHIEFRIVCPGEGLPPELVQDMFHSNRWVTKEGLGLSMCRKILKLMNGEIQYIRESERCYFLIILDLPMTGRGSKSVG

SEQ ID NO: 14721 - protein, 228 aa, Brucella melitensis 16M
MLNKLSAEFFGTFWLVFGGCGSAILAAAFPELGIGFLGVALAFGLTVLTMAYAVGGISGGHFNPAVSLGLTVAGRLPAKDLIPYWVAQVLGAIAAAAILYVIASGKDGFSAGGLASNGYGELSPGGYSMMAGLLIEIILTAFFIIIILGSTSSLAPAGFAPIAIGFGLTLIHLVSIPVTNTWVNPARSTGVALFADTAALSQLWLFWVAPLVGAVIGAIIWKGLLGRD

SEQ ID NO: 14722 - protein, 136 aa, Zea mays
  unsure (1)..(136): unsure at all Xaa locations
MATNRSVGTLGEADLKGKKVFVRADLNVPLEDAQKITDYIRMRASVPTIKFLLEKGAQVILASHLGRPKGVTTKHSLKPLVSRLSELLVIEVVMAHDCIXGEEPEKLAAALPXGGVLLLEIVRFYKEEEKTDLLLV

SEQ ID NO: 14723 - protein, 106 aa, Glycine max
FSTKNLCFCAFRIFCSDGYFQSSIALLSGESVCYGRFQVVLIGNNITSLLDDSEANFAPTVKGPGKDGILYFAQPLDACTVLPDQVQPSSDATSPFRRLAQGARRF

SEQ ID NO: 14724 - protein, 130 aa, Glycine max
MAAVRKIIEVNRNKILSPSLLSFRRGIAYKLFVGGLSFYTTENALSEAFSNYGQVIEAKIVTDRVSDRSKGFGFVTFASQDEAENAIEDMKGKTLNGRVIFVDYAKPNINTRGEIPITRGPPEPTSTPDT

SEQ ID NO: 14725 - protein, 444 aa, Arabidopsis thaliana
MATITVVKARQIFDSRGNPTVEVDIHTSNGIKVTAAVPSGASTGIYEALELRDGGSDYLGKGVSKAVGNVNNIIGPALIGKDPTQQTAIDNFMVHELDGTQNEWGWCKQKLGANAILAVSLAVCKAGAVVSGIPLYKHIANLAGNPKIVLPVPAFNVINDGSHAGNKLAMQEFMILPVGAASFKEAMKMGVEVYHHLKSVIKKKYGQDATNVGDEGGFAPNIQENKEGLELLKTAIEKAGYTGKVVIGMDVAASEFYSEDKTYDLNFKEENNNGSQKISGDALKDLYKSFVAEYPIVSIEDPFDQDDWEHYAKMTTECGTEVQIVGDDLLVTNPKRVAKAIAEKSCNALLLKVNQIGSVTESIEAVKMSKKAGWGVMTSHRSGETEDTFIADLAVGLSTGQIKTGAPCRSERLAKYNQLLRIEEELGSEAIYAGVNFRKPVEPY

SEQ ID NO: 14726 - protein, 424 aa, Salmonella typhimurium LT2
MAKNIQAIRGMNDYLPGETAIWQRIEGTLKNVLGSYGYSEIRLPIVEQTPLFKRAIGEVTDVVEKEMYTFEDRNGDSLTLRPEGTAGCVRAGIEHGLLYNQEQRLWYIGPMFRHERPQKGRYRQFHQLGAEVFGLQGPDIDAELIMLTARWWRALGIAEHVSLELNSIGSLEARANYRDALVAFLEQHQETLDEDCKRRMYTNPLRVLDSKNPDVQALLNDAPALGDYLDDDSREHFAGLCKLLDAAGIAYTVNQRLVRGLDYYNRTVFEWVTNSLGSQGTVCAGGRYDGLVEQLGGRATPAVGFAMGLERLVLLVQAVNPEFIASPVVDIYLVAAGAQTQSAAMTLAERLRDEMPGVKLMTNHGGGNFKKQFARADKWGARIALVLGESEVADGTVVVKDLRSGEQTAVAQDSVAAHLRTLLG

SEQ ID NO: 14727 - protein, 308 aa, Zea mays
MCIYAADCSEIGLGPPAGPAEFRALKRFYIKRVQDLHKGVQVFEEKDLMKSLSKSTCVPEVLSTCADQSYLGILLNCCLCCSLASILHTPLNETSARFFAASVVVALEELHQKSIIYRGVSADILMLDRSGHLQLVDFRFAKKLEGQRTYTICGIADSLAPEIVLGRGHGFPADWWALGVLIYFMLQSDMPFGSWRESELEPITKIAKGHLVMPVSFSAEVVDLITKLLVVDENARLGTSGAEAVKKHPWFDGTDWERIASGTCAAPEEITERINYCIETLNEDLSASPSVPIEDPDDLTAPEWIQDW

SEQ ID NO: 14728 - protein, 453 aa, Agrobacterium tumefaciens str. C58
MVSHASAFDTFPMRQHPIVMSRIFGNLDRFEAFAALLDNRQSSPMMSYCDDRECDDCAPSPQLLRSGQNIISSSLLGLLRACQQTFQHSTSTHEMEEYSHADDGATNEARLQRRLTQLKGAQPGYEAAAFLAAIVESSDDAIISKSLQGIITTWNLSAERLFGYSADEAVGRPITMLIPEDRLDEEPAILARINAGERVDHFETVRRRKDGTLIDISLTISPIRAGDGTIIGASKIARDISERKRAAEHQDMLLREMHHRVKNLFTITGSIITLAARTAQTPAELADGMKNRLIALSHAHQLTLPSFSGGESPSERSTTLFNLLSNLLSPFADKDAGRWHLHGEDPHISAERVTSLALLFHEYATNAVKYSALSVADGRLDVTLTPGPDCFEIAWLESNARTTAAGKTKEADFGTTLENMLVRTLNAQVSRDWQRQGLLIRLTLPRNVFSLPS

SEQ ID NO: 14729 - protein, 191 aa, Pinus sylvestris
DDHGEVISEMRRYDLEPYLGLHYPATDIPQASRFLFMRNRVRMICDCYAQPVAVIQDERLPRDLSFCGSTLRAPHGCHAQYMANMGSIASLVMAVVINEKELDGDSEGQMQQKGRRLWGLVVCHHTSPRYVPFPLRYACEFLMQVFGIQLNKEVELAAQIREKQILRTQTLLCDMLLRDTPLGIVTQKPNI

SEQ ID NO: 14730 - protein, 191 aa, Pinus sylvestris
DDHGEVISEIRRYDLEPYLGLHYPTTDIPWASRFLFMRNKVRMVCDCYAQPVTVIQDKRLPRDLSFCGSTLIAPHGCHAQYMANMGSIASLVMAVVINEKELDGVSEGQMQQKGKRLWGLVVCHHTSPRYVPFPLRYACEFLMQVFGIQLNKEVELAAQMREKRILLTQTLLCDMLLRDTPLGIVTWKPDI

SEQ ID NO: 14731 - protein, 260 aa, Arabidopsis thaliana
MPQGDYIDLHRKRNGYRLDHFERKRKKEAREVHKHSTMAQKSLGIKGKMIAKKNYAEKALMKKTLKMHEESSSRRKADENVQEGAVPAYLLDREDTTRAKVLSNTIKQKRKEKAGKWEVPLPKVRPVAEDEMFRVIRSGKRKTKQWKRMVTKATFVGPAFTRKPPKYERFIRPSGLRFTKAHVTHPELKCTFCLEIIGIKKNPNGPMYTSLGVMTRGTIIEVNVSELGLVTPAGKVVWGKYAQVTNNPENDGCINAVLLV

SEQ ID NO: 14732 - protein, 188 aa, Pinus sylvestris
DEHGEIVAEIKPPDLEPYLGLHYPATDIPQAARFLFMQNKVRMICDCKAAPVKLIQSQELTQPLCLVGSTLRAAHECHLQFMTNMGSIASLVMAVIINGNDSAGGGNGRNSMKLWGLAVCYHTSPRAVPFHHRYACEYLMQAFSLQLSMELQLAAQLKEKRIFRIQTLLCDMLLRDGPIGIVTQSPSI

SEQ ID NO: 14733 - protein, 469 aa, Pirellula sp. 1
MTEVKLPELGDGIESGDVLEIFVSVGDVITAGQDIVEMETDKATVPVPSDVGGKVTKISVGEGDTVPIGGVLIEVEAAAGAESAPAPAAPAEPEKKPEPKPEPQAEAPAPEPAAPPAAKPAAPAAPPVAQPVATPAARTPAVADEPDAPVDGGGSIPAGPAIRRFARETGVNLASVTGTGAGGRITRDDVLAVVRSASQKAAAPAAKPAPSAGTAAPRTNVTSGDLPGTPDTDDYGPIRVERMSKIRKTISAQMHLSWSTVPRVTNFDDADITDLERLRQSSKDDYAAQGLKLTTMPFLVKAVATALRHHPSLNAVIDSENQQVIYKDYVNIGIAVDTDNGLVVPVMHNADQMGIPDTARNIAEMAGKVRGGKFGVNDLRGGSFTISNLGAIGGQYSTPIVNVPEVAILLVGRSRKLPVVMPDDSIQPRLMMPLSLSYDHRLVDGGTAARFLNDVIGYLQAPSRLLLAL

SEQ ID NO: 14734 - protein, 392 aa, Oryza sativa
  unsure (1)..(392): unsure at all Xaa locations
MLRCPPPRRLCLRLRLRLGSPVSTMASTLAFLRPSAPAPLAASRGAARGVPAAVRVPCRSRVSAAGVSLGSEVAVGSDALFADYKPTTAFLFPGQGAQTVGMGAEAVNVPAAAKLFDKANDILGYDLLDFCTNGPKEKLDSTVISQPAIYVTSLAAVEVLRSRDGGQNVIDSVDVTCGLSLGEYTALAFAGAFSFEXDGLKLVKLRGEAMQDASDAASSAMVSVIGLDSEKVQQLCDAANEEVDEKERVQIANFLCPGNYAVSGGVKGIEAVEAKAKSFKARMTVRLAVAGAFHTSFMQPAVSRLESALAETEIKTPRIPVISNVDASPHSDPDTIKKILARQVTSPVQWESTVKTLMGKGLEKSYELGPGKVIAGILKRIDKGASIENIGA

SEQ ID NO: 14735 - protein, 1015 aa, Escherichia coli O157:H7 EDL933; identical to SEQ ID NO: 9827
  unsure (1)..(1015): unsure at all Xaa locations

SEQ ID NO: 14736 - protein, 314 aa, Zea mays
ACLQAVIKRLMTDVPFGVLLSGGLDSSLVASVTKRHLVKTDAAGKFGTELHSFVVGLENRARDGTLTARTFQGSPDLKAAREVADYLGTTHHEFHFTDGIDAIEEVIYHDETYDVTTIRASTPMFLMARKIKSLGVKMVLSGEGSDELLGGYLYFHFAPNKEEFHRETCRKVKALHQYDCLRANKATSAWGLEVRVPFLDKEFINVAMGMDPEWKMYDKNLGRIEKWVMRKAFDDDEHPYLPKHILYRQKEQFSDGVGYNWIDGLKSFTEQQVTDEMMNNAAQMFPYNTPVNKEAYYYRMIFERLFPQDSARET

SEQ ID NO: 14737 - protein, 486 aa, Pseudomonas aeruginosa UCBPP-PA14
MIKHWINGREVESKDVFENYNPATGELIGEVASGGAAEIDAAVAAAREAFPKWANTPAKERARLMRRLGELIDRNVPHLAELETLDTGLPIHQTKNVLIPRASHNFEFFAEVCTRMNGHSYPVDDQMLNYTLYQPVGVCGLVSPWNVPFMTATWKTAPCLALGNTAVLKMSELSPLTANELGRLVHEAGIPPGVFNVVQGYGASAGDALVRHRDVRAVSFTGGTATGRRIMEAAGIKKYSMELGGKSPVLVFEDADLERALDAALFTIFSLNGERCTAGSRIFVQESVYPQFVAEFAARARRLIVGDPQDPKTQVGSMITQAHYDKVTGYIRIGLEEGATLVAGGLERPTGLPAHLSKGQFIQPTVFADVDNRMRIAQEEIFGPVVCLIPFKDEAEALRLANDVEYGLASYIWTQDIGKAHRLARGIEAGMVFINSQNVRDLRQPFGGVKASGTGREGGEYSFEVFAEIKNVCISMGSHHIPRWGV

SEQ ID NO: 14738 - protein, 477 aa, Bordetella bronchiseptica RB50
MRTITSLIDGQWAGGAGDSENINPSDLSAPVCLVAQASAQQAAQAVEAARRAQPGWAATGLAARAQILKDIGRGIVANSQQLAHTLASEQGKTLPEARGEVQRAADIFDYYAGEVFRLGGEMFPSIRAGVEVEISREPLGVVALITPWNFPIAIPAWKTAPALACGNAVVLKPSEFTPATAVMLAEIIRAAGVPDGVFNLVLGTGADVGQVLTGHPAVAGVSFTGSSATGRKIAASAVAGHKKLQMEMGGKNPLVVLDDADLEIALACALDGAFHATGQRCTASSRLIVTPGIYNRFVQELAQRVMALNVGHALDERSQIGPVSNGAQFDKDLSYIALARDEAQRVVGGAALQRAQRGYYLQPCLALDVSLDARIAREEVFGPLACVLRAQDYEHALAIANDTEYGLSAGICTQSLKHATHFRRHVQSGLAMVNMPTSGVDFHVPFGGRGASSYGSSEQGHYAREFFTSLKTSYIRP

SEQ ID NO: 14739 - protein, 453 aa, Bacillus anthracis str. Ames 0581
MYFNNVETKPGIGYPKQWEDQEKYKGGWELKNGEIQLKSGSKMKRLMNIFHNPDQPTIDDYFEPWNYDYETLTTSPQRKHQPVARPKSAITGEFIDKIEWGPNWEDDLAGGHITGLQDPNVKKMEEEIKTDFENVFMMYLPRICEHCMNPSCVSSCPSGAMYKREEDGIVLVDQNACRAWRFCVSSCPYKKVYVNWQTNKAEKCTMCFPRIEAGMPTICSETCVGRIRYIGVMLYDADKVKEAASVENEKDLYESQLTVFLDPNDPEVVAEAKKQGIPEEWIKAAQESPIYKMIIDWKIALPLHPEYRTMPMVWYIPPLSPIMNMVEGKGSNWQAEEIFPAIDNMRIPIQYLANLLTAGDESHIRLTLKKMAVMRTHMRALQINKEPNEAVLKELGLTKQDVEDMYRLLAIAKYKDRFVIPTSHREQVADLYNEQGSCGLSFAGGPGSCMTIS

SEQ ID NO: 14740 - protein, 187 aa, Oryza sativa
MITPPVAGDTFAGAPPPPSQEEDAPPYGSVVLGGTFDRLHDGHRRLLKASADLARDRIVVGVCTGPMLAKKEYAELIEPVEKRMKAVEDYIKSVKPELVVQVEPIEDPYGPSIIDDKLDAIIVSKETLNGGFAVNRKREEKGLPLLKVEVVDLLSGGAEGEKLSSSALRKLEAEKANQQEGAASKGV

SEQ ID NO: 14741 - protein, 479 aa, Shigella flexneri 2a str. 2457T
MSVPVQHPMYIDGQFVTWRGDAWIDVVNPATEAVISRIPDGQAEDARKAIDAAERAQPEWEALPAIERASWLCKISAGIRERASEISALIVEEGGKIQQLAEVEVAFTADYIDYMAEWARRYEGEIIQSDRPGENILLFKRALGVTTGILPWNFPFFLIARKMAPALLTGNTIVIKPSEFTPNNAIAFAKIVDEIGLPRGVFNLVLGRGETVGQELAGNPKVAMVSMTGSVSAGEKIMATAAKNITKVCLELGGKAPAIVMDDADLELAVKAIVDSRVINSGQVCNCAERVYVQKGIYDQFVNLLGEALQAVQFGNPAERNDIAMGPLINAAALERVEQKVARAVEEGARVALGGKAVEGKGYYYPPTLLLDVRQEMSIMHEETFGPVLPVVAFDTLEDAISMANDSDYGLTSSIYTQNLNVAMKAIKGLKFGETYINRENFEAMQGFHAGWRKSGIGGADGKHGLHEYLQTQVVYLQS

SEQ ID NO: 14742 - protein, 801 aa, Salmonella typhimurium LT2
MGFYLTSRIMKNIKSQGNGEQPAISRRHFIQASSALIALPFVSSPATAQARAVTATENRPAEKVVQTCSTFDCGGKCDIRAHVSDGIVTRISTRPDNALDAQMPVMRACVRGRAYRKFVYHPDRLKYPMKRVGKRGEGKFERISWDEATTLIADNLKSITEKYGPASRYVHVGTAVSGGTFSGDKMARRLLNLTGGYLESYHSVSMGNTAAATPYTYGIAASGSSLDTLLDTKLVILWGHNPTETIFGHTNYFLQKMKQNGTRFIVVDPRYSDTVSSLADQWIPLLPTTDNALMDAMMYVIISENLHDRAFIARYAIGFDEDSMPEGVPANESLVAYLTGAKDGVVKSPEWAEKITHVPAQTIRQLARDYANTKPAALIQGWGPQRHNCGERTARGSTLLATITGNVGIKGGWAAGYGGCANRKFAAGPEMPDNPVKAKISVMNWVQAADDASKVTPDMGLKDADKLDSNIRILFSLAGNYLANQNPDLHQAVRVLEDESKIQFIVASDLFMTPSAKYADLLLPETSFMERWNIGETWGTASYLILSEKLIEPEFERRSDYDWLREVAAKLGIENEFSQGRDEKAWIEHIWEQTRLAMPDENLPDFATLQKTRQHLFKSAPFIAFEDNIRDPENHPFPTPSGKIEIFSKRLYDMQHPEIPALSHYVPAHEGPEDALAKDFPLQLITWKGKNRANSTQYANPWLIEVQQQTLWINPQDAQKRGITHGDMVRIHNSRGICEIPAEVTPRIIPGVVAMQAGAWWQPDENGVDKGGCANVLSSARITALAKGNSHQTMLVEVAKA

SEQ ID NO: 14743 - protein, 367 aa, Arabidopsis thaliana
MGKKKKRATEKVWCYYCDREFDDEKILVQHQKAKHFKCHVCHKKLSTASGMVIHVLQVHKENVTKVPNAKDGRDSTDIEIYGMQGIPPHVLTAHYGEEEDEPPAKVAKVEIPSAPLGGVVPRPYGMVYPPQQVPGAVPARPMYYPGPPMRHPAFVWQMPPPRPQQWYPQNPALSVPPAAHLGYRPQPLFPVQNMGMTPTPTSAPAIQPSPVTGVTPPGIPTSSPAMPVPQPLFPVVNNSIPSQAPPFSAPLPVGGAQQPSHADALGSADAYPPNNSIPGGTNAHSYASGPNTSGPSIGPPPVIANKAPSNQPNEVYLVWDDEAMSMEERRMSLPKYKVHDETSQMNSINAAIDRRISESRLAGRMAF

SEQ ID NO: 14744 - protein, 245 aa, Streptococcus pneumoniae R6
MSDMIGLSLAFERRGIMARTVVGVAANLCPVDAEGKIIHSSVSCRFAEIIRQVGGLPLVIPVGDESVVRDYVEMIDKLILTGGQNVHPQFYGEKKTVESDDYNLVRDEFELALLKEALRQNKPIMAICRGVQLVNVAFGGTLNQEIEGHWQGLPFGTSHSIETVEGSVVAKLFGKESQVNSVHRQSIKDLAPNFRVTAIDSRDQTIEAIESIDEHRIIGLQWHPEFLVNEEDGNLELFEYLLNEL

SEQ ID NO: 14745 - protein, 97 aa, Glycine max
  unsure (1)..(97): unsure at all Xaa locations
GGENGVVPEXVXXLTXQXLRXIGVXGRKASXLHDXGRKYXXGIXSDSAIVXMDDKVAXXMXXMXNGMXSWXXXMFMXFXXXRIXVFXINXIGVRKGV

SEQ ID NO: 14746 - protein, 485 aa, Oryza sativa (japonica cultivar-group)
MSVQEYLEKHLLSRKIEEAVNAAVRAKAPDPVLFISNHMRRAAPAVITSVRARQILDGRGEPAVEVSLHTNKAVHRASAAAADAPEGAAADAVRDAEKRKLLARAVADAVRVINDKVSEALVGMDPQQQSQIDQAIMDLDKAHHKAEIGVNSMLAVSIAACKAGAAEKEVPLYKHIAELVGKSATTLPIPAITVINGGTHAGNSLPIQEIMILPVGAKNFEEAMQMGSETYHHLKDIILEKYGSNSCNIGDDGGFAPNISRQWNYAIQYCWSAVNLMAYINRTTLNHRSRELEQQLECVVCYGNKYDMEFKFAEKSGQGFKTADDLIEIYSQLCSEYPLVSIEQPFDKDDWEHSKKFTTLELCQVVGDDLLMSDPERIKRAVNEYTCNALVLKANQVGTVTEAIEVVRQAKDAHWGVMVSHRSGDTDDSFIADLAVGAAAGQIKAGAPCRGECLSKYNQLLRIEEELGSDGVYAGENWRTTASTS

SEQ ID NO: 14747 - protein, 194 aa, Phyllocladus trichomanoides
DDHGEVISEIRRNDLEPYLGLHYPATDIPQASRFLFMKNKIRMICDACASPVRVIEDKRLPRELSMVKSTLRAPHACHAEYMYNMGSIASLVMAVVVNEREEDDDGQQQIQSVQARRRLWGLVVCHHSSPRFVPFHLRYACEFLMQVFGIQLNKEVELTALGMEKQILRTQTLLCDMLLRGDKPMGIVTRRPNI

SEQ ID NO: 14748 - protein, 405 aa, Escherichia coli CFT073
MSSVDILVPDLPESVADATVATWHKKPGDAVVRDEVLVEIETDKVVLEVPASADGILDAVLEDEGTTVTSRQILGRLREGNSAGKETSAKSEEKASTPAQRQQASLEEQNNDALSPAIRRLLAEHNLDASAIKGTGVGGRLTREDVEKHLAKAPAKESAPAAAAPAAQPTLAARSEKRVPMTRLRKRVAERLLEAKNSTAMLTTFNEVNMKPIMDLRKQYGEAFEKRHGIRLGFMSFYVKAVVEALKRYPEVNASIDGDDVVYHNYFDVSMAVSTPRGLVTPVLRDVDTLGMADIEKKIKELAVKGRDGKLTVEDLTGGNFTITNGGVFGSLMSTPIINPPQSAILGMHAIKDRPMAVNGQVEILPMMYLALSYDHRLIDGRESVGFLVTIKELLEDPTRLLLDV

SEQ ID NO: 14749 - protein, 180 aa, Neurospora crassa
MSFDDMTTNSAYQGDGYSGAGAGPMGDGGGGAAGAVGGANGGGGDGGDGDGGGAANGADAGGGAGGGGGGGPVGVTGFGFGAASVSYGASVSTNRFGSFGAGGAGVGAGVGAGSRFGSLGAGGSYGAGSRFGSYGGGGAGGAGGAGSRFGSFGGAGGSFGGGSFGGGGGGGGGGRGDRGG

SEQ ID NO: 14750 - protein, 187 aa, Pseudotsuga menziesii
DEHGEVVAEIRRSDLEPYLGLHYPATDIPQASRFLFMQNRVRMICDCMATPVKLIQSEELMQPLCLVGSTLRAPHGCHAQYMANMGSVASLVMAVIINGNDDEGGGSGRNSMKLWGLVVCHHTSPRAVPFPLRYACEFLMQAFGLQLNMELQLAAQLTEKHILRTQTLLCDMLLREPQWNVTQSPSI

SEQ ID NO: 14751 - protein, 93 aa, Mirabilis jalapa
VKVSMDGAPYLRKIDLKVYQSYAELLRGLENMFKVRIGSYSERDGYNGSDYVPTYEDKDGDWMLVGDVPWEMFISSCKRLRIMKSSEAKGLGS

SEQ ID NO: 14752 - protein, 192 aa, Triticum aestivum
  unsure (1)..(192): unsure at all Xaa locations
ELHSFVVGLEGSPDLKAAREVADYLGTIHHEFHFTVQDGIDAIEEVIYHDETYDVTTIRASTPMFLMARKIKSLGVKMVLSGEGSDELLGGYLYFHFAPNKEECHRETCRKVKALHQYDCLRANKATSAWGXEVRVPFSTRSHNVRWHGPQWKSPQDLGRSRMGQRKGPHDSTYCQDISTGEEIMTGKWLPI

SEQ ID NO: 14753 - protein, 195 aa, Podocarpus neriifolius
DDHGEVISEIRRNDLEPYLGLHYPATDIPQASRFLFMKNKIRMICDACASPVRVIEDKSLPRELSLVGSTLRAPHECHTQYMYNMNSIASLVMAVVISEREEEERDTDGQQQPQEAVRRLWGLVVCHHTRPRFVSFHLRYACEFLMQVFSIQLNKEVELAAQVREKQILRTQTLLCDMLLRGVAPLGIVTRRPNI

SEQ ID NO: 14754 - protein, 143 aa, Glycine max
  unsure (1)..(143): unsure at all Xaa locations
ALNLALGSLPQFTICNRAGAGGXVXFTVPLFTAGLPTRKTNNDITNIVSNGGRVRCMQVWAPVGKKKHETLSYLPDLDDAQLAKEVEYLPRKGWIPCLESEREHGLVYREHIRLPGYYDGRYWTMWKLLMIGCTDASQVLKEL

SEQ ID NO: 14755 - protein, 190 aa, Huperzia selago
DEHGEVVAEIRRSDLEPYLGLHYPATDIPQASRFLFMKNRVRMICDFSDPPVNVVQDKDLRQPISLAGSTLRAPHGCHSKYMRNMGSIASLVMAVVINDSEETQNERTQKPKGRKLWGLVVCHHTLPRAVPFPLRSACEFLMQVFGLQINMELELAAQFKEKHILRTQTLLCDMLLQDAPIGIVSQSPNI

SEQ ID NO: 14756 - protein, 387 aa, Oryza sativa
MGTRELLVVLAVVVMAAVGAGAQSSSASPAPATSQAPTVRQQTPFGRTMSTVITVSISVFFFLLFFCAYINQCRLAEAGDARAAAAAAAGGGAGGGPSRRGKRGLDPAVVATFPIVPYREVVKHKIGKSVLECAVCLTSFDDGDDLRLLPHCSHAFHPECIDPWLESRVTCPLCRANLEKPPPPPPPLPAAAAASPSPERSPRCQPSPPPPPPPHALVIPVEDEEDDSDEDDRKEEAVELEMLRSERRAARLPRSHSTGHSLVASAAAAAESGDHERFTLRLPQHVRDEVLRSLRLRHAASLVNLSDMSSEGSSRGGRRALGLAFGNGGGSSHGGRRWQAFLARTVSWARGGGDGSVRRGWDGSTRRGKDDAESSRKGATSPAAGRP

SEQ ID NO: 14757 - protein, 197 aa, Oryza sativa
MGRVAASGGGGGGGEMMRYRGVRRRRWGKWVSEIRVPGTRERLWLGSYATAEAAAVAHDAAVCLLRLGGGRRAAAGGGGGLNFPARALAAAAAASSYGGAGGLLSPRSVQRVASDAGMAADAQLVDLRRDHPPAAAAASSSGSGVAGDGARKQGTRGEVSDTYWCRNGEDGSRSRSSGSEELIVYEGLSVDDMEILM

SEQ ID NO: 14758 - protein, 421 aa, Brucella suis 1330
MPVEVVLPALSAGMEDAVIARWLKAEGDAVSKGDLIAEVETDKATMELEAEVDGRIGQLLVKDGARANVNQVIALLLKEGEDASAMAGFAVGSSPVAVAEAETPVAASPVPAAPAVSAPASGEVRHKASPLARRLAAELGVSLDGLAGSGARGRIVRIDVERAAASKPVPVAAAAAPVAAPAEASSKAIPVGIGEYEAVPHTSMRRTIARRLLEAKITVPHFYLNVDCEIDALLALRSQINEKREGSARISVNDFVIKASAAALRRVPDANVIWTDEALLKLKDVDIAVAVATEGGLITPIIRSADQMSLGAISAQMKSLAARARENRLKPEEFQGGGFSISNLGMYGVKSFSAIINPPQSAILAVGAGERRPIERNGELAFATMMSVTLSVDHRAVDGALGAQLLAAFKAGIEDPMSLLV

SEQ ID NO: 14759 - protein, 257 aa, Helicobacter pylori J99
MEILQFIGYGNMAQAILEGSHEILSKRFILEITGRNPEKIAPFLQEKNIQAQIVPYKDAIDIHQKFVFLLFKPYNLKDFNYQGQAKSVLSALAGVNFEALSNAINSLHYLKCMPNIASKFALSSTAVCEKSVAPSISEKALNIIESFGNCVRVGNEEQVDSSVATNGSALAFLSLVASSLKDAGIREGLNAKDSLELVKMSFKGFAKLLEKERPEMIIEQICTPKGATIEGLSVLEKKGVRGAFIKACHESVKKMRL

SEQ ID NO: 14760 - protein, 351 aa, Oceanobacillus iheyensis HTE831
MKAAVWYGKHDIRVENKEEPIIKPGKVKIKVAWTGICGSDLHAYHGAEGVVQVGEPHPVTGEMAPLTLGHEFSGVIHEIGEGVSGLSVGDRVAIEPAIKCGKCENCVRGNYNLCEHNGFVGLQSDGAFAEYAIVDPHMVHKLPDNISFEEATAIEPTAVSFHALKLSNMKAGDTVAVFGVGPIGLTAILCAKAAGASRIYAIDVSNERLEMAQKLGATTVINAIEENAAEKIYAETGSGVTIAFDCAGAEATVNSAIDSLAKGGQLVIVSIIPEPIKVNLLQANLKEINILATIGYRDVYKDVIAMVESGQLDLKPIITKKIGLDDIIEEGFHALTNDKSQAKILVSPTGV

SEQ ID NO: 14761 - protein, 547 aa, Cochliobolus heterostrophus
MQSSNEGPADIIAKVAGVTQGGKREDDGPYFTNNEGIPWPDAEHSKTIGGIPVASDVFLFQKQQTFNRSKNLERMVHPCGSGAFGYFETTKDVTHLTKADFLKTVGEKTPIFIRFSTVTPGREYPDEARNPRGFAIKFYTGEGNYDIVGLNFPVFFCRDPIQGPDVIRSQWRNPKNFLFDYDAIFDLLANTPEGNHAGLMFFSDHGTPQGWRFNHGYGCHTFKWVNKDGQFVYIKYHFVAEHGQKQFTQEQATQMCGEDPDYSKRDLYETIENGEEVVWKAHVQVMSPEEADPDKLGFDPFDVTKVWPRKQFPMQEFGRLVLNKNPENFHRDVEQAAFSPGSMVPGVEDSPDPLLQFRMFFYRDAQYHRIGVNLHQIPVNCPFMAKSFASLNFDGQMRVDANHAGNKPYAPNSFAHKFRPDVAEAPYQVNDNIMSRKSHYWHEGKKNEYDQAKELWSRVMSVQEKQNTIKNTANMLKFVRYPEIQQYNIGTDLSRGIYDLLPKPAFDFSEVEELSHTAHEWYKEKKFRSIDGERLTGFPPSMPVYNY

SEQ ID NO: 14762 - protein, 740 aa, Cochliobolus heterostrophus
MASEILGNVTEKAKDLAGSKSTKMAQLAEVTKDVHDDKWRITSDYGVKQNNTDDWLKVATDDQTGPMLLEDQFAREKIHRFDHERIPERVVHARGSGAFGKFTLFESASDVTSAGILTDTSRETPVFLRFSTVLGSRGSADTVRDVRGFAVKFYTEEGNWDIVGNNIPVFFIQDSMKFPDVIHAGKPEPDCEVPQAQSAHNNFWDFQYMHPEATHMFMWAMSDRTIPRSYRMMQGFGVNTYTLINAKGERHFVKFHFTPELGVHSFVWDEALKIAGQDPDFHRKDLWMAIDSGAYPKWKFGIQVIPEAKEHDFEFDILDATKVWPEELVPVRYIGELELNKNPDEFFTQTEQVAFCTSHIVPGIGFSNDPLLQGRNFSYQDTQLSRLGINWEELPINKPVCPVMNFNRDGAMRHTITKGKVNYWPNRFQTVPPATEKEGGYVEFPEKTAGIKVRMQSKKFREHKSQAELFYNSMSENEKMHMKAAFAFELDHCDDPVVYERLCERLCEIDLELAQSVAEMVGGEQPTKQTRPKHNKTAKGLSQMDFQPEKPTIATRMVAILIADGYDKAAYTGMKAALTAAGALPFTISPRRNKIFADGEDRSGSGVVADHHLEGQRSTMYDSVFVPGGARSIETLSKNGRAVHWVREAFGHLKAIGGTGEAVSFIKQAVDLPGMEFSTSGDVVNSYGVVTATAVQPESFKEAVNMVKEAKDFASAYMYAISQHKNFERETAGLNAMVAY

SEQ ID NO: 14763 - protein, 665 aa, Bacillus anthracis str. A2012
MNKKMEQLKHHVTDNQRKHALTTNQGVKIAEDEFSLKMGLRGPTLMEDFHFREKMTHFDHERIPERIVHARGVGAHGYFQLYESLEAYTKADFLTNPSKKTPVFVRFSTVQGSKGSNDAVRDVRGFATKFYTDEGNYDLVGNNMPVFFIQDAIKFPDFVHAVKPEPHNDIPQGASAHDTFWDFVAHNPESTHMVMWQMSDRAIPRSLRMMEGFGVHTFRLINKEGKAHFVKFHWKPALGVHSLVWDEAQKIAGKNPDFHRQDLYEAIEKGDYPEWELGLQLIPEEDEHTFDFDILDPTKLWPEEEVPVKLVGKMTLNKNVDNFFAETEQVAFHPGHVVPGIDFSNDPLLQGRLFSYTDTQLSRLGGPNFHQTPINQPVCPFHNNQRDGMHQMQIHRGQTSYHPNGLNDNQPATVQAEQGGYEHYQEKIDGHKIRGRSKSFLNFYSQAKLFYNSMSPIEKQHIKEAFCFEVGKCKSDMVKANVIALLNHVDRQLAQEVANIIGAPLPKENHEVNSDAKSPALSMSNTIFKADSKNVAIVLNGDPSVSLLSEWIQAFAQHRINYSIVDNKIYQFNNSIKVTDTYTTTDSSLFDAVLVFSSESAIHPPVLEFAETTFKHFKPIAHVLSNPHALDNSKIKLDGAGIYNLANTSIESFIEGIAQGRFWNR

SEQ ID NO: 14764 - protein, 545 aa, Helicobacter pylori J99
MLTQLKTYPKLLKHYEEIKEVHMRDWFSKDKERASRYFVQLESLSLDYSKNRLNDTTLKLLFELAKDCSLKEKIEAMFKGEKINTTEKRAVLHTALRSLNDAEILLDNMEVLKSVRSVLKRMRAFSDSVRSGKRLGYTNQVITDIVNIGIGGSDLGALMVCTALKRYGHPRLKMHFVSNVDGTQILDVLEKINPASTLFIVASKTFSTQETLTNALTARKWFVERSGDEKHIAKHFVAVSTNKEAVQQFGIDEHNMFEFWDFVGGRYSLWSAIGLSIMIYLGKKNFNALLKGAYLMDEHFRNAPFESNLPVLMGLIGVWYINFFQSKSHLIAPYDQYLRHFPKFIQQLDMESNGKRISKKGEIIPYDTCPVVWGDMGINAQHAFFQLLHQGTHLIPIDFIASLDKKPNAKGHHEILFSNVLAQAQAFMKGKSYEEALGELLSKGLDKDEAKDLAHHRVFFGNRPSNILLLEKISPSNIGALVALYEHKVFVQGVIWDINSFDQWGVELGKELAVPILQELEGHKSNAYFDSSTRHLIELYKNYNQ

SEQ ID NO: 14765 - protein, 372 aa, Nicotiana sp.
MNSTYTQFVASKRMGICDPIHQIGMWGDFKNSSFPDTSATLILEVENCLENEMPIMEKRPHNETEELSHGTVGTSNRYEPEARKPIDKVLRRLAQNREAARKSRLRKKAYVQQLENSKLKLLQLEQELERTRQQGQYAGVGLDESQIGYTGTANSGIVAFEMEYGHWVEEQDRQTDELRSALNSQVGEIELQLLVEGCLNHYFDLFRMKAAAAHADVLFLMTGTWKTSAERFFLWIAGFRPSELLKVLTPNVEPLTEQQLRDVCNLMQSCQQAEDALSQGMVKLHQILAEAVAAGTLGDGIILPKMAATIENLEALVRFVNQADHLRKETLLQMSCILTPQQSAQGLLALGEYFKRLRALSSLWTSRTSEPA

SEQ ID NO: 14766 - protein, 256 aa, Pseudomonas syringae pv. syringae B728a
MNDQRKGSDAEPTTHFGYKNVPESQKAEKVAEVFHSVAAKYDLMNDLLSGGMHRLWKRFAIELSGVRTGNRVLDIAGGTGDLTRKFSNLVGPTGQVVLADINASMLKVGRDRLLDLGVSGNVEFVQADAEKLPFPDNHFDCVTIAFGLRNVTHKEDALRSMLRVLKPGGRLLVLEFSKPTNKLMSKAYDAYSFAFMPLMGKLVTNDSESYRYLAESIRMHPNQETLKSMMVEAGFDRVTYHNMTAGVVALHRGIKP

SEQ ID NO: 14767 - protein, 407 aa, Yersinia pestis biovar Medievalis str. 91001
MSSVDINVPDLPESVADGSVATWHKKPGDSVKRDEVLVEIETDKVILEVPASQDGILDAILEDEGATVTSRQVLGRIRPSDSSGKPTEEKSQSTESTPAQRQTASLEEESNETLSPAIRRLIAEHDLDATAIKGSGVGGRITREDVDSHLASRKSASAVVADAKAVAAAAPVLAGRSEKRVPMSRLRKRVAERLLEAKNSTAMLTTFNEINMQPIMDLRKQYGEAFEKRHGVRLGFMSFYIKAVVEALKRYPEVNASIDGEDVVYHNYFDVSIAVSTPRGLVTPVLRDVDTLSMADIEKKIKELAVKGRDGKLKVEELTGGNFTITNGGVFGSLMSTPIINPPQSAILGMHAIKDRPMAVNGQVVILPMMYLALSYDHRLIDGRESVGYLVTVKEMLEDPARLLLDV

SEQ ID NO: 14768 - protein, 197 aa, Triticum aestivum
  unsure (1)..(197): unsure at all Xaa locations
KFIMGLQFHPEXRMRKEGSDEFDYPGCAKAYQEFVRAVVVRKAKLAAAHAHVHVQSAVTTPAKLNHEMEKQRKVIGRSVSLAKNMYMFGNNNSAQHPAQHRDGDLDGGAEFLESNTALSVQQEKWLKQMGATVRNASGYMNRLKVSEEXREAAARALMAKMSVAQLASLAAFYRAMGNVCSEVLDAKLQPPSTTLHE

SEQ ID NO: 14769 - protein, 190 aa, Huperzia selago
DEHGEVVAEIRRSDLEPYLGLHYPATDIPQASRFLFMKNRVRMIVDCTAAPVKVIQDKELRQPLSLAGSTLRAPHGCHSQYMSNMGSTASLAMAVIINDNDEERSSAVSVQKGRKLWGLVVCHHSTPRAVPFPLRSACEFLMQAFGLQLNMEVELSAQVKEKHILRTQTPLCDMLLRDAPIGIVSQSPNI

SEQ ID NO: 14770 - protein, 834 aa, Pseudomonas sp. G-179
MTAELTRRDVLKAQAAAIAASTAGIAMPAAAQSVPGGVAALEIKWSKAPCRFCGTGCGVMVGVKENHVVATHGDMEAEVNRGLNCVKGYFLSKIMYGKDRLTTPLLRKRNGVFDKEGEFEPVTWEEAFDIMAEKAKKTLKEKGPTALGMFGSGQWTIFEGYAATKLMRAGFRSNNLDPNARHCMASAAYGFMRTFGMDEPMGCYDDFEHADAFVLWGSNMAEMHPILWTRLADRRLGHEHVKVSVLSTFTHRSMDLADIPLVFKPGTDLAILNYIANHIIQTGRVNQEFIDKNTKFMQATTDIGYGLRAEHPLEVKATGAAKAAEMTPIDFEAFKKHVSEYTLEKVAELAGVDKGFLEQLAELYADPKVKVMSLWTMGFNQHVRGVWANQMVYNIHLLTGKISEPGNSPFSLTGQPSACGTAREVGTFAHRLPADMTVTNPEHRKHAEELWNIPHGIIPEKPGYHAVQQDRMLHDGKLNFYWVQVNNNMQAAANNSNEAYIGYRNPDNFIVVSDAYPTVTAMTADLILPAAMWVEKEGAYGNAERRTHVWHQLVNAPGEARSDLWQLVEFSKRFTTDEVWPQDILDQNPEYKGKTLYDVLFQNGNVDKFPVSEISSDYENREAKAFGFYLQKGLFEEYASFGRGHGHDLGPYDLYHQVRGLRWPVVNNQETKWRYREGYDPYVKEGEGVKFYGQNDGRAVILAAPYEPPAESPDDEFGFWLVTGRVLEHWHSGSMTMRVPELYKAFPGARCFMNGDDARRLGINQGGQVKIQSRRGEIISRVDIRGRNRMPHGVIFVPWFDASQLINKVTLDATDPISKQTDFKKCAVKILPVA

SEQ ID NO: 14771 - protein, 489 aa, Geobacter sulfurreducens PCA
MKWKRSIITLALAAAAFMAPAAVLAEEAKAPAVAATQAAVTSAQAAPAAVAPAEAAPAAAEAPKVAEPVLNTGNTAWMLVCAALVLLMLPGLALFYGGMVRSKNVLSTLMHSFVAMGIVGVQWAVIGYSLAFGPDMGGMGLVGDFSRALLNGMISFKDGAPVYTLWQNVTSEPNAIPEYVFAMFQGMFAMITVALISGAMAERVKFSAYCVFVLLWTTLVYDPLAHWVWMVDGWLFKKGALDFAGGTVVHLSSGISALAFLVFLGKRHGFPHERMAPHNLSMTMLGVGLLWFGWFGFNAGSAVVGVNNVDAAGGLAGLAFATTTIAPAAGGLAWMIAEWIHAGRPSALGFGSGVVAGLVGITPAAGFVQPGAAIIIGLGAGVICYLGVLMKAKLKYDDSLDAFGVHGVGGTFGALVTGVFATVGATGLLSGNVSQFITQVIGVVSAGAYAFIVTLVIAFILDKTIGLRVEKEDEIMGLDQTQHSESAYN

SEQ ID NO: 14772 - protein, 190 aa, Marattia laevis
DDHGEVVAEIRRSNLEPYLGLHYPATDIPQASRFLFMKNRVRMICDCSAPPVKVIQDKKLGQPLSLTSSTLRAPHGCHSLYMGNMGSIASLVMAVVINDNEDDIIKNGHAYQGRRLWGMVVCHHTSPRFVPFPVRSACEFLMQVFGLQLNMEVGMAAQLREKHILKTQTVLCDMLLRDAPIGIVSKSPNI

SEQ ID NO: 14773 - protein, 377 aa, Geobacter sulfurreducens PCA
MNIATQAAQIGLDWDTRTGAVTVPIYQTATFRHPGLGQSTGYDYSRSGNPTRQALEEGIARLDGGARGFAYASGMAAIANLLLLFKSGDHLVVTEDLYGGTCRLFDQILVQYGLSFTYVDTSDPEAVRDAIRPETRALFVESLTNPLLKVADIAALSTLCRERGLLCIVDNTFLTPYLLRPLDLGADITVYSGTKYLSGHNDTVSGLVVVKEPALAERVYFLQNSVGAVLGPQDAWLTIRGMKTLSVRLDRQQENAGRIAEWLARHPRVPRVFYPGLPGHPGHELLARQARGFGAMIAFEVDDKALVERLLLKTELISFAESLGGVETLITFPQVQTHADIPPEVRERLGINDVLLRLSVGIEDADDLIADLSRAFA

SEQ ID NO: 14774 - protein, 378 aa, Geobacter sulfurreducens PCA
MKFGTRIIHTGREIDPTTGALSVPIYQTSTYRQESVDHFGKYDYARSDNPTREALEETVAQLENGTRGFAFASGMAAISSTLLLFSPGDHLVVCEDVYGGTFRALTQLFSRLGVESTFVDATDTAAIEAAFRPNTKGLYLETPSNPLMKITDLAAAARLARERGAITLVDNTFMTPYLQRPLDLGCDVVLHSGTKFLNGHSDVVCGFAVVRDPELGQRIRFIQNAFGAILGPQDSWLVLRGIKTLRVRMEESQAGAVKIANWLAGEKRVSRVFYPGLPDHPGHDIHGRQSSGPGAVLSFTLDTVETTRRLLEGMRLAAFAVSLGGVESIISYPARMSHAAMPPAERAARGIGDTLVRLSVGLEDADDLLAEMDRLING

SEQ ID NO: 14775 - protein, 190 aa, Marattia laevis
DEHGEVVAEIRRSDLEPYLGLHYPATDIPQASRFLFMKNKVRMICDCTIPPVGVIQHKGLRQPLSLAGSTLRAPHGCHTQYMENMGSIASLVMAVLVNDNDEESSKSSYHTKYRKLWGLIVCHHTKPRAVPFPLRSACEFLMQVFGLQLNMEVELAAQMREKHVLRTQTLLCDMLLRDAPIGIVSRSPNI

SEQ ID NO: 14776 - protein, 312 aa, Escherichia coli
MKVAVLGAAGGIGQALALLLKTQLPSGSELSLYDIAPVTPGVAVDLSHIPTAVKIKGFSGEDATPALEGADVVLISAGVARKPGMDRSDLFNVNAGIVKNLVQQVAKTCPKACIGIITNPVNTTVAIAAEVLKKAGVYDKNKLFGVTTLDIICSNTFVAELKGKQPGEVEVPVIGGHSGVTILPLLSQVPGVSFTEQEVADLTKRIQNAGTEVVEAKAGGGSATLSMGQAAARFGLSLVRALQGEQGVVECAYVEGDGQYARFFSQPLLLGKNGVEERKSIGTLSAFEQNALEGMLDTLKKDIALGQEFVNK

SEQ ID NO: 14777 - protein, 634 aa, Pirellula sp. 1
MCGFTGGLWQRDDQAINADLLSRMTNEIAHRGPDDSQIWMDPEHRDATGRPMGVGLGFRRLSIIDVEGARQPLSNEDGRVRMVFNGEIYNYEVLRKRLQGAGHQFATQGDGESIVHLYEDIGTDCFSSLNGMFAIAIWDARRNRIVLARDRIGQKPLYYSYKNGRLVFASELKALRLVPGVCEEVDPNAIDEFLTYQYIPHPGTIFKGVHKLPPGHFAVLDERGLRVERYWNFDPSIERPLGREEAIEKVRDLLADSVRLRMRSDVPLGSFLSGGIDSSLITALAGDHTDTPLRTFSIGFPVADFDETRYAAQVAEHLQTDHTRFEVQPSGIDILEKLVWHYDEPYGDSSAVPTWYLSKLTRESVKVALSGDGGDELFAGYERYRALWMSQKIARLFPLNKFPGIGLIQRLPDSNRRRSVVRRAKRFLEAIDQPVVRRYMNWLQIFPESMRASMYNDEFVQALPGHDPVDFLESVWARSEGRDVVTRASTSDIQSYLPCDLCTKVDIASMAHGLEVRQPMLDYRFVELAASMPVEHKFRGRRGKLILQDAFGDRIPSSIFTRPKMGFGIPIGQWFREDFKPLVHDTMLASDARINAYFRPEAIADLVRSHETGEQNHGYRLWNLLVLETWLRQL

SEQ ID NO: 14778 - protein, 365 aa, Synechococcus sp. PCC 7942
MTVVIYYMTVLCKAFDCFNSSAVENTMIRIRNRWFRWLAIALASLVASIGIATVGFAATGVTPDQVLSAIEGTFGVNVGQRRNHIKGTCAVGNFVATTEAKTYSRSPLFSGQSIPVVARFSLAGGNPKAPDTAKNPRGLGLQFQLPNNRFLNMALLNTPVFGVASPEGFYENILAIRPDPTTGKPDPEKVKAFREKYPENKAQAAFLASNNPPTSYANTSYFGLHAFKFINQTNQTRLVRWQFVPQDGEKRLTDAELQAAPANFLEQKLIERTQDSPVKWDFWITLGQPGDAEDNPTIAWPSDRQQVKVGTLTLTAASPQPGAACEGINYDPLVLSDGIEPTNDPVLQFRSGVYALSYSKRTRGL

SEQ ID NO: 14779 - protein, 633 aa, Lactobacillus plantarum WCFS1
MCGFAGCLTDRTKADNAAYDQTIHEMTKMIVHRGPDDDGYFADDNITMGFRRLSIIDLAGGHQPLSYDNERYWMTFNGEIYNYVELREQLKQEGYEFKTSSDSEVILAMYAKYHADATKYLRGMFAFVIWDKQEKTLFAARDQFGIKPFYYAISGDDFYYASESKAIYKILKDKTFDKNALQDYMTFQFVPEPETLTKEIKMLAPGCSLTKKLGSAPRIDRYYHREFHPVERSEDEYAQKIKDALIDSVKIHMRSDVPVGSFLSGGIDSSIIVAIAKNFNPNLETISVGFEREGYSELDVAQETAEKLGVKNYSMTITPEAFMKAFPHFVWSMDDPLADPAAVPQYFLAKEAVKHVKVCLTGEGADELFGGYTIYHEPESLKPFRYTKPINGALKRIALMMPEGMRGRSFLLRGTTPLENRYVGNAFIFGEQEKQAFFKNYNQNHPFQSITQPLYDESVDYDPISRMQFIDMHTWLNGDLLHNADRTTMAHSLELRTPFVDREVYNLAAEIPADLRISHGTTKYILRKAVEDIVPAHVLHRKKLGFPVPIRFWLKDEMYDWAKQIINDSQTDQYFNKDYFLKLLDDHKAGVRDNSRKLWTVLTFMMWHRLYVESDHLMDSPEANAVAEKVEEF

SEQ ID NO: 14780 - protein, 730 aa, Cochliobolus heterostrophus
MVRSNVLTAIAAICHVAHAVCPYMDDQPLARREGATAMSTDDFMKQYEIDDSKAYLTSPVGGPQPDQESLSAGERGPSLLEDQILRRKIMSFDHERVPERAVHARGAGAHGTFKSYGDWSNITGASFLANSEKETPVFIRFSTVAGSRGSADTARDVHGFAVRFYTDEGNFDIVGNNIPVFFIQDAIKFPDLIHAVKPKPDREIPQAATAHDSAWDFFSQQPSTMHTLLWAMSGHGTIRSYRHTDGWGVHTFRFVRDDGKSKLVKFRFRSLQGKASLLWEEAQTTAGMNADMHRQDLFESIENGYYPEWIFEAQIMEESDQLRFGFDVLDPTKIVPEDIVPFTPLGKLTLNRNPRNYFAETEQIMFQPGHLVRGIDVSDDPLLQGRMFSYLDTQLNRNGGPNFEQIPINQPRVPVHNNERDGAGQMYIPLNTAAYSPNTLNGGYPKQATQAEGRGFFTAPSRSVSGNLVRTVSSTFADNWSQPRLFYNSLSAVEQQFVINAIRFETSQLQSEVVKQNVLIQLNRISHDIATRVATALGMTAPAPDDKFYHNNKTIGVNPAGEPLLKIEGLKVGYLTSAGSTGDKGKALKAALKDEKVSLTVVAEHLGAGIDQTYSATSAVNFDAIIVDGSASALFAPAGSLANSNSTAAKGRSTLYPAGRPLEILQTGYQFGKPVGVLGASNSTLSAAGVVAGTPGVYSFDSASDMAAVVTKITEGLRTFKFLDRYPLDN

SEQ ID NO: 14781 - protein, 380 aa, Oenococcus oeni PSU-1
MLNYRDLMVFLFATKEGIKIFKESRELKMKAAVVREKNDGFVDLIDDWKPRELGFGDALVDVEYCGLCHTDLHCASGDFGDPNTLGERNGDFRRVAGHEGVGIVSKLGEGADQYLKVGDRVSIAWFYDACGVCDYCVSGNETFCRKVRNSGYTVDGAMAQQVVVDAKYAVKVPEGLDPAQASSITCAGVTMYKSLKVGETKPGQWVSVHGAGGLGNLAVQYAHNVFGAHVVAIDGNPDKLEAAKEGGAEVLINRKQPGIDVAAEVQKDTGGVHNAQVTAVNDAAFKQAVDSLRPMGKLVAVALPQGDMELNIVKTVLDGIEVRGSLVGTRADLKEAFQFGAEGKVTPIVEKVDLNDINDVIEEMKEGTITGRKVFDFTHM

SEQ ID NO: 14782 - protein, 299 aa, Streptococcus pneumoniae R6
MTSKVRKAVIPAAGLGTRFLPATKALAKEMLPIVDKPTIQFIVEEALKSGIEDILVVTGKSKRSIEDHFDSNFELEYNLKEKGKTDLLKLVDETTGMRLHFIRQTHPRGLGDAVLQAKAFVGNEPFVVMLGDDLMDITDEKAVPLTKQLMDDYKRTHASTIAVMPVPHDEVSAYGVIAPQGEGKDGLYSVETFVEKPAPEDAPSDLAIIGRYLLTPEIFQILENQAPGAGNEIQLTDAIDTLNKTQRVFAREFTGARYDVGDKFGFMKTSIDYALKHPQVKDDLKNYLIQLGKELTEKE

SEQ ID NO: 14783 - protein, 151 aa, Sinorhizobium meliloti 1021
MIRLLIALFLLLASVAPGFAVNPDEVLADPALEARARAISAQLRCMVCQNQSIDDSNAELAKDLRLLVRERLKNGDSDEAVISYVVSRYGEFVLLNPRLEAKTLVLWGMPAILLVAGIITLVVAARRRGARVPGAPLSDEEKERLDRLLRP

SEQ ID NO: 14784 - protein, 350 aa, Pseudomonas syringae pv. tomato str. DC3000
MYTAIGYAAQSATAPLAPMTFERRAPRADDVAIEILFCGVCHSDIHQARNEWGIAVYPLMPGHEIVGRVTATGANATKYKVGDLVGVGCMVDSCRECSACKSDLEQYCLEGPTMTYATPDRVDGSNTMGGYSNSIVVAEHFVVRVPEKLDPAAAAPILCAGITTYSPLKHYGVKAGDKVGILGMGGLGHMGIKFAKAMGAEVTLFTRSAAKAQEARRQGADHVIVSTDAEQMKAAAGHFDFLLDTIPVQHDLNPYLETLRFDGVHILVGLIEPIEPPVHAAHLVMSRRVLAGSLIGGIAETQEVLDFCAENGITCDIEMLDIRNINEAYERMLAGDVKYRFVIDMATLQA

SEQ ID NO: 14785 - protein, 327 aa, Thauera selenatis
MSQRQLAYVFDLNKCIGCHTCTMACKQLWTNRDGREYMYWNNVESRPGKGYPKNWEQKGGGFDKDGKLKTNGIIPIRADYGGTWNYNLLETLVEGKSNQVVPDEKPTWGPNWDEDEGKGEFPNNHYFYLPRICNHCSNPACLAACPTKAIYKREEDGLVVVDQSRCKGYRYCVKACPYGKMYFNLQKGTSEKCIGCYPRVEKGEAPACVKQCSGRIRFWGYRDDKDGPIYKLVDQWKVALPLHAEYGTEPNVFYVPPMNTTPPPFEEDGRLGDKPRIPIEDLEALFGPGVKQALATLGGEMAKRRKAQASELTDILIGYTNKDRYGI

SEQ ID NO: 14786 - protein, 385 aa, Dechloromonas aromatica RCB
MDTPIRIDSRFPNMGTTIFTVMSRLAAECGAVNLSQGFPDFQAEPALFDAMHRHMLAGRNQYAPMAGLPELRQAIADKVAALYGTRFDVESEVTVTAGATQAIFTAIAAFVRPGDEVLVFEPVYDSYVPAIETVGGTAVYAQLKFPDYTPDWAQVAGLISPKTRMIIVNSPHNPTGSLLTAADLDKLAELVRGTDIVILSDEVYEHILFDGEQHASLCGHPELAVRTIVVSSFGKTYHITGWKIGYVVGPAALMAEFRKVHQFNVFTVHAPSQLAIAEYMQDASRHLGLAAFYQEKRDFFRQLMAATPFELLPCRGTYFQLARYDRISDLPDRAFAEWMAREVGVAVIPVSVFNADGRDDKVVRFCFAKREETLRAAAERLCKAL

SEQ ID NO: 14787 - protein, 320 aa, ASPERGILLUS NIDULANS FGSC A4
MPLSLLLKASPFIDELALYDVVNTPGVAADLSHISSVAKISGYLPKEDGLKNALTGTDIVVIPAGIPRKPGMTRDDLFKINAGIVRDLVKGIAEYSPKAFILIISNPVNSTVPIAAEILKAAGVFDPARLFGVTTLDVVRAETFTQEFSGQKDPSAVTVPVVGGHSGETIVPLFSKVSPAFQIPADKYDALVNRVQFGGDEVVKAKDGAGSATLSMAFAGFRSGILFAESVIKASKGQSGIVEPSYVYLPGVPGGADIAKATGVNFFSTPVELGPNGVQKAINILDGITDAEKKLLDTAIKGLKGNIDKGVEFAQSPPPK

SEQ ID NO: 14788 - protein, 189 aa, Osmunda regalis
DEHGEVVAEIRRSDLEPYIGLHYPATDIPQASRFLFMKNRVRMICDCTLPPVKVIQDRNLAQPLSSTGSTLRAPHGCHAQYMGNMNSIASLVMAVIVNDTAEVDANGRAYQGTRLWGLVVCRHTSPRAVPFPLRSACEFLMQVFGLQLNMEVGMAAQVREKHILRTQTVLCDMLLRDAPIGIVSQSPNV

SEQ ID NO: 14789 - protein, 446 aa, Zea mays
MASRVASGLLRRRAGATLGLLRSYAHVRSYNSQLSALVSATSECSNLPRRCYYLPNPSPYQVWSRSFASDNGDKFEAVVPFMGESVTDGTLANFLKKPGDRVEADEPIAQIETDKVTIDVASPEAGVIEKLIASEGDTVTPGTKVAIISKSAQPAETHVAPSEEATSKESSPPKVEDKPKVEEKAPKVDPPKMQAPKPTAPSKTSPSEPQLPPKERERRVPMPRLRKRIANRLKDSQNTFAMLSTFNEVDMTNLMKLRSDYKDEFVTKHGVKLGLMSCFVKAAVSALQNQPIVNAVIDGDDIIYRDYVDISVAVGTSKGLVVPVIRDADTMNFADIEKGINNLAKKATEGALSIDDMAGGTFTISNGGVYGSLLSTPIINPPQSSILGMHSIVQRPVVVNGDILARPMMYLALTYDHRLIDGREAVFFLRRIKDVVEDPRRLLLDI

SEQ ID NO: 14790 - protein, 188 aa, Osmunda regalis
DEHGEVVAETRRSDLEPFIGFHYPATDIPQASRFLFMKNKVRMICDCTMPPVKVIQDRNLAQSLSLTGSTLRAPHGCHAQYMGNMGSIASLVMAVIIYDGEVDANGRAYQAMKLWGMVVCHHTSARAVPFPLRSACEFLMQVFGLQLNMEVAMAAHVRENHILRTQTILCDMFLRDALVGVVSQSPNV

SEQ ID NO: 14791 - protein, 294 aa, Allium cepa
MDQYEKVEKIGEGTYGVVYKARDRLTNETIALKKIRLEQEDEGVPSTAIREISLLKEMQHANIVRLQDVVHSEKRIYLVFEYLDLDLKKHMDSCPDFAKDSRLAKTFLYQLLRGIAYCHSHRVLHRDLKPQNLLIDRRTNSLKLADFGLARAFGIPVRTFTHEVVTLWYRAPEILLGARQYSTPVDIWSVGCIFAEMVNQRPLFPGDSEIDELFKIFRIMGTPNEDTWPGVTSLPDFKSAFPKWPAKDLATIVPKLDSAGIDLLYKMLHLEPSKRITARKALEHEYFRDLGTIP

SEQ ID NO: 14792 - protein, 104 aa, Glycine max
  unsure (1)..(104): unsure at all Xaa locations
VTGNAKKLEEVRAILGNSIPFQSLKLDLPELQGEPEDISKEKARMAAVQVNGPVLVEDTCLCFNALKGLPGPYIKWFLQKLGHEGLNNLLMAYDDKXAYALCVF

SEQ ID NO: 14793 - protein, 439 aa, Streptococcus agalactiae 2603V/R
MKKYDVIVLGFGKAGKTLAAKLATQGKSVAMVEEDDKMYGGTCINIGCIPTKTLLVSASKNHDFQEAMTTRNEVTSRLRAKNFAMLDNKDTVDVYNAKARFISNKVVELTGGADKQELTADVIIINTGAKSVQLPIPGLADSQHVYDSTAIQELAHLPKRLGIIGGGNIGLEFATLYSELGSKVTVIDSQSRIFAREEEELSEMAQDYLEEMGISFKLSADIKSVQNEDEDVVISFEDEKLSFDAVLYATGRKPNTEGLALENTDIKLTERGAIAVDEYCQTSVENIFAVGDVNGGPQFTYISLDDSRIVLNYLNCDKDYSLKNRGAVPTSTFTNPPLATVGLDEKTAKEKGYQVKSNSLLVSAMPRAHVNNDLRGIFKVVVDTETNLILGARLFGAESHELINIITMAMDNKIPYTYFQKQIFTHPTMVENFNDLFNF

SEQ ID NO: 14794 - protein, 187 aa, Osmunda regalis
DEHGEVVAEMRRSDLEPYLGLHYPATDIPQASRFLFMKNRIRMICDCCASPIQVIQDEKLRQPLSLAGSTLRAPHGCHSQYMVSMGSVASLVMAVIVNNNDEEPSSRSYQTKLWGLVVCHHTTPRAVPFPLRSACEFLMQVFGLQLNMEVKLSAQMREKHILRTQTLLCDMLLRDAPIGIVSQSPNI

SEQ ID NO: 14795 - protein, 190 aa, Polypodium vulgare
DEHGEVVAEIRKSDLEPYLGLHYPATDIPQASRFLFMKNRVRMISDCRAIPVKVIQDRGLRQPLGLAGSTLRAPHGCHSQYMANMGSAASLGMAVTVNDNEGESSSRDHQPKQRKLWGLVVCHHTTPRAVSFPLRSACEFLMQVFGLQLNMEVELAAQMREKHILRTQTLLCDMLLRDAPIGIVSESPNI

SEQ ID NO: 14796 - protein, 542 aa, Rhizobium tropici
MIKTVPTTPYADQKPGTSGLRKKVPVFQQPNYAENFIQSIFDSLEGYQGKCLVIGGDGRYYNREVIQKAIKMAAANGFGKVMVGKGGILSTPAASNIIRKYKAFGGIILSASHNPGGPTEDFGIKYNISNGGPAPEKITDAIYERSKVIDSYKIADFPDINLDRIAREDVGGMIVSVIDPVEDYAALMEELFDFGAIRNLISLGFRICFDAMSAVTGPYAKEIFEIRLGAPDGSVRNFLPLPDFGGHHPDPNLVYCKELYDDMMSDDAPDFGAASDGDGDRNLIIGKGIYVTPSDSLAILAANANLAPGYSHGIAGIARSMPTSGAADRVAEKRGVGIYETPTGWKFFGNLLDAGMATICGEESSGTGSNHVREKDGLWAVLLWLNILAVRGESVIDIVTQHWATYGRNYYSRHDYEGVDTDAANGLIAALREKLPTLPGTKIGDLTVSAADDFAYHDPVDKSVSQHQGIRILFEGGSRVVFRLSGTGTTGATLRVYIERYEPDPTRHNIETQEALADLITAAQDIADIKGRTGRDAPTVIT

SEQ ID NO: 14797 - protein, 486 aa, Dechloromonas aromatica RCB
MLQDKILNFINGEFVATNKWFENRTPISNAVIGQVAEAGKAEVDAAVAAAQAALKGPWGKMTLAKRVELLEALVAEINNRFDEFLEAECADTGKPKSLASHIDIPRGAANFKVFADVIKNVPGEFFDMATPDGGTAINYTFRSPVGVVGVICPWNLPLLLMTWKVGPALACGNTVVVKPSEETPRTAALLGEVMNKVGIPKGVYNVVHGFGPNSAGEFLTTHPDVDAITFTGETRTGEIINRAASVGSRPVSLEMGGKNAAIVFADCDFDAAIEGTLRSAFANCGQVCLGTERVYVERPIFEKFVAAMKAGAEKLKIGVPEDPATGMGPLISKEHQNKVLSYFQIAKEAGATIVTGGGVPDMPGELKDGCWVQPTIWTGLPETARVIKEEIFGPCCHIAPFDTEEEVLEKANDNIYGLATAIWTKDVSRANRVAQQMEVGIAWVNSWFLRDLRTAFGGAKQSGIGREGGVHSLEFYTELKNICIKL

SEQ ID NO: 14798 - protein, 303 aa, Zea mays
MRALLADGGMALAMAPEVNESSGGAALSQGLLWWASECHGVLYSLAVMLPSLAFVGFLAWQARRSFRRISYGRSHVVVVAYYALLWVVAVLNLLWCFLQAWQCMPDRAFSWNVLSLFTKSGMLFLEVSLIAFLLQGNDASGFESLARTFVISGAVVAADALLKTIYVFGFGVPLFIDADQGTGGKWGLWILHKLVLTGVYGLIVFMHHSRWRNRLPAKPAYYNYVCAMLLLNGVSLFGCFLVASGAGFGLWLYNLTIVCYHSLYLPLLYVTFLADFFQEEDMLLESVYYSEMKDAGFFDADWD

SEQ ID NO: 14799 - protein, 387 aa, Photorhabdus luminescens subsp. laumondii TTO1
MSVIKMTDLDLAGKRILIRADLNVPVKDGKVTSDARIRASLPTIEAALKQGAKVMITSHLGRPTEGEYSEEFSLKPVVDYLEEKLSSPVRLEKEYLEGVDVAEGELVVLENVRFNKGEKKDDETLAKKYASLCDIYVMDAFGTAHRAQASTHGVAKFAPVACAGPLLSAELEALGKALDNPARPMVAIVGGSKVSTKLTVLDTLSKIADQLIVGGGIANTFVAAEGHNVGRSLYEDDLLPEAKKLLISCDIPVPTDVRVATEFSETAEAILKSTHDIKDDEQILDLGDESAQRLADILKNAKTILWNGPVGVFEFPNFRQGTEIVARAIADSDAFSIAGGGDTLAAIDLFGIADKISYISTGGGAFLEFVEGKKLPAVVMLEERAKQ

SEQ ID NO: 14800 - protein, 377 aa, Methanococcoides burtonii DSM 6242
MQKVPPSGIRKFFDLVSDSEDVITLGVGEPDYVTPWHIREACIHSIEYGETSYTSNYGLMELREELSKHYTRRHNVYYEPETEILVTAGVSEGLDLAIRAIVNPGDEIIVVQPSYVAYVPAIIFAGGVPVTLGARPENDFKITADEIRAAITNKTKAVIINYPNNPTGATMDKSDLEAIADVIVEHNILMISDEVYERLTYEGTHTCFSSLEGMRDRTILLNGFSKAYAMTGFRMAYALAPKEIIDAMMLIHQYTMICAPITAQIGAIEALRNGEEEVEKMAREYNRRRKLIVGGLNKIGLDCFNPRGAFYAFPAISSTGLSADEFAERLLNEYKVVTIPGNIFGDTGDGFLRCAYAASREDIKEALDRIGNFVDGL

SEQ ID NO: 14801 - protein, 78 aa, Arabidopsis thaliana
MGFWTLLKGLLLFANALAILNEDRFLVPRGWTLGELHQTDRRNSPKGQIIGLIHACQYMRLPLMLINTAVIVLKLISG

SEQ ID NO: 14802 - protein, 474 aa, Escherichia coli O157:H7 EDL933
MQHKLLINGELVSGEGEKQPVYNPATGDVLLEIAEASAEQVDAAVRAADAAFAEWGQTTPKVRAECLLKLADVIEENGQVFAELESRNCGKPLHSAFNDEIPAIVDVFRFFAGAARCLNGLAAGEYLEGHTSMIRRDPLGVVASIAPWNYPLMMAAWKLAPALAAGNCVVLKPSEITPLTALKLAELAKDIFPAGVINVLFGRGKTVGDPLTGHPKVRMVSLTGSIATGEHIISHTAPSIKRTHMELGGKAPVIVFDDADIEAVVEGVRTFGYYNAGQDCTVACRIYAQKGIYDTLVEKLGAAVATLKSGAPDDESTELGPLSSLAHLERVSKAVEEAKATGHIKVITGGEKRKGNGYYYAPTLLAGALQDDAIVQKEVFGPVVSVTLFDNEEQVVNWANDSQYGLASSVWTKDVGRAHRVSARLQYGCTWVNTHFMLVSEMPHGGQKLSGYGKDMSLYGLEDYTVVRHVMVKH

SEQ ID NO: 14803 - protein, 553 aa, Pichia stipitis
MSSQDIPSGVQTPSNASFLEKDEDKIEEVPQNHDATLVALESKGISEYLLICFFCLLVAFGGFVFGFDTGTISGFVNMSDFLERFGQTRADGTHYLSNVRVGLLVSIFNIGCAIGGIFLSKIGDVYGRRVGIMASMVIYVVGIIVQIASQHAWYQVMIGRAITGLAVGTVSVLSPLFIGESSPKHLRGTLVYCFQLCITLGIFIGYCVTYGTKRLSDSRQWRVPLGLCFLWAIFLVVGMLAMPESPRYLVEKKRIEDAKKSVARSNKLSPEDPSVYTEIQLIQAGIDREAIAGSASWTELITGKPAIFRRVVMGIIMQSLQQLTGVNYFFYYGTTIFQAVGLKDSFQTSIILGVVNFAATFIGIWAIERFGRRSCLLVGSAGMFVCFIIYSTIGSFHLYKDGEYNNDNTYKPSGNALIFITCLFIVFFASTWAGGVYTIISESYPLRIRSKAMAIATAANWVFGFLISFFTPFIVSAIHFKFGYVFSGCLLFSFFYVYFFVVETKGLSLEDVDELYASNVVPWKSSKWVPPSTAAMATEAGYAADEKPVDEHV

SEQ ID NO: 14804 - protein, 256 aa, GIBBERELLA ZEAE PH-1
MPGVGFGTFANEGAKGETYKAVIAALKTGYRHLDCAWFYLNEGEVGQAVRDFLAEDNGVKREDLFICTKVWNHLHEPEEVKWSFENSLKNFGLDYIDLFLVHWPIAAEKGDDYQPKIGPDGKYVIKKDLTENPEPTWRAMEEIYASGKARAIGVSNWTIDGLKQLMAFAKVKPAVNQIEIHPFLPNEDLVKFCLENDILPAAYSPLGSQNQVPTTGETVRSNKTLNEVADRSGNTLAQVLIAWGLRRGYAPVRRGL

SEQ ID NO: 14805 - protein, 201 aa, Glycine max
  unsure (1)..(201): unsure at all Xaa locations
MSNEYDYLFKLLLIGDSSVGKSCLLLRFADDSYVDSYISTIGVDFKIRTVELEGKTVKLQIWDTAGQERFRTITSSYYRGAHGIIIVYDVTEMESFNNVKQWLNEIDRYANDSVCKLLVGNKSDLVDNKVVDSLTAKAFADELGIPFLETSAKDSINVEXAFLTMTAEIKKKMGSQTTTGKSAESVQMKGQPIPQKSNCCG

SEQ ID NO: 14806 - protein, 264 aa, Zea mays
  unsure (1)..(264): unsure at all Xaa locations
MDGFSKTIGGSGPNVPAGSHPAGGSQAAAGGGATQRTQYPYVTGTSVIALKYKDGVIMACDTGASYGSTLRYKSVERIKAXVGKHSIIGASGEFSDFQEILRYLDELTLSDHMWDDGNSLGPKEIHSYLTRVMYNRRNKFDPLWNSLVLGGVKKGPKGDEKYLGMVNMIGTHFEENHVATGFANHLAIPILRAEWREDMTFEEAVKLVEKCLLVLLYRDRSSINKFQIAKITTEGSTIYPPYSLKTYWGFSHFENPAQGAVGSW

SEQ ID NO: 14807 - protein, 146 aa, Lactobacillus delbrueckii subsp. lactis
  unsure (1)..(146): unsure at all Xaa locations
MTKVVIENVHAREIFDSRGNPTVEVEVTLSNGVVGRAXVPSGASTGENEAVELRDGGSRLGGKGVMKAVNNVNTAINNELQGADPFNQPAIDKAMIELDGTPNKGKLGANAILGTSMATAVXAAKATHQPLYRXLGGTDLSMPQTF

SEQ ID NO: 14808 - protein, 111 aa, Lactobacillus delbrueckii subsp. lactis
MKRIGILTSGGDAPGMNAAVRAVTRVAIANGLEVFGIRYGFAGLVAGDIFPLESEDVAHLINVSGTFLYSARYPEFAEEEGQLAGIEQLKKHGIDAVVVIGGDGSYHGALQ

SEQ ID NO: 14809 - protein, 142 aa, Zea mays
  unsure (1)..(142): unsure at all Xaa locations
MERYHQVVSVLISPMTKSNTPEAQGKCIARLLLYHCCVNLPLMMASYPVFRFMGMESSFPLPSWKVVSAQILFYFIIEXDFXFYWGXRILHTXWLYKNDHSXHHEYATPFGLTSEYAHPAEILFLGFATIVXXPALTGPHFD

SEQ ID NO: 14810 - protein, 416 aa, Saccharomyces cerevisiae
MSLSSKLSVQDLDLKDKRVFIRVDFNVPLDGKKITSNQRIVAALPTIKYVLEHHPRYVVLASHLGRPNGERNEKYSLAPVAKELQSLLGKDVTFLNDCVRPEVEAAVKASAPGSVILLENLRYHIEEEGSRKVDGQKVKASKEDVQKFRHELSSLADVYINDAFGTAHRAHSSMVGFDLPQRAAGFLLEKELKYFGKALENPTRPFLAILGGAKVADKIQLIDNLLDKVDSIIIGGGMAFTFKKVLENTEIGDSIFDKAGAEIVPKLMEKAKAKGVEVVLPVDFIIADAFSADANTKTVTDKEGIPAGWQGLDNGPESRKLFAATVAKAKTIVWNGPPGVFEFEKFAAGTKALLDEVVKSSAAGNTVIIGGGDTATVAKKYGVTDKISHVSTGGGASLELLEGKELPGVAFLSEKK

SEQ ID NO: 14811 - protein, 266 aa, Bacteroides thetaiotaomicron VPI-5482
MKITIIGAGNIGSAVAACLAKGHLYNEKDIIISTPHTDKLENLHKQFPAIRIMTENQYAISEADIIILAVKPCIVDEVLSPLRFSRTQILVSLVTGISISHLAHLSETEMPIFRVVPNIAITEHSSLTLITSRKAGKEHQQLIKQTFEEGGKCLFAEEKQLDIISALTSSGIAFALKYIHAAMQAGIELGISAEDAMRMTAYSMEGATELILNHDTHPLLEIEKAATPGGATIKGLNELEHRGFTSAVIHAIKSSATVSTDKETEE

SEQ ID NO: 14812 - protein, 472 aa, Pseudomonas syringae pv. syringae B728a
MAERLSNDFQFIDVGRKDPKKKLLRQRKKEFVEIYEPFKPQQSADQAHRCLGCGNPYCEWKCPVHNFIPNWLKLVAEGNILAAAELSHQTNTLPEVCGRVCPQDRLCEGACTLNDGFGAVTIGSVEKYITDTAFAMGWRPDMSKVVPTGKRVAIIGAGPAGLGCADVLVRGGVTPVVFDKNPEIGGLLTFGIPEFKLEKSVLSHRREVFTGMGIEFRLNTEVGKDVTIDQLLAEYDAVFMGMGTYTYMKGGFPGEDLPGVHDALDFLIANVNRNLGFEKAPEDFVDMKGKRVVVLGGGDTAMDCNRTSIRQGAKSVTCAYRRDEENMPGSRKEVKNAKEEGVKFLYNRQPIAIIGEGKVEGVKVVETRLGEPDARGRRSPEPIPGSEEIIPAEAVVIAFGFRPSPAPWFEQFTISTDSQGRVVAPEQAQYKHQTSNPKIFAGGDMVRGSDLVVTAIFEGRNAAEGILDYLGV

SEQ ID NO: 14813 - protein, 204 aa, Paracoccidioides brasiliensis
MAQQQLQQLQTENVMRRKLVIIGDGACGKTSLLSVFTLGYFPTHYVPTVFENYVTDCRVDGRSVQLALWDTAGQEDYERLRPLAYSKAHVLLIAFAVDTPDSLENVRNKWIEEANERCPDVPIILVGLKKDLREDPLAIEEMRKKSLRFVSSKEGHDTAAQVGARKYLECSSLTGEGVDDVFEAATRAALLTFEKDRGSCCVIL

SEQ ID NO: 14814 - protein, 83 aa, Pectobacterium carotovorum subsp. carotovorum
MSPIEKSRKLENVCYDIRGPVLKEAKRLEEEGNKVLKLNIGNPAPFGFEAPDEILVDVIRNLPTAQGYCDSKGLYSARKAIVQ

SEQ ID NO: 14815 - protein, 190 aa, Polypodium vulgare
DEHGEVLAEIRRSDLEPYLGLHYPATDIPQASRFLFMKNRVRMICDCRALPVRVIQDKELRQPLGLAGSTLRAPHGCHSQYMENMGSIASLVMAVVVNDNDEDVSNRSHHPKMRRLWGLVVCHHTTPRAVPFALRSACEFLVQVFGLQLNMELELAAQMREKRILRTQTLLCDMLLRDAPIGIVSESPNI

SEQ ID NO: 14816 - protein, 585 aa, Arabidopsis thaliana
MASQLDLIGGDYIAGISINPPTNSRVTSVYSEVQASRIDHTLPLPSVFKTPFKIIDGPPSSSAGHPEEIEKLFPNLFGQPSALLVPNQSNEVSSDQKLKIGVVLSGGQAPGGHNVICGIFGFKNLICDCIFVVGLIDYLQEYARGSSLFGFRGGPAGIMKGKYIELTSEFVYPYRNQGGFDMICSGRDKIETPEQFKQAEETVTKMDLDGLVVIGGDDSNTNACLLAEHFRAKNMKTLVIGCPKTIDGDLKSKEVPTSFGFDTACKIYSEMIGNVMIDARSTGKYYHFVRLMGRAASHITLECALQTHPNITIIGEEVFEKKLTLKNVTDNIVDVIYKRAENGYNYGVILVPEGLIDFIPEVQQLISELNEVLAEGNVDEEGQWKKNLKKETLEIFEFLPQTIQEQLMLERDPHGNVQVAKIETEKMLIQMVETELEKKKTEGTYEREFMGKSHFFGYEGRCGLPTNFDATYCYALGYGAGSLLQSGKTGLISSVGNLAAPVEEWTVGGTALTSLMDVERRHGKFKPVIKKAMVELEGAPFKKFASQREEWALKNRYISPGPIQFKGPGSDARNHTLMLELGAQA

SEQ ID NO: 14817 - protein, 589 aa, Neurospora crassa
MAQYTASTGSSLRASPNLRQHHADTSAAPDTTEKFPDFDTSQTTNGYPSGNGRSTNAGSNAPSDQWRPRRESKVTWAPRDSPGPVNAYSHGRGHSRQTSISNAIHRMRSGSMSQNAHEIAEALRAPGLCMMWYWSSALTNTSSKSILTTFDKPATLTLIQFAFVCSYCLLASWLASTFPKLRTAVPALKHPIRKPSRDVIVTTLPLAAFQIFGHLLSSSATSKIPVSLVHTIKGLSPLFTVLAYRLIFDIRYPRATYYSLVPLTIGVMLACSGKHSFGEGQFLGILYALIATIIFVTQNIFSKRLFNEAARAEQEDGHSNGHRSKKLDKLNLLCYSSGMAFILTGPIWLWSEGFSIIGDFLWDGSVDLSETPNSFDHGRLTLEFIFNGTFHFGQNILAFVLLSMVSPVTYSVASLLKRVFVIIIAIIWFRSPTTNVQAVGIALTFLGLYLYDRSQEKNKADQRARSLSRSKMHESILPLNTKQTTETSSQYQPSSSLNTQIGGYGYMPSIQPTTSSADLGANKKDDGPNPSSVSTTAGGGRQRGASMAKANGGWLPPGTRQEHTWRVGDGRGQNGGAEVSGPAGVAVMS

SEQ ID NO: 14818 - protein, 491 aa, Zea mays
  unsure (1)..(491): unsure at all Xaa locations
MAREQLEESIVADGNGKEEEVGVMGIGAADGADDQHGGGKLSMKSLLWHGGSVWDAWFSCASNQVAQVLLTLPYSFSQLGMLSGVLLQIFYGFLGSWTAYLISVLYVEYRSRKEKEGVSFKNHVIQWFEVLDGLLGPYWKAAGLAFNCTFLLFGSVIQLIACASNIYYINDRLDKRTWTYIFGACCATTVFIPSFHNYRIWSFLGLGMTTYTAWYLAIAALLNGQAEGVAHSGPTKLVLYFTGATNILYTFGGHAVTVEIMHAMWKPAKFKYIYLLATLYVFTLTLPSSAAMYWAFGDELLTHSNAFSLLPKTRWRDAAVILMLIHQFITFGFACTPLYFVWEKVIGMHDAKSIFKRALARLPIVVPIWFLAIIFPXFFGPINSAVGALLVSFTVYIIPALAHVLTYRTASARMNAAEKPPFFLPSWTGMFVLNMFIVVWVLVVGFGLGGWASMVNFVRQIDTFGLFAKCYQCPKPPVPAAAQSPAPLPHH

SEQ ID NO: 14819 - protein, 190 aa, Pilularia globulifera
DEHGEVVAEIRKSDLEPYLGLHYPATDIPQASRFLFMKNRVRMICDCRAIPVKVIQDRELRQPLSLAGSTLRAPHGCHSQYMANMGSIASLVMAVIVNDNEEETSSRSQQPKMRKLWGLVVCHHTTPRAVPFPLRSACEFLMQVFGLQLNMELELSAQMREKHILRTQTLLCDMLLRDAPIGIVSESPNI

SEQ ID NO: 14820 - protein, 414 aa, Pirellula sp. 1
MTLMAEPTDAANIRPPFQKSVRTSLMSVAKPESVRAVAMTAPGATEMRTYPYPTVDHDSAILKVDMSGICGTDRHIFKGEASELRGKSIFPYVGGHEVIGTIVEIGDNAAKVMDYDKQPLQVGDRVAIAVEVNCGHCFYCRKHYNNTTCLNQIQAYGLHPNADTLPYLRGGFAEYIFIRPGTHLFKVPDEMSTDVAVFVEEMAVAYHSLARAAGPFAPVNEGFGPGNSVAVLGNGPLGILHGIMASIHGAGLRIATDLSDLRLEKAKNLYADVTINAAKVSTDERIEQVKDMTEGVGPDLVIESAGEPEAFIEALRMVRKGGTVIEVGNWVDLGKPVALDVMRHISSKNLHIHSVFHCGTDWRPVLNILHQQSDRYDFPSLITHRFGLDELVDKFGTVTNFDECCKIEVIPHKS

SEQ ID NO: 14821 - protein, 307 aa, Vibrio parahaemolyticus RIMD 2210633
MSKFAIVFPGQGSQAVGMLADLGEQYDVVKQTFAEASDALGYDLWALVQNGPAEDLNQTFRTQPALLASSVAIWRVWQELGLEQPANLAGHSLGEYSALVCAGVIDFKEAIKLVELRGKLMQEAVPAGTGAMYAIIGLDDDVIAKACEEAAQGDVVSPVNFNSPGQVVIAGSKDAVERAGALCKEAGAKRALPLPVSVPSHCALMKPAADKLAVALESIEFNTPQLPVINNVDVAAETDPAKIKDALVRQLYSPVRWTESVQLMSEQGVENLLELGPGKVLTGLTKRIVKTLSAAAVNDVASLEAAK

SEQ ID NO: 14822 - protein, 290 aa, Vibrio parahaemolyticus RIMD 2210633
MIKKCLFPAAGYGTRFLPATKSMPKEMMPVVNKPLIEYGVEEAIQAGMNGMCIVTGRGKHSIMDHFDKNYELEHQISGTNKEELLVDIREIIESANFTYIRQREMKGLGHAILTGRELVGDEPFAVVLADDLCVNEEEGVLAQMVALFKQFRCSIVAVQEVPADETHKYGVISGEMIKDDIYRVDDMVEKPEPGTAPSNLAIIGRYILTPDIFELIENTEPGKGGEIQITDALLKQAKAGCVLAYKFKGKRFDCGSVEGYIEATNYCFENLYLKDEKKSELGKHATKKEV

SEQ ID NO: 14823 - protein, 222 aa, Triticum aestivum
FGTRAAEGRGGEDEEGGVLVPALLARLAGAGDAEVRVLVMAALRRLAGCAGAETKERMASIEALSSIVRSLSRDVDERNEAIALLLDLSDIPQVRQRIGRIKGCIVMLVTLRNAHESGTYDDAEKLLHILSCNPQNVLLMAEAGYFRPLIHYLKEGSDMNKILMATAISKMFLSEQMKSSLGEDGAVEPLVEMFKSGNHEAKHSVLAALRNLSSSLQNAEIL

SEQ ID NO: 14824 - protein, 158 aa, Oryza sativa
HEGQVAARRRGRHRRRDQPQLAFCPGIIVPGIYYSDDKLLQTRIFSYSDTQRHRLGPNYLLLPPNAPKCAHHNNHYDGFMNFMHRDEEVDYFPSRYDPAKHAPRYPIPSATLTGRREKVVIAKENNFKQPGERYRSWDPARQDRFIKRWIDALSDPRL

SEQ ID NO: 14825 - protein, 297 aa, Brucella suis 1330
MSSIRKIRKAVFPVAGLGTRFLPATKSIPKEMLTVVDKPVIQYVVDEAREAGIEHLIFVTGRNKAVIEDYFDAQVELYSTLAERGKTEELNRLQDLQPQPGTTSFTRQQVPLGLGHAVWCARELVGNEPFALLLPDMVMQSKKGCLAEMVELYEQTGGNIIAVQECDPEEAHKYGIVGKGGAVGNGFEITRMVEKPAKGTAPSNLYINGRYILQPEIFGLLSKQEKGAGNEIQLTDAMLKLADQQKFYGFDYRGLTFDCGSKAGFIEANVAFALWREDIRPSVEGSIGHLLKTIQPA

SEQ ID NO: 14826 - protein, 325 aa, Zea mays
MKICTVSGPGCRSASIPAALPAHLPISPRALSLSLSLSLSVGDEPGRPAPPPLAQVSIGRFARSCLDPSPAPSNFCYRIPHRGMLAKGRKVAGRREEMSANYAFGPQDDDAIIKHRLLTRTTTTRGEPPLKKLQKKFMSFATEIEKDADNISDCERLYKAFLHEINTFELPLLKSKAVVDANIREKESFNELQVEIERQILHAKTDIEDLKKQLEQSKIERQHKEECEAIRKLISLQPPRSETEKLIADLEKEITDLKAENVACIRTLELRKKQFALLLHVVEELQISIEDEQKSIADELRAIAGEQKMSMEEGSVGASDSMVVD

SEQ ID NO: 14827 - protein, 422 aa, Oenococcus oeni PSU-1
MSDKLFQKPKGTADLLPAVQAIWDKINRAAQEIFGRRYRFGRIDTPLFENYEIFARTSGDSSDVVSKEMYDFYDKGNRHLALRPEGTAGVVRAYVENKLYGPEYEKPVNLYYLESMFRYERPQAGRTREFHQLGVESFGSDSPFLDAQIIQMAIDFFQEFNLDNFIVKINSLGDEESRTNYRSALVDYLKQFEDRLSNDSKNRLKSNPLRILDSKDPKDQELLIDAPKILDYLNQESKDRFKKVTKALDDFDISYEIDNKLVRGLDYYNNTIFEIETRDPKLKSSATVCGGGRYSGMVEEFGGPETPAIGFGIGLERLITLVGQIEDQDHNDVYIVQTDKSVNEFANLLAKRLREKFHFGVLLDYTDRSMKSQLKSADRTKSRYSIVIGEEEVKNKKVTIKKMADGSQKKILLDKLTIGDFS

SEQ ID NO: 14828 - protein, 500 aa, Glycine max
MAMANLARRKGYAVVLSSRSSLCLTRWRGFASGSDENDVVVIGGGPGGYVAAIKAAQLGLKTTCIEKRGTLGGTCLNVGCIPSKALLHSSHMYHEAKHAFANHGVKFSSVEVDLPAMMAQKDKAVSNLTKGIEGLFKKNKVNYVKGYGKLVSPSEVSVDTTEGGNTVVKGKHIIIATGSDVKSLPGITIDEKKVVSSTGALALTEIPKRLIVIGAGYIGLEMGSVWGRLGSEITVVEFASEIVPTMDAEVRKQFQRSLEKQGMKFKLKTKVVGVDTSGDGVKLTLEPAAGGDQTTLEADVVLVSAGRTPFTAELGLDKIGVETDKIGRILVNERFATNVSGVYAIGDVIPGPMLAHKAEEDGVACVEYIAGKVGHVDYDKVPGVVYTMPEVASVGKTEEQVKELGVEYRVGKFPFLANSRAKAIDNAEGLVKILAEKETDKILGVHIMAPNAGELIHEAAIALQYDASSEDIARVCHAHPTMSEAVKEAAMATYDKPIHI

SEQ ID NO: 14829 - protein, 312 aa, Vibrio sp.
MKVAVLGAAGGIGQALALLLKTQLPAGSDLSLYDIAPVTPGVAVDLSHIPTDVTIAGFAGMDPTDALVGADVVLISAGVARKPGMDRSDLFNINAGIIKNLAGKCAEVCPNACIGIITNPVNTTVPIAAEVLKQAGVYDKRKLFGITTLDVIRSETFVSALKGISLADVEVPVIGGHSGVTILPLLSQVKGVEFTAEEVVALTARIQNAGTEVVEAKAGGGSATLSMGQAAARFGLSLVRALQGEKGIVECTYVDGGSEHATFFAQPVLLGKNGVEEVLAYGELSEFETNARDAMLEELKANITLGEEFVAG

SEQ ID NO: 14830 - protein, 259 aa, Bacteroides thetaiotaomicron VPI-5482
MKRFENKVVVITGAAGGIGEATTRRIVSEGGKVVIADLSQERADKLAAELTQAGADVRPIYFSATELQSCKELVDFAMKEYGQIDVLINNVGGTDPKRDLNIEKLDIDYFDEVFHLNLCCTMYLSQQVIPIMTTHGGGNIVNVASISGLTADANGTLYGASKAGVINLTKYIATQMGKKNIRCNAVAPGLVLTPAALDNLNEEVRNIFLGQCATPYLGEPEDVAATIAFLASNDARYITGQTIVVDGGLTIHNPTVELS

SEQ ID NO: 14831 - protein, 554 aa, Shewanella oneidensis MR-1
MCSIFSILDIQSDAKELRQVALEMSKLMRHRGPDWSGIYASDKAILAHERLAIVDIEHGAQPLLTEDGSLILAVNGEIYNHKELKAQLGDKYSYQTNSDCEVILALYQEYGTEFLDKLNGIFAFVLYDKAKDAYLIGRDHMGIIPLYTGRDAAGNLYVASEMKALMPVCKTVEEFQPGQYLYSSDAAAVKYYTRDWQQYDAVKDNGASQEELREALEAAVKRQLMSDVPYGVLLSGGLDSSVISAITQTFAKRRIEDDGETGAWWPQLHSFAVGLKGAPDLIAAKKVADAIGTIHHEINFTFQEGLDAIKEVIYHLETYDVTTIRAATPMYLMARKIKAMGIKMVLSGEGADELFGGYLYFHKAPNAQAFHEELVRKLDKLHLFDCLRANKAMAAWGLEARVPFLDKEFMDVAMRINPEAKMSKDGRIEKHILRQAFEHKLPKEVAWRQKEQFSDGVGYSWIDGLKAHAAEQVDDLQLANAKFRFPYNTPETKEAYFYRCFFEEHYPLPSAAETVPGGKSVACSTPEALAWDESLRGIIDPSGRAVRSVHAASY

SEQ ID NO: 14832 - protein, 192 aa, Ustilago maydis 521
MAAKVYVGNLSWNTTDDSLAHAFSTYGQLTDYIVMKDRETGRSRGFGFVTFATQAEADAAIAALNEQELDGRRIRVNMANSRPAGGMGGGYGGVTGQYGANAYGAQGGYGGYGGQPGGFQQPGGFQQQGGYPQQGGYGGYQQPGFQPQQGGYGAPQQGYGAPQQGGYGGYGAQQGFQQPAQQNSGSYNGQGY

SEQ ID NO: 14833 - protein, 382 aa, Pseudomonas aeruginosa PAO1
MIQSKLPNVGTTIFTRMSQLAAECGAINLSQGFPDFDGPPELREAVGRHIAAGHNQYAPMTGLPALREQVAKKIEQFYGRRVSADSEVTITPGATEAIFSAIQALVHPGDEVVVLDPSYDSYEPSVQLAGGRCVHVPLALPDFSIDWQRMAEAIGPRTRLVIINTPHNPSGALISREELDRLAALIRDRDIYLISDEVYEHLVFDGVAHTSVLSHDELYPRSFVVSSFGKTYHVTGWKTGYVVAPPALSAELRKVHQYVNFCGVTPLQWALADYMAGHPEHLRQLPGFYQAKRDLFCDLLLDSRFRFTRAPGTYFQCVDYSAIRPDLDDVAMAEWLTREHGVAAIPVSVFYEKAPDAMRLVRFCYAKREETLRQAAEKLCAI

SEQ ID NO: 14834 - protein, 428 aa, Bordetella bronchiseptica RB50
MTQVFQKVSAIRGMNDVLPGPSARWEKFEEIVRGWLRSYGYRNVRTPVLEHTRLFARGIGEVTDIVEKEMYTFTDALNGDSLTMRPEMTAGIVRASIEHNMLYDRPHRVYAIGPVFRHERPQRGRYRQFHQIDVEALGFAGPDVDAEMIVMLARLWKLLGLQDVRLELNSLGQPAERAAHRAALIEHLERHQDILDEDGRRRMYSNPLRVLDTKNPAMQEMADSAPRLFDFLGEESRSHFDGLCQRLADAGIEYRLNPRLVRGLDYYNLTVFEWVTDRLGAQGTVCGGGRYDGLVELLGGKPAPAVGFAIGMERLLDLWEQSVEIEQPAECEVYIVHQGEEGQRLAARVGEQLRDAGLDVIVHAGAAGFKAQFKRADASGARIAVILGGDEVASRTASIKHLRGPVGADAAQQQVPLAQLADVLKSKG

SEQ ID NO: 14835 - protein, 429 aa, Pseudomonas aeruginosa PAO1
MSKSLQAIRGMNDILPEQTPAWRYLERTFAGLLDGYGYSEIRLPILEFTELFARGIGEGTDVVDKEMYTFLDRNGESLTMRPEGTAGCVRAVLEHGLSGGGQVQKLWYTGPMFRYEKPQKGRYRQFHQIGVEVFNLPGPDIDAELIILTWRLWQKLGMADAVTLQLNTLGSSEARARYREALVAYLQERFEQLDEDSQRRMTTNPLRILDSKVESTQALLVGAPTLHDYLDEESIAHFEGLKARLDAVGLRYEINQKLVRGLDYYCRTAFEWVTDKLGAQGTVCGGGRYDGLVSQFGGKPTPGVGFAMGVERLVLLLETLGVIPAELNRPADLYVCAFGEPAELAALTLAEQLRSAIPGIRLLVNAGAGSFKSQFKKADKSGARFALILGEDEVANRVVGFKPLRDEGEQQSIAWDALPEHLAACLAQA

SEQ ID NO: 14836 - protein, 578 aa, Vibrio parahaemolyticus RIMD 2210633
MTFSTENNKQIVLGEELGPLSDNERLKKQSNLLRGTIAEDLQDRITGGFTADNFQLIRFHGMYQQDDRDIRNERTKQKLEPLHNVMLRARMPGGIITPTQWLAIDKFATEHSLYGSIRLTTRQTFQFHGVLKPNIKLMHQTLNNIGIDSIATAGDVNRNVLCTTNPVESELHQEAYEWAKKISEHLLPKTRAYAEIWLDGEKVESTEEDEPILGKTYLPRKFKTTVVIPPQNDVDVHANDLNFVAIADNGKLVGFNVLVGGGLAMTHGDTSTYPRRADDFGFIPLEKTLDVAAAVVTTQRDWGNRSNRKNAKTKYTLDRVGTDVFKAEVEKRAGIQFEASRPYEFTERGDRIGWVEGIDGKFHLALFIENGRLLDYPGKPLKTGVAEIAKIHKGDFRMTANQNLIVAGVPKSEKAKIEKIAREHGLMDDNVSEQRKNSMACVAFPTCPLAMAEAERFLPQFVTDVEGILEKHGLPENDNIILRVTGCPNGCGRAMLAEIGLVGKAPGRYNLHLGGNRAGTRVPKMYKENITDKQILEEIDLLVARWSKEREEGEAFGDFTIRAGIIQEVFVSKRDFYA

SEQ ID NO: 14837 - protein, 363 aa, Pseudomonas aeruginosa UCBPP-PA14
MNSSPQANAAMRAAVWHGRHDIRVEDVPLPAEPPPGWVQIRVHWCGICGSDLHEYLAGPVFIPVEAPHPLTGLKDQCILGHEFSGEIVRLGNGVTGFALGQAVAADACQHCGTCYYCRHGLYNICENLAFTGLMNNGAFAEYVNVPANLLYALPAGFPSEAGALIEPLAVGMHAVKKAGSLLGQNVVVVGAGTIGLCTIMCARAAGAAQVIALEMSSARKAKALEVGASQVLDPSRCDALGEIRALTGGLGADVSFECIGNKHTAKLAIDAIRKAGKCVLVGIFEEPSEFNFFELVSTEKQLLGALAYNGEFADVIAFIADGRLDIAPLVTGRIGLEEIVERGFEELVNNKEHNVKIIVSPGG

SEQ ID NO: 14838 - protein, 352 aa, Arabidopsis thaliana
MSSSKKGSDRNQIRKSLRKLKKQIGELEKLESPDRLNNVKPIFIKRNIYLKKKLKKKVKDHGIFCSCSLDPGSSTLCGSDCNCGILLSSCSSSCKCSSECTNKPFQQRHIKKMKLVQTEKCGYGIVADEDINSGEFIIEYVGEVIDDKICEERLWKLNHKVETNFYLCQINWNMVIDATHKGNKSRYINHSCSPNTEMQKWIIDGETRIGIFATRFINKGEQLTYDYQFVQFGADQDCYCGAVCCRKKLGAKPCKTKNTTLEEAVKPVACKVTWKTPKLLNSEVRETNLDASGQAWNNHSQRKICCRDCIGAYYTAQMKVLTLVVDIFQVMYEDGVTEIIDMCREVWKVVTA

SEQ ID NO: 14839 - protein, 117 aa, Zea mays
  unsure (1)..(117): unsure at all Xaa locations
MATVDLEKLRMSGAGKAIGVLTSGGDAQGMNAAVRAVTRMGIYVGAKVFLIYEGYEGLVEGGENIKPANWLSGSDIMQLGGTIIGSARCKAFTTREGRLAAGYTLLRRGXTNLCVIG

SEQ ID NO: 14840 - protein, 304 aa, Kluyveromyces lactis
MVAPSQFKQLEKVGNGTYATVYKGLNKTTGVYVALKEVKLDSEEGTPSTAIREISLMKELKHDNIVRLFDVIHTENKLTLVFEFMDNDLKKFMDNRNKGNPHKGLEMDLVKYFQWQLLQGVAFCHENRILHRDLKPQNLLINNRGQLKLGDFGLARAFGIPVNTFSSEVVTLWYRAPDVLMGSRNYCTLIDIWSCGCILAEMIMGKPLFPGSNDEEQLKLIFDTMGTPVEQTWPQVTQLAKYNPLLPPHMPRDLKQLLQNNTEEVLDDNVVDLLHGLLQLNPDARLSAKDALNHPWFAEYNHAN

SEQ ID NO: 14841 - protein, 745 aa, Pseudomonas fluorescens PfO-1
MNPQDKEAFEELLANCADEPIRFPGAIQPHGLLLTLSEPDLSIIQISANVETLLARPAQELIGQPLQSLIGDAHAAQVREALQQAALSDAPPLHFRLNGTAFEGLLHRHQDVLILELEIHVENFQPRNVAGTETHLGRMLARLQKAQSLQALYDISVKEIQAMTGYDRVLIYRFEEEGHGQVIAEASDPSMEVFNGLFFPASDIPEQARELYRTNWLRIIPNADYQPVPLVPKLRPDTQTPLDLSFATLRSVSPIHCQYMKNMGVLSSMSISLLKGDKLWGLISCGNRQPLHVPHELRTACQTIGQVLSLQISAMEALEVSRQREEKLEALALLNQAMIDSPQNVFDGLANQPQVLMALANAGGIAIIEDKQLHRYGNCPEPEEIRALHKWLQERGEPVFASHHLASVYPPAAHYQQVASGVLAMSLPKPVDNGVLWFRPEVKENINWSGDPRKPLDLENSDAGLRLRPRTSFEIWKVEMAGISTKWSHGDLFAANDLRRSALENDLARQVRREQEAVRARDELVAVVSHDLRNPMTVISMLCGMMQKAFSSDGPHTSRRISTAIDTMQQAAGRMNTLLEDLLDTSKIDAGRYTIAPQKLDVAQMFEEAQSLLAPLALDKDISISFEADPDLSIHADPERLFQVLSNLVGNAIKFTPRLGTVDVYAKSVGDDIVFTVRDSGEGIPKDHLPHVFDRYWTVKEGNPTGTGLGLYITQGIVEAHGGQIVAESEPGQGSEFRFTVPRLD

SEQ ID NO: 14842 - protein, 429 aa, Streptococcus pneumoniae R6
MKLQKPKGTQDILPAESAKWQYVEGFAREIFKRYNYAEVRTPIFEHYEVISRSVGDTTDIVTKEMYDFYDKGDRHITLRPEGTAPVVRSYVENKLFAPEVQKPSKFYYMGPMFRYERPQAGRLRQFHQIGVECFGSSNPATDVETIAMAAHFLKEIGIQGVKLHLNTLGNPESRAAYRQALIDYLTPLKETLSKDSQRRLEENPLRVLDSKEKEDKVAVENAPSILDFLDEESQTHFDAVRQMLENLGVDYIIDTNMVRGLDYYNHTIFEFITEIEGNDLTVCAGGRYDGLVAYFGGPETAGFGFGLGVERLLLILEKQGVALPIENALDVYIAVLGDGANVKALELVQALRQQGFKAERDYLNRKLKAQFKSADVFAAKTLITLGESEVESGQVTVKNNQTREEVQVSLETISQNFSEIFEKLGFYTQ

SEQ ID NO: 14843 - protein, 421 aa, Chlamydophila pneumoniae TW-183
MAIQKAGAFLRCLPSESRPYLEHAMRRNPHFSLLKPQYLFSEISKKLAQFRKENPEISVIDLSIGDTTQPLCRSITQAIKEFCVSQEKQETYRGYGPETGLEKLRTKIASEVYENRISPEEIFISDGAKPDIFRLFSFFGSEKTLGLQDPVYPAYRDIAHITGIRDIIPLACRKETGFIPELPNQQSLDILCLCYPNNPTGTVLTFQQLQALVNYANQHGTVLIFDAAYSAFVSDPSLPKSIFEIPEAKYCAIEINSFSKSLGFTGMRLAWNVIPKELTYDNNEPMINDWKRLFATTFNGASLLMQEAGYYGLDLFPTPPAISLYLTNAQKLKKSLETAGFSVHGGDHAPYLWVELPEGISDEEAFDFFLHQYHIAVTPGHGFGSCGQGFVRFSALTQPQNIALACDRLCTASLKETMVLA

SEQ ID NO: 14844 - protein, 208 aa, Pseudomonas fluorescens PfO-1
MPDPYQPASEFLASLDADWQRHIAAVGPCLHQPHPTRDPYESLVRAIAYQQLHAKAGDAIVGRLVGLFPGQTFPRPEQILATDFDQLRGCGFSAGKIATIQGIAQATLDGVVPDYPTALAMEDEALIERLVSLRGVGRWTVEMLLIYSLERPDILPADDFGVREGYRRLKGLEVQPARKQMIEIGLDWKPFRTVAAWYLWRVPKSPSP

SEQ ID NO: 14845 - protein, 481 aa, Ralstonia eutropha JMP134
MNVFLNHIDGEWTACQSGRTFDNVNPADTGDIVGRFQASSAVDAQAAVAAAAAAFAGWKKTPVGKRAAVLNRAADHLEANADSIAAELTREEGKALTLARDEVLRSAQTLRFYAVEGQTFTGEVFPNDDPDQLVFSQREPLGVVTVIAPWNFPVSIPARKIAPALVTGNTVVFKPSSEAPLSGYRLAEALIKAGLPKGVLNFITGSAAEIGAAITEAPVVRAISFTGSSRAGEQIHRAVPLTTRTQMELGGKNPLIVMEDADLDRAVDLTIKGGFSLSGQACTGTSRVLVAESVKAAYTERLLAKVATLKVGSGMTAGMDLGPLASQKQMETVLRYIDIGKSEATLLCGGERLTGGEFDKGYYVAPTVFTDVTQQMRIAREEIFGPVIAILGFTDYADAIAKANDTEYGLAAAIVTSNPRYIHHFANDIEAGTVKINRTTTGNLVNAPFGGLKRSSTSTFRESGRTGLEFYTQIKTVYRGA

SEQ ID NO: 14846 - protein, 526 aa, Chlamydophila pneumoniae AR39
MERKRFIDCDSTKILQELALNPLDLTAPGVLSAERIKKFSWLGGGFTFSFATERLDDAILAALISLAEERGLHESMLAMQQGQVVNYIEGFPSEMRPALHTATRAWVTDSSFTGEAEDIAVRSRVEAQRLKDFLTKVRSQFTTIVQIGIGGSELGPKALYRALRAYCPTDKHVHFISNIDPDNGAEVLDTIDCAKALVVVVSKSGTTIETAVNEAFFADYFAKKGLSFKDHFIAVTCEGSPMDDTGKYLEVFHLWESIGGRFSSTSMVGGVVLGFAYGFEVFLQLLQGASAMDQIALQPNARENLPMLSALISIWNRNFLGYPTEAVIPYSSGLEFFPAHLQQCCMESNGKSIVQDGRRVGFSTSPVIWGEPGTNGQHSFFQCLHQGTDIIPVEFIGFEKSQKGEDISFQGTTSSQKLFANMIAQAIALACGSENTNPNKNFDGNRPSSVLVSSQLNPYSLGELLSYYENKIVFQGFCWGINSFDQEGVSLGKALANRVLELLEGADASNFPEAASLLTLFNIKFR

SEQ ID NO: 14847 - protein, 376 aa, Populus tremula x Populus tremuloides
MASMYNPETSAVQDQQQNPTLLYDALYCSEENWVEEVREDWFQDELEGESYCSNNSNKLNTFPILLEQDLSWEDEELSSLFAKEEQNQLCKDLETNPSLARARCEAVEWILKVNEHYSFTALTAVLAVNYLDRFLFSVHLQKEKPWMAQLAAVSCLSLAAKVEETQVPLLLDFQVEDSKYVFEAKTIQRMEILVLSTLKWKMNPVTPISFLDYITRRLGLEHYLCLEFLKRCERMVLSILADSRSMPYVPSVMAAATMLYVIDNIEPSLAAEYQSQLLSILGIDKDKVEDCSKFLMEFALRDHFKLLSNKRKFCSLPGSPSGVVDVSFSSDSSNDSWSVASSVSSSPKPLSKKSRALQSLNNATTSDFSQHSSPVP

SEQ ID NO: 14848 - protein, 583 aa, Candida albicans SC5314
MGQILSQPVVEKHSDEHKDKYLAYGISCMQGWRINMEDAHATILNLYDLPLKKSLSSNSEQDEDEEDEEEEADSQDSTTTNTTKSHQQQNQKEDLQQNNDKQNSQQDIKDGDNDTQMSDSDENHHHAAPQQQHIAFFGVYDGHGGEKAAIFTGEKLHHLIKETKEFKQKDYINALKQGFLNCDQEILKDFYMRDDDSGCAATSAIITPDLIVCGNAGDSRTIMSTNGFAKALSFDHKPSNEGEKARICAAGGYVDMGRVNGNLALSRGIGDFDFKKNVDLPAEEQIVTCYPDVIQHNIDYKSDEFVVLACDGIWDCLTSQKCVECVRRGIYERKSLSIICEEIMDLCCAPTSDGSGIGCDNMSIAIVALLDYTKNETLDQWYEKIISRVEQQQQQKNDPNSLNKYGPISQPYNELYKEMYGEYYDIGQQGQGGNGRSNIGSGSGRGSGASGSSSGGGASINGNSIFGRSGYDDEEDDDEEKNIERRRRDQDESNLNGGAISLQKLLASNAITNENGVIYLDTSSAQSLLAHFGVADAGAHGDEEDEEEEGEDVHQGLAHEEEEEEEKEGSKIEEISEKIDDEV

SEQ ID NO: 14849 - protein, 331 aa, Glycine max
MVSWNRLRLGMDGDGEELTAQETALYDRQIRVWGADAQRRLSKSHVLVYGMKGTVAEFCKNIVLAGVGSLTLVDDRAATEEMLSSNFLIPPDENVYSGKTLAELCCNSLKDFNPMVHVSVEKGDLSSFDVEFLSKFDVVVVSCCTLSAKKLANGKCRKLSKRVAFYAVDCRDSCGEIFVDLQDYKYSKKKQDETVECDLKYPSFEDALSVPWRALHRRMSKLYYAMRVIEKFEEAEGRSTGEVSIADFSGLLKLKKEICTAQSLNESQVPDSLLKRLVTNATEFPPVCAIIGGILGQEVIKAISGKGDPLKNFFFFDAFDGKGIIEDISPK

SEQ ID NO: 14850 - protein, 308 aa, Shewanella oneidensis MR-1
MENVAFVFPGQGSQALGMLAELAAVQPIVGQTFAEASEVLGYDLWALVQDGPVETLNETDKTQPALLAASVAIWRAYLASGKAMPAVLAGHSLGEYSALVCAGVIDFKDAIKLVELRGQLMQQAVPAGTGAMYAIIGLDNDGIANACIEAAQGEVVSPVNFNSPGQVVIAGQKDAVERAAAACKASGAKMAVALPVSVPSHCALMKPAADKLALALNNVQFNAPSITVINNVDVASPTAVADIKDALVRQLYCPVRWSETVELMAEKGITQLVECGPGKVLTGLTKRINKSLSAQAVNDVASLAALTE

SEQ ID NO: 14851 - protein, 397 aa, Puelia ciliata
TGYDRVMVYRFHDDEHGEVVAESRHADLEPYLGLHYPATDIPQASRFLFRQNRVRMIADCHAAPVRVIQDPALPQPLCLVGSTLRAPHGCHAQYMANMGSIASLVMAVIITSGGDDEHNMARGGISSAMKLWGLVVCHHTSPRCIPFPLRYACEFLMQAFGLQLNMELQLAHQLSEKHILRTQTLLCDMLLRDSPTGIVTQSPSIMDLVKCDGAALYYHGKYYPLGVTPTEAQIKDIIEWLTLCHGDSTGLSTDSLADAGYHGAAALGDAVCGMAVAYITPSDYLFWFRSHTAREIKWGGAKHRPEDKDDGQRMHPRSSFKAFLEVVKSRSLPWEHAEMDAIHSLQLILRDSFRDAAEGTSNSKAIVNGQVQLGELELRGIDELSSVAREMVRLIET

SEQ ID NO: 14852 - protein, 426 aa, Bacteroides thetaiotaomicron VPI-5482
MAKQFKPETLCVQAGWTPKKGEPRVLPIYQSTTFKYDTSEQMARLFDLEDSGYFYTRLQNPTNDAVAAKIAALEGGVAAMLTSSGQAANFYAIFNICQAGDHFVCSSAIYGGTFNLFGVTMKKLGIDVTFVNPDASEEEISAAFQPNTKALFGETISNPSLEVLDIEKFARIAHSHGVPLIVDNTFPTPINCRPFEWGADIIVHSTTKYMDGHATSVGGCIVDSGNFDWDAHADKFPGLCTPDESYHGLTYTKAFGKGAYITKATAQLMRDLGSIQSPQNSFLLNLGLETLHLRMPQHCRNAQKVAEYLSKNEKVAWVNYCGLPDNKYYALAQKYMPNGSCGVISFGLKGGRDVSIKFMDSLEFIAIVTHVADARSCVLHPASHTHRQLSDEQLMEAGVRPDLIRLSVGIENADDIIADIEQALNA

SEQ ID NO: 14853 - protein, 393 aa, Sesleria insularis
EPARTEDPALSIAGAVQSQKLAVRAISRLQALPGGDVKLLCDTVVEHVRELTGYDRVMVYKFHDDEHGEVLAESRRADLEPYLGLHYPATDIPQASRFLFRQNRVRMIADCHAAPVRVIQDPAMPQPLCLVGSTLRSPHGCHAQYMANMGSIASLVMAVIISSGGEDNMSRGGAVPSAMKLWGLVVCHHTSPRCIPFPLRYACEFLMQAFGLQLNMELQLAHQLSEKHILRTQTLLCDMLLRDSPTGIVTQSPSIMDLVKCDGAALYYHGKYYPLGITPTGAQIKDIIEWLKVCHGDSTGLSTDSLADAGYPGATALGDAVCGMAVAYITPSDYLFWFRSHTAKEIKWGGAKHHPEDKDDGQRMHPRSSFKAFLEVVKSRSLPWENAEMDAIH

SEQ ID NO: 14854 - protein, 382 aa, Sorghum halepense
EPARTEDPALSIAGAVQSQKLAVRAISRLQALPGGDIKLLCDTVVEHVRELTGYDRVMVYRFHEDEHGEVVAESRRDNLEPYLGLHYPATDIPQASRFLFRQNRVRMIADCHATPVRVIQDPGMSQPLCLVGSTLRAPHGCHAQYMANMGSIASLVMAVIISSGGDDEQTGRGGISSAMKLWGLVVCHHTSPRCIPFPLRYACEFLMQAFGLQLNMELQLAHQLSEKHILRTQTLLCDMLLRDSPTGIVTQSPSIMDLVKCDGAALYYHGKYYPLGVTPTESQIKDIIEWLTVCHGDSTGLSTDSLADAGYLGAAALGDAVCGMAVAYITPSDYLFWFRSHTAKEIKWGGAKHHPEDKDDGQRMHPRSSFKAFLEVVKSRSL

SEQ ID NO: 14855 - protein, 393 aa, Sporobolus giganteus
EPARTEDPALSVAGAVQSQKLAVRAISRLQALPGGDVKLLCDTVVEHVRELTGYDRVMVYRFHEDEHGEVVAESRRDDLEPYLGLHYPATDIPQASRFLFRQNRVRMIADCHATPVRVIQDPGLSQPLCLVGSTLRAPHGCHAQYMANMGSIASLVMAMIIIVVVMTKQTSRSGISSAMKLWGLVVCHHTSPRFIPFPLRYACEFLMQAFGLQLNMELQLAHQLSEKHILRTQTLLCDLLLRDSPTGIVTQSPSIMDLVKCDGAALYYHGKYYPLGVTPTESQIKDIIEWLTVCHGDSTGLSTDSLADAGYHGAAALGDAVCGMAVAYITPSDYLFWFRSHTAKEIKWGGAKPHPEDKDDGQRMHPRSSFKAFLEVVKSRSLPWENAEMDAIH

SEQ ID NO: 14856 - protein, 169 aa, Glycine max
MSEEHRLQEPRLCANDCGFFGNTATQNLCSKCFRDLKHEQENSSTAKNALKQTLAACVASSSVSSPPPPPPPADLTSDLKEVNTENPGKRAASEPEEEEEQKPPQDPKRCLTCRRRVGITGFRCRCGFVFCGTHRYAEQHECTFDFKRVGKEKIAKANPIVKAEKLEKI

SEQ ID NO: 14857 - protein, 143 aa, Glycine max
  unsure (1)..(143): unsure at all Xaa locations
MASSMISSPAVTTVNRAGAGMVAPFTGLKSMAGFPTRKTNNDITSIASNSGRVQCMHVWPPVDKKKFETLSYLPYLDNTQLAKEXEYLLKKEXIPYLEFECKHDFIYHKHNRSPGYYNKHYXTIVKLAIYNYTNTSQILRDLQ

SEQ ID NO: 14858 - protein, 394 aa, Streptochaeta angustifolia
EPASTEDPALSIAGAVQSQKLAVRAISRLQALPGGDVKLLCDTVVEHVRELSGYDRVMVYRFHDDEHGEVVAENRRADLEPYLGLHYPAMDIPQASRFLFRQNRVRMIADCHAAPVRVIQDPSLKQPLCLVGSTLRAPHECHAQYMANMGSIASLVMAVIISSGGDDENSVGRSGISSATKLWGLVVCHHTSPRCIPFPLRYACEFLMQAFGLQLNMELQLAHQLSEKHILRTQTLLCDMLLRDSPTGIVMQSPSIMDLVKCDGAALYYHRKYYPLGITPTEAQIKDIIDWLAMCHGDSTGLSTDSLADAGYPGAAALGDAVCGMAVAYITPNDYLFWFRSHTAKEIKWGGAKHHPEDKDDGQRMHPRSSFKAFLEVVKSRSLPWENAEMDAIH

SEQ ID NO: 14859 - protein, 397 aa, Streptogyna americana
TGYDRVMVYRFHDDEHGEVVAESRRADLEPYLGLHYPATDIPQASRFLFRQNRVRMIADCHAAPVKVIQDPALPQPLCLVGSTLRAPHGCHAQYMANMGSIASLVMAVIISSGGDDEHNMMRGGIPSAMKLWGLVVCHHTSPRCIPFPLRYACEFLMQAFGLQLNMELQLAHQLSEKHILRTQTLLCDMLLRDSPTGIVTQSPSIMDLVKCDGAALYYHGKYYPLGVTPTEAQIKDIIEWLTLCHGDSTGLSTDSLADAGYPSAAALGDAVCGMAVAYITPSDYLFWFRSHTAKEIKWGGAKHHPEDKDDGQRMHPRSSFKAFLEVVKSRSLPWENAEMDAIHSLQLILRDSFRDAAEGTSNSKAIVNGQVQLGELELRGIDELSSVAREMVRLIET

SEQ ID NO: 14860 - protein, 396 aa, Thysanolaena maxima
  unsure (1)..(396): unsure at all Xaa locations
TGYDRVMVYRFHEDEHGEVVAESRRDGLEPYLGLHYPATDIPQASRFLFRQNRVRMIVDCHATAVRVIQDPGLSQPLCLVGSTLRAPHGCHAQYMANMGSIASLVMAVIISSGGDDEQTMRGGISSAMKLWGLVVCHHTSPRFIPFPLRYACEFLMQAFGLQLNMELQLAHQLSEKHILRTQTLLCDMLLRDSPTGIVTQSPSIMDLVKCDGAALYYHGRYYPLGVTPTEFQIKDIIEWLTACHGDSTGLSTDSLADAGYHGAAALGDAVCGMAVAYITPSDYLFWFRSHTAKEIKWGGAKHHPEDKDDGQRMNPRSSFKAFLEVVKSRSLPWENAEMDAIHSLQLILRDSFRDSAEGTSNSKAIVNGQVQLGELELRGINELSSVAREMVRXIET

SEQ ID NO: 14861 - protein, 393 aa, Zea mays
  unsure (1)..(393): unsure at all Xaa locations
EPASTEDPALSIAGAVQSQKLAVRAISRLQALPGGDVKLLCDTVVEHVRELTGYDRVMVYRFHEDEHGEVVAESRRDNLEPYLGLHYPATDIPQASRFLFRQNRVRMIADCHATPVRVIQDPGLSQPLCLVGSTLRAPHGCHAQYMANMGSIASLVMAVIISSGGDDEQTGRGGISSAMKLWGLVVCHHTSPRCIPFPLRYACEFLMQAFGLQLNMELXLAHQLSEKHILRTQTLLCDMLLRDSPTGIVTQSPSIMDLVKCDGAALYYHGKYYPLGVTPTESQIKDIIEWLTVFHGDSTGLSTDSLADAGYLGAAALGEAVCGMAVAYITPSDYLFWFRSHTAKEIKWGGAKHHPEDKDDGQRMHPRSSFKAFLEVVKSRSLPWENAEMDAIH

SEQ ID NO: 14862 - protein, 394 aa, Zizania aquatica
EPARTEDPALSIAGAVQSQKLAVRAISRLQALPGGDVKLLCETVVEHVRELTGYDRVMVYRFHEDEHGEVVAESRRNDLEPYLGLHYPSTDIPQASRFLFRQNRVRMIADCHSAPVRVIQDPALPQPLCLVGSTLRAPHGCHAQYMANMGSIASLVMAVIISSAGDDEHNMARGGIPSAMKLWGLVVCHHTSPRCIPFPLRYACEFLMQAFGLQLNMELQLAHQLSEKHILRTQTLLCDMLLRDSPTGIVTQSPSIMDLVKCDGAALFYHGKYCRLGVTPTEAQIKDIIEWLTVCHGDSTGLSTDSLADAGYPGAATLGDAVSGMAVAYITPSDYLFWFRSHTAKEIKWGGAKHHPEDKDDGQRMHPRSSFQAFLEVVKSKSLPWENAEMDAIH

SEQ ID NO: 14863 - protein, 469 aa, Zea mays
MMMQLGARSLVRRFSRLAAAGAPAETTSAGVPRMPAFDHVPLPYDGPSAADIARKRAEYLSPSLFHFYSKPLNIVEGKRQYLYDEHGRRYLDAFAGIATVCCGHCHPDVVDAITRQAKRLQHSTVLYLNHVIADFAEALASKLPGDLKVVFFTNSGTEANELAILMARLYTGSHDIISLRNSYHGNAAGTMGATAQKNWKFNVIQSGVHHAVNPDPYRGAFGSDAEKYVRDVQEIIEFGTTGQVAGFISEAIQGVGGIVEVSPGYLPLAYDKVRKAGGLCIADEVQAGFARVGSHFWGFETHGVVPDIVTMAKGIGNGIPLGAVVTTPEVAQVLTRRCYFNTFGGNPLCTAGGLAVLEVLEKERLQENAFVVGSYLKDRLRGLQEKHEIIGDVRGTGFMLGIELVTDRQLKTPAKDEICHAMEHMKDMGVLVGKGGFYGNVFRITPPLCFTKEDADFFVEVMDIALSKL

SEQ ID NO: 14864 - protein, 69 aa, Glycine max
SINDAKQMFKFSSDKELEQYIAEEHPEWDVKDGRVLFQKVKESQPCKEIPAASVINQTLGYARELERIV

SEQ ID NO: 14865 - protein, 783 aa, Aspergillus niger
MAPPQAPVQPPKRRRIGVLTSGGDAPGMNGVVRAVVRMAIHSDCEAFAVYEGYEGLVNGGDMIRQLHWEDVRGWLSRGGTLIGSARCMTFRERPGRLRAAKNMVLRGIDALVVCGGDGSLTGADVFRSEWPGLLKELVETGELTEEQVKPYQILNIVGLVGSIDNDMSGTDATIGCYSSLTRICDAVDDVFDTAFSHQRGFVIEVMGRHCGWLALMSAISTGADWLFVPEMPPKDGWEDDMCAIITKNRKERGKRRTIVIVAEGAQDRHLNKISSSKIKDILTERLNLDTRVTVLGHTQRGGAACAYDRWLSTLQGVEAVRAVLDMKPEAPSPVITIRENKILRMPLMDAVQHTKTVTKHIQNKEFAEAMALRDSEFKEYHFSYINTSTPDHPKLLLPENKRMRIGIIHVGAPAGGMNQATRAAVAYCLTRGHTPLAIHNGFPGLCRHYDDTPICSVREVAWQESDAWVNEGGSDIGTNRGLPGDDLATTAKSFKKFGFDALFVVGGFEAFTAVSQLRQAREKYPEFKIPMTVLPATISNNVPGTEYSLGSDTCLNTLIDFCDAIRQSASSSRRRVFVIETQGGKSGYIATTAGLSVGAVAVYIPEEGIDIKMLARDIDFLRDNFARDKGANRAGKIILRNECASSTYTTQVVADMIKEEAKGRFESRAAVPGHFQQGGKPSPMDRIRALRMATKCMLHLESYAGKSADEIAADELSASVIGIKGSQVLFSPMGGETGLEATETDWARRRPKTEFWLELQDTVNILSGRASVNNATWSCYENA

SEQ ID NO: 14866 - protein, 490 aa, Photorhabdus luminescens subsp. laumondii TTO1
MTNNVNTELLRQQAYINGQWVDADNQATFKVTNPANGEVIAHVSNMGAAETERAIAAAQQALPAWRTMTAKQRSQILQRWFQLMMANQPALAELLSREQGKSQTEAMGEIAYGASFIEWFAEEGKRTYGETIPSPLPGRRIVTIKQPIGVVAAITPWNFPNAMITRKVGPALAAGCTVILKPASETPLSALALAALAEQAGIPAGVFNVVTGIDAKAIGGAMTQSPIVRKLSFTGSTRVGKLLMAQSADTVKKLSLELGGNAPFIVFDDANIDAAVQGALIAKFRNSGQTCVCANRILVQETIYDTFAERLAQAVNQLQVGPASDAKSQQGPLINQAAVDKVEEHISDAISHGARILAGGKPHALGGLFFEPTVLADVNKSMLISQEETFGPIAPLFKFRDEAEAIHLANETEFGLAAYFYSRDIGRIYRVAEALESGMVGINEGLISNEAAPFGGIKQSGLGREGSRYGIEDYLEVKYLCFGGIEDTGV

SEQ ID NO: 14867 - protein, 145 aa, Glycine max
SFFFVHGKVNGPVLVEDTCLCFNALKGLPGPYIKWFLHKLGHEGLNNLLMAYDDKSAYALCVFSFAAGPDSEPITFSGKTPGKIVPPRGPNDFGWDPIFEPDGYDQTYAQMPKEEKNKISPRSKSLALVKSHFAEAGYTFDIKNV

SEQ ID NO: 14868 - protein, 169 aa, Rhodopseudomonas palustris CGA009
MERPMRKLFAALLIVFATVVASPLAHAVQPDEVMADPKQESRARELSRELRCMVCQNQSIDDSDATLAKDLRLLVRERIAAGDSNKQVIDYLVSRYGEFVLLKPRFETHTLLLWLLPPLVLVAGGLGLWLHIRRRSRDAARASDAPKPLSADEQARLDKLLAEGADQAP

SEQ ID NO: 14869 - protein, 491 aa, Escherichia coli
MMSRMAEQQLYIHGGYTSATSGRTFETINPANGNVLATVQAAGREDVDRAVKSAQQGQKIWASMTAMERSRILRRAVDILRERNDELAKLETLDTGKAYSETSTVDIVTGADVLEYYAGLIPALEGSQIPLRETSFVYTRREPLGVVAGIGAWNYPIQIALWKSAPALAAGNAMIFKPSEVTPLTALKLAEIYSEAGLPDGVFNVLPGVGAETGQYLTEHPGIAKVSFTGGVRSGKKVMANSAASSLKEVTMELGGKSPLIVFDDADLDLAADIAMMANFFSSGQVCTNGTRVFVPAKCKAAFEQKILARVEPIRAGDVFDPQTNFGPLVSFPHRDNVLRYIAKGKEEGARVLCGGDVLKGDGFDNGAWVAPTVFTDCSDDMTIVREEIFGPVMSILTYESEDEVIRRANDTDYGLAAGIVTADLNRAHRVIHQLEAGICWINTWGESPAEMPVGGYKHSGIGRENGVMTLQSYTQVKSIQVEMAKFQSIF

SEQ ID NO: 14870 - protein, 490 aa, Escherichia coli
MSRMAEQQLYIHGGYTSATSGRTFETINPANGNVLATVQAAGREDVDRAVKSAQQGQKIWASMTAMERSRILRRAVDILRERNDELAKLETLDTGKAYSETSTVDIVTGADVLEYYAGLIPALEGSQIPLRETSFVYTRREPLGVVAGIGAWNYPIQIALWKSAPALAAGNAMIFKPSEVTPLTALKLAEIYSEAGLPDGVFNVLPGVGAETGQYLTEHPGIAKVSFTGGVRSGKKVMANSAASSLKEVTMELGGKSPLIVFDDADLDLAADIAMMANFFSSGQVCTNGTRVFVPAKCKAAFEQKILARVEPIRAGDVFDPQTNFGPLVSFPHRDNVLRYIAKGKEEGARVLCGGDVLKGDGFDNGAWVAPTVFTDCSDDMTIVREEIFGPVMSILTYESEDEVIRRANDTDYGLAAGIVTADLNRAHRVIHQLEAGICWINTWGESPAEMPVGGYKHSGIGRENGVMTLQSYTQVKSIQVEMAKFQSIF

SEQ ID NO: 14871 - protein, 270 aa, GIBBERELLA ZEAE PH-1
MAERNLSQIISQLKHSPSMSYTDANALLSKAKLALLKLNALTPSPSTPTQLLPLARETYEQGALFAIRARNPEAFTRYVQQLQPFYELPASVLPPNLLERNKVTGLSLLLLLTQGRYAEFHTELESLENREGGGGDVESDRYLGYPIRLERWLMEGSYDRVWKAMKSSEVPCDEYSVFSEILKNQIRSEIASSSERAYPSLPISSTKSLLFLDSEGDVISFAHHRGWIVRDGHIYFPDAAEGENGDQNKEMSQMVIENALGYARELETIV

SEQ ID NO: 14872 - protein, 321 aa, Fusobacterium nucleatum subsp. nucleatum ATCC 25586
MAKIVECIPNYSEGKDLAKIERIVAPYKNNPKIKLLSVEPDANYNRTVVTVLGDPEEVKKAVIESIGIATKEIDMNVHKGEHKRMGATDVVPFLPIQEMTTEECNEISKEVGKAVWEKFQLPVFLYESTATAPNRVSLPDIRKGEYEGMAEKLKQPEWAPDFGERAPHPTAGVTAIGCRMPLIAFNINLATTNMDIPKEIAKAIRFSSGGFRFIQAGPAEILDKGFVQVTMNIKDYTKNPIYRIMETVKMEAKRWGVKVTGCEIIGATPFASLTDSLKYYLACDGIKDDVDAMSMDKVVELMIKYLGLTDFDVKKVLEANI

SEQ ID NO: 14873 - protein, 274 aa, Glycine max
MEIFPIPAESYTLGFIGAGKMAESIARGAVRSGVLPPSRIRTAVHFNLARRGAFESFGVTVLPSNDDVVRESDVVVLSVKPQLVKDVVSKLTPLLTKNKLLVSVAAGTKLKDLQEWAGNDRFIRVMPNTPAAVGQAASVMSLGGSATEEDGNIIAQLFGSIGKIWKAEEKYFDAITGLSGSGPAYVYLAIEALADGGVAAGLPRDLSLSLASQTVLGAASMVSQTGKHPGQLKDDVTSPGGTTITGIHELENGGFRGTLMNAVVAAAKRSRELS

SEQ ID NO: 14874 - protein, 197 aa, Triticum aestivum
PLRRSNPSAGYAMHLDRPPSFLKKNLHRLHVLVLNTGHHWNRGKLKANKWEMYASGPPNNNREIAGMWKAKNFTIHGVMKWLDAQLPRYPHLKVFYRSLSPRHFFNGEWNTGGTCDNKDPLAKGTRVFQNHFEDADGEGAVKGTRIKLLDITALSRLRDEGHISKYSIRATPGVQDCLHWCLPGVPDTWNEILAAQL

SEQ ID NO: 14875 - protein, 428 aa, Pseudomonas syringae pv. tomato str. DC3000 [sequence omitted]

SEQ ID NO: 14876 - protein, 370 aa, Pseudomonas syringae pv. tomato str. DC3000
MIKSRAAVAFEAKKPLEIVEVDVAMPKAGEVLLKVVASGVCHTDAYTLSGADPEGIFPSILGHEGGAIVEAIGEGVTSVAVGDHVIPLYTPECRQCKFCRSGKTNLCQAIRSTQGKGLMPDGTTRFSYKGEPIFHYMGTSTFSEYTVLPEISVAKIDKKAPLEKVCLLGCGVTTGIGAVLNTAKVKPGDTVAVFGLGGIGLSAVIGAVKAKAARIIAIDINPAKFEIAKQLGATDCVNPKDFDRPIQEVIVDMTDGGVDFSFECIGNVQLMRSALESCHKGWGESVIIGVAGAGQEISTRPFQLVTGRVWRGSAFGGVRGRTELPSYVDMAQTGEIPLDTFITHTMGLEDINKAFDLMHEGKSIRTVIHF

SEQ ID NO: 14877 - protein, 512 aa, Glycine max
  unsure (1)..(512): unsure at all Xaa locations
EVRREKWQSPLPSRQLFTKMESGKFPLLNKXRFPIINPATEDIIGHIPAATKEDVDLAVDAAKRAFSHNKGKDWSSAPGSVRARYLRAIASKITEKKDELGKLEAIDCGKPLDEALADLDDVIGCFNYYAELAEGLDAKQNAPVSLPMETFKSYVLKEPIGVVALITPWNYPLLMATWKVAPALAAGXTAILKPSELASVDCLELSEICXEVGLPPRVLNIVTGLGXHEAGAPLAAHPDVDKIAFTGSSATGSKIMTAAAQLIKPVSLELGGKSPIIVFEDVDLDKAAEWTIFGCFWTNGQICSATSRLIVHESIATEFLNRIVKWXKNIKISDPLEEGCRLGPIVSEGQYEKILKFISNAKSEGATILTGGSRPEHLKKGFFVEPTVITDVTTSMQIWREEVFGPVLCVKTFSTEEEAIDLANDTVYGLGSAVISNDLERCERITKAFKAGIVWINCSQPCFTQAPWGGIKRSGFGRELGEWGLDNYLSVKQVTQYISDEPWGWYQSPSRL

SEQ ID NO: 14878 - protein, 498 aa, Hypericum androsaemum
MEFLLITQCSLLFVATYLLVNHVILRGRSKNNGSTKLPPGPRPLPIIGNLLALRDKPHKSLAKLARVHGPLVTLKLGQVTTVVVSSPATAREILQKHDATLSNRYIIDAIRAQGHHEAGLAWVPVGPTWRKFRKVCYSHIFTNQKLNSSQHVRQRTIQQLLAEARESCRVGEAMDVGKAAFRAALSSLSISVMSLDLADAASDTAREFKELARCIMNDVGEPNLADYFPVLKRFDPQGVRGRVEISFGRILDLFGSIIADRMEKRGADEDILDTLLTTHDENPELVEINDIKHLLLDLFVAGTETTSSTLEWAMAELLHKPTTMAKAKAELEQIIGKGNSIDQESEVSRLPYLQAVIQETLRLHPAVPLLLPRRAGEEVHVSGFTIPKDAQVLVNVWAMGRDPEVWEDPCSFTPERFLGSSIDVIGTCFELIPFGAGRRICPGLPLAMRMLQMMLGNLLLSFDWKLPDGVTPECMDMEDRFGITLQKAQPLLAIPLSL

SEQ ID NO: 14879 - protein, 401 aa, Solanum tuberosum
MAFSAGKSYAFSTNFDPLQQNLWGSKPPISSLSIKDIDFKQCDKHNILSKKPLYISAVLSGFGHADESKEFKSRDPLVQCNAYEASQPQSIPIDIEFGQEAQAAATQKLKIGLYFATWWALNVVFNIYNKKVLNAFPFPWLTSTLSLAAGSLMMLVSWATKIAETPKTDFDFWKALFPVAVAHTIGHVAATVSMSKVAVSFTHIIKSGEPAFSVLVSRLLGETFPLPVYLSLLPIIGGCGLAAITELNFNLIGFMGAMISNLAFVFRNIFSKKGMKGKSVGGMNYYACLSMMSLLILIPFAIAVEGPQVWALGWQNAVSQIGPNFIWWVVAQSVFYHLYNQVSYMSLNEISPLTFSIGNTMKRISVIVSSIIIFQIPIQPINALGAAIAILGTFLYSQAKQ

SEQ ID NO: 14880 - protein, 321 aa, Mucor mucedo
MSTDYLTLNRTGDKMPIRGFGCWKIDTKDCEETVYQAIKTGYRLFDGACDYGNEVEVGRGINKAINEGLVKREDLFIVTKLWNTFHSKKHVRALFDRQLKDTGLEYFDLYLIHFPVPLQYVDPATVYPPGWYVGDAKSLQFEQSPIHECWAELEKIVDAGLARNIGVANFNCQAILDLLTYARIKPAVLQIELHPYLPQERLVKWVKEQGIQITAYSSFGPTSYVDLTESGKTYTSLLEHASVKSVADKHNVSTGQVLLRWALDREFAVIPKSVNAGRMKANLEILDIKLDAEDNKTLDSLKTNQRFNDPMTYGFGLPLFD

SEQ ID NO: 14881 - protein, 402 aa, Pirellula sp. 1
MSDNKGVVYLGAGKVDVQSIDDPKLELSYRGKTRQCHHGVILKVISTNICGSDQHMVRGRTTAPAGMVLGHEITGEVIEVGRDVEFIKKGDICSVPFNIACGRCRCCKEGDTGVCENVNPDRPGAAYGYVDMGGWIGGQSRYVMVPYADWNLLAFPDRDQALAKIRDLTMLSDIFPTGYHGAYTAGVTTGSTVYVAGAGPVGLACAHAAQLLGAAVVIVGDMVEERLAQARSFGCETVDLKTDASLPDMIEQILGSREVDCAVDCVGFEARGHGGDSGVEKPATVLNQVMEVTRVGGGVGIPGLYVTDDPGGVDEAARTGNLSLRIGLGWAKSLHFTTGQCPVMKYNRGLMMAILHDRCQIAKAVNATVISLDDAPQGYADFDQGAAKKFVLDPHGVLAAST

SEQ ID NO: 14882 - protein, 298 aa, Triticum aestivum
  unsure (1)..(298): unsure at all Xaa locations
MRAMASGGGNWLGFSLSPHMAMEVPSSEPDHAQAQPASASAMSASPTNAATCNLLFSQPAQMAAPPPGYYYVGGAYGDGTSTAGVYYSHHSVMPITSDGSLCIMEGMMPSSSPKLEDFLGGGNGSGHDAVTYYSHHQQQQDQQDQEASRIYQHHQQQLAPYNFQXLDTFGQRTSQYRGVTSRHRWTGRYEAHLWDNSCKKDGQTRKGRQVYLGGYDNEDKAARAYDLAALKYWGPSTNTNFPLENYREEVEEMKSMTRQEFVAHLRRRSSGFSRGASIYRGVTRHHQHGRWQARIGRV

SEQ ID NO: 14883 - protein, 594 aa, Spinacia oleracea
MASLPVNKIIPSSTTLLSSSNNNRRRNNSSIRCQKAVSPAAETAAVSPSVDAARLEPRVEERDGFWVLKEEFRSGINPAEKVKIEKDPMKLFIEDGISDLATLSMEEVDKSKHNKDDIDVRLKWLGLFHRRKHHYGRFMMRLKLPNGVTTSEQTRYLASVIKKYGKDGCADVTTRQNWQIRGVVLPDVPEIIKGLESVGLTSLQSGMDNVRNPVGNPLAGIDPHEIVDTRPFTNLISQFVTANSRGNLSITNLPRKWNPCVIGSHDLYEHPHINDLAYMPATKNGKFGFNLLVGGFFSIKRCEEAIPLDAWVSAEDVVPVCKAMLEAFRDLGFRGNRQKCRMMWLIDELGMEAFRGEVEKRMPEQVLERASSEELVQKDWERREYLGVHPQKQQGLSFVGLHIPVGRLQADEMEELARIADVYGSGELRLTVEQNIIIPNVENSKIDSLLNEPLLKERYSPEPPILMKGLVACTGSQFCGQAIIETKARALKVTEEVQRLVSVTRPVRMHWTGCPNSCGQVQVADIGFMGCMTRDENGKPCEGADVFVGGRIGSDSHLGDIYKKAVPCKDLVPVVAEILINQFGAVPREREEAE

SEQ ID NO: 14884 - protein, 551 aa, Bordetella bronchiseptica RB50
MSNIVEIKVPDIGDFKEVEVIEVLVSAGDTIKAEQSLITVESDKASMEIPASAAGVVKSVKVKVGDKIAEGTVILEVEAAGEAAAAPKAEQAPEAAEAPKADAAKAEAPQAEAPAAAGPIEVKVPDIGDFKEVEVIEVLVAEGDTIKAEQSLITVESDKASMEIPASAGGVVQSLKVKVGDKVAMGTVIAVVQGQGAAAPAAKAEAPAAAPAAAEPAAPASPAAPAPAPAQRPAPAAALQDEDLKPGQLPHASPSVRKFARELGVNLSRVTGSAAKGRITADDVRAYVKQALSAGAPAGASGGGDGAALGLLPWPKIDFTKFGPIEAKPLSRIKKISGANLHRNWVMIPHVTNNDEADITDLEALRVALNKENEKSGVKVTMLAFLIKAVVAALKKFPEFNASLDGDNLVLKQYYHIGFAADTPNGLVVPVVRDADKKGILELARETSELARKAREGKVSPAEMQGGCFSISSLGGIGGTHFTPIINAPEVAILGVSRSAHKPVWDGKQFVPRLTLPLSLSYDHRVIDGASAARFNAYLGQLLADFRRIAL

SEQ ID NO: 14885 - protein, 591 aa, Bordetella bronchiseptica RB50
MSNIVEIKVPDIGDFKEVEVIEVLVAAGDTIKAEQSLITVESDKASMEIPASSAGVVKSVKVKVGDKVAEGTVILDVEAAGEAAAAPKAEAPKTEAPKAEAPKAPAAKASAPAAAAYSGSADLECDMLVLGAGPGGYSAAFRAADLGMDTVMVERYATLGGVCLNVGCIPSKALLHNAAVIDEARALAAHGISFGEPKVDLDKLRGYKDSVVAKLTGGLAGMARARKVRVVTGTGEFADPHHLTVTDGEGKKQTIRFKQAIIAAGSQSVKLPFLPDDERIVDSTGALQLRAIPKKMLIIGGGIIGLEMGTVYSTLGARLDVVEMLDGLMQGADRDLVKVWQKMNAPRFDNIMLKTKTVGAEARKDGIYVSFEGEGAPKEPQRYDLVLQAVGRSPNGKKIGAERAGVAVTERGFIEVDRQMRTNVPHIYAIGDVVGQPMLAHKAVHEGHVAAEAAHGEKSFFDARVIPSVAYTDPEVAWVGLTEDEAKKQGVKVEKGLFPWAASGRAIANGRDEGFTKLLFDAETHRIVGGGIVGTHAGDLISEIALAIEMGADMVDIGKTIHPHPTLGESVGMAAEVAEGVCTDLPPMRKK

SEQ ID NO: 14886 - protein, 255 aa, Candida albicans SC5314
MPDGTPRFTCKGKEILHFMGCSTFSQYTVVADISVVAINEKAEFEKACLLGCGITTGYGAATITANVQEGDNVAVFGGGCVGLSVIQGCKERKVNKIILVDINDKKEEWGKQFGATDFVNSTKLPEGTTIVDKLIEMTDGGCDYTFDCTGNVNVMRNALEACHKGWGTSIIIGVAAAGKEISTRPFQLVTGRVWKGAAFGGVKGRSQLPGIVEDYLDGKLKVEEFITHREPLDKINTAFDEMHGGDCIRAVVSLW

SEQ ID NO: 14887 - protein, 523 aa, Glycine max
  unsure (1)..(523): unsure at all Xaa locations
MAMANLARRKGYAVVLSSRSSLCLTRWRGFASGSDENDVVVIGGGPGGYVAAIKAAQLGLKTTCIEKRGTLGGTCLNVGCIPSKALLHSSHMYHEAKHAFANHGVKFSSVEVDLPAMMAQKDKAVSNLTKGIEGLFKKNKVNYVKGYGKLVSPSEVSVDTTEGGNTVVKGKHIIIATGSDVKSLPGITIDEKKVVSSTGALALTEIPKRLIVIGAGYIGLEMGSVWGRLGSEITVVEFASEIVPTMDAEVRKQFQRSLEKQGMKFKLKTKVVGVDTSGDGVKLTLEPAAGGDQTTLEADVVLVSAGRTPFTAELGLDKIGVETDKIGRILVNERFATNVSGVYAIGDVIPGPMLAHKAEEDGVACVEYIAGKVGHVDYDKVPGVVYTMPEVASVGKTEEQVKELGVEYRVGKFPFLANSRAKAIDNAEGLVKILAEKETDKILGVHIMAPNAGELIHEAAIALQYDASSEDIARVCHAHPTMSEAVKEAAMATYDKXHSHLKRRLLLSXLLSFLSKNFTMTWR

SEQ ID NO: 14888 - protein, 474 aa, Dechloromonas aromatica RCB
MSKQFDVLVIGGGPGGYIAAIRASQLGFLAACAESNPYADPKGEPRLGGTCLNVGCIPSKALLHTSHLFEEANHSFEAQGIKVGKATIDVPVMKARKDGVVNQLTSGIKMLLKKNKVSFLAGHGSFVGKEGDYWKVKVGAEEVLTKQVIVATGSKARHLPNLPVDQKIVMDNEGALNQESVPKKLAIIGAGVIGLEMGSVWRRVGSEVTVLEAMPDFLAAADVDVAKEALKLFSKQGLNIQMGVKIGDIKATKKSVSIAYTDKDGKEQKLDADRLIVSIGRVPNTDGLNGEAVGLKLDARGFVEVDGHCKTNLPGIWAIGDVVRGPMLAHKAHEEGVMVAELMAGQAGHCNFDTIPWVIYTSPEIAWVGKTEQQLKAEGVEYKAGKVPFLANGRALGMGDPSGFVKMLACKKTDRILGVHIIGANASEIIAEAVVAMEFGGASEDLARICHAHPTLSETVHEAALACDKRTLNF

SEQ ID NO: 14889 - protein, 265 aa, Desulfovibrio vulgaris subsp. vulgaris str. Hildenborough
MQTTLGCIGCGNMGSAILRGLSGREGLRLVGCDPTGAKLAALADAGVEGVADIAAAVRASDIVLVAVKPGQVGAVLGAAMPELDSGKVVVSIASGVSVGSLREMSGGRCPVVRVMPNTPAMVGAGVFALCFEDATLDEVRRTLVKELFEALGRVLVLPEEKFNAFTAVVGCGPAYVFHFMEAVVEAAVTLGFPRHEATDMVVDLFAGSVKLAATSGTHLSLLREAVCSPAGNTIAAMNQFDRDAVRGRIIDAILAAYRRGQEMER

SEQ ID NO: 14890 - protein, 407 aa, Dechloromonas aromatica RCB
MSIIEVQVPQLSESVAEGTLASWKKKIGEAVARDEILIDIETDKVVLEVPSPAAGVLVEIIKADGETVVSGELIARIDTEAKAGVAAPAAEAPKAAAAAAPAPAAAAPAGTASPSARKILDEKGVAAADVAGSGRGGRVTKEDAVAAAPKSGPVAAPAAAKVSLPTPPVTVALGDRTEQRVPMTRLRARIAERLLQSQQTNAILTTFNEVNMGPMMALRKQYGEKFEKTHGVRLGFMGFFVKAACAALQKFPVLNASVDGNDIVYHGYIDIGIAVGSPRGLVVPIIRNADQMSIAEIEKKIAEFGAKAKDGKLTIEELTGGTFSISNGGIFGSMMSTPIINPPQSAILGIHATKDRAMVENGQVVVRPMNYLAMSYDHRIIDGREAVLGLVTMKEALEDPSRLLLGV

SEQ ID NO: 14891 - protein, 298 aa, Triticum aestivum
FPGYVIHLSSGIAGFTAAYWVGPRLKSDRERFSPNNILLMIAGGGLLGMGWAGFNGGAPYAANITASVAVLNTNVSAATSLLTWTCLDVIFFGKPSVIGAVQGMMTGLVCITPGAGLVQTWAAVVMGIFAGSVPWFTMMILHKKSALLMKVDDTLAVFHTHAVAGLLGGILTGLLATPELMTMESSVPGPKGAFYGGGIKQVGKQLAGAAFVIVWNLVVTTLILLGIGLFVPLRMPDDQLMIGDDAAHGEEAYALWGDGEKFDATRHDVSRGAGGEREMGTAEQRLAGMGARGVTIQL

SEQ ID NO: 14892 - protein, 143 aa, Cytophaga hutchinsonii
MNIFVGSLPFSLEENELREFFEEYGEVSSVKIISDKFTGRSKGFGFVEMPDDAAAQKAIDELNGAEVNGRTIVVNKSEEKKDGPRRSGFSGGGNRGGGGGYSGGGNGGGGYGGNRSGGGGYGGGGNSRGFGGSGTGRNSRGDR

SEQ ID NO: 14893 - protein, 406 aa, Streptococcus pyogenes MGAS315
MVCATIGVGPLSKREFIGVNAIAEVHEMRENTTLLHGYTVIDEFTGAASVPIYQTSTFHNSELYCPSQKHLYTRFSNPTTEALEDGLACLEKATYAVAYASGMAAISTVLMLLKAGDHVIFPLEVYGGTCQFATAILPNYQIETSFVDMADLATVKASIRPNTRMIYLETPSNPLLKICDISELVQLAKAYGVLTVADNTFMTSLYQEPLAMGVDIVVESVTKFINGHSDVVAGLAATNNEAIYNQLKLFQKNFGAIVGVEDAWLILRGMKTMGIRMEQAVKNAQQLANYLAKHPKVLKVHYPGLDSHPNHDTHLQQAKNGGAVLSFELASKEELMTFTHRIQLPILAVSLGGVESILSHPATMSHACLSSQARLEQGVVDGLLRLSCGVENIEDLLADFEQALAF

SEQ ID NO: 14894 - protein, 357 aa, Nostoc sp. PCC 7120
MRKRIGILTSGGDCPGLNCVIRAVVSHATLTYDWEVLGIPYATQGLRERQAIALNMHGWDLRGIDPLLNMGGTILGTINKGDTLAHVDEMLASYQALALDALIVIGGDGSLGILHELASRGNWNLVAIPKTIDNDVALTERAVGFDTAVNTIVDALNRLTFTAASHDRVMIVEVMGRSAGHLALHAGIAGGADVILIPEISYTISGLCQHIAELRDRWQRKFAIVVVAEGAKLCLEDVQENIASSCAPSKCGRGQYIADQIAQCSKNLIDTRVSVLGHIQRGGIPSALDRLTATVFGKTAVDLIAQGKFGQMVAWQNGEAIPVPIQDVVAQSPLHVNPQGSLVQSARCLGIYVGEKT

SEQ ID NO: 14895 - protein, 428 aa, Panicum miliaceum
MAALSRAASCLTRRPQMQPSRLQAARAMASSLFGHVEPAPKDPILGVTEAFLADPSPDKVNVGVGAYRDDNGKPLVLDCVREAERRIAGNLNMEYLPMGGSIKTIEESLKLAYGEDSEHIKDKRIAAVQALSGTGACRLFADFQKRFLPDSQIYIPTPTWSNHHNIWRDAQVPQKTFTYYHPETRGLDFAGLMNDIKNAPDGSFFLLHACAHNPTGVDPTEEQWREISHQFKVKKHFPFFDMAYQGFASGDPERDAKAIRIFLEDGHQIGCAQSYAKNMGLYGQRVGCLSILCEDEMQAVSVKSQLQQIARPMYSNPPVHGALVVSIILSDPELKSLWLKEVKGMADRIIGMRTALKENLEKLGSSLSWEHITNQIGMFCYSGMTPEQVDRLTNEFHIYMTRNGRISMAGVTTGNVAYLANAIHEVTK

SEQ ID NO: 14896 - protein, 323 aa, Dechloromonas sp. RCB
MLALAALIPHATMAADPTPDASQVVAAVEGVFGVTPGERRNHIKGTCAAGEFVGTKEAAKLSRSPLFSGKPVPVVARFSLSGGNPKAPDVAKSARGMALQFQLPKGQLHHITMLNTPMFGAANPQTFLDLMQALQPDPATGKPDPEKMKAFKASHPDNQAQAQYLASNNPPASYASSSYWGIHTFKFVDKKGKATLVRWQFVPQDGEKRLSDDELKTAGANFLESALIERAKQGAVRWDMMVSIGQPGDSETDPTVLWPAERPRIKAGTLTIRSAEAQKGAPCEPINFDPLVMAPGIQPTDDPVLRFRSPAYAVSFGKRLSER

SEQ ID NO: 14897 - protein, 316 aa, Buchnera aphidicola str. Bp (Baizongia pistaciae)
MNQLECLKKYTDIVVDSGDLVSINKFKLGDVTTNPSLIRQVMSLQKYQYIIYDSIRYAKKKGGSHKFKLENAIDKVSVILGSEILKNISGKISTEIDSRLSFNTNLCIERAKKLISMYEEHDIHRDRVLIKLAATWESVSAAKELKKENIQSNLTLLFSFAQAKICAEAGVFLISPFVGRIYDWYKSKSLIKSAMIDDDPGVNAVRKIYQYYKEYGYHTIIMGASFRNVDQVLALSGCDRLTISPNLLHKLQLSDDLVIRKLIPPKHKKLQPVCMSKSEFCWFHNEDAMAVEKLSEGIRQFGKDQQELENIINNNF

SEQ ID NO: 14898 - protein, 474 aa, Bacillus subtilis
MATEYDVVILGGGTGGYVAAIRAAQLGLKTAVVEKEKLGGTCLHKGCIPSKALLRSAEVYRTAREADQFGVETAGVSLNFEKVQQRKQAVVDKLAAGVNHLMKKGKIDVYTGYGRILGPSIFSPLPGTISVERGNGEENDMLIPKQVIIATGSRPRMLPGLEVDGKSVLTSDEALQMEELPQSIIIVGGGVIGIEWASMLHDFGVKVTVIEYADRILPTEDLEISKEMESLLKKKGIQFITGAKVLPDTMTKTSDDISIQAEKDGETVTYSAEKMLVSIGRQANIEGIGLENTDIVTENGMISVNESCQTKESHIYAIGDVIGGLQLAHVASHEGIIAVEHFAGLNPHPLDPTLVPKCIYSSPEAASVGLTEDEAKANGHNVKIGKFPFMAIGKALVYGESDGFVKIVADRDTDDILGVHMIGPHVTDMISEAGLAKVLDATPWEVGQTIHPHPTLSEAIGEAALAADGKAIHF

SEQ ID NO: 14899 - protein, 478 aa, Pseudomonas putida
MTQKFDVVVIGAGPGGYVAAIKAAQLGLKTACIEKYTDAEGKLALGGTCLNVGCIPSKALLDSSWKYKEAKESFNVHGISTGEVKMDVAAMVGRKAGIVKNLTGGVATLFKANGVTSIQGHGKLLAGKKVEVTKADGTTEVIEAENVILASGSRPIDIPPAPVDQNVIVDSTGALEFQAVPKRLGVIGAGVIGLELGSVWARLGAEVTVLEALDTFLMAADTAVSKEAQKTLTKQGLDIKLGARVTGSKVNGNEVEVTYTNAEGEQKITFDKLIVAVGRRPVTTDLLAADSGVTIDERGYIFVDDYCATSVPGVYAIGDVVRGMMLAHKASEEGIMVVERIKGHKAQMNYDLIPSVIYTHPEIAWVGKTEQALKAEGVEVNVGTFPFAASGRAMAANDTGGFVKVIADAKTDRVLGVHVIGPSAAELVQQGAIAMEFGTSAEDLGMMVFSHPTLSEALHEAALAVNGGAIHVANRKKR

SEQ ID NO: 14900 - protein, 328 aa, Dechloromonas aromatica RCB
MSKAPMRVAITGAAGQIGYSLLFRIASGEMLGKDQPVILQLLDLPQAQQAVKGVMMELEDCAFPLLAGMVATDDPNVAFKDADVCLLVGARPRTKGMERADLLTANGAIFTVQGKAIAENAKEDVKVLVVGNPCNTNAFIAAAAAKKVGRTNPNNYHGMLRLDHNRALSQLAGKTGRAVSSLKKLVVWGNHSPTMYADYRFCTSNGDSVKALVNDHAWNNDVFLPTVGKRGAAIIEARGLSSAASAANAAIDHVRDWVLGSDEWVTMGVPSDGSYGIPAGIVFGFPCECKGGKFSIIQGLEIDEYSREKINFTLKELTDEAEAVKDML

SEQ ID NO: 14901 - protein, 427 aa, Methylococcus capsulatus str. Bath
MSKIVDILAREILDSRGNPTVQAEVILDSGAEGSAMVPSGASTGAREAIELRDGDASRYGGKGVLKAVENVRGPIKAALTGMDAADQAAIDRRLIELDGSDNKGVLGANAILAVSLATAHAAAADAKKPLYAYLNRSGEFLLPVPMMNIINGGAHADNSIDMQEFMILPVGAPSFREALRYGAEVFHALKKVLSDRGLATGVGDEGGFAPNLPSNEAAIGIILEAIEKAGYRPGEDICLGLDVASSEFYSDGIYTLASEGRRFTSEEFSDHLAAWVDKYPIVSIEDGMAENDWHGWGIHTDRLGRRIQLVGDDLFVTNPAILKQGIEARIANSILIKVNQIGTLTETLEAIHIARKAGYTSVVSHRSGETEGTTIADIAVATCTGQIKTGSLSRSDRIAKYNRLLKIEEELGDKARYGGRGAVKNLA

SEQ ID NO: 14902 - protein, 294 aa, Zea mays
MLCLSLVAPPPMAPAGRRRRRRHPTSVTRRGQTLAALPCHCGRRHVIGASSAAALLPFLAPPSLAAPPVDPDVVLQRVHPSRPDWYEEFYASAMDQGMKSYEAEIAGYKVKLFSHLSPAGKNILELGVGTGPNFKYYASEDGVNVIGVDPNKHMEKYARAAVVSAGLASSSFTFRRGVAEALPAEDNSMDVVVGTLVLCSVNNIDMALREIKRVLKPGGLYVFIEHVAAPDGTLLRLVQGALDPLQQLVADGCHLTRRTGQSIRDAGFSSLSLDGVRLSNAYIISPHVYGVACK

SEQ ID NO: 14903 - protein, 419 aa, Azotobacter vinelandii
MASAQEATLDSGDTAWMLTATALVLFMTIPGLALFYGGMVRSKNLLSVMMQCFAITGLISVLWVLFGYSLAFDTAGMEEGVLNFSSFVGGLDKAFLSGLTTDSLVGTFPESVFITFQMTFAIITPALITGAFAERMKFSSMLVFMSAWFLLVYAPIAHMVWSGNGALMWDWGVLDFAGGTVVHINAGVAGLVACLVLGKRKGYPGVAMTPHNLGYTLVGAAMLWVGWFGFNAGSAIAANGTAGMAMLVTQIATAAAALAWMAAEWLTHGKPSALGIASGVVAGLVAITPAAGTVGPMGALVIGLASGSICFYCATAVKRRFGYDDSLDAFGVHGVGGIVGAVLTGLFAAPALGGFGEIDSIASQLWIQIKGVLFTVIYTGVATFVILKAIERVIGLRISEEEETMGLDLSLHNERGYNL

SEQ ID NO: 14904 - protein, 453 aa, Arabidopsis lyrata subsp. petraea
MESSISQTLSKVSDPTTALLIVVSLFIFIGFITRRRRPPYPPGPRGWPIIGNMLMMDQLTHRGLANLAKKYGGLCHLRMGFLHMYAVSSPDVARQVLQVQDSVFSNRPATIAISYLTYDRADMAFAHYGPFWRQMRKVCVMKVFSRKRAESWASVRDEVDKMVRSVSCNVGKPINVGEHIFALTRNITYRAAFGSACEKGQDEFIRILQEFSKLFGAFNVADFIPYFGWIDPQGINKRLVKARNDLDGFIDDIIDEHMKKKENQNAVDDGDVVDTDMVDDLLAFYSEEAKLVSEAADLQNSIKLTRDNIKAIIMDVMFGGTETVASAIEWALTELLRSPEDLKRVQQELAEVVGLDRRVEEADIEKLTYLKCTLKETLRMHPPIPLLLHETAEDTSIDGFFIPKKSRVMINAFAIGRDPTSWADPDTFRPSRFLEPGVPDFKGSNFEFIPFGS

SEQ ID NO: 14905 - protein, 340 aa, Glycine max
TCEKTTEGETDKVTIDVSSPESGVILKLLANEGDTVEPGNKIAIISRSADATHVAPSETISEKAAPQPTQKVSEEKKAPKVETAPAKEKPKTPPATLKSPTEPQLPPKERERRVPMTRLRKRVATRLKDSQNTFAMLTTFNEVDMTNLMKLRSDYKDAFVEKHGVKLGLMSGFVKAAVNALQHQPIVNAVIDGDDIIYRDYIDISIAVGTPKGLVVPVIRNADTMNFADIEKQINTFAKKANDGSLSIDEMAGGTLTISNGGVYGSLLSTPIINPPQSAILGMHSIVSRPTVVGGNIVPRPMMYVALTYDHRIIDGREAVFFLRRIKDIVEDPRRLLLDI

SEQ ID NO: 14906 - protein, 292 aa, Oryza sativa
  unsure (1)..(292): unsure at all Xaa locations
MAGREDGAAAGAMEEGQDSKEVKCENSEDGSNTSRRCQGNDMISVQFMQKILTEILGTYFMIFAGCGAVVVNLSTGGAVMFPGICVVWGLVVTVLVYSVGHISGTHLNPAVTVAFATXGCFPWKQGLTAVPSYVVAQVLGSTMASLTLRVVFGGGGSGXRGEHLFLGTTPAGSMAQAAALEFVISFFLMFVVSSVATDNRAIGELAGLAVGATVAVNVLFAGPVTGASMNPARSLGPAMVAGRYGGVWVYVAAPVSGAVCGAWAYNLLRFTDKTLRVIAKSGSFLRRSSRRS

SEQ ID NO: 14907 - protein, 480 aa, Desulfovibrio vulgaris
MTKHKLTTNAGAPVPDNQNAMTAGPRGPMLLQDVWFLEKLAHFDREVIPERRMHAKGSGAYGTFTVTHDITSYTKAALFSKIGKKTDLFVRFSTVAGERGAATAERDIRGFAIKFYTEQGNWDLVGNNTPVFFLRDPLKFPDLNHAVKRDPRTNMRSAKNNWDFWTSLPEALHQVTVVMSDRGIPASYRHMHGFGSHTFSFISPDNQRYWVKFHLRTQQGIKNLTDAEAEAIVARDRESHQRDLYDSIERGDFPRWTNYVQVMPEKDAEKLPYHPFDLTKVWFHKDCPLIEVGVLELNRNPENYFAEVEQAAFNPANVVPGISFSPDKMLQGRLFSYGDAHRYRLGVNHHLIPVNAARCPVHSYHRDGAMRVDGNHGSTLAYEPNSYGEWQEQPDFAEPPLAIRGDAAHWNFREDDADYYDQPGRLFRLMTPQQQDELFQNTARAMGDAPEEIKRRHVGNCAKADPAYGAGVARALGLKM

SEQ ID NO: 14908 - protein, 393 aa, Chlamydophila pneumoniae TW-183
MIFEFRFPKIGETSSGGSIVRWLKNLGDHVARDEPLIEVSTDKIATELPSPKAGRLVRFCVNEGDEVASGDVLGLIELEEISEADDESTSCPLTSCETKSEAGSSSSSVWFSPAVLSLAQREGIGLDNLQKIAGTGKGGRVTRQDLEAYISESQQVSIPEIFQGEVNRIPMSPLRRAIASSLSKSSDEVPHASLVVDVDVTDLMHLISGERQRFLDTHGVKLTITSFIVQCLAQTLRQFPLLNGSLDGTTIVMKKSVNVGVAVNLNKEGVVVPVIHNCQDRGLVSIAKALADLSSRARLNKLDPSEVQDGSVTVTNFGMTGALIGMPIIRYPEVAILGIGTIQKRVVVRDDDSLAVRKMVYVTLTFDHRVLDGIYGSEFLTSLKNRLESVTMG

SEQ ID NO: 14909 - protein, 487 aa, Mycobacterium tuberculosis CDC1551
MSDSATEYDKLFIGGKWTKPSTSDVIEVRCPATGEYVGKVPMAAAADVDAAVAAARAAFDNGPWPSTPPHERAAVIAAAVKMLAERKDLFTKLLAAETGQPPTIIETMHWMGSMGAMNYFAGAADKVTWTETRTGSYGQSIVSREPVGVVGAIVAWNVPLFLAVNKIAPALLAGCTIVLKPAAETPLTANALAEVFAEVGLPEGVLSVVPGGIETGQALTSNPDIDMFTFTGSSAVGREVGRRAAEMLKPCTLELGGKSAAIILEDVDLAAAIPMMVFSGVMNAGQGCVNQTRILAPRSRYDEIVAAVTNFVTALPVGPPSDPAAQIGPLISEKQRTRVEGYIAKGIEEGARLVCGGGRPEGLDNGFFIQPTVFADVDNKMTIAQEEIFGPVLAIIPYDTEEDAIAIANDSVYGLAGSVWTTDVPKGIKISQQIRTGTYGINWYAFDPGSPFGGYKNSGIGRENGPEGVEHFTQQKSVLLPMGYTVA

SEQ ID NO: 14910 - protein, 323 aa, Sporidiobolus salmonicolor
MVGTTTLNTGASLELVGYGTWQAAPGEVGQGVKVAIETGYRHLDLAKVYSNQPEVGAAIKEAGVKREDLFITSKLWNNSHRPEQVEPALDDTLKELGLEYLDLYLIHWPVAFPPEGDITQNLFPKANDKEVKLDLEVSLVDTWKAMVKLLDTGKVKAIGVSNFDAKMVDAIIEATGVTPSVNQIERHPLLLQPELIAHHKAKNIHITAYSPLGNNTVGAPLLVQHPEIKRIAEKNGCTPAQVLIAWAIVGGHSVIPKSVTPSRIGENFKQVSLSQEDVDAVSKLGEGSGRRRYNIPCTYSPKWDINVFGEEDEKSCKNAVKIK

SEQ ID NO: 14911 - protein, 826 aa, Geobacter sulfurreducens PCA
MVTLTIDDKQVTVPKDATIFDAAKQAGIRIPILCHDKKLHPFGGCRMCLVEVEQMKGRQIPACTTPVTEGMIVRTMTDEIVKARKMVLELLLLKHPIDCPVCDAAGDCDLQNLTYEYGVDTNRFTDEKFNWKIDYVNPLIERDMNRCVHCGKCARICDEIVSFGAYSFINRGIEAKIGTEFDGPLNCEFCGSCVSVCPVGALISRPFKFKARWWALNKVKTVCSYCGTGCQLTLGVKDNKVLTTIYDENQGFHNGQLCTRGRWGYQFVNSSKRLTTPLIRKGDTLQPASWDEALGMVADRLKTSKDAAATLVTPRLTNEELYLLKRVVKDAVGSDNLDHSGGYAHEALTAGARESLGFPGSPSVIADIQKSELLLVIKTDAYETHPVIGFEVNLAVKRQGVALRILSDKKGKLSRLPGAQTYVHTPGAELVLVNALAKTIVDEGLHDASSVGAIKGFDAWLKSIESCTPDQAAGQCGIAADTIKAVAREYAAAGKALIMLPLGMGYPGHGKALAQALINLALLTGRVGKEGCGVLIMGEKNNSQGAADLGIHPTANGLNAQAILAGCSAGSIKTLYVVGENPVVSYPNRKQVEAALDAVEFLVVQDLFLTETASKADVVLPACSFAEKDGTFTSLGGAVQRVNRAITPLGDCRSDFDILNMLHAKLTGQAAYTSQKEAFADLAAATPGYAGLTLEGLGDAGAVRVNNCTASFVPVATSTVTTEAGKFALLTGSALNHSGTLSLYGEGPMLVCPEGYLELNKDDAAKLSITEGDAVTMKSATGELRLKAKVGTRLPQGVAFAPYHFAEASINSLTGATAITWITISK

SEQ ID NO: 14912 - protein, 433 aa, Spinacia oleracea
GASFSLHVLSKINSYKSQSTKPIRGVASMAKKSVGDLTSADLKGKKVFVRADLNVPLDDSQNITDDTRIRAAIPTIKHLINNGAKVILSSHLGRPKGVTPKFSLAPLVPRLSELLGLQVVKADDCIGPDVEKLVAELPEGGVLLLENVRFYKEEEKNDPEFAKKLASLADLYVNDAFGTAHRAHASTEGVTKFLKPSVAGFLLQKELDYLVGAVSNPKRPFAAIVGGSKVSSKIGVIESLLEKCDILLLGGGMIFTFYKAQGMSVGSSLVEEDKLDLATSLLAKAKEKGVSLLLPTDVVIADKFAADADSKIVPASGIPDGWMGLDIGPDSIKTFSEALDTTQTVIWNGPMGVFEFEKFAAGTEAIAKKLEEISKKGATTIIGGGDSVAAVEKVGVAEAMSHISTGGGASLELLEGKQLPGVLALNEADPVPV

SEQ ID NO: 14913 - protein, 404 aa, Spinacia oleracea
MESRVLSRTTAIAALPKLFRPSREAASFGFATGVKTPVGLVKDGGSLTWGRQLRPVLLLEPVQTGPVCSRREKTAVQPCRAASGSSGEAKTGFLEKYPALVTGSFFFMWYFLNVIFNILNKKIYNYFPYPYFVSVIHLFVGVVYCLASWSVGLPKRAPMDSKLLKLLIPVAVCHAIGHVTSNVSFAAVAVSFTHTIKALEPFFNAAASQFVLGQSIPITLWLSLAPVVIGVSMASLTELSFNWLGFISAMISNVSFTYRSLYSKKAMTDMDSTNIYAYISIIALFVCLPPAIIVEGPQLMKHGFNDAIAKVGLTKFISDLFWVGMFYHLYNQLATNTLERVAPLTHAVGNVLKRVFVIGFSIIAFGNKISTQTAIGTSIAIAGVALYSLIKAKMEEEKRQMKST

SEQ ID NO: 14914 - protein, 402 aa, Pseudomonas syringae pv. syringae B728a
MADQGSPRRFARIDRLPPYVFNITAELKMAARRRGEDIIDLSMGNPDGATPPHIVDKLITVAQREDTHGYSTSRGIPRLRRAISNWYKKRYEVDIDPESEAIVTIGSKEGLAHLMLATLDQGDTVLVPNPSYPIHIYGAVIAGAQVRSVPLVPGVDFFDELEKAIRGSIPKPKMMILGFPSNPTAQCVELDFFERVVALAKQYDVLVVHDLAYADIVYDGWKAPSIMQVPGAKDIAVEFFTLSKSYNMAGWRIGFMVGNPELVNALARIKSYHDYGTFTPLQVAAIAALEGDQQCVLDIAEQYRQRRNVLVKGLHELGWMVENPKASMYVWAKIPQAYAHLGSLEFAKKLLAEAKVCVSPGIGFGEYGDDHVRFALIENQDRIRQAVRGIRSMFRADDKLKS

SEQ ID NO: 14915 - protein, 399 aa, Desulfovibrio vulgaris subsp. vulgaris str. Hildenborough
MTTSFEALKNREESLLCRTYGRYPISVQRAEGSRMWDHEGREYIDLLSGIAVTSLGHCHPELAEVMARQARKLVHVSNLFYQEEQLDLAEKLLSTLHCTKAFFCNSGAEANEAAIKLARRYMQRVRGVDAHEVVTLTGAFHGRTLATVAATGQERFQDGFAPMPAGFRQAEWGDIDALRAAITPATAGVLVEMVQGEGGVRPMTQDYARAVADLCREKGVLLMVDEIQTGLCRTGRFWAHQHYGVEPDIVTSAKALANGLPMGAMMTTDEVAQGFVAGSHATTFGAGALVSSVAAATLDIMKRDRLDERATAVGGRAMERFRAIGAKLPGTIEEVRGYGLMIGIVLTFSGKEVWKELVARGFVCNNTQEKVLRLVPALTIDEADLTAFADTLEDILARR

SEQ ID NO: 14916 - protein, 925 aa, Methylococcus capsulatus str. Bath
MNPSDEIVFKLDGRPVGARPGEAILQAARRHGVEIPHLCYRDGLRPDGNCRACVVEIEGERVLAASCCRTPGEGMEVRSDSPRARSAQRMVVELLLADQPETSRSRDDELRQWAERLGVSGSRFPGREAPPPDRSNPAIAVQLDACIQCTRCVRACRETQVNDVIGYAYRGSHARIVFDQGDPMGLSSCVSCGECVQVCPTGALAPGNGAALLEADRRVDSGCPYCGVGCQLTYHVKDGKIVKVTGRDGPANHGRLCVKGRYGFDYPAHRQRLTQPLIRKPGIAKDPQGELDPADPLAAFRPASWEEALDFAADGLKRIIAEHGKHALAGFGSAKGSNEEAYLFQKLVRTGFGTNNVDHCTRLCHASSVVALLEGVGSGAVSNPVADVQHAEVVVVIGSNPIVNHPVAATFIKNAVKKGTTQLILMDPRRTELARHAAYHLPFRPDSDVALLNALLHVIVTEGLVDEEFVRLRTENYEALKQNVLAYSPEAMAPICGIDARTLREVARLYARSRASMILWGMGVSQHVHGTDNVRCLIALAMVTGQIGRPGTGLHPLRGQNNVQGASDVGLIPMCFPDYLRVDDEAARAKFERLWGVPLDGQPGLTVVEIIDAACAGRIKGMYIEGENPAMSDPNSNHAREGLASLEHLIVQDLFMTETAYFADVILPASAYAEKTGTFTNTDRIVQIGRQAVTPPGEARQDLWIIQEIARRLGLDWNYQGPREVFEEMRSAMPSIAGISWERLEREGHVTYPCASETDPGQPVIFTERFPTPSGRARIVPADIIPADERPDADYPLVLITGRQLEHWHTGSMTRRASVLDAIEPAPTVSVHPLDLEGIGAEAGDVLTVESRRGRIALFARADDGIPRGSVFIPFCYYEAAANRLTNQALDPYAKIAELKYCAVRVRKGGTVGREFGYQLRGRVA

SEQ ID NO: 14917 - protein, 174 aa, Saccharomyces cerevisiae
MGEGLLDLRSQLGFYKFYHHNPKNVLIHSIFVPTILFSGSCMLHRVKIYQSISLTAVLSVLFSIFYCLLYLPTGLLAGVLLLLLNLALIDHRVDLTFKQELGLFTIGWIFQFVGHGVFEKRRPALIDNLVQSLVLAPYFIMFEFLFKLGFMPRLKATLEHDLEIKQRNLRMQRQ

SEQ ID NO: 14918 - protein, 360 aa, GIBBERELLA ZEAE PH-1
MGYPDTFEGFCVDSPKSWNKFEKQTLTPKTWGDRDIDVEIECCGVCGSDVHTVTGGWGDFEGPLCVGHEVVGKAVRVGDKVSEIKVGDRVGVGAQVSSCLKCKLCNNKNENYCPDMVDTYNCKYPDGSVAHGGFASHIRAHEYFTFKIPDALKSEQVAPLLCAGITTYSPLVRAGVGPGKVVAVLGIGGLGHMGVQWAKALGAEVYAMTHSPSKVEDAKKLGAKEVIVTSEEGWADKYKFTFDFILNCADMTHKFDMNAYMGTLNIGGEFHNVGLPDEPLPQFTAGTFAGNAGKITGSHLGNNQEMNAMLKLAAEKNIVAWVETIDISEKGCAEAIERVKENKVRYRFTLTGFEKVFKKD

SEQ ID NO: 14919 - protein, 369 aa, Rhodopseudomonas palustris CGA009
MKTRAAVAFEAKKPLEIVELDLEGPKAGEVLVEIKATGICHTDAYTLDGFDSEGIFPSILGHEGAGIVREIGPGVTSVKPGDHVIPLYTPECRQCKSCLSQKTNLCTAIRATQGKGLMPDGTSRFSYKGQTIYHYMGCSTFSNFTVLPEIAVAKIRDDAPFDKSCYIGCGVTTGVGAVVNTAKVTPGSNVVVFGLGGIGLNVIQGAKMVGADKIVGVDINDDKEEWGRRFGMTHFVNPKKIDGDIVQHLVGLTDGGADYTFDCTGNTNVMRQALEACHRGWGVSVVIGVAEAGKEISTRPFQLVTGRVWKGSAFGGARGRTDVPKIVDWYMNGKIEIDPMITHVLKLEEINKGFDLMHQGKSIRSVVVY

SEQ ID NO: 14920 - protein, 570 aa, Oryza sativa
MNVPIVDPLQGDFPETIEEFLQYGSMKCIAFNRRGTLLAAGCANGTCVIWDFETRGIARELHDKDCTAPITSVAWSKYGHHLLASATDKSLTLWHVVNEKKIARITLQQTPLSVRLHPGGPSTPSICLACPLSSAPILVDLNTGSTTVLPAFLSDNGNLPAPNTRNKFSDGSPPFTPTAATFDKYGDLIYVGNSKGEILIIDSKSIKVHAVIPIPGGTVVKDIVFSRDGRYLLTNSNDRVIRVYDNLLPVKGSGEEIEKISSNNISYESHYEKLKANGASCLAISCELLDAIAKIPWKAPCFSGDSEWIVGASASKGEHRLCIWNRSGRLVKILEGPKEALIDIAWHPVDPTIVSVSVAGLAYIWAKEHVENWSAFAPDFVELEENEEYVEREDEFDLNAYVEKAEEQLVNEDEYVDIETYDKNSTFSDLDDSSSTTMELIYLAAIPIPDTPDEQPDKCLGSSSKLEDSNHSDSPSSLDAVQNGQAIPPASSPMEVDNSTAEEPAEAVNSKRRRRLSAKGLELQQAEKGKKPTTKNKSNGKSPGSNGKQLEPANGNSSAVDDEATEDDEI

SEQ ID NO: 14921 - protein, 433 aa, Nostoc punctiforme PCC 73102
MSIHEVFMPALSSTMTEGKIVSWVKSPGDKVEKGETVVVVESDKADMDVETFYEGFLAHIIVEAGETAPVGSAIAFIAETEAEIEQAKSLANSGGVAATTTSAPEPIPATASVVTPALASQNGSNHKEGRLVASPRARKLAKELKVDLTTLQGSGPYGRIVAEDVEALSNKGKQPATAPVAPPATVPTSAPIASPAPRTPAPAPVVAAVPGQIVPLTTFQNAVVRNMVATISVPVFRVGYTITTDGLDKLYKQIKSKGVTMTALLAKAVAVTLQKHPLLNASYSDQGIVYHSDINISVAVAMDDGGLITPVLQNADAVDIYSLSRTWKSLVERARAKQLQPQEYNSGTFTLSNLGMFGVDKFDAILPPGQGSILAIGASRPQVVATPDGLFGVRQQMQVNITSDHRIIYGAHAAAFLQDLAKLIETNPQSLTL

SEQ ID NO: 14922 - protein, 547 aa, Magnaporthe grisea 70-15
MDIQTCAVLSALETVAWVGFHEYRSLALTTRKELVAVFSVFFLVQYLCAKIYRIFIYPVHVSPLRHLPTPKGNHFMLGQLVNQFRASCPNELYLKWTSQWPDSPFVRFFTIGNKESLLINGIEANREVFATHCYAFTKPSLFLRFVGDIAGTGLLFTEGDEHKRHRKMILNVFSVPNLKKMFPIFQEKAEELSQHLDATIAASTGGSIDVQCIYSKATIDIIGITALGLDLRNLKSTKLRMDFLQCYRRMHEQPFSAALISFINVHVPIRRLLWFVRANRDFVEASQEVRAMLRTCIRERIRDVDSRKGAEVKFQSRDLLTYMVEERLLAQCKDPLTTEDILGHLLNFLSAGHETTTGVMTWASYVLATNPRIQDRLRAEVEALLKESPCPSYSDIERMKYMHNFVREVLRLYSPAVATYREAAKDVTICGTLIPKGTHLVLCPSVCNKSKRIWGADAEEFVPERWEKLDGEAASPYSIMTFLAGPRQCIGKQYALQEVKVLLIEVISKFRLLPTEELVSNDFKVNISNPGVVLRPKGGMVLRVERL

SEQ ID NO: 14923 - protein, 277 aa, Rhodopseudomonas palustris CGA009
MQTADAHFVEAHGAKIPALGLGTWELSGHSCSRIVEQALRLGYRHIDTAQIYDNEREVGEGIRNSHIRRDQLFVTTKVWTTHFAPNDLVRSAKESLVKLRLSEVDLLLLHWPNAHVPLAETLGALAQARALGLTRHIGVSNFTVALLAEAVAVCPAPLVCNQVEYHPFLDQQKVLAACALYGMALVAYSPIARGNAKKSEVLTRIGNVHGKTAAQVCLRWLIQQNVAAIPRSSRLERLAQNIDVFDFELSDAEMQEIFTLGSPKGRLTTMPTAPVWD

SEQ ID NO: 14924 - protein, 288 aa, Arabidopsis thaliana
MESYKCRVCFKSFVNGKALGGHMRSHMSNSHEEEQRPSQLSYETESDVSSSDPKFAFTSSVLLEDGESESESSRNVINLTRKRSKRTRKLDSFVTKKVKTSQLGYKPESDQEPPHSSASDTTTEEDLAFCLMMLSRDKWKKNKSNKEVVEEIETEEESEGYNKINQATTKGRYKCETCGKVFKSYQALGGHRASHKKNRVSNNKTEQRSETEYDNVVVVAKRIHECPICLRVFASGQALGGHKRSHGVGNLSVNQQRRVHRNESVKQRMIDLNLPAPTEEDEVSVVFQ

SEQ ID NO: 14925 - protein, 508 aa, Ustilago maydis 521
MISGLLSRSSVGPARAFQASTLPRVVSTLPRVHSRGLATGADPYDVVVIGGGPGGYVAAIKAAQLGLKTACVEKRGALGGTCLNVGCIPSKAMLNNSHLYHQAQHDFKSRGIDVGSISLNLETMLKAKSSAVTGLTKGIEGLFKKNKVDYLKGAGSFSSPTTIKVALNDGGETEIEAKNIIIATGSEVTPFPGIEIDEKQIVSSTGALELQKVPEKMIVIGAGVIGLEMGSVWSRLGAKVEVVEFLSTVGGAGIDGEIAKNFKKTLEKQGLKFRLGTKVIDAEKKDGKVYLNVEDAKSGDKTQLDADVVLVAIGRRPVTSGLNLEAVGIEKDERGRIIVDDQYNTTCKGVKCIGDATFGPMLAHKAEEEGIAAVEIIKSGHGHVNYAAIPAVVYTHPEVAWVGKNEEELKKEGVEYKVGKFPFLANSRAKTNADSDGTVKFLVEKETDKVLGVHIIGPNAGEMIASAVLAIEYQASAEDIARTCHAHPTLSEAFKEAAMASYSKAIHF

SEQ ID NO: 14926 - protein, 340 aa, GIBBERELLA ZEAE PH-1
MSSLPQTYKACVIEKANAPFTLKDVPLKHPSKGQILVKVLACGVCFSDVGVSEGHMGDVFPRVPGHEIIGDVVEVGEDVDNFKNGDRVGGPWHGGHDRTCRQCQRAQFQMCDHKEVNGVSRDGGFAEYVLLRSEAVVRVPKEIEPADAAPLLCAGVTVFNGIRKMHVEQGRIVAVQGLGGLGHLAVQYAYKMGYEVAVLSSTDDKADFAKKLGAHHYINTKTSDVGEELNKLGGASIIVQTAPNPKAISPLIQGLAPEGKLLNLAPVGGAEFDTVALVLKGASVVGWPSGHALDSEEALRFSLTHGVKCMVEKYPLEKVQDAVDSLKAGKPRFRNVLVME

SEQ ID NO: 14927 - protein, 500 aa, Pichia angusta
MPRQWTRFFEYKYLEMRRFSRLINTNSFFATMKDSMTEDLAADYDKADMVWVMVSGVLVWIMIPGVGLLYSGLSRKKHALSLLWASLMAICLISFQWFFWGYSLTFGTNSSVFLGSLDNFCLMKVLGDSNALSTVPDIVFCFFQGMFAMITGCIMLGGACERARLGPMMVFLFLWMTVVYCPCAMWTWNANGWLATLGAYDFAGGGPVHQASGFGALAYALICGKRHDPVAGSNLPKYRPHSVTSVVLGTVFLWFGWFGFNGGSSGDASIRGFYACVNTNLAAACGGLAWMFLDYFRCGRKWTTVGMCSGAVAGLVGITPAAGFVPVYFAVPIGALTAIACNYSVDIKNMIGIDDGLDVWCLHGVGGFTGSVLTGLFAADYIIATDYGVSGEGGWLNHHYKQLGYQLAASVSIDAWSFVVTSILLLVLNRIPFLKIRLSEEEEELGTDAAQIGEFTYQESRVYIPEPVRSVKSIPGTKATKSNELDADAVPLPKDEKVDV

SEQ ID NO: 14928 - protein, 111 aa, Zea mays
  unsure (1)..(111): unsure at all Xaa locations
MATNTIVGTLFEADLKGKNVFVRADLNVPLDDAQKITDDTLIRAYVPTIKFLLXKGAKVMLRSTLSRPNGVTPKYSLKPLVSRLSELLGVEIVMANDCIGEEVDNLAAAFP

SEQ ID NO: 14929 - protein, 563 aa, Physcomitrella patens
  unsure (1)..(563): unsure at all Xaa locations
MMAVALPGQLNLDETPTWGSRSVDVYEKIEHIGEGTYGQVYMAKDKSTGEVVALKKVRMDNEKEGFPITAIREIKILKKLQHANVIKLKEIVTSKGPEKEDNIKPGDASKFKGSIYMVFEYMDHDLTGLADRPGMRFSIPQIKCYMKQLLTGLHYCHVNQVLHRDIKGSNLLIDNNGILKLADFGLARSFSNDQNGQPLTNRVITLWYRPPELLLGSTKYTPAVDMWSVGCIFAELLNGKPILPGRNESEQFQKICELCGSPDEXNWPRVSQLPYYNQFKPERLMKRRVKDVFKHFDRHALELLERMLTLDPDHRISAKDALDAEYFWVEPFPCQPSSLPKYEASHEYQTKKKRQQQRQQQEEQAKRMKVLHHPAPHTRLPPIQQQPLRPGPHQPGHNLGPPIHANGMANQHNNYNRGQGASNQGRAPGGGRPPHGGPNQNGGYGGPNRGGPGGAYGGPAQPGGFAAPNMGHQGGRGGAYGGPAGGVYPAGPYGGGRGPPVGGRGQQFGGMPGGPQPPAYGGQHYMQQPTAQYVDIDGAYARASHSGFQPPSPHRPDYRQQQR

SEQ ID NO: 14930 - protein, 1011 aa, Oryza sativa
MHFRVEAHPEKSMMVDGVQRRVFGRAYWIFGQSIEAFKHLRPVLAIDGTFLTGKYQAGATTDQMKDLERICQINEKALFLDEIKRLMGVVGERPKKWLEDHMPLKVKWARAFDTNGRRHSIMTSNMAESFNNVLRGIRKLLLQLLWHTHFRSAIVVVGRRNLAYYHYTNEMDYLQPEHVVWMPYQAQEVLELELNPMCHIEDALKTLRCPLICFYAVEFQMCHRVMRQFGRLQTIPHRFSTSIDLHNHFNIYYIFELDILHTCRVDRRKNKKVTDWAYYHQDHITQWEKFEENGVPDQGQHNGTEFDLYLAWLHRTYRLVLRPAWTLADIADDPEDVEEQNEYDTRTRLGTTVETGPVRDRVARELLRTVNDAGVALGTAPGSEGEGGTLRNALQRLRQRCRKLAARLGCRSTDVVEHAHAHQEGDEEGEVGDEEGEQDKEAEEGDEEEEGDEDREEEADELGPSQLEDAPESSQPDISQPGPSRPRRRRAPSQDWRYTPDVPRPRTRGRRRSQPSHPEGLLGWATAETAKSYLSARWAGAECPTVSAIMAGAEVLARKPSRRLAGLGHGRNGQVPPQRQPASHPDGLLGWATAETAKCHLSARLAGAEFPTVSAIMAGAEVPARKPSRRLAGLGLGVAAKSHLSASPAGAEVAATSAGDRPRPPRWHNVSASPVGADTANVSANVFGAEATAYFWLKFLAGAKAKLSMLKSKVICCKLYISESQNAKVVDAITRIGQKDPEVVLLSKFEDDHYNRVRYTLASYIINENSTGEVKFSPMRRVLLEMIEKAFSTINLETHTGTHPRIGVIDDMSFHPLNQATMEDAAQLAKTVASDIGNFLQVPVFLYGAAHPTGKPVTAVRRELGYFQPNYMGIQWMGQVLPDILPVKPDEGPDHVSRERGAIMIGAAPLPLNYNVPVLSKDIPTIRRITRRVTGRGGGLPTVQALALSHGDDCTEIACFLDPDHVSADQVQQQVEQIAAEQGLEVEKGYFTDFSKDAMLEKYFKIVLSVD

SEQ ID NO: 14931 - protein, 490 aa, Glycine max
  unsure (1)..(490): unsure at all Xaa locations
LRGRGLRVRTAHASAHASADAWEKSQYAVXGELYLRASELQKEGKKIIFTNVGNPHALGQKPLSFPRQVVALCQAPFLLDDPNVGLLFPADAIARAKHYLSLTSGGLGAYSDSRGLPGVRKEVAEFILRRDGYPTDPELIYLTDGAXSKGVMQILNTIIRGQDDGILVPVPQYPLYSATIALLGGTLVPYYLEEXANWGLDVNELRQSVEQARFKGITVKAMVIINPGNPTGQCLSEANLREVLQFCYQENLALLGDEVYQTNIYQDERPFISSRKVLMDLGPPISKEVQLISFHSVSKGYYGECGQRGGYFEMTNIPPEXVDEIYKVASISLSPNVPAQIFMGXMLHPPQPGDISYDKFVRESTGILESLRRRARLMTDGFNSCRNVVCNFTEGAMYSFPQIRLPPRALEAAXKQAAKVPDVFYCLKLLEATGISTVPGSGFGQREGVFHLRTTILPDEEDMPAIMDSFKKFNDEFMEQYEDNRGYSRL

SEQ ID NO: 14932 - protein, 421 aa, Schizosaccharomyces pombe
MNENQKSFDSDKSESEDEQKNGRVKVRSRKTDDNEGYTWEGEYQRSWDIVQEDAEGSLVGVIAGLIQSGKRKRLLRDTTPLQRGIIRHMVLVLDLSNSMEERDFHHKRFDLQIKYASEFVLEFFEQNPISQLSIIGVMDGIAHRITDLHGNPQSHIQKLKSLRDCSGNFSLQNALEMARASLSHIASHGTREVLIIFGSILSSDPGDIFKTIDALVHDSIRVRIVGLAAEVAICKEICNKTNSSTKNAYGVVISEQHFRELLLESTIPPATDSAKTTDASLVMMGFPSKVVEQLPSLCACHSIPSRGGFHCPRCKAKVCTLPIECPSCSLVLILSTHLARSYHHLFPLKNWSEIPWSANPKSTHCFACQLPFPKPPVSPFDESTSSMRYACPSCKNHFCLDCDVFAHEQLHECYGCQCSGN

SEQ ID NO: 14933 - protein, 84 aa, Triticum aestivum
MPIGVSDELLGTFVPIAVYWLYSGLYVALDGVERLDAYRLHPRGEEAARNVVSRGAVVRGGLVQRGWWGVEGRGGGGGWGGGGG

SEQ ID NO: 14934 - protein, 252 aa, Lolium perenne
ALFAVFLGSAHGIAKVPPGPNITAEYGDKWLDAKSTWYGKPTGAGPKDNGGACGYKDVDKAPFNGMTGCGNTPIFKDGRGCGSCFEIKCTKPESCSGEAVTVTITDDNEEPIAPYHFDLSGHAFGSMAKKGEEQNVRSAGELELQFRRVKCKYPDDTKPTFHVEKGSNPNYLAILVKYVDGDGDVVAVDIKEKGKDKWIELKESWGAVWRIDTPDKLTGPFTVRYTTEGGTKSEVEDVIPEGWKADTSYSAK

SEQ ID NO: 14935 - protein, 488 aa, Bacteroides thetaiotaomicron VPI-5482
MEEKKLTAANGRPIADNQNSQTAGQRGPVMLQDPWLIEKLAHFDREVIPERRMHAKGSGAFGTFTVTHDITKYTRAAIFSEVGKQTECFVRFSTVAGERGAADAERDIRGFAMKFYTEEGNWDLVGNNTPVFFLRDPLKFPDLNHAIKRDPKTNMRSPNSNWDFWTLLPEALHQVTITMSPRGIPYSYRHMHGFGSHTYSFINADNQRIWVKFHLRTLQGIKNLTDQEAEAIIAKDRESHQRDLFESIEKGDYPKWLFQIQLMTEEEADHYRINPFDLTKVWPHKDFPLQDVGILELNRNPENYFAEVEQAAFNPINTVDGIGFSPDKMLQGRLFSYGDAQRYRLGVNSEQIPVNKPRCPFHAYHRDGAMRVDGNYGATKGYEPNSYGEWKDSPHMKEPPLKASGNGEIYNYNEREYDDDYYSQPGDLFRLMPADEQQLLFENTARAMGDSELFIKQRHTRNCYKADPAYGAGVAKALGIDLQEALKE

SEQ ID NO: 14936 - protein, 273 aa, Ustilago maydis 521
MSISPFRYQILTKQNDYIEEHIRRHGRRLDHEERQRKRAAREVHKASAVAQKVTGLKAKMLNKKRRNEKIQMKKTLKAHEERDVKQASTSSDPNQALPTYLLDREGQKDAKALSSAVKERRKDKAARYSVPLPQVRGIAEDEAFKVIKTGKRKQKGWKRMVTKPTFVGESFTRKPPKLERFIRPMGLRYNKAHVTHPELKASFNLPIVGVKKNPQSPLYTQLGVLTKGTIIEVNVSELGMTTTTGKVVWGKYAQVTNNPENDGCVNAVLLLSS

SEQ ID NO: 14937 - protein, 586 aa, Triphysaria versicolor
MCGILAVLGCSDDSQAKRVRVLELSRRLKHRGPDWSGIHHHGDCYLAHQRLAIVDPASGDQPLFNEDKRIAVTVNGEIYNHEELRALLPNHKFRTGSDCDVIAHLYEEYGENFVEMLDGMFSFVLLDSRDNTFIAARDAFGITSLYIGWGLDGSVWISSELKGLHDECENFEVFPPGHVYSSKTEGFRRWYNPPWFSEAIPSTPYDPLVLRGAFEQAVIKRLMTDVPFGVLLSGGLDSSLVAAVTARHLAGTKAAKRWGSQLHSFCVGLEGSPDLKAGKEVADYLGTVHHEFLFTVQDGIDAIEDVIYHIETYDVTTIRASTPMFLMSRKIKSLGVKMVISGEGSDEIFGGYLYFHKAPNKEEFHRETCRKIKALHQYDCLRANKATSAWGLEARVPFLDKEFVNLAMSIDPEAKMIKPDQGRIEKWILRKAFDDEERPYLPKHILYRQKEQFSDGVGYSWIDGLKAHAEQHVTDKMMLNAGHIFPHNTPTTKEGYYYRMIFERFFPQNSAKLTVPGGPSVACSTATAVAWDASWSKNLDPSGRAATGVHDLAYENHVPIGNLKSKKMDSVSLGNAVGPQELTIRS

SEQ ID NO: 14938 - protein, 380 aa, Pisum sativum
MSNTVGQIIKCRAAVAWEAGKPLVIEEVEVAPPQAGEVRLKILFTSLCHTDVYFWEAKGQTPLFPRIFGHEAGGIVESVGEGVTHLKPGDHALPVFTGECGECPHCKSEESNMCDLLRINTDRGVMLNDNKSRFSIKGQPVHHFVGTSTFSEYTVVHAGCVAKINPDAPLDKVCILSCGICTGLGATINVAKPKPGSSVAIFGLGAVGLAAAEGARISGASRIIGVDLVSSRFELAKKFGVNEFVNPKEHDKPVQQVIAEMTNGGVDRAVECTGSIQAMISAFECVHDGWGVAVLVGVPSKDDAFKTHPMNFLNERTLKGTFYGNYKPRTDLPNVVEKYMKGELELEKFITHTVPFSEINKAFDYMLKGESIRCIIKMEE

SEQ ID NO: 14939 - protein, 105 aa, Glycine max
MNVIWVAILAEIDYMTGEQGMGVGGGTPYGFDVGQSERGTVLKGLDLGVQGMRVGGQRLLIVPPELAYGSKGVQEIPPNSTIELDIELLSIKQSPFGTPVKIVEG

SEQ ID NO: 14940 - protein, 696 aa, Penicillium janthinellum
TASGKLQRKFLDRFAISMGRGVALGKTYGTLGAASRGATLLQDLLFTEIIFAFDRERVPERAVHARGTGAHGTFLSYEDWSNLTAASFLSAEGKFTPEMTRFSTVSGARGSADTARDVHGFATRFYVDEGNFDIVGNNIPVFFIWDVIIEPTLMALHAQKPNPRFHLPRGQQDPNRISDNLTARGDSLAQGSQISSERGSPKAYSNTEPNKHRSFRLVTDNGKQFQCSNHWQPLQGFIDLGVEEAWRFPEEGEGYVAENLFESIELLTVGDEELEIQSMSFNNDLRERFNSSEVTKSSVVRLVPLITQGKLVFNKNIQMLFNEVIGAMFQPGHIVRGVDFTEDPLLQGRLFSYLDTQLNRHGPNIQQLGFNRPPRAPIHNNNRDGAGEMIDLPPFASFVETQEWGAKDIKQTAVGQNKFDQEHRFSHWKFGVNGFVHTRNDDNVTHARGFFTAPERGQQKKRVAAFDRMFTVVGLSVDGQQANSDQYADFDAAAGKKVAKAIGVEAPKPNSNYFHPTDVFGEHIAASGTKYGVPEGNTKGVLLASVNKPASIAQGAKLQVVASSGDFAEFFISAKQLNMREVTQGIIPLVPVLKLAKLDLGKTFRFQLMQVGNIEELERFGFDLPDLTDKQVDLSAMGMFETTFRPTSRAAQFEQGKTKLVKGLQGKNAFMDRALKQPSNNREKIQRFADRFAVQD

SEQ ID NO: 14941 - protein, 509 aa, Oryza sativa (japonica cultivar-group)
MELVCYLDADDVLNYNTPEDAILMSSASGEKYDYIINFAINIGWSLMRPTLTSHGRVVEITPNPGNYIQGGPTMTQSSKSLARAPGYIVTVLTMFANKKITCMSMRNEEMRFTMELAGEGKLKMVANSWHPFEEAAEPWEKSTGGHATRKPEHFLSDSYRINETMTTGEIQELLGIMAAGGGIPATMRAVQYTGYGGGAGALKHVEIPVPSVKKHEVLIKVEAASVNPIDWSIQKGMLRPFLPKFPFIPVTDVAGEIVEAGSAVHELKVGDKVLSKLNFWKGGGLAEYVAAPESLTVVRPAGVSAVDAAGLPVAGLTALKALMSIGTKFDGTGGTGANVLITAASGGVGTYAVQLAKLGNHRVTATCGARNMDLVRSLGADEVLDYNTPQGAALTSSASDEKYDYIINTAMNVNWSAMKPTLSSRGRVVDITPNPGNYVAAMLTMFARKKITMMALMSLGKEEMRFLMELVGEGKLRTVVDSRCPFEKAAEAWEKSMGGHATGKVIVEM

SEQ ID NO: 14942 - protein, 375 aa, Populus x canescens
MGRAPCCEKNGLKRGPWTPDEDQKLIGYIQKHGYGNWRTLPKNAELQRCGKSCRLRWTNYLRPDIKRGRFSFEEEETIIQLHGILGNKWSAIAARLPGRTDNEIKNYWNTHIRKRLLRMGIDPVTHSPRLDLLDLSSILNSPLYDSSRMNMSRILGVQPLGDPELLRLATSLLSSQRDQTQDFAIPNGHQENHLSSPQVHQNQNQSIIHQANQFQPAGQEMPACTALTTTPCVTFSNEAQQMDPNGDQYHLSTITTFSSPNSQVSTHDQWQSNRMGSNLSEDYYVPAVSSYNSADNCRGTDLVDPSSEASTFISNNSNQTFGFASVLSTPSSSPAPLNSNSTYINCSSTEDERDSYCSNFLKFEIPDILDVSNFM

SEQ ID NO: 14943 - protein, 351 aa, Streptococcus agalactiae NEM316
MRAATYLSANELSLTDKAKPQVIKPTDAVVRLVKTTICGTDLHILGGDVPACKPGTTLGHEGIGIVEEVGSAVNHFKVGDKVIISCVTACNTCYYCKHQLPSHCEDGGWILGHLIEGTQAEYVHIPHADGSLYHAPEGVCDDALVMLSDILPTSYEIGVLPSHIKPGDTVCIVGAGAIGLSALLTAQFYSPAKIIMVDLSQKRLEASKKFGATHTILSTSTQEVKEEIDKITKGRGVDVVLECVGYPATFDICQNVVSIGGHIANVGVHGKPVEFNLQDLWIKNITLNTGLVNANTTEMLLEVLETGKIDATQLVTHHFKLSEIEEAYKVFKAAEENNTLKVIIENDITPA

SEQ ID NO: 14944 - protein, 650 aa, Methylobacillus flagellatus KT
MYEQVSHSLLNDILIGLDPKVGCEDLKHFYIRLGANFYAIHSLFHQLYGDRQDFRLQMHKLVAVMAKQYVSRPQELRHRDLAREKDHNWFLSQKLAGYALYCQEFAQSLKGMHEKLDYLQELGINLIHIMPILDGPKGRNDGGYAVRDFRKIDEKYGTLEDLDTLSAELRSRDMLLVLDVVVNHTSDEHEWALKAQQGNKKYQEYYYTYPDRKIPDLFEQTMPEVFPDTAPGNFTWNEKMGRWVMTVFNNFQWDLNYRNPSVFIEMIDIILFWANHGADVIRLDAVAFLWKKIGSPCQNEREAHLILQLMKDCCQVTAPGTLFIAEAIVAPLEIIKYFGEDAVNAKECEIAYNATYMALLWDAVATKKTLLLNRGLRSLPTKLDGATWLNYVRCHDDIGLGFDDNDIRASGYDPQAHRRFLVDYYTGAYQGSTATGVAFGVNPKTGDARISGSLASLAGLETALLRNDAQAIDTSIRTIILLHSMIASFGGIPLIYYGDSIGTLNDNTYLDDENKHHDSRWVHRPSLDWNKAARRHEPGTVENRIFTAIQRILAVRKQIPAFADLNNREIFETSNPHLFTFLRFTSQGMHSRVLVIANFDASPQYMNLRELDSVNLFRHVEVKDLYSGETLSTKHGTLEIPPLGFYWLQL

SEQ ID NO: 14945 - protein, 319 aa, Glycine max
  unsure (1)..(319): unsure at all Xaa locations
LGVQIVKAPDSVGPKPKQTEAAVPDGRDLLLQHGRLYMDAKPTDPEPAIMIASLANLIENDAFVPAHRPHALSEGVTTYLTPXVAGLIXQKELDYLVGAVSNPKRPFAAIVGGSKVSSKIGVIESLLEKVDILLLGGGMIFTXYNAQGLSVGSSLVEEDKLDLATSLLAKAKERGVSLLLPSDVVIAHKFAPDANSRVVPASAIPDGWMGLDIGPDSVKSFSEALDTTQTIIWNGPMGVFEFDKFAVGTEAIAKKLADLSGKGVTTIIGGGDSVAAVEKVGVASVMSHISTGGGASLELLEGKELPGVLALDEAVPVAV

SEQ ID NO: 14946 - protein, 189 aa, Zea mays
MAHRVDNEYDYLFKIVLIGDSGVGKSNILSRFTRNEFCLESKSTIGVEFATRTLQIEGKTIKAQIWDTAGQERYRAITSAYYRGAVGALLVYDITKKQTFENIQRWLRELRDHADSNIVIMMVGNKSDLNHLRSVPEEDGQALAEKEGLSFLETSALEALNVEKAFQTALSDIHPLIYNSTLAADLSFD

SEQ ID NO: 14947 - protein, 333 aa, Oryza sativa (japonica cultivar-group)
MAAGGGIPATMRAVQYTGYGGGAGALKHVEIPVPSVKKHEVLIKVEAASVNPIDWSIQKGMLRPFLPKFPFIPVTDVAGEIVEAGSAVHELKVGDKVLSKLNFWKGGGLAEYVAAPESLTVVRPAGVSAVDAAGLPVAGLTALKALMSIGTKFDGTGGTGANVLITAASGGVGTYAVQLAKLGNHRVTATCGARNMDLVRSLGADEVLDYNTPQGAALTSSASDEKYDYIINTAMNVNWSAMKPTLSSRGRVVDITPNPGNYVAAMLTMFARKKITMMALMSLGKEEMRFLMELVGEGKLRTVVDSRCPFEKAAEAWEKSMGGHATGKVIVEM

SEQ ID NO: 14948 - protein, 433 aa, Burkholderia fungorum LB400
MAMGVTDTILLGSLGPDALAAGGLGANLFFVVVTLLQGVLTSVSVSVSHARGAADEGRVPHIYWTGFVLSVLLSVPAFFLLSFATPILLAFGEPALLAHNVGEYAAVLRWGSLGSLVGVGLMRSFLPAIGAAKRLLWVSLASVGVNGFLNYGLIHGAYGLPRLGFLGSAAATSITVWLSALVLMALLHLRPRYRHFVVATRPNVPLMGELFGIGWPVAITYGVESTLFLATGLMVGLLGESQLAAHQIALNVASVAFMVPLAIGQAANVRVGFWSGAGQPLAARHAGFVALALGVGFMTLSGLVLIAAPHWIVGLYLHLDDPANAATVALASSLLGVAAIFQIVDGLQTVGSGCLRGLKDTRVPMIAAAFGYWVIGFPTGYTLAFHFGLGARGLWWGLAAGLASVALLMTLRFHKLSLRRVPAKPGAQPAKSV

SEQ ID NO: 14949 - protein, 101 aa, Medicago sativa
CDPSGNYGGWKAGAIGANNQAAQSILKQDYKDDITREEAVNLALKVLSKTMDRTSLTSDKLELAEVFLAPSGKVKYQVCSPENLTKLLVKSGVTQPATETR

SEQ ID NO: 14950 - protein, 420 aa, Lupinus angustifolius
MASVNQSVSVSPTASSDSVFAHLLPAPEDPILGVTVAYNKDPSPVKLNLGVGAYRTEEGKPLVLNVVRRVEQQLVNEASRNKEYLPIVGVADFNKLSARLIFGADSPAIQENRVTTVQCLSGTGSLRVGGEFLARHYHQRTIYIPQPTWGNHPKIFTLAGLSVKTYRYYAPATRGLDFEGLLEDLGSAPSGSIVLLHACAHNPTGVDPTTEQWEQIRKLLRSKALLPFFDSAYQGFASGSLDIDAQAVRLFVADGGELLLAQSYAKNMGLYGERVGALSIVSKSADVASRVESQVKLVVRPMYSNPPIHGASIVAAILRDRDLYNEWHIELKAMADRIIKMRQQLFDALQSRGTPGDWSHIIKQIGMFTFTGLNAEQVSFLTKEYHIYLTSDGRISMAGLSSKTVPHLADAIHAAVTRVV

SEQ ID NO: 14951 - protein, 587 aa, Cryptococcus neoformans var. neoformans
MLSADQRQRAPFAHKSSCANLTATQPSALRSPFPPQSHWPTPPSAEGHQLQLTSDRSKWAQYPSPRKISNETCQAGFSDHPYAFGGIGATYSLDTPTSRRHSLPSLFNPNTHRRAFTFPSMSLPNPATVRFISLCFLWYACSAISNNTGKVILNHFKYPVTLTIVQFFFVAFYCAISSQKMLGWTGRLRQPTKNILKGTLPLAAFQVGGHIFGSMAISRVPVSTVHTIKALSPLFTVMAYALLFGVSYSPATYLSLLPLTLGVMLACSFDISFSNIFGLVCALGSTIVFVSQNIFFKKIMPTTSTNEVNSSSKLDKINLLYFSSSMAFILMIPLWIYSDARRLIDLWINPAASESGTSVLFYFFLNGTVHFAQSIIAFALLASTSPVTYSIASLVKRIAVICLAIIWFKQPVHTVQALGIVLTGAGLWMYNNAKRDVDRGEIKMRHVEALREGVLPSTKMDQCILEGSGIELSYKSAHNSPKPTYPNNYIDLPSSTTTAVNKTTFQVPPILDHTSHIEAPYPSPPASISSSPPADITYLGISKGRQHWLSGEGERFRPPVLNSIRSSVMEEARETGVNEGMAAVVTT

SEQ ID NO: 14952 - protein, 515 aa, Ustilago maydis 521
MRAVLSLNMTKLLALLLVILPILVAVQANGSISNASHHHQRRMVRQRHIEARSAMSWLTKISSKASDWMFGSVHAPNLDKKDLPKPLVGGVAVMPKMPYPYATGMIPRLASETLSGNGLPGGWMCIHVTPPADVPKQADGGAGTRSGAQQFGGQRVGADGTAAGTVGGTAAGAAGAAGGLPGGVPGGMSGGYVGGAGPGTAGGAGGAAGGVAGGSGGGFAGGAGSSFGYPGGFGFGANTGYPGGQQGASTGSGPFVGGAGAGGMGGGMGAGTGSSGMGAGMGAGIGNGGMGAAMGAAMGNGMGSDTAAGMGGASYGVAGTGGNSAMAGGQGSTVPAGYIRYNGQLMTVDQYEQAIAGGGSPGTAASQQTLSRRDMLQTDTSTLFLNTFIHKRQASTSATDGDSDGDDSQAAPDGADASTQHKKPASNANAPKVLMCINGDPAVPAIKFNTMTGVRIRDASTQKDGVVDITNLPNYKMPWMPFLPTADMWGEQQNLMLDQEKMIETNMTMAPPPSR

SEQ ID NO: 14953 - protein, 311 aa, Zea mays
MAVDLMGCYTPRRADDQLAIQEAATAGLRSLELLVSSLSGAAPSKAPQQHPQQPFGEIADQAVSKFRKVISILDRTGHARFRRGPVQSAPPPPPPPAPVAPPPPPPLTVVAPVSVAAPLPQPQSLTLDFTKPNLTMSGATSVTSTSFFSSVTAGEGSVSKGRSLVSAGKPPLSGHKRKPCAGAHSEATTNGSRCHCSKRRKNRVKRTIRVPAISAKIADIPPDEYSWRKYGQKPIKGSPYPRGYYKCSTVRGCPARKHVERATDDPAMLVVTYEGEHRHTPGAPAPAPSPLPAAPKDPTCSDACIALQYCH

SEQ ID NO: 14954 - protein, 341 aa, Schizosaccharomyces pombe
MFAKVAFKNFTPLKSIAPRSFSTTSSRAFKVAVLGAGGGIGQPLSMLLKLNDKVSELALFDIRGAPGVAADIGHINTTSNVVGYAPDDKGLEKALNGADVVIIPAGVPRKPGMTRDDLFATNASIVRDLAFAAGETCPEAKYLVVTNPVNSTVPIFKKALERVGVHQPKHLFGVTTLDSVRASRFTSQVTNGKAELLHIPVVGGHSGATIVPLLSQGGVELTGEKRDALIHRIQFGGDEVVKAKAGAGSATLSMAYAGARMASSVLRALAGESGVEECTFVESPLYKDQGIDFFASRVTLGKDGVDTIHPVGKINDYEESLLKVALGELKKSITKGEQFVA

SEQ ID NO: 14955 - protein, 401 aa, Pisum sativum
MATKRSVGTLKEADLKGKRVFVRVDLNVPLDDNLNITDDTRIRAAIPTIKYLTGYGAKVILSSHLGRPKGVTPKYSLKPLVPRLSELLGSEVTIAGDSIGEEVEKLVAQIPEGGVLLLENVRFHKEEEKNDPEFAKKLASLADLYVNDAFGTAHRAHASTEGVAKYLKPSVAGFLMQKELDYLVGAVSNPKKPFAAIVGGSKVSSKIGVIESLLEKVDILLLGGGMVFTFYKAQGYSVGTSLVEEDKLGLATSLIEKAKAKGVSLLLPTDVVIADKFSADANDKIVPASSIPDGWMGLDIGPDSIKTFNEALDKSQTVIWNGPMGVFEFDKFAAGTEAIAKKLAEISGKGVTTIIGGGDSVAAVEKAGLADKMSHISTGGGASLELLEGKPLPGVLALDDA

SEQ ID NO: 14956 - protein, 402 aa, Bradyrhizobium japonicum USDA 110
MTIFVPAARVSRIKISPTTAASARVRELKAAGRDIVDMAIGEPDFDTPDHVKTAAHEAIDRGETKYTAVNGTVALRKAIIADYKRRLGLDYADNEICVGGGAKQILFLALMASVEEGAEVIVPAPYWVSYPDMVIANDGKPVIVRCSENQGFKLTAEALEAAITPKTRWLILNAPSNPTGAAYSRADLKAIGDVLLRHPDVLVLSDDIYDQIWYRDEPATTLAAAVPELKDRVLLANGVSKTYAMTGWRIGYAAGPAPLVAAINKLQSQMSSCPSSISQAAAAHALTSDQSFVRDSVKLYKERRDYACARLNAIPGLSCLVPDGAFYLYPGCAGVIGKTTPGGKVIESDLDFVLYLLDDVGVAAVQGAAYGLSPYFRLSIATSMEAIKAACDRIEKACRALR

SEQ ID NO: 14957 - protein, 120 aa, Glycine max
  unsure (1)..(120): unsure at all Xaa locations
FGTNKAAQLASSMISSPAVTTVNRAGAGMVAPFTGLKSMAGFPTXKTNNDITSIASNGGRVQCMQVWPPVGKKKFETLSYLPDLDDAQLAKEVEYLLMKGWIPCLEIQLEQRFVFREPHQ

SEQ ID NO: 14958 - protein, 286 aa, SYNECHOCOCCUS SP. WH 8102
MQAPRGPLPARQRKLKMGTTSFMVVMHVLATVALLPRFWSWQGLVAFGVLYWVTVLGVTLGLHRLVAHRSLVVPVWVERMLVIMGTLACQSGPIEWVGLHRHHHRFSDQPIDHHDAGRGLWWSHSEWMLHDIPALKELDRYAGDLQVDPFYRWLDRWFLLLQIPLGLGLYWIGEAAQVHGGGIGLVLWAIPLRLVIVYHVTWLVNSATHAFGYRNFDCPDLSRNCWWVALLSFGEGWHNNHHAHPASARHGLRWFEFDLTWQHVRLLKRLGLASRVRTARYVPGAS

SEQ ID NO: 14959 - protein, 229 aa, Streptococcus agalactiae NEM316
MLTKPIIGITGNEREMSDIPGYYYDSVSRHISEGVKNAGGLPVILPISEAESAKAYVEMIDKLIISGGQNVLPSYYGEEKIIESDDYSLARDIFEFALVDEALKQNKPIFAICRGMQLVNVALGGTLNQSIDNHYQEPYIGFAHYLNVEKGSFLEGFISGDFRINSLHRQSVKLLAEGLIVSARDPRDGTVEAYESRTEQCIIGVQWHPELMLHQIENQTLFGYFVNET

SEQ ID NO: 14960 - protein, 253 aa, Glycine max
MSNATDSAGKIPPETRPAESDSGGDSGPRPTIKINVMHGSSQHEFHLPAQSTFGDVKKLLVNKTGLEPVEQRLFFRGIEKGDNLHLHLEGVKDKSKLLLLEGTASKERKLEETRKQNVMSKAFEAIAGVRAEVDKLSNRVTSIEVAINGGNKASEKEFLVLTELLMSQLLKLDGIEAEGEAKLQRKAEVNRVQNLVDKLDSLKARNANPFSNSSNDVKVTTQWETFDSGMESSDAPSDNSSSTKVTQDWEQFD

SEQ ID NO: 14961 - protein, 400 aa, Bradyrhizobium japonicum USDA 110
MPELANRLKTVKVSASAAMTDKARELRDAGVKIVGLSSGEPDFPTPPHAIEAAHRAALAGDTKYPAQPGTVALRTAVQRKFKRENNLDYALDEILIANGGKQIIFNALFATCNPGDEVVIPAPGWITYADIVLLAEATPVAVPCPENNQFKLRPTDLDAAITPRTKWLILNFPNNPTGAACTRDEMCAIADVMLKYPDVWILTDDIYEHLTYDGFEFCTIAEVEPRLKNRVVTVNGASKAYAMTGWRVGYCGGPKDLIAAMNNVHGQATGGICTLSQAAAVAVLDGPQEFLKERADIYRDRRDLVVKLLNQIPGITCHKPEGAFYVFPNIAGCIGKTTKGGRRLDTDADFISALLEEQHVAAVPGGAYGMSPYFRISYATDTESLKEGCRRIANFCESLR

SEQ ID NO: 14962 - protein, 237 aa, Streptococcus agalactiae NEM316
MTQFLGEFLGTFILVLLGDGVVAGNVLSKTKEEGTGWTAIVFGWGIACTVAVYVSGLFSPAHLNPAVTLAMASIGAISWGQVIPFIIAQMLGAMVAATILWLHYYPHWKETKDSGLILASFSTGPAIRHTPSNLLGEIIGTAILVITIMAIGPSKVAAGLGPIIVGIVIFAVGFSLGPTTGYAINPARDLGPRLMHAILPIENKGDSDWSYAWIPVVGPIIGGVLGAILYNIALTLI

SEQ ID NO: 14963 - protein, 235 aa, Zea mays
MTVLDAESRFHVLAVDDSIIDRKLIEMLLKSSSYQVTTVESGNKALELLGLRDNGAEDASPPSSSSSSSSSSSPDHQEIDVSLIITDYCMPGMTGYDLLKRVKGSSSLKDIPVVIMSSENVPARISRCLQDGAEEFFLKPVKPADMKKLKSHLLKRKQPKQKNKPQAQAVESPEQQLDPHPQPVHELELEEAAADRNGVNKRKAAAMEEGLTVVVTAPESTKPRRLSTSSLTVET

SEQ ID NO: 14964 - protein, 202 aa, Salmonella typhimurium
  unsure (1)..(202): unsure at all Xaa locations
MKKVVTVCPYCASGCKINLVVDNGKIVRAEAAQGKTNQGTLCLKGYYGWDFINDTQILTPRLKTPMIRRQRGGKLESVSWDEALNYVAERLSAIKAKYGPDAIQTTGSSRGTGNETNYVMQKFARAVIGTNNVDCCARVXHGPSVAGLHQSVGNGAMSNAINEIDNTDLVFVFGYNPADSHPIVANHVINAKRNGAKIIVCD

SEQ ID NO: 14965 - protein, 37 aa, Lycopersicon esculentum
DVPWEMFIDTCKRLRIMKGSDAIGLAPRAMEKCRSRN

SEQ ID NO: 14966 - protein, 320 aa, Vibrio cholerae
MIKKIGVLTSGGDAPGMNAAIRGVVRTALGAGLEVFGIYDGYQGLYEDRIKQLDRSSVSDVINRGGTFLGSARFPQFREVEVREKAIENLKKHGIEALVVIGGDGSYMGAKKLTEMGFPCIGLPGTIDNDIAGTDYTIGYLTALNTVIEAIDRLRDTSSSHQRISIVEIMGRHCGDLTLTSAIAGGCEYIITPETGLNMEQLISNIKDGIAKGKKHAIIALTELMMDANKLAKEIESATGRETRATVLGHIQRGGKPTAFDRVLASRMGNYAVHLLMEGHGGRCVGIQKEQLVHHDIIDAIENMKRPVRTDLYKVAEELF

SEQ ID NO: 14967 - protein, 316 aa, Salmonella enterica subsp. enterica serovar Typhi Ty2
MNQLDGIKQFTTVVADSGDIESIRHYQPQDATTNPSLLLKAAGLEQYGHLIEDAIAWGKKHGGTQEQQVAAASDKLAVNFGAEILKSIPGRVSTEVDVRLSFDKEKSIEKARHLVDLYQQQDVDKSRILIKLAATWEGIRAAEQLEKEGINCNLTLLFSFAQARACAEAGVYLISPFVGRIYDWYQARSPLEPYVVEEDPGVKSVRNIYDYFKQHRYETIVMGASFRRTEQILALTGCDRLTISPNLLKELKEKEEPVIRKLVPSSQMFHRPTPMTEAEFRWEHNQDAMAVEKLSEGIRLFAVDQRKLEDLLAAKL

SEQ ID NO: 14968 - protein, 470 aa, Zea mays
MDRKDVGILAMDIYFPPSCVQQEALEAHDGASKGKYTIGLGQDCMAFCSEVEDVISMSLTVVNSLLKKYKIDPKLIGRLEVGSETVIDKSKSIKTWLMQIFEESDNTDIEGVDSSNACYGGTAALLNCVNWVESNSWDGRYGLVVCTDSAVYAEGPARPTGGAAAIAMLIGPNAPISFESKYRASHMAHVYDFYKPDLASEYPVVDGKLSQTCYLMALDSCYRQFCNKYEKIAGKQFSISDAEYFVFHSPYNKLVQKSFARLYYNDFMRNCSYVDDDAKEKLQSFSNLTGEESYQSRDLEKASQQVAKHLYGIKVQPTTLLPKQIGNMYTASLYAALASVLYNKHDSLNGQRIVMFSYGSGLTSTMFSLRLNNGQHPFSLSNIGSVLGVTEKLQSRHETLPEKFVETLKLMEHRYGAKDFETSSDTSLLQPGTFYLTKVDSMYRRFYSQKPAEEIGGGKTKCCNGFANGH

SEQ ID NO: 14969 - protein, 586 aa, Pisum sativum
MCGILAVLGCSDDSQAKRVRILELSRRLKHRGPDWSGLHQHGDNYLAHQRLAIVDPASGDQPLFNEDKSIIVTVNGEIYNHEELRKQLPNHKFFTQCDCDVIAHLYEEHGENFVDMLDGIFSFVLLDTRDNSFIVARDAIGVTSLYIGWGLDGSVWIASELKGLNDECEHFEVFPPGHLYSSKEREFRRWYNPPWFNEAIIPSTPYDPLVLRNAFEKAVIKRLMTDVPFGVLLSGGLDSSLVASVTARYLAGTKAAKQWGAKLPSFCVGLKGAPDLKAGKEVADFLGTVHHEFEFTIQDGIDAIEDVIYHTETYDVTTIRAATPMFLMSRKIKSSGVKWVISGEGSDEIFGGYLYFHKAPNREEFHQETCRKIKALHRYDCLRANKSTYAWGLEARVPFLDKDFIKVAMDIDPEFKMIKHDEGRIEKWILRKAFDDEENPYLPKHILYRQKEQFSDGVGYGWIDGIKDHAAKHVTDRMMFNASHIFPFNTPNTKEAYYYRMIFERFFPQNSARLTVPGGPSVACSTEKAIEWDASWSNNLDPSGRAALGVHVSAYEHQINPVTKGVEPEKIIPKIGVSPLGVAIQT

SEQ ID NO: 14970 - protein, 435 aa, Bordetella bronchiseptica RB50
MPGGRACARLQGFVALQSCGAPAARGLFPPLFLSPFRIPIMRKFSRIERLPPYVFNITGELKMAARRRGEDIIDMSMGNPDGATPQHIVDKLVEASTRPDTHGYSVSKGIPRLRKAICDWYMRRYAVEFDPDSEAIVTIGSKEGLAHLMLATLDRGDTVLVPNPSYPIHIYGAVIAGANIRSVRMTPGIDFFEELERAVRESIPKPKMMILGFPSNPTAQCVDLSFFERVVALAKEHDILVVHDLAYADVCFDGYVAPSIMQVPGARDVAVEFFTMSKSYNMAGWRIGYMVGNRELVGALARIKSYHDYGTFTPIQVASIAALDGPQDCVNEIVAQYQRRRDVLARGLHEAGWNVEIPKASMYIWAQIPEPYRAMGSLEFAKRVLSDAKVAVSPGIGFGEYGDEYVRFALIENEQRTRQAVRGIKDMFRKDGLLK

SEQ ID NO: 14971 - protein, 583 aa, Pisum sativum
MCGILAVLGCSDPSRAKRVRVLELSRRLKHRGPEWSGLHQHGDCYLAQQRLAIVDPASGDQPLFNEDNPSIVTVNGEIYNHEDLRKQLSNHTFRTGSDCDVIAHLYEEYGEDFVDMLDGIFSFVPLDTRDNSYIVARDAIGVTSLYIGWGLDGSVWISSEMKGLNDDCEHFECFPPGHLYSSKDSGFRRWYNPSWYSEAIPSAPYDPLALRHAFEKAVVKRLMTDVPFGVLLSGGLDSSLVASITSRYLATTKAAEQWGSKLHSFCVGLEGSPDLKAGKEVADYLGTVHHEFTFTVQDGIDAIEDVIYHVETYDVTSIRASTPMFLMSRKIKSLGVKWVISGEGSDEIFGGYLYFHKAPNKEEFHEETCRKIKALHQYDCQRANKSTYAWGLEARVPFLDKAFINVAMNIDPENKMIKRDEGRIEKYILRKAFDDEENPYLPKHILYRQKEQFSDGVGYSWIDGLKAHAAKHVTDKMMLNAGNIFPHNTPNTKEAYYYRMIFERFFPQNSARLTVPGGPTVACSTAKAVEWDAAWSNNLDPSGRAALGVHDSAYENHNKVNKTVEFEKIIPLEAAPVELAIQG

SEQ ID NO: 14972 - protein, 404 aa, Bdellovibrio bacteriovorus HD100
MALGASAFAGSVFIVFLIFGLGMLAPVTALFARMQGQENYPYGGVLLRHSIIVALAISAFIIGLLYALLPNLKVFGQTNEVLEMGAAFFEITIWSVLPSLLYQSYKQFTDGIGKTKVAMYVMIFGVVLNITGNWVLIHGLYGLPKLGLNGAAWATLIARCLMALIMVTYVHIHPHFKKYLVERWVHRFDHHLLKNIIRLGLPNGFTYLFEVGAFSAAAVMMGWFGATPLAAHQITISLASTSFLITLGIGIAASIRVGYELGRGDYSLARFAGFTAIKLGAAYMSLCALGFFFLREWFPTFYVTDQDVIAWAAKFFIVVAIFEIFDGIQAVAIGALRGMSDTQWPSIIAFFAYWVMGLPGGYLLAFHLGVGPVGIWIGLLLGLIFASILLTWRFHILSKRFLKN

SEQ ID NO: 14973 - protein, 214 aa, Ustilago maydis 521
MAPAAIRRKLVIVGDGACGKTSLLCVFAIGEFPQEYEPTIFENYVAEIRLDGKPVQLALWDTAGQEEYERLRPLSYSQAHVILIAFAIDTPDSLENVQVKWMEEVRQICGPSVPVLLVGCKKDLREDAIAKGKPVQGHYVERQQAKLVAAQIGARSYHECSSLNNQGVDAVFEAATRAAMLVRNSGASSGGAISQSKTKEALHNDAGSCKCIVL

SEQ ID NO: 14974 - protein, 119 aa, Triticum aestivum
  unsure (1)..(119): unsure at all Xaa locations
MDPKMTEVTQMFARFKAAYARNDLDACVTLLSXQLKVHLTQFPSLPPSFEQTPNAVEELKXARDIYEHAVVLXSVNLEDQGACRRVAAGLXSCFVSCALSPPQPRGVPIXGLNLLKVVG

SEQ ID NO: 14975 - protein, 500 aa, Pseudomonas fluorescens
MNTLPSQVWRTNIGSAPSQLLNYIDGNFVTSASSFANINPVNGKLISDVFEADAKQVNEAVVAAQNALKGPWGKLSVQDRAALIHKIADGIQARFEEFVAAEVADTGRPVHQARTLDIPRAIANFRTFADLAKTSHTDLFEMSTSDGSGALNYTVRKPLGVIGVISPWNLPLLLFTWKVAPALACGNTVVAKPSEESPSSATLLAEVMHDAGVPPGVFNLIHGFGKDSAGEFLTQHPGISALTFTGESKTGSTIMKAVADGVKEVSFELGGKNAAVVFADADLDAAIEGVLRSSFTNSGQVCLCSERVYVHRSIFDEFVSGLKVEAERLVVGYPDQDGVNMGPLISHGHRDKVLSYYRLAVDEGATVVTGGGVPKFNDERDQGAYVQPTIWTGLSDKARCVTEEIFGPVCHISPFDDEDEVINRVNDSNYGLACAIWTTNLSRAHRVSRQIHVGLVWVNTWYLRDLRTPFGGVKLSGLGREGGRFSMDFYSDIANICIKI

SEQ ID NO: 14976 - protein, 551 aa, GIBBERELLA ZEAE PH-1
MAPKTKFELKTPKGTKDWEGKDMVIRDHIFNTITQVFKRHGGVTIDTPVFELREILAGKYGEDSKLIYDLADQGGEICSLRYDLTVPFARFLAMNKQIQNIKRYHIAKVYRRDQPAMTKGRMREFYQCDFDIAGTYDPMLPDAEVLRIITEVFEGLGWNGGYTIKLNHRKILDGIFQVCGVPEDKIRTISSAVDKLDKLPWADVRKEMTEEKGLDGEVADRIGEWVVLKGKQDLLKKLQSTESLAANESMKKGMEDLELLFEYLEAFNCLDRVSFDLSLARGLDYYTGLIYEVVTQGSAPEVTPGQENTDSKPSKKKGKKGGEDDDRSDDPTVGVGSVAAGGRYDNLVGMFSGKSQIPCVGISFGVDRIFSITKAKLAAEKSAAVRSNDVDVYVMAFGKGFLKERMSVCAKLWEAGIKAEFLYKVKPKLPAQFKAAEANGVPFAIFLGDDEVASGKVKIKEMGLQEGHPEKEGILVSQEDMAKEIKVRLQRKRELDAMTTQAEGLRVVHGIKGNAKDAEKKEESAKPETTTPAAAEPAPETEEQSPANPSA

SEQ ID NO: 14977 - protein, 229 aa, Triticum aestivum
  unsure (1)..(229): unsure at all Xaa locations
MATTNWTLPDHPTLPKGKTEAXDSLDRWGEASPDQNNVQSMFDPVRTVMVLRIIDMDASLDHSWKNYVDSASIGNIVRFVFSSSSTTDMGXTSELGHNALGAGRIFAQGAKLDDAALAYAKIWEDEGFNYIKESFDKGTLHLIGLLSDGGVHSRLDQVQLIVKGASERGAKRIRLHILTDGRDVMDGNHVGFLETIENDLAHLHEQGVDARIAYAGGRMYVTMDQIKND

SEQ ID NO: 14978 - protein, 503 aa, Neurospora crassa
MPSLSFLVRPSVVSSRLASGRVGSLSRHFSVTALNMAPISRETDFLVIGGGSGGIATARAAAGKYGIKSMVVEGKRLGGTCVNVGCVPKKVTFYAALVAETIHQAKDYGFSVEQTAPFDWPTFKQKRDAYVARLNGIYERNLANDKVEYVHGWAKLLSPNSVEVTLDDGTKSVVNAKKILIAVGGNPTIPPHIPGSEYGTNSDGFFDIDTLPKKVALVGAGYIAVEFAGMLNALGVETHLFIRHDTFLRSFDPMIQQVSVKEYERIGVKVHKKSQLTSVQKDAAGKLAINFKEGEGEQSISDVDHLIWAVGRTPAVEGLGLDKAGVKTNEKGYIEVDEYQNTSTENIYAVGDVCGQVELTPVAIAAGRKLAARLFGPEEFRTLKLNYDNVPSVVFAHPEIGSIGLTEPEAVAKYGAENLKIYKSSFTAMYYAMMKPEDKAPTAYKLICAGPEEKVVGLHIIGLGSGEILQGFGVAVNMGATKADFDNCVAIHPTSAEELVTLK

SEQ ID NO: 14979 - protein, 494 aa, Medicago truncatula
MAASPAYQAHLPTSPEWLNKGDNAWQMTAATLVGLQSMPGLVILYASIVKKKWAVNSAFMALYAFAAVLICWVLVAYRMAFGDELLPFWGKGAPALGQKFLVARAKVPASTHYYKNGVDIETPMEEPFFPMASLVYFQFTFAAITMILLAGSVLGRMNIKAWMAFVPLWLIFSYTVGAFSLWGGGFLYHWGVIDYSGGYVIHLSSGIAGFTAAYWVGPRIKSDRERFPPNNVLLMLAGAGLLWMGWSGFNGGAPYAANVASSIAVLNTNICAATSLLVWTSLDVVFFGKPSVIGAVQGMMTGLVCITPGAGLVQSWAAIVMGILSGSIPWVSMMILHKKSSLLQKVDDTLGVFHTHAVAGLLGGLLTGLFAEPALCRLLLPVTNSRGAFYGGSGGMQLLKQLVAAMFVIGWNIVSTTIILLVIQLFIPLRMPDEQLEIGDDAAHGEEAYALWGDGEKYDPTRHGSLNTGNTGVSPYVNGARRCDYKFMSHNLQV

SEQ ID NO: 14980 - protein, 291 aa, Cytophaga hutchinsonii
MKAYVFPGQGSQFSGMGKDLFENSAKAKELFLQANDILGFDITKVMFTGTDEELKQTNVTQPAIFIHSVILAKISETFAPEMVAGHSLGEFSALVANGTLSFEDGLKLVSKRAAAMQKACELVPGTMAAVLALADEKVEEICASIADEVVVAANYNCPGQLVISGSVKGIEKACELMKAAGAKRALVLPVGGAFHSPLMEPARIELEDAIKNTLFSKPACAVYQNVNAKPSTDVEAIKLNLIAQLTAPVRWTQSVQNMVKDGATTFVECGPGKVLQGLVKKIESGTEVASI

SEQ ID NO: 14981 - protein, 137 aa, Triticum aestivum
  unsure (1)..(137): unsure at all Xaa locations
MMHHSTDDSEPDGAMPVQQRDDSASSSDSASAVSNHTITXTVYHGSSDHHLHVPQHATFGDVKKAFVLETGLEATDLKILFRGDVKDDAEQLQAAGVTDGSVVVLVDEPNKGVXHVEPPPVMTEEIAKAIAAVLAVS

SEQ ID NO: 14982 - protein, 481 aa, Arabidopsis thaliana
MALKALDYDTLNENVKKCQYAVRGELYLRASELQKEGKKIIFTNVGNPHALGQKPLTFPRQVVALCQAPFLLDDPNVGMLFPADAIARAKHYLSLTSGGLGAYSDSRGLPGVRKEVAEFIQRRDGYPSDPELIFLTDGASKGVMQILNCVIRGNGDGILVPVPQYPLYSATISLLGGTLVPYYLDESENWGLDVANLRQSVAQARSQGITVRAMVIINPGNPTGQCLSEANIREILKFCYNEKLVLLGDEVYQQNIYQDERPFISSKKVLMEMGSPFSKEVQLVSFHTVSKGYWGECGQRGGYFEMTNLPPRVVEEIYKVASIALSPNVSAQIFMGLMVNPPKPGDISYDQFARESKGILESLRRRARLMTDGFNSCKNVVRNFTEGAMYSFPQIRLPTGALQAAKQAGKVPDVFYCLKLLEATGISTVPGSGFGQKEGVFHLRTTILPAEDEMPEIMDSFKKFNDEFMTQYDNNFGYSKM

SEQ ID NO: 14983 - protein, 308 aa, Helianthus annuus
MAILSRYSSSNTLFCIEEQVHEDEDELTHQDSSAIHPLDLQDLCWEHEELVSLFTKEEEQQKQTPWPSSCTLSFRKEAVDWILKVKGCHGFTPLTAILAINYLDRFLSSLHFQKANTPWMIHLVAVTCLSLAAKIQETHVPLLLDLQLEESKFLFEAKNIQKTELLVMSTLKWRMNLVTPISFLDHIVRRLGLSNHLHWDFFKKCEAMILYLVADSRFVCYKPSVLATATMLCVVEEIDPTNSIGYKSQLLDLLKTTKDHINECYKLVMDLSYDNHNKGKRDENERTIYPVSPAGFIGFMCHESSNDS

SEQ ID NO: 14984 - protein, 508 aa, Psychrobacter sp. 273-4
MLYAYPNTENSPVQFRKKYDNFINGEWVAPIDGEYFDNSSPIDGKTFCQIARSKEADVEAALDAAHAAKDAWGKTSVTERSNMLLKLADGIEANLEKIAIAESYENGKPVRETLAADIPIAIDHLRYFAGVIRAQEGGISQIDEDTVAYHFHEPLGVVGQIIPWNFPILMAIWKIAPALAAGNCVVLKPAEQTPASILYMLDVIGAADILPKGVLNVVNGFGVEAGKPLASNPRIDKVSFTGETTTGRLIMQYASENIIPVTLELGGKSPNIFFADVMDEDDDFLDKAVEGLVMFALNQGEVCTCPSRALVHESIYDEFMKRCIARVKAIKMGNPLDTDTMIGAQASSDQLEKILSYLDIGKKEGAKVLVGGELAKHDGDIANGYYVQPTIFEGTNDMRVFQEEIFGPVLAVTTFKDDEEAMALANDTLYGLGAGVWTRNGTRAYRFGRGIKAGRVWTNCYHLYPAHSAFGGYKQSGIGRENHLMMLDHYQQTKNMLVSYSPKAMGFF

SEQ ID NO: 14985 - protein, 244 aa, Arabidopsis thaliana
MRKGRGSSVVGPALPVTAGGSVKEPRYRGVRKRPWGRFAAEIRDPLKKSRVWLGTFDSAVDAARAYDTAARNLRGPKAKTNFPIDCSPSSPLQPLTYLHNQNLCSPPVIQNQIDPFMDHRLYGGGNFQEQQQQQIISRPASSSMSSTVKSCSGPRPMEAAAASSSVAKPLHAIKRYPRTPPVAPEDCHSDCDSSSSVIDDGDDIASSSSRRKTPFQFDLNFPPLDGVDLFAGGIDDLHCTDLRL

SEQ ID NO: 14986 - protein, 616 aa, Chromobacterium violaceum ATCC 12472
MCGIAGWVSFERDLSTQRAVAETMTKTMALRGPDDEGLWLDRRAALGHRRLSIIDLEGGRQPMTADEDGRTLACLVYTGEVYNFRELRLELQGLGHAFRTRSDTEVVLRAYLQWGEAMLERLNGMYAFALWDAREQRLLLVRDRMGVKPLYYYPMPDGVLFGSEPKAILAHPEAERRVTAGGLREMLDLVKTPEAAAFAGMHEVRPGQVVTIDRGGLRKRRYWQLEAREHTDDLPTTIRTVRELLDDIVERQIIADVPLCTLLSGGLDSSVVTALAARSMRRQGKGTVRSFSVDFVKHGAAFEADYLRGSPDAPFVRDLAAHAGTEHREILLESRELADPRLRAAVLGAQDLPPAYWGDMLPSLYKLFEAIRAQSTVALSGESADEVFGGYRWFHDAAAVDGDAFPWLAGSSGAFFDGQSLIAPGLLRELDMPGFRRDSYAQALAEVPRLASDSTRERRMREISHMHLTRFVQALLDRKDRMSMAVGLEVRVPFCDHRLVEYVFNAPWSMKNFDGREKSLLRAAGKDVLPESIVRRVKSPYPATQDPAYEQALRQGLARVLDDSRSPALPLLDKAAAWKLLDRPFGKTSTSPERAGLEMALGLDEWLRHHQVSLDL

SEQ ID NO: 14987 - protein, 305 aa, Schizosaccharomyces pombe
MSRLRAPVAKFLADGLKGIRSTALAGSRLSNCRYTSTSSKDTDTSSHMTHFGFKDVPEDEKEHLVKNVFSSVAKKYDEMNDAMSLGIHRLWKNIFVSRLNPGNSTVPMKILDVAGGTGDIAFRILNHATNHNGDRNTRVIVADINPDMLSVGLRRSKKTPYYDSGRVEFIEQNAEILDKIPDNSIDMYTIAFGIRNCTHIPKVLEQAYRVLKPGGVFSCLEFSKVYPAPLAELYRQYSFKILPLLGTIIAGDSQSYEYLVESIERFPDAKTFAKMIEDAGFTLAGETGYETLSFGIAAIHTGIKL

SEQ ID NO: 14988 - protein, 267 aa, Zea mays
MGRPPCCDKAGVKKGPWTPEEDIVLVSYVQEHGPGNWRAVPVSTGLMRCSKSCRLRWTNYLRPGIRRGNFTPHEEAIIVHLQSLLGNRWAAIASYLPQRTDNDIKNYWNTHLKKKLKKQQAIGAIFAPPDSSSSSSIVVPPGATTTTTTTDDHHHRDMLGANLLVSSKDTYYYARPPAEAAAVARRSPFAADGDSSSSSYASSMDNISRLLTGFMKQQHDDAAAAADTKPPAPAAQVNSPPPAAFTVDRRSTTTCPPAPGVARHLQV

SEQ ID NO: 14989 - protein, 299 aa, Oryza sativa
MEATAKYNRGNPAVKRILQEVKEMQSNPSPDFMAMPLEEDIFEWQFAILGPRDSEFEGGIYHGRIQLPSDYPFKPPSFMLLTPSGRFEIQKKICLSISNYHPEHWQPSWSVRTALVALIAFMPTPGGGALGSLDFKKEDRRALAIKSRETPPKFGSAERQKVIDELLTNETNEETNQLPASDASDEHAHKAVGGVNTAGSNSDSVNNDLPRPDSESEIVQHIVEGRTEGVSNHSRANLSRENIPRVAPTPQNPVVAIQKPKHDRLLTLAAFGLTLAIMALVIKKFFKINGLAGYIEGKF

SEQ ID NO: 14990 - protein, 246 aa, Rhodococcus erythropolis
MSYALEGKVAVVTGGGSGIGAACVRQLCALGASVVVADIVFDNATLVAKEFGDRAVAVEVDVARVEDAERMVETAVAHFGGLDIAVNNAGVGVPVKASVGDTGFEEWRRVLDVNLDGAFFCMRAELRRMRKGGSVVNLASVMGAVAAEGSSSYVASKHALVGLTKTAALDYATAGIRVNAVGAGFVDTPLMAGRDPEWLAAVAASHPLGRLAQPDEIASVVAFLASSAASFVTGAFIPVDGGYLAR

SEQ ID NO: 14991 - protein, 194 aa, Zea mays
SIRAVSAPAKKDASEVKRSKVEIIKEKSNFLRYPLNEELVSEAPNINESAVQLIKFHGSYQQTDRDVRGQKNYSFMLRTKNPCGKVPNQLYLAMDTLADEFGIGTLRLTTRQTFQLHGVLKKNLKTVLSTVIKNMGSTLGACGDLNRNVLAPAAPYVKKDILFAQQTAENIAALLTPQSGAYYDLWVDGEKIMS

SEQ ID NO: 14992 - protein, 421 aa, Mesorhizobium loti MAFF303099
MADLKRTQPLARDAMAYVLAGGRGSRLKELTDRRAKPAVYFGGKTRIIDFALSNALNSGIRRLGVATQYKAHSLIRHLQRGWNFLRPERNESFDILPASQRVSETQWYEGTADAVYQNIDIIEAYGPEYMVILAGDHIYKMDYEMMLRQHVDANADVTVGCLEVPRMEATGFGVMHVDAKDNIIAFVEKPADPPGIPGNPDFALASMGIYVFKTKFLMEQLRRDAAEPGSSRDFGKDIIPYIVQHGKAIAHRFTKSCVRSTAENEAYWRDVGTVDAYWEANIDLTDITPELDLYDRDWPIWTYAELKPPAKFVHDEDGRRGSAVSSLVSGDCIVSGATLKKSLIFTGARINSYSTLEEVVMLPDVHVGRNAKLKRVVIDHGVRIPEGLVVGEDPALDAKRFRVSEKGICLITQDMINKLGL

SEQ ID NO: 14993 - protein, 299 aa, Fusobacterium nucleatum subsp. nucleatum ATCC 25586
MGKVAFVYPGQGTQYIGMGKELYENNNKAKELFDKIFNSLDIDLKNVMFEGPEDLLKRTDYTQPAIVSLSLVLTELLKEKGIEADYVAGHSVGEFAAFGGANYLSIEDAVKLVAARGRIMREVAEKVNGSMAAVLGMDAEKIKEVLKSVDGVVEAVNFNEPNQTVIAGEKEAVENACMALKEAGAKRALPLAVSGPFHSSLMKEAGEQLKEEAKKYTFNVGKIKIIANTTAEPLETDSEVKDEIYRQSFGPVKWVDTINKLKSLGVTKIYEIGPGKVLSGLIKKIDKEIEVENIELIEA

SEQ ID NO: 14994 - protein, 523 aa, Zea mays
  unsure (1)..(523): unsure at all Xaa locations
PPGSFFLKDAVQIITKMAAANGVRRVWVGQNSLMSTPAVSAVIRERIGADGSKATGAFILTASHNPGGPTEDFGIKYNMGNGGPAPESVTDKIFSNTTTISEYLISEDLPDVDISVVGVTSFSGPEGPFDVDVFDSSVNYIKLMKTIFDFEAIKKLLTSPKFTFCYDALHGVAGAYAKHIFVEELGADESSLLNCVPKEDFGGGHPDPNLTYAKELVERMGLGKSSSNVEPPEFGAAADGDADRNMILGKRFFVTPSDSVAIIAANAVQSIPYFASGLKGVARSMPTSAALDVVAKNLNLKFFEVXPTGWKFFGNLMDAGMCSICGEESFGTGSDHIREKDGIWAVLAWLSIIAFKNKDNLGGDKLVTVEDIVRQHWATYGRHYYTRYDYENVDAGAAKELMANLVSMQSSLSDVNKLIKEIRSDVSEVVAADEFEYKDPVDGSVSKHQGIRYLFGDGSRLVFRLSGTGSVGATIRVYIEQYEKDSSKTGRDSQEALAPLVDVALKLSKMQEYTGRSAPTVIT

SEQ ID NO: 14995 - protein, 232 aa, Guillardia theta
MSRNLYSHDGRVEQLEFALELIDKSNSAIGIIYEKGILFATMEKNKHNSEKEYQNFTFALEKNIICIASGNIPDANTILFYLKSFADEYKLMFQETVPIEKIVGYLSDIMHKPTQMIYQRPLGVSFIIGGWDEFRGFQLFKIDPSGNFSGWRATSIGFNNILNQTLIEENYHNKINLKESIGIIVKLYYKNLNDYNFPNSFNLLKLYFDKNKNILIHRFNKKEIKMLRKVFK

SEQ ID NO: 14996 - protein, 905 aa, Mycobacterium tuberculosis CDC1551
MSTAIAALFGAHGQAYQALSAQAQAFHAQFVQALTSGGGAYAAAEAAAVSPLLDPINEFFLANTGRPLIGNGANGAPGTGANGGDGGWLIGNGGAGGSGAAGVNGGAGGNGGAGGLIGNGGAGGAGGVASSGIGGSGGAGGNAMLFGAGGAGGAGGGVVALTGGAGGAGGAGGNAGLLFGAAGVGGAGGFTNGSALGGAGGAGGAGGLFATGGVGGSGGAGSSGGAGGAGGAGGLFGAGGTGGHGGFADSSFGGVGGAGGAGGLFGAGGEGGSGGHSLVAGGDGGAGGNAGMLALGAAGGAGGIGGDGGTLTAGGIGGAGGAGGNAGLLFGSGGSGGAGGFGFADGGQGGPGGNAGTVFGSGGAGGNGGVGQGFAGGIGGAGGTPGLIGNGGNGGNGGASAVTGGNGGIGGTGVLIGNGGNGGSGGIGAGKAGVGGVSGLLLGLDGFNAPASTSPLHTLQQNVLNVVNEPFQTLTGRPLIGNGANGTPGTGADGGAGGWLFGNGANGTPGTGAAGGAGGWLFGNGGNGGHGATNTAATATGGAGGAGGILFGTGGNGGTGGIATGAGGIGGAGGAGGVSLLIGSGGTGGNGGNSIGVAGIGGAGGRGGDAGLLFGAAGTGGHGAAGGVPAGVGGAGGNGGLFANGGAGGAGGFNAAGGNGGNGGLFGTGGTGGAGTNFGAGGNGGNGGLFGAGGTGGAAGSGGSGITTGGGGHGGNAGLLSLGASGGAGGSGGASSLAGGAGGTGGNGALLFGFGGAGGAGGHGGAALTSIQQGGAGGAGGNGGLLFGSAGAGGAGGSGANALGAGTGGTGGDGGHAGVFGNGGDGGCRRVWRRYRRQRWCRRQRRADRQRRQRRQRRQSRGHARCRRHRRAAARRERTQRLAIAGRPATTRGVEGISCSPQMMP

SEQ ID NO: 14997 - protein, 570 aa, Shigella flexneri 2a str. 2457T
MSEKHPGPLVVEGKLTDAERMKLESNYLRGTIAEDLNDGLTGGFKGDNFLLIRFHGMYQQDDRDIRAERAEQKLEPRHAMLLRCRLPGGVITTKQWQAIDKFAGENTIYGSIRLTNRQTFQFHGILKKNVKPVHQMLHSVGLDALATANDMNRNVLCTSNPYESQLHAEAYEWAKKISEHLLPRTRAYAEIWLDQEKVATTDEEPILGQTYLPRKFKTTVVIPPQNDIDLHANDMNFVAIAENGKLVGFNLLVGGGLSIEHGNKKTYARTASEFGYLPLEHTLAVAEAVVTTQRDWGNRTDRKNAKTKYTLERVGVETFKAEVERRAGIKFEPIRPYEFTGRGDRIGWVKGIDDNWHLTLFIENGRILDYPGRPLKTGLLEIAKIHKGDFRITANQNLIIAGVPESEKAKIEKIAKESGLMNAVTPQRENSMACVSFPTCPLAMAEAERFLPSFIDNIDNLMVKHGVSDEHIVMRVTGCPNGCGRAMLAEVGLVGKAPGRYNLHLGGNRIGTRIPRMYKENITEPEILASLDELIGRWAKEREAGEGFGDFTVRAGIIRPVLDPARDLWD

SEQ ID NO: 14998 - protein, 199 aa, Ceratopteris pteridoides
RNGLLKKAHELSVLCDAEIALIIFSSTGKLFEHSSSRGIKKILERYKRCSGILQDVGGTVIRDVEYWKQEAERLKERLTYMEEIQRNMLGESLGSLQIKDLQNLEAKLDSGLYKIRGAKTQLMVRQVQELQKKEQILLQQNEALRTKLAELSRLQAPVSGLTTATTSQDVQESSSGSGSRQHETSLSAAETTLQLGFAQ

SEQ ID NO: 14999 - protein, 216 aa, Thermoanaerobacter tengcongensis
MKFFLDTANIEEIKEAYSLGVISGVTTNPSLVAKEGRDFKEVIREIAEIVDGPISAEVISDDHEGMVKEARELAKIHKNIVIKIPMTAEGLKAVNILSKEGIKTNVTLIFSANQALLAARAGATYVSPFVGRLDDINTDGMQIIEDIVTIFTNYDIQAEIITASVRHPIHVLEAAKLGAHIATVPYKVLMQMIKHPLTDIGIERFKEDWKKAGLKI

SEQ ID NO: 15000 - protein, 470 aa, Triticum aestivum
MSVPVAYQGNTSAAVADWLNKGDNAWQLTASTLVGLMSVPGMVVLYGGVVKKKWAVNSAFMALYAFAAVWICWVVWAYNMSFGEELLPFWGKAGPALDQAFLVGRASLPATAHYRADGTLETAMVEPYFPMATVVYFQCVFAAITLILVAGSLLGRMSFLAWMLFVPLWLTFSYTVGAFSVWGGGFLFHWGVIDYCGGYVIHIPAGVAGFTAAYWVGPRTKKDRESFPPNNILFALTGAGLLWMGWAGFNGGGPYAANVDSSMAILNTNICTAASLIVWTCLDAVFFKKPSVVGAVQAVITGLVCITPGAGVVQGWAALVMGVLAGSVPWYTMMVLHKRSKLLQRVDDTLGVIHTHGVAGLLGGVLTGLFAEPNLCNLFLPVTNSRGAFYGGNGGAQLGKQIAGALFVIGWNVVVTSIICVVIRLVVPLRMSEEKLAIGDDAVHGEEAYALWGDGEHYDDTKHGAAVVPV

SEQ ID NO: 15001 - protein, 412 aa, Nicotiana tabacum
MAATSATTFSVGSATSLGCKGSSVSQSKAFSVKFYSKNSLKSFSGLKAATDVSCESESSFLGKESVAVLKQSFTPKAQKENKGYGNCVQPQASYKVAVLGASGGIGQPLSLLVKMSPLVSELNLYDIANVKGVAADLSHCNTPSKVSDFTGASELANCLKGVNVVVIPAGVPRKPGMTRDDLFNINANIVKTLVEAVADNCPDAFIHIISNPVNSTVPIAAEVLKRKGVYDPKKLFGVTTLDVVRANTFVAQKKSLRLIDVDVPVVGGHAGITILPLLSKTKPSTTFTDEEVQELTVRIQNAGTEVVEAKAGAGSATLSMAYAAARFVESSLRALDGDSDVYECAFVQSDLTELPFFASRVKLGKNGVEALIPSDLQGLTEYEQKALDALKPELKSSIEKGIGFVQKEPVAA

SEQ ID NO: 15002 - protein, 277 aa, Halobacterium sp. NRC-1
MRMAQDTQQRAAVVEEMPEFGLGTWENEDPSACADSVRTALEMGYRHIDTAQIYENEDAVGDGIAAADVDREDVFLATKVWTSELGDGDVAPATEQSLEKLGVDYVDLLYVHWPANQYDATETLAALADLQADGVTERIGVSNFEPRHLDEAEDVLGELPFANQVEFHPLLQQEELREYADGEDIELVAYSPLARGEVFDVPEIQAVAEKHGVSEAQVSLAWVRRKGVTAIPKATGEDHIADNWASLDLELDDEDVAKIDGIDRRERQVDPEFGPWN

SEQ ID NO: 15003 - protein, 494 aa, Pisum sativum
MDPYKHRPSSAFNSPFWTTNSGAPVWNNNSSLTVGSRGPILLEDYHLVEKLAQFDRERIPERVVHARGASAKGFFEVTHDISHLTCADFLRAPGVQTPVIVRFSTVIHERGSPETLRDPRGFAVKFYTREGNYDLVGNNFPVFFVHDGMNFPDMVHALKPNPQTHIQENWRILDFFYNFPESLHMFSFLFDDVGVPQDYRHMDGFGVNTYTLINKAGKSVYVKFHWKPTCGVKCLLEEEAIQVGGSNHSHATKDLYDSIAAGNYPEWKLYIQTIDPAHEDRFEFDPLDVTKTWPEDIIPLQPVGRMVLNKNIDNFFAENEQLAFCPAIMLPGIYYSDDKMLQTRVFSYADSQRHRLGPNYLQLPVNAPKWSHHNNHHEGFMNAIHRDEEVNYFPSRHDTVRHAERVPIPTTHLSARREKCNIPKQNHFKQAGERYRTWAPDRQERFLRRWVEALSDTDPRITHEIRSIWVSYWSQADRSLGQKLASHLNMRPSI

SEQ ID NO: 15004 - protein, 333 aa, Saccharomyces cerevisiae
MSEPSEKKQKVATSSLEQLKKAGTHVVADSGDFEAISKYEPQDSTTNPSLILAASKLEKYARFIDAAVEYGRKHGKTDHEKIENAMDKILVEFGTQILKVVPGRVSTEVDARLSFDKKATVKKALHIIKLYKDAGVPKERVLIKIASTWEGIQAARELEVKHGIHCNMTLLFSFTQAVACAEANVTLISPFVGRIMDFYKALSGKDYTAETDPGVLSVKKIYSYYKRHGYATEVMAASFRNLDELKALAGIDNMTLPLNLLEQLYESTDPIENKLNSESAKEEGVEKVSFINDEPHFRYVLNEDQMATEKLSDGIRKFSADIEALYKLVEEKM

SEQ ID NO: 15005 - protein, 449 aa, Burkholderia cepacia
MQKYDFDLFVIGAGSGGVRAARIAAGHGAKVAIAEEYRFGGTCVIRGCVPKKLLMYASQYGQGFEDAAGFGWHSAATSHSWTSLIAAKDAEIARLEGVYQRLIENANVEIFKGRAQIAGPNRVTVTGASVSARTILIATGARPVMPPVAGANLMITSDDVFDLPVGPPRIAIIGGGYIACEFAGIFNGLGRHVVQLHRGSQVLRGFDDELREHLGDELKKSGIDLRLGVDVVAVERQRGALSVQLTTGDAMEVDAVMAATGRLPNTWGLGLETVDVGLDQNGAIKVDEYSRTSSPGIYAVGDVTNRLNLTPVAIHEGHAFADTVFGGKALPTEHENVPFAVFSQPQAASVGLSEAQARDRYSNVEIYGSAFRPMRAALSGRDEKALVKLVVNGSNDRVVGAHIVGADAAEIIQGIAVAIKARATKADFDATLGVHPTLAEEFVTLRNRR

SEQ ID NO: 15006 - protein, 156 aa, Methanosarcina acetivorans C2A
MPKVAVGGTFQYLHDGHARLIEKAFEIAGDGKVYIGLTSDEMLQKNHSIDNYENRRVRLLEYIDEMEIPKEKYEITRLNDPCGPTVEEDFDYIVVSPETYPVALKINRIREKKGKNPLEIVYVEYVMAEDGTPISSTRIAKGEIDRHGKMKRESQA

SEQ ID NO: 15007 - protein, 468 aa, Escherichia coli
MKKVNHWINGKNVAGNDYFLTTNPATGEVLADVASGGEAEINQAVATAKEAFPKWANLPMKERARLMRRLGDLIDQNVPEIAAMETADTGLPIHQTKNVLIPRASHNFEFFAEVCQQMNGKTYPVDDKMLNYTLVQPVGVCALVSPWNVPFMTATWKVAPCLALGITAVLKMSELSPLTADRLGELALEAGIPAGVLNVVQGYGATAGDALVRHHDVRAVSFTGGTATGRNIMKNAGLKKYSMELGGKSPVLIFEDADIERALDAALFTIFSINGERCTAGSRIFIQQSIYPEFVKFAERANRVRVGDPTDPNTQVGALISQQHWEKVSGYIRLGIEEGATLLAGGPDKPSDLPAHLKGGNFLRPTVLADVDNRMRVAQEEIFGPVACLLPFKDEAEALRLANDVEYGLASYIWTQDVSKVLRLARGIEAGMVFVNTQFVRDLRHAFGGVKPRTGREGGGYSSKCSRK

SEQ ID NO: 15008 - protein, 403 aa, Streptococcus agalactiae NEM316
MKIFDKSMKLEHVAYDIRGPVLEEADRMRANGEKILRLNTGNPAAFGFEAPDEVIRDLITNARESEGYSDSKGIFSARKAVMQYYQLQNIHVDMDDIYIVNGVSEGISMSMQALLDNDDEVLVPMPDYPLWTACVSLAGGNAVHYICDEEANWYPDIDDIKSKITSKTKAIVLINPNNPTGAVYPREILQEIVDIARQNDLIIFSDEVYDRLVMDGMEHIPIASIAEDIFTVTLSGLSKSHRICGFRVGWMVLSGPRQHVKGYIEGLNMLANMRLCSNVLAQQVIQTSLGGQQSIDSMLLPGGRIYEQRNYIHKAINEIPGLSAVKPNAGLYLFPKIDTDMYRIDNDEEFVLNFLKQEKVLLTHGRGFNMNTADHFRIVYLPRVDELTELQEKMARFLSQYKR

SEQ ID NO: 15009 - protein, 482 aa, Thermoproteus tenax
MLGKYGVFPPTDPEFEDPPKLDKYDVIVVGGGGGGYHGAFQLSAGGYRVLMVDDKGNLGGNCLYEGCIPSKSVFYMVYLAERLRRLAKRSAGAAEVKAIWEEAVDHKDEVQYLRYLQHIREIKEHGNVDFVKGVARVLDGRRVEVTAVDGSWRKTVEGSRLLLATGSVAVRLPIPGAELAIGSEELFGYRTKRRTLPREVVVIGGGYIGVEVASAMASAGAKVTVVEMLPRIMSGWDSSIVSMIEGALKGRGVEILTNSRVTAIREESGQKVVEFQRPDGSKGTVAGEEVVMAVGRKPYVEGLEALGIVEKGRVVADSSMSTKAPGVYAAGDVLGKYMLYHAAVKESTVAAWNIMMGRPVYEVNFNAIPLTLFTEPEAAMVGISEDEARARGIPYVAVQYPLEDDSYAQIVGVREGWVKLIVERESQRIIGGSVYGEAASMIINEIALAVAVNARVRDLALLAHAHPTIFESIDRAAVRFSL

SEQ ID NO: 15010 - protein, 466 aa, Thermoproteus tenax
MTFDLVVLGGGSAGFAAAIKAAQLGASVAMINDGPLGGTCVNVGCVPSKYLVRAGELMKAARAPYFRGIRGWAEVDGKALMAHMRSVVEELRRRKYADLIDYYDIKLMEGRGMLVGPGAVKVGGETVVGRKIVVATGARAVWPQIKGLEEARRRGLAFSNEEFFSLEDLPNSVVFIGGGAISVELGQALSRLGMETYVIYRSRLLKYEEALVSDFIEEALREDGVKLIRGEATAVEVKNNGVEVRAGGVSVEAEAVFVATGRRPNVEDLGGLLKLTPEGAVEVNRRMETSVPGIYAAGDVTGGLPGGRYLENVAARQGVVAAVNALGGSAEFDAMWAPRVVFSDPPVASVGLREEDMIRSGVGCACRLVTIDNAAAAWTSGRARGFIKINTYPERLRLKGGRIAGALVVSPHAEELINIFALAVRKGLTVDDIADWIPAFPSFSEALRLAALAFTTDPTKLSCCGG

SEQ ID NO: 15011 - protein, 101 aa, Glycine max
  unsure (1)..(101): unsure at all Xaa locations
MRTKRKEMASSMISXPADTSGNRASSGLDARFAVLKSMAGFPTSETNKDITLIAXNCGRVLCMQVXSPIVMMKFXTLCYLPDLDDAQLAXEVRYLLKNGWI

SEQ ID NO: 15012 - protein, 279 aa, Thermoproteus tenax
MGDGGALAHVAESLNISGAVMVVNGDVFTDADYRAVLDAHKRAGGVATMMLVEVSPESVSKYGIAVLDDSMRLIEFVEKPKEPPAGSRLANAGIYVFEPEVFKLIPRRRGEVKIAKDIIPELLRRGDIYAFIHRGIWHDIGTPADYLKANYAALDKWGSKEVDKPGIDITPPVYIGEGSIVEEGASLGPYVVLGQGAKVGRYARLKNSVLMRAATVEPGAYISGSIIGEETYIGRWARVLESVVADGVYIKDEVYVGRGSAIGPNREVVEDVPDGSMLP

SEQ ID NO: 15013 - protein, 518 aa, Zea mays
MASADLAEAMEPGKKSNVKYASVCAIMASMACVILGYDIGVMSGAAIYIKKDLKITDVQLEILIGIISLYSLIGSFAGARTSDRIGRRLTVVFAAVIFFVGALLMGFSVNYGMLMVGRFVAGVGVGYGGMIAPVYTAEISPAASRGFLTSFPEVFINLGILLGYLSNYAFAGLPLHLGWRVMLGIGAAPSALLALLVLWMPESPRWLVMKGRLADARAVLEKTSASPEEAAERLADIKVAAGIPKGLDGDVVAVPKERSGGEMQVWRELILSPTPAIRRILLSAVGLHFFQQASGSDSVVLYSPSVFKSAGITDDNKLLDLGVTCAVGVAKTLFIPVATFLLDRAGRRPLLLTSTGGMIVSLVGLGTGLTVVGHHPDAKIPSAVALCIASTLAYVAFFSIGLGPVTGVYNSEIFPLQVRALGFAVGVACNRVTSAVISMTFLSLSKGITIGGSFFLYSGIAAVGWVFFFTCLPETRGRTLEEMGKLFGMPEPDTDMAEAYNAAAKEKAVEMPAVLGND

SEQ ID NO: 15014 - protein, 445 aa, Zea mays
  unsure (1)..(445): unsure at all Xaa locations
MQWLMESGGVGLRFRACWMVQRTLGLLRSYAHVRSYNSQLSALVSATSECSNLPSSCYYLPNPSPCQVWSRSFASDNGDKFEAVVPFMGESVTDGTLANFLKKPGDRVEADEPMAQIETDKVTIDVASPEAGVIEKLIASEGDTVTPGTKVAIISKSAQPAETHVAPSEEATSKESSPPKVEDKPKVEEKAPKVDPPKMQAPKPTAPSKTSPSEPQLPPKERERRXRIANRLKDSQNTFAMLSTFNEVDMTNLMKLRSDYKDEFVTKHGGKLGLMSCFXKAAVSALQNQPIVNAVIDGDDIIYRDYVDISVAVGTSKGLVVPVIRDADTMNFADIEKGINNLAKKATEGALSIDDMAGGTFTISNGGVYGSLLSTPIINPPQSSILGMHSIVQRPVVVNGDILARPMMYLALTYDHRLIDGREAVFFLRRIKDVVEDPRRLLLDI

SEQ ID NO: 15015 - protein, 220 aa, Ceratopteris richardii
MGRGKIEMKRIENRTTRQVTFCKRRAGLVKKARELSVLCDADVALIVFSSSGRLFEYAGSRSMREIIQAYVDAHEDSSSLLQLRSEEACVSQDLRAELTELRKEVESLRQEKRRKDGDIHDLKLLSADELDSLEGEVETSLCSIRKRQKQLYREKMNETFRKEEELRKENEKLRKQVEELQCARWEICCAQGFEASATSMCTSHGMTSERSDSFLDLRLN

SEQ ID NO: 15016 - protein, 61 aa, Glycine max
  unsure (1)..(61): unsure at all Xaa locations
FRRIFLSSKRLWGGLXKDLFTKIHHKVSENWISATLLLCPLVGFYAYVQNYLEKEKLAQRY

SEQ ID NO: 15017 - protein, 560 aa, Arabidopsis thaliana
MGSSGDVNWKLADHPKLPKGKTIGLIVLDGWGESDPDQYNCIHKAPTPAMDSLKDGKPDTWRLIKAHGTAVGLPSEDDMGNSEVGHNALGAGRIYAQGAKLVDLALASGKIYEDEGFKYISQSFEKGTVHLIGLLSDGGVHSRLDQVQLLLKGFAERGAKRIRVHILTDGRDVLDGSSVGFVETLEADLAALRSKGVDAQVASGGGRMYVTMDRYENDWSVVKRGWDAQVLGEAPHKFKSALEAVKTLRAEPGANDQYLPPFVIVDDSGKAVGPIVDGDAVVTFNFRADLMVMHAKALEYKDFDKFDRVRVPDIRYAGMLQYDGELKLPSHYLVSPPLIDRTSGEYLAHNGVRTFACSETVKFGHVTFFWNGNRSGYFNEKLEEYVEIPSDSGISFNVQPKMKALEIAEKARNAILSGKFDQVRVNLPNGDMVGHTGDIEATVVACEAADRAVRTILDAIEQVGGIYVVTADHGNAEDMVKRDKSGKPALDKEGNLQILTSHTLKPVPIAIGGPGLSAGVRFRQDIETPGLANVAATVMNLHGFVAPSDYETSLIEVVEK

SEQ ID NO: 15018 - protein, 312 aa, Neurospora crassa
MSEFAKQRIQAIGNHLAANKAIPPVIKMAGDSNGPRVTGKVVIITANGSQGANSVLGIGRASAHQFAQNGAKAVYICDYDDSNLEEHKREIETLYSSANVHTRQFDAADEKAISEVVKDALDRYGRLDVFFANAGILGPHTKFSDVEADEFMETMRVNALGPFLAAKYAAPAMQKTSAEKQKSSGSIIMTASVAGLRSNAGGTPYSASKAAVVSMAQTIAYQLVGTNIRVNALCPGLIETAMTAPVFDSARARGTEGKIGQLNPLRRGGHADEIARVALFLGSDESSYVNAQAWAVDGGLSSGHPYVPGKIA

SEQ ID NO: 15019 - protein, 432 aa, Shigella flexneri 2a str. 2457T
MSKIVKIIGREIIDSRGNPTVEAEVHLEGGFVGMAAAPSGASTGSREALELRDGDKSRFLGKGVTKAVAAVNGPIAQALIGKDAKDQAGIDKIMIDLDGTENKSKFGANAILAVSLANAKAAAAAKGMPLYEHIAELNGTPGKYSMPVPMMNIINGGEHADNNVDIQEFMIQPVGAKTVKEAIRMGSEVFHHLAKVLKAKGMNTAVGDEGGYAPNLGSNAEALAVIAEAVKAAGYELGKDITLAMDCAASEFYKDGKYVLAGEGNKAFTSEEFTHFLEELTKQYPIVSIEDGLDESDWDGFAYQTKVLGDKIQLVGDDLFVTNTKILKEGIEKGIANSILIKFNQIGSLTETLAAIKMAKDAGYTAVISHRSGETEDATIADLAVGTAAGQIKTGSMSRSDRVAKYNQLIRIEEALGEKAPYNGRKEIKGQA

SEQ ID NO: 15020 - protein, 487 aa, Mesorhizobium loti
MRAQPTASHYVNGRYIDDEQGAPLPVIYPATGETIAMLRSATPNVLELAIEAARAAQPAWARLKPVERGRILRRAADILRARNADLARIETLDTGKAIQETLVADAPSAADCLEYFGGAVAAYNGEAVDLGGPFAYTRREALGVCVGIGAWNYPIQIAGWKSAPALAMGNAMVFKPSENTPLSALALAEIYSEAGLPDGLFNVVQGYGDVGAGLVGHDVVAKVSVTGSVPTGRKVLSLAGSKMKHATMELGGKSPLIVFDDADIENAIGGAMLGNFYSTGQICSNGTRVFVQSGIHDRFVERLVERTKKIRIGNPLDPETQMGPLVSKAQHEKVVGYIGIGKQDGAVLACGGNVPSLQGFDGGFFVEPTVFTGVTDTMRIAREEIFGPVMSVLKFDGEDEVIDRANDTEFGLAAGVFTRDLPRAHRVIAELQAGTCWINAYNLTPVEIPFGGFKQSGIGRENSLAALALYSQLKSIYVETGDVASPY

SEQ ID NO: 15021 - protein, 309 aa, Saccharomyces cerevisiae
MSAVFNNATLSGLVQASTYSQTLQNVAHYQPQLNFMEKYWAAWYSYMNNDVLATGLMFFLLHEFMYFFRCLPWFIIDQIPYFRRWKLQPTKIPSAKEQLYCLKSVLLSHFLVEAIPIWTFHPMCEKLGITVEVPFPSLKTMALEIGLFFVLEDTWHYWAHRLFHYGVFYKYIHKQHHRYAAPFGLSAEYAHPAETLSLGFGTVGMPILYVMYTGKLHLFTLCVWITLRLFQAVDSHSGYDFPWSLNKIMPFWAGAEHHDLHHHYFIGNYASSFRWWDYCLDTESGPEAKASREERMKKRAENNAQKKTN

SEQ ID NO: 15022 - protein, 357 aa, Clostridium pasteurianum
MKEFKIAVIPGDGIGPDIVREAVKIMTKVGEKYDTKFNFVEVKAGGDAIDAYGEPLPKETIDVCKSSAAVLLGAVGGPKWDNLEGSKRPERALLGLRGALGLYANLRPAKVYNVLKSASPLKNEIIDEGVDLLVVRELIGGIYFGDRGTKEVNGVETAFDTEKYNVDEVKRIAHSAFKAAMKRRKKVTSVDKANVLDASRLWRKTVNEVSKEYPEVELSHLYVDNTAMQLVRKPSQFDVILTNNIFGDILSDEASMITGSIGMLASSSIREDSFGMYEPIHGSAPDIAGLDIANPLAQILSAAMLMEYSLDMSEAARDVEAAVEKVLNEGYRTADIYIEGTKKVGTSEMGNLVLERL

SEQ ID NO: 15023 - protein, 503 aa, Pseudomonas putida KT2440
MRYPMKDSSDTHPNHLPDSCYGLFIDNQWVTAEYGETLDIINPANGKILTNIPNATAADVDRAVQAAQRAFVTWRTTSPAERANALLKIADLLEADADRFAVLETLDVGKPIRESRSVDIPLAIDHFRYFAGVIRSQSDEAVMLDEQTLSIALSEPLGVVGQVIPWNFPLLMAAWKIAPAIAAGNTVVIKPSELTPVTILELAKIFAKVLPAGVVNIVTGLGTTVGQALLDHPDLRKLAFTGSTRVGELVANAAAKKIIPATLELGGKSANIVFPDANWDKAVEGAVLAILWNQGQVCESGARLFVHESIYERFLAELKHKFEAVRVGDPLNPDTMMGAQVSKTQMERILGYVDIAKEEGAEVLIGGGRLTGADYDAGFFIQPTILVGVRNDMRVAYEEIFGPVLCVIPFKDEAEVIAMANDSEYGLAGAVWTQDINRALRVARAVETGRMWVNTYHEIPAHAPFGGYKKSGLGRETHKSMLEAYSQKKNIYVSLNEAPLGLF

SEQ ID NO: 15024 - protein, 161 aa, Chloroflexus aurantiacus
MGRDLIAASPAARQIFATADETLDFNLSELCFCGPEADLTATANAQPALLTTSMALLAAMTELLGDRLEQPIAVAGHSLGEYSALVAGGALDFKTALQLVRRRGELMAAAHEGSMAAVIGLDAAILEQICQEVSAALQNDHSHGTVVIANYNAPRPTGHQW

SEQ ID NO: 15025 - protein, 60 aa, Zea mays
MGVGMEVHQNRWIQKWDPGPENLQFNFPWGPPNLSVVGLFGPPVPLLVFKGLVPGFPIQG

SEQ ID NO: 15026 - protein, 355 aa, Burkholderia multivorans
MKIAVLPGDGIGPEIVTEAVKVLNALDEKFELEQAPVGGAGYEARGHPLPDATLKLAKEADAILFGAVGDWKYDSLERALRPEQAILGLRKHLELFANFRPAICYPQLVDASPLKPELVAGLDILIVRELNGDIYFGQPRGVRAAPDGPFAGEREGFDTMRYSEPEVRRIAHVAFQAAQKRAKKLLSVDKSNVLETSQFWRDIMIDVSKEYADVELSHMYVDNAAMQLAKAPKQFDVIVTGNMFGDILSDEASMLTGSIGMLPSASLDKNNKGLYEPSHGSAPDIAGKGIANPLATILSAAMLLRYSLNRAEQADRIERAVKTVLEQGYRTGDIATPGCKQVGTAAMGDAVVAAL

SEQ ID NO: 15027 - protein, 232 aa, Brassica oleracea var. botrytis
MASSSYAPFSAVFSGFAATKPNPPPTCSAFLVPKRRSNSRNLKNGVSLKSWNKHGFQFKSRNLSVYARATEEKTVHDFTVKDISGKDVSLDKFKGKPLLIVNVASKCGLTSSNYTELSQLYDKYRNQGFEILAFPCNQFGGQEPESNPDIKRFVCTRFKAEFPIFDKVDVNGPSTAPIYQFLKSKSGRFLGDLIKWNFEKFLVDKKGNVVQRYPPTTPPLQIEKDIQKLLVA

SEQ ID NO: 15028 - protein, 275 aa, Triticum aestivum
MASISGAAAPPSSSSACRLRLRRQLLMRPSHLRLRAPHSIADLSRSSGSPHAPAPPLASRAPGQGGGAAVEKDPIKLWDRYVEWLYQHKQLGLFVDVSRMGFTDDFLLRMEPLMQRAFVAMGELEKGAIANPDEGRMVGHYWLRDPGLAPNSFLRTKIEKTVDHILAFSQDIVSGKIKPPSSQVGRFTQILSIGIGGSSLGPQFVSEALAPDNPPLKIRFIDNTDPAGIDHQIAQLGEELKSTLVIVISKSGGTPETRNGLLEVQKAFRDAGLDF

SEQ ID NO: 15029 - protein, 314 aa, Oryza sativa
  unsure (1)..(314): unsure at all Xaa locations
MAVDLMGFSPRGGCRPSVETEQLAFQEAAAAGLRSLELLVSSLSAGGEKQSSPPLGEIADQAVSRFRKVISILDRXTGHARFRRGPVVGAAAAEAAAAAASASPSSSPVSPPLPPVTTQPAAAVKSLTLDFTNPAKVAAASVTSTSFFSSVTAGGDGSVSKGRSLVSSGKPPLAGGVKRKHPHPPCAAAGDGHGHGAGHAHAHGGCHCSKKRKQRVRRTVRVAAASARVADIPADEYSWRKYGQKPIKGSPYPRGYYRCSTVKGCPARKHVERAADDPATLVVTYEGDHRHSQGAGERSLSSSRPNGLTAARFA

SEQ ID NO: 15030 - protein, 785 aa, Escherichia coli K12
MASSALTLPFSRIAHAVDSAIPTKSDEKVIWSACTVNCGSRCPLRMHVVDGEIKYVETDNTGDDNYDGLHQVRACLRGRSMRRRVYNPDRLKYPMKRVGARGEGKFERISWEEAYDIIATNMQRLIKEYGNESIYLNYGTGTLGGTMTRSWPPGNTLVARLMNCCGGYLNHYGDYSSAQIAEGLNYTYGGWADGNSPSDIENSKLVVLFGNNPGETRMSGGGVTYYLEQARQKSNARMIIIDPRYTDTGAGREDEWIPIRPGTDAALVNGLAYVMITENLVDQAFLDKYCVGYDEKTLPASAPKNGHYKAYILGEGPDGVAKTPEWASQITGVPADKIIKLAREIGSTKPAFISQGWGPQRHANGEIATRAISMLAILTGNVGINGGNSGAREGSYSLPFVRMPTLENPIQTSISMFMWTDAIERGPEMTALRDGVRGKDKLDVPIKMIWNYAGNCLINQHSEINRTHEILQDDKKCELIVVIDCHMTSSAKYADILLPDCTASEQMDFALDASCGNMSYVIFNDQVIKPRFECKTIYEMTSELAKRLGVEQQFTEGRTQEEWMRHLYAQSREAIPELPTFEEFRKQGIFKKRDPQGHHVAYKAFREDPQANPLTTPSGKIEIYSQALADIAATWELPEGDVIDPLPIYTPGFESYQDPLNKQYPLQLTGFHYKSRVHSTYGNVDVLKAACRQEMWINPLDAQKRGIHNGDKVRIFNDRGEVHIEAKVTPRMMPGVVALGEGAWYDPDAKRVDKGGCINVLTTQRPSPLAKGNPSHTNLVQVEKV

SEQ ID NO: 15031 - protein, 402 aa, Corynebacterium efficiens YS-314
MKNLATVEDTLTSWPQVLLNTYGTPPVELVTGKGSTVTDADGNVYIDLLAGIAVNALGHAHPAIIEAVTTQLSQLGHVSNLFATRPVVEVAAELVQRFALDDATIASQTQVFFCNSGAEANEAAFKLARLTGRHRILAATNGFHGRTMGSLALTGQPDKRIPFAPLPSGVEFYPYGDLDYLTTLVESDPTDTAAIILEPIQGETGVIPAPEGFLTGVRELCDKHGLLFIVDEVQTGIGRTGDFFAHQHEGVTPDVVTMAKGLGGGLPIGACLATGEAAKLFGPGKHGTTFGGNPVSAAAARAVLSVIDEEFCADVARKGELFAEQLRGVAGVADVRGRGLMLGVVLDQPVAKQAVTAGFKHGLILNAPADNIIRLTPPLVITDDEIRDAVRALAAVLAELNA

SEQ ID NO: 15032 - protein, 622 aa, Mycobacterium tuberculosis CDC1551
MMAVGSLIESRRRRRRVVSWRPGVTSRREVPVSFVIAQPEMIAAAAGELASIRSAINAANAAAAAQTTGVMSAAADEVSTAVAALFSSHAQAYQAASAQAAAFHAQVVRTLTVDAGAYASAEAANAGPNMLAAVNAPAQALLGRPLIGNGANGAPGTGQAGGDGGLLFGNGGNGGSGAPGQAGGAGGATGFFGNGGNGGDGGAGANGGAGGTAGWFFGFGGNGGAGGIGVAGINGGLGGAGGDGGNAGFFGNGGNGGMGGAGAAGVNAVNPGLATPVTPAANGGNGLNLVGVPGTAGGGADGANGSAIGQAGGAGGDGGNASTSGGIGIAQTGGAGGAGGAGGDGAPGGNGGNGGSVEHTGATGSSASGGNGATGGNGGVGAPGGAGGNGGHVSGGSVNTAGAGGKGGNGGTGGAGGPGGHGGSVLSGPVGDSGNGGAGGDGGAGVSATDIAGTGGRGGNGGHGGLWIGNGGDGGVGGVGGVGGAGAAGAIGGHGGDGGSVNTPIGGSEAGDGGKGGLGGDGGGRGIFGQFGAGGAGGAGGVGGAGGAGGTGGGGGNGGAIFNAGTPGAAGTGGDGGVGGTGAAGGKGGAGGSGGVNGATGADGAKGLDGATGGKGNNGNPG

SEQ ID NO: 15033 - protein, 405 aa, Chromobacterium violaceum ATCC 12472
MTKPRAVYLQSGGPTAVLNASAQGAIETARRLGLSLYAAYDGLAGLLDGRLCDTDGVSDTAIAQLAFMPGGSFGVSRRMIGTFEEAPEDWLRLRDVLAKHDIHYLLINGGNGSLGCAERLVDFEKHTGYKLGVIGIPKTIDNDLVGTDNSPGYGSSAKFLASAMREVGLDMTSMGWGRVFIMETMGRHTGWLAAACAAASRNPHEAPHLLLLPEVPFDQARFLAALDASLAKYGQCAIAVAEGITGQDGRFVAEAKKSETYGHEQLGGAGHWLAQLILRERGISAHVAQVDYLQRAGGHLASATDVRQAYVMGERAVEWLLAGKTGLMAGIRRLNDHPYCWDVAEVPLSAVGDKEKRLPPEFIGADGFSVTQAFLDYVKPLIEGERIPPFKDGLPDYRPIAWPRV

SEQ ID NO: 15034 - protein, 468 aa, Neurospora crassa
MAPISRETDFLVIGGGSGGIATARAAAGKYGIKSMVVEGKRLGGTCVNVGCVPKKVTFYAALVAETIHQAKDYGFSVEQTAPFDWPTFKQKRDAYVARLNGIYERNLANDKVEYVHGWAKLLSPNSVEVTLDDGTKSVVNAKKILIAVGGNPTIPPHIPGSEYGTNSDGFFDIDTLPKKVALVGAGYIAVEFAGMLNALGVETHLFIRHDTFLRSFDPMIQQVSVKEYERIGVKVHKKSQLTSVQKDAAGKLAINFKEGEGEQSISDVDHLIWAVGRTPAVEGLGLDKAGVKTNEKGYIEVDEYQNTSTENIYAVGDVCGQVELTPVAIAAGRKLAARLFGPEEFRTLKLNYDNVPSVVFAHPEIGSIGLTEPEAVAKYGAENLKIYKSSFTAMYYAMMKPEDKAPTAYKLICAGPEEKVVGLHIIGLGSGEILQGFGVAVNMGATKADFDNCVAIHPTSAEELVTLK

SEQ ID NO: 15035 - protein, 392 aa, Bacillus cereus ATCC 10987
MKSFQPSEIVTSLPTQFFASLVAKVNKVVAAGHDVINLGQGNPDQPTPQHIVKALQDAAEKTIHHKYPPFRGHESLKEAVATFYQREYGVELNSKTEVAILFGGKAGLVELPVCFTNPGDTILVPDPGYPDYLSGVALAKAKFETMPLIAENNFLPDYAKIDDSIAERAKLMFLNYPNNPTGATASKDFFDETIHFANKHNILVIHDFAYGAIGFDGQKPVSFLQADGAKDTGIEIYTLSKTFNMAGWRIAFAVGNESVIETINLLQDHMYVSIFGAVQDAAREALLSSQSCVIDLVNSYEARRNALISACHSIGWNVNIPTGSFFAWLPVPKGYTSEQFSNILLEKAHVAVAPGVGFGEHGEGYVRVGLLHTEDRLREAIHRIDKLNFFKK

SEQ ID NO: 15036 - protein, 380 aa, Staphylococcus aureus subsp. aureus MW2
MNKKTKLIHGGHTTDDYTGAVTTPIYQTSTYLQDDIGDLRQGYEYSRTANPTRSSVESVITALENGKHGFAFSSGVAAISAVVMLLDKGDHIILNSDVYGGTYRALTKVFTRFGIEVDFVDTTHTDSIVQAIRPTTKMLFIETPSNPLLRVTDIKKSAEIAKEHGLISVVDNTFMTPYYQNPLDLGIDIVLHSATKYLGGHSDVVAGLVATSDDKLAERLAFISNSTGGILGPQDSYLLVRGIKTLGLRMEQINRSVIEIIKMLQAHPAVQQVFHPSIESHLNHDVHMAQADGHTGVIAFEVKNTESAKQLIKATSYYTLAESLGAVESLISVPALMTHASIPADIRAKEGITDGLVRISVGIEDTEDLVDDLKQALDTL

SEQ ID NO: 15037 - protein, 399 aa, Enterococcus faecalis V583
MNVSNRAQQLTPSVTLAAAAKAKALKAKGVDVLSLTVGEPDFVTPKNIQKAAIASIEDGRASYYTPSGGIPELKQAIVSYVEREYQLRYQPKQVIVTDGAKYALYLLFQAILNVGDEVIIPVPYWVSYGEQVKLAEGKPVFVSSTQEQSFKVSVAQLEAVRTDKTKAIILNSPSNPTGVIYTEEELRQIGEWAVAHNILIIADDIYGRLVYNGHRFTPIATISEAIRQQTIIINGVSKTYAMTGWRIGFAVGDEKIIQAMTQLASQSTSNPVAVSQYAAIEALTGEQSTVEDMRQAFEKRLNHIYPKVAALPGVSLIKPEGAFYLFPNVKKTLEICGYDNVTNWVEDLLQEAHVALVTGEGFGAPEHVRMSYATDLMTLEKAIERMNDFIEKKRIQHNA

SEQ ID NO: 15038 - protein, 524 aa, Thermus thermophilus HB27
MEITRLLTLYYEATPDPQNPLEGVRFGTSGHRGSSLKATFTEAHVLAIAQAIAELRPSFGATGPLFLAKDTHALSEPAWATALSVFAAHGIEVRVEADGDYTPTPLVSLAILEHNARQEAKADGVLLTPSHNPPEDGGFKYNPPTGGPANARITRAIEERANALLQEGLKGVKRLPLREALARAKPFDYAGLYVEKVAEAVDLEAIRASGLRIGVDPLGGASLRVWERLAESHGLPLEVVNPTLDPTFRFMPKDHDGKIRMDCSSPYAMAGLLALKDRFDLAIGNDPDADRHGIVTPRGLMNPNHYLAAALHHLYTTRSWPGAKVGKTAVTSALLDRVAQALGREVYETPVGFKHFVAGLLEGWLGFAGEESAGASFLRFDGRPFSTDKDGILMGLLAAELMAKRGQAPDALYEALAETLGRPYYARKDLPVSPEAKARLARLSTKEVHPATLAGEPVLQVLDRATGNGEPLGGIKVVAANAWFAVRPSGTEDVAKVYAESFLGEAHLERVLEEATALLHKALA

SEQ ID NO: 15039 - protein, 390 aa, Brucella melitensis biovar Abortus
MATIRVPTLGESVSIAVDEPLVELETDKVTVEVPAPAAGVLAEITAKEGDTVEVGALLGQISSDGAAVAAAPAQKKEEAKPAAAAPAAAPVASASSGPAMQPAPAAAKLLAESGLSADQVEGSGKRGQVAQRGHSSRPSRKAVSAAPAAPVAARPASSADDASREERVKMTRLRQTIAARLKDAQNTAAMLTTFNEVDMSAVMELRNKYKDRLEKKHGVKLGFMGFFTKAVTHALKEIPAVNAEIDGTDIVYKNFCHVGMAVGTDKGLVVPVIRDADQMSIAEVEKELARLARAARDGSLSMADMQGGTFTITNGGVYSLMSRDLCASRTLGMYKIQECPMVVGGQIVVRPMMYLALSYDHRIVDGKEAVTFLVRAKESLEDPEHLVLDL

SEQ ID NO: 15040 - protein, 214 aa, Citrus limon
IDFRPVKPYEVPMTAAGALQSYKLAAKAITRLQSLPSGSMERLCDTMIQEVFELTGYDRVMAYKFHEDDHGEVVSEITKSGLEPYLGLHYPATDIPQAVRFLFMKNKVRMIVDCRARHVKVLQDEKLPFDLTLCGSTLRAPHSCHLQYMENMNSIASLVMAVVVNDEEEEGDNTLPQKRKRLWGLVVCHNTTPRFVPFPLRYACEFLAQVFAIH

SEQ ID NO: 15041 - protein, 148 aa, Citrus limon
VMVYKFHEDEHGEVVAESKRPDLEPYFGLHYPATDIPQASRFLFKQNRVRMIVDCHATPLCVIQDEGLMQPLCLVGSTLRAPHGCHAQYMANMGSIASLALAVIINGNDEEAVGGRSTTRLWGLVVCHHTSARCIPFPLRYACEFLTQ

SEQ ID NO: 15042 - protein, 278 aa, Pseudomonas sp. Y2-1-1
HTRGVWANNLIYNIHLLTGKISEPGNSPFSLTGQPSACGTAREVGTFSHRLPADMLVANPKHRETAEKIWKLPAGTIQEKPGFHAVEQSRKLKDGVLKVYWTQVSNNMQAGPNIMQEVLQGWRNPQAFVVVSDVYPTVSAQAADLILPSAMWVEKEGAYGNAERRTQFWHQLVKAPGEARSDLWQLVEFSKRFTTDEVWPAELLDKAPTYRGKTLYQVLFANGQVDQFPSEQIETGYLNDEAAAFGFYLQKGLFEEYAQFGRGHAHDLAPFDSYHAAR

SEQ ID NO: 15043 - protein, 87 aa, Oryza sativa
MALSLMASRATTVCPLQGLKSTAGMPVARRSGNSSLCNVSNGGRIRCMQAWPIEDIKKFETLCYLSPITVEDLLKHIEYLLRSKWVP

SEQ ID NO: 15044 - protein, 509 aa, Zea mays
MTIDMSIPGSSGLLNAAGKRDMKFFSNPYVLALTGAAGIGGFLFGYDTGVISGALLYIRDDFPAVKDNYFLQETIVSMALVGAMIGAAGGGWINDAYGRKKSTLLADLMFALGSLVMCAAAGPYILIIGRLLVGLGVGVASVTAPVYIAEAAPSEIRGGLVSTNVLMITGGQFFSYLINLGFTEVPGTWRWMLGVAAVPAIIQFVLMLFLPESPRWLYWKDEKAKAIAVLERIYESDRLEEEVELLATSSMHEFQSNNTGSYLDVFKSKELRLAFFAGAGLQAFQQFTGINTVMYYSPTIVQMAGFSSNRLALLLSLIVAAMNAAGTIVGIYLIDRCGRRRLALTSLAGVVVSLAILATAFILQSSSGLCASAASGTCQGALGWFAVAGLALYIAFFSPGMGPVPWAVNSEIYPEAYRGTCGGMSATVNWVSNLVVAQTFLSIVGLVGTGPTFLIVAGIAVLAFVFVATYVPETKGLTFEQVEQMWRERAWGNSGGNCESLLAGTAAAP

SEQ ID NO: 15045 - protein, 168 aa, Avena agadiriana
VMASSATSVAPFQGLKSTAGLPVSRRSNAGLGSVSNGGRIRCMQVWPIEGIKKFETLSYLPPLSEEALLKQIDFLIRSKWVPCLEFSKVGFIFREYGSTPGYYDGRYWTMWKLPMFGCTDASQVIKEVEEVKKEYPDAYVRIIGFDNIRQVQCVSFIAFKPPGCEESG

SEQ ID NO: 15046 - protein, 650 aa, Nostoc sp. PCC 7120
MVKSAPPPTTGRKPSKVEGLKENSNFLREPVATQILEDTTHFTEDAVQILKFHGSYQQDNRDNRTKGQEKDYQFMLRTKNPGGLVPPQLYLALDKLADEYGNHTLRATTRQGFQMHGILKKNLKAAIATIVRNLGSTLGACGDINRNVMAPPAPFKNRAEYQYAWEYAQNIADLLSPQTGAYYEIWLDGEKAISAEESPEVKAARQSNGNGTIIHDTEEPLYGTYYMPRKFKVSVTVPGDNSIDLYSQDLTLVVLTDKKGNLEGFNIFAGGGLGRTHNKEETFARLADPIGYVAKEDVYSAVKAIVATQRDYGDRTDRRHARLKYLINDWGVDKFRAKVEEYFGKPIAPFKQLPEFKYHDFLGWHEQGDGNLFLGISIDNGRVKDEGAFQLKTALREIVEQFNLPIRLTPNQNLIFYEITPENKPAIQAILDRCNVVSDPTTIEPLVRYAMACPALPTCGLAITESERAIPGILERIRTLLDKLGLQNEHFVVRMTGCPNGCARPYMAELGFVGSAPESYQVWLGGSPNQTRLAQPYVEKLHDNDIESFLEPIFVYFRKYRKSGESFGDFCDRVGFDAIREFVAEYQPETTPVTIEPEQPEVVSKSRKARYRVSLHDDLYNKVKATATSQGRSMTDLVKDALEAYFQSLS

SEQ ID NO: 15047 - protein, 403 aa, Oryza sativa
  unsure (1)..(403): unsure at all Xaa locations
TRHRSAVPSGASTGIYEALERRDGDGAAYGGKGVLNAVRNINEVIAPKLVGVDVRNQSDVDAIMLDIDGXRPNKSKLGANAILGVSLSVCRAGAGAKEVPLYKHIQELGGAEELVMPVPAFNVINGGSHAGDNLAMQEFMLLPVGASSFSEALRMGSEVYHALKGIIKAKYGQDACNVGDEGGFAPNVQDNREGLVLLMDAIEKAGYSGKIKIGMDVAASEFLTKDGSYDLNFKNQPNDGAYVISAQHLCDRVRPRVRDFPIVSIEDPFDQDDWSSWASLQSSVNIQIVGDDLLVTNPKRIAEAIGKKACNALLLKVNQIGTVTESIQAALDSKAAGWGVMVSHRSGETEDNFIADLAVGLASGQIKTGAPCRSERLAKYNQLLRIEMELGNVRYAGEAFRSP

SEQ ID NO: 15048 - protein, 368 aa, Arabidopsis thaliana
MDPIKHISLPVLVLFLLLSVSAGQPGTPDQRHDPYAYSGSLSPAMAVVVVVVIAALFFMGFFTVYIRHCTGAVDGSVTPAGGARRRVTNATVARGLDVETIETFPTFVYSEVKTQKIGKGALECAICLNEFEDDETLRLLPKCDHVFHPHCIGAWLQGHVTCPVCRTNLAEQTPEPEVVVETDLEAQQQSAVPVPVVELPRVKFPRSHTTGHSVVLPGESTDRFTLRVPEELRKKIMANWKLNRSNSVFVLPRGGSSRSGKQVDRSRAKSDRWLFRKTPSFLWRNRDDGSIRLGGTGSVRGNSVTSPSGDSVRADRWAFLRNPSFLWRNTTPVPSPRVEVNNKDGEGTSSVQHIGTVGSTSGSLRLPV

SEQ ID NO: 15049 - protein, 278 aa, Bacteroides thetaiotaomicron VPI-5482
METVRLNNGVEMPILGYGVYQVTPEECERCVLDAISVGYRSIDTAQAYYNEEGVGNAVRKCGVPREELFITTKVWISNGGYEKAKASIDESLRKLQSDYVDLLLIHQPFNDYYGTYRAMEEAYKAGKARAIGVSNFYPDRFIDLAEFCEIKPAVNQVETHVFNQQVKPQEIMKKYDTKVMSWGPFAEGRNNFFSNEVLKAIGEQYGKSVAQVALRFLIQRDIIVIPKSTRKERMIENFDVFDFTLSVKDMEEIAGLDKKESLFFSHYDPEMVNFLINL

SEQ ID NO: 15050 - protein, 465 aa, Vibrio cholerae O1 biovar eltor str. N16961
MKTFDPLSSYSPTHWRSEGDINTTAARRDWLTHVNDETTQNLLQRDANVFLHQAMSTPCLAPLASAAGCYLYDVSGKSYLDFHGNNVHQLGHGHPQVIEKITEQMQTLPFAPRRFTHETAIRCAEKLTEIAGGELNRVLFAPGGTSVIGMALKLARHITQNFKVVSLWDAFHGASLDAISVGGEACFRQGMGPLMAGVERIPPAITYRGAFPREDGSDVHYADYLEYVIEKEGGIGAFIAEAVRNTDVQVPSRAYWQRVREICDKHNVLLIIDDIPNGMGRSGEWFTHQAFGIEPDILCIGKGLGAGLIPIAALLTKEKYNTAAQVSLGHYTHEKSPLGCAAALATIEVIEQHNLLAKVHADSIYMRQRLSQMQQQFSLIGDVRGIGLLWGIELVIDRHTKQRAHDEAEAILYHCLRHGLSFKVSQGNVIQLSPPLIISRQELDQALDILYSALLAISQQMNYSY

SEQ ID NO: 15051 - protein, 414 aa, Bordetella bronchiseptica RB50
MHQNGFTTTIVHSDRDQSAEHGAVHKPMHPSSEYVYEDARELAAVFQGKAGFTYARQGTPTTTALEARITRMEAGKSTVSFATGMAALAAIFTTLLRRGDHLVSSQYVFGNTNSLLNTLMELGVEVTMVDATDVRQVRDALRPNTRMVFTETIANPGTQVADLAGMGALCRERGLVYVVDNTLTSPWMFRPVEVGASLVMNSLSKYIAGHGHALGGAVTDTGLYDWSGYANIYESYRKGAPTGWGLTQIKKKGLRDMGGTLAAEPAHRIAIGTETLALRMARHCSNALALATFLQGHPGVARVHYPGLSSHAQHQRASELFDGRYGGLLGVELAEGIDCFDFLNRLRIVLMATHLGDTRSLALPAAHTIYYEMGAEKRAQMGIADSLIRVSVGIEDEADLLFDFDQALRGCLQS

SEQ ID NO: 15052 - protein, 575 aa, SYNECHOCOCCUS SP. WH 8102
MQTLNAETLQGLLENLFPEDSSADSEQLSSQLLQILRGASANDDPPGATDLWSGADAVLITYADTVVEQGVPALRSLRQLLNNRLRPFAEVVHVLPFLTSTSDGGFAVASHDRIEPRFGDWRDLADLAHGRRMMADLVLNHISASHPWVRQFLRDEEPGRSCVLEAAPDPCWDQVVRPRSSSLFTQLSGSDGPRQVWTTFGPDQVDVDWRSPEVLLGFTRLLDRMLRHGVRWVRLDAVGFIWKTPGTGCIHLPEAHRIVEVLRQLMERSCSGGVVVTETNVPEQENLSYLVSGREAHLAYNFPLPPLLLEAAISGRADLLNGWLNRWPALPVATGLFNFTACHDGVGLRALEGLMTDQRRLQLLIACEQRGGLISHRRLTNGEEAPYEINISWWSAMADGGIDPAHLQRARFLMTQLLVLALPGVPAFYLPALLATPNDLGRFRRTGQRRDLNRPQFKADTVERRLQDPDSDATAVTSVLAHALRVRRDQPALHPDAAMEVMSAGRSDLVMLRRRGGGQTLVAVHNVTPSRLTLVLGRLGGRTGLAWTDCLSGSSETHGSQLQLEPYAVHWLIQA

SEQ ID NO: 15053 - protein, 487 aa, Staphylococcus aureus subsp. aureus MW2
MGEFKGFMKYDKQYLGELSLVDRLKHHKAYQQRFTKEDASIQGARCMDCGTPFCQTGQQYGRETIGCPIGNYIPEWNDLVYHQDFKTAYERLSETNNFPDFTGRVCPAPCESACVMKINRESIAIKGIERTIIDEAFENGWVAPKVPSRRRDEKVAIVGSGPAGLAAAEELNLLGYQVTIYERARESGGLLMYGIPNMKLDKDVVRRRIKLMEEAGITFINGVEVGVDIDKATLESEYDAIILCTGAQKGRDLPLEGRMGDGIHFAMDYLTEQTQLLNGEIDDITITAKDKNVIIIGAGDTGADCVATALRENCKSIVQFNKYTKLPEAITFTENASWPLAMPVFKMDYAHQEYEAKFGKEPRAYGVQTMRYDVDDKGHIRGLYTQILEQGENGMVMKEGPERFWPADLVLLSIGFEGTEPTVPNAFNIKTDRNRIVADDTNYQTNNEKVFAAGDARRGQSLVVWAIKEGRGVAKAVDQYLASKVCV

SEQ ID NO: 15054 - protein, 376 aa, Thermus thermophilus HB27
MSRVPEPSVFLVVDEAKRKARERGVGLIDLSIGSTDLPPPEAPLKALAEALNDPTTYGYCLKSCTLPFLEEAARWYEGRYGVGLDPRREALALIGSQEGLAHLLLALTEPEDLLLLPEVAYPSYFGAARVASLRTFLIPLREDGLADLKAVPEGVWREAKVLLLNYPNNPTGAVADWGYFEEALGLARKHGLWLVHDNPYVDQVYEGEAPSPLALPGAKERVVELFSLSKSYNLAGFRLGFALGSEEALARLERVKGVIDFNQYAGILRMGVEALKTPKEVVRGYARVYRERALGMAEALKGALSLLPPRATMYLWGRLPEGVDDLEFGLRLVERGVALAPGRGFGPGGKGFVRIALVRPLEELLEAAKRIREALD

SEQ ID NO: 15055 - protein, 184 aa, Triticum aestivum
  unsure (1)..(184): unsure at all Xaa locations
MAPTVMASSATSVAPFQGLKSTAGLPVSRRSNGASLGSVSNGGRIRCMQVWPIEGIKKFETLSYLPPLSTEALLKQVXDYLIRSKWVPCLEFSKVXGFIFREAQMRLPGYYDGRYWDNVESCLMFRGATDAXTQVINEGWREGQRKEYLTRYVRIIGFDNMRQVQCVSSMPQATGCKIRKAKQY

SEQ ID NO: 15056 - protein, 168 aa, Avena strigosa
VMASSATSVAPFQGLKSTAGLPVSRRSNAGLGSVSNGGRIRCMQVWPIEGIKKFETLSYLPPLSEEALLKQIDFLIRSKWVPCLEFSKVGFIFREHGSTPGYYDGRYWTMWKLPMFGCTDASQVIKEVEEVKKKYPDAYVRIIGFVNIRQVQCVSFIAFKPPGCEESG

SEQ ID NO: 15057 - protein, 168 aa, Avena clauda
VMASSATTVAPFQGLKSTAGLPVSRRSASSLGNVSNGGRIRCMQVWPIEGIKKFETLSYLPPLSEEALLKQIDFLIRSKWVPCLEFSKVGFIFREHGSTPGYYDGRYWTMWKLPMFGCTDASQVIKEVEEVKKEYPDAYVRIIGFDNIRQVQCVSFIAFKPPGCEESG

SEQ ID NO: 15058 - protein, 168 aa, Avena sterilis subsp. ludoviciana
VMASSATSVAPFQGLKSTAGLPVSRRSNAGLGSVSNGGRIRCMQVWPIEGIKKFETLSYLPPLTEEALLKQIDFLIRSKWVPCLEFSKVGFIFREHGSTPGYYDGRYWTMWKLPMFGCTDASQVIKEVEEVKKEYPDAYVRIIGFDNIRQVQCVSFIAFKPPGCEESG

SEQ ID NO: 15059 - protein, 387 aa, Corynebacterium efficiens YS-314
MRNKYVVERLRPFGETIFATMTQRANEAGAINLGQGFPDEDGPAPMLEIASQQILGGNNQYSGGRGDLGLRTAVASDRHKRFKLDYDPDTEVLITVGATEAISASVLGLVEPGDEVIVLEPYYDAYAAAIALAGATRVAVPLKEEDNTWVLDTDAVHAAVTKKTSMIIVNSPHNPTGSVFSKRSLEALAGIARAYDLLVLSDEVYEHLTFDKVSHTAVASLPGMWDRTITVSSAAKTFNVTGWKTGWALAPAPILEAVIRAKQFMSYVGATPFQPAVAHAVAHEKPWVKQMRKGLQNKRDILTDALTQAGLKVHDSHGTYFVVADIGERDGAEFCFDLIDRVGVAAIPVQAFVDKPEQWSSKVRFAFCKQEDTLREAAQRLRAAGSL

SEQ ID NO: 15060 - protein, 192 aa, Chromobacterium violaceum ATCC 12472
MGWLGRENAMKRWGAMLMLWGQAALAACPALLNHSVPGLMGGQINLCQYADRPLLVVNTASHCGFTPQFTQLESLYKQYGPRGLMVIGFPSNDFFQELDKPSEIGAFCQANYGVTFPMAGKGHVRGADAQPLFKDLIAATDDAPSWNFHKYLILPGASKVISIGTRTKPDAPEVVNAFLPYLQPETQAAAKP

SEQ ID NO: 15061 - protein, 509 aa, Solanum tuberosum
MSIVTCEKAAASLSSSSNMNNDTNGAFCYTPQHQLVTPQYQNPPQQIKKKRNQPGNPDPEAEVIALSPKTLVAANRFFCEICNKGFQRDQNLQLHRRGHNLPWKLKKRENKEVVRKKVYICPESSCVHHDPSRALGDLTGIKKHFSRKHGEKKWKCEKCSKRYAVQSDCKAHFKTCGTREYKCECGTIFSRRDSFITHRAFCETLAMESARSVINGRNPTIFSPQLNLQFQQPHFFNSHEQIQATTFPMKKEQQSSDFRHIEIPPWLITTNSQPFQLGAINHGPSPRSNFSSSSIFPATTRLDQQYTQSGHKDLNLHHPNPNLRGPTLGYDSTGESGAVSPVHISATRLLQKAAQFGATISNKASAVTATAAYTGTVKIPHNTHVSVTSTDSATKQTHQKLSSREDLTSITGPANISGIMTSFSNGFDGSTMFEDAILFGGFNNLNSKKEDEEEDQQLYFNGSMNEEDHILTKDFLGLKPLSHTDDIFNIAALVNTEPHHFKNHKTWQS

SEQ ID NO: 15062 - protein, 423 aa, Neurospora crassa
MSAKLKPAARVAGNRQDVWTIVNEAAAASPRQPIVNMGQGFFGYNPPEFILNAAKKALDRVECNQYSPTRGRPRLRKALSKAYAPHWGRELDPETEITITTGANEGMLSAFMAFIEPGDEVIVFEPFFDQYISNIEMPGGKIVYVPMHPPKEGHIKTLSASEWTIDFDELERAVTPRTKMLVINTPHNPVGKVFSRAELERIAELCVKNQIIILSDEVYDRLFYTPFTRMATLSPEVEKITLTVGSAGKNFYATGWRVGWLMGPAELIQYVAAAHTRICYSSVSPLQEACAIGFEEADQQGFWTQCIEDMQNKMSRFNAIWDELGLPYSIPEGGYFVMANLNKVEIPEGYPFPPHVAERPRDFKLAWFLIQELGVAAIPPSEFYTDVNAHIVEDWLRFAVCKPDEVLEDAKERLRGLKKFIKQ

SEQ ID NO: 15063 - protein, 512 aa, Pseudomonas fluorescens
  unsure (1)..(512): unsure at all Xaa locations
MKIRSQIGMVLNLDKCIGCHTCSITCKNVWTSREGMEYAWFNNVESKPGIGYPKEWENQDKWKGGWVRNADGSINPRIGGKFRVLANIFANPDLPSLDDYYEPFDFDYQHLHTAPLGEHQPTGRPRSVVSGKRMEKIEWGPNWEEILGSEFAKRRKDKNFDKIQADIYGEYENTIMMDLPRLCEHCLNPACAASCPSGAIYKREEDGIVLIDQEKCRGWRMCISGCPYKKIYFNWKSGKSEKCIFCYPRIEAGMPTVCAETCVGRIRYLGVLLYDADRISEVASTANEQDLYEKQLEIFLDPNDPAVIRQALADGVPQSVIDSAQRSPVYKMAVDWKLALPLHPEYRTLPMVWYVPPLSPIQNAATAGTVGMNGVIPDVDSLRIPLRYLANMLTAGDEKPVKLALKRLLAMRAYKRAEQVDGVQDLQVLADVGLSVNQVEEMYRYLAXANYEDRFVVPSAHREDAMSDAFAERSGCGFSFGSGCSGSSDTNMFGGKKANRRDVIKTVQLWEE

SEQ ID NO: 15064 - protein, 534 aa, Glycine max
  unsure (1)..(534): unsure at all Xaa locations
MDSNSSSPSPNNHASTTKINGFFHPKLGSQPATSSRSRLAMASPVNSDPKVVTGTAGYILEDVPHFTDYIPNLPTYPNPLQDNPAYSVVKQYFVHVDDSVPQKVVVHKDGARGVHFRRAGPRQKVYFEADEVQAAIVTCGGLCPGLNTVIRELVCGLHHMYGVKRVLGINGGYRGFYARNTITLTRYHTEETLTRCLRGTVCFGXQVIPRVNSTKVRGINKDYINGGDGTEKGASSIFEEVRWCGLKVSVVGFPKTIDSDIPVIDKSFGFDTAVEEAQRAINAAHVEAESVENGIGVVKLMGRNSGFIAMYATLASRDVDCCLIPESPFYLEGPGGLYEYIEKRLKENGHMVIVIAEGAGQELVSESVQSMSKQDASGNKLFQDVGLWISQKIRDHFAAQKTLPITLKYIDPTYMIRAIPSNASDNVYCTLLAQSAVHGAMAGYTGYTSGLVNGRQTYIPFYRITERQNHVVITDRMWARLLSSTNQPSFLDSKGDNEEKKEEEAALNQLPDGHCSKDTSLANKEINSIYPTTC

SEQ ID NO: 15065 - protein, 475 aa, Sinorhizobium meliloti 1021
MDTQLLIGSRFEAGTEAEEHILNPRTGAGIIDLAEASHAQIDAAVDAAERAFVGWSQTTPAERSNALLKIADAIEKEADEFAALEALNCGKPINAVKNDELPAIIDCWRFFAGAVRNLHAPAAGEYLPGHTSMIRRDPIGIVGSIAPWNYPLMMMAWKLAPAIGGGNTVVFKPSEQTPLTALKLARLIADILPEGVVNVITGRGETVGNALINHPKVGMVSITGDIATGKKVLAAAAKTVKRTHLELGGKAPVIVYGDADLEAVVNGIRTFGYYNAGQDCTAACRIYAEAGIYEKLVADLTSAVSTIRYNLDDDTENEIGPLISRRQRDRVASFVERAADQKHIEITTGGRTGSDEGFFFQPTVVAGATQEDEIVRREVFGPVVSVTRFTGKDDAVAWANDSDYGLASSVWTKDISKAMRAASRLQYGCTWINTHFMLTNEMPHGGIKQSGYGKDMSVYALEDYTAVRHIMINHG

SEQ ID NO: 15066 - protein, 286 aa, Saccharomyces cerevisiae
MTYTLAILGCGVMGQALLSAIYNAPKAADETAAAFYPSKIITCNHDEPSAQQVTDLVETFDESPNGIKVESTYGHNVSAVEEASVVLLGTKPFLAEEVLNGVKSVIGGKLLISLAAGWTIDQLSQYTSTVCRVMTNTPAKYGYGCAVVSYSADVSKEQKPLVNELISQVGKYVELPEKNMDAATALVGSGPAFVLLMLESLMESGLKLGIPLQESKECAMKVLEGTVKMVEKSGAHPSVLKHQVCTPGGTTIAGLCVMEEKGVKSGIINGVEEAARVASQLGQKKK

SEQ ID NO: 15067 - protein, 468 aa, ASPERGILLUS NIDULANS FGSC A4
MSFVRAASRRMPLAKRLVSAVESPMQRRYVSATLKAQGAVVTPDPGADSVSAAFVNERAPYLVPTYVRPAPIMVKGQGCYLWDMENRRYLDLTAGIAVNSLGHCDPEISKIIAEQAETLLHASNLYHNAWVGALSKDLIILTRESGAMRDAAQVFIANSGTEANEAAIKFARKTGRARDPSGAKHEIVSFHNSFHGRTMGALSATPNPKYQTPFSPMLPGFKYGKYNDVAQLKDLVTEKTCGVIVEPIQGEGGVNVATPEFLSALRKRCDDVGAVLIFDEIQCGLSRTGSFWAHAHPSLVPSSGEAAHPDILTTAKALGNGIPIGATIVSGKTVADNIKAGDHGTTFGGNPLACRVAHHIIHRLASPELQKSVQDKSAILVAGFQALQQKYPDLVSEVRGRGLILGLQLSKDFSARAGEIVTAARERGMLIITAGEGCLRFVPPLTITEEQLKTALRILEQAFEAVKA

SEQ ID NO: 15068 - protein, 749 aa, Mycobacterium tuberculosis CDC1551
MIGNGGAGGSGAPGAIGGAGGPAGLIGVGGAGGAGGDSAVAGVIGGAGGAGGAALLFGAGGAGGAGGSGGSGAAGGAGGAGGAGGLFASGGSGGFGGFASTGTGGAGGTGGAGGLFASGGVGGTGGGAGSGGTGGVGGTGGAGGLFASGGAGGAGGSGGTGGAGGTGGAGGLFGAGGAGGLGGQGNHTGGHGGAGGSAGLLALGDGGAGGAGGAATTGTGGAGGAGGKAGLLFGSGGAGGSGGAAGTFGDTGNSGGAGGAGGKAGLLFGSGGAGGSGGAGGFANGSTGGAGGAGGGAGLIGNGGNGGSGGTSVATGGAGNGGAGGAGGGAGLIGNGGNGGSGGMGDAPGGTGVGGIGGLLLGLDGANAPASTNPLHTAQQQALAAVNAPIQAVTGRPLIGNGANGAPGSGAPGGHGGWLFGGGGTGGSGVSGGAGGDGGAGGILFGAGGAGGAGGAVTGTGATGGSGGAGGGALLFGAGGAGGAGGSSGIGGFAAGGAGGPGGAGGLFNGGGAAGAGGSGVSGGAGGEGGAGGAGGLFAGGGAGGAGGSGNNVGGAGGAGGVGGLFGAGGAGGSGGGGSVAGDGGAGGNAGLLAPGLAGGAGGGGGQGFDTGGAGGPGGDAGLLVGSGGVGGAGGFGLTTGGPGAAGGDAGLLFGSGGAGGAGGSGRTDLGGAGGAGGKAGLIGNGGNGGAGGAGGNGGGDGGPGGAAFGLGNGGNGGNGGTGTSAGSPGAGGAGGSLIGAEGLPGLLP

SEQ ID NO: 15069 - protein, 324 aa, Haemophilus ducreyi 35000HP
MAKEIKKIAVLTSGGDAPGMNAAIRGVVRAALNEGLEIFGVQDGYYGLYHDKVIPLDRRSVSEIINRGGTFLGSARFPQFKDIEVRKQAVKILAKYEIDALVVIGGDGSYMGAKLLTEEFGYPCIGLPGTIDNDIVGTDYTIGYQTALQTAVEAIDRLRDTSTSHQRISIVEIMGRHCGDLTISAALAGGCEYIIVPEKGLDKESLIHSIADNFRKGKRHAIIAITELMTDVHQLARELEEKFGHETRATVLGHIQRGGSPCPFDRILASRMGVYAVDLLRQGFGGRCVGIQNEHLVHHDIIDAINNMRRPFKQDIFEAASKLA

SEQ ID NO: 15070 - protein, 416 aa, Methanosarcina acetivorans C2A
MLRVMTSRNFLTIDDFDIRGKTILLRVDMNSPMDTQGHILDDMRIKSHIATLKDLESAKVVLLAHQSRPGKKDFTTMKPHAHLLSRYLGKQVTYVDDIFGTFAKTHIASMEDGDVIMLENVRFYSEESLERTPAEQANTYMVKKLAPFVDIFLNDAFAVAHRSHLSVVGFTEVLPSGAGRVMEKELVSLDRGVKGGERPSIFVLGGAKVDDSLRVTENVLTSGGADRVLLTGVVANVALAASGVNIGKVNMDFIKSQGYENQIEKARGLLAKFKDRIGLPKDVALNDNRERVEVHISELNSDSLPINDIGLETIVDYTNEIQNSKTVVLNGPAGVSEIEDFALGTHEIIKAAIKSDFSIIGGGHISVEVAHLGLEHRFSHISTGGGACIDYLAGEKLPGVESLKAAYIKYQEAKKL

SEQ ID NO: 15071 - protein, 879 aa, Mycobacterium tuberculosis CDC1551
MSFVIAAPDLVAMATEDLAGIGASLTAANAAAAVPTSGLLAAAGDEVSAAIAALFSSHGQQYQAMSAQAAAFHARFVQALAGAMGAYAAAEAANASPLQTLEQGLLGAINAPAAALSGRPFIGNGTNGAPGTGEAGGPGGWLLGNGGNGGSGAPGQTGGAGGAAGLLGHGGTGGAGGTGASGGKGGTGGWLWGSGGAGGAGGSGGGSGGAGGNALMFGIGGNGGAGGAASGVGNGGVGGAGGAGGALVAIGGAGGAGGAATTGTGGAGGAGSNALGLFLGLGGSGGQGGDSAMGSGGAGGAGGSGGAASPFGIDIGIGGAGGHGGAGTNGGAGGAGGAGGSSGTVFALDLSWGGAGGNGGAATTGTGGAGGTGGFAVAPDFIGFGAAYGGAGGLGGAATGAGGTGGTGGVGAGGFAALGVGVGGAGGAGGAATETGGIGGAGGLGVGLLGGAGGAGGPGGAASAGSGGHGGTGGDALGLIGAGIGGVGGVGGAATDTGGNGGAGGSGTGLLGGVGGAGGHGGGASVGTGGSGGAGGDGFGFVGAGGNGGNAGTGVGVNGANGGNGGSATGALAAVGGAGAAGGDATSGTGGFGGAGGSARGLIFALGGAGAAGGDASTGVGGPGGPGGTGTASSPFGIAIAIGGAGAQGGAGTSGATGGAGGDGVFEGIAVLGLGFGGAAGAGGAATGDGATGGAGGFGGAGAGIANFLGFSVLHGGAGGAGGTATGTGGNGGAGGGGGLSSPVILGIGIGGAGGDGGGALGVLGGMGGDGGEAVAVGIAVGGAGGAGGAAPTGNGGAGGGGGDALGLVGVGGNGGNAGTGFGANTGGNGGDTTIVVNGMLAPSTLGYGGNGGNGVNGGAGGTGGKAGVFGAPGQNGLP

SEQ ID NO: 15072 - protein, 332 aa, Nostoc sp. PCC 7120
MTKNLLEQLREMTVVVADTGDIQAIEKFTPRDATTNPSLITAAAKMPEYQEIVDQTLLQAKKDAGAGASKGQIVSLAFDRLAVSFGLKILQIIPGRVSTEVDARLSYDTEATITKARELIAQYKAAGIGPERVLIKIASTWEGIKAAEILEKEGIHCNLTLLFGLHQAIACAEAGITLISPFVGRILDWYKKETGRDSYPSAEDPGVLSVTTIYNYYKKFGYKTEVMGASFRNIGEITELAGSDLLTISPGLLGELQATIGELPRKLDPAKAATLDIDKISIDKATFDKMHAADRMAYDKLDEGIKGFTKALEELETLLAERLARLEVVASH

SEQ ID NO: 15073 - protein, 223 aa, Saccharomyces cerevisiae
MSSEDYGYDYDLLFKIVLIGDSGVGKSNLLSRFTKNEFNMDSKSTIGVEFATRTLEIDGKRIKAQIWDTAGQERYRAITSAYYRGAVGALIVYDISKSSSYENCNHWLSELRENADDNVAVGLIGNKSDLAHLRAVPTEESKTFAQENQLLFTETSALNSENVDKAFEELINTIYQKVSKHQMDLGDSSANGNANGASAPNGPTISLTPTPNENKKANGNNCC

SEQ ID NO: 15074 - protein, 491 aa, Escherichia coli
MTEPHVAVLSQVQQFLDRQHGLYIDGRPGPAQSEKRLAIFDPATGQEIASTADANEADVDNAVMSAWRAFVSRRWAGRLPAERERILLRFADLVEQHSEELAQLETLEQGKSIAISRAFEVGCTLNWMRYTAGLTTKIAGKTLDLSIPLPQGARYQAWTRKEPVGVVAGIVPWNFPLMIGMWKVMPALAAGCSIVIKPSETTPLTMLRVAELASEAGIPDGVFNVVTGSGAVCGAALTSHPHVAKISFTGSTATGKGIARTAADHLTRVTLELGGKNPAIVLKDADPQWVIEGLMTGSFLNQGQVCAASSRIYIEAPLFDTLVSGFEQAVKSLQVGPGMSPVAQINPLVSRAHCDKVCSFLDDAQAQQAELIRGSNGPAGEGYYVAPTLVVNPDAKLRLTREEVFGPVVNLVRVADGEEALQLANDTEYGLTASVWTQNLSQALEYSDRLQAGTVWVNSHTLIDANLPFGGMKQSGTGRDFGPPLAGRAGC

SEQ ID NO: 15075 - protein, 168 aa, Avena maroccana
VMASSATSVAPFQELKSTAGLPVSRRSNAGLGSVSNGGRIRCMQVWPIEGIKKFETLSYLPPLSEEALLKQIDFLIRSKWVPCLEFSKVGFIFREHGSTPGYYDGRYWTMWKLPMFGCTDASQVIKEVEEVKKEYPDAYVRIIGFDNIRQVQCVSFIAFKPPGCEESG

SEQ ID NO: 15076 - protein, 384 aa, Clostridium perfringens str. 13
MKKNSLLIHGGISIDEKTGAVNIPIYQTSTYKQRSFGENSGYEYSRTGNPTRESLEKLIADIEYGKRGFAFASGLAAITAVLSLFKSGDKLLITNNLYGGTFRVIDKIFSNFGIGYEIIDDFTNIEEKIDKSVKAIYIETPTNPLLDVIDIKIASDKAKKYNLLTIVDNTFMTPYFQNPLNLGADIVIHSATKYLGGHSDLVAGLVVVKDEELGEKIHFIQNSTGGILQPFDSFLLIRGIKTLSVRMDRHELNANFIAEKLGDLEGIDNVYYPGLKTHIGHDIQKKQASGFGGIISFTLNKKYNYEKFFNSLELITFGESLGGVESLACHPASMTHAAMPLELRERIGITDRLIRISVGIEDKEDILEDIQKALVKAGDKNEIL

SEQ ID NO: 15077 - protein, 443 aa, Pyrococcus furiosus DSM 3638
MEPLEIVRRYEKVIAPANRTTYYPLIPVKAENAKVWDITGKEYIDFLSDAAVQNVGHNNPRVVKAIKDQIEKLVHASYIYLFPIEPLLLAEKLVEIAPIENAKVSFGLSGADANDGAIKFARAYTKRNMILSYMKSFYGSTYGAMSLTGLDFQVRALVGELSGVHYIPYPNCYRCPFGKDRNSCKMECVEYIKEKFEGEVYSEGVAALFAEAIQGDSGMIVPPQDYFKKVKRILDEHGILLVVDEVQSGLGRTGKWFAIEHFDVKPDIITIAKPLGGGLPISATIGRAEIMDSLPPLSHAFTLSGNPTAAKAALAVIEEIEEKDLLKRAEKLGEYTKKKLEELKKKHELVGDVRGLGLMLGVELVKDRETKERAFEETKKVVWRAFELGLIVTFLQGNVLRIQPPLTIEKDVLDEGLEILDQAIEDVEEGKVPDEVIKNVRGW

SEQ ID NO: 15078 - protein, 185 aa, Thermus thermophilus HB27
MFEHPVLAAFYRRHGPAPFAPNPFPQRPPFRVLAESVVAQQLSTRAAARLAERLFRLVPPTPKAFLEAPLDLLRQAGLSRAKALALKDLAAKAEEGLLDGLDRLEDEAVVERLTRVRGVGLWTAEMFLMFGLGRPDVWPVRDLGLRRAAARLFGVAPEALPAFGEAFRPYRSHLAWYLWRSLSSP

SEQ ID NO: 15079 - protein, 168 aa, Avena maroccana
VMASSATSVAPFQGLKSTAGLPVSRRSNAGLGSVSNGGRIRCMQVWPIEGIKKFETLSYLPPLSEEALLKQIDFLIRSKWVPCLEFSKVGFIFREHGSTPGYYDGRYWTMWKLPMFGCTDASQVIREVEEVKKEYPDAYVRIIGFDNIRQVQCVSFIAFKPPGCEESG

SEQ ID NO: 15080 - protein, 630 aa, Escherichia coli K12
MAIEIKVPDIGADEVEITEILVKVGDKVEAEQSLITVEGDKASMEVPSPQAGIVKEIKVSVGDKTQTGALIMIFDSADGAADAAPAQAEEKKEAAPAAAPAAAAAKDVNVPDIGSDEVEVTEILVKVGDKVEAEQSLITVEGDKASMEVPAPFAGTVKEIKVNVGDKVSTGSLIMVFEVAGEAGAAAPAAKQEAAPAAAPAPAAGVKEVNVPDIGGDEVEVTEVMVKVGDKVAAEQSLITVEGDKASMEVPAPFAGVVKELKVNVGDKVKTGSLIMIFEVEGAAPAAAPAKQEAAAPAPAAKAEAPAAAPAAKAEGKSEFAENDAYVHATPLIRRLAREFGVNLAKVKGTGRKGRILREDVQAYVKEAIKRAEAAPAATGGGIPGMLPWPKVDFSKFGEIEEVELGRIQKISGANLSRNWVMIPHVTHFDKTDITELEAFRKQQNEEAAKRKLDVKITPVVFIMKAVAAALEQMPRFNSSLSEDGQRLTLKKYINIGVAVDTPNGLVVPVFKDVNKKGIIELSRELMTISKKARDGKLTAGEMQGGCFTISSIGGLGTTHFAPIVNAPEVAILGVSKSAMEPVWNGKEFVPRLMLPISLSFDHRVIDGADGARFITIINNTLSDIRRLVM

SEQ ID NO: 15081 - protein, 2117 aa, Aspergillus fumigatus
MPNGRSNSPFPRSAGLERSASQGHNQPRQGSSNNLYSSTFSWNSPDISHTDQRRGVGRKAMATSGADDPGPPPTSSSSSKQLQLNPNQIDYFHQNPNASWSSSPKIAPMDSSGTFSHDFSEQEASPASATFRPSTGRTFASEPVDFDYNRDDRRPSVASATTISSQGSKSSTGGRFRKKLQGFFGDEYLPPGESKQEQEQDTRSLSSRPASIDHFKARERANSDGARNFPERSQDDTSSLHPSRPRTPLPSSEITPWLYQSFNDIPQFGEAPIREVPIAPEGSRLAGQTATNSGAPREARRHHGSHRHSRSKEEKPTVAGDLAGYPARPATGRDDSYLGLRPFRDHSLNASTAMSSTTTLGGRSTSPTPSIQSAYSREQSQNSPGAPSNKRSILDKIRRTKAHGPLKHFPGSKSAQEASKSSSKLARREASPRRGRQGSLEGGTSLRNLDLGDYERRKDGKGIVMGSTKLRNRRGLGNEAPPGKDVKLSEEPGVWRLDTDLSHMEGIVSQQPPPSPGDKSKAQDGVPPKHEEGKKSEGLPPGHWDAPESWQVKKHGEDLAARLPNVASDATGIAREPDGTSYFIRVFRIDSTFATLSAGLNATVADILLMLGRKSFLQDHLNNYEIVMKRNDLSRQLDHSERPILMQKRLLEQVGYTAKDRIEEIGREDHSYICRFIFLPTKLSGYSSLDGDPGFSRMQKFSHVDLQGRSLVTIPITLYKKASEIISLNLSRNLSLDVPKDFIQGCINLREIKFIGNEARRLPASFSLASRLTYLDVSNNLLEELGHANLDRLHGLVSIKMANNKLSELPSYFGNFQYLRSLNISSNNFQVFPSFLCNLKSLVDLDISFNNIAELPNIGKLVTLERLWMTNNMLSGPLDETFKDLVNLREIDARFNAITNIDILAQLPRLEQLLIGHNAVSKFKGSFPKLRTLLLDHCPMTQFDIDAPVPTLTSLNIASAKLVQFRDSLFENLPNLTKLILDKNHFVSMSPHIGKLRRLEHFSMIKNPLAALPATIGCLTELKYLNLRECNLRRLPAEIWHCARLETLNVSSNVLDSFPKHGSSPPQPPTDTGITPAATPGGATTPSYEELGPLQEQDGLETRRPSQTSGGFISSGGSPNDGTYRKPSVASSLGQSGRKVSAASRSGTEGSPSSRKDSNFSQHVASTFAGSLRNLYLADNRLEDDIFRELSLIPELRVVNLSYNELTELPQGLLKRWPFLTELYLSGNELTSLPSDDLEEGSNLKVLNLNANRFQVLPAELCKVSKLAILDVGSNALKYNVSNWPYDWNWNWNRNLKYLNFSGNKRLEIKPNITSAGTTTANGTDLTDFNSLTHLRVLGLMDVTLTTPTIPEENEDRRVRTSASLAGSLAYGMADFLGKSEHLSIIDMIVPRLKPDNVETLVGLFDGQAQSTGGSRIAKFLHENFTSTFSSELKRLRVEEEETPLDALRRTFLALNKNMAAAAYKSIDDRSVRQFHRGSPATKLLNQDDIRSGGVATVLYLNNMDLYVANVGDAQAILVKSDGTLKYLTKNHDPAEPHERARIRAAGGFVSRNGRLNDILHVSRAFGHFQLMPAVVAAPHTMHVQLTEQDEMIILASKELWDYVTPDVVVDVTRAERRDLMIAAQKIRDLAISFGANNKLMVMILGVSDLKKREKFKFRGTSLSMGPPAFPEEQIIPSTKRTKKPRDMPGDSRLARFDYVDAPIGELAIIFTDIKKSTSLWETCPDAMRSAIQIHNDILRRQLGIIGGYEVKTEGDAFMVAFSTTTAALLWCFNCQTQLLEAEWPTEILEQPQCQVQYDMENNIIFRGLSVRMGIHWGEPVCEKDPVTNRMDYFGPMVNRASRISAVADGGQIFVSSDFMSDIQRNLEVYADSERAASTGSEESYAVDSLGYNIRRELQQLNSQGFVIKDQGERKLKGLENPEPLYLIYPHSLSGRLTTLEQAEARENGPTTISKHSELEIQADLIWRLWELTLRLERLCGALENPGEARLKEPNVALFNLVKNHGGELADSTVVSLVEQQVTRIEMNVTTLSVRYMLKPFKPGDKLSDHAVPIGVVMQQLQTQLAEYRALKEQLAVGGAGITGVSSSSPGAEGQDTGESDPSSASSSFLQLATSSE

SEQ ID NO: 15082 - protein, 136 aa, Glycine max
MQHRNLTSGRPSGTDGSDYSYRMVVDSRYQLVAKGKKRLSLYFITEAVLLLIGVTLTYLPGIEADAPNTVAYSSVIVSVVSLIIGNIGRRRSRSGLLRFYAAVSSIAMLLLIASLAQQHLLLKAIQDSKLWKTGKV

SEQ ID NO: 15083 - protein, 316 aa, Vibrio cholerae O1 biovar eltor str. N16961
MSNKLAQLRKLTTVVADTGEIDAIKKYQPEDATTNPSLILKAAQIAEYAPLIDQAIAYAKTQSNDKAQQVQDTCDMLAVNIGKEILKTIPGRISTEVDARLSYDTERSVAKARQLVKMYNDAGISNDRILIKLASTWEGIRAAEILEKEGINCNLTLLFSFAQARACAEAGVFLISPFVGRIMDWYKAKEGRDFAASEDPGVLSVTKIYNYYKEHGYKTVVMGASFRNIGEILELAGCDRLTIAPSLLAELEAAEGELVAKLVDSKGSKARPAPMTHSEFLWEHNLDAMAVEKLAEGIRNFAVDQGKLEAMIAAKL

SEQ ID NO: 15084 - protein, 294 aa, Lactobacillus gasseri
MKGIILAGGSGTRLYPLTLVTSKQLLPVYDKPMIYYPLSTLMLAGIKDILVISTPADTPRFKELLGDGSQFGINLSYKVQPTPDGLAQAFTLGKDFINGEPCAMVLGDNIFYGNGFTDLLKNAAEDAQKGKATVFGYYVNDPERFGVVDFDENGKAVSIEEKPEQPKSNYAVTGLYFYPAGVSEKAAQVKPSARGEVEITSLNDMYLQDDNLGVQLLGRGYAWLDTGTMQSLVDASNYVKMIEERQGVSVSAPEEIAYVHGWNDKDQLLEAAKHYGKSPYGKHLKSVAEGKVRY

SEQ ID NO: 15085 - protein, 674 aa, SYNECHOCOCCUS SP. WH 8102
MCGIGGVFLADRHQTLDRQLLVNMAAIQSHRGPDGFGVECLDAAGVGFCHARLSIIDLNESRARQPFLSNDRQVLMAHNGEFYDFQRIRADLTAQGVRFSSKSDSEILLRLYQRQGLESTLPLLRGEFAFALFDAADDCLYLVRDRFGIKPQYWTMTPEGLVFGSELKVLFAHQAVERRFTSEGLFHQLMQTMVPGTTAFAGVHQVQPGHVLKVQRRSDRLEVSESTYWDVDFPRLDQRDSTLTEADHIANVRAALLEAVEMRMVADVPVGCYLSGGIDSCSILGLASAVSQGPVKAFTIGFDDARYDETPIAAEMAEATGAEQDVMRLSGRELYGHMEQTLWHTERTIYNTLAVAKYLMSRHVNSVDYKVVMTGEGSDELFGGYPAFRRDMFLHGLEDLPQSDRQDWESLLQTNNSLVQGAMLAADQVDDPDLDAVVGFTPSCLQPWLACAPLVPDLLADEHRQALVEYSPGKAIAEQLNPQQLDGRHALDKAQYVWIKTMLEGQILTWGGDRVDMANSMEARPAFLDHHLAAAAVQVPPELRIKGKTEKYVLREAMAGLLPEVLYKREKFAFMAPPAHTEPEKWAQMKQLADDYLSDEAIDAAGLLSKEGVRALFARHDDPATTDAERVQMDAVINHLLGVQMLHRMFVAADVPAQAREQADRLGWRVLMPV

SEQ ID NO: 15086 - protein, 433 aa, Haemophilus ducreyi 35000HP
MAKIVKVIGREIIDSRGNPTVEAEVHLEGGFVGLAAAPSGASTGSREALELRDGDKSRFLGKGVLKAVAAVNNEIAQAIVGKEGCAQSEIDQTMIDLDGTENKSKFGANAILAVSLATAKAAAASKGLPLYAYIAELNGTPGVYSMPLPMMNIINGGEHADNNVDIQEFMIQPIGAKTLREALRIGAEVFHNLAKVLKAKGLSTAVGDEGGFAPNLASNADALACIKEAVENAGYVLGKDITLAMDCASSEFYNKENGLYEMKGEGKSFTSQEFTHYLENLCKEYPIVSIEDGQDESDWDGFAYQTKILGDKVQLVGDDLFVTNTKILKEGIEKGIANSILIKFNQIGSLTETLAAIKMAKDAGYTAVISHRSGETEDATIADLAVGTAAGQIKTGSMSRSDRIAKYNQLIRIEEALGEMAPFLGLKAIKGQA

SEQ ID NO: 15087 - protein, 434 aa, Bordetella parapertussis 12822
MVGMTKMTQVFQKVSAIRGMNDVLPGPSARWEKFEEIVRGWLRSYGYRNVRTPVLEHTRLFARGIGEVTDIVEKEMYTFTDALNGDSLTMRPEMTAGIVRASIEHNMLYDRPHRVYAIGPVFRHERPQRGRYRQFHQIDVEALGFAGPDVDAEMIVMLARLWKLLGLQDVRLELNSLGQPAERAAHRAALIEHLERHQDILDEDGRRRMYSNPLRVLDTKNPAMQEMADSAPRLFDFLGEESRSHFDGLCQRLADAGIEYRLNPRLVRGLDYYNLTVFEWVTDRLGAQGTVCGGGRYDGLVELLGGKPAPAVGFAIGMERLLDLWEQSVEIEQPAECEVYIVHQGEEGQRLAARVGEQLRDAGLDVIVHAGAAGFKAQFKRADASGARIAVILGGDEVASRTASIKHLRGPVGADAAQQQVPLAQLADVLKSKG

SEQ ID NO: 15088 - protein, 484 aa, Oryza sativa
  unsure (1)..(484): unsure at all Xaa locations
MANIRALLIGLVRARGSLVDIGRCVSSSRPSYLASLGRHYKVPMEIRWLSSTGFPPHLVVGMPALSPTMNQGNIAKWRKQEGEKIEVGDVICEIETDKATLEFESLEEGYLAKILAPEGSKDVQVGQPIAXTVEDLEDIKNIPADASFGGEQKEQSIASEAQKVETDAAKESSIITRISPAAKLLIKEHRLDQSVLNASGPRGTLLKGDVLAALKLGASSSSTKQKNAPAAPSSQPTHDFQAQSVTIPQQNDAYEDIPNSQIRKVIAKRLLESKQTTPHLYLSQDVILDPLLAFRNELKEQHGVKVSVNDIVIKAVALALRNVPEANAYWNNDKEQAQKCVSVDISIAVATEKGLMTPIIRNADQKTISAISSEVKQLAEKARAGKLAPNEFQGGTFSISNLGMYPVDHFCAIINPPQSGILAVGRGNKIIEPVVDSDGTEKATVVTKMSLTLSADHRVFDGQVGGKFFTELSQNFGDIRRLLL

SEQ ID NO: 15089 - protein, 279 aa, Bordetella parapertussis 12822
MQVVRKAVFPVAGMGTRFLPATKAMPKEMLPVVDKPLIQYAVEEAVAAGITDLIFVTGRNKRAIEDHFDAAPELETDLEAKGKHELLALVRDILPAHVNCLYIRQSAPLGLGHAVLTAAPAVGNEPFAVLLADDLIDADTPVLKQLIDVAVARQGSVLGVQEVPREDTRKYGIVASQPVDARTERVTHIVEKPAPEQAPTTLAVVGRYVLEAAIFDHLRATTVGAGNEIQLTDGIAALLRERDVYAHRYDGKRYDCGSKAGMFQATVALGRKYHGLIPE

SEQ ID NO: 15090 - protein, 76 aa, Chlamydia trachomatis
IPGTWEGICAAEVLESQGIACNVTLIFNSVQAIAAAKAKVTLVSPFVGRIYDWWIAAYGAEGYLSKPILELLPSKY

SEQ ID NO: 15091 - protein, 200 aa, Streptomyces coelicolor A3(2)
MTRLILATRNAGKITELRAILADAGLPHDLVGADAYPHIPDVKETGVTFAENALLKAHALAEATGLPAVADDSGLCVDVLNGAPGIFSARWAGRHGDDQANLDLLLAQIADIADEHRGAHFACAAALALPDGTERVVEGQLKGTLRHAPAGTGGFGYDPILQPEGETRTCAELTAEEKNAISHRGKAFRALVPVVRELLG

SEQ ID NO: 15092 - protein, 449 aa, Lactobacillus plantarum WCFS1
MISQNHRLDQQLIEREDHYMATAARINYYDLVIDHAHGALLTDVDGNQYIDLLASASAINVGHTHPRVVKAIQEQAAKLIHYTPAYFHHQPEQRLAERLAKSAPGTDNEVVFGNSGSDANDAIIKFARAYTNRQYIVAYTDAYHGSTYGSMSLSGVSLNMVRKMGPLLPGIVHVPYPDCYRTLPHETEHELALRYFEAFKAPFDSYLPAEETACVIIEPIQGDGGIRKAPAEYVQLVYDFCHQHGILFAVDEVNQGMGRTGKMWSIQNFPGIRPDLMSVGKSLASGLPLSAVIGRREVMESLAAPAHTFTTAANPVCCAAALATIDVLADEQLVARSANYGRYAKEQFLALQQRHPKIGQVRMYGLNGGIELVTDRQSQQPDPDFASDVIYAAFERGVVMITLKGNILRFQPPLVITKTQLDTALTVLDEAMAAAEQGLVKRPQGKIGW

SEQ ID NO: 15093 - protein, 497 aa, Oryza sativa
MATCLDSLGPLLGGAANSTDAANYICNRFTDTSSAVDATYLLFSAYLVFAMQLGFAMLCAGSVRAKNSMNIMLTNVFDAAAGALFYYLFGFASRRTPSKGFIGKQFFGLKHMPQTGYDYDFFLFQWAFAIAAAGITSGSIAERTRFSAYLIYSAFLTGFVYPVVSHWFWSTDGWASAGRLTGPLLFKSGVIDFAGSGVVHLVGGIAGLWGAFIEGPRIGRFDAAGRTVAMKGHSASLVVLGTFLLWFGWFGFNPGSFTTISKIYGESGTIDGQWSAVGRTAVTTSLAGSVAALNHAVRQEMADGALERDRRLQRSPRRVRAITAGCSVVDPWASVICGFVSAWVLIGCNKLALMLKFDDPLEATQLHGGCGAWGIIFTALFARREYVELIYGVPGRPYGLFMGGGGRLLAAHIVQILVIVGWVSATMGTLFYVLHRFGLLRVSPATEMEGMDPTCHGGFGYVDEDEGERRVRAKSAAETARVEPRKSPEQAAAGQFV

SEQ ID NO: 15094 - protein, 511 aa, Thermus thermophilus
MKVRAHMSMLFHLDKCIGCHTCSIACKNLWTDRKGAEYMWWNNVETRPGAGYPTGWEDQERFRGGWEYKDGHLDLRLHSRTQGLFRLFFNPALPSLDDYYEPFTFRYADLFTAPEGEDQPTAVPVSMITGEPMTPEAGPNWDDDLSGSPLYAKNDPNLKALAPEVRAQLEEIEGVVFQYLPRICNHCLNPACVAACPSGAIYKRAEDGVVLVNENKCKAWRMCVAACPYKKVYYNWATGKSEKCILCFPRLETGQAPACAHSCVGRIRYMGVLLYDADRIPEAAMVPDEELVESQLSLILDPFDPEVIAAAKAEGIDEGWIQAAQKSPIYKFVKTWGLALPLHPEYRTLAMMFYVPPLSPVVATVEKALRAGRGGEGLVRLDIPETDLDFEVYAALEKARMPVKYLANLFAAGNEALIVPILKKMLAVRILKRQESLEGRPTEKALKVLADAGLTLEEAEAIYRLTTLPTLEERFVLPPYHREMAAEVWKDPLAHKGEAGLGYIQPPLRGE

SEQ ID NO: 15095 - protein, 644 aa, Xanthomonas axonopodis pv. citri str. 306
MSTCPIDSPALRAAFAAPLDPQHAEVLLSRYDQHASRLLDALHALYGQRADYASWLAQWLGEVGDIARQRPQALQTLDSTRHAGWFGQQHMLGYSAYADRFAGTLQGVAERVPYLQELGVRYLHLLPFLRARAGDNDGGFAVSDYGQVEPSLGSNDDLVALTSRLREAGISLCADFVLNHTADDHAWAQAARAGDARYLDYYHHFADRTLPDRYEATLGQVFPHTAPGNFTWVDDTAQWMWTTFYPYQWDLNWSNPAVFGDMALAMLRLANLGVETFRLDSTAYLWKRIGTDCMNQPEAHTLLVALRAVTDIVAPAVVMKAEAIVPMTQLPPYFGSGVDEGHECHLAYHSTLMAAGWSALALQRGDILHNVIAHSPPLPRHCAWLSYVRCHDDIGWNVLQHEACGNAAQPPFSLRDVARFYANAVPGSYARGESFQSSGDGVHGTNGMAAALAGIQAAQEAGDAAALAVAVDRLVLLYAIALAMPGVPLIYMGDELAMVNDPGYRHDPHRQHEGRWLHRPAMDWQLAAQRHDANSLSGTVYRRLRGLIRQRAALGALAADQALASIALNDPRVFVLTRGDSFIALHNFSDQPLDVELAAIGIDGWTLLAIDDAIGGAAARGDGSIVLPPYGVRWLQRGTEHAPE

SEQ ID NO: 15096 - protein, 392 aa, Rhodospirillum rubrum
MEETARTVAERFGFGEIITPIFEFTDVFARTLGDTSDVVTKEMYTFTDRSGDSLTLRPENTAGVARAFISGGLAQNVPVKLFYRGPMFRHERPQKGRLRQFHQVGVELIGAENPLADVEVIALGSQLLGALGVGGRTILHLNSLGDPESREAYRAALVSYLSGHRDSLSRDSLERLERNPLRVLDSKDEGDRAVVAGAPRLIDHLNEASRAFFAGVTGGLEALGIPFEIDPLLVRGLDYYGHTAFEFVTTDLGAQGTVMAGGRYDGLIRQMGGSQTPGVGWAAGVERLSMLMAADRVGAPRPLAMIPAGPDDEVEALKLAHALRQGGLFVDFGYSGNLGKRMKRANRINARAAIILGGEERANGTVVVRDLDSGEQETIGLAVLEEFLARFL

SEQ ID NO: 15097 - protein, 492 aa, Solanum tuberosum
MDPSKYRPSSAYDTPFLTTNAGGPVYNNVSSLTVGPRGPVLLEDYYLIEKLATFDREKIPERVVHARGASAKGFFEVTHDISHLTCADFLRAPGAQTPVICRFSTVVHERGSPESIRDIRGFGVKFYNRGGNFDLVGNNVPVFFNRDAKSFPDTIRALKPNPKSHIQEDWRTLDFFSFLPESLHTFAFFYDDVCLPTDYRHMEGFGVHAYQLINKEGKAHYVKFHWKPTCGVKCMSEEEAIRVGGTNHSHATKDLYDSIAAGNYPEWKLFIQTMDPEDVDKFDFDPLDVTKTWPEDLLPLIPVGRLVLNRNIDNFFAENEQLAFNPGHIVPGIYYSEDKLLQTRIFAYADTQRHRIGPNYMQLPVNAPKCGHHNNHRDGAMNMTHRDEEVDYFPSRFDPCRPAEQYPIPACVLNGRRTNCVIPKENNSKQAGERYRSWESDRQDRYINKWVESLSDPRVTHEIRSIWISYLSQADKSCGQKVASRLTVKPTM

SEQ ID NO: 15098 - protein, 258 aa, Escherichia coli K12
MRLSMENIMNNPVIGVVMCRNRLKGHATQTLQEKYLNAIIHAGGLPIALPHALAEPSLLEQLLPKLDGIYLPGSPSNVQPHLYGENGDEPDADPGRDLLSMAIINAALERRIPIFAICRGLQELVVATGGSLHRKLCEQPELLEHREDPELPVEQQYAPSHEVQVEEGGLLSALLPECSNFWVNSLHGQGAKVVSPRLRVEARSPDGLVEAVSVINHPFALGVQWHPEWNSSEYALSRILFEGFITACQHHIAEKQRL

SEQ ID NO: 15099 - protein, 423 aa, Xanthomonas axonopodis pv. citri str. 306
MSTAPQKPLAIRERLSEVRYEIRGELARRARELEAQGRKLIKLNIGNPGAFGFRAPEHLQRAIADDMGRTDPYTHQQGLPEAREAIATAYARRQHPDAHPDRIFVGNGVSELIDLSLRALLNPGDEVLVPSPDYPLWSAATILNDGRPVYYRCAPENGFQPDPVEIETLVSSRTRAIVLINPNNPSGASYSRELLERIVAIATKHNLLLMVDEIYDQVLYDDAAFVPVAPLAGAHPCITFSGLSKVHRACGWRVGWALLSGDQARINDLRNAMDLLGALRLCANVPGQYAIDAAVNGPDTISALCAPGGRLYETRRAVIEACAASEHLSLVAPAGALYAFPAVVGAAARNFDDHAFALDLMNEEGVLVVPGSSFNVPYRHHFRVTLMPEAGVMRDVFARIDRALARRAEAVTKVVPLKPRSVA

SEQ ID NO: 15100 - protein, 2972 aa, Corynebacterium efficiens YS-314
MSISSLTPLHSFKEPAILYAGQASAWQQVIADASVDHIAASHLRELLSRARAKTAPFARQVTSIVPGSLARLEELTREGSDHESDIDPQPAVSIPGIVLGQVAATRQLRDLGLDVDNATRLGHSQGILGVEAAVNEEDVLAFAILLGAAASRFAGKGSHMLSVRGLERDTIHEVVADVDGVEVSLRNARAHFVLSGKPAQLKKAAAALQHAADAFNEDINNKRKGGSLLEPKFDYLPVAIPFHHSSMQEAVNIAVEWSEACGLNVDAKRLACAILVDHSDWVAQISQLKADYVLTLDAGLARFTAPLLEGTGITQLPAYTAAERDNLARPGYQIPTAVDWSEFAPKLVKLPTGETKVQTRFSTLTGYSPILLGGMTPTTVDATIVAAAANAGYWAEMAGGGQYSEEVFNRNKENLVRQLNPGRAAQFNSMFFDRYIWNLQFGAQRIVSRARAAGTAIDGVVISAGIPEPEEATELLQGLNEDGFPYIAFKPGTVDQIRATLAIADNNPDHDIIMMVEDGHAGGHHSWVNLDDLLLTTYAEVRARKNVVLTIGGGIGTPAKAAHYLTGQWSADLGYPKMPVDGIIIGTAAMATKEATTSPEVKQALVDTPGIDPQDAGGWVGRGDSRGGVTSGLSHLHADMYELDNDSAAASRLISSIDSDDVEEHREELIAAINKTAKPYFGDLEEMTYAEWIERWVDLAHPSQDPTWDDRLFDLVHRLEARLHDADHGEIETLFPDLASIEDAPAAVEKLLAAYPHAREIKVSARDAAWFIGLCRKHHKPMPWVPAIDADLARWWGLDTLWQAHNPRYSANAVRVIPGPVSVAGIDRVDEPVADLLGRFEEACIEAVDGEPVEIYARLNESKNERELLLSAPHIVWHGNLIDNPAHVLEDGAFELIEEDGYWIIRILADSVFDDIPVEQRPYLVKHVDIPVELSDAVATGASPVVSREKLPESVYALLAGVAGVGSVSAAGDKIEALPTKIDDGTEFGYVRDSFTLPRELLTAHTAVTGAALEEHNVGTGDVLVGVCWPALYASLGTGKLSDGYPVIEGLLNAVHLDHLLDLRVPLEELADGRTIDVESRCASIEESSSGRIVTVRLTLFSEGEVVAKLVTRFAIRGRITTTDLAQPAEAYGGRDEVIEDTPRSFVRSATVTAPADMTPFAMVSGDYNPIHTSANAAKLVGLDAPLVHGMWLSATAQHLAGLGSEVVGWTYSMYGMVQLNDIVDITVERVGRSGLMPAYEVTCRIDGNVVSRGQALLKAPSTAYVYPGQGIQAKGMGQGDRNASPEARAVWERADAHTRANLGFSIQQVIDENPVELKVGDTTFVHPKGVLNLTQFTQVALAVVAYAQTERLKAADAIVDGSLYAGHSLGEYTALASLGNIFELEGVIDVVFSRGSAMHSLVPRDEQGRSNYALAAFRPNMIGLSGAEVENWVDRIAEESGEFLQIVNYNVDGQQYAVAGTLKGLKALKASASANPRAYVDIPGIDVPFHSSVLRPGVPAFAEKLDELLPQVIDIDALRGRYIPNLVARPFELTQDFVDAILAVVPSERLKGVKVEEMEENKLARLLLIELLSWQFASPVRWIETQALIIGQVDQIIEVGLAASPTLTNLALRTMDVIGESRPVFNVERDQDQVMLNDVRQAPVVEVEEEDTPAAPAESSAPAPVTESVPAPAAPAAAPVAVSDAPELKFNASNAIMTLFALQNKINIDQITPADTSETLTNGVSSRRNQMLMDMSTELSVPTIDGAADADVATLQGRVVTAAPGYKPFGPVLGEAIRARLRALLGAAGLKASYVGDRVTGTWGLPESWVAHVEVELLLGTRDGESVRGGALGSLPESASNKGEVDSLIDAAVNNVAAANGTSVSLSAGGSGGGGGVVDSAALDAYAATVTGEDGVLANIARGILTQLGLDTRDDAPAAEADTELYEAVEAELGAGWQKMVTPVFTAERAILFDDRWASAREDLARLATGADIAVERFAGTGETVAKQAAWWADHVEDTTLAATLTEVSKVALEAADEPHAEDVALVTGAAPESIAGAVAGRLLSQGATVIMTASNVSQARKEYARQLYAQHASPSAKLWIVPANMSSYRDVDAVIDWIGNEQRVTVGGSVTVTKPALTPTLAYPFAAPSVSGNLSDAGPQTENQARLLLWSVERTIAGLADLASRGAGERVHIVLPGSPNRGMFGGDGAYGEVKAAFDAILAKWGSETGWPQYVTLAQARIGWVAGTGLMGRNDVLIPAAEKLGIHVYTPEEISTELVGLASAESREQALTAPIDYDLTGGLGGGISIAELAASLEQDEVEQVETDSATIKALPSPKNPVQAPGAEVGEVSVDLDDMVVMVGVGEISSWGSGRTRFEAEYGIQRDGSVELTAAGVVELAWMMGLITWSEDPRPGWYDAEGTEVPEEDIYDRYRDEVVARCGIRELVNDAFLIDGGSMDAAEIFLDRDITFTVTSEEEAQAYVDADASAEIAEVDGEWTVTKKKGSTSFVPRKATLTRSVAGQLPTDFDPAKWGIPASMIDAMDNITAWNLVTAVDAFLSSGFSPAELLQAVHPADVSSTQGTGIGGMQSLRKLFVNRFLGQDRPSDILQETLPNVVAAHTMQSYVGGYGQMIHPVAACATAAVSVEEGLDKIRLGKADFVVAGGIDDIQVESLTGFGDMNATADTQTMLDKGIDPRFISRANDRRRGGFLEAAGGGTVLLARASLAAELGLPVLAVVAHAQSYADGSHTSIPAPGIGALGAARGGEKSVLARELKKMGLTPDDVRVVSKHDTSTNANDPNESELHSILWKTIGRDADNPMFVISQKTLTGHSKGGAALFQIGGLVSVLETGKLPQNAALDCVDPEMQAKGESLVWLREPLDLGAGAIKAGVLTSLGFGHVAALVVMATTGVFEQAMRNAGLDVEAWRKRATERLRAGANRLEAGMVGRAPLFEQVDGRRLPERGAHEAEINMLIDADARLGADGTYPAAR

SEQ ID NO: 15101 - protein, 248 aa, Malus x domestica
MGRGRVELKRIENKINRQVTFAKRRNGLLKKAYELSVLCDAEVALIIFSSRGKLYEFCSSFSMMKTLEKYQSCSYGSLEANLPANETQNSYQDYLMLKARVEVLQQSQRNLLGEDLSHLNTKELEHLEHQLETSLKQIRSRKTQFILDQLSDLQNREQMLVEANKALKRKLEETSVQAPEGMAWEAAGHGPNNIQQTRLPSHSEAFFHPLEGNNSSSQIGYTHMGSDNEMNVGNPGQYVNGYIPGWML

SEQ ID NO: 15102 - protein, 235 aa, Malus x domestica
MGRGKVELKRIENKINRQVTFAKRRNGLLKKAYELSVLCDAEVALIVFSTSGKLYEFCSGPSIAKTLERHQRCTYGELGASQSAEDEQSRYQEYLKLKTKVEALQRTQRHLLGEDLVHLGTKELQQLENQLDVSMKKIRSTKTQFMHVQISELQRKEEMLLEANTGLRRKLEEITAGHQRSWNGNHQAAQLEGFPEHLQYNNALQIGTPVVTNDEANVATSSAQNGTGFFPGWML

SEQ ID NO: 15103 - protein, 392 aa, Oryza sativa
MAPARVHSNGRLLMLLLLLAVAGFAAAQPSQDNPPAGYYATNFSPSMAIVIVVLIAAFFFLGFFSIYVRHCYGGRGDYSTTPLPRSGAARSRRQRGLDQSVLATFPTMAYADVKAHKSVKGALECAVCISEFDDDETLRLLPKCSHVFHQDCIDTWLASHATCPVCRANLVDGASEPASDVAAELPTAPAPRPEGATPSEAAAPGGEAPAAAAAAAVVIDVEETEEERIIREEAAELTRIGSLKRALRSKSGRAPAARFPRSHSTGHSLSSSAAASAGAERFTLRLPEHVLREVIAAGQLQRTTSLVAFRAGRQGSTRRGLRSGGGGGGGEGSSRAGRSVRLGQSGRWPSFLPRTFSARLPAWGSRSTRRGDGDGSSKGGRTAGSGAGAGGK

SEQ ID NO: 15104 - protein, 743 aa, SYNECHOCOCCUS SP. WH 8102
MSDGPRSVRSQCPYCGVGCGLELLPPAVKGQAVKRDAEGNPMWTARGDREHPSSLGQVCIKGATVGETLARGRLRQPLFRSKLTDAFAPISWDDALDKITGQIKASLARRGNADGIAMYGSGQFHTEDYYLAQKLLKGALGTNNFDANSRLCMSSAVAGYTRSLGSDGPPCSYEDLDHCTVAFLIGTNTAECHPVLFQRLLKRKRKNPGSVKIVVVDPRRTDTAKAADIHLPIAPGSDLALLHGIAHLVLRDNGQDPAFIDNHTENYDAFFDVAARWTPRRVALFCNIPEKRLRDVAALFHRRQKVLSLWSMGVNQRREGTAVVQGLINLHLLTGQIGNEGAGPFSLTGQPNAMGGREAGGLAHLLPGYRLVANPEHRAEVEQAWKLPAGQIAAKPGLAAWQQVEAMERGDLDLWWVAATNPLVSMPDLDRVKQAMGNCPLVVVSEAYADSETSHYAHLLLPAAQWSEKAGAMTNSERRVTFCPAYRLRFGESRPDWEVFADVGRRLGYTEQFRFDSAAEVYAEFTRLTQGRLCDVSGLSHELLEQAGPQQWPYPMGSIPSTAAKRLYENHLFATPSGRARFSTDQPLGLAEPPCDTYPLVLTVGRYLGQWHTMTRTGKVERLMKQHPEPLLEIHPSDAQELQLRNGELAAISSRRGHLTATVKVTDRIRCGTVFLPMHWGFTQEKACEANTLMHDDACPVSKQPELKACAVIVAPAVSVVKPVEQEKGRLEALRRLLTPALR

SEQ ID NO: 15105 - protein, 473 aa, Oryza sativa (japonica cultivar-group)
MMEGGRLGGAAASASAAAAADARGGMSGFAAPQHAIHTNLNNVQPTQVTDFGALAQSAGFRIEDLANLSTNGLFNLKSNAHTIINDPLQFENYVKSISPSNITTTATVTVVDPQTLVPQKGAQLNLVTIRTGNVENWGESTIADTSPRTDTSTDPDTDERNQMFEQGQLAAPTASDSSDRSKDKLDHKTLRRLAQNREAARKSRLRKKAYIQNLESSRLKLTQIEQELQRARQQGIFISTSSDQSHSASGNGALAFDMEYARWLEEHNKHINELRAAVNAHAGDNDLKSTVDSIMAHYNEIFKLKGVAAKADVFHVLSGMWKTPAERCFMWLGGFRSSELLKLLAGQLEPLTEQQLAGIANLQQSSQQAEDALSQGMEALQQSLAETLASGSLGPAGSSGNVANYMGQMAMAMGKLGTLENFLRQADNLRLQTLQQMQRILTTRQSARALLAISDYFSRLRALSSLWLARPRE

SEQ ID NO: 15106 - protein, 270 aa, Pisum sativum
MGDNSGCNETNEIVVNVNKDVSNITQEDSTAHATASLLQKLVAEVVGTYFLIFAGCAAVAVNKNNDNVVTLPGISIVWGLAVMVLVYSLGHISGAHFNPAVTIAFATTRRFPLKQVPAYIAAQVFGSTLASGTLRLLFSGKHDQFVGTLAAGSNLQAFVMEFIITFYLMFIISGVATDNRAIGELAGIAVGSTVLLNVMFAGPITGASMNPARSIGPAFVHNEYRGIWIYMISPIVGAVSGAWVYNVIRYTDKPVREITKSGSFLKGAKP

SEQ ID NO: 15107 - protein, 277 aa, Glycine max
  unsure (1)..(277): unsure at all Xaa locations
MPPFVVTPSSSSSSVLTPKLCNPQVKRFVLQFAYPKRSRTFLEPSSSSSFSPMRKTKEEVVEERLYREEYVHPRNDDVLGDEEERDKRLGKACEVYVCNLPRRCDATYLLDMFRPYGTILSVEVCRDAETNESKGCGYVTLGSIYSARNAVAALDGSDVGGRELRVRFSIEMNSKRRSXIIMNSSTKRISYYESPHKLYVGNLAKTVRPEQLRDLFSRFGNVVSARVLHDFKQGNSRVYAFLSFQSEAERDAAMSLNGTEYYGRTLIVKEGVERSED

SEQ ID NO: 15108 - protein, 249 aa, Glycine max
  unsure (1)..(249): unsure at all Xaa locations
MNNVAERPLNKDVEDDDEDDGGGLEAWERTYAEDRSWEALQEDESGPXPPVXSIGPPPIYRAQYRRRLRTLAASAATARIXKGLIRYLYIVVDLSKAASERDFRPSRMAVMGKQVEAFIREFFDQNPLSHVGLVTIKDGIAHCITELGGSPESHIKALMGKLECSGDASLQNALELVLGYLNQIPSYGHREVLILYSALSTCDPGDLMETIXKCKKSKIRCSVIGLAAEMXVCKHLCRTGXTILFTNPL

SEQ ID NO: 15109 - protein, 403 aa, Pseudomonas putida KT2440
MQFSKSNKLANVCYDIRGPVLKHAKRLEEEGHRILKLNIGNPAPFGFEAPDEILQDVIRNLPTAQGYSDSKGLFSARKAVMQYCQQKDIEGVTIEDIYLGNGVSELIVMSMQALLNNGDEVLIPAPDYPLWTAAVSLAGGKPVHYLCDEQADWFPDLEDIKAKITPNTKALVIINPNNPTGAVYSKELLLGMLELARQHNLVVFSDEIYDKILYDEAVHISTASLAPDLLCLTFNGLSKSYRVAGFRSGWLIISGPKHHAHSYIEGIDMLANMRLCANVPAQHAIQTALGGYQSINDLVLPPGRLLEQRNRTYELLNDIPGVSCVKPMGALYAFPRIDPKVCPILNDEKFALDLLLSEKLLIVQGTAFNWPWPDHFRVVTLPRVDDLEAAIGRIGNFLKGYSQ

SEQ ID NO: 15110 - protein, 430 aa, Yersinia pestis biovar Medievalis str. 91001
MASEYIEHLAVFHAEDTLLPAKGSFFMSPIEKSSKLDNVCYDIRGPVLKEAKRLEEEGNKVLKLNIGNPAPFGFDAPDEILVDVIRNLPTAQGYCDSKGLFSARKAIMQHYQARNIRDLTVEDIYIGNGVSELIVQSMQALLNLGDEMLVPAPDYPLWTAAVSLSSGKAIHYMCDEESGWFPDLDDIRSKITPRTRGIVIINPNNPTGAVYSKELLLEIVEIARQNDLIIFADEIYDKILYDDAQHHSIAALAPDLLTVTFNGLSKTYRVAGFRQGWMVLNGPKKHAKGYIEGLEMLASMRLCANVPMQHAIQTALGGYQSISEFIQPGGRLYEQRDRAWELINQIPGVSCVKPQGALYMFPRIDQKRFNLKDDQKLVLDLLLQEKVLLVQGSAFNWPYPDHVRIVTLPRVDELEMAVRKLGRFLETYHQ

SEQ ID NO: 15111 - protein, 162 aa, Pseudomonas putida KT2440
MAATMLNIPCVTLGGEHKTLGDFPGKVLLVVNTASQCGFTPQYKGLEQLWQAYRDRGLVVLGFPCNQFGKQEPGDAREIAQFCERNFGVSFPLFRKVEVNGPGAHPLFVELKQRAPGILGSQKIKWNFTKFLVDPASGQVKRYAPTTKPQALEADIERLLSR

SEQ ID NO: 15112 - protein, 369 aa, Acinetobacter baumannii
MKSRAAVAFAPGKPLEIVEIDVAPPKAGEVLIKITHTGVCHTDAFTLSGDDPEGVFPAILGHEGAGVVIEVGEGVTSVQPGDHVIPLYTAECKECLFCKSGKTNLCVAVRATQGKGVMPDGTTRFSYKGEPIYHYMGCSTFSEYTVVAEVSLAKINPEANHEQVCLLGCGVTTGIGAVHNTAKVQEGDSVAVFGLGGIGLAVVQGARQAKAGRIIVVDTNPDKFELAKQFGATDFLNPKDYDQPIQQVIVEMTGWGVDHSFECIGNVNVMRSALECAHRGWGQSVIIGVAGAGQEISTRPFQLVTGRKWLGTAFGGVKGRSQLPKMVEDAMKGDIQLEPFVTHTMPLQDINTAFDLMHEGKSIRTVIHF

SEQ ID NO: 15113 - protein, 562 aa, Glycine max
MAPSTTVPNGTLPSGSVTGRLASVYSEVQKTRVDHALPLPSVLKHPFTILHGPPSSAAGNPDEIAKLFPHLFGQPSAALARSDAAQTQKKLKIGVVLSGGQAPGGHNVISGIFDYLQERAPGSTLYGFKGGPAGIMKCKYVELTSEYIYPYRNQGGFDMICSGRDKIETPEQFKQAEETAKKLDLDGLVVIGGDDSNTNACLLAENFRSKNLKTSVIGCPKTIDGDLKCKEVPTSFGFDTACKIYSEMIGNVMIDARSTGKYYHFVRLMGRAASHITLECALQTHPNITIIGEEVAAKKLTLKNVTDYIVDVVCKRAEINYNYGVILIPEGLIDFIPEVQHLIAELNEILAHDTVDEGGLWKKKLTDQSLKLFDFLPQAIQEQLMLERDPHGNVQVAKIETEKMLIQMVETELEKRKQEGKYKGEFKGQSHFFGYEGRCGLPTNFDATYCYALGYGAGALLHSGKTGLISSVGNLCAPVKEWTVGGTALTSMMDVERRHGKFKPVIKKAMVELEGAPFKKFASLRDEWALKNCYISPGPIQFSGPGSEVINHTLLLELEAQA

SEQ ID NO: 15114 - protein, 395 aa, Oryza sativa
ETARSPSPSLLPRLPVASHSRPRLAAHSRRSRSRSHSSSISSRWRLLHRALASVSGAAARKAAVATAAAASPPAEGGGKANGGAVAGGISRTVQLGAMILVWYLLNIYFNIFNKLVLKSVPFPYTITTFQFASGSFFITLMWLLNLHPKPRLSLGQYAKILPLALVHTMGNVFTNMSLGKVAVSFTHTIKAMEPFFSVLLSVLFLGETPSFLVLGSLVPIVGGVVLASMTEVSFNWIGFWSAMASNLTNQSRNVFSKKLLADKEETLDDINLFSIMTVMSFLLSAPLMLSVEGIKFSPSYLQSNGVNLQELCMKAALAGTCFHFYQQVSYSLLARVSPVTHSVANCVKRVVVIVSSVLFFRTPISPINALGTGVALAGVFLYSRFKKAKPKAKTA

SEQ ID NO: 15115 - protein, 498 aa, Rhodospirillum rubrum
MFSLIDSLVGETALLPHGQCLLWDTPLLALHAVSDALIALAYFAIPLAIVIFVRRRPGLEPLHLALALLFAVFIVACGLSHISSVVTLWIPAYLTQGLIKAATAVVSLVTAFVLFALIPRLLAIPSPAELREANRRLGQEAALRQGMVEDLIVARADLERRVEERTRAAVKIMENFEVTLRGSAVTIFQQDLDLRYTWIHNLRPPLVASDYIGRTPRQALPPEAAAVIEPFQREVLRTGVKDRLILAISRGLDEGVWYDIQSEPLRDDAGVISGLASVAVDITSQKAGEQQLRVLMRELTHRSKNLLAVVQGIARQSAANVPDVKTFTERFGARLQALGESHDILVSTDWRGAAIPDLARAHLGHFLAVSKERLTLRGPDILLSPEATQQIGLALHELSTNAAKYGALSNDGGRVEITWETRPSPLGVDLVLIWREIDGPPVVPSERTGFGHIMVTYLVPRSLRGTATLTPAAEGMLWTLTFPLFIRQNPHPPATPTA

SEQ ID NO: 15116 - protein, 406 aa, Brucella melitensis 16M
MSEEFHKIRRLPHYVFEQVNRLKASARAAGADIIDLGMGNPDLPTPQNIVDKLCEAVQDPRAHRYSASKGIPGLRRAQAQYYARRFGVKLNPDTQVVATLGSKEGFANMAQAITAPGDVVLCPDPTYPIHSFGFIMSGGVIRSVQAKPDDNFIPTLERGVKHSIPKPIALILNFPSNPTAYVATLDFYKDVVAFARKHDIVILSDLAYSEIYFDGNPPPSVLEVPGAMDVTVEFTSMSKTFSMPGWRMGFAVGNERLIAALTRVKSYLDYGAFTPIQVAATAALNGDGSDIAYVRNVYKQRRDVLVESFGRAGWDVPPPAATMFAWVPIPERFRSLGSLEFSKLLVEQADVAVAPGVGFGEHGDDYVRIALVENEHRIRQAARNIKRFFSAKDENLQNVIPLEGHR

SEQ ID NO: 15117 - protein, 472 aa, Shigella flexneri 2a str. 2457T
MVTINTESALTPRSLRDTRRMNMFVSVAAAVAGLLFGLDIGVIAGALPFITDHFVLTSRLQEWVVSSMMLGAAIGALFNGWLSFRLGRKYSLMAGAILFVLGSIGSAFATSVEMLIAARVVLGIAVGIASYTAPLYLSEMASENVRGKMISMYQLMVTLGIVLAFLSDTAFSYSGNWRAMLGVLALPAVLLIILVVFLPNSPRWLAEKGRHIEAEEVLRMLRDTSEKAREELNEIRESLKLKQGGWALFKINRNVRRAVFLGMLLQAMQQFTGMNIIMYYAPRIFKMAGFTTTEQQMIATLVVGLTFMFATFIAVFTVDKAGRKPALKIGFSVMALGTLVLGYCLMQFDNGTASSGLSWLSVGMTMMCIAGYAMSAAPVVWILCSEIQPLKCRDFGITCSTTTNWVSNMIIGAAFLTLLDSIGAAGTFWLYTALNIAFVGITFWLIPETKNVTLEHIERKLMAGEKLRNIGV

SEQ ID NO: 15118 - protein, 475 aa, Solanum tuberosum
TTNSGAPVWNNNSSLTVGARGPVLLEDYHLVEKLANFDRERIAERVVHARGASAKGFFEVTHDIAHLTCADFLRAPGVQTPVIVRFSTVIHERGSPETLRDPRGFAVKFYTREGNFDLVGNNFPVFFIRDGMKFPDMVHALKPNPKSHIQENWRILDFFSHHPESLHMFTFLFDDIGIPQDYRHMDGSGVHTFTLINRAGKSTYVKFHWKPTCGVKSLLEEEAIRVGGANHSHATQDLYDSIAAGNYPEWKLFIQIMDPDHEDKFDFDPLDVTKTWPEDILPLQPVGRLVLNKNIDNFFNENEQLAFCPSIVVPGVYYSDDKMLQTRIFSYSDTQRYRLGPNYLQLPANAPKCAHHNNHYDGSMNFMHRDEEIDYFPSRYDQVRHAEVYPIPSTVCSGKREKCIIQKENNFKQPGERYRTFTPDRQERFIRPWVEALSDPRITYEIRSIWISYWSQADKFLGQKLAFRLNVRPSI

SEQ ID NO: 15119 - protein, 397 aa, Mycobacterium tuberculosis CDC1551
MTVSRLRPYATTVFAEMSALATRIGAVNLGQGFPDEDGPPKMLQAAQDAIAGGVNQYPPGPGSAPLRRAIAAQRRRHFGVDYDPETEVLVTVGATEAIAAAVLGLVEPGSEVLLIEPFYDSYSPVVAMAGAHRVTVPLVPDGRGFALDADALRRAVTPRTRALIINSPHNPTGAVLSATELAAIAEIAVAANLVVITDEVYEHLVFDHARHLPLAGFDGMAERTITISSAAKMFNCTGWKIGWACGPAELIAGVRAAKQYLSYVGGAPFQPAVALALDTEDAWVAALRNSLRARRDRLAAGLTEIGFAVHDSYGTYFLCADPRPLGYDDSTEFCAALPEKVGVAAIPMSAFCDPAAGQASQQADVWNHLVRFTFCKRDDTLDEAIRRLSVLAERPAT

SEQ ID NO: 15120 - protein, 179 aa, Staphylococcus aureus subsp. aureus MW2
MHNDLKEVLLTEEDIQNICKELGAQLTKDYQGKPLVCVGILKGSAMFMSDLIKRIDTHLSIDFMDVSSYHGGTESTGEVQIIKDLGSSIENKDVLIIEDILETGTTLKSITELLQSRKVNSLEIVTLLDKPNRRKADIEAKYVGKKIPDEFVVGYGLDYRELYRNLPYIGTLKPEVYSN

SEQ ID NO: 15121 - protein, 556 aa, Phytophthora infestans
MINDTPAWKALAEHAAEIKSTHLRELLNDDARNAAMRTEQQGIYLDFSRQNATSKTLDLLFELAETAELKKKLQAIASGEHVNAAEDRAVMHMALRAPKTEKIVVDGHDVVPDVHEVLDAIRALTSNVRDGKLVGATGKQLKNVISIGIGGSYLGPEFVFESLRYEPVAKAAAEGRNLRFLANVDPVDVARATSGLNPEETLVVVVSKTFTTAETMLNARTLRKWLVDDLTKKGSSEADAVAKHMVAASSAVPLVQQFGIDRANIFGFWDWVGGRYSVTSAVGILPLALQYGFDITEKFLAGAHAMDKHLLETPLRNNLPVIMGLRGVWNSSFLGHSSRALLPYSQALLRFAAHIQQVDMESNGKRVTVEGVDLPFQAGEVNFGEPGTNGQHSFYQLIHQGRVVPCDFLGFCESQNPVQLAGEPVSNHDELMSNFFAQPDALARGKSIEDLKAEGVPEKLQNHKLFPGNRPSISLLFKKLDAFSTGQLLALYEHRTVVQGAIWGINSFDQWGVELGKVLAKQARAQLSASRTENAPVKGFNSATTSMLEAYLAHKA

SEQ ID NO: 15122 - protein, 215 aa, Glycine max
  unsure (1)..(215): unsure at all Xaa locations
PRVRFSLWGGGFLYGWGVIEGSGGXVIDLSSGIAGFTAAYWGXLWMGWSGFNGGAPYAANIDSSIAVLNTNICAATSLLVWTSLDVIFFGKPSVIGAVQGMMTGLVCITPGAGLVQSWAAIVMGXILSGSIPWVTMMILHKKSSLLQKVDDTLGVFHTHAVAGLLGGLLTGLLAEPQLCRLILPVTNSRGXAFYGGSGGIQLFKQLVAAWFNSWM

SEQ ID NO: 15123 - protein, 401 aa, Lactobacillus plantarum WCFS1
MYMELSRKVMQVQPSATLKISATAKQMMADGVDVINLGIGEPDFQTPDNIKQAAIDSIQNGQASFYTPATGLPALKQAISQRIEADHHYHFDPNQIVVTDGAKMALFTLFQVILNPDDEVLLPVPYWVSYSEQVKLAGGVPVEVSTDEQLRFTTADLEAQRTPKTKALVLNSPQNPSGLVFSRAELTAIVNWAVEHDVLVIADEIYEKLLYNGNEFTSVLELDDANMDHVVLINGVSKAYSMTGWRIGYAAGPQTIMAKMGVVLGHAASNPAAVSQYAAIEAFSGDQSSVETMRQGFEARLNELYPLIERLPGFKMPAGKPAGAFYLFPDITEALRLTGYADAPAFVTAVLLEAHVGLVPGEAFGMPGCLRLSYATDIDSLREAHRRLQKFMTEKIAEQAK

SEQ ID NO: 15124 - protein, 556 aa, Phytophthora infestans
MINDTPAWKALAEHAAEIKSTHLRELLNDDARNAAMRTEQQGIYLDFSRQNATSKTLDLLFELAETAELKKKLQAIASGEHVNATEDRAVMHMALRAPKTEKIVVDGHDVVPDVHEVLDAIRAFTSNVRDGKLVGATGKQLKNVISIGIGGSYLGPEFVFESLRYEPVAKAAAEGRNLRFLANVDPVDVARATSGLNPEETLVVVVSKTFTTAETMLNARTLRKWLVDDLTKKGSSEADAVAKHMVAASSAVPLVQQFGIDRANIFGFWDWVGGRYSVTSAVGILPLALQYGFDITEKFLAGAHAMDKHLLETPLRNNLPVIMGLLGVWNSSFLGHSSRALLPYSQALLRFAAHIQQVDMESNGKRVTVEGVDLPFQAGEVNFGEPGTNGQHSFYQLIHQGRVVPCDFLGFCESQNPVQLAGEPVSNHDELMSNFFAQPDALARGKSIEDLKAEGVPEKLQNHKLFPGNRPSISLLFKKLDAFSTGQLLALYEHRTVVQGAIWGINSFDQWGVELGKVLAKQVRAQLSAPRTENAPVEGFNSATTSMLEAYLAHKA

SEQ ID NO: 15125 - protein, 155 aa, Mesorhizobium loti MAFF303099
MKARFCAALLVLMLALGFAGTALAVKPDEMLADPALEARARALSEGLRCMVCQNQSIDESDADLARDLRILVRQRLVAGDTDQQVMDYVVSRYGEFVLLKPRFDLRNALLWGTPVLLLLVGGVFIVLTARSRRTLATKTLSADEQAALDAILHRD

SEQ ID NO: 15126 - protein, 556 aa, Phytophthora infestans
MINDTPAWKALAEHAAEIKFTHLRELLNDDARNAAMRTEQQGIYLDFSRQNATSKTLDLLFELAETAELKKKLQAIASGEHVNATEDRAVMHMALRAPKTEKIVVDGHDVVPDVREVLDAIRAFTSNVRDGKLVGATGKQLKNVISIGIGGSYLGPEFVFESLRYEPVAEAAAEGRNLRFLANVDPVDVARATSGLNPEETLVVVVSKTFTTAETMLNARTLREWLVDDLTKKGSSEADAVAKHMVAASSAVPLVQQFGIDRANIFGFWDWVGGRYSVTSAVGILPLALRYGFDITEKFLAGAHAMDKHLLETPLRNNLPVIMGLLGVSNSSFLGHSSRALLPYSQALLRFAAHIQQVDMESNGKRVTVEGVDLPFQPGEVNFGEPGTNGQHSFYQLIHQGRVVPCDFLGFCESQNPVQLAGEPVSNHDELMSNFFAQPDALARGKSIEDLKAEGVPEKLQNHKLFPGNRPSISLLFKKLDAFSTGQLLALYEHRTVVQGAIWGINSFDQWGVELGKVLAKQVRAQLSASRTENAPVKGFNSTTTSMLEAYLAHKA

SEQ ID NO: 15127 - protein, 556 aa, Phytophthora mirabilis
MINDTPAWKALAEHAAEIKSTHLRELLNDDARNAAMRTEQQGIYLDFSRQNATSKTLDLLFELAETAELKKKLQAIASGKHVNATEDRAVMHMALRAPKTEKIVVDGHDVVPDVHEVLDAIRAFTSNVRDGKFVGATGKQLKNVISIGIGGSYLGPEFVFESLRYEPVAKAAAEGRNLRFLANVDPVDVARATNGLNPEETLVVVVSKTFTTAETMLNARTLRKWLVDDLTKKGSSEADAVAKHMVAASSAVPLVQQFGIDRANIFGFWDWVGGRYSVTSAVGILPLALQYGFDITEKFLAGAHAMDKHLLETPLRNNLPVIMGLLGVWNSSFLGHSSRALLPYSQALLRFAAHIQQVDMESNGKRVTVEGVDLPFQAGEVNFGEPGTNGQHSFYQLIHQGRVVPCDFLGFCESQNPVQLAGEPVSNHDELMSNFFAQPDALARGKSIEDLKAEGVPEKLQNHKLFPGNRPSISLLFKKLDAFSTGQLLALYEHRTVVQGAIWGINSFDQWGVELGKVLAKQVRAQLSASRTENAPVKGFNSATTSMLEAYLAHKA

SEQ ID NO: 15128 - protein, 366 aa, Pyrococcus furiosus DSM 3638
MEPLHYPIYLTAVFKQIGDAYLTERGTELKYSREENPTVRNLEDKLAKLENAENALAFNSGMGAISTLFLSLLKAGDEIVMSMEGYGTTIEVPKLLEKFGVRVRLAYPSAEKICETITSNTTLVFIETMTNPTLKVIDVREVAKKCREEEITLIVDNTFVTPILYRPLEDGVNFVVHSLTKYIAGHNDVTGGVILWNGKFLNDLWDWRRRLGTIIQPFDAWMVERGMRTLNVRFEKQSKNALAIAEFLQDHPKVRKVHYPGLPSDPYHGIARRLFRKDLYGGVVSFDLGSEKSALAFLRSLKKIFPSPSLGGVESLATYPVKSAVKNMEKETRDLLGITDGLIRLSVGIEEVDELIEDLDRALKGC

SEQ ID NO: 15129 - protein, 381 aa, Medicago sativa
MARIELSRHMPLVTLIVLVLCTTPPIFASTHCDFPAIFSFGASNVDTGGLAAAFRAPPSPYGQTYFNRSTGRFSDGRIIIDFIAQSFRLPYPSPYLNSLGSNFTHGANFATAGSTINIPTSILPKGILSPFSLQIQYIQFKDFISKTKLIRDQGGVFATLVPKEDYFSKALYVFDIGQNDLTIGFFGNKTIQQVNATVPDLVNNYIENIKNIYNLGARSFWIHSTGPKGCAPVILANFPSAIKDSYGCAKQYNEVSQYFNLKLKEALAQLRSDLPLAAITYVDIYSPKYSLFTNPKKYGFELPYVACCGYGGEYNIGAGCGATINVNGTKIVAGSCKNPSTRITWDGTHYTEEANKFVFYQISTGVFNDPPISLDMACYRK

SEQ ID NO: 15130 - protein, 311 aa, Bacillus coagulans
MDMLSAYSAVNQGHRHPKIIEALKNQADKVTLTSRAFHNELLGPWTKRMAKLTKKDKVLPMNTGVEAVETAIKAARRWAYQVKGVTENQAEIIAADGNFHGRTLNAISLSNDPDATKNYGPFVPGINKVSYGDINAIEKAITENTAAIILEPIQGEAGIIIPPEGYLKKVRELCSERNILFIADEVQTGFARTGKMFACEWENVEPDIYVMGKALGGGVFPISAIAANNEIMDVFTPGSHGSTFGGNPLACAVSMAAIDVIEEENLVNKSLESGKYFADKLRAINFEGIKEVRARGLFIGMEFHQPVRAIC

SEQ ID NO: 15131 - protein, 542 aa, Corynebacterium efficiens YS-314
MANDITTTAAWQSLTERYEAFQGTTLRELFQDGGRAEKLSFDAAGLRVDLSKNLLDDAILTDLVALAEQAGLTDRIEAMFRGEHINNTEDRAVLHTALRLPVEESLEVDGQDVAADVHEVLGRMRDFATALRSGAWLGYTGRTIKKVVNIGIGGSDLGPAMATKALRAYATAGITAEFVSNVDPADMVSVLEDLDAESTLFVIASKTFTTQETLANANAAKNWLIEQLGSEEAVSKHFVAVSTNAEKVTAFGINPENMFGFWDWVGGRYSVDSAVGLSLMAVIGPRDFMRFLGGFRAMDEHFRYTDFGQNVPVLMALLSVWYTDFFGAETHAVLPYSEDLSRFAAYLQQLTMESNGKSVRRDGSPVTTGTGEIYWGEPGTNGQHAFFQLIHQGTRLIPADFIGFARPKQDLPAGEKSMHDLLMSNFFAQTKVLAFGKTAEEIAAEGVDDNLINHKVMPGNRPTTTILAEELTPAVLGALIALYEHIVFVQGVIWDINSFDQWGVELGKQQASDLAPAVSGEVEVDSGDSSTDALIRWYRTNR

SEQ ID NO: 15132 - protein, 265 aa, Triticum aestivum
  unsure (1)..(265): unsure at all Xaa locations
MAERNLSQIISQLKHSPSMSYTDANALLSKAKLALLKLNALTPSPSTPTQLLPLARETYEQGALFAIRARNPEAFTRYVQQLQPFYELPASVLPPNLLERNKVTGLSLLLLLTQGRYGEFHTELESLENREGGGGDVESDRYLGYPIRLERWLMEGSYDRVWKAMKSSEVPCDEYSVFSEILKNQIRSEIASSSERAYPSLPISSTKSLLFLDSEGDVISFAHHRGWIVRDGHIYFPDAAEGENGDQNKEMSQMVIXDALGYARE

SEQ ID NO: 15133 - protein, 497 aa, Oryza sativa
MASPTRPGPYMPRPPAVPEWLNTGDNGWQLAAATFVGLQSMPGLVVLYGSIVKKKWAVNSAFMALYAYASTLIVWVLVGFRMAFGDRLLPFWGKAGAALTEGFLVARASVPATAHYGKDGALESPRTEPFYPEASMVLFQFELAAITLVLLAGSLLGRMNIKAWMAFTPLWLLFSYTVCAFSLWGGGFLYQWGVIDYSGGYVIHLSSGIAGFTAAYWVGPRLKSDRERFSPNNILLMIAGGGLLWLGWAGFNGGAPYAPNITASIAVLNTNVSAAASLLTWTCLDVIFFGKPSVIGAVQGMMTGLVCITPGAGLVHTWAAILMGICGGSLPWFSMMILHKRSALLQKVDDTLAVFHTHAVAGLLGGFLTGLFALPDLTAVHTHIPGARGAFYGGGIAQVGKQIAGALFVVVWNVVATTVILLGVGLVVPLRMPDEQLKIGDDAAHGEEAYALWGDGERFDVTRHEGARGGAWGAAVVDEAMDHRLAGMGARGVTIQL

SEQ ID NO: 15134 - protein, 609 aa, Mycobacterium tuberculosis CDC1551
MSYVLATPEMVAAAANNLAQIGSTLSAANAAALAPTTGVLAAGADEVSAAVASLFSGHAQAYQTLGTQAAAFHERFIQALSTAAGAYGSAEAANASPLQQALNVINAPTQTLLGRPLIGNGTNGAPGTGQAGGPGGLLYGNGGNGGSGGVGQAGGAGGSAGLIGIGGTGGAGGAGAVGGVGGNGGWLYGNGGAGGLGGTGVAGVNGGMGAAGGAGGNAYLFGSGGAGGQGGMGAAGADGVNPTPTGTADAGSTGTDQTLGGNAIGGNGGPGDAGDAMTSGGAGGSGGNAVSTVNGDAVGGEGGKGGEGAYGGAGGAGGSAASIGNAAIGGNGGAGGNAQAPGGVGGAGGEGGDAQVGTNSPSNAEAGNGGSGGNGFDSFASGGTGGAGGTGGAGGRGGLLIGDGGAGGAGGVGGTGGSGAPGGGGGAGGDGGAANTDSAGSSRKAFGGDGGVGGDGASALGTGGEGGIGGQGGNGGAGGLLIGNGGAGGVGGTAGAGGTGGSGGAGGAGGAGGGGTNSGPGAAFGGNGNTGGNGGNGGAPGALGGKGGSGGLIGRAGSDGGVGAGGAGGAGGAGGTGGEGGTGGDGKTTDGNPGMGGSPGSAGQPGQPG

SEQ ID NO: 15135 - protein, 661 aa, Bacillus cereus ATCC 14579
MEQLKHHVTDNQRKHALTTNQGVKIAEDEFSLKMGLRGPTLMEDFHFREKMTHFDHERIPERIVHARGVGVHGYFQLYESLEAYTKADFLTNPSKKTPVFVRFSTVQGSKGSNDTVRDVRGFATKFYTDEGNYDLVGNNMPVFFIQDAIKFPDFVHAVKPEPHNDIPQGASAHDTFWDFVAHNPESTHMVMWQMSDRAIPRSLRMMEGFGVHTFRLINTAGKAHFVKFHWKPTLGVHSLVWDEAQRIAGKNPDFHRQDLYEAIEKGDYPEWELGLQLIPEEDEHKFDFDILDPTKLWPEEEVPVKLVGKMTLNKNVDNFFAETEQVAFHPGHVVPGIDFSNDPLLQGRLFSYTDTQLSRLGGPNFHQIPINQPVCPFHNNQRDGMHQMQIHRGQTSYHPNGLNNNQPATVQAEQGGYEHYQEKIDGHKIRGRSKSFLNFYSQAKLFYNSMSPIEKQHIKEAFCFEVGKCKSDMVKANVIALLNHVDRQLAQEVANIVGAPLPKENHEVNSDAKSPALSMSNTIFKSDSKNVAILLNGDPSVSLLSEWIQAFAQHRMNYSIIDNKIYHFNDSIKVTDTYTTTDSSLFDAVLVFSSESVIHPPVLEFTETTFKHFKPIAHVLSNPHALDNSKIKLDGAGVYNLTNTSIESFIEGIAQGRFWNR

SEQ ID NO: 15136 - protein, 133 aa, Oryza sativa
LELLKTAIEKAGYTGMVVIGMDVAASEFYSDKDQTYDLNSKEENHDGSQKISGDSLKNVYKCFGSEYPIVAIEDPFDQDDWVHYAKMTEEIGEHVQIVGDDLLVTNPTRVAMAITEKSCSALLLKDNQIGSVT

SEQ ID NO: 15137 - protein, 643 aa, Mycobacterium avium subsp. paratuberculosis str. k10
MCGLLAFVAARAGAVGADDAIARASHLMRHRGPDEPGTWAGADGSVVFGFNRLSIIDIAHSHQPLRWGPPETPDRYELVFNGEIYNYLELRDELAARHGAVFATDGDGEAIVAGFHHWGTDVLTRLRGMFAFALWDTVTRELFCARDPFGIKPLFVATGTGGTAVASEKKCLLELAELIGFDTAIDERAVQHYTVLQYVPEPETLHRGVRRLESGCYARIRPGAAPDVTRYFVPRFAAVPITRDTEQARYDEITAVLEDSVAKHMRADVTVGAFLSGGIDSTAIAALAIRHNPRLITFTTGFEREGFSEIDVAVASAEAIGARHIAKVVHPDEFVAALPEIVWYLDEPVADPALVPLFFVAREARKHVKVVLSGEGADELFGGYTIYREPLSLRPFDYLPRPVRRSMGKVSRPLPDGMRGKSLLHRGSLTLEERYYGNARSFSDTQLRDVLPGFRAEWTHTDVTAALYAQSIGWDPVARMQHIDLFTWLRGDILVKADKMTMANSLELRVPFLDPEVFAVASRLPVEAKITRTTTKYALRRALEPIVPAHVLHRPKLGFPVPIRHWLRAGELQDWAYSMVASSQAGHLVDLGAVRRMLDEHRNGVSDHSRRLWTVLIFMLWHAIFVEHSVVPQISEPVYPVQL

SEQ ID NO: 15138 - protein, 556 aa, Phytophthora infestans
MINDTPAWKALAEHAAEIKSTHLRELLNDDARNAAMRTEQQGIYLDFSRQNATSKTLDLLFELAETAELKKKLQAIASGEHVNATEDRAVMHMALRAPKTEKIVVDGHDVVPDVHEVLDAIRAFTSNVRDGKFVGATGKQLKNVISIGIGGSHLGSEFVFESLRYEPVAKAAAEGRILRLLANVDPVDVARATSGLNPEETLVVVVSKTFTTAETMLNARTLRKWLVDDLTKKGSSEAGAVAKHMVAASSAVPLVQQFGIDRANIFGFWDWVGGRYSVTSAVGILPLALQYGFDITEKFLAGAHAMDKHLLETPLRNNLPVIMGLLGVWNSSFLGHSSRALLPYSQALLRFAAHIQQVDMESNGKRVTVEGVDLPFQAGEVNFGEPGTNGQHSFYQLIHQGRVVPCDFLGFCESQNPVQLAGEPVSNHDELMSNFFAQPDALARGKSIEDLKAEGVPEKLQNHKLFPGNRPSISLLFKKLDAFSTGQLLALYEHRTVVQGAIWGINSFDQWGVELGKVLAKQVRAQLSASRTENAPVKGFNSATTSMLEAYLAHKA

SEQ ID NO: 15139 - protein, 556 aa, Phytophthora infestans
MINDTPAWKAQAEHAAEIKSTHLRELLNDDARNAAMRTEQQGIYLDFSRQNATSKTLDLLFELAETAELKKKLQAIASGEHVNATEDRAVMHMALRAPKTEKIVVDGHDVVPDVHEVLDAIRAFTSNVRDGKFVGATGKQLKNVISIGIGGSYLGSEFVFESLRYEPVAKAAAEGRILRLLANVDPVDVARATSGLNPEETLVVVVSKTFTTAETMLNARTLRKWLVDDLTKKGSSEADAVAKHMVAASSAVPLVQQFGIDRANIFGFRDWVGGRYSVTSAVGILPLALQYGFDITEKFLAGAHAMDKHLLETPLRNNLPVIMGLLGVWNSSFLGHSSRALLPYSQALLRFAAHIQQVDMESNGKRVTVEGVDLPFQAGEVNFGEPGTNGQHSFYQLIHQGRVVPCDFLGFCESQNPVQLAGEPVSNHDELMSNFFAQPDALARGKSIEDLKAEGVPEKLQNHKLFPGNRPSISLLFKKLDAFSTGQLLALYEHRTVVQGAIWGINSFDQWGVELGKVLAKQVRAQLSASRTENAPVKGFNSATTSMLEAYLAHKA

SEQ ID NO: 15140 - protein, 556 aa, Phytophthora infestans
MINDTPAWKALAEHAAEIKSTHLRELLNDDARNAAMRTEQQGIYLDFSRQNATSKTLDLLLELAETAELKKKLQAIASGEHVNATEDRAVMHMALRAPKTEKIVVDGHDVVPDVHEVLDAIRAFTSNVRDGKFVGATGKQLKNVISIGIGGSYLGSEFVFESLRYEPVAKAAAEGRILRLLANVDPVDVARATSGLNPEETLVVVVSKTFTTAETMLNARTLRKWLVDDLTKKGSSEADAVAKHVVAASSAVPLVQQFGIDRANIFGFWDWVGGRYSVTSAVGILPLALQYGFDITEKFLAGAHAMDKHLLETPLRNNLPVIMGLLGVWNSSFLGHSSRALLPYSQALLRFAAHIQQVDMESNGKRVTVEGVDLPFQAGEVNFGEPGTNGQHSFYQLVHQGRVVPCDFLGFCESQNPVQLAGEPVSNHDELMSNFFAQPDALARGKSIEDLKAEGVPEKLQNHKLFPGNRPSISLLFKKLDAFSTGQLLALYEHRTVVQGAIWGINSFDQWGVELGKVLAKQVRAQLSASRTENAPVKGFNSATTSMLEAYLAHKA

SEQ ID NO: 15141 - protein, 241 aa, Halobacterium sp. NRC-1
MISLDDAVTARLETHGERFEVLVDPDAALEMRRDEFDGELTDVIAARDVFENASRGDRPAESDLETVFGTTEPLEIIPEVIGQGEIQITADQREAMQQRKKRSLINTISRNAINPQMDGAPHPPDRIESALDEAGFTVDPMTPADEQVDDALEALRPVIPIRFEEMTVAVQLPADYAGSGQAKLREFGELEREEWQADGSWVGVITFPAGMQDEFYGRVNEVSEGNGETSVVKDKDELKTR

SEQ ID NO: 15142 - protein, 87 aa, Oryza sativa
  unsure (1)..(87): unsure at all Xaa locations
HRPSSSINGPLWITNSGAPEWNNNNSITIDSRGPILLEXYNLDAKLATFYRERIPDRMAYACRDQXARAIYEVTQXITHLTCADFLR

SEQ ID NO: 15143 - protein, 317 aa, Erwinia sp. SK-30-7
  unsure (1)..(317): unsure at all Xaa locations
CIGCHTCAVTCKNVWTSREGMEYAWFNNVETKPGTGYPTDWENQEKWKGGWIRKINGKLQPRMGNRAMLLGKIFANPHLPGIDDYYEPFDFDYQHLHNAPAGKHQPIARPRSLITGQRMNKIEKGPNWEXDLGGEFEKLSKDQNFQNMQKAMYGQFENTFMAYLPRLCEHCLNPACAATCPSGAIYKREEDGIVLIDQDKCRGWRMCITGCPYKKIYFNWKSGKSEKCIFCYPRIEAGQPTVCSETCVGRIRYLGVLLYDADAIEQAASTENEKDLYERQLGIFLNPNDPAVIEQALKECVPRSVIDAAQQSPVYKM

SEQ ID NO: 15144 - protein, 556 aa, Phytophthora infestans
MINDTPAWKALAEHAAEIKSTHLRELLNDDARNAAMRTEQQGIYLDFSRQNATSKTLDLLFELAETAELKKKLQAIASGEHVNATEDRAVMHMALRAPKTEKIVVDGHDVVPDVHEVLDAIRAFTSNVRDGKLVGATGKQLKNVISIGIGGSYLGPEFVFESLRYEPVAKAAAEGRNLRFLANVDPVDVARATSGLNPEETPVVVVSKTFTTAETMLNARTLRKWLVDGLTKKGSSEADAVAKHMVAASSAVPLVQQFGIDRANIFGFWDWVGGRYSVTSAVGILPLALQYGFDITEKFLAGAHAMDKHLLETPLRNNLPVIMGLLGVWNSSFLGHSSRALLPYSQALLRFAAHIQQVDMESNGKRVTVEGVDLPFQAGEVNFGEPGTNGQHSFYQLIHQGRVVPCDFLGFCESQNPVQLAGEPVSNHDELMSNFFAQPDALARGKSIEDLKAEGVPEKLQNHKLFPGNRPSISLLFKKLDAFSTGQLLALYEHRTVVQGAIWGINSFDQWGVELGKVLAKQVRAQLSASRTENAPVKGFNSATTSMLEAYLAHKA

SEQ ID NO: 15145 - protein, 90 aa, Haloferax denitrificans
  unsure (1)..(90): unsure at all Xaa locations
CIGCQTCTVACKSLWTEGGGRDYMYWNNVETKPGKGYPRDWEDSGGGWKDAEHTERKPGDIPEQADYGDAWSFNHEEVMYNGGVQPLXPT

SEQ ID NO: 15146 - protein, 556 aa, Phytophthora infestans
MINDTPAWKALAEHAAEIKSTHLRELLNDDARNAAMRTEQQGIYLDFSRQNATSKTLDLLFELAETAELKKKLQAIASGEHVNTTEDRAVMHMALRAPKTEKIVVDGHDVVPDVHEVLDAIRAFTSNVRDGKLVGATGKQLKNVISIGIGGSYLGPEFVFESLRYEPVAKAAAEGRNLRFLANVDPVDVARATSGLNPEETLVVVVSKTFTTAETMLNARTLRKWLVDGLTKKGSSEADAVAKHMVAASSAVPLVQQFGIDRANIFGFWDWVGGRYSVTSAVGILPLALQYGFDITEKFLAGAHAMDKHLLETPLRNNLPVIMGLLGVWNSSFLGHSSRALLPYSQALLRFTAHIQQVDMESNGKRVTVEGVDLPFQAGEVNFGEPGTNGQHSFYQLIHQGRVVPCDFLGFCESQNPVQLAGEPVSNHDELMSNFFAQPDALARGKSIEDLKAEGVPEKLQNHKLFPGNRPSISLLFKKLDAFSTGQLLALYEHRTVVQGAIWGINSFDQWGVELGKVLAKQVRAQLSASRTENAPVKGFNSATTSMLEAYLAHKA

SEQ ID NO: 15147 - protein, 86 aa, Glycine max
MASSMISSPAVTTVNRAGAGMVAPFTGLKSMAGFPTRNTNSDITCVASNGGRVRWVRVWPPIGEREWESVCSLPNVPDRAVRGDVQ

SEQ ID NO: 15148 - protein, 564 aa, Zea mays
MAAAAVTSNGGAVAANGPAPGRLASVYSEVQTNRLLHALPLPSVLRSNFSVVDGPASSAAGNPDEIAKLFPNLFGQPSASLVPSAEPAATRPLKVGVVLSGGQAPGGHNVICGIFDYLQERAKGSTLYGFKGGPAGIMKCKYVELTSDFVYPYRNQGGFDMICSGRDKIETPEQFKQAEDTANKLDLDGLVVIGGDDSNTNACLLGEYFRSRNMKTRVIGCPKTIDGDLKCKEVPTSFGFDTACKIYSEMIGNVMTDARSTGKYYHFVRLMGRAASHITLECALQTHPNAALIGEEVAAKKQTLKNVTNYITDIICKRADLGYNYGVILIPEGLIDFIPEVQKLIAELNEILAHDVVDEAGAWKSKLQPESRELFEFLPNTIQEQLMLERDPHGNVQVAKIETEKMLISMVETELEKRKAEGRYSAHFRGQAHFFGYEGRCGLPTNFDSNYCYALGYGAGALLQSGKTGLISSVGNLAAPVEEWTVGGTALTSLMDVERRHGKFKPVIKKAMVELDAAPFKKYASMRDEWAIKNRYISPGPIQFSGPGSNDSNHTLMLELGAAL

SEQ ID NO: 15149 - protein, 545 aa, Dechloromonas aromatica RCB
MAHPLAGQAAPLASLTDIPALLAAYHQQPDINEPAQRVAFGTSGHRGCAFNGSFNEAHILAIAQAVAEYRLQAGIRGPLFLGMDTHALSAPAQQNVLEVLAANGVLIHLQENQGYTPTPVISRAILVHNAQPAVERADGIVITPSHNPPQDGGIKYNPPHGGPADTDVTGWIEQRANALMADGNRGVKRLPYGQALAAATTRAVDLMTPYIAELGSVIDMQSIRRAKLRIGVDPMGGAAVAYWKPIAEHYGLDITVVNPAVDPTFGFMTLDHDGKIRMDCSSPYAMASLVALKDKFDIAWGNDADVDRHGIVTPSLGLMNPNHYLAVAINYLLAHRPQWPHSSAVGKTLVSSGLIDRVVKGLDRTLLEVPVGFKWFSAGLLDGSICFGGEESAGASFLRRDGSVWTTDKDGIILGLLAAEITAVTGRDTGSHYLDLASRYGTPYYLRIDAAATPAQKVAFKQLTGDRVSAATLAGEPITARLTRAAGNNAAIGGLKVTTENGWFAARPSGTEDIYKIYAESFKSEAHLQQLVAEAGTIVTAALAA

SEQ ID NO: 15150 - protein, 175 aa, Triticum aestivum
MAPAVMASSATSVAPFQGLKSTAGLPVSRRSNGASLGSVSNGGRIRRMQVWPIEGIKKFETLSYLPPLSTEALLKQVDYLIRSKWVPCLEFSKVGFIFREHNASPGYYDGRYWTMWKLPMFGCTDATQVINEVEEVKKEYPDAYVRIIGFDNMRQVQCVSFIAFKPPGCEESGKA

SEQ ID NO: 15151 - protein, 327 aa, Triticum aestivum
  unsure (1)..(327): unsure at all Xaa locations
QENWRILDFFSHHPESLHMFTFLFDDIGVPADYRHMDGSGVNTYTLVNRAGKAHYVKFHWKPTCGVKSLLEEEAVTVGGTNHSHATKDLTDSIAAGNYPEWTFYIQTIDPDHEDRFDFDPLDVTKTWPEDVVPLQPVGRLVLNRNIDNFFAENEQLAFCPGIIVXPGVYYSDDKLLQTRIFSYSDTQRHRLGPNYLLLPANAPKCSHHNNHYDGLMNFMHRDEEVDYFPSRFDPAKHAPRYPIPSRTLNGRREKMVIEKENNFKQPGERYRSMDPARQERFINRWIDALSDPRLTHEIKAIWLSYWSQADKSLGQKLASRLSSKPSM

SEQ ID NO: 15152 - protein, 163 aa, Acetabularia acetabulum
WFQGTADAVRQQIRYVEEDKGDEVLILSGDQLYRMDYVPMIQMHRETGADATIAVIPIPTEETYGLGLAVSMTMAGSKGLSKTQDRGRACPGEDVGRLAEKRGVKDTNRQFLGNMGIYLFKKDSLLELLNAPPKATDFGKEIFPRCVDTHKVMTYVFEDYWED

SEQ ID NO: 15153 - protein, 537 aa, Arabidopsis thaliana
MDALSQAISSGISVPYKNNSSSLVPSHGLTSLILRKSRSPVNPSSRSRVSVRASEIQHSKTSASSIDLSDPDWKLKYEKDFEQRFSIPHITDVLPDAEAIRSTFCLKMRSPTEDFVGGYPSDEEWHGYINNNDRVLLKVISYSSPTSAGAECLDHDCSWVEQWIHRAGPREKIYFRPEEVKAAIITCGGLCPGLNDVIRHIVITLEIYGVKNIVGIPFGYRGFSDKDLTEMPLSRKVVQNIHLSGGSLLGVSRGGPSVSEIVDSMEERGINMLFVLGGNGTHAGANAIHNECRKRKIKVAVVGVPKTIDNDILHMDKTFGFDTAVEEAQRAINSAYIEAHSAYHGIGVVKLMGRNSGFIAMQASLASGQVDICLIPEVPFNLHGPNGVLKHLKYLIETKGSAVICVAEGAGQNFLEKTNAKDASGNAVLGDFGVYIQQETKKYFKEISTPIDVKYIDPTYMIRAVRANASDGILCTVLGQNAVHGAFAGYSGITVGIINTHYAYLPITEVIAYPKSVDPNSRMWHRCLTSTGQPDFI

SEQ ID NO: 15154 - protein, 175 aa, Triticum aestivum
MAPAVMASSATSVAPFQGLKSTAGLPVSRRSNGASLGSVSNGGRIRCMQVWPIEGIKKFETLSYLPPLSTEALLKQVDYLIRSKWVPCLEFSKVGFIFREHNASPGYYDGRYWTMWKLPMFGCTDATQVINEVEEVKKEYPDAYVRIIGFDNMRQVQCVSFIAFKPPGCEESGKA

SEQ ID NO: 15155 - protein, 195 aa, Thellungiella halophila
MTKMGFKPDSNPSPNPNESNAKEIRYRGVRKRPWGRYAAEIRDPGKKTRVWLGTFDTAQQAARAYDAAAREFRGAKAKTNFPTFLELNAAKDGGFARSPSQSSTVDSVSPTSARLVTPPQLELSLGGGGGGACYQIPVARRPVYFYNMTTFPAAAAATCGVQSESDSSSVVDFECGAEKKYRPLDLDLNLAPPAE

SEQ ID NO: 15156 - protein, 173 aa, Triticum aestivum
MAPAVMASSATTVAPFQGLKSTAGLPVSRRSSEPRPRHNGGRIRCMQVWPIEGIKKFETLSYLPPLSTEALLKQVDYLIRSKWVPCLEFSKVGFVFREHNSSPGYYDGRYWTMWKLPMFGCTDATQVLNEVEEVKKEYPDAYVRVNGFDNLRQVQCVSFIAFRPPGCEESGKA

SEQ ID NO: 15157 - protein, 231 aa, Zea mays
MMNCAGGGDPVEDFLISGAVDDEDLAIFCDGGLGIEGVNGDACGFEQSNLGKRSRDEPCSSGLKSKACREKMRRDKLNDRFLELSSVMNPGKQAKLDKANILSDAARMVAQLRGEAEKLKESNEKLRENIKDLKEEKNELREEKVRLKVEKDRLEQQVKAMSVAPTGYVPHLPHPASYHPAAFAPFVPPQQAAGNKSAPIPAPFPGMAMWQWLPPTIVDTTQDPKLWPPNA

SEQ ID NO: 15158 - protein, 378 aa, Thellungiella halophila
MLSTLMKLLSACLWPSSSGKSSDSTGKQDGLLWYKDSGQHLLGEFSMAVVQANNLLEDQSQVESGPLSTLDSGPFGTFIGIYDGHGGPETSRFVNDHLFQHLKRFAAEHASMSVDVIRKAYEATEEGFLGVVTKQWPVKPQIAAVGSCCLVGVICGGRLYIANVGDSRAVLGRAMNATGEVIALQLSAEHNVSIESVRQEMRSLHPDDSHIVVLKHNVWRVKGLIQISRSIGDIYLKKAEFNKEPLYTKYRLREPIKRPILSGEPSITEHEIQPQDQFLIFASDGLWEQMSNQEAVDIVQNHPRNGIARRLVKMALQAAAKKREMRYSDLKKIERGVRRHFHDDITVVVIFLDTNVVSSAKGPSLSIRGGGMTFPKKL

SEQ ID NO: 15159 - protein, 429 aa, Salmonella typhimurium LT2
MKALNREVIDYFKEHVNPGFLEYRKSVTAGGDYGAVEWQAGSLNTLVDTQGQEFIDCLGGFGIFNVGHRNPVVVSAVQNQLAKQPLHSQELLDPLRAMLAKTLAALTPGKLKYSFFCNSGTESVEAALKLAKAYQSPRGKFTFIATSGAFHGKSLGALSATAKSTFRRPFMPLLPGFRHVPFGNIDAMSMAFSEGKKTGDEIAAVILEPIQGEGGVILPPQGYLTEVRKLCDEFGALMILDEVQTGMGRTGKMFACEHENVQPDILCLAKALGGGVMPIGATIATEEVFSVLFDNPFLHTTTFGGNPLACAAALATINVLLEQNLPAQAEQKGDTLLDGFRQLAREYPNLVHDARGKGMLMAIEFVDNETGYRFASEMFRQRVLVAGTLNNAKTIRIEPPLTLTIELCEQVLKSARNALAAMQVSVEEV

SEQ ID NO: 15160 - protein, 400 aa, Sinorhizobium meliloti 1021
MAFLADALSRVKPSATIAVSQKARELKAKGRDVIGLGAGEPDFDTPDNIKKAAIDAIDRGETKYTPVSGIPELREAIAKKFKRENNLDYTAAQTIVGTGGKQILFNAFMATLNPGDEVVIPAPYWVSYPEMVALCGGTPVFVPTRQENNFKLKAEDLDRAITPKTKWFVFNSPSNPSGAAYSHEELKALTDVLMKHPHVWVLTDDMYEHLTYGDFRFATPVEVEPGLYERTLTMNGVSKAYAMTGWRIGYAAGPLHLIKAMDMIQGQQTSGAASIAQWAAVEALNGPQDFIGRNKEIFQGRRDLVVSMLNQAKGISCPTPEGAFYVYPSCAGLIGKTAPSGKVIETDEDFVSELLETEGVAVVHGSAFGLGPNFRISYATSEALLEEACRRIQRFCAACR

SEQ ID NO: 15161 - protein, 355 aa, Azotobacter vinelandii
MMKAAMFVEPGRIELQDKPIPDVGPDDALVRITTTTICGTDVHILKGEYPVASGLTIGHEPVGIVEKLGSNVKGYSEGQRVIAGAICPSFTSYACQDGYPSQDGGCACHGYKPMGGWRFGNSIDGTQAEYVLVPDAQANLAPVPDGLSDEEVLMCPDIMSTGFAGAEAANIRIGDIVAVFAQGPIGLCATAGAKLRGASTIIAIDGVDERLEIARRLGADVTLNFRKVDVVDEILRLTGGRGVDASIEALGLQSTFESALRVLKPGGALSSLGVYSSDLTIPLGAFHAGLGDNRIVTSLCPGGKERMRRLLNVVASGRVDLKPLVTHQYRLDDIEAAYDLFAHQRDGVLKVAIKP

SEQ ID NO: 15162 - protein, 556 aa, Phytophthora infestans
MINDTPAWKALAEHAAEIKSTHLRELLNDDARNAAMRTEQQGIYLDFSRQNATSKTLDLLFELAETAELKKKLQAIASGEHVNATEDRAVMHMALRAPKTEKIVVDGHDVVPDVHEVLDAIRAFTSNVRDGKLVGATGKQLKNVISIGIGGSYLGPEFVFESLRYEPVAKAAAEGRNLRFLANVDPVDVARATSGLNPEETLVVVVSKTFTTAETMLNARTLRKWLVDDLTKKGSSEADAVAKHMVAASSAVPLVQQFGIDRANIFGFWDWVGGRYSVTSAVGILPLALQYGFDITEKFLAGAHAMDKHLLETPLRNNLPVIMGLLGVWNSSFLGHSSRALLPYSQALLRFAAHIQQVDMESNGKRVTVEGVDLPFQAGEVNFGEPGTNGQHSFYQLIHQGRVVPCDFLGFCESQNPVQLAGEPVSNHDELMSNFFAQPDALARGKSIEDPKAEGVPEKLQNHKLFPGNRPSISLLFKKLDAFSTGQLLALYEHRTVVQGAIWGINSFDQWGVELGKVLAKQVRAQLSASRTENAPVKGFNSATTSMLEAYLAHKA

SEQ ID NO: 15163 - protein, 556 aa, Phytophthora infestans
MINDTPAWKALAEHAAEIKSTHLRELLNDDARNAAMRTEQQGIYLDFSRQNATSKTLDLLFELAETAELKKKLQAIASGEHVNATEDRAVMHMALRAPKTEKIVVDGHDVVPDVHEVLDAIRAFTSNVRDGKLVGATGKQLKNVIPIGIGGSYLGPEFVFESLRYEPVAKAAAEGRNLRFLANVDPVDVARATSGLNPEETLVVVVSKTFTTAETMLNARTLRKWLVDDLTKKGSSEADAVAKHMVAASSAVPLVQQFGIDRANIFGFWDWVGGRYSVTSAVGILPLALQYGFDITEKFLAGAHAMDKHLLETPLRNNLPVIMGLLGVWNSSFLGHSSHALLPYSQALLRFAAHIQQVDMESNGKRVTVEGVDLPFQAGEVNFGEPGTNGQHSFYQLIHQGRVVPCDFLGFCESQNPVQLAGEPVSNHDELMSNFFAQPDALARGKSIEDLKAEGVPEKLQNHKLFPGNRPSISLLFKELDAFSTGQLLALYEHRTVVQGAIWGINSFDQWGVELGKVLAKQVRAQLSASRTENAPVKGFNSATTSMLEAYLAHKA

SEQ ID NO: 15164 - protein, 556 aa, Phytophthora infestans
MINDTPAWKALAEHAAEIKSTHLRELLNDDARNAAMRTEQQGIYLDFSRQNATSKTLDLLFELAETAELKKKLQAIASGEHVNATEDRAVMHMALRAPKTEKIVVDGHDVVPDVHEVLDAIRAFTSNVRDGKFVGATGKQLKNVISIGIGGSYLGSEFVFESLRYEPVAKAAAEGRILRLLANVDPVDVARATSGLNPEETLVVVVSKTFTTAETMLNARTLRKWLVDDLTKKGSSEADAVAKHMVAASSAVPLVQQFGIDRANIFGFWDWVGGRYSVTSAVGILPLALQYGFDITEKFLAGAHAMDKHLLETPLRNNLPVIMGLLGVWNSSFLGHSSRALLPYSQALLRFAAHIQQVDMESNGERVTVEGVDLPFQAGEVNFGEPGTNGQHSFYQLIHQGRVVPCDFLGFCESQNPVQLAGEPVSNHDELMSNFFAQPDALARGKSIEDLKAEGVPEKLQNHKLFPGNRPSISLLFKKLDAFSTGQLLALYEHRTVVQGAIWGINSFDQWGVELGKVLAKQVRAQLSASRTENAPVKGFNSATTSMLEAYLAHKA

SEQ ID NO: 15165 - protein, 636 aa, Vibrio cholerae
MCGVAGFISKRLSPVDCLTSMVGSIMHRGPNDSGLWVDDDFGVCLAHARLSIQDLSSAGHQPMHSKSERYVMIFNGEIYNHLTLREELIEIVPSYWNGHSDTETLLAGFEVWGIEQTIQKCVGMFAIVLWDKVLKQLILIRDRFGEKPLYYGWQRDTFLFASELKALKAHPSFEGSINRQALSHFFRLNYIPTPLSIYEGIFKLEPGVIAVFSHEGQLLSKQTFWDASHAVSLQNFSDHDAVDKLDDLIKQSIQDQALSDVPLGAFLSGGVDSSTVVGILQSLSTRPVKTFTIGFDHADFNEASEASDVAKHLGTDHVELIVSAEDALAIINQLPVMYDEPFADASQVPTFLVSKLAKKEVTVCLSGDGGDELFCGYNRYHYTAKVWSYLEKIPFPIRKMLSVFLLTLSPSSWDVLSKTLGLNTRLPNLGNKIQKGAQALKARDIEDLYTRVVSNWDLDEPLVKNTAVEKLPFLSDLTELSHLNDLEKMMLWDKQSYLMDDVLVKTDRATMACSLEGRVPLLDHRIAEFAASLPIHLKYRGGKGKWLLREVLYRYVPKKLIERPKKGFSLPIAEWLRGPLKDWANVLLDSDRIDKEGFLSSELVQKKWREHLAGKRDWSSQLWSVLMFQLWLEKNK

SEQ ID NO: 15166 - protein, 556 aa, Phytophthora cactorum
MINDTPAWKALAEHAAEIKSTHLRELLNDDARNAAMRTEQQGIYLDFSRQNATSKTLDLLFELAETAELKKKLQAIASGEHVNATEDRAVMHMALRAPKTEKIVVDGHDVVPDVHEVLDAIRAFTSNVRDGKLVGATGKQLKNVISIGIGGSYLGPEFVFESLRYEPVAKAAAEGRNLRFLANVDPVDVARATSGLNPEETLVVVVSKTFTTAETMLNARTLRKWLVDDLTKKGSSEADAVAKHMVAASSAVPLVQQFGIDRANIFGFWDWVGGRYSVTSAVGILPLALQYGLDITEKFLAGAHAMDKHLLETPLRNNLPVIMGLLGVWNSSFLGHSSRALLPYSQALLRFAAHIQQVDMESNGKRVTVEGVDLPFQAGEVNFGEPGTNGQHSFYQLIHQGRVVPCDFLGLCESQNPVQLAGEPVSNHDELMSNFSAQPDALARGKSIEDLKAEGVPEKLQNHKLFPGNRPSISLLFKKLDAFSTGRLLALYEHRTVVQGAIWGINSFDQWGVELGKVLAKQVRAQLSASRTENAPVKGFNSATTSMLEAYLAHKA

SEQ ID NO: 15167 - protein, 522 aa, Oryza sativa
MAKPECVSTPATSLGRCSPMAMMAMGAASWAPIPAPARAAAAFYPGRDLAAARRRRGAAARRPFVFTPRAVSDSRSSQTCLDPDASTSVLVVLGIILGGGAGTRLYPLTKKRAKPAVPLGANYRLIDIPVSNCLNSNVSKIYVLTQFNSASLNRHLSRAYGNNIGGYKNEGFVEVLAAQQSPENPNWFQGTADAVRQYLWLFEEHNVMEFLILAGDHLYRMDYQKFIQAHRETNADITVAALPMDEERATAFGLMKIDDEGRIIEFAEKPKGEKLKSMMVDTTILGLDTERAKELPYIASMGIYVFSKDVMLKPSRQNFPAANDFGSEVIPGATEIGMRVQAYLYDGYWEDIGTIEAFYNANLGITKKPVPDFSFYDRSAAIYTQPRYLPPSKVLDADVTDSVIGEGCVIRHCTINHSVVGLRSCISEGAVIEDSLLMGADYYETETDKKALSETGGIPIGIGKNAHIRKAIIDKNARIGENVKIINVDNIQEASRETDGYFIKSGIVTVIKDALIPSGTVI

SEQ ID NO: 15168 - protein, 228 aa, Oryza sativa
NYLITSILKKLHLTLYVYLHICLQRGPAFIEELMQVIPNSCYVKRGTYELKKIVEYANNRDFTSLVVVHTNRREPDALLIINLPAGPTAHFKLSKLILRKDIKNHGNPTSHKPELVLNNFTTRLGHRVGRMIQSLFPQEPNFRGRRVVTFHNQRDYIFFRHHRCIYETKTSESKSQPEKQVICRLQECGPRFTLKLLTLQHGTFDTKNGEYEWVHKPDMDTSRRRFFL

SEQ ID NO: 15169 - protein, 556 aa, Phytophthora cactorum
MINDTPAWKALAEHAAEIKSTHLRELLNDDARNAAMRTEQQGIYLDFSRQNATSKTLDLLFELAETAELKKKLQAIASGEHVNATEDRAVMHMALRAPKTEKIVVDGHDVVPDVHEVLDAIRAFTSNVRDGKLVGATGKQLKNVISIGIGGSYLGLEFVFESLRYEPVAKAAAEGRNLRFLANVDPVDVARATSGLNPEETLVVVVSKTFTTAETMLNARTLRKWLVDDLTKKGSSEADAVAKHMVAASSAVPLVQQFGIDRANIFGFWDWVGGRYSVTSAVGILPLALQYGLDITEKFLAGAHAMDKHLLETPLRNNLPVIMGLLGVWNSSFLGHSSRALLPYSQALLRFAAHIQQVDMESNGKRVTVEGVDLPFQAGEVNFGEPGTNGQHSFYQLIHQGRVVPCDFLGLCESQNPVQLAGEPVSNHDELMSNFFAQPDALARGKSIEDLKAEGVPEKLQNHKLFPGNRPSISLLFKKLDAFSTGQLLALYEHRTVVQGAIWGINSFDQWGVELGKVLAKQVRAQLSASRTENAPVKGFNSATTSMLEAYLAHKA

SEQ ID NO: 15170 - protein, 338 aa, Photorhabdus luminescens subsp. laumondii TTO1
MHSQINSLPQYMLAISIIKPGGPEKLHLVQVPLPRPGKGYLLVKVAAAGVNRPDIFQRMGSYPPPPDASPLPGLEIAGEVVAKGEGCERWNLGDKVCALVAGGGYAEYCLVHDSVALPIYGLDFVQAAALPENFFTVWANVFQTGQLKPGENLLIHGGTSGIGSVTIMLAKAFGAKVITTVGSDEKAKVAHSLGADFVINYHKEDFVDRVLKITGNHGVDMVVDLIGGDYVNKNYKVAAKFGRIIQIGMMKGNPENLNLMPLMLKRLTHTGSTLRSRSVEEKAEIAKELEKQVWPLLKSGKVTPLICKVFDLKDAADAHRMMEAGDVIGKVMLVNVSP

SEQ ID NO: 15171 - protein, 256 aa, Photorhabdus luminescens subsp. laumondii TTO1
MDRMLEGKVVIVTGGASGIGAGIALAAARHGAATVIIGDITDQPREGGTPVFQRLRALGTQAIFHRCDVTSRSEMDALVDIATPFGGVDLMACNAGIALATDGPQINADDFHKLLTVNLDGVLFGAQAAAEQMIKLGKRGSIVATSSMGSIRTGQLTTAYSTSKAGVNMMVAALADAFGPSGIRVNAVCPGLINTALPLSSPEVAKMFDGLRERMPLRRLGEPEEVGNAVVWLGSDLASFITGVSLLVDGGQTVVL

SEQ ID NO: 15172 - protein, 273 aa, Oryza sativa
MDPLSDEALAIVVPIVVYWLYSGLYMALGHSISMDKYRLHSKEEEDAKNLVSKRDVVMGVLLQQLVQAAVAAATFTLAGERRTTTATTASPSSWLAVAARFAVGMVVLDGWQYAWHRWMHTNRFLYRRVHSWHHRLVAPYAFGAQYNHPAEGLLLDTVGGAVAFLASGMSPRASVVFFSLCTAKGVDDHCGLWLPAASPLQRVFRNNAAYHDVHHQRRGGRYNFSQPFFVTWDKVLGTHMPYVVEERPGGGLQVRPVAMSPSSATAAAGASGK

SEQ ID NO: 15173 - protein, 188 aa, Zea mays
  unsure (1)..(188): unsure at all Xaa locations
MSRRYDSRTTIFSPEGRLYQVEYALEAISHAGTAIGILAKDGIVLAAERKVTSKLLEQDTSAEKLYILNDNMICAVAGMTADANILINYARQAAQRYLLTYNEDIPCEQLVRRLCDLKQGYTQHGGLXSPFGVSFIYAGWDPRRQFQLYLSNPSGNYXGWKATSAGANNASAQSLLKQDYKEDCTFEE

SEQ ID NO: 15174 - protein, 519 aa, Coxiella burnetii RSA 493
MTQADNQNPKPMVLIILDGFGESDETTHNAIKEANTPTLDKLFRHYPHTLLEASGRAVGLPDGQMGNSEVGHLHIGGGRKVPQDLTRIDAAIASGEFYENPALIEALEKAKALNKAVHILGLLSPGGVHSRDNQIAALVELAHRCGIKKIYLHAILDGRDTPPKSALLSIEKITDQFHAYGNGKIASLIGRYYAMDRDKRWDRTEKAYDLLTQGTAQFHALTAKEGLMLAYEQGNTDEFVSPTSIHRHNETPITIEDGDVVVFMNFRADRARQLTYAFLDDHFTAFNRQVRPKLSAFVTLTAYAKDIHAAVAFPPLELHNTLGEYLSARGYRQLRIAETEKYAHVTYFLNGGQEAPFNGEDRLLIPSPKVATYDLQPEMSAVEMTNKLVEIIQNDDYDLIVCNFANPDMVGHTGDETATREAIQVIDDCLKRIITALQSVGGEALITADHGNAEKMFDEKTNQPHTAHTSNLVPLIYVGREAQFCKEVGALDDVAPTLLYLMGLEKPREMTGRNLITLK

SEQ ID NO: 15175 - protein, 425 aa, Photorhabdus luminescens subsp. laumondii TTO1
MTESMLAKRRSAAIARGVGVTTQVYAERAENAEIWDVHGQRYIDFAAGIAVVNTGHCHPRVIAAAREQMEQFTHTCHQVVPYENYVALAERLNRLVPGNFAKKTVFVTTGAEAVENAVKIARAATGRSGVVAFSGAFHGRTFLGMSLTGKVAPYKMGFGPLVSDVYRVPFPVGLHGISVEQTLNALENLFKADIEPTRVAAIIIEPIQGEGGFYPAPPELLKALREIADCHGIVLIADEIQTGFARTGKLFAMEHHEVVADLTTMAKSLAGGLPLAAVTGRAELMDAVVPGGLGGTYGGNPVAIAAAHAVLDVIEEEKLNVRATQLGEQLKQRLHELRPHVPQIADVRGLGLMIAVEFNHADSQEPDANFTNAVRQKALECGLILLMCGVHGNVIRFLPPLTIQNDVFNEALNILESVLLDLTKQ

SEQ ID NO: 15176 - protein, 299 aa, Corynebacterium glutamicum ATCC 13032
MPAAGLGTRFLPATKTVPKELLPVVDTPGIELIAAEAAELGATRLAIITAPNKAGVLAHFERSSELEETLMERGKTDQVEIIRRAADLIKAVPVTQDKPLGLGHAVGLAESVLDDDEDVVAVMLPDDLVLPTGVMERMAQVRAEFGGSVLCAVEVSEADVSKYGIFEIEADTKDSDVKKVKGMVEKPAIEDAPSRLAATGRYLLDRKIFDALRRITPGAGGELQLTDAIDLLIDEGHPVHIVIHQGKRHDLGNPGGYIPACVDFGLSHPVYGAQLKDAIKQILAEHEAAERIADDSQVK

SEQ ID NO: 15177 - protein, 164 aa, Thellungiella halophila
MGLSSLPGPSEGMLCVILVNTALSISIFKGIVRSVLHVLGIRLSQSSSSPSSVTASSEIPASEPFDFRVSHPESFLEEFRNKTPTLRYESLCRCKKHEDNECSVCLSKFEEDSEINKLKCGHLFHKTCLEKWIDYWNITCPLCRTPLVVVAAAEDQKQLSSNVW

SEQ ID NO: 15178 - protein, 597 aa, Glycine max
MTGVEAMEKNEKSVTDEEPKINYRGWKVMPFIIGNETFEKLGTIGTLANLLVYLTTVFNLSSLAATNIVNIFNGSASLSTLLGAFLCDTYFGRYKTLGFSTMASFLGLLVIQLTAWIKKMHPPHCGRDSITCIGPTTGQMGFLLAGFGLLIVGAAGIRPCNLAFGVDQFNPNTESGKKGINSFFNWYFFTFTFAQMVSLSLIVYIQSNVSWAIGLGIPAALMLISCTLYYTGSNYYVKVKATGPAPLTSLAQAVVVAIKKRRLNLSEYPLDSSLFAYVSPQSINSKLLHTSQFRFLDKAAIITPQDGINPDGSASDPWSLCSMQQVEELKCLLRVIPIWFAGIFFYIAIVQQNTMLVFQALQSDRRILSTNFKILAASYTIFQMLSLTIWLPIYDRILVPSLQRVTKKEGGITVLQRIGFGMFLSILCTMVSGVVEERRRTLALTNPIGLEPRKGAISSMSGLWLVPQLTLAGLSDAFAIVGQVEFFYKQFPENMKSLAASLFFCGLAGSSYLSSLLISIIHRATAKSSTGNWLPQDLNKGRLDRLYYIITALEVVNFGYFILCAKWYKYKGTGSSSSGDLQLDQVSKPSERTVNTV

SEQ ID NO: 15179 - protein, 211 aa, Leuconostoc mesenteroides subsp. mesenteroides ATCC 8293
MTPLKAEILPEIHEHYSIPKKINDHGYFTYDFALPMTTLYTLYSGKTNQLAKWLKMSPMKQFTTLDTHDGIGVVDARDVLTDEEIDYASEELYKVGANVKKTYSSASYNNLDIYQINSTYYSALGNDDAAYLLSRIFQVFAPGIPQIYYVGLLAGENDIELLESSKEGRNINRHYYSVDEVKEEVKRPVVAKLLKLLSWRNNFAAFDLDGS

SEQ ID NO: 15180 - protein, 332 aa, Oryza sativa
MAAGERPATMRAVQYSGYGGGAAALKFVEIPVPSVKKDEVLVKVEAASINQSDLMTQKGMMRPFHPKFPFIPVNNVSGEIVEVGSAVREFKVGDKVVSKLDFWTAGGLAEYVATSDKLTVARPAGISAADAAGVPVAGLTALQALKAIGTKFDGSGTSGGADVLITAASSGVGTYAVQLAKLGNHRVTATCGARNLGLVAGLGADEVLDYKTPEGAALSSPSGKKYDYIVNISNKNKWSVFKPRLSSHGRVVDVAPNFGNFVASVVTLFSRRKKLSLVSLKMSKEDLGLLLELMREGKLRTVVDSRHPFEKAADAWARSLSGHATGKVIVEM

SEQ ID NO: 15181 - protein, 204 aa, Fusobacterium nucleatum subsp. vincentii ATCC 49256
MQKPLKLGADIVVHSVTKYINGHGDVIAGLVVTNKELADQIRFVGLKDMTGAVLGPQDAYYIIRGMKTFEIRMERHCANAKKVVEFLNKHPKIEKVYYPGLETHPGYEIAKKQMKDFGAMISFELKGGFEAGKTLLNNLKLCSLAVSLGDTETLIQHPASMTHSPYTKEEREAAGITDGLVRLSVGLENVEDIIADLEQGLEKI

SEQ ID NO: 15182 - protein, 297 aa, Zea mays
  unsure (1)..(297): unsure at all Xaa locations
MAVDLMGCYAPRRANDQLAIQEAAAAGLRNLELLVTSLSTQAAAPHRAADQPFGEIAGQAVSKFRKVISILDRTGHARFRRGPVEPSPPTPPAPPVVPGPAPPVSVAQPPQSLTLDFTKPNLAVSAXATSVTSTSFFSSVTAGEGSVSKGRSLMSSGKPPLSGHKRKPCAGAHSEATTNGSRCHCSKRRKNRVKRSIRVPAISSKVADIPPDEYSWRKYGQKPIKGSPYPRGYYKCSTVRGCPARKHVERATDDPAMLVVTYEGEHRHTPGAVQGPSPLATASPVPVAVSAGNGLVV

SEQ ID NO: 15183 - protein, 183 aa, Glycine max
GTVPQCLCSLDVNYSFKLLLIGITFYARLLGSPLASYPLPLLAIYVFGVGVPLFNHNVRSTHTIKWSLWIIHKLLLAAAYGFILFANFSKWREKLPPRPSFHNYVAVMFVFSVITLFACGLAAIDAGLGNWLYDLTVLCYHSLYLPFLYVTFLADFFQEEDFLLDNAYYSEMKDAGFFDADWE

SEQ ID NO: 15184 - protein, 590 aa, Mycobacterium avium subsp. paratuberculosis str. k10
MAFSVQMPALGESVTEGTVTRWLKQEGDTVELDEPLVEVSTDKVDTEIPSPAAGVLTKIIAQEDDTVEVGGELAVIGDAADGAAGGGAQAPSQPSQPQAPAQPEPQAQEPAQAQPEAPAQPQAPAQPAPQESGGGAATPVLMPELGESVTEGTVTRWLKKVGDSVQVDDALVEVSTDKVDTEIPSPVAGVLISITAEEDSTVPVGGELARIGTGAQAPAPAAPQPPPAPKPEPKPEPAPQPQAQPAPQPQAQPAPEPKAQPAQAQPAAGGEGTPYVTPLVRRLAAENDIDLSSITGTGVGGRIRKQDVLAAAEQKQRQQQAAAQPSAAPAPAAAEARKPAAPTPAPALAHLRGTTQKASRIRQITAAKTRESLLATAQLTQTHEVDMTRLVGLRARAKAAFAEREGVNLTFLPFIARAVIDALKIHPNINASYNEETKEITYYDAEHLGFAVDTEQGLLSPVVHNAGDLSLAGLARAIADIAARARSGNLKPDELSGGTFTITNIGSQGALFDTPILVPPQAAMLGTGAIVKRPRVIVDEFGNESIGVRSICYLPLTYDHRLIDGADAGRFLTTIKHRLEEGAFEADLGL

SEQ ID NO: 15185 - protein, 166 aa, Bordetella parapertussis 12822
MNTMYDFSAPTITGAERALADFRGQVALVVNVASRCGFTPQYSGLEELYRSYRNEGFVVLGFPCNQFGRQEPGDEAAIAQFCETQYAISFPLFAKIDVNGAHAHPLYRWLKAHKPGLLGTRAIKWNFTKFLVGRDGLPLRRYAPAHTPESLRHDIARACAAPGPTP

SEQ ID NO: 15186 - protein, 312 aa, Pseudomonas putida KT2440
MSASLAFVFPGQGSQSLGMLAELGAEKPVIIETFKEASEALGYDLWKLVQDGPEEQLNQTDKTQPAILTASIALWRLWLEEGGAKPAFVSGHSLGEYSALVAAGSISLKDAVRLVERRGQLMQEAVPAGHGAMAAILGLDDAVVVELCAEAAEDEVVSAVNFNSPGQVVIAGNKAAVDRAMELCKAKGAKRALPLAVSVPSHCALMKPAAERFAESVNAIEWKAPQIPVVQNVTAAVAADLDALKHDLLAQLYQPVRWVECVQTLAANGAVNLVECGPGKVLAGLNKRCADGVTTYNLNTPDAVAATRAALA

SEQ ID NO: 15187 - protein, 137 aa, Glycine max
MMSQQWGSPCGSQCTNKYAALGKIPWRIFCKKGCDSDGETWEECLEDCNQICYKDPVLKDQQWSAYIDRSPGAASYSEECFHACVSGCGYKFEVKSEEADKVCPNRQPKPETKPTKKPKPQPVRPIDLPGDIPDTSA

SEQ ID NO: 15188 - protein, 449 aa, Zea mays
  unsure (1)..(449): unsure at all Xaa locations
MAVTITWVKARQIFDSRGNPTVEVDVGLSDGSYARGAVPSGASTGIYEALELRDGGSDYLGKGVLKAVSNVNNIIGPAIVGKDPTEQVEIDNFMVQQLDGTSNEWGXWCKQKLGANAILAVSLAVCKAGAMVKKIPLYQHIANLAGNKTLVLPVPAFNVINGGSHAGNKLAMQEFMILPTGASSFKEAMKMGSXEVYHNLKSIIKKKYGQDATNVGGIEGGFAPNIQENKEGLELLKAAIEKAGYTGKVVIGMDVAASEFFGEKDKTYDLNFKEENNDGSNKISGXSLKDLYKSFVSEYPIESIEDPFDXDDWSTYAKLTDEIGQKVQIVGDDLLVTNPXRVAKAINEKXCNALLLKVNQIGSVTESIEAVRMSKRAGWGVMASHRSGETEDTFIADLSVGLSTGQIKTGAPXRSERLAKYNQLLRIEEELGDAAVYAGAKFRXPVEPY

SEQ ID NO: 15189 - protein, 339 aa, Streptomyces tenebrarius
MKALSFEAPGEAVFGTREVPVPAPGEALIHLGYNSICGSDLSLYRGVWHGFSYPVVPGHEWSGTVVEVNGPGAELVGRDVVGDLTCACGSCAACGRGTPVLCENLQELGFTRDGACAEYMTIPTGNLHVLPEGLSLRAACQVEPVAVALHAVSTVGVEPGERVAVLGAGGIGLMLMQVARQRGGVITTVGEPVAERRAVAAQLGARTVTTGRPGELAELVAKHPDLTPDVVLEASGYPVAVQEAIEVVRPGGRIGLVGYRVEEVGPMATHHVAVKALTIRGSLGPGGRFPEAIDLLARGEIEVEPLLSHEFALDDHARALDLALRRAEGNVRSFFNLRA

SEQ ID NO: 15190 - protein, 214 aa, Thellungiella halophila
MGVKRSPNMCASVGIQGIAWAFGGMIFALVYCTAGISGGHINPAVTFGLFLARKLSLTRAVYYIVMQCLGAICGAGVVKGFQPKQYQALGGGANTIAHGYTKGSGLGAEIIGTFVLVYTVFSATDAKRNARDSHVPILAPLPIGFAVFLVHLATIPITGTGINPARSLGAAIIFNKDNAWDDHWVFWVGPFIGAALAALYHVIVIRAIPFKSRS

SEQ ID NO: 15191 - protein, 829 aa, Vibrio cholerae O1 biovar eltor str. N16961
MKMTRRAFVKANAAASAAAVAGITLPASATNLIASSDQTAIHWDKAPCRFCGTGCSVLVGTQDGRVVATQGDPEAPVNKGLNCIKGYFLSKIMYGQDRLKTPLLRMKDGQYHKDGEFTPVSWDTAFDVMAEKWKASLKTKGPTSVGMFGSGQWTVMEGYAAVKLMKAGFRSNNIDPNARHCMASAVVGFMRTFGIDEPMGCYDDFEHADAFVLWGSNMAEMHPVLWTRITDRRLSHPHVKVNVLSTYYHRSFELADHGYIFHPQSDLAIANFIANYIIQNDAVNWDFVNKHTHFKQAVTDIGYGLRDDHPLQKKAKNANSGDVSDISFEEYKKSVAPYTVEKASEISGVSPDKLITLAKQYADPNTKVMSLWTMGMNQHTRGVWMQSLVYNLHLLTGKIATPGNSPFSLTGQPSACGTAREVGTFAHRLPADMVVANPKHRAIAEKVWKLPEGTIPEKPGFHAVQQDRMLKDGVLNCYWVQCNNNMQAGPNINEERLPGYRNPENFIVVSDAYPTVTAQAADLVLPTAMWVEKEGAYGNAERRTQVWYQQVKTVGESHSDSWQVIEFSKRFKVEDVWPEELLAKAPQYRGKTLYDVLFKNGQVDKFPLSEARELNDDAHHFGFYIQKGLFEEYAEFGRGHGHDLAPYDVYHQVRGLRWPVVDGKETKWRFKEGSDPYAKAGSGWDFYGKPDGKAWIISSPYEAPPEMPNEEYDLWLCTGRVLEHWHTGTMTRRVPELYKAVPDALCFMHHEDAQARGLRRGDEVLISNSRGEVRVRVETRGRNKPPKGLVFVPFFDARILVNKLILDATDPLSKQTDFKKCPVKITKVA

SEQ ID NO: 15192 - protein, 86 aa, Piromyces sp. E2
  unsure (1)..(86): unsure at all Xaa locations
YALDNGAKSVVLISHLGRPNGAPNQKYTLKPVAAEVERLLGKPVTFLNDCVGAEVEXACANPADGSVILLENARFHLEEEVSLRTR

SEQ ID NO: 15193 - protein, 156 aa, Zea mays
  unsure (1)..(156): unsure at all Xaa locations
TIKWIMTNRQGTLLAAASANGIWIISHSPTTDLAKKYHANDXTAPIXGPASSSISIQLINSGTDNYITICACDILCKKLHAIXLISHTPVRVSLRPGSPTPSISTIWPLXSAPLLGEINTRTTTPLHVAVTKNAKPPSLKPQNKLANGPTAMPTTA

SEQ ID NO: 15194 - protein, 304 aa, Glycine max
MTLNYNIALAFSAVLTLLLFPLLTVGELVEEQPLVLKYHNGQLLKGRITVNLIWYGTFTPIQRSIIVDFINSLSSAPNAPLPSTATWWKTTEKYKVGGGSPALVVGMQFLHPAYTLGKNLKGRDLLALASKFNEINSITVVLTAKDVAVEGFCMSRCGTHGSTRNVKSNARTAYIWVGNSETQCPGQCAWPFHQPIYGPQTPPLVSPNGDAGVDGMVINLATLLAGTVTNPFNNGYFQGPPTAPLEAVSACTGVFGSGSYPGYPGRVLVDKATGASYNAHGANGRRYLVPAMWDPQTSTCKTLV

SEQ ID NO: 15195 - protein, 158 aa, Manihot esculenta
MVTAHFVLIHTICHGAWIWYLMESFPDWKDTVYFKYTNNSGETVTALKLGFTLLRENLFTSCPPEDYELAKMLTRKGFLFQNILTKREKFTEEGYGSIKKIYIWTEQDKIFSPEFQRWQIANYKPDKVYQVQGGDHKLQLSKTKEIAQILQEVANAYA

SEQ ID NO: 15196 - protein, 272 aa, Sinorhizobium meliloti 1021
MSIAVSGPIVLVGAGNMGGAMLAGWLKSGVRGSDVLVIDPGPSPAMAKLLADSGVQHATSAPAGGKAGAIFLAVKPQVMETVLPPLKGLVGPQTVIVSVAAGKTLGFIERHLGEAATVRAMPNTPAMIGRGVTGAFANARVSEAQRALVHDLLKVSGPVEWVGSEADIDAVTAVSGSGPAYVFYLVECMAEAGRKAGLEADLAMRLARETVAGAGELLHQSPDDAARLRQNVTSPGGTTAAALAVLMADDGMQPLFDRAIAAARKRAEELAG

SEQ ID NO: 15197 - protein, 123 aa, ASPERGILLUS NIDULANS FGSC A4
MINHGRMGSAQDFFGQLWKEYALSDSRYLTSDTLVLCMETITVIIVCMAHLYGDTLYFATSIYDDHAHERPYCRPEPFYFWVYYFGMNFIWIVVPAIYLYQSMKAISYAMKKAEKISQSLKSE

SEQ ID NO: 15198 - protein, 541 aa, Eremothecium gossypii
MRNLPRINLKSTFTTFSRIMSQQKEVSAGVMASSGAKKENVKKSKLQVSLKTPKGTKDWADKDMVIREAIFQRLSGMFRRHGGVTIDTPVFELREILAGKYGEDSKLIYDLKDQGGELCSLRYDLTVPFARFVAMNNIQNIKRYHIAKVYRRDQPAMTKGRMREFYQCDFDIAGSYESMVPDAECLSILVEGLTGLGIQDFKIKLNHRKILDGIFEIAGVKEEDVRKISSAVDKLDKSPWEVVRKEITVEKGQSEATADKIGEYVKLSGSLEEVYEKLAADAAVTSNEKAKQGLEEMATLTKYTRAFGINEFISFDLSLARGLDYYTGVIYEAVTGASAPPSNAQELKAKAKDAEDASEYVGVGSIAAGGRYDNLVGMFAEASGKKSVSIPCVGLSFGVERIFSLIKQRSERASSIRPTSTQVFVMAFGGGKDWTGYLPERMQVTKQLWDAGIDTEYVYKSKANPRRQFEAAEKSGCPLAVILGKEEYLEGKLRVKRLGPEFADDDGELIDAADVVKVVKNKLAEIRVDGMDEVERLLRSL

SEQ ID NO: 15199 - protein, 259 aa, ASPERGILLUS NIDULANS FGSC A4
MDLHSKLQAAWYRLINTYRPGTIELTGSIATQTVGFILPATLYLLIDTLFPEFSKRHKIQSAGRQPTRPQILHCVKVTLFNHVWVVAIHAMLVYWAGLDHAIMNLDPIVPPWREFIVDFVFALLAREILFYYIHRTLHHPRIYAYIHKMHHKYTTPVAFAGEYAHPVEHVIANILPITLPLYLKGAHYLSIIAFVSFELWEAAADHSGYDFLKLPPAELHDLHHEKFRVHYGTIGLMDWIHGTDVVGWDRPETDKRDEQ

SEQ ID NO: 15200 - protein, 500 aa, Mesorhizobium loti MAFF303099
MADKSEKTKARLPRGFADRSAEDIRAVEKMMATIRSVYELYGFEPADQPLIEYTDALGKFLPDQDRPNEGVFSFQDDDEQWLSLRYDLTAPTARFVAENYERLPKPYRSYRSGWVFRNEKPGPGRFRQFMQFDADTIGTPGVAADAEMAMMMADVMEALGIKRGDYVIRVNNRKVLDGVLEAIGLGGEENIGRRLTVLRAIDKLDKLGPEGVKLLLGPGRWDGGKEGEGDFAKGAGLNNGQAEAVLQATARNAQAAQDSVVDSNATYQEGVGELATIEALVRAAGYGEDRIAMDRSVVRGLEYYTGPVFEAELLAEIPNEDGQIVRFGSVGGGGRYDGLVSRFRGEPVPATGFSIGVSRLMTALKNLGKLDNADVIAPVVVLVMDKDTESLGRYQKMVSELRAAGIRSEMYLGGAGMKAQLKYADRRGCPVAIIQGGDERAKGELQIKDLIEGARMSAEITDNAEWRAARPAQVTVAESELVAEVKKILAAQAEERARGK

SEQ ID NO: 15201 - protein, 264 aa, Hordeum brevisubulatum
MTRKKKVRRRSTGPDSVAETIKKWKEQNQKLQQENGSRKAPAKGSKKGCMAGKGGPENSNCAYRGVRQRTWGKWVAEIREPNRGNRLWLGSFPTAVEAARAYDDAARAMYGATARVNFPEHSPDANSGCTMAPSLLLSNGATAVSHPSDGKDESESPPSLVSNAPTAALHRSDAKDEFESSGTVAHKVKAEVSNDLRSTHEEHKALEVTQPKGKALHKEANVSYDYFNVEEVLDMIIVELSADVKMEAHEEYQEGDDGFSLFSY

SEQ ID NO: 15202 - protein, 191 aa, Halobacterium sp. NRC-1
MADAHDALRTDPTLAPLLDAHGELAVTPHDDLFERLVVAIIRQQLSTDAAATIRERVFDAVDVTPAGIAAADPAVLRDAGLSRQKTDYVTNVAAAFREHDYTRARFAELSDAAVREELTAITGVGDWTASMFLLFALGRADVFPVGDLGIRTGMQALYGADTTRAEMREIADSWRPYRSYASLYVWRAQDA

SEQ ID NO: 15203 - protein, 354 aa, Zea mays
MGKKKKRVDKVFCYYCDREFDDEKILVQHQKAKHFKCHVCHKKLSTASGMAIHVLQVHKESVTKVPNAKPDRESTEIEIFGMQGIPAHVLAAHYGEEEDPSTKVPKVEVPQVRPVIMPNSLGMAFPPRPAYGVAPPIYNPALNPLMARPPIWPAAPAQAWYSQQAAYPQQSAVSVPPIVAGLPPQQPLFPIQNVPTPMTSAAANVLQTSFPMAPPGVPSPVAPHVSQPLFPVNTSAVNGAVNSPFLASVAPGTIPASSSAAVGVAGIGYGTNNQGTRDPAVGSSPAVSNNKASGAQPATNEVYLVWDDEAMSMEERRLSLPKYQVHDETSQMNSVDAAIDRRISESRLAGRMAL

SEQ ID NO: 15204 - protein, 340 aa, Micromonospora echinospora
MGGRMRALQFHGGHKAQIIDTPRPEAPPGWAVVKVHYCCLCGSDLWLYRGKWHGNRYPIVPGHEWAGVVDSAPEGYESWVGRPVTGDLIVGCQGCGPCRDGLPVMCENLIEIGFTVDGGCAGYVAVPITNLYLLPEGMDLAAASQTEPLAVALHAVDRINLRPAERVAVLGAGGIGQLILQSARATGATVTLATDLVAERRKIAEESGAAAAVHPSELPELTSYADKVDVVFEASGDPESVVRALDLVRPGGRVCLVGYQVGAEHALETARLPLSYASLVGVMGPGGKYREAVDLLANGAIDTQPILTDIVTLDDYAPAIDRAINRTDGTVRVVFDLRNE

SEQ ID NO: 15205 - protein, 554 aa, Chromobacterium violaceum ATCC 12472
MSNLIELKVPDIGGHSNVDIIEVFIAPGQTVSVDDSLITLETDKATMEVPAEAAGVIKEVKAVVGGKISEGDVIAILEVGAAASAPAPAAAAPAPAAAPAAAPAPAAAAPAAAPAAPAASGRSEIRVPDIGGHNGVDVIEVTVKVGDEIAVDDSLITLETDKATMEVPATAAGKVVEVKIKVGDKVSEGDLIVVVEGAVAAASAPAAAAPAPAAAPAAPAPVAAAPAAAPAVAPVAAAVSAAIDEIAFSKAHAGPSVRRLARELGVDLGKVKGNGRKGRITEDDVKAFVKGVMQNPAALAPAAAPAGSGAGLDLLPWPKVDFAKFGPIETKPLSRIQKISGANLSRNWVMIPHVTFNDECDITELEDFRKTVGKEWEKSGLKISPLAFIIKAAAEALKAFPTFNSSLDGDNLVLKQYYHIGFAADTPNGLVVPVIKDADKKGLRQIAQELTDLSKLAREGKLKPTDMQGATFTISSLGGIGGTSFTPIVNAPEVAILGVCKSQIKPVWNGKEFAPRLMCPLSLSFDHRVIDGAAAARFTVHLGKLLSDVRRLIL

SEQ ID NO: 15206 - protein, 599 aa, Chromobacterium violaceum ATCC 12472
MSNLIELKVPDIGGHNNVDVIEVFVKPGDVIEKEASLITLETDKATMEVPAEAAGTVKEVRVTVGSKVSEGDLVVILEAAGAAAAAPAEVKPVETTGVASATTQAGFAPQAAPVAASHSGGADIECDVMVLGGGPGGYSAAFRAADLGLKVVIVERYATLGGVCLNVGCIPSKALLHNAAVIDEVSHLAANGIKFGKPEVDIDMLRGYKEKVIAKLTGGLGGMAKARKVEIVRGNGHFIDPHHIEVSLTTGKGREESGEKKIVKFKNAIIAAGSRVVKLPFIPNDPRVVDSTGALELKGVADRMLIIGGGIIGLEMGTVYSTLGARLDVVEMLDGLMQGADRDLVKVWQKWNAHRFDNIMLNTKTVAVEPKEDGVWVTFEGEQAPKEPQRYDLVLYATGRAPNGKLIGAENAGIAVTDRGFIQVDKQQRTNVPHIFAIGDIVGQPMLAHKGVHEGHVAAENCAGMKSYFDARVIPGVAYTDPEVAWVGVTEDEAKKQGLKIEKGVFPWAASGRAIANGRDEGFTKLIFDAESHQIIGGGIVGPHAGDMIGEVCLAIEMGCDATDIGKTIHPHPTMGESIGMAAEVAHGTCTDLPPQRKK

SEQ ID NO: 15207 - protein, 367 aa, Oryza sativa
MSVQEYLEKHLLSRKIEEAVNAAVRAKAPDPVLFISNHMRRAAPAVITSVRARQILDGRGEPAVEVSLHTNKAVHRASAAAADAPEGAAADAVRDAEKRKLLARAVADAVRVINDKVSEALVGMDPQQQSQIDQAIMDLDKAHHKAEIGVNSMLAVSIAACKAGAAEKEEIMILPVGAKNFEEAMQMGSETYHHLKDIILEKYGSNSCNIGDDGNKYDMEFKFAEKSGQGFKTADDLIEIYSQLCSEYPLVSIEQPFDKDDWEHSKKFTTLELCQANQVGTVTEAIEVVRQAKDAHWGVMVSHRSGDTDDSFIADLAVGAAAGQIKAGAPCRGECLSKYNQLLRIEEELGSDGVYAGENWRTTASTS

SEQ ID NO: 15208 - protein, 500 aa, Oryza sativa (japonica cultivar-group)
MAMMAMGAASWAPIPAPARAAAAFYPGRDLAAARRRRGAAARRPFVFTPRAVSDSRSSQTCLDPDASTSVLGIILGGGAGTRLYPLTKKRAKPAVPLGANYRLIDIPVSNCLNSNVSKIYVLTQFNSASLNRHLSRAYGNNIGGYKNEGFVEVLAAQQSPENPNWFQGTADAVRQYLWLFEEHNVMEFLILAGDHLYRMDYQKFIQAHRETNADITVAALPMDEERATAFGLMKIDDEGRIIEFAEKPKGEKLKSMMVDTTILGLDTERAKELPYIASMGIYVFSKDVMLKLLRQNFPAANDFGSEVIPGATEIGMRVQAYLYDGYWEDIGTIEAFYNANLGITKKPVPDFSFYDRSAAIYTQPRYLPPSKVLDADVTDSVIGEGCVIRHCTINHSVVGLRSCISEGAVIEDSLLMGADYYETETDKKALSETGGIPIGIGKNAHIRKAIIDKNARIGENVKIINVDNIQEASRETDGYFIKSGIVTVIKDALIPSGTVI

SEQ ID NO: 15209 - protein, 660 aa, Oryza sativa
MQPRATSQQVLLQQGVKNRRALDSHEAEVPQRERSKDIRGSGSASLLSRKPKRFQLGKSKMRSCSWRGEEEEEEEMQELLRGNKDVMSLAQGVVYWQPPEAAMNKIKEIVWEPSISKYGSDDGLPELREALLEKLRRENKLTKSSIMVTSGANQAFVNVVLTLCDAGDAVVMFAPYYFNSYMSFQMTGVTDILVGASNPETLHPDVDWLEKVLQENNPIPKLVSVVNPGNPSGAFIPKPMLERISELCRNAGAWLVVDNTYEYFMYDGMEHYCLEGNHIVNLFSFSKAYGMMGWRVGYIAHPNEADGLHAQLLKVQDNIPICASIIGQRLALYALEAGPEWIRERVRDLVKNRELLMEAMSPLGKDSVKGGEGAIYLWAKLPEKCSDDFEVVRWLANKHGVAVIPGSASGGPGYIRVSFGGLKESDTRLAAERLRRGLQELVTEGMHFSTTCSEDAGSKFSQPLLVPIIKPNQPHLGCIPKCRWMLLKLSLRHNYSKVYTNELNITKLINILILKEFSKNANSRRRLRPHLNLLKMDIKYGHVKKRCWPCVSIAAAIVESMHCVRIYNGPKCKLQLQWPWPWSREGEREMRLLTCFADDHRRFDEAETTNGQYSVRQKKMMNLDTQEYVRQPTAAVAPHTDEDNVCPRSVEWNGGISLLK

SEQ ID NO: 15210 - protein, 597 aa, Oryza sativa
  unsure (1)..(597): unsure at all Xaa locations
MASSASLQRFLPPYPHAAASRCRPPGVRARPVQSSTVSAPSSSTPAADEAVSAERLEPRVEQREGRYWVLKEKYRTGLNPQEKVKLGKEPMSLFMEGGIKELAKMPMEEIEADKLSKEDIDVRLKWLGLFHRRKHQYGRFMMRLKLPNGVTTSEQTRYLASVIEAYGKEGCADVTTRQNWQIRGVTLPDVPAILDGLNAVGLTSLQSGMDNVRNPVGNPLAGIDPDEIVDTRSYTNLLSSYITSNFQGNPTITNLPRKWNVCVIGSHDLYEHPHINDLAYMPAVKGGKFGFNLLVGGFISPKRWEEALPLDAWVPGDDIIPVCKAVLEAYRDLGTRGNRQKTRMMWLIDELGMEAFRSEVEKRMPNGVLERAAPEDLIDKKWQRRDYLGVHPQKQEGMSYVGLHVPVGRVQAADMFELARLADEYGSGELRLTVEQNIVIPNVKNEKVEALLSEPLLQKFSPQPSLLLKGLVACTGNQFCGQAIIETKQRALLVTSQVEKLVSVPRAVRMHWTGCPNSCGQVQVADIGFMGCLTKDSAGKIVEAADIFVGGXRVGSDSHLAGAYKKSVPCDELAPIVADILVERFGAVRREREEDEE

SEQ ID NO: 15211 - protein, 578 aa, Schizosaccharomyces pombe
MSSESRENEVKAETKDEIANDGSPQLNGDNNIQSSDGHNDENEESLSRKRDSSGATVGDLKQEEKESMPKKEPEPTVKKIRGSGMPPPQQKYCLAIVRQLKRTKNSAPFKVPVDPIKQNIPDYPTIVKNPMDLGTIEKKLTSYEYSVPQEFIDDMNLMFSNCFLYNGTESPVGSMGKALQEVFERQLKQLPDAEQPAAAPVKKSKQKSASTAPPRTRRNSSVSSTSASVAASTAPKAASPAVLPEGKPRRRKNNSQMRFCSTVLKELYKRQYESFAFPFYQPVDPVACDCPDYFDVIKEPMDLSTIQSKLNKNEYSTLEEFESDILLMFNNCFTYNPPGTPVHVMGRQLENVFKEKWEARPKFDDATLVKQQEAETDALFDNGEEEEALMSEEEINGAKFAAVDKQISMLQDTLEAMKAKKMNRMRKPRRRDLTKEYGPITYAMQNELAERCNYLSAEQLSNVAEILREEMPWLRDTDEIEIDVGNMKPEVFHRIYRYVCKPDADSSEPASPVLMPTKPEKKKGRVLSETEQAEKIRRLQQQLDRFAGKTSPTSPESNNAANVSDSESDNESESSESA

SEQ ID NO: 15212 - protein, 612 aa, Arabidopsis thaliana
MASLSGLYSSSPSLKPAKNHSFKGIAGAISRFLLFPTYLQTHQSTLTLSSARSVARDISHADSKKELLKDPDALWKRYLDWFYQQKELGLYLDISRVGFTDEFVAEMEPRFQAAFKAMEDLEKGSIANPDEGRMVGHYWLRNSKLAPKPTLKTLIENTLDSICAFSDDIISGKIKPPSSPEGRFTQILSVGIGGSALGPQLSLRLGPDNPPLKIRFIDNTDPAGIDHQIAQLGPELASTLVVVISKSGGTPETRNGLLEVQKAFREAGLNFAKQGVAITQENSLLDNTARIEGWLARFPMYDWVGGRTSIMSAVGLLPAHLQGINVREMLTGAALMDEATRTTSIKNNPAALLAMCWYWASNGVGSKDMVVLPYKDSLLLFSRYLQQLVMESLGKEFDLDGNTVNQGLTVYGNKGSTDQHPYIQQLRDGVHNFFATFIEVLRYRPPGHDWELEPGVTCGDYLFGMLQGTRSALYANGRESISVTIQEVTPTSVGAIIALYERAVGLYASIVNINAYHQPGVEAGKKAAAEVLALQKRVLSVLNEATCKDPVEPLTLEEIADRCHAPEEIEMIYKIIAHMSANDRVLIAEGNCGSPRSIKVYLGECNVDDLYA

SEQ ID NO: 15213 - protein, 289 aa, ASPERGILLUS NIDULANS FGSC A4
MGIDIDLTVAVIGCGTLGTAIAAGILDPKDKSGINIKRLIATVGTEPSKQRVRDALSTHESRLTVLTHGGNVRAIQEADVVLLAVKPFKRAEVFCAPGFKEAIRNKLVLSIMAGITTKEFARLAIGDGAAPGILQVVRAMPNMAAKIREAMTLYTPSPGTSPENLSIASWIFGQVGESHQIPEASFDICAVLVGCAGSLLLLAVDGLLDAAVAEGVRRSEVQNLVVNSAIGMLKLVPAGDHPSVLREKIASPGGCSIQALLELERLGARSAFTRAIMAAAEKSKAMSSS

SEQ ID NO: 15214 - protein, 561 aa, Plasmid pSB102
MTTLKITGMTCDSCATHVKEALEKVPGVQSAVVSYAKGAAQLDLDPGTASDALTAAVAGLGYKATFADTLSTDNRAGLLDKVRGWMGTADKGSDGERQLQVAVIGSGGAAMAAALKAVEQGAKVTLIERGTIGGTCVNIGCVPSKIMIRAAHIAHLRRESPFDDGIAATVPAINRSKLLAQQQARVDELRHAKYEGILDGNPAITVLHGEARFKDDQSLTVRLNDGGERVVVFDRCLVATGASPAIPPITGLKGTPYWTSTEALVSDTIPERLAVIGSSVVALELAQAFARLGSQVTILARSTLFFREDPAIGEAVTAAFRAEGIKVLEHTQASQVAYADGEFVLTTGHGEVRADKLLVATGRTPNTRSLALEAAGVAVNAQGAIVIDKGMRTSTPHIYAAGDCTDQPQFVYVAAAAGTRAAINMTGGDATLNLTAMPAVVFTDPQVATVGYSEAEAHHDGIETDSRLLTLDNVPRALANFDTRGFIKLVIEEGSGRLIGVQAVAPEAGELIQTAVLAIRNRMTVQELADQLFPYLTMVEGLKLAAQTFTKDVKQLSCCAG

SEQ ID NO: 15215 - protein, 557 aa, Oryza sativa
  unsure (1)..(557): unsure at all Xaa locations
MSGARRCGGRTSERSSVVGDNRNGYVETDPTGRYGRLSEVLGKGAMKTVYRGFDELRGVEVAWNQATIXDVLRTPDALHRMYAEVSLLADLRHDXAIIAFHASWVHPSRRTFNFITELFSSGTLRSYRLRYPRVSRRAVGAWARAILRGLAYLHSRGVIHRDLKCDNIFVNGHLGQVKIGDLGLAAVLRGCTSARSVIGTPEFMAPEMYDECYGVGVDVYSFGMCMLEMLTNEYPYSECDNPAQIYKKVTAGKLPDAFYRLTDADARRFIGRCLVDAAHRPSAEELLLDPFLSPSQNHDDHNIIAHATAPPPPLPLACSNSSEEQEEAAPAPAAKTTDMAITGKLNKEHDTIFLKVQIGGGRNVRNIYFPFDVANDTAMEVATEMVKELDIADREPTEIAAMIEQEIVRLVPGYKQHEYSYADDNDDDDVSGHPNPFYYLSSSPTSSQGSLCGVGSTSSEGSVSVSDDDDSSTSSLSAAVSASSLHQQPGRPRQREGEEERRRRRMSRNRSMVDMRSQLLHRTLVEELNKRHDIGFRDPTAAASSSSSSSHHRRRSS

SEQ ID NO: 15216 - protein, 636 aa, Vibrio cholerae O139
MCGVAGFISKRLSPVDCLTSMVESIMHRGPNDSGLWVDDDFGVCLAHARLSIQDLSSAGHQPMHSKSERYVMIFNGEIYNHLTLREELIEIVPSYWNGHSDTETLLAGFEVWGIEQTIQKCVGMFAIVLWDKVLKQLILIRDRFGEKPLYYGWQRDTFLFASELKALKAHPSFEGSINRQALSHFFRLNYIPTPLSIYEGIFKLEPGVIAVFSHEGQLLSKQTFWDASHAVSLQNFSDHDAVDKLDDLIKQSIQDQALSDVPLGAFLSGGVDSSTVVGILQSLSTRPVKTFTIGFDHADFNEASEASDVAKHLGTDHVELIVSAEDALAIINQLPVMYDEPFADASQVPTFLVSKLAKKEVTVCLSGDGGDELFCGYNRYHYTAKVWSYLEKIPFPIRKMLSVFLLTLSPSSWDVLSKTLGLNTRLPNLGNKTQKGAQALKARDIEDLYTRVVSNWDLDEPLVKNTAVEKLPFLSDLTELSHLNDLEKMMLWDKQSYLMDDVLVKTDRATMACSLEGRVPLLDHRIAEFAASLPIHLKYRGGKGKWLLREVLYRYVPKKLIERPKKGFSLPIAEWLRGPLKDWANVLLDSDRFDKEGFLSSELVQKKWGEHLAGKRDWSSQLWSVLMFQLWLEKNK

SEQ ID NO: 15217 - protein, 197 aa, Brassica napus
MGRKKLEIKRIENKSSRQVTFSKRRNGLIEKARQLSVLCDASVALLVVSASGKLYSFSSGDNLVKILDRYGKQHDDDLKALDRQSKALDCGSHHELLELVESKLEESNVDNVSVGSLVQLEEHLENALSVTRARKTELMLKLVENLKEKEKLLEEENHVLASQMEKSNLVRAEADNMDVSPGQISDINLPVTLPLLN

SEQ ID NO: 15218 - protein, 372 aa, GIBBERELLA ZEAE PH-1
MDLSNKAAYLVSPNGPTIEVRSAPVPTPGPGELLVKTHAVAINPVDAVKQSMGNMMFEWLSYPLILGYDVAGEVIKTGPGVGRFREGDRVVGVTAGMDKRGRCPDEGAFQEICIVREHLAAKIPDGITSTDASVLPLTFVTAACALFQKEQLALQLPQTKANRSSTGQTVLVWGASTSVGRNAVQLAVAAGYDVIATASPKNWDIVRNLGASSVFDYRSPTVIDDVITSLKEKKCAGAVAIGQRSLAKCVDIIKRIPGATKNVAQVTLSMPESQPTTNISMIPFVAKYFWMAGTDRLKVMSSGVQSKFVFGTDIIEWDAEGKLASYLSEALELGEYKLSSRAQVLEGGLSSIAQGLDLVREGTDGNKVVVRI

SEQ ID NO: 15219 - protein, 196 aa, Brassica napus
MGRKKLEIKRIENKSSRQVTFSKRRNGLIEKARQLSVLCDASVALLVVSASGKLYNFSAGDDLVKIVDRYGKQHADDRKALDLQSEAPKYGSHHELLELVESKLVESNSDVSVDSLVQLENHLETALSVTRARKTELLLKLVDSLKEKEKLLKEENQGLASQMEKNNLAGAEADKMEVSPGQISDINCPVTLPLLY

SEQ ID NO: 15220 - protein, 196 aa, Brassica napus
MGRKKLEIKRIEKNSSRQVTFCKRRNGLIEKARQLSVLCEASVGLLVVSASDKLYSFSSGDRLEKILDRYGKKHADDLNALDLQSKSLNYSSHHELLELVESKLVESIDDVSVDSLVELEDHLETALSVTRARKAELMLKLVESLKEKENLLKEENQVLASQIEKKNLEGAEADNIEMSSGQISDINLPVTLPLLN

SEQ ID NO: 15221 - protein, 406 aa, Pseudomonas syringae pv. tomato str. DC3000
MAIDIKAPSFPESVADGTISKWYKKEGDAVKRDEMLVDIETDKVVLEVLAEADGVMGAITKEEGAIVLSNEVLGTLNDGATASAAPAPAAAPASAPAAAPAAAGEEDPIAAPAARQLAEENGINLASVKGTGKDGRITKEDIVAAVEAKKSAPAAAPAAKPVAAAAPVVAAGDRTEKRVPMTRVRATVAKRLVEAQSNMAMLTTFNEVDMTEVMALRSKYKDLFEKSHNGVRLGFMSFFVKAATEALKRFPAVNASIDGSDIVYHGYADVGVAVSSDRGLVVPVLRNAEHMSLAEIEGGIATFGKKARDGKLSIDEMTGGTFTITNGGTFGSMMSTPIVNPPQAAILGMHNILQRPMAVNGQVVIRPMMYLALSYDHRLIDGKEAVTFLVTIKNLLEDPARLLLDI

SEQ ID NO: 15222 - protein, 280 aa, Vigna radiata
GEGTYGVVYKARDRVTNEAIALKKIRLEQEDEGVPSTAIREISLLKEMQHRNIVRLQDVVHSGKRLYLVFEYLDLDLKKHMDSSPEFAKDLRQVKMFLYQILCGIAYCHSHRVLHRDLKPQNLLIDRSTNSLKLADFGLARAFGIPVRTFTHEVVTLWYRAPEILLGSPRYSTPVDIWSVGCIFAEMVNQRPLFPGDSEIDELFKIFRILGTPNEDTWPGVTSLPDFKSAFPKWQPKDLKTVVPNLDPAGLDLLSRMLHLDPSKRITGRSALEHEYSERH

SEQ ID NO: 15223 - protein, 499 aa, Escherichia coli
MTEPHVAVLSQVQQFLDRQHGLYIDGRPGPAQSEKRLAIFDPATGQEIASTADANEADVDNAVMSAWRAFVSRRWAGRLPAERERILLRFADLVEQHSEELAQLETLEQGKSIAISRAFEVGCTLNWMRYTAGLTTKIAGKTLDLSIPLPQGARYQAWTRKEPVGVVAGIVPWNFPLMIGMWKVMPALAAGCSIVIKPSETTPLTMLRVAELASEAGIPDGVFNVVTGSGAVCGAALTSHPHVAKISFTGSTATGKGIARTAADRLTRVTLELGGKNPAIVLKDADPQWVIEGLMTGSFLNQGQVCAASSRIYIEAPLFDTLVSGFEQAVKSLQVGPGMSPVAQINPLVSRAHCDKVCSFLDDAQAQQAELIRGSNGPAGEGYYVAPTLVVNPDAKLRLTREEVFGPVVNLVRVADGEEALQLANDTEYGLTASVWTQNLSQALEYSDRLQAGTVWVNSHTLIDANLPFGGMKQSGTGRDFGPDWLDGWCETKSVCVRY

SEQ ID NO: 15224 - protein, 478 aa, Pseudomonas syringae pv. tomato str. DC3000
MSQKFDVVVIGAGPGGYVAAIKAAQLGLKTACIEKYQDKEGKLALGGTCLNVGCIPSKALLDSSWKFYEAKNGFAVHGISTSEVAIDVPAMIGRKSTIVKGLTGGVASLFKANGVTTLQGHGKLLAGKKVELTAADGTVEIIEADHVILASGSRPIDIPPAPVDQKVIVDSTGALEFQQVPQRLGVIGAGVIGLELGSVWARLGAQVTVLEALDKFIPAADEAVSKEALKTFTKQGLDIKLGARVTGSKVNGEEVVVSYTDAAGEQSITFDRLIVAVGRRPVTTDLLASDSGVDLDERGFIYVDDYCTTSVPGVYAIGDVVRGLMLAHKASEEGIMVVERIKGHKAQMNYNLIPSVIYTHPEIAWVGKTEQTLKAEGVEVNVGTFPFAASGRAMAANDTGGFVKIIADAKTDRVLGVHVIGPSAAELVQQGAIAMEFGSSAEDIGMMVFSHPTLSEALHEAALAVNGGAIHIQNRKKR

SEQ ID NO: 15225 - protein, 165 aa, Oryza sativa (indica cultivar-group)
MAAPDVDYRCFVGGLAWATDNRSLEAAFSTYGEILESKIINDRETGRSRGFGFVTFSSEQAMRDAIEGMSGKELDGRNITVNEAQSRRSGGGGGGGYGQRGGGGGYGGRGYGGGGGGGGYGQRREGGYGGGGGYGGGGGGGGYGGGYGGGYGSRGGGNSDGNWRN

SEQ ID NO: 15226 - protein, 499 aa, Ruegeria sp. PR1b
MNAASFTKSFWHDEAKKLEFRTKHLINGEWVDSEDGTTFDTINPATGETIAKVASGKAADIDKAVKNARETFKSGVWSMLAPRERLAVIERFSALIEENAVEFALLDCLDMGKPVMDMINIDIPESVKNLKFFAETADKVHGSLTATDPSVVHYILRQPLGVVGLITPWNYPLMMAAWKLGPALITGNSVVLKPAEQAPLSCALLGDLFLKAGGPAGVLNVVQGLGEEAGKAIGLHPDVDKIGFTGSTEVGKLLMTYAGQSNMKRVTTECGGKTPQIVFADYDNLDKAVTSAVYGIYGNMGEMCNAGSRILVQRPIYDEFIKRFSELTASNMVVGDPLDPDTTIGPLVTVEQQERVLEYIEIGKKEGATLALGGGRGLNSGCYVEPTLFTDVTNSMRVAQEEIFGPVGTVIPFDTAEEALEIANDSLYGLAAAVWTNDLKTAHRFGRDLESGFVWVNTFDIGDMTSIWGGYKQSGNGRDTCIEALSQYTQTKSVWMDMA

SEQ ID NO: 15227 - protein, 529 aa, Pleurotus sajor-caju
MPTQEVFDKKDGAVYTTSNGAPVAEPYAAQRAGLHGPLLLQDFHHIDLLAHFDRERIPERVVHANAAGAHGYFEVTHSCADITSNKLLCSVGKKVRLTARFSTVGGESGSADTARDPRGFALKLRTEEGNWDWVFNNTPIFFIRDPAKFSHFIHTQKRDPQTHLKDADMFWDYLGQNPESIHQMMILFSDRGTPDGVHQMHGYSGHTFKWLKDDGSFTYVQVHCRADSGFKTLDGETAHRLTADNPDYSTEMLFRTIEAGKFPSWTVYIQTMTPEQAENFRYNILDLTKVWPHKEFPLRPIGRFVLDENPKNYFAEIEQAAFAPSHLVPYIEPSADPVLQSRLFSYLDTHRHRLGANYHQIPVNAPIVPVANFQRDGPMTVNNNQGNRPNYQSSIQPLTYISNKETLEAGCRNQERMARHENFIGGAYRDLGEITELDFEQPRALWQKVWNDQQREAYVKNVAGHFGGVKSPVVRDRQLSVWAAVDQDLSDRIAKAVGAKPVAPLKVKPAAEALRFRCNIGGPPGPSRL

SEQ ID NO: 15228 - protein, 277 aa, Bordetella parapertussis 12822
MKNDLSIAFIGGGNMAAALASGLAGKVCPAANIHVVDINADSHAGWRARGMSAAAAPDATLAGCRVWVYAVKPQHMREAVAGTRPWLRPDTLIVSVAAGIHADTLAGWLGEPGQPWQRLVRCMPNTPALVGAGMTGLAALPGVTPQDRELAGQLLTSVGEVVWVDGDAGLDAVTALSGSGPAYVFLFIEALIAGGRAVGLTDEQARQLALGTLAGATRLAAQSDEPPAVLRERVTSKGGTTATALDVYAQGDFAGLVERAMQAAARRSRELAEEFGR

SEQ ID NO: 15229 - protein, 492 aa, Pseudomonas putida KT2440
MAVFASDSFGQLKVEKIMTAQWNHYINGEYVSPESEEYIHEFIPTTALPGDSIARGSAADVDKAVRAAAAAQPAWNARKPIERGRILLAIARLVRANAAAFCAKEAEETGKPLKMAAFEIEACAQYFEYYGGLATAIQGETINLGPSYHAYTTREPFGVVGVILPWNSPLNQAGRAIAPALVSGNTVVVKPSEFTSVTMLQFAELVVKEAGLPPGVLNVVTGTGKETGEPLVKHPLIRKVAFTGSVRAGREIGKLAADRIIPLSLELGGKSPNIVFEDADLDRAVAGSVFAFTVNTGQVCLAGTRCLVHESIFEKFSKKLAGAVEALQFSDGESFGLGPLTTKAQFEQVHRYNELAIQEGAHCLVGGEAPSDKTGWYVRPTVYTNVNNSMRIAREEIFGPVLVLIPFKDENEAVAIANDSDYGLAAGVWTTDLARAHRVSAQIEAGQVYVNEYPSGGVETPFGGFKQSGHGREKGIEALHHYTQTKTTIIRI

SEQ ID NO: 15230 - protein, 582 aa, Populus tremula x Populus tremuloides
  unsure (1)..(582): unsure at all Xaa locations
MVLFNVSRVETTPFGDQKPGTSGLRKKVKVFKQPNYLQNFVQSTFNALTPQNVRGATLVVSGDGRYFSKDAIQIITKMAAGNGLRRVWVGQNGLLSTPAVSAVIRERVGVDGSKATGAFILTASHNPGGPNEDFGIKYNMENGGPAPEGITDKIYENTKTIKEYLTADLPDVDITTIGVTSFSGSEGQFDVEVFDSASDYIKLMKSIFDFESIRKLLSSPKFTFCYDALHGVAGAYAKRIFVEELGAQESSLLNCVPKEDFGGGHPDPNLTYAKELVARMGLGKSNSEVEPPEFGAAADGDADRNMVLGKRFFVTPSDSVAIIAANAVEAIPYFSAGLKGVARSMPTSAALDVVAKSLNLKFFEVPTGWKFFGNLMDAGLCSVCGEESFGTGSDHIREKDGIWAVLAWLSILAYKNRENLGGGKLVTVEDIVHNHWATYGRHYYTRYDYENVDAGAAKELMACLVKLQSSLTEVNEIVSGIQSDVSKVVHADEFEYKDPVDGSISKHQGIRYLFEDGSRLVFRLSGTGSEGATIRLYIEQYEKDPSKTGRDSQDALAPLVAVALGLXKMQEFTGRSAPTVIT

SEQ ID NO: 15231 - protein, 378 aa, Wolbachia endosymbiont of Tunga penetrans
MSDLAKRMSLIKPSPTIAVTDKANRLKSEGKKICVLAAGEPDFDTPGHVKKAAIQAINEGKTKYTAVDGTLELKEAIINKLKKDNSLKYTPSQICVGAGAKQVLFNLFMATVNPGDEAIIPAPYWVSYVDMVSLFGGLPVVVECKQSFKLTPELLKSKITKKTKWLILNSPNNPAGVIYTYDELKGIAQILLEYPHVNVVTDDIYEHIIYDEKFFTIAQVEPKLYDRIFVVNGVSKAYAMTGWRIGYIAGRSDVIKAISTLQSQSTSNPNSIAQAAAVEALNGDHDFLKERTKIFKSRRDFVVEKLNSVPGLSASTPQGAFYLFVSCEGLLGKSTRSGKVINNDLDFAEYLLEDHLVAVVPGIAFGLKNFVRISYATS

SEQ ID NO: 15232 - protein, 469 aa, Corynebacterium efficiens
MTEHYDVVVLGAGPGGYVSAIRAAQLGKKVAVIEKQYWGGVCLNVGCIPSKALIKNAEIAHIFNHEKKTFGINGEVTFNYEDAHKRSRGVSDKIVGGVHYLMKKNKITEIDGFGTFKDAKTIEVTDGKDAGKTVTFDDCIIATGSVVNSLRGVEFSENVVSYEEQILNPVAPKKMVIVGGGAIGMEFAYVLGNYGVDVTLIEFMDRVLPNEDPEVSKVIAKAYKKMGIKLLPGHATTAVRDNGDSVEVDYQKKGSDKTETITVDRVLISVGFRPRVEGFGLENTGVKLTERGAIDIDEHMRTNVDGIYAIGDVTAKLQLAHVAEAQGIVAAETLAGAETQTLGDYMMMPRATFCNPQVASFGYTEEQAKEKWPDREIKVSSFPFSANGKAVGLAETDGFAKIVADAEFGELLGGHIVGANASELLNELVLAQNWDLTTEEISRSVHIHPTLSEAVKEAAHGVNGHMINF

SEQ ID NO: 15233 - protein, 498 aa, Zea mays
  unsure (1)..(498): unsure at all Xaa locations
SPERQEAGAGSVSVRSSGAIETPRHAPPLLPCTFLPPKARARGPKTSAFSCPPACLLVIAAAHEPPAPCRPALYGSAPTSPRGARKRSRQKPPPRRARRSGMASTVTFNPVSAQAALIQKPRNLGAISYAGLKMPASVSSGSESSFLGWNASLRAAVTPRIVPKAKSGSQISPQASYKVAVLGAAGGIGQPLGLLVKMSPLVSELHLYDIANVKGVAADLSHCNTPAQVLDFTGPSELANCLKGVDVVVIPAGVPRKPGMTRDDLFNINASIVKTLVEAVADSCPEAFIHIISNPVNSTVPIAAEVLKQKGVYNPKKLFGVTTLDVVRANTFVAQKKNLKLIDVDVPVXGGHAGIXILPLXSKTRPSVTFTDEETEELTKRIQNAGTEVVDAKAGAGSATLSMAYAAARFVESSLRALAGDPDVYECTFVQSEITDLPFFASRVKLGKNGVESVISADLQGMTEYEAKALEALKAELKASIEKGIAFVNKQREAAASV

SEQ ID NO: 15234 - protein, 380 aa, Corynebacterium efficiens YS-314
MVTASANYRGVTMSFTVPGIIARSKGAPVEKVNVVVPDPGANDVIVDIQACGVCHTDLAYRDGDISDEFPYLLGHEAAGVVSVVGENVTHVEVGDFVVLNWRAVCGECRACKKGEPKYCFNTHNASKKMTLEDGTELSPALGIGAFIEKTLVHEGQCTKVNPDEDPAAAGLLGCGIMAGLGAAVNTADIQLGESVAVFGLGGVGMAAVAGAKLAGASKIIAVDIDERKLEWAREFGATDVINSSGLSGEGEESEVVAKIRELTGGFGTDVTIDAVGIMPTWQQAFYSRDHAGRMVMVGVPNLTSHIDIPAIDFYGRGGSLRPAWYGDCLPERDFPAYVELHLQGRFPLDKFVSERIGLDDVEEAFNTMKAGDVLRSVVEL

SEQ ID NO: 15235 - protein, 412 aa, Shigella flexneri 2a str. 2457T
MPQQNYLDELTPAFTPLLAIKEASRCLLCHDAPCSQACPAQTDPGKFIRSIYFRNFKGAAETIRENNALGAVCARVCPTEKLCQSGCTRAGVDAPIDIGRLQRFVTDFEQQTGMEIYQPGTKTLGKVAIIGAGPAGLQASVTLTNQGYDVTIYEKEAHPGGWLRNGIPQFRLPQSVLDAEIARIEKMGVTIKCNNEIGKTLTLEQLKAENRAVLVTVGLSSGSGLPLFEHSDVEIAVDFLQRVRQAQGDISIPQSALIIGGGDVAMDVASTLKVLGCQAVTCVAREELDEFPASEKEFASARELGVSIIDGFTPVAVEGNKVTFKHVRLSGELTMAADKIILAVGQHARLDAFAELEQQRNTIKTQNYQIRDPQVFAAGDIVEGDKTVVYAVKTGKEAAEAIHHYLEGACSC

SEQ ID NO: 15236 - protein, 268 aa, Bouteloua hirsuta
ASYAAAAMPALDVLPEKPHHGWESNGAAAVAPTPAPRRLDGKVAIVTGGARGIGEAIVRLFARHGARVVIADVDAAAGDALAAALGPQVSCVRCDVSVEDNVRRAVEWAVARHGRLDVLCNNAGVLGRQTRAAKSILSFDAGEFDRVLRVNALGAALGMKHAARAMAPRRAGSIVSVASVAGVLGGLGPHAYTASKHAIVGLTKNAACELGAHGIRVNCVSPFGVATPMLINAWRQGHADAVPSDEEVEKMEEVVRGLATLKGPTLRP

SEQ ID NO: 15237 - protein, 386 aa, Oryza sativa
VVVQKNSRRGVHFRRAGPRQKNGYKGFYSSNYLTLTPKSVDDIHKRGGTVLGTSRGGHDTKKIVDNIQDRGINQVYIIGGDGTQKGAYEIFKEIRKRGLKVSVAGIPKTIDNDIAIIDKSFGFDTAVEEAQRAIDSAHVEACSAENGIGLVKLMGRYSGFIAMYATLASRDVDCCLIPESPFYMDGEGGLLQYVERRLKENKHMVIVVAEGAGQDLIAKSLSTSEQQDASGNKLLLDIGLWLTHKIKDHFKSKKMEMTIKYIDPTYMIRAIPSNASDNVYCTLLAHSAIHGAMAGYSFTVGNVNGRHAYIPFYRVTSTRNKVKITDRMWARLLSSTNQPSFLSQKDIDEAKENDRTANKPPLPTGLSHHVANSFDQSASSSSNSQI

SEQ ID NO: 15238 - protein, 130 aa, Pseudomonas putida
MAIEIKAPTFPESVADGTVATWHKKPGEAVKRDELIVDIETDKVVLEVLATADGVLGDIVKGEGDTVLSDELLGSIVEGGAAAAPAAAAAPAAAPAAAAADAGEDDPIAAPAARKLAEENGIDLATVAGT

SEQ ID NO: 15239 - protein, 307 aa, Pseudomonas fluorescens PfO-1
MAKYKGILLAGGAGSRLHPITLGVSKQSLPVYDKPMIYYPLSVLMLAEIREILIISTPEDLPGFQRMLGDGSQLGLSLSYAVQPSPDGLAQAFIIGREFVGEDNVCLVLGDNIFYGAGFGETLLQAAARDEGATVFGYYVADPERFGVVEFDAAGKALSICEKPSDPKSNYAVTGLYFYDNEVLQIAADIKPSPRGELEITDVNNVYLQRGKLNVSVMGRGMAWLDTGTHDALMEAGNFVQAIEKRQGLKIACLEEIAYHKGWIDDAQLLVHAGSMSKTGYGQYLARLIHDDVVVAMDAQRPLKGAA

SEQ ID NO: 15240 - protein, 488 aa, ASPERGILLUS NIDULANS FGSC A4
MVASAVRMRVPSASFISKGACSLRRPQASYKFTAAIQHQLPALAALSRYYASKSFPPHTIISMPALSPTMTAGNIGAWQKKAGDALQPGDVLVEIETDKAQMDFEFQEEGILAKVLKESGEKDVSVGSPIAVLVEEGTDVAAFESFSLEDAGGEGAGAAPPKETQETPKEAPKASEPSTPQPAAGAYEPDTSGEKLQPSLDREPAISPAAKALALEKGVPIKALKGTGRGGQITKEDVEKYKPTAAAAAAGPASEDIPLTSMRKTIASRLQQSWNQNPHFFVSTTLSVTKLLKLRQALNASSEGKYKLSVNDFLIKACAAALRKVPQVNSSWTEENGQVVIRQHNSVDISVAVATPVGLITPIVKNAQGLGLSSISNQVKDLGKRARDNKLKPEEYQGGTFTISNMGMNPAVERFTAIINPPQAGILAVGTTRKVAVPVETEEGTSVEWDDQIIVTASFDHRVVDGAVGAEWIKELKKVVENPLELLL

SEQ ID NO: 15241 - protein, 302 aa, Mycobacterium avium subsp. paratuberculosis str. k10
MIALLAPGQGSQTEGMLSPWLELDGAADQLALWSKASGLDLVRLGTTASTEEITDTAVTQPLVVAATLLAHQELTRRGLLADADLVVAGHSVGEIAAYAIAGVMAADDAVALAATRGAEMAKACAVEPTGMSAVLGGDEAEVLARLEQLDLFPANRNAAGQIVAAGSLAALEKLAEDPPAKARVRALGVAGAFHTKYMASALDGYAAAAAAVQTAEPTATLLSNRDGKPVASAAAAMEALVAQLTQPVRWDLCTATLRELEVAAAVEFPPAGTLTGIAKRELRGVSARAVKSPADLDALAEL

SEQ ID NO: 15242 - protein, 293 aa, Anabaena variabilis ATCC 29413
MQIHKVRKAVIPAAGFGTRLFPATKVVKKELFPIIDQDGRAKPVILAIVEEAINAGITEIGIVVQPDDIGVFADLFKNPPAPELLQKLSPHNQEYSQYLQELGQKVVLLTQSEQEGYGHAVFCAKDWVGNEPFLLMLGDHVYKSDIKKTCAQQVVEIYAQVHQSVVGLTTMPAAIINKAGCVTGLWQEFNSILELTQLAEKPSIDYAREHLRVEYMAEDEFLCVFGLYVLTPKIFDFLEESINQNLRDRGEFQLTTCLDKLCQAEGMTGYVMQGQCFDTGLPNTYRQTLIDFI

SEQ ID NO: 15243 - protein, 224 aa, Petunia x hybrida
MGRGRVELKRIENKINRQVTFAKRRNGLLKKAYELSVLCDAEVALIIFSNRGKLYEFCSSSSMLKTLERYQKCNYGAPETNISTREALEISSQQEYLKLKARYEALQRSQRNLLGEDLGPLNSKELESLERQLDMSLKQIRSTRTQLMLDQLQDLQRKEHALNEANRTLKQRLMEGSTLNLQCSKMHKMWATADKQLKLREMASFILWNVNPLYKLGIKMIQLQ

SEQ ID NO: 15244 - protein, 363 aa, Triticum aestivum
  unsure (1)..(363): unsure at all Xaa locations
MASTLALPRPSAPSPGTNVRAPLRSRASTRVSDGSAVAAVADTLFADYKPTTAFLFPGQGAQAVGMGKEALNVGSSXELFDKANDILGYDLLNLCIDGPKEKLNSTVISQPAIYVTSLAAVEVLRAREEGQSVIXNSVDVTCGLSLGEYTALAFAGAFSFEDGLKLVKLRGEAMQDASDAANSAMVSVIGLDSEKVQQLCDAANEDVDEKERVQIANFLCXGNYAVSXGVKGILPVEVNATSFKTIVTVLASCCGLLSTNPRSLQFSRTTRIRPWTNYKRLDHRGIPAFSKVDAQPHSXARGLIKEDYRDNRMTXSPVQWETTVTTLFXKALRRAIELGPXGKVKAGIIERINKGASIENIGA

SEQ ID NO: 15245 - protein, 496 aa, Mesorhizobium loti
MPSAAEPMARTNNNLTGASMQSDNASKFYIDGQWVMPGGAGRMDVVNPATEQSFMQIAIGTTEDADLAVQAAFEAFPTFSQTSRTERVELLRNVLRCYNDRYDDIARAVSTELGAPLKFAREAQAWAGQIHLESTIAALEAFSFDELHGSSMITWEPIGVCALITPWNWPLNQIVCKVAPALAAGCTVVLKPSELAPLSAIIFAEVLEEAAIPKGVFNLINGTGPEVGQYLAGHPRVDMVSFTGSTRAGIMVAKTAAETVKRVAQELGGKSANIVLADADLENAVVKGVEACFSNSGQSCDAPTRLLIPADRHAEALDIARRVAAATRVGDPSSEDTDMGPVISQQQFDKIQRMIGLGIEEGATLVAGGPGKPEGLDVGFYVKPTIFGGVTPEMTIAREEIFGPVLSIIPYDTEADAIRIANDSIYGLAAYVQGGSLEGARAVARKLQAGSVYVNYAPWDTHAPFGGYKQSGNGREYSHWGIRDFMEVKGIVGWGA

SEQ ID NO: 15246 - protein, 449 aa, Lactobacillus plantarum WCFS1
MADYDTIFIGSGHATWHAAVALAHAQHKVAIIEEDTIAGTCTNFGCDAKILLDGPFELTEQLKQYQGIGVNTTPTIDWSQLMAYKQQVIQPLSVQMTAVFKQLGITIITGHGELTDTHTVQVADSTYTADTIVIGTGQRPAKLAIPGADLMHDSRDFLDLPTMPKRLTLIGAGIISLEFANMAVLLGSEVHIIEFADRALPAFYSEHVKKMITHLQAAGVHFHFGEALSQVTKTATGLMATTASGLKIESDDIIAATGRIPNIEHLGLTKVGIKTDRHGIIVDDHLRTSIPNIYASGDVISKTLPKLTPTAIFESNYIAGQLLGSTAAIDYPVIPAVVFTLPRIAQVGVSVEAAQHDTEHFHVQALPYGKLLAFQYQNEVDADLQLVFDQENYLVGASIYGNGALDLINLLTMIIADHVSATTLSQKIFAFPSASVGIIDMLTPLLHHD

SEQ ID NO: 15247 - protein, 1129 aa, Solanum tuberosum
MASGSRTKHSHHSSSQAQSSGTSNVNYKDSISKAIAQYTADARLHAVFEQSGESGKFFDYSQSVKTTTQSVPERQITAYLTKIQRGGHIQPFGCMIAVDEASFRVIAYSENACEMLSLTPQSVPSLEKCEILTIGTDVRTLFTPSSSVLLERAFGAREITLLNPIWIHSKNSGKPFYAILHRVDVGIVIDLEPARTEDPALSIAGAVQSQKLRSEGLFLICNHFLVGTLKLLCDTVVESVRELTGYDRVMVYKFHEDEHGEVVAESKRSDLEPYIGLHYPATDIPQASRFLFKQNRVRMIVDCHATPVRVTQDESLMQPLCLVGSTLRAPHGCHAQYMANMGSIASLTLAVIINGNDEEAVGGGRNSMRLWGLVVGHHTSVRSIPFPLRYACEFLMQAFGLQLNMELQLASQLSEKHVLRTQTLLCDMLLRDSPPGIVTQSPSIMDLVKCDGAALYYQGKYYPLGVTPTEAQIKDIVEWLLAYHGDSTGLSTDSLPDAGYPGAASLGDAVCGMAVAYITSKDFLFWFRSHTAKEIKWGGAKHHPEDKDDGQRMHPRSSFKAFLEVVKSRSSPWENAEMDAIHSLQLILRDSFKDAEASNSKAIVHAHLGEMELQGIDELSSVAREMVRLIETATAPIFAVDVEGRINGWNAKVAELTGVSVEEAMGKSLVHDLVYKESQETAEKLLYNALRGEEDKNVEIKLRTFGAEQLEKAVFVVVNACARDYTNNIVGVCFVGQDVTGEKVVMDKFINIQGDYKAIVHSPNPLIPPIFASDENTCCSEWNTAMEKLTGWSRGEIVGKMLVGEIFGSCCRLKGPDAMTKFMIVLHNAIGGQDTDKFPFSFFDRNGKYVQALLTRNKRVNMEGDTIGAFCFIQIASPELQQALRVQRQQEKKCYSQMKELAYICQEIKSPLNGIRFTNSLLEATNLTENQKQYLETSAACERQMSKIIRDIDLENIEDGSLTLEKEDFFLGSVIDAVVSQVMLLLREKGVQLIRDIPEEIKTLTVHGDQVRIQQVLADFLLNMVRYAPSPDGWVEIQLRPSMMPISDGVTVVHIELGLYAPGRLPPELVQDMFHSSRWVTQEGLGLSMCRKMLKLMNGEIQYIRESERCYFLIILDLPMTRKGPKSVG

SEQ ID NO: 15248 - protein, 550 aa, Vibrio parahaemolyticus RIMD 2210633
MLKNINPTQTQAWKALTAHFESAQDMDLKELFAQDAARFDKYSARFGSDILVDYSKNLINEETLKHLFALANETELKSAIEAMFSGEAINQTEGRAVLHTALRNRTNTPVMVDGEDVMPAVNAVLEKMKSFTDRVIGGEWKGYTGKAITDIVNIGIGGSDLGPYMVTEALAPYKNHLNLHFVSNVDGTHIVETLKKVNPETTLFLIASKTFTTQETMTNAHTARDWFLESAGDQAHVAKHFAALSTNATAVSEFGIDTANMFEFWDWVGGRYSLWSAIGLSIALAVGYDNFVELLDGAHEMDKHFVSTDLESNIPVILALIGIWYNNFHGAESEAILPYDQYMHRFAAYFQQGNMESNGKYVDREGNAVTYQTGPIIWGEPGTNGQHAFYQLIHQGTKLIPCDFIAPAISHNPAGDHHQKLMSNFFAQTEALAFGKSEETVKEELVKAGKNAEEVAAIAPFKVFEGNRPTNSILVKQITPRTLGNLIAMYEHKIFVQGVIWNIFSFDQWGVELGKQLANQILPELADASQINSHDSSTNGLINAFKAFKA

SEQ ID NO: 15249 - protein, 715 aa, Escherichia coli
  unsure (1)..(715): unsure at all Xaa locations
MKKVVTVCPYCASGCKINLVVDNGKIVRAEAAQGKTNQGTLCLKGYYGWDFINDTQILTPRLKTPMIRRQRGGKLEPVSWDEALNYVAERLSAIKEKYGPDAIQTTGSSRGTGNETNYVMQKFARAVIGTNNVDCCARVCHGPSVAGLHQSVGNGAMSNAINEIDNTDLVFVFGYNPADSHPIVANHVINAKRNGAKIIVCDPRKIETARIADMHIALKNGSNIALLNAMGHVIIEENLYDKAFVASRTEGFEEYRKIVEGYTPESVEDITGVSASEIRQAARMYAQAKSAAILWGMGVTQFYQGVETVRSLTSLAMLTGNLGKPHAGVNPVRGQNNVQGACDMGALPDTYPGYQYVKDPANREKFAKAWGVESLPAHTGYXISELPHRAAHGEVRAAYIMGEDPLQTDAELSAVRKAFEDLELVIVQDIFMTKTASAADVILPSTSWGEHEGVFTAADRGFQRFFKAVEPKWDLKTDWQIISEIATRMGYPMHYNNTQEIWDELRHLCPDFYGATYEKMGELGFIQWPCRDTSDADQGTSYLFKEKFDTPNGLAQFFTCDWVAPIDKLTDEYPMVLSTVREVGHYSCRSMTGNCAALAALADEPGYAQINTEDAKRLGIEDEALVWVHSRKGKIITRAQVSDRPNKGAIYMTYQWWIGACNELVTENLSPITKTPEYKYCAVRVEPIADQRAAEQYVIDEYNKLKTRLREAALA

SEQ ID NO: 15250 - protein, 291 aa, Zea mays
MSAGRQAYWCYQCRQRVRPRGREMVCPYCDSGFVAEMDDVDALMSHFVGTDPDFHRDPRFGIMEAISAVMRHGMAGMNREVDVRGRPNFFSDLEMEFGSGPWLLFRGQLPGHLTEDNGFDVFVNGRRGGGGGGVGMRRANIADYFVGPGLDDLIEQLTQNDRRGPPPAAQSSIDAMPTVKITQRHLSGDSHCPICKEKFEMGSEAREMPCKHLYHSDCIVPWLEQHNSCPVCRYELPPQGSATGASCSRARSTDQSQSSSSSSSSGRTSGRQRRRNPFSFLWPFRSSSSSR

SEQ ID NO: 15251 - protein, 1421 aa, Polyangium cellulosum
MADRPIERAAEDPIAIVGAGCRLPGGVIDLSGFWTLLEGSRDTVGQVPAERWDAAAWFDPDLDAPGKTPVTRASFLSDVACFDASFFGISPREALRMDPAHRLLLEVCWEALENAAIAPSALVGTETGVFIGIGPSEYEAALPRATASAEIDAHGGLGTMPSVGAGRISYVLGLRGPCVAVDTAYSSSLVAVHLACQSLRSGECSTALAGGVSLMLSPSTLVWLSKTRALATDGRCKAFSAEADGFGRGEGCAVVVLKRLSGARADGDRILAVIRGSAINHDGASSGLTVPNGSSQEIVLKRALADAGCAASSVGYVEAHGTGTTLGDPIEIQALNAVYGLGRDVATPLLIGSVKTNLGHPEYASGITGLLKVVLSLQHGQIPAHLHAQALNPRISWGDLRLTVTRARTPWPDWNTPRRAGVSSFGMSGTNAHVVLEEAPAATCTPPAPERPAELLVLSARTAAALDAHAARLRDHLETYPSQCLGDVAFSLATTRSAMEHRLAVAATSSEGLRAALDAAAQGQTPPGVVRGIADSSRGKLAFLFTGQGAQTLGMGRGLYDVWPAFREAFDLCVRLFNQELDRPLREVMWAEPASVDAALLDQTAFTQPALFTFEYALAALWRSWGVEPELVAGHSIGELVAACVAGVFSLEDAVFLVAARGRLMQALPAGGAMVSIAAPEADVAAAVAPHAASVSIAAVNGPDQVVIAGAGQPVHAIAAAMAARGARTKALHVSHAFHSPLMAPMLEAFGRVAESVSYRRPSIVLVSNLSGKAGTDEVSSPGYWVRHAREVVRFADGVKALHAAGAGTFVEVGPKSTLLGLVPACLPDARPALLASSRAGRDEPATVLEALGGLWAVGGLVSWAGLFPSGGRRVPLPTYPWQRERYWIDTKADDAARGDRRAPGAGHDEVEKGGAVRGGDRRSARLDHPPPESGRREKVEAAGDRPFRLEIDEPGVLDRLVLRVTERRAPGLGEVEIAVDAAGLSFNDVQLALGMVPDDLPGKPNPPLLLGGECAGRIVAVGEGVNGLVVGQPVIALSAGAFATHVTTSAALVLPRPQALSATEAAAMPVAYLTAWYALDGIARLQPGERVLIHAATGGVGLAAVQWAQHVGAEVHATAGTPEKRAYLESLGVRYVSDSRSDRFVADVRAWTGGEGVDVVLNSLSGELIDKSFNLLRSHGRFVELGKRDCYADNQLGLRPFLRNLSFSLVDLRGMMLERPARVRALFEELLGLIAAGVFTPPPIATLPIARVADAFRSMAQAQHLGKLVLTLGDPEVQIRIPTHAGAGPSTGDRDLLDRLASAAPAARAAALEAFLRTQVSQVLRTPEIKVGAEALFTRLGMDSLMAVELRNRIEASLKLKLSTTFLSTSPNIALLTQNLLDALATALSLERVAAENLRAGVQSDFVSSGADQDWEIIAL

SEQ ID NO: 15252 - protein, 155 aa, Oryza sativa
KLELATSLIEKAKSKGVSLLLPTDIVVADKFAADAESKTVPASAIPDGWMGLDIGPDSIKTFSETLDTTKTVIWNGPMGVFEFEKFAAGTDAIAKKLADITAKGVTTIIGGGDSVAAVEKAGLADKMSHISTGGGASLELLEGKTLPGVLALNDA

SEQ ID NO: 15253 - protein, 362 aa, Corynebacterium efficiens YS-314
MCAWPTLRRATILARMTIPVKALQKTGPDAPFQITTIQRRSPRADDVVIDIKAAGICHSDIHTVRNEWGEANFPLTVGHEIAGVVSAVGSEVTDWKVGDRVGVGCLVDSCGTCEMCQQGFENHCLNGAVGTYNSVDVDGTITQGGYAEKIVVSERFVCRIPDALDFDVAAPLLCAGITTFSPIVQWNVKEGDKVAVMGLGGLGHMGVQIAAAKGAEVTVLSRSLKKAEVAKSLGAVRTLATSDESFFNDYRGEFDFILNTISANINLGAYLGLLKPRGVMAVVGLPPEKQPLSFGSLIGGSKVLTGSNIGGIPETQEMLDFCAEHGLGARIEKISVHEVDEAYDRVVAGDVQFRFVIDTSTF

SEQ ID NO: 15254 - protein, 408 aa, Brucella melitensis 16M
MATEIRVPTLGESVTEATIGKWFKKAGEAIAVDEPLVELETDKVTVEVPAPAAGVLAEITAKEGDTVEVGELLGQISSDGAAVAAAPAQKKEEAKPAAAAPAAAPVASASSGPAMQPAPAAAKLLAESGLSADQVEGSGKRGQVLKGDVLEAITKGVSAAPAAPVAARPASSADDASREERVKMTRLRQTIARRLKDAQNTAAMLTTFNEVDMSAVMELRNKYKDVFEKKHGVKLGFMGFFTKAVTHALKEIPAVNAEIDGTDIVYKNFCHVGMAVGTDKGLVVPVIRDADQMSIAEVEKELARLARAARDGSLSMADMQGGTFTITNGGVYGSLMSTPILNAPQSGILGMHKIQERPMVVGGQIVVRPMMYLALSYDHRIVDGKEAVTFLVRVKESLEDPERLVLDL

SEQ ID NO: 15255 - protein, 268 aa, Bouteloua hirsuta
ASYAAAAMPALDVLPEKPHHGWESNGAAAVAPTPAPRRLDEKVAIVTGGARGIGEAIVRLFARHGARVVIADVDAAAGDALAAALGPQVSCVRCDVSVEDDVRRAVEWAVARHGRLDVLCNNAGVLGRQTRAAKSILSFDAGEFDRVLRVNALGAALGMKHAARAMAPRRAGSIVSVASVAGVLGGLGPHAYTASKHAIVGLTKNAACELGAHGIRVNCVSPFGVATPMLINAWRQGHADAVPSDEEVEKMEEVVRGLATLKGPTLRP

SEQ ID NO: 15256 - protein, 288 aa, Corynebacterium efficiens YS-314
MKGIILAGGSGTRLYPITKGISKQLMPIYDKPMVYYPLTTLIQAGIREILIITTPEDRSAFERLLGDGSGWGISLSYAVQPSPDGLAQAFIIGEDFIGDDDVALVLGDNIFDGAQLGRALKACSDPDGGIVFAYEVSDPERYGVVEFDANNRAVSIEEKPAQPKSNFAVVGLYFYDNRVVEIAKSIEPSERGELEITSVNEAYLQAGALTVQRLDRGDVWLDTGTIDSMSEASAYVEVLQKRTGLIIGSPEVAAHRAGFISTEQLVELGGSLKKSGYGNYLLRAAGER

SEQ ID NO: 15257 - protein, 467 aa, Brucella melitensis 16M
MSYDVVVIGTGPGGYVAAIKAAQLGLKVAVVEKRKTFGGTCLNIGCIPSKALLHASEVFAEAGHSFDTLGVEVTPKLNLTKMLAHKDTTVKANVSGVEFLFKKNKITPYIGTGKIVGKGKVSVTSEDGKVEEIEAKNIIIATGSDVAGIPGVKVDIDEKVIVSSTGALSFDKVPGSLIVVGGGVIGLELGSVWARLGAKVTVVEYLDKVLGPMDGEVSKQFQRLLEKQGIAFKLGAKVTGVEKVGKGAKITFEPVKGGDAETLEADAVLIATGRRPYTDGLGLQEAGVAVDERGRVAIDDHWRTNVEGIYAIGDVVQGPMLAHKAEDEGIAVAEIIAGQAGHVNFDVIPSVVYTQPEVASVGKTEEELKAAGINYKVGKFPFTANGRARAMLHTGGFVKILADKATDRVLGAHILGYNAGEMIHELAVLMEFGGSSEDLARTCHAHPTMSETVRESALATFAKPIHM

SEQ ID NO: 15258 - protein, 97 aa, Pseudomonas sp.
VDRLTQPLLRMTNGQYDKQGEFQPISWEKAFDIMELKFKEALKSKGPGSVGMFGSGQWTVWEGYAANKLMKAGFRSNNIDPNAPHCMASAVMGFMRT

SEQ ID NO: 15259 - protein, 350 aa, Schizosaccharomyces pombe
MTIPDKQLAAVFHTHGGPENVKFEEVPVAEPGQDEVLVNIKYTGVCHTDLHALQGDWPLPAKMPLIGGHEGAGVVVKVGAGVTRLKIGDRVGVKWMNSSCGNCEYCMKAEETICPHIQLSGYTVDGTFQHYCIANATHATIIPESVPLEVAAPIMCAGITCYRALKESKVGPGEWICIPGAGGGLGHLAVQYAKAMAMRVVAIDTGDDKAELVKSFGAEVFLDFKKEADMIEAVKACTNGGAHGTLVLSTSPKSYEQAAGFARPGSTMVTVSMPAGAKLGADIFWLTVKMLKICGSHVGNRIDSIEALEYVSRGLVKPYYKVQPFSTLPDVYRLMHENKIAGRIVLDLSK

SEQ ID NO: 15260 - protein, 554 aa, Yersinia pestis biovar Medievalis str. 91001
MCSIFGVLELKTDPIELRKKALEMSRLMRHRGPDWSGVWANDKAILAHERLSIVDVNTGAQPLYNAAHTHILAVNGEIYNHQALRQQYSDRYAFQTGSDCEVILALYQEKGPAFLDDLQGMFAFVLYDTEKDAYLIGRDHLGIIPLYMGHDEHGNMFVASEMKALVPVCRTIKEFPAGSYLWSQDGEIREYYHRDWFDYDHVKDNVTDKIQLANALEDAVKSHLMSDVPYGVLLSGGLDSSVISAITKKFAARRVEDNERSEAWWPQLHSFAVGLIGSPDLRAAQEVANHLGTVHHEIHFTVQEGLDAIRDVIYHIETYDVTTIRASTPMYLMSRKIKAMGIKMVLSGEGSDEVFGGYLYFHKAPNAKELHEETVRKLLALHMYDCARANKAMSAWGVEARVPFLDKNFLDVAMRINPQDKMCGNGKMEKHILRECFESYLPHSVAWRQKEQFSDGVGYSWIDTLKEKAAEQVTDQQMETAHFRFPYNTPGSKEGYLYREIFEELFPLPSAAECVPGGPSVACSSAKAIEWDESFKNMDDPSGRAVGVHQDAYK

SEQ ID NO: 15261 - protein, 121 aa, Glycine max
MASSMLSSAAVGTSPAQATMVAPFTGLKTSAAFPATRKANNDITSIASNGGRVSCMKVCPPDGKKKFETLSYLPDLTEVELGKEVDYLLRNKCTPCAEFQLEHEFVYRDHRSKPGYYDARY

SEQ ID NO: 15262 - protein, 391 aa, Daucus carota
MGKHSAFSVFLFSILVAHSHVSASSQTCDFPAIFNFGDANSDTGAFAAWFFGNPPFFGQSYFNGSAGRVSDGRLLIDFMATDLGLPFLHPYMDSLGANFSHGANFANILSTIALPTSNIIPGVRPPRGLNPVNLDIQVAQFAQFVNRSQTQGEAFDNFMPKQDYFSQALYTLDIGQIDITQEFLTNKTDDEIKAVVPGLISSLSSNIQILYSLGGRSFWIHNLGPNGCLPILLTLAPVPDDQLDSAGCAKRYNDLTQYFNSELKKGVDQLRTDLPLAAVTYVDVYTAKYSLYQEPAKYGFTHPLETCCGFGGRYNYGEFSLCGSTITVNGTQLTVGPCENPAEYINYEGQTYTQAADQITFNKISTGELSDPPNSLKTACPKLSLPRVSDI

SEQ ID NO: 15263 - protein, 456 aa, Mycobacterium avium subsp. paratuberculosis str. k10
MSVAEPKRDIAGLPLAPKNPLSYRERLRAIKEFHTGTNKLRDAGGPVTRVTLGPRWLISPIVLATSPQGIRDIVSVRDGSIDKTSTVATELRRLLGPNLFVLPHTEWLPRRRTLQPVFTRQRVREFGGHMAEAAESVCAGWPEDTEIDLDAQCRTLTLRALGRSVLGLDLDERSDAIAEPLRVATSYAVRRALRPLRAPEWLPTPSRRRARAAAGAIRALADEILQACRADPGREAPLVHALIAATDPETGQALSDKEIRDEMIIFLFAGHDTTATTLTYALWALGRHPEYQARVAAEVAELPDRHLTPDDVARLGFTVRVLQEALRLCPPGPTGTRMATRDVEVAGYRVEAGTMLAFGRMAVQTDPSLWDAPLRFDPDRFDPRRAGDRDRWQYLPFGGGPRSCIGDHFAMLEATLALATIVRRVEIESLSDDFPLAVPFTMVAAAPIRAMVRRRR

SEQ ID NO: 15264 - protein, 184 aa, Physcomitrella patens subsp. patens
MASAVASTVVAPVSVTVASSSVAASRESSSVKAFSGLKSATLFTSKSQQLSSVQNGSRVQCMQVWNPIGQPKFETFSYLPPLSDDQIARQVDYMIQQNLIPCIEFDTVGAVSRTNFSGSGSSGYYDGRYWTMWKLPMFGCTDSSQVLREIQECKTSYPSCWVRVLGFDSKKQVQICGFLVARPN

SEQ ID NO: 15265 - protein, 358 aa, ASPERGILLUS NIDULANS FGSC A4
MFAARQSFGFLQKRAFSASASQASKVAVLGASGGIGQPLSLLLKLNPRVSELALYDIRGGPGVAADISHINTNSTVKGYEPTESGLADALKGSEIVLIPAGVPRKPGMTRDGKEDDCENLRIGTDLLMTDLFNTNASIVRDLAKAAAKASPEANILVISNPVNSTVPIVSEVFKAAGVYNPKRLFGVTTLDVVRASRFISQVQGTDPSKEAVPVVGGHSGVTIVPLLSQSNHPNIDGKTRDELVHRIQFGGDEVVKAKDGAGSATLSMAMAGARFAESLLRAAQGEKGVVEPTFVESPLYKDQGVNFFASKVELGPNGAEKINPVGEVNEFEQKLLEACLVDLKKNIQKGIDFVKANP

SEQ ID NO: 15266 - protein, 666 aa, ASPERGILLUS NIDULANS FGSC A4
MEEMDLSLSPSSSIASDADGQPSPRKKTRVQFDEDVEMREISYNAETQGGSQWTTDKSAAVVREEVRRAIQRHVSGGDSEAYDRVKEVFSINPRRLDANGMPPSNVPTHTTLKHHLMGLLSNVAALDRSCNGLVQAVLDSEWLGRDESYIKLYIRFLGNLAAAQGSYLGSVLKMLANYMGELPRGTGRLPGYPHVHPAEAYTRVHMAMRHVLQLVPSGSGSLSQIISSQFPFDTDSAKANIAYTQNLVKVIRYAPELQADILALITEKLVKIDVQIQVDMEDLEDEEGEEVLHAISPEAVMFAEDLDDEDDDDNASVVSDESVEPESRRLKTIKENILKLDGMIDTLFEYYAPPFTSGTLDDKENALDLLLSHFSTIILPTYRSRHSQFLLFHFSQSSPILVDRFAATCVQLIFNKAQPAILRQSAAAYLASFVARGAHISSEVVRDVFDLLGTHLNNLRLDYEPSCRGPDLRRFGPFYSTAQALLYIFCFRWRDLTTAAIEGDTPEQIDELEPEDITFPPSIRDVLHKAILSKLNPLKVCSPAIVSQFARMSQHLNFIYVFTILETNKRLRMSTYRNIAALSDPRYSHVERETRAGDDLGYQLDAYFPFDPYQLPRSRRWLEGDYVEWRGIPGLDDRDDDDDSDDLEELSDDEDDLSDGTETDHE

SEQ ID NO: 15267 - protein, 405 aa, Sinorhizobium meliloti 1021
MEEFHKVRRLPPYVFEQVNRLKASARAAGADIIDLGMGNPDLPTPQSIVDKLCEVVQDPRTHRYSSSKGIPGLRRAQAAYYARRFGVKLNPETQVVATLGSKEGFANMAQAITAPGDVVLCPNPTYPIHAFGFLMAGGVIRSISVEPDESFFPPLERAVRHSIPKPLALILNYPSNPTAQVATLDFYKDVIAFAKKHDIIVLSDLAYSEIYFDDAPPPSVLEVPGATDVTVEFTSMSKTFSMPGWRMGFAVGNERLIAALTRVKSYLDYGAFTPIQVAATQALNGDGSDIAEVRAIYKRRRDVMVESFGKAGFEVPPPPATMFAWAKIPEKFRHLGSLEFSKLLVEKADVAVAPGIGFGEQGDDYVRLALVENEHRIRQAARNIKRFLSSADETMHNVISLNAHR

SEQ ID NO: 15268 - protein, 434 aa, Yersinia pestis biovar Medievalis str. 91001
MTRILQSINKIALKERLMESKVVVPAEGKKITVDAQGKLVVPHNPIIPFIEGDGIGVDVTPAMINVVDAAVKKAYNGERKISWMEIYTGEKSTHVYGKDVWLPEETLDLIRDYRVAIKGPLTTPVGGGIRSLNVALRQQLDLYVCLRPVRYYEGTPSPVKHPELTNMVIFRENAEDIYAGIEWKAGSPEAEKVIKFLREEMGVKKIRFPEQCGIGVKPCSEEGTKRLVRAAIEYAITNDRESVTLVHKGNIMKFTEGAFKDWGYQLAREEFGGELIDGGPWVKIKNPNNGKEIIVKDVIADAFLQQILLRPAEYDVIACMNLNGDYISDALAAQVGGIGIAPGANIGDDCALFEATHGTAPKYAGQDKVNPGSIILSAEMMLRHMGWFEAADLIIKGTEGAIQAKTVTYDFERLMEGAKLLKCSEFGDAIIKHM

SEQ ID NO: 15269 - protein, 7257 aa, Polyangium cellulosum
MTTRGPTAQQNPLKQAAIIIQRLEERLAGLAQAELERTEPIAIVGIGCRFPGGADAPEAFWELLDAERDAVQPLDRRWALVGVAPVEAVPHWAGLLTEPIDCFDAAFFGISPREARSLDPQHRLLLEVAWEGLEDAGIPPRSIDGSRTGVFVGAFTADYARTVARLPREERDAYSATGNMLSIAAGRLSYTLGLQGPCLTVDTACSSSLVAIHLACRSLRAGESDLALAGGVSTLLSPDMMEAAARTQALSPDGRCRTFDASANGFVRGEGCGLVVLKRLSDAQRDGDRIWALIRGSAINHDGRSTGLTAPNVLAQETVLREALRSAHVEAGAVDYVETHGTGTSLGDPIEVEALRATVGPARSDGTRCVLGAVKTNIGHLEAAAGVAGLIKAALSLTHERIPRNLNFRTLNPRIRLEGSALALATEPVPWPRTDRPRFAGVSSFGMSGTNAHVVLEEAPAVELWPAAPERSAELLVLSGKSEGALDAQAARLREHLDMHPELGLGDVAFSLATTRSAMTHRLAVAVTSREGLLAALSAVAQGQTPAGAARCIASSSRGKLALLFTGQGAQTPGMGRGLCAAWPAFREAFDRCVTLFDRELDRPLREVMWAEAGSAESLLLDQTAFTQPALFAVEYALTALWRSWGVEPELLVGHSIGELVAACVAGVFSLEDGVRLVAARGRLMQGLSAGGAMVSLGAPEAEVAAAVAPHAAWVSIAAVNGPEQVVIAGVEQAVQAIAAGFAARGVRTKRLHVSHAFHSPLMEPMLEEFGRVAASVTYRRPSVSLVSNLSGKVVTDELSAPGYWVRHVREAVRFADGVKALHEAGAGTFLEVGPKPTLLGLLPACLPEAEPTLLASLRAGREEAAGVLEALGRLWAAGGSVSWPGVFPTAGRRVPLPTYPWQRQRYWIEAPAEGLGATAADALAQWFYRVDWPEMPRSSVDSRRARSGGWLVLADRGGVGEAAAAALSSQGCSCAVLHAPAEASAVAEQVTQALGGRNDWQGVLYLWGLDAVVEAGASAEEVGKVTHLATAPVLALIQAVGTGPRSPRLWIVTRGACTVGGEPDAAPCQAALWGMGRVAALEHPGSWGGLVDLDPEESPTEVEALVAELLSPDAEDQLAFRQGRRRAARLVAAPPEGNAAPVSLSAEGSYLVTGGLGALGLLVARWLVERGAGHLVLISRHGLPDREEWGRDQPPEVRARIAAIEALEAQGARVTVAAVDVADAEGMAALLAAVEPPLRGVVHAAGLLDDGLLAHQDAGRLARVLRPKVEGAWVLHTLTREQPLDLFVLFSSASGVFGSIGQGSYAAGNAFLDALADLRRTQGLAALSIAWGLWAEGGMGSQAQRREHEASGIWAMPTSRALAAMEWLLGTRATQRVVIQMDWAHAGAAPRDASRGRFWDRLVTVTKAASSSAVPAVERWRNASVVETRSALYELVRGVVAGVMGFTDQGTLDVRRGFAEQGLDSLMAVEIRKRLQGELGMPLSATLAFDHPTVERLVEYLLSQALELQDRTDVRSVRLPATEDPIAIVGAACRFPGGVEDLESYWQLLTEGVVVSTEVPADRWNGADGRGPGSGEAPRQTYVPRGGFLREVETFDAAFFHISPREAMSLDPQQRLLLEVSWEAIERAGQDPSALRESPTGVFVGAGPNEYAERVQDLADEAAGLYSGTGNMLSVAAGRLSFFLGLHGPTLAVDTACSSSLVALHLGCQSLRRGECDQALVGGVNMLLSPKTFALLSRMHALSPGGRCKTFSADADGYARAEGCAVVVLKRLSDAQRDRDPILAVIRGTAINHDGPSSGLTVPSGPAQEALLRQALAHAGVVPADVDFVECHGTGTALGDPIEVRALSDVYGQARPADRPLILGAAKANLGHMEPAAGLAGLLKAVLALGQEQIPAQPELGELNPLLPWEALPVAVARAAVPWPRTDRPRFAGVSSFGMSGTNAHVVLEEAPAVELWPAAPERSAELLVLSGKSEGALDAQAARLREHLDMHPELGLGDVAFSLATTRSAMNHRLAVAVTSREGLLAALSAVAQGQTPPGAARCIASSSRGKLAFLFTGQGAQTPGMGRGLCAAWPAFREAFDRCVALFDRELDRPLCEVMWAEPGSAESLLLDQTAFTQPALFTVEYALTALWRSWGVEPELVAGHSAGELVAACVAGVFSLEDGVRLVAARGRLMQGLSAGGAMVSLGAPEAEVAAAVAPHAAWVSIAAVNGPEQVVIAGVEQAVQAIAAGFAARGVRTKRLHVSHASHSPLMEPMLEEFGRVAASVTYRRPSVSLVSNLSGKVVTDELSAPGYWVRHVREAVRFADGVKALHEAGAGTFLEVGPKPTLLGLLPACLPEAEPTLLASLRAGREEAAGVLEALGRLWAAGGSVSWPGVFPTAGRRVPLPTYPWQRQRYWPDIEPDSRRHAAADPTQGWFYRVDWPEIPRSLQKSEEASRGSWLVLADKGGVGEAVAAALSTRGLPCVVLHAPAETSATAELVTEAAGGRSDWQVVLYLWGLDAVVGAEASIDEIGDATRRATAPVLGLARFLSTVSCSPRLWVVTRGACIVGDEPAIAPCQAALWGMGRVAALEHPGAWGGLVDLDPRASPPQASPIDGEMLVTELLSQETEDQLAFRHGRRHAARLVAAPPRGEAAPASLSAEASYLVTGGLGGLGLIVAQWLVELGARHLVLTSRRGLPDRQAWREQQPPEIRARIAAVEALEARGARVTVAAVDVADVEPMTALVSSVEPPLRGVVHAAGVSVMRPLAETDETLLESVLRPKVAGSWLLHRLLHGRPLDLFVLFSSGAAVWGSHSQGAYAAANAFLDGLAHLRRSQSLPALSVAWGLWAEGGMADAEAHARLSDIGVLPMSTSAALSALQRLVETGAAQRTVTRMDWARFAPVYTARGRRNLLSALVAGRDIIAPSPPAAATRNWRGLSVAEARMALHEVVHGAVARVLGFLDPSALDPGMGFNEQGLDSLMAVEIRNLLQAELDVRLSTTLAFDHPTVQRLVEHLLVDVLKLEDRSDTQHVRSLASDEPIAIVGAACRFPGGVEDLESYWQLLAEGVVVSAEVPADRWDAADWYDPDPEIPGRTYVTKGAFLRDLQRLDATFFRISPREAMSLDPQQRLLLEVSWEALESAGIAPDTLRDSPTGVFVGAGPNEYYTQRLRGFTDGAAGLYGGTGNMLSVAAGRLSFFLGLHGPTLAMDTACSSSLVALHLACQSLRLGECDQALVGGVNVLLAPETFVLLSRMRALSPDGRCKTFSADADGYARGEGCAVVVLKRLRDAQRAGDSILALIRGSAVNHDGPSSGLTVPNGPAQQALLRQALSQAGVSPVDVDFVECHGTGTALGDPIEVQALSEVYGPGRSEDRPLVLGAVKANVAHLEAASGLASLLKAVLALRHEQIPAQPELGELNPHLPWNTLPVAVPRKAVPWGRGARPRRAGVSAFGLSGTNVHVVLEEAPEVELVPAAPARPVELVVLSAKSAAALDAAAERLSAHLSAHPELSLGDVAFSLATTRSPMEHRLAIATTSREALRGALDAAAQRQTPQGAVRGKAVSSRGKLAFLFTGQGAQMPGMGRGLYEAWPAFREAFDRCVALFDRELDQPLREVMWAAPGLAQAARLDQTAYAQPALFALEYALAALWRSWGVEPHVLLGHSIGELVAACVAGVFSLEDAVRLVAARGRLMQALPAGGAMVAIAASEAEVAASVAPHAATVSIAAVNGPDAVVIAGAEVQVLALGATFAARGIRTKRLAVSHAFHSPLMDPMLEDFQRVAATIAYRAPDRPVVSNVTGHVAGPEIATPEYWVRHVRSAVRFGDGAKALHAAGAATFVEIGPKPVLLGLLPACLGEADAVLVPSLRADRSECEVVLAALGTWYAWGGALDWKGVFPDGARRVALPMYPWQRERHWMDLTPRSAAPAGIAGRWPLAGVGLCMPGAVLHHVLSIGPRHQPFLGDHLVFGKVVVPGAFHVAVILSIAAERWPERAIELTGVEFLKAIAMEPDQEVELHAVLTPEAAGDGYLFELATLAAPETERRWTTHARGRVQPTDGAPGALPRLEVLEDRAIQPLDFAGFLDRLSAVRIGWGPLWRWLQDGRVGDEASLATLVPTYPNAHDVAPLHPILLDNGFAVSLLATRSEPEDDGTPPLPFAVERVRWWRAPVGRVRCGGVPRSQAFGVSSFVLVDETGEVVAEVEGFVCRRAPREVFLRQESGASTAALYRLDWPEAPLPDAPAERMEESWVVVAAPGSEMAAALATRLNRCVLAEPKGLEAALAGVSPAGVICLWEPGAHEEAPAAAQRVATEGLSVVQALRDRAVRLWWVTTGAVAVEAGERVQVATAPVWGLGRTVMQERPELSCTLVDLEPEVDAARSADVLLRELGRADDETQVVFRSGERRVARLVKATTPEGLLVPDAESYRLEAGQKGTLDQLRLAPAQRRAPGPGEVEIKVTASGLNFRTVLAVLGMYPGDAGPMGGDCAGIVTAVGQGVHHLSVGDAVMTLGTLHRFVTVDARLVVRQPAGLTPAQAATVPVAFLTAWLALHDLGNLRRGERVLIHAAAGGVGMAAVQIARWIGAEVFATASPSKWAAVQAMGVPRTHIASSRTLEFAETFRQVTGGRGVDVVLNALAGEFVDASLSLLTTGGRFLEMGKTDIRDRAAVAAAHPGVRYRVFDILELAPDRTREILERVVEGFAAGHLRALPVHAFAITKAEAAFRFMAQARHQGKVVLLPAPSAAPLAPTGTVLLTGGLGALGLHVARWLAQQGAPHMVLTGRRGLDTPGAAKAVAEIEALGARVTIAASDVADRNALEAVLQAIPAEWPLQGVIHAAGALDDGVLDEQTTDRFSRVLAPKVTGAWNLHELTAGNDLAFFVLFSSMSGLLGSAGQSNYAAANTFLDALAAHRRAEGLAAQSLAWGPWSDGGMAAGLSAALQARLARHGMGALSPAQGTALLGQALARPETQLGAMSLDVRAASQASGAAVPPVWRALVRAEARHAAAGAQGALAARLGALPEARRADEVRKVVQAEIARVLSWGAASAVPVDRPLSDLGLDSLTAVELRNVLGQRVGATLPATLAFDHPTVDALTRWLLDKVLAVAEPSVSPAKSSPQVALDEPIAVIGIGCRFPGGVTDPESFWRLLEEGSDAVVEVPHERWDIDAFYDPDPDVRGKMTTRFGGFLSDIDRFEPAFFGISPREATTMDPQQRLLLETSWEAFERAGILPERLMGSDTGVFVGLFYQEYAALAGGIEAFDGYLGTGTTASVASGRISYVLGLKGPSLTVDTACSSSLVAVHLACQALRRGECSVALAGGVALMLTPATFVEFSRLRGLAPDGRCKSFSAAADGVGWSEGCAMLLLKPLRDAQRDGDPILAVIRGTAVNQDGRSNGLTAPNGSSQQEVIRRALEQAGLAPADVSYVECHGTGTTLGDPIEVQALGAVLAQGRPSDRPLVIGSVKSNIGHTQAAAGVAGVIKVALALERGLIPRSLHFDAPNPHIPWSELAVQVAAKPVEWTRNGAPRRAGVSSFGVSGTNAHVVLEEAPAAAFAPAAARSAELFVLSAKSAAALDAQAARLSAHVVAHPELGLGDLAFSLATTRSPMTYRLAVAATSREALSAALDTAAQGQAPPAAARGHASTGSAPKVVFVFPGQGSQWLGMGQKLLSEEPVFRDALSACDRAIQAEAGWSLLAELAADETTSQLGRIDVVQPALFAIEVALSALWRSWGVEPDAVVGHSMGEVAAAHVAGALSLEDAVAIICRRSLLLRRISGQGEMAVVELSLAEAEAALLGYEDRLSVAVSNSPRSTVLAGEPAALAEVLAILAAKGVFCRRVKVDVASHSPQIDPLRDELLAALGELEPRQATVSMRSTVTSTIVAGPELVASYWADNVRQPVRFAEAVQSLMEGGHGLFVEMSPHPILTTSVEEIRRATKREGVAVGSLRRGQDERLSMLEALGALWVHGQAVGWERLFSAGGAGLRRVPLPTYPWQRERYWVEAPTGGAASGSRFAHAGSHPLLGEMQTLSTQRSTRVWETTLDLKRLPWLGDHRVQGAVVFPGAAYLEMALSSGAEALGDGPLQVSDVVLAEALAFADDTPVAVQVMATEERPGRLQFHVASRVPGHGRAAFRSHARGVLRQTERAEVPARLDLAALRARLQASAPAAATYAALAEMGLEYGPAFQGLVELWRGEGEALGRVRLPEAAGSPAACRLHPALLDACFHVSSAFADRGEATPWVPVEIGSLRWFQRPSGELWCHARSVSHGKPTPDRRSTDFWVVDSTGAIVAEISGLVAQRLAGGVRRREEDDWFMEPAWEPTAVPGSEVTAGRWLLIGSGGGLGAALYSALTEAGHSVVHATGHGTSAAGLQALLTASFDGQAPTSVVHLGSLDERGVLDADAPFDADALEESLVRGCDSVLWTVQAVAGAGFRDPPRLWLVTRGAQAIGAGDVSVAQAPLLGLGRVIALEHAELRCARIDLDPARRDGEVDELLAELLADDAEEEVAFRGGERRVARLVRRLPETDCREKIEPAEGRPFRLEIDGSGVLDDLVLRATERRPPGPGEVEIAVEAAGLNFLDVMRAMGIYPGPGDGPVALGAECSGRIVAMGEGVESLRIGQDVVAVAPFSFGTHVTIDARMVAPRPAALTAAQAAALPVAFMTAWYGLVHLGRLRAGERVLIHSATGGTGLAAVQIARHLGAEIFATAGTPEKRAWLREQGIAHVMDSRSLDFAEQVLAATKGEGVDVVLNSLSGAAIDASLATLVPDGRFIELGKTDIYADRSLGLAHFRKSLSYSAVDLAGLAVRRPERVAALLAEVVDLLARGALQPLPVEIFPLSRAADAFRKMAQAQHLGKLVLALEDPDVRIRVPGESGVAIRADGTYLVTGGLGGLGLSVAGWLAEQGAGHLVLVGRSGAVSAEQQTAVAALEAHGARVTVARADVADRAQIERILREVTASGMPLRGVVHAAGILDDGLLMQQTPARFRAVMAPKVRGALHLHALTREAPLSFFVLYASGAGLLGSPGQGNYAAANTFLDALAHHRRAQGLPALSIDWGLFADVGLAAGQQNRGARLVTRGTRSLTPDEGLWALERLLDGDRTQAGVMPFDVRQWVEFYPAAASSRRLSRLVTARRVASGRLAGDRDLLERLATAEAGARAGMLQEVVRAQVSQVLRLPEGKLDVDAPLTSLGMDSLMGLELRNRIEAVLGITMPATLLWTYPTVAALSAHLASHVVSTGDGESARPPDTGNVAPMTHEVASLDEDGLFALIDESLARAGKR

SEQ ID NO: 15270 - protein, 2439 aa, Polyangium cellulosum
MATTNAGKLEHALLLMDKLAKKNASLEQERTEPIAIIGIGCRFPGGADTPEAFWELLDSGRDAVQPLDRRWALVGVHPSEEVPRWAGLLTEAVDGFDAAFFGTSPREARSLDPQQRLLLEVTWEGLEDAGIAPQSLDGSRTGVFLGACSSDYSHTVAQQRREEQDAYDITGNTLSVAAGRLSYTLGLQGPCLTVDTACSSSLVAIHLACRSLRARESDLALAGGVNMLLSSKTMIMLGRIQALSPDGHCRTFDASANGFVRGEGCGMVVLKRLSDAQRHGDRIWALIRGSAMNQDGRSTGLMAPNVLAQEALLRQALQSARVDAGAIDYVETHGTGTSLGDPIEVDALRAVMGPARADGSRCVLGAVKTNLGHLEGAAGVAGLIKAALALHHESIPRNLHFHTLNPRIRIEGTALALATEPVPWPRAGRPRFAGVSAFGLSGTNVHVVLEEAPATVLAPATPGRSAELLVLSAKSTAALDAQAARLSAHIAAYPEQGLGDVAFSLVATRSPMEHRLAVAATSREALRSALEAAAQGQTPAGAARGRAASSPGKLAFLFAGQGAQVPGMGRGLWEAWPAFRETFDRCVTLFDRELHQPLCEVMWAEPGSSRSSLLDQTAFTQPALFALEYALAALFRSWGVEPELIAGHSLGELVAACVAGVFSLEDAVRLVVARGRLMQALPAGGAMVSIAAPEADVAAAVAPHAASVSIAAVNGPEQVVIAGAEKFVQQIAAAFAARGARTKPLHVSHAFHSPLMDPMLEAFRRVTESVTYRRPSMALVSNLSGKPCTDEVCAPGYWVRHAREAVRFADGVKALHAAGAGIFVEVGPKPALLGLLPACLPDARPVLLPASRAGRDEAASALEALGGFWVVGGSVTWSGVFPSGGRRVPLPTYPWQRERYWIEAPVDGEADGIGRAQAGDHPLLGEAFSVSTHAGLRLWETTLDRKRLPWLGEHRAQGEVVFPGAGYLEMALSSGAEILGDGPIQVTDVVLIETLTFAGDTAVPVQVVTTEERPGRLRFQVASREPGARRASFRIHARGVLRRVGRAETPARLNLAALRARLHAAVPAAAIYGALAEMGLQYGPALRGLAELWRGEGEALGRVRLPESAGSATAYQLHPVLLDACVQMIVGAFADRDEATPWAPVEVGSVRLFQRSPGELWCHARVVSDGQQAPSRWSADFELMDGTGAVVAEISRLVVERLASGVRRRDADDWFLELDWEPAALEGPKITAGRWLLLGEGGGLGRSLCSALKAAGHVVVHAAGDDTSAAGMRALLANAFDGQAPTAVVHLSSLDGGGQLDPGLGAQGALDAPRSPDVDADALESALMRGCDSVLSLVQALVGMDLRNAPRLWLLTRGAQAAAAGDVSVVQAPLLGLGRTIALEHAELRCISVDLDPAQPEGEADALLAELLADDAEEEVALRGGERFVARLVHRLPEAQRREKIAPAGDRPFRLEIDEPGVLDQLVLRATGRRAPGPGEVEIAVEAAGLDSIDIQLAVGVAPNDLPGGEIEPSVLGSECAGRIVAVGEGVNGLVVGQPVIALAAGVFATHVTTSATLVLPRPLGLSATEAAAMPLAYLTAWYALDKVAHLQAGERVLIRAEAGGIGLCAVRWAQRVGAEVYATADTPEKRAYLESLGVRYVSDSRSGRFAADVHAWTDGEGVDVVLDSLSGEHIDKSLMVLRACGRLVKLGRRDDCADTQPGLPPLLRNFSFSQVDLRGMMLDQPARIRALLDELFGLVAAGAISPLGSGLRVGGSLTPPPVETFPISRAAEAFRRMAQGQHLGKLVLTLDDPEVRIRAPAESSVAVRADGTYLVTGGLGGLGLRVAGWLAERGAGQLVLVGRSGAASAEQRAAVAALEAHGARVTVAKADVADRSQIERVLREVTASGMPLRGVVHAAGLVDDGLLMQQTPARLRTVMGPKVQGALHLHTLTREAPLSFFVLYASAAGLFGSPGQGNYAAANAFLDALSHHRRAHGLPALSIDWGMFTEVGMAVAQENRGARLISRGMRGITPDEGLSALARLLEGDRVQTGVIPITPRQWVEFYPATAASRRLSRLVTTQRAVADRTAGDRDLLEQLASAEPSARAGLLQDVVRVQVSHVLRLPEDKIEVDAPLSSMGMDSLMSLELRNRIEAALGVAAPAALGWTYPTVAAITRWLLDDALAVRLGGGSDTDESTASAGSFVHVLRFRPVVKPRARLFCFHGSGGSPEGFRSWSEKSEWSDLEIVAMWHDRSLASEDAPGKKYVQEAASLIQHYADAPFALVGFSLGVRFVMGTAVELASRSGAPAPLAVFALGGSLISSSEITPEMETDIIAKLFFRNAAGFVRSTQQVQADARADKVITDTMVAPAPGDSKEPPSKIAVPIVAIAGSDDVIVPPSDVQDLQSRTTERFYMHLLPGDHEFLVDRGREIMHIVDSHLNPLLAARTTSSGPAFEAK

SEQ ID NO: 15271 - protein, 268 aa, Bouteloua hirsuta
ASYAAAAMPALDVLPEKPHHGWESNGAAAVAPTPAPRRLDGKVAIVTGGARGIGEAIVRLFARHGARVVIADVDAAAGDALAAALGPQVSCVRCDVSVEDDVRRAVEWAVARHGRLDVLCNNAGVLGRQTRAAKSILSFDAGEFDRVLRVNALGAALGMKHAARAMAPRRAGSIVSVASVAGVLGELGPHAYTASKHAIVGLTKNAACELGAHGIRVNCVSPFGVATPMLINAWRQGHADAVPSDEEVEKMEVVVRGLATLKGPTLRP

SEQ ID NO: 15272 - protein, 437 aa, Thermobifida fusca
MLPDVGEGLTEAEILTWHVQPGDQVDVNQVICEIETAKAVVELPSPFAGRVEALLVEAGETVPVGTPIIAVDTGGAAGEPRPEPAPAAAPAEPPAEEKREPVLVGYGVKSGATKRRARRRTPSAVPAQTVGQRTVVLAKPPVRKLAKDLGVDLRTVVPSGPNGVITRDDVRRHAEQNQPQPSAPRVPEPAAPAPAASPAPERDVREERIPVKGVLKHMAAAMVDSAFTAPHVTEFLQVDVTKTVKVVQKLRQRPEFADVKVSPLLLVARALLIAVRRHPRINASWDEANQEVVVKHYVNLGIAAATDRGLVVPNIKEADRLPLPDLARALTDLTEKARAGQTAPADLTGGTITITNIGVFGIDGGTPILNRGEAAILALGQIRDMPWVHKGKIKIRKVTTLSLSFDHRLVDGELGSKVLRDVATILEDPEEMVLAWG

SEQ ID NO: 15273 - protein, 284 aa, Xanthomonas axonopodis pv. citri str. 306
MNTPASSSPSSSATTSIAFVGGGNMARSLIAGLIRQGTPAASIRVAEPVADLRAALARDFGVQVVEDARAAVDATTTWVLAVKPQVLPMVCAQLADLAQAQQPLLVSIAAGITATQLQRWSGGDIAVVRAMPNTPALLGAGVTGLYANARVSAAQRQQATQLLDSAGVTVWIDDEAQMDAVTAVSGSGPAYVFLLAEAMEAAAQAQGLPAAAARTLVLQTLLGAARMLTESGEAPEVLRRRVTSPNGTTHAAIETFQAGGFEALTAQAIAAATERGRSLSAAND

SEQ ID NO: 15274 - protein, 396 aa, Triticum aestivum
MALSISAPTSSPFLPAPRQVGRWSSSPSSAKPAVFSLRRPVVVARAAAGNAPSSPAGAVVTEFDVPSGRSEIVPDTGVFDDFEKFAPTAATVSSSLLLGIAGLPDTKFKSAIDTALVDGECNTMEKPGDRMSCYLTKALGNVGAELALQVPGRVSTEIDARLAYDTQGIVQRVHELLQIYNEHDIPSERLLFKIPATWQGIEASRLLESEGTQTHLTFVYSFAQAAAAAQAGASVVQIFVGRIRDWAKNHSGDPEIDEALKKGEDAGLALVKKAYVYIHKNGYKTKLMAAAVRNKQDVFSLLGIDYIIAPLKILQSLDESVTDSDEKYGYVQRLTPSLDKMYNFSQEELVKWDHLSLAAAMGPAAEELLASGLEGYANQARRVEELFVKIWPPPNV

SEQ ID NO: 15275 - protein, 268 aa, Bouteloua hirsuta
ASYAAAAMPALDVLPEKPHHGWESNGAAAVAPTPAPRRLDGKVAIVTGGARGIGEAIVRLFTRHGARVVIADVDAAAGDALAAALGPQVSCVRCDVSVEDDVRRAVEWAVARHGRLDVLCNNAGVLGRQTRAAKSILSFDAGEFDRVLRVNALGAALGMKHAARAMAPRRAGSIVSVASVAGVLGGLGPHAYTASKHAIVGLTKNAACELGAHGIRVNCVSPFGVATPTLINAWRQGHADAVPSDEEVEKMEEVVRGLATLKGPTLRP

SEQ ID NO: 15276 - protein, 97 aa, Pseudomonas sp.
VDRLTQPVLRMTNGQYDKQGEFQPISWEKAFDIMELKFKEALKSKGPGSVGMFGSGQWTVWEGYAANKLMKAGFRSNNIDPNAPHCMASAVMGFMRT

SEQ ID NO: 15277 - protein, 268 aa, Bouteloua hirsuta
ASYAAAAMPALDVLPEKPHHGWESNGAAAVAPTPAPRRLDGKVAIVTGGARGIGEAIVRLFTRHGARVVIADVDAAAGDALAAALGPQVSCVRCDVSVEDDVRRAVEWAVARHGRLDVLCNNAGVLGRQTRAAKSILSFDAGEFDRVLRVNALGAALGMKHAARAMAPRRAGSIVSVASVAGVLGGLGPHAYTASKHAIVGLTKNAACELGAHGIRVNCVSPFGVATPMLINAWRQGHADAVPSDEEVEKMEEVVRGLATLKGPTLRP

SEQ ID NO: 15278 - protein, 97 aa, Pseudomonas sp.
VDRLTQPLSRMTNGQYDKQGQFQPISWEKAFDIMELKFKEALKSKGPGSVGMFGSGQWTMWEGYAANKLMKAGFRSNNIDPNARHCMASAVMGFMRT

SEQ ID NO: 15279 - protein, 243 aa, Zea mays
MASLFKDPSKLSAYKDRRFKGTQEEYEATLHASTTLYIGNMSFYTTEEQAYELFSRAGEIKKIIMGLDKNSKTPCGFCFVLYYSREDAEDAVKYISGTMLDDRPIRVDFDWGFEEGRQWGRGRSGGQVRDEYRTDYDPGRGGYGKMVQRELEAQRELVDYGGSFQPNAPPPYERGERKRGYGDSHRNDRGDYQRKRYRSSDDRSAPEESKRAPDSDPAEKNPRFREKGDSDEEEDDYDKRRRR

SEQ ID NO: 15280 - protein, 381 aa, Medicago sativa
MSCSVAVSNSPVFSPSSSLFCNKSETLTLSLSHLKPSSTTTTTTTSSSSSSSSPSPCSSPSSPFCLRLPKLPLVFTSNKDSGSQNDAVLKRKRPTRLNIPVSEHAFCVPATPSAVARDVVEAEGDGYSVYCKRGRREYMEDRYTAGVNLRGENNLAFFGVFDGHGGAKAAEFARNNLEKNILDEVIMTDEDDVEEAVKRGYLNTDSEFMKKDLHGGSCCVTAFIRNGNLVVSNAGDCRAVISRGGVAEALTSDHRPSREDEKDRIETLGGYVDLCRGVWRIQGSLAVSRGIGDRHLKQWVTAEPETKVIRIEPEHDLLILASDGLWDKVSNQEAVDIARQFCVGNNNQQPLMACKKLAQLSVSRGSLDDTSVMIIKFKHYV

SEQ ID NO: 15281 - protein, 533 aa, Streptococcus oralis
VESALEKIGAKNIESSYRRGEAVFELSDDIEVESAIKAIADANYHPGEAEEIQVQSEKRTDVSLNDEGNYDYDYIIIGSGGAAFSSAIEAVTLNAKVAMIERGTVGGTCVNVGCVPSKTLLRAGEINHLAKNNPFVGLHTSASNVDLAPLVKQKNDLVTEMRNEKYVNLIDDYGFELIKGEAKFVNENTVEVNGNQITAKRFLIATGASSTAPNIPGLDEVDYLTSTSLLELKKVPNRLTVIGSGYIGMELGQLFHNLGSEVTLIQRSERLLKEYDPEISEAITKALTEQGINLVTGATYERVEQDGDIKKVHVEINGKKRIIEAEQLLIATGRKPNTESLNLHAAGVEVGSRGEIVIDDYLKTTNSRIYSAGDVTLGPQFVYVAAYEGGLAARNAIGGLNQKVNLEVVPGVTFTSPSIATVGLTEQQAKEKGYEVKTSVLPLDAVPRALVNRETTGVFKLVADAKTLKVLGAHVVAENAGDVIYAATLAVKFGLTVGDLRETMAPYLTMAEGLKLAVLTFDKDVSKLSCCAG

SEQ ID NO: 15282 - protein, 373 aa, Bacillus subtilis subsp. subtilis str. 168
MSQHVETKLAQIGNRSDEVTGTVSAPIYLSTAYRHRGIGESTGFDYVRTKNPTRQLVEDAIANLENGARGLAFSSGMAAIQTIMALFKSGDELIVSSDLYGGTYRLFENEWKKYGLTFHYDDFSDEDCLRSKITPNTKAVFVETPTNPLMQEADIEHIARITKEHGLLLIVDNTFYTPVLQRPLELGADIVIHSATKYLGGHNDLLAGLVVVKDERLGEEMFQHQNAIGAVLPPFDSWLLMRGMKTLSLRMRQHQANAQELAAFLEEQEEISDVLYPGKGGMLSFRLQKEEWVNPFLKALKTICFAESLGGVESFITYPATQTHMDIPEEIRIANGVCNRLLRFSVGIEHAEDLKEDLKQALCQVKEGAVSFE

SEQ ID NO: 15283 - protein, 268 aa, Bouteloua hirsuta
ASYAAAAMPALDVLPEKPHHGWESNGAAAVAPTPAPRRLDGKVAIVTGGARGIGEAIVRLFARHGARVVIADVDAAAGDALAAALGPQVSCERCDVSVEDDVRRAVEWAVARHGRLDVLCNNAGVLGRQTRAAKSILSFDAGEFDRVLRVNALGAALGMKHAARAMAPRRAGSIVSVASVAGVLGGLGPHAYTASKHAIVGLTKNAACELGAHGIRVNCVSPFGVATPMLINAWRQGHADAVPSDEEVEKMEEMVRGLATLKGPTLRP

SEQ ID NO: 15284 - protein, 775 aa, Aspergillus oryzae
MTNTILDTYSSRRKPRRIGILTSGGDAPGMNGAIRAVVRTAIQNGCEAWAIHEGYEGLIQGGAMMHPLYWEDVRGFLSRGGTLIGSVRCDRFREREGRLQAARNMVLFGIDALVVCGGDGSLTGADLFRSEWPELLNELVSTGVLTVAQVAPHQNLNIVGLLGSIDNDFSGTDATIGCYSALTRICEAVDAVFDTASSHRRGFVVEVMGRHCGWLALMAAIATGADWLFIPERPPRDGWEDDMCSIITKNRNRGKRRTIVILAEGAQDSNLDRISSSAVKDVLSKRLGLDTRVTVLGHIQRGGSPCAYDRWLSTLQGIHAVKAVLSMTPESPSPVVIIQENRIRTSSLAETVALTKEANASMHAKEFEKAATLRDPEFMEYHSAYRHLNTSDHPKMVLPEDKRMRVAIIHVGAPAAGMNPATRAVVAYCLTRGHTPIAIHNGFPGLCRHHDDTPGSVREMHWLESGDWINDGGSDIGTNAGLPLDDIETTAQCFERYKFDALFVIGGFEAFTAVSQLRKARKQYLAFRIPLVLLPASMSNNVPGTEYSLGSDTSLNTLVYFCDVVRQSASSSGHSVFVVEAQGAEYQATAAALAAGAMTVYTPERGITLQSLSNDIEYLRQQFSKDHGANRSGKLIIRNDQTSTIYSTTEIANIIKHEAKNRFDAQGVVPGHFQQGGKVSPIDRIRAFRLAVKCMEHLETFAGQSPEEIMNDENSATVISIKQSRILLLPMGGPTGVEATDTDWKRQRPKTQNWLEIQEAVDSLSGRSSLYAIPN

SEQ ID NO: 15285 - protein, 390 aa, Bacillus subtilis subsp. subtilis str. 168
MSKHNWTLETQLVHNPFKTDGGTGAVSVPIQHASTFHQSSFEEFGAYDYSRSGTPTRTALEETIAALEGGTRGFAFSSGMAAISTAFLLLSQGDHVLVTEDVYGGTFRMVTEVLTRFGIEHTFVDMTDRNEVARSIKPNTKVIYMETPSNPTLGITDIKAVVQLAKENGCLTFLDNTFMTPALQRPLDLGVDIVLHSATKFLSGHSDVLSGLAAVKDEELGKQLYKLQNAFGAVLGVQDCWLVLRGLKTLQVRLEKASQTAQRLAEFFQKHPAVKRVYYPGLADHPGAETHKSQSTGAGAVLSFELESKEAVKKLVENVSLPVFAVSLGAVESILSYPATMSHAAMPKEEREKRGITDGLLRLSVGVEHADDLEHDFEQALKEIAPVSVR

SEQ ID NO: 15286 - protein, 785 aa, Aspergillus oryzae
MATTHAPAEPPKRRRIGVLTSGGDAPGMNGAVRAVVRMAIYSGCEAYAVYEGYEGLVHGGDMIRQVHWEDVRGWLSRGGTLIGSARSMAFRERAGRLKAAKNMIVRGIDALVVCGGDGSLTGADLFRSEWPGLLEELVKTGELTEEQIVPYKVLNIVGLVGSIDNDMSGTDATIGCYSSLTRICDAVDDVFDTAYSHQRGFVIEVMGRHCGWLALMSAISTGADWLFIPEMPPREGWEDDMCDIITKNRQERGKRRTIVIVAEGAHDRQLNKITSSKIKDILTNRLDLDTRVTVLGHTQRGGAACAYDRTLSTLQGVEAVRAVLDMTPESPSPVITVRENKLLRTPLMDAVKATKEVADLIHERKFDEAMHLRDSEFKEYHFAYKNTATPDHPKLILPENKRMRIAIIHVGAPAGGMNQATRAAVAYCQTRGHTALAVHNGFPGLCRHHADTPVSSVREVSWEEQDTWVNEGGSDIGTNRSLPSEDFETTAKCFEKFKFDGLFVVGGFEAFTAVSQLRQAREKYPAFKIPMVVLPATISNNVPGTEYSLGSDTCLNTLIDFCDAIRQSASSSRRRVFVVETQGGKSGYVATTAGLAVGASAVYIPEEGIDIKMLARDIDFLRNNFAHDKGANRAGKIILRNETASSTYTTQVIADMIKEEAKGRFESRAAVPGHFQQGGKPSPMDRIRALRMAIRCMQHIETFSGKSADEIAADELSATVIGVKGSQVLFSQMGGPNGLEATETDWARRRPKDEFWLDLQSTVNILSGRASFGEGKTGWSCYENC

SEQ ID NO: 15287 - protein, 533 aa, Streptococcus mitis
VESALEKIGAKNIESSYRRGEAVFELSDDIEVESAIKAIADANYHPGEAEEIQVQSEKRTDVSLNDEGNYDYDYIIIGSGGAAFSSAIEAVTLNAKVAMIERGTVGGTCVNVGCVPSKTLLRAGEINHLAKNNPFVGLHTSASNVDLAPLVKQKNDLVTEMRNEKYVNLIDDYGFELIKGEAKFVNENTVEVNGNQITAKRFLIATGASSTAPNIPGLDEVDYLTSTSLLELKKVPNRLTVIGSGYIGMELGQLFHNLGSEVTLIQRSERLLKEYDPEISEAITKALTEQGINLVTGATYERVEQDGDIKKVHVEINGKKRIIEAEQLLIATGRKPNTESLNLHAAGVEVGSRGEIVIDDYLKTTNSRIYSAGDVTLGPQFVYVAAYEGGLAARNAIGGLNQKVNLEVVPGVTFTSPSIATVGLTEQQAKEKGYEVKTSVLPLDAVPRALVNRETTGVFKLVADAKTLKVLGAHVVAENAGDVIYAATLAVKFGLTVGDLRETMVPYLTMAEGLKLAVLTFDKDVSKLSCCAG

SEQ ID NO: 15288 - protein, 151 aa, Escherichia fergusonii
GVARKPGMDRSDLFNVNAGIVKNLVQQVAKTCPKACIGIITNPVNTTVVIAAEVLKKAGVYDKNKLFGVTTLDIIRSNTFVAELKGKQPGEVEVPVIGGHSGVTILPMLTQVTGVSFTEQEVADLTKRIQIAGPDVVEAKVGGGFATMSMA

SEQ ID NO: 15289 - protein, 467 aa, Sinorhizobium meliloti 1021
MNQYDLIVVGSGPAGRRGAIQAAKLGKKVLVIEQGKRVGGVSVHTGTIPSKTLRETALNLTGWRERGFYGRSYRVKQEISAEDLRRRLIITLNHEVEVLEHQFARNRVQHIRGRASFVGPTTLEISKDDDESMLVSGTSILLAVGTKPFRPDYMPFDGRTVVDSDELLDIRELPRSLVVIGAGVIGIEYATIFSALDIQVTVIDPKTTMLDFIDREIVEDFTYQLRDRAMKLNLGQKAEKVERLDNGKVLLTLDNGRKITTEMVLFAAGRMGATDALNLPAAGLEADARGRLKVNPETFQTTVPNIYAAGDVVGFPSLASTSMEQGRVAARVAVGAIAKEPQKYFPYGIYAVPEISTCGLSEEEVKERGIPYECGIARFRETSRGHIMGLDSGLLKMIFSLRTRRLLGVHIIGEGATELVHIGQAVLNLKGTVEYFVENTFNYPTLAEAYKIAGLDAWNRMGEIKAE

SEQ ID NO: 15290 - protein, 380 aa, Oenococcus oeni PSU-1
MNSSQNEFVDVLFEKEVMLMKPENTFNSKESVDVGGSERIPSEMRAWEVTSPAPIDSSPSPIHFVKHPVPVPKTSEVLVRVISCGICHTDLHVAEGDLPVHHPHVIPGHEIIGRVVANGPQAGRFNLGDRIGVPWLRWTCGVCTYCRSGKENLCPNSLYTGWDHDGGYAEYVTVPEGFAYRIPSAFNSVTAAPLLCAGIIGYHAFRRANVPAGGRLGLYGFGGSAHLAAQIAIAQGIEVHVFTRGKDAQRFALELGAASAQGVYDPSPVSLDSSILFAPVGDIVPKALENLAAGGTLALAGIHLTDVPSLNYQNHLFHEKVLTSVESNTRRDGEEFLTLADRLKIHPKTTEYPFEKADEALRHLSHGDMQGACVLRISEG

SEQ ID NO: 15291 - protein, 169 aa, Saccharomyces cerevisiae
  unsure (1)..(169): unsure at all Xaa locations
GAHXVTSNVVLVSGEGERFTVDKKIAERSLLLKNYLNDXGDDDDEDDDEIVXPVPNVRSSVLQKVIEWAEHHRDSNFPDEDDDDSRKSAPVDSWDREFLKVDQEXLYEIILAANYLNIKPLLDAGCKVVAEXIRGRSPEEIRRTFNIVNDFTPEEEAAIRRENEWAEDR

SEQ ID NO: 15292 - protein, 357 aa, Anabaena variabilis ATCC 29413
MRKKIGILTSGGDCPGLNCVIRAVVSHATLTYDWEVFGIPYATQGLLERQAIALNMHGWDLRGIDPLLNMGGTILGTINKGDTLAHVDEMLASYEALALDALIVIGGDGSLGILHELASRGNWNLVAIPKTIDSDVALTERAVGFDTAVNTIVDALNRLTFTAASHDRVMIVEVMGRSAGHLALHAGIAGGADVILIPEISYTISGLCQYIAELRDRWQRKFAIVVVAEGAKLCLEDVQENIASACVSPKCGRGQYIAEQIARCSKNLIDTRVSVLGHIQRGGIPSALDRLTATVFGKTAVDLVAQGKFGQMVAWQNGEAIPVPIQDVVAQSPLHVNPQGSLVQSARCLGIYVGEKT

SEQ ID NO: 15293 - protein, 455 aa, ASPERGILLUS NIDULANS FGSC A4
MSAPTADIRARAPEAKKVHIADTAINRHNWYKHVNWLNVFLIIGIPLYGCIQAFWVPLQLKTAIWAVIYYFFTGLGITAGYHRLWAHCSYSATLPLRIWLAAVGGGAVEGSIRWWARDHRAHHRYTDTDKDPYSVRKGLLYSHLGWMVMKQNPKRIGRTDISDLNEDPVVVWQHRNYLKVVFTMGLAVPMLVAGLGWGDWLGGFVYAGILRIFFVQQATFCVNSLAHWLGDQPFDDRNSPRDHVITALVTLGEGYHNFHHEFPSDYRNAIEWHQYDPTKWSIWAWKQLGLAYDLKKFRANEIEKGRVQQLQKKLDRKRATLDWGTPLDQLPVMEWDDYVEQAKNGRGLVAIAGVVHDVTDFIKDHPGGKAMISSGIGKDATAMFNGGVYYHSNAAHNLLSTMRVGVIRGGCEVEIWKRAQKENVEYVRDGSGQRVIRAGEQPTKIPEPIPTADAA

SEQ ID NO: 15294 - protein, 269 aa, Methylobacillus flagellatus KT
MKISFIGGGNMARAIIGGLKQKGYSMATISVIELDAAKREQLTEEFGIHATEHLPSVANADIIVLAVKPQQLRDLAIFLASFLNQQLVISIAAGIPCAALSRWLNGYRAIVRAMPNTPAQIQVGISGLYAADGVSIEQREQADLLLSAAGSTLWVDDEQKIDAVTAISGSGPAYVFYFIEALEQAALELGFAPYQARALSLQTFLGASKLASQSDAPAATLRAQVTSKGGTTERAILSMEQAGIKQAIIQAAQAAAKRARELGEQLGKD

SEQ ID NO: 15295 - protein, 188 aa, Catharanthus roseus
MAAQVLDVGFHVLAVDDSLVDRKLIERLLKTSAYQVTVVDSGIKALEFLGLLDEEKEISGSNHQQVVEVNLIITDYSMPGMTGYDLLRKVKESSYLKDIPVVIMSSENIPSRINRCLEEGADDFFLKPVKQSDVNKLIPLVPNSFTGKPIKNHEQQQIFSSSTCKRKQHTDEYLSPTLRRKRYNQIFS

SEQ ID NO: 15296 - protein, 342 aa, Hypocrea jecorina
MPTTTAETLSLVTRNVSVAPLVLLSAVDHYNRTVTSKTKRRVVGVLLGQNDGKNVRVSNSFAVPFEEDEKDPSVWFLDHNYVESMNDMFKKVNAREKLVGWYHTGPKLRASDLEINELFKRYTPNPLLVIIDVQPKESGVPTDAYFAVEEIKDDGTTTSRTFVHTPSIIEAEEAEEIGVEHLLRDIRDVAVGTLSTRVTNQLQSLQGLHLRLRDIGAYLQKVLDGQLPVNHAILGNLQDVFNLLPNLSTPEDDSRTGGHELSHAMSIKTNDQLMAIYLSSLIRAITAFHDLIENKIQNRQQQDEKEPKKDEAKDKDEKKDAGATNANGESKESSDKEKSKKK

SEQ ID NO: 15297 - protein, 253 aa, Triticum aestivum
MASANALLLLFSAAFCFLARRAAGDYGSWQSAHATFYGGGDASGTMGGACGYGNLYSTGYGTNTAALSTALFNDGAACGSCYELKCQDVSSSCLPGSITITATNLCPPNYALPNDDGGWCNPPRAHFDMAEPAYLQIGIYRAGIVAVAYRRVPCVKKGGIRFTINGHSYFNLVLVTNVAGAGDVQSVAIKGSSTGWQAMARNWGVNWQSNALLSGQSLSFRVTSTDGQTLTFPNAAPVGWGFGQTFATNKQFS

SEQ ID NO: 15298 - protein, 509 aa, Streptomyces avermitilis MA-4680
MAGQQARQAGQTQRTIHVGGEWREADSRATREILDPADAKPFAVVAEGDERDADAAVAAARRAFDSGEWPHTPVAERAALLRRVADLLVRDRESLGLLESRDAGKTLEEGRVDIDCVADAFRYFADLVVGEGGGRVVDAGSPDIHSVVVHEPVGVCAMITPWNYPLLQASWKIAPALAAGNTFVIKPSEITPLTTAALVDLLVEAGAPAGVANIVTGPGHTVGARLAEHPDVDLISFTGGLASGTKVAQAAAVSVKKVALELGGKNPNVVFADACATDEDFDTAVDQALNAAFIHSGQVCSAGGRLIVEESVRERFVAELVRRAGRIRLGRGTEDGVECGPLVSEQQRDKVEGYVASALSEGAVLRTGGRRPEPSDVRPAAGYFFEPTVLDQCHRGMKVVREEVFGPVLTVETFRTEDEAVALANDTEYGLAGAVWTSDAGRARRVAGRLRHGTVWINDFHPYLPQAEWGGFGKSGVGRELGPAGLAEYRETKHVYQNLAPKPVRWFAG

SEQ ID NO: 15299 - protein, 562 aa, Pseudomonas aeruginosa
MAEAITLHIEGMTCTSCAEHVQQALTNVPGVRAASVSYPQRQAEIEADAGVSVAPLVAAVATLGYRARLTDTPNKPAGLLDKALGWLGGETKHVGGEQALHVAVIGSGGAAMAAALKAVEQGARVTLIERGTIGGTCVNVGCVPSKIMIRAAHIVHLRRESPFDAGLPAAAPAVLRERLLAQQQGRVEELRHAKYEGILASTPAITVLRGEARFRDTRTLTVATADGGTHEVNFDRCLIATGASPALPPIPGLADTPHWTSTEALESSSLPERLAVIGSSVVAVELAQAFARLGSQVTILARSTLFFREDPAIGEAVTDAFRAEGIEVLDHTQASHVAYAGGEFVLTTGQGEVRADKLLVATGRAPNTRSLNLEAAGVEVNAQGAIVIDRAMRTSAPHIFAAGDCTDQPQFVYVAAAAGTRAAINMTGGDAALDLTAMPAVVFTDPQVATVGYSEAEAHHDGIETDSRLLTLDNVPRALANFDTRGFIKLVAEAGSGRLIGVQAVAPEAGELIQTAALAIRHRMTVQELADQLFPYLTMVEGLKLAAQTFNKDVKQLSCCAG

SEQ ID NO: 15300 - protein, 139 aa, Xanthomonas axonopodis pv. citri str. 306
MFALAPLRKGERIIQYKGRLRTHAEVDADDTGDVESGHTFLFTLSDDYVLDANYEGNVARWINHSCDPNCEAVIEEAEGDDRRKDKIFIEAKRDIKPGEELTYNYGITLAERHTPRLKKIWECRCGSKNCTGTMLQPKR

SEQ ID NO: 15301 - protein, 268 aa, Bouteloua hirsuta
ASYAAAAMPALDVLPEKPHHGWESNGAAAIAPTPAPRRLDGKVAIVTGGARGIGEAIVRLFARHGARVVIADVDAAAGDALAAALGPQVSCVRCDVSVEDDVRRAVEWAVARHGRLDVLCNNAGVLGRQTRAAKSILSFDAGEFDRVLRVNALGAALGMKHAARAMAPRRAGSIVFVASVAGVLGGLGPHAYTASKHAIVGLTKNAACELGAHGIRVNCVSPFGVATPMLINAWRQGHADAVPSDEEVEKMEEVVRGLATLKGPTLRP

SEQ ID NO: 15302 - protein, 268 aa, Bouteloua hirsuta
ASYAAAAMPALDVLPEKPHHGWESNGAAAVAPTPAPRRLDGKVAIVTGGARGIGEAIVRLFTRHGARVVIADVGAAAGDALAAALGPQVSCVRCDVSVEDDVRRAVEWAVARHGRLDVLCNNAGVLGRQTRAAKSILSFDAGEFERVLRVNALGAALGMKHAARAMAPRRAGSIVSVASVAGVLGGLGPHAYTASKHAIVGLTKNAACELGAHGIRVNCVSPFGVATPMLINAWRQGHADAVPSDEEVEKMEEVVRGLATLKGPTLRP

SEQ ID NO: 15303 - protein, 416 aa, Virgibacillus pantothenticus
MQIFEELESAVRSYSRGWPTIFEKAKGYKLWDIDGNMYIDFFAGAGALNYGHNHDTMQEKLIAYIQDDHIIHSLDMGTTPRKTFLETFHNTILKPRNLDYKIMFPGPTGTNTVESALKIARKVTGRDTVISFTNAFHGMTIGSLSVTGNSFKRHGAGVPLHHSVSMPYDKYVNDQDSIAYLERFLEDSGSGVALPAAIILETVQGEGGINAASIEWLQKIASICERWDILLIIDDVQAGCGRTGTFFSFEPAGIAPDIVCLSKSIGGIGLPMAITLIKPEYDQWGPGEHNGTFRGNNLAFIAATEALTAFWQDNTFSKSIIQKSKLVRQRIDRIIDKFPSLQGEARGRGLMQGIVIPEPNCASEICKAAFDIGLIVETSGPNDEVVKFLPPLIIDKEGINQGFDILEVSMEHVLKK

SEQ ID NO: 15304 - protein, 661 aa, Bacillus anthracis str. Ames 0581
MEQLKHHVTDNQRKHALTTNQGVKIAEDEFSLKMGLRGPTLMEDFHFREKMTHFDHERIPERIVHARGVGAHGYFQLYESLEAYTKADFLTNPSKKTPVFVRFSTVQGSKGSNDAVRDVRGFATKFYTDEGNYDLVGNNMPVFFIQDAIKFPDFVHAVKPEPHNDIPQGASAHDTFWDFVAHNPESTHMVMWQMSDRAIPRSLRMMEGFGVHTFRLINKEGKAHFVKFHWKPALGVHSLVWDEAQKIAGKNPDFHRQDLYEAIEKGDYPEWELGLQLIPEEDEHTFDFDILDPTKLWPEEEVPVKLVGKMTLNKNVDNFFAETEQVAFHPGHVVPGIDFSNDPLLQGRLFSYTDTQLSRLGGPNFHQTPINQPVCPFHNNQRDGMHQMQIHRGQTSYHPNGLNDNQPATVQAEQGGYEHYQEKIDGHKIRGRSKSFLNFYSQAKLFYNSMSPIEKQHIKEAFCFEVGKCKSDMVKANVIALLNHVDRQLAQEVANIIGAPLPKENHEVNSDAKSPALSMSNTIFKADSKNVAIVLNGDPSVSLLSEWIQAFAQHRINYSIVDNKIYQFNNSIKVTDTYTTTDSSLFDAVLVFSSESAIHPPVLEFAETTFKHFKPIAHVLSNPHALDNSKIKLDGAGIYNLANTSIESFIEGIAQGRFWNR

SEQ ID NO: 15305 - protein, 268 aa, Bouteloua hirsuta
ASYAAAAMPALDVLPEKPHHGWESNGAAAVAPTPAPRRLDGKVAIVTGGARGIGEAIVRLFARHGARVVIADVDAAAGDALAAALGPQVSCVRCDVSVEDDVRRAVEWAVARHGRLDVLCNNAGVLGRQTRAAKSILSFDAGEFDRVLRVNALGAALGMKHAARAMAPRRAGSIVSVASVAGVLGGLGPHAYTASKHAIVGLTKNAACELGAHGIRVNCVSPFGVATPMLINAWRQGHADAVPSDEEVEKMEEVVRGLATLKGPTLRP

SEQ ID NO: 15306 - protein, 268 aa, Bouteloua hirsuta
ASYAAAAMPALDVLPEKPHHGWESNGAAAVAPTPAPRRLDGKVAIVTGGARGIGEAIVRLFTRHGARVVIADVDAAAGDALAAALGPQVSCVRCDVSVEDDVRRAVEWAVARHGRLDVLCNNAGVLGRQTRAAKSILSFDAGEFDRVLRVSALGTALGMKHAARAMAPRRAGSIVSVASVAGVLGGLGPHAYTASKHAIVGLTKNAACELGAHGIRVNCVSPFGVATPMLINAWRQGHADAVPSDEEVEKMEEVVRGLATLKGPTLRP

SEQ ID NO: 15307 - protein, 121 aa, Musa acuminata
FQDAVTKIQWKAPCFSGDGEWVIGASASKGEHKLYIWDRAGHLVKILEGPKEALIDLAWHPLRPLVVSVSVAGLVYIWAKDYTENWSAFAPDFKELEENEEYVEREDEFDLMPESEKVKEL

SEQ ID NO: 15308 - protein, 268 aa, Bouteloua hirsuta
ASYAAAAMPALDVLPEKPHHGWESNGAAAVAPTPAPRRLDGKVAIVTGGARGIGEAIVRLFARHGARVVIADVDAAAGDALAAALGPQVTCVRCDVSVEDDVRRAVEWAVARHGRLDVLCNNAGVLGRQTRAAKSILSFDAGEFERVLRVNALGAALGMKHAARAMAPRRAGSIVSVASVAGVLGGLGPHAYTASKHAIVGLTKNAACELGAHGIRVNCVSPFGVATPMLINAWRQGHADAVPSDEEVEKMEEVVRGLATLKGPTLRP

SEQ ID NO: 15309 - protein, 455 aa, Staphylococcus epidermidis ATCC 12228
MFWQIFYRRDKTMKNYDLIIIGFGKAGKTLAAHAAGHGQKVAVVEQSTKMYGGTCINIGCIPTKTLIHDGIEGNSFKESITRKKEVVQALNNKNYQGLNSKNNIDVLNYNAKFISNEIIELQDSNGTIQETITADKILINTGSRANIPDIKGIDTAQNIYDSTGLLNIDYQPQELVIIGGGYIALEFASMFANFGTHVTILERGDAIMTNEDQDIANLIVKDLQDKGVTINTNTSTIAFSNNKDQTIIHTNHGEISADTVLLATGRKPNTNHLGLENTDVKIGKQGEVIVNKHLQSTVKHIYAAGDVKGGLQFTYISLDDYRIIKSHLFGDGSRTTENRGAIPYTVFIDPPLSRVGLIASEAKLQGYDILDNKVFVSNIPRHKINNDSRGLFKAVINKDTKEILGASLYGKESEELINLIKLAIDQHIPYTVLRDNIYTHPTMTESFNDLFLEPL

SEQ ID NO: 15310 - protein, 950 aa, Methylobacterium extorquens
MTLIKEIDYGTPIRLNEQTVTLTIDGESVTVPAGTSVMAAAMHMGTKIPKLCATDSLEPFGSCRMCLVEIDGRRGAPASCTTPAENGMVVHTQTDKLHRLRKGVMELYISDHPFDCLTCAANGDCELQDTAGQVGLREVRYGYDGDNHVKPASDRYLPKDESNPYFTYDPSKCIVCNRCVRACEETQGTFALTIEGRGFDSRVAAGPTNFMQSECVSCGACVQALPTATLQEKTIHQYGQPDHSEVTTCAYCGVGCAFKAEMQGDKVVRMVPYKGGKANEGHSCVKGRFAYGYATHKDRITKPMIREKITDPWREVSWEEAINHAASEFKRIQATYGRDSVGGITSSRCTNEEAYLVQKLVRAAFGNNNVDTCARVCHSPTGYGLMSTLGTSAGTQDFKSVEESDVILVIGANPTDGHPVFGSRMKKRLREGARLIVADPRKIDLVKSPHIRADHHLPLKPGSNVAFINAFAHVIVTEGLIAEDYVRERCDLAEFESWARFIAEERNSPEAAQAITGVDPQEIRAAARLYATGGKAAIYYGLGVTEHSQGSTMVMGMANIAMATGNIGMVGAGVNPLRGQNNVQGSCDMGSFPHELPGYRHVSDDATRESFEAIWGAKLDNAPGLRITNMLDEAVGGSFKGMYIQGEDIAQSDPDTHHVTSGLKAMECIVIQDLFLNETAKYAHVFLPGASFLEKDGTFTNAERRISRVRKVMAPMGGYGDWEGTVLLANALGYKMEYTHPSEIMDEIAALTPSFAGVSYDKLEELGSIQWPCNEKAPLGTPMMHVDRFVRGKGRFMITEYVPTDERTTGKFPLILTTGRILSQYNVGAQTRRTENSRWHEEDVLEIHPFDAEMRGIVDGDLVALESRSGDIALKAKVTERMQPGIVYTTFHHAKTGANVITTDYSDWATNCPEYKVTAVQVRRTNRPSDWQAKFYEEDFSLTRIAEAAE

SEQ ID NO: 15311 - protein, 268 aa, Mycobacterium avium subsp. paratuberculosis str. k10
MVNELAGKVAIVTGGASGIGRGIVERFVAEGARVVIADIETERGERLAAELGGEAVFRRTDVSDIEQVGALVAAAVEKFGGLHVMVNNAGISSPLRRLLDDDLADFHRVMGVNVLGVMAGTRDAARHMADNGGGTIINLTSIGGIQAGGGVMTYRASKAAVIQFTKAAAIELARYDIRVNAIAPGNIPTPILGKSAGDMDPEQRERFEARIREGMREDRPLKREGTPDDVAEAALYFATDRSRYVTGTVLPVDGGTSAGKAMRSKRQG

SEQ ID NO: 15312 - protein, 160 aa, Oenococcus oeni PSU-1
MSIYDYKATLENGESYKLDKYKGKIMVIVNTATKCGFAPQFEELEKIYKQFKDSGLVVLGFPSNQFKQELDSSQAAAEACRTTYGVTFLMHEINDVNGKDELPLFSYLKDNAPGAIGKSIKWNFTKFLVKQDGEVAKRYAPKTDPEKMIPDIEELLQLQK

SEQ ID NO: 15313 - protein, 450 aa, Oenococcus oeni PSU-1
MNNLEKASRLIDEENNYYARSARINYYDLVINHAHGATLIDVDGNEYIDLLASASAINVGHTNERVVKAISRQAQKLIHYTPAYFHHVPGIELSKRLAELAPGNSPKMVSFGNSGSDANDAIIKFSRAYTSRQYIVSYMGSYHGSNYGSQSLSGTSLNMTRKIGPMLPGVVHVPYPDLYRRYAGETEHDVAIRYFNAFKAPFESFLPADETACVLVEPIQGDGGIVKAPEEYMQLVYKFCHDNGILFAVDEVNQGLGRTGKMWGIQQYKDIEPDLMSVGKSLASGMPLSAVVGKKDIMQSLDAPAHIFTTSGNPVCAAASLATLNVIRDDHLVEKSAKDGEYAKQRFLEMQRHHPIIGDVRMWGLNGGIELVKDPKTKEAENDAATKVIYYAFAHGVVIITLAGNILRFQPPLVISHKQLDKALQVLDDAFTAVEQNKVEVPKDTGKIGW

SEQ ID NO: 15314 - protein, 831 aa, Rhodobacter sphaeroides
MTLTRRDLIKAQAAATAAAAAGLPVSALAQPVTGGAEALRIRWSKAPCRFCGTGCGVMVGTRDGQVVATHGDTQAEVNRGLNCVKGYFLSKIMYGEDRLTTPLLRMKDGVYHKEGEFAPVSWDEAFDVMAAQAKLVLKEKAPEAVGMFGSGQWTIWEGYAASKLMRAGFRSNNLDPNARHCMASAATAFMRTFGMDEPMGCYDDFEAADAFVLWGSNMAEMHPILWSRLTDRRLSHEHVRVAVLSTFTHRSSDLSDTPIIFRPGTDRAILNYIAHHIISTGRVNRDFVDRHTNFALGATDIGYGLRPEHQLQLAAKGAADAGAMTPTDFETFAALVSEYTLEKAAEISGVEPALLEELAELYADPDRKWMSLWTMGFNQHVRGVWANHMVYNLHLLTGKISEPGNSPFSLTGQPFACGTAREVGTFAHRLPADMVVTNPEHRAHAEEIWKLPAGLLPDWVGAHAVEQDRKLHDGEINFYWVQVNNNMQAAPNIDQETYPGYRNPENFIVVSDAYPTVTGRAADLVLPAAMWVEKEGAYGNAERRTHFWHQLVEAPGEARSDLWQLMEFSKRFTTDEVWPEEILSAAPAYRGKTLFEVLFANGSVDRFPASDVNPDHANHEAALFGFYPQKGLFEEYAAFGRGHGHDLAPFDTYHEVRGLHWPVVEGEETRWRYREGFDPYVKPGEGLRFYGKPDGRAVILGVPYEPPAESPDEEFGFWLVTGRVLEHWHSGSMTLRWPELYKAFPGAVCFMHPEDARSRGLNRGSEVRVISRRGEIRTRLETRGRNRMPRGVVFVPWFDASQLINKVTLDANDPISRQTDFKKCAVKIEAV

SEQ ID NO: 15315 - protein, 137 aa, ASPERGILLUS NIDULANS FGSC A4
MPASVHSQDNDQSMLDAQAQNQDHIDETLLEQKRIIVLPGATDTAASFQFEGEGHTLGNALRFAIMKNPEVEFCGYTIPHPSESKMNIRIQTYDSTTAVEALEKGLDTLMDLCDVVTDKFTAARDEFNAEQANRMES

SEQ ID NO: 15316 - protein, 498 aa, Shewanella oneidensis MR-1
MSTPKTRSDWENLAVSLAINGKAFINGEYRDASSGNTFDCISPIDGRLLAPVASCDLMDANIAVANAREVFDSGVWSKAAPVKRKQVMIRFAELLEENANELALLETLDMGKPIRFSKAVDVAGAARAIRWSGEAIDKLYDELAPTAHNEIGMITREPVGVVAAIVPWNFPLLMACWKLGPALVTGNSVILKPSEKSPLTAIRIAELAVQAGIPKGVLNVLPGYGHTVGKALALHMDVDTLVFTGSTKIAKQLMIYAGESNMKRVWLEAGGKSPNIVFNDAPDLKAAAVAAAEAIGFNQGEVCTAGSRLLVESGVKDELVGLIAEELASWQPGHPLEPTTVSGAVVDKQQLDTILSYIKAGQNEGASLVYGGQQVLAETGGVYVQPTVFSNVKNQMKIASEEIFGPVLSVIEFNGMEEAIAIANDTIYGLAAGVWTADISKAHKTAKALRSGMVWINHYDGGDMTAPFGGYKQSGNGRDKSLHSFDKYTEIKATWIVL

SEQ ID NO: 15317 - protein, 429 aa, Escherichia coli
MTTDDLAFDQRHILHPYTSMTSPLPVYPVVSAEGCELILSDGRRLVDGMSSWWAAIHGYNHPQLNAAMKSQIDAMSHVMFGGITHAPAIELCRKLVAMTPQPLECVFLADSGSVAVEVAMKMALQYWQAKGEARQRFLTFRNGYHGDTFGAMSVCDPDNSMHSLWKGYLPENLFAPAPQSRMDGEWDERDMVGFARLMAAHRHEIAAVIIEPIVQGAGGMRMYHPEWLKRIRKICDREGILLIADEIATGFGATGKLFACEHAEIAPDILCLGKALTGGTMTLSATLTTREVAETISNGEAGCFMHGPTFMGNPLACAAANASLAILESGDWQQQVADIEVQLREQLAPARDAEMVADVRVLGAIGVVETTHPVNMAALQKFFVEQGVWIRPFGKLIYLMPPYIILPQQLQRLTAAVNRAVQDETFFCQ

SEQ ID NO: 15318 - protein, 429 aa, Escherichia coli
  unsure (1)..(429): unsure at all Xaa locations
MTTDDLAFDQRHILHPYTSMTSPLPVYPVVSAEGCELILSDGRRLVDGMSSWWAAIHGYNHPQLNAAMKSQIDAMSHVMFGGITHAPAIELCRKLVAMTPQPLECVFLADSGSVAVEVAMKMALQYWQAKGEARQRFLTFRNGYHGNTFGAMSVCDPDNSMHSLWKGYLPENLFAPAPQSRMDGEWDERDMVGFARLMAAHRHEIAAVIIEPIVQGAGGMRMYHPEWLKRIRKICDREGILLIADEIATGFGRTGKLFACEHAEIAPDILCLGXALTGGTMTLSATLTTREVAETISNGEAGCFMHGPTFMGNPLACAAANASLAILESGDWQQQVADIEVQLREQLAPARDAEMVADVRVLGAIGVVETTHPVNMAALQKFFVEQGVWIRPFGKLIYLMPPYIILPQQLQRLTAAVNRAVQDETFFCQ

SEQ ID NO: 15319 - protein, 256 aa, Streptococcus agalactiae 2603V/R
MKIGIIGVGKMASAIIQGLKQTQHDIIISGSCLERSKEIAERLDVTYAESHQSLINQADIIMLGIKPQLFEKVLLPLDITKPIISMAAGISLARLSQLTRSDLPLIRIMPNINAQILQSCTAICYNNHVSDELRQLAKEITDSFGSSFDIAETNFDTFTALAGSSPAYIYLFIEALAKAGVKYGFPKEQALSIVGQTVLASSQNLLQGQNSTSDLIDNICSPGGTTIAGLLDLEKNGLTHSVISAIDATIEKAKKL

SEQ ID NO: 15320 - protein, 451 aa, Buchnera aphidicola str. Bp (Baizongia pistaciae)
MKKHLHEIKMLLKITIPIFLAQISQTSMSLINSIMIGHLKENNIAAISVGISIWSPIILFGHGLLLSLVPTVSRIHGSGKINKIPEQINNAYWLATLISLVIMIVLWNSDVIIHTISQVNPIIEQESIKYIRILLWSTPGYLYFQVIQNQCEGLLKPKPAMVIGLIGLLFNIVVSYTLISEKFHCFNYGSTGCGISAIIVYWFMFIAMKKITKNDILINYNIKNKNISNLEMYLPNYKIIWNLFKMGFPIALSLFCEITLFTLITLLIASMETFQIIAHQIALNISSTIFILPLSIATAASIRLGFYLGKKSFSKISTIILSSQIIGLIISTTISTFIILFHYQIITLYTKNANIIKLTKQMLFITASYQIFDFFQIIGNGILRSYKDTNIIFIITCTSYWIVGFPFGYFLALTNYIVPHMGAIGFWYGILIALITSSIMILFRIYILQKK

SEQ ID NO: 15321 - protein, 268 aa, Bouteloua hirsuta
ASYAAAAMPALDVLPEKPHHGWESNGAAAVAPTPAPRRLDGKVAIVTGGARGIGEAIVRLFARHGARVVIADVDAAAGDALAAALGPQVSCVRCDVSVEDDVRRAVEWAVARHGRLDVLCNNAGVLGRQTRAAKSILSFDAGEFDRVLRVNVLGAALGMKHAARAMAPRRAGSIVSVASVAGVLGGLGPHAYTASKHAIVGLTKNAACELGAHGIRVNCVSPFGVATPMLINAWRQGHADAVPSDEEVEKMEEVVRGLATLKGPTLRP

SEQ ID NO: 15322 - protein, 433 aa, Brucella melitensis 16M
MLITGRNKQTALMASLPALFALAGTAMAQDTAPAPTLDTGDTAWMLTSTALVLMMTIPGLALFYGGMVRKKNVLSTVMQSFAITCLMSILWMIAGYSLAFTDGGSLHSYIGGFSKVFFSGVTMESLTGTIPEYLFITFQMTFAIITPALITGSFAERMKFSSMLVFLTLWLFIVYVPVAHWVWGGGFMASDGVLDFAGGTVVHINAGVAGLVAALVIGKRDGYGHTNMAPHNLVLSVIGAALLWVGWFGFNAGSAAGANALAGVAMLNTQVATAGAALAWMFVEWAISGKPSVLGIISGAVAGLVAVTPAAGFVNPTGALIIGIVAGAVCYVAAVKIKHVLGYDDSLDAFGVHGVGGFVGAVLTGFFADATINPASEGATIGKQFFGAAITIIYTAIATVIILYVVKAIMGLRPGKQAEIEGLDIALHGEAVQ

SEQ ID NO: 15323 - protein, 126 aa, Triticum aestivum
  unsure (1)..(126): unsure at all Xaa locations
MATKRSVGTLGEADLKGKKVFVRADLNVPLDDAQKITDDTRIRASIPTIKYLLEKGAKVILXASHLGPPKRCHPQFSLEPLVXTLSDSLGLKFVMALNASVXNLKMGAALPNGGFNPKCYFTGGKF

SEQ ID NO: 15324 - protein, 268 aa, Bouteloua hirsuta
ASYAAAAMPALDVLPEKPHHGWESNGAAAVAPTPAPRRLDGKVAIVTGGARGIGEAIVRLFTRHGARVVIADVDAAAGDALAAALGPQVSCVRCDVSVEDDVRRAVEWAVARHGRLDVLCNNAGVLGRQTRAAKSILSFDAGEFERVLRVNALGAALGMKHAARAMAPRRAGSIVSVASVAGVLGGLGPHAYTASKHAIVGLTKNAACELGAHGIRVKCVSPFGVATPMLINAWRQGHADAVPSDEEVEKMEEVVRGLATLKGPTLRP

SEQ ID NO: 15325 - protein, 386 aa, Vibrio parahaemolyticus RIMD 2210633
MSTRKPATIAVRTGIESDSQYHAVVPPIYLSTNYGFPAFGEVPKYDYTRSGNPNRGLLESALSELESGKGAVVTNCGTSALNLWVSAFLGPDDLIVAPHDCYGGTYRLFNTRANKGDFKVQFVDQSDEQALEAALAKKPKLILLETPSNPLVRVVDIAAVCEKAKQVGALVAVDNTFLTPVYQKPLELGADFVIHSTTKYINGHSDVIGGVVITKTEAHAEELAWWGNCIGATGTPFDSYMTLRGIRTLGARMRVHEESSQHVLNYLQQQALVAKIYHPSLPDHPGHEIAKKQQSGFGSMLSFEFAGSFEQLKVFVKELELFSLAESLGGVESLICHPASMTHRAMGEEALAEAGVSHQLLRLSVGLEDAQDLIADLDQAFVKAAQ

SEQ ID NO: 15326 - protein, 268 aa, Bouteloua hirsuta
ASYAAAAMPALDVLPEKPHHGWESNGAAAVAPTPAPRRLDGKVAIVTGGARGIGEAIVRLFTRHGARVVIADVDAAAGDALAAALGPQVSCVRCDVSVEDDVRRAVEWAVARHGRLDVLCNNAGVLGRQTRAAKSILSFDAGEFDRVLRVNALGTALGMKHAARAMAPRRAGSIVSVASVAGVLGGLGPHAYTASKHAIVGLTKNAACELGAHGIRVNCVSPFGVATPMLINAWRQGHADAVPSDEEVEKMEEVVRGLATLKGPTLRP

SEQ ID NO: 15327 - protein, 697 aa, Desulfovibrio vulgaris subsp. vulgaris (strain Hildenborough)
MCGIAGIVSPGAPVASATLAAMTESLAHRGPDACGLFIRPSGAGSPHVGLGHRRLSILDLSDAGAQPMQSEDGAFTLVFNGEIYNYPDLRRDLEAAGHIFRSTSDTEAILRGYMAWGEGVVARLKGMFAFALWDERKRSLLLARDRFGKKPLHYAVTRQGTLLFASEPKALLAHPEFRPEPDAASLLHFLRYDYVPAPRSIYAGAAKLPPSHLMVWRDGRLEVRRYASLAFSGATGDRGVPLREAEAAVDALLDAAVQRRLASDVPLGVFLSGGLDSSTVLAYMTRHIPAHDIRTFAIGFDEASYDESAHAEAMARHAGSHHTMMRLPAARMLDLLDMVWTTQDEPMADASIIPTLLLCRFAREHITVALGGDGGDELFAGYDPVLADLPARCLDWLPPAALRLLQGIALRLPTGDANMSLGFKVQRFLSGLGAREVAARHQTWLGAFDDEGARAMLHPDLRAATRDVSPLDALDMLREECRDASRFDAMLHFYQRFYMCGSILTKVDSASMAVSLEVRSPFLDQDLADYVNRLPREHKLRGLTRKVLLRRLMRSRMPDALLKRPKKGFGLPLARWFRHELRPLVTAMLDPGRVAQGGLLDPVTVERMVRDHLSGRRDHRKEIWSALCVEAWRERYLHHSRATASDTIEFGTTPHGDGHLITAQAVPARSSAAINDSTNDSPSWAASPSRHRCNDSI

SEQ ID NO: 15328 - protein, 352 aa, Staphylococcus xylosus
YSTNDITQYTSASIFSEVGKQTEMFARFSTVAGERGAADAERDIRGFALKFYTDEGNWDLVGNNTPVFFFRDPKLFASLNHAVKRDPRTNMRSAQNNWDFWTSLPEALHQVTILMSDRGIPKGFRNMHGFGSHTYSMYNDKGERVWVKFHHRTQQGIENLQPDEAAKIIADDRESSQRDLFEAIENKDYPKWKTYIQVMTEEQARNHKDNPFDLTKVWYKGDYPLIEVGEWELNRNPDNYFQDVEQAAFAPTNIVPGLDFSPDKMLQGRLFSYGDAQRYRLGVNHWQIPVNQPKGVGVENICPFSRDGQMRILDNNQGGGTHYYPNSDGSFEDQPEFKKPGLKVEGEAYEYD

SEQ ID NO: 15329 - protein, 268 aa, Bouteloua hirsuta
ASYAAAAMPALDLLSEKSHHGWDGTGAAAVAPTPAPRRLDGKVAIVTGGARGIGEAIVRLFVKHGARVVIADIDDAAGDALAAALGPQVSCVRCDVSVEEDVKRAVEWAVARHGRLDVLCNNAGVLGRQTRAAKSILSFDAGEFDRVLRVNALGTALGMKHAALAMAPRHAGSIVSVASVAGVLGGLGPHAYTASKHAIVGLTKNAACELGAHGIRVNCVSPFGVATPMLINAWRQGHADAVPSDEEVEKMEEVVRGFATLKGPTLRP

SEQ ID NO: 15330 - protein, 354 aa, Staphylococcus xylosus
VTNDITQYTSASIFSEVGKQTEMFARFSTVAGERGAADAERDIRGFALKFYTDEGNWDLVGNNTPVFFFRDPKLFASLNHAVKRDPRTNMRSAQNNWDFWTSLPEALHQVTILMSDRGIPKGFRNMHGFGSHTYSMYNDKGERVWVKFHHRTQQGIENLQPDEAAKIIADDRESSQRDLFEAIENKDYPKWKTYIQVMTEEQARNHKDNPFDLTKVWYKGDYPLIEVGEWELNRNPDNYFQDVEQAAFAPTNIVPGLDFSPDKMLQGRLFSYGDAQRYRLGVNHWQIPVNQPKGVGVENICPFSRDGQMRILDNNQGGGTHYYPNSDGSFEDQPEFKKPGLKVEGEAYEYDSDL

SEQ ID NO: 15331 - protein, 341 aa, Amycolatopsis mediterranei
MRVGVLTGGGDCPGLNAVIRAVVRKGIEVHGWDFVGFRNGWNGPLTGDSRPLGLNDVEDILTRGGTILRSSRTNPYKVEGGVDKIKQVLADQGVDALIAIGGEDTLGVAKRLTDDGIGVVGVPKTIDNDLGATDYTFGFDTAVSIATEAIDRLHTTAESHHRALVVEVMGRHAGWIALHSGLAGGASVILVPERHFNVDQVVSWVERRFEKEFAPIIVVAEGALPEGGEEKLLTGEKDAFGHVRLGGIGTWLADEIAHRTGKESRAVVLGHVQRGGTPTAYDRVLATRFGLNAVDAVADGDFGVMVALKGTDIVRVKLSEATAELKTVPVERYQEAEVFFG

SEQ ID NO: 15332 - protein, 375 aa, Burkholderia fungorum LB400
MIEHPRDAIIKVSSCAICGSDLHLFDGFMPTMKSGDVLGHEFMGEVVEVGAENQKLKIGDRVVVPFTIACGECDRCRRGFFSVCERSNRNKEMADKVFGHSTAGLFGYSHLTGGYPGGQAEYVRVPFADFTPVRIPDGLTDEQVLFLGDIFPTGWQAAAQCEIEPTDTVSIWGAGPVGQFAIRSAILLGARQVISIDRVPERLAMARAAGAITINFDTESVLDRLNELTQGKGPEKCIDAVGMESHATRSFDALYDRAKQALMLETDRPHVLREMIYVCRPAGILSIPGVYGGLIDKIPFGAAMNKGLTFRMGQTHVNRWTDDLLRRIQEGQIDPSFVITHTVPLEQGPEMYRVFREKEDGCVKVVLKPSPSMGQ

SEQ ID NO: 15333 - protein, 340 aa, Staphylococcus epidermidis ATCC 12228
MKAAVVTKDHRVSIEEKRLRELRPGEALVKTEYCGVCHTDLHVKNADFGDVTGVTLGHEGIGRVIKIADNVDSLKVGDRVSIAWMYAACGNCEYCTTGRETLCRDVLNAGYTVDGAMAEEVIVDANYAVKVPENLDPAAASSITCAGVTTYKAVKVSGIEPGQWLGVFGVGGLGNLALQYAKNVMGAKVVAFDINDDKLNFAKELGADAIINSTNVDPIEEVNRLTNNKGLDATVITAVAKTPFNQAVDVVKAGARVVAVGLPVDKMDLDIPRLVLDGIEVVGSLVGTRQDLREAFQFAAENKVIPKIQLRQLSEINDIFDEMEKGTITGRMVIDMKSTH

SEQ ID NO: 15334 - protein, 346 aa, Dictyoglomus thermophilum
MSKMRIGVLTGGGDCPGLNPAIRGIVMRALDYGDEVIGLKYGWAGLLKADTMPLSLEMVEDILEIGGTILGSSRTNPFKKEEDVQKCVENFKKLNLDALIAIGGEDTLGVASKFSKLGLPMIGVPKTIDKDLEETDYTLGFDTAVEVVVDAIKRLRDTARSHARVIVVEIMGRHAGWLALYGGLAGGADYILIPEVEPNLEDLYNHIRKLYARGRNHAVVAIAEGVQLPGFTYQKGQEGMVDAFGHIRLGGVGNVLAEEIQKNLGIETRAVILSHLQRGGSPSIRDRIMGLLLGKKAVDLVHEGKSGLFVAVKGNELVPVDITLIEGKTKNVDPAFYESVKTFFNK

SEQ ID NO: 15335 - protein, 500 aa, Atriplex centralasiatica
MAFPMPVRQLFIDGEWREPLLKNRIPIINPSTEEIIGDIPAATAEDVEVAVVAARKAFKRNKGRDWAATSGAHRARYLRAIAAKITERKDHFVKLETLDSGKPLDEAVLDIDDVATCFEYFAGQAEALDAKQKAPVTLPMDRFKSHVLRQPIGVVGLISPWNYPLLMATWKIAPALAAGCTAVLKPSELASVTCLEFGEVCNEVGLPPGVLNILTGLGPDAGAPIVSHPDVDKIAFTGSSATGSKIMASAAQLVKPVTLELGGKSPVIMFEDIDIETAVEWTLFGVFWTNGQICSATSRLLVHESIAAEFVDRMVKWTKNIKISDPFEEGCRLGPVISKGQYDKIMNFISTAKSEGATILCGGSRPEHLKKGYYIEPTIITDITTSMQIWKEEVFGPVICVKTFSTEDEAIELANDTEYGLAGAVFSKDLERCERVTKALEVGAVWVNCSQPCFVHAPWGGVKRSGFGRELGEWGIENYLNIKQVTSDISDEPWGWYKSP

SEQ ID NO: 15336 - protein, 500 aa, Atriplex centralasiatica
MAFPMPVRQLFIDGEWREPLLKNRIPIINPSTEEIIGDIPAATAEDVEVAVVAARKAFKRNKGRDWAATSGAHRARYLRAIAAKITERKDHFVKLETLDSGKPLDEAVLDIDDVATCFEYFAGQAEALDAKQKAPVTLPMDRFKSHVLRQPIGVVGLISPWNYPLLMATWKIAPALAAGCTAVLKPSELASVTCLEFGEVCNEVGLPPGVLNILTGLGPDAGAPIVSHPDVDKIAFTGSSATGSKIMASAAQLVKPVTLELGGKSPVIMFEDIETVVAVEWTLFGVFWTNGQICSATSRLLVHESIAAEFVDRMVKWTKNIKISDPFEEGCRLGPVISKGQYDKIMNFISTAKSEGATILCGGSRPEHLKKGYYIEPTIITDITTSMQIWKEEVFGPVICVKTFSTEDEAIELANDTEYGLAGAVFSKDLERCERVTKALEVGAVWVNCSQPCFVHAPWGGVKRSGFGRELGEWGIENYLNIKQVTSDISDEPWGWYKSP

SEQ ID NO: 15337 - protein, 429 aa, Escherichia coli
  unsure (1)..(429): unsure at all Xaa locations
MTTDDLAFDQRHILHPFTSMTSPLPVYPVVSAEGCELILSDGRRLVDGMSSWWAAIHGYNHPQLNAAMKSQIDAMSHVMFGGITHAPAIELCRKLVAMTPQPLECVFLADSGSVAVEVAMKMALQYWQAKGEARQRFLTFRNGYHGDTFGAMSVCDPDNSMHSLWKGYLPENLFAPAPQSRMDGEWDERDMVGFARLMAAHRHEIAAVIIEPIVQGAGGMRMYHPEWLKRIRKICDREGILLIADEIATGFGRTGKLFACEHAEIAPDILCLGXALTGGTMTLSATLTTREVAETISNGEAGCFMHGPTFMGNPLACAAANASLAILESGDWQQQVADIEVQLREQLAPARDAEMVADVRVLGAIGVVETTHPVNMAALQKFFVEQGVWIRPFGKLIYLMPPYIILPQQLQRLTAAVNRAVQDETFFCQ

SEQ ID NO: 15338 - protein, 267 aa, Bacillus cereus ATCC 14579
MLTKHRILFIGAGRMAEAIFSGLLKTSKEYIEEIIVSNRSNIEKLKQLQHQYNVSTTTDWKQHVTSVDTVVLAMPPSAHEELLAELSPLISNQLVVTVAAGIGPSYLEARLPKGTPVAWIMPNTAAEIGKSISLYTMGQSVNEIHQETLQLLLKGIGTSQLCTEEEVHQLTAVTGSAPAFLYYFAESLIEATKSYGVDEETAKHLVIQMISGSASMLEQTQNPANLREQVTTPGGSTAEGLKTLYEYNFSEAIQKAVEATNKKARGK

SEQ ID NO: 15339 - protein, 185 aa, Geobacter sulfurreducens PCA
MSVTLDEIKQVYQEADCLFSEAEVEAAIGRLATAVTERLAEANPLVFCVMNGGLIVTGKLLPRLGFPLEIEYLHATRYGHHIFGKSLDWRVRPTVDLRGRTVLIVDDILDEGATLDAITEWCLQEGAAKVFTAVLVDKEHDRKARPGLKADFTGLVSPDRFLFGYGMDYKGYWRNAPGIYAVKGY

SEQ ID NO: 15340 - protein, 197 aa, Pseudomonas syringae pv. syringae B728a
MNLTQLVLASHNGGKLKELQAMLGDSVTLRSVSEFSLVEPEETGLSFVENAILKARNAARLSGLPALADDSGLAVDFLGGAPGIYSARYADGQGDAANNAKLLEALKDVPDEQRGAQFVCVLALVRHADDPLPILCEGLWHGRILHAASGEHGFGYDPLFWVPERNCSSAELGPTEKNQLSHRARAMVLLRQRLGLQ

SEQ ID NO: 15341 - protein, 312 aa, Photobacterium profundum
MKVAVIGAAGGIGQALALLLKNGLPAGSDLALYDIAPVTPGVAADLSHIPTPVSIKGYGGVDPTPALEGADVVLISAGVARKPGMDRSDLFNVNAGIIKSLAEKIAVVCPKACVGIITNPVNTTVAIAADVLKKAGVYDKRRLFGITTLDIIRSETFVAELKGKTPSELQVPVIGGHSGVTILPLLSQVEGVEFSDEEIKALTPRIQNAGTEVVEAKRGGGSATLSMGQAAYRFGLSLVRALQGQQGIVECAYVEGDGKHARFFAQPVLLGKDGVEEVIDYGKLSTFEQEALNNMLDTLTSDITLGEEFAAK

SEQ ID NO: 15342 - protein, 237 aa, ASPERGILLUS NIDULANS FGSC A4
MANDEYDVSPRPLTFLFKVVLIGDSGTGKSNLLSRFTRNEFNLDSKSTIGVEFATRSIQVDSKTIKAQIWDTAGQERYRAITSAYYRGAVGALLVYDISKHQTYDNVNRWLKELRDHADSNIVIMLVGNKSDLRHLRAVPTEEAKQFASENNLSFIETSALDASNVELAFQNILTGIAPVGISKRRSLTAILFFVEIYRIVSSKALEGESGGASVGERRQIIDIEKTQDTENKGGCC

SEQ ID NO: 15343 - protein, 272 aa, Pseudomonas syringae pv. syringae B728a
MSKTRIAFVGAGNMAASLIGGLRAQGVEAALISASAPGAETRERIANDHGIQVFADNADAIKGVDVVVLAVKPQMMKTVCQALKSGLEPHQLIVSVAAGITCASLTQWLGEQPVVRCMPNTPSLLRQGASGLYATDNVTPEQREQAEALLAAVGIAVWVEQEKHMDAVTAVSGSGPAYFFLMMEAMTAAGVKLGLPEDIAKKLTLQTALGSALIATGSDAGAGELRRRVTSPGGTTEAAIKAFQAGGFEALVETALTAADHRAAELAEQLGK

SEQ ID NO: 15344 - protein, 197 aa, Glycine max
  unsure (1)..(197): unsure at all Xaa locations
NSAPVXXDIVMHSATKFIAGHSDIMAGVLAVKGEKLGKELYFLQNAEGSGLAPFDCWLCLRGIKTMALRIEKQQDNAQKIAEFLASHPRVKKVNYAGLPGHPGRDLHYSQAKGAGSVLSFLTGSLELSKHIVETTKYFSITVSFGSVKSLISMPCFMSHASIPAAVREARGLTEDLVRISVGTEDLRACIVIFSLDS

SEQ ID NO: 15345 - protein, 214 aa, Bordetella parapertussis 12822
MSSADIVIVKPDYWDDAVAHLMRRDRILKRIIPQHGETWLTSRGSPFVTLARAIIGQQISVKAADALWQRFLETVGKRPTPATVLRAGLPALRAAGLSQRKAEYLVDLATHFGQRLVHPEKWAAMDDEAVIAELVAIRGIGRWTAEMFLIFNLQRPDVLPLDDLGLLKAISLHYFSGEPVSRFEAREVSLAWQPWRTVATWYLWRSLEPAAVQY

SEQ ID NO: 15346 - protein, 251 aa, Triticum aestivum
MASPEGSNWVFDCPLMDDLAAADFAAASAGGFYWTPPMQPQMHTLAQAVSATPAPNPCAEINSSVSVDWDHAKGQPKNKRPRSETGAQPSSKACREKVRRDKLNERFLELGAVLDPGKTPKIDKCAILNDAIRAVTELRSEAEKLKDSNESLQEKIRELKAEKNELRDEKQKLKAEKESLEQQIKFMNARQSLVPHPSVIPAAAFAAAQGQAAGHKLMMPVMSYPGFPMWQFMPPSDVDTSDDPKSCPPVA

SEQ ID NO: 15347 - protein, 309 aa, Glycine max
  unsure (1)..(309): unsure at all Xaa locations
MATIKAVKARQIFDSRGNPTVEVDVILSDGSFHRAAVPSGALLXVYEALELRDGGSDYLGKGVLKAVENVNSIIAPALLGKDPTKQTEIDNFMVQQLDGTVNEWGWCKQKLGANAILAVSLAVCKAXCSVRKLSGLELLKTAIAKAGYTGKVVIGMDVAASEFYDNKDKTYDLNFKEENNDGSQKISGDSLKNVYKSYVTDYPIVSIEDPFDQDDWEHYAKLTAEVGQQVQIVGDDLLVTNPKVCYINFKSEICNAILAVSVSLAVCNAGAAVKKIPLYKHIAWLETRLWYYLCFHSMLSMEAHMQEIS

SEQ ID NO: 15348 - protein, 550 aa, Pichia stipitis
MSSQDLPSGAQTPIDGSSILEDKVEQSSSSNSQSDLASIPATGIKAYLLVCFFCMLVAFGGFVFGFDTGTISGFLNMSDFLSRFGQDGSEGKYLSDIRVGLIVSIFNIGCAIGGIFLSKIGDVYGRRIGIISAMVVYVVGIIIQISSQDKWYQLTIGRGVTGLAVGTVSVLSPMFISESAPKHLRGTLVYCYQLCITLGIFIGYCVTYGTKDLNDSRQWRVPLGLCFLWAIFLVVGMLAMPESPRFLIEKKRIEEAKKSLARSNKLSPEDPGVYTELQLIQAGIDREAAAGSASWMELITGKPAIFRRVIMGIILQSLQQLTGVNYFFYYGTTIFQAVGLQDSFQTSIILGTVNFLSTFVGIWAIERFGRRQCLLVGSAGMFVCFIIYSVIGTTHLFIDGVVDNDNTRQLSGNAMIFITCLFIFFFACTWAGGVFTIISESYPLRIRSKAMSIATAANWMWGFLISFCTPFIVNAINFKFGFVFTGCLLFSFFYVYFFVSETKGLSLEEVDELYAEGIAPWKSGAWVPPSAQQQMQNSTYGAEAKEQEQV

SEQ ID NO: 15349 - protein, 985 aa, Bacillus subtilis subsp. subtilis str. 168
MAGKKTITINGVEMEASEEQTVLQLLNNSSIEVPQVCYHPSLGPIETCDTCIVSINGELKRSCSAELKDGDVIDTLSPDVKKAQVIGMDKILYNHELYCTVCDYNNGGCEIHNTVKEMKINHQSIPFDHKPYHKDESHPFYRYDPDQCILCGRCVEACQDVQVTETLTIDWERKRPRVIWDNDVPINESSCVSCGHCSTVCPCNAMMEKGMEGEAGYLTGINNETLRPMIEITKGVETGYGSILAISDMESAMRDERIKKTKTVCTYCGVGCSFDVWTKGRDILKVEPQEEAPANGISTCVKGKFGWDFVNSEERLTKPLIREGDHFREAEWEEALLLIASKFTELKEAFGPDSLAFITSSKCTNEESYLMQKLARGVIGTNNVDNCSRYCQSPATAGLFRTVGYGGDSGSITDIAQADLVLIIGSNTSESHPVLSTRIKRAHKLRGQKVIVADIRKHEMAERSDLFVQPRAGSDIVWLNAIAKYLIENGKADERFLRERVNGRDEYVKSLAPYTLEYAEEKTGIDQETLIQMAEMIGQADSVCALWAMGVTQHIGGSDTSTAISNLLLVTGNYGKPGAGSYPLRGHNNVQGASDFGSMPDRLPGYEKVTDEQVRQKYERVWGVPLPKEPGMTNHEMIEKIHSGQLKAMYVKGEEMGLVDSNINHVHAAYEKLDFFVVQDIFLSRTAEFADVVLPASPSLEKEGTFTNTERRIQRLYQVFEPLGESKPDWQIIMEVANKLGAGWLYEHPADIMEEAAKLSPIYAGVTYERLEGYNSLQWPVNADGKDSPLLFTERFPFPDGKAILYPVQWTEPKEFGEEYDIHVNNGRLLEHFHEGNLTYKSKGISEKTPEVFLEISPELAAERGIQDGTLVRLTSPFGNVKVKCLITDRVKGKEVYLPMNDSGEAAINLLTGSHADKDTDTPAYKETSAKMEILKHDGISPLPKINHRNGNPQPQIGVQVHKKWARKDYIFPGDAVKRGMGHNG

SEQ ID NO: 15350 - protein, 399 aa, Bacillus cereus ATCC 10987
MTYTLATRMKAFQSSIFSELGAYKKEKIAAGHKMIDLSIGNPDMPPADFVREEMVHTANQKESYGYTLSGIQEFHEAVTEYYNNTHNVILNADKEVLLLMGSQDGLVHLPMVYANPGDIILVPDPGYTAYETGIQMAGATSYYMPLKKNNGFLPNLELIPEEIADKAKMMILNFPGNPVPAMAHADFFKEVIVFAKKHNIIVVHDFAYAEFYFDGNKPISFLSVPGAKEVGVEINSLSKSYSLAGSRIGYMIGNEEIVRALTQFKSNTDYGVFLPIQKAACAALKNGAAFCEKNRGIYQERRDTLIDGFKTFGWNVDKPAGSMFVWAEIPNGWTSIDFAYALMDRANVVVTPGHAFGPHGEGFVRIALVQDKEVLQQVIENIRNSGIFSLEKINELVKN

SEQ ID NO: 15351 - protein, 432 aa, Enterococcus hirae
MSIITDVYAREILDSRGNPTIEVEVYTESGAFGRGMVPSGASTGEYEAVELRDGDKARYGGKGVTKAVDNVNNIIAEAIIGYDVRDQMAIDKAMIALDGTPNKGKLGANAILGVSIAVARAAADYLEVPLYHYLGGFNTKVLPTPMMNIINGGSHADNSIDFQEFMIMPVGAPTFKEALRMGAEVFHALAAILKSRGLATSVGDEGGFAPNLGSNEEGFEVIIEAIEKAGYVPGKDVVLAMDAASSEFYDKEKGVYVLADSGEGEKTTDEMIKFYEELVSKYPIISIEDGLDENDWDGFKKLTDVLGDKVQLVGDDLFVTNTQKLSEGIEKGIANSILIKVNQIGTLTETFEAIEMAKEAGYTAVVSHRSGETEDSTISDIAVATNAGQIKTGSLSRTDRIAKYNQLLRIEDQLGEVAEYKGLKSFYNLKAA

SEQ ID NO: 15352 - protein, 481 aa, Papaver somniferum
SLVAVVITTFLYLIFRDSSPKGLPPGPKPWPIVGNLLQLGEKPHSQFAQLAETYGDLFSLKLGSETVVVASTPLAASEILKTHDRVLSGRYVFQSFRVKEHVENSIVWSECNETWKKLRKVCRTELFTQKMIESQAEVRESKAMEMVEYLKKNVGNEVKIAEVVFGTLVNIFGNLIFSQNIFKLGDESSGSVEMKEHLWRMLELGNSTNPADYFPFLGKFDLFGQSKDVADCLQGIYSVWGAMLKERKIAKQHNNSKKNDFVEILLDSGLDDQQINALLMEIFGAGTETSASTIEWALSELTKNPQVTANMRLELLSVVGKRPVKESDIPNMPYLQAFVKETLRLHPATPLLLPRRALETCKVLNYTIPKECQIMVNAWGIGRDPKRWTDPLKFSPERFLNSSIDFKGNDFELIPFGAGRRICPGVPLATQFISLIVSSLVQNFDWGFPKGMDPSQLIMEEKFGLTLQKEPPLYIVPKTRD

SEQ ID NO: 15353 - protein, 822 aa, Archaeoglobus fulgidus DSM 4304
MVTRRDFLKATALTATAISAGIKFQPKSYAEATAASGEVKFVPNICAMCPAACSIQVEVRDGKVHRIHGTPDHPINNGKICARGNAGVQRVYNPDRLKKPLIRTGEKGTWSFREASWEEALSLIASKVKEYREMGHPEYIGMLGGWLPCTYYKPFFKAFLAALGTPNGGGVPEALCFLSKALGWKSAYGFGAHPELLTDYENARYVIMLRRNVAGSISVVHGWRLGQNRRKFKLVVLDPRYSETAAKADVWLPIKPGTDLAFLLAMMNVIINEKLYDSNFLAKYSNAPMLLKDGKPFKVWDENGKKKYLVFDLAKGAAVEHDSAMLPALEGEYEVEGEKVIPAFEALKRRVAEYTPEWAEGITDIEAKKIREIAREFALRRGVIDSGWHGPKYRNSLLTWRAAAIVNALVGSVNNDGGLLFTGLAQFVTSKESTTEAPSQSVLRMWAEKRGIATAFLGHTVQAFYDAIVNEDPYPIKMLFVVGHNLLMNMPERQKWEEALKKLDFMVAVDILPQDHLYYADVVLPESTYIEKDDPLFPIAYAPAFGFHTRVKAIEPIYDTKHVIEMMVEIASRLGTEDTFFKALSKGLGVDAEKLKSYYHGEGVAGIRRAQAEAKGVNYNELLSKGYVLKAGRDKIVYNMPYKQPLPTPTGKVEIFSFMLANFASKASEPYWDALIKWVPPKVSERKLGSNEFYLAYSRSPFTTHSSTSDNPLLAKLIDDAELYYKGIWINSERAAELGIRNGDRVVVESVFTGDKTEAIAFVNELVRKDTIFTVSGFGQSSERLTNIPQRGMTMMRLIPLQFDTLSGTIMSQETIVRITKA

SEQ ID NO: 15354 - protein, 651 aa, Agrobacterium tumefaciens str. C58 (Cereon)
MVDDFHFREKIFHFDHERIPERVVHARGYGAHGYFETYDSLATHTKADLFQRAGERTPAFVRFSTVAGNKGSADLARDVRGFAVKLYTKEGNWDLVGNNIPVFFIQDAIKFPDLVHAAKQEPDRAFPQAQTAHDTFWDFISLTPESMNMVMWIMSDRTIPRSFRFMEGFGVHTFRFINAKEQSTFVKFHWKPKLGLQSVAWNEAVKINGADPDFHRRDLWTAIQSGNFPEWELQVQLFDQDFADSFDFDVLDPTKIIPEEILAPKPVGRLVLDRMPDNFFAETEQVAFMTQNVPPGIDFSNDPLLQGRNFSYLDTQLKRLGGPNFTHLPINAPKCPFAHFQQDGHMAMRNPTGRANYQPNSFGEGQRESPTRGFQHFAAEEQGVKARLRPESFADHYSQARQFYISQTPPEQRHIASALTFELSKVETVEIRERMVSHLLNIDETLATTVAQKLGLQTMPEPANTAIPTRQDLEPSPALSIVERGPKRFEGRKLGILITDGVDAKLLKGLTQAVTAEKAVFEFIAPKVGGVTASNGTLIEAHHMIDGGPSVLFDAVALLTSEAAIAELTEEATARDFVADAFQHCKFIGYDRSALPLLEIAGIADAMDEGVLPLPGEEGLAAFVAELGKLRVWAREPSLKLGKASVPVNKE

SEQ ID NO: 15355 - protein, 454 aa, Magnaporthe grisea 70-15
MTEPPHPYNALDAAKLQEAADSSLLSYGPSFHNEIIARAEGVFIYTVAGRRILDWTSGQMSCLIGHGNPEVVSVIHQHATSLDHLFSGMLSPPVINLAAELKKLLPPGLERSMFLSTGGESNEAAIRMAKCVTGRWEIVGLSASWHGMTGGAAGAQYHSGRRGIGPMIPGNLMLPAPNTYRSIFRHADGTYDWETELDHGWAMVDAASSGSLAAVILEPILSSAGMHALPDGYLAAMKAHCERRGMLLILDEAQTAIGRAGDMFAFQHPSNGGVVPDVLTLSKTLGNGLPLSAVVTSDAIAARARGEGFLFFTTHVNDPLPAAVGLKVLQIVQRDGLVQRSRRLGERLHAGLRRLQERYACIGDVRGRGLMAGVEIVSDRETKAPGMELADRLGKRMMELGVSANLATLASFGGAFRIAPPITISEEELDLGLGFMEETLRSTEGSMPTGAIRK

SEQ ID NO: 15356 - protein, 287 aa, Escherichia coli
MKGIILAGGSGTRLYPITMGISKQLLPVYDKPMIYYPLSVLMLAGIRDILIITTPEDQFSFIRLLGDGKHLGVSISYAVQPRPDGLAQAFTIGKDFIGADSVCLVLGDNIFFGQGFTPKLKTACERKLGATIFGYQVRDPGRFGVVEFDSDYRVLSIEEKPLKPKSNWAVTGLYFYDNDVVEIAKSITPSQRGELEITSINEVYLKNNKLTVELLGRGFAWLDTGTHDSLIEAGSFVETVQKRQGMMVACPEEIAWRNGWLNNSDLKSLATNMKNSYGSYLTKLILQ

SEQ ID NO: 15357 - protein, 206 aa, Anemia phyllitidis
VMVYKFHEDEHGEVVAEIRRSDLEPYLGLHYPATDIPQASRFLFMKNRVRMICNCAATPVRVIQDKGLRQPLSLAGSTLRAPHGCHSQYMANMGTIASLVMAVIVNDNDEEVEQQNTSPKQEKLWGLVVCHHTTPRAVPFPLRSACEFLMQVFGLQLNMEMELAAQMREKHILRTQTLLCDMLLRDAPIGIVSESPNIMDLVKGSI

SEQ ID NO: 15358 - protein, 204 aa, Anemia phyllitidis
VMAYKFHDDEHGEVVAEIRRSDLEPYMGLHYPATDIPQAARFLFMKNRVRLIYDCRLPPVKVIQDKNLVQPLSLAGSTLRAPHRCHAEYMGNMGSIASLGMAVIVNDDDSSDAGNMQQRTRLWGLVVCHHTSTRYVPFPLRSACEFLMQVFSLELNMEVELAAQRREKHILQTQTLLCDMLLRDAPIGIVSQSPNIMDLVKGSI

SEQ ID NO: 15359 - protein, 206 aa, Dryopteris filix-mas
VMAYKFHEDEHGEVLAEIRRSDLEPYLGLHYPATDIPQASRFLFMKNRVRMICDCRAIPVRVIQDKELRQPLSLAGSTLRAPHGCHGQYMANMGSIASLVMAVVVNDNDEDLSNRPHQPKMRRLWGLVVCHHTTPRAVPFALRSACEFLMQVFGLQINMELELAAQMREKHILRTQTLLCDMLLRDAPIGIVSESPNIMDFVKGSI

SEQ ID NO: 15360 - protein, 291 aa, Glycine max
  unsure (1)..(291): unsure at all Xaa locations
MVEQSVLVLEKQGPNPVLSEGIHDWVFECHGLLHNAVLIIASFLFVLYLALQAKKSFLRLSHGRSYIIISYYASLWLVSILNLLWCFSQAWECSPGKEFAWNLLSLFTTSGMLFLEVSLLAFLLQGNSTSAXSVTQLWISGIXGLDILLKAIYLFAFGIPIFINSDYPTPHVKWNLWVAHELLLTLVYGFILFMYHSRWRERLPARPAYYKYVTIMLILNAIALFACGITGNGTAFGFWLYHFTVVCYHAAYLPLLYITFLADFFQEEDLHLENVYYSEMKDAGFFEADWN

SEQ ID NO: 15361 - protein, 396 aa, Photorhabdus luminescens subsp. laumondii TTO1
MFEKITAAPADPILGLADSFRSDPRTNKINLGIGVYKDETGKTPVLTSVKKAEQYLLENETTKNYLPISGLAEFGRVTQELLFGKDHPVVTDKRARTAQSPGGTGALRIAADFIAKQTNAKRVWISNPTWPNHKNVFSAAGLEVCEYKYYDAEKHALNFEDMLASLSEAQAGDVVLFHGCCHNPTGIDPTPAQWAKLAEMSAEKGWLPIFDFAYQGFAKGLNEDAEGLRIFAKNHNELIVASSYSKNFGLYNERVGACTIVASDSDTAEKAFSQAKAIIRANYSNPPAHGASIVTTILSNEDLKAAWEQELTTMRERIQRMRQLFVNTLQEKGAKQDFSFIISQNGMFSFSGLTKEQVERLRDEFGIYAVSSGRINVAGLTLENMAPLCEAIVAVL

SEQ ID NO: 15362 - protein, 399 aa, Bacillus anthracis str. Ames 0581
MTYTLATRMKAFQSSIFSELGAYKKEKIAAGHKMIDLSIGNPDMPPADFVREEMVHTANQKESYGYTLSGIQEFHEAVTEYYNNTHNVILNADKEVLLLMGSQDGLVHLPMVYANPGDIILVPDPGYTAYETEIQMAGATSYYMPLKKENDFLPNLELIPEEIADQAKMMILNFPGNPVPAMAHEDFFKEVIAFAKKHNIIVVHDFAYAEFYFDGNKPISFLSVPGAKDVGVEINSLSKSYSLAGSRIGYMIGNEEIVGALTQFKSNTDYGVFLPIQKAACAALRNGAAFCEKNRGIYQERRDALVDGFRTFGWNVEKPAGSMFVWAEIPKGWTSIDFAYALMDRANVVVTPGHAFGPHGEGFVRIALVQDKVVLQQVVENIRNSGIFALEKVDELVKN

SEQ ID NO: 15363 - protein, 339 aa, Clostridium thermocellum ATCC 27405
MVSPGKIEFHEVEKPELKPGQVLIKIMRIGICGSDIHVNHGKHPFTKYPVTQGHEVSGKIVEVAEDVEHLKVGQKVTIEPQVVCGKCHPCRTGKYNLCEELKVMGFQTVGAGSEYFAVDAKNVTTVPDHLSYDEAAMIEPLAVTVHAANRVGDVKDKDIVVIGAGPIGILLVQTLKAKGARKVMVTDVSDYRLELALKCGADFAVNTKKEDFGEAMLRCFGPDKADVIYDCAGNNTTMEQAIKHSRKGSIIVLVAVFEGMATVDLATLNDKELDLNTTMMYRHEDYVEAIELVEAGKVKLTPLMSKHFAFRDWEKAYEYIDNNREITMKVLIDVNNDDD

SEQ ID NO: 15364 - protein, 425 aa, Mycobacterium avium subsp. paratuberculosis str. k10
MHGIDPAATAWLLASTALVLLMTPGLAIFYGGMVRTTGVLNMIMMSFISIPLVTVAWLLVGYTMAFSQDGMSGLVGNLRHFGMLGITPDTTHGAVPELLYATFQLTFAIITAALVSGAIADRAKFAAWMVFVPVWTVAVYSVVAQWVWGPGGWLARLGVLDYAGGLVVEIVSGSSALALALVLGPRIGFKKDAMRPHNLPLLFVGVGLLWFGWFGFNAGSALAANGTAAAIFLNTLVAGCLGMLGWLSVEQIRDGRPTTFGAASGVVAGLVAITPSCGTVNTLGATVVGLAAGVVCSFAAGAKLRFNYDDSLDVVGVHFVGGVVGVSLIGLFATAVMTAGPQGLFYGGGVAQLGKQALAIAVVALYAFTVSFLLAKVIDRVMGFRVSAEDETTGVDLTQHAETAYAEGVHGHLPQRRPGPGDRLK

SEQ ID NO: 15365 - protein, 145 aa, ASPERGILLUS NIDULANS FGSC A4
MEGLRDATTLYVGNLSTSSSPSSVSQPHNPDLLLTRFRCGEIKRLVMGLDRYNKTPCGFCFVEYYTHQDALDCLKYIGGTKLDERIIRTDLDPGFEEGRQYGRGKSGGQVRDEYREEYDPGRGGYGRAYADDQRRREEEEYGAGR

SEQ ID NO: 15366 - protein, 358 aa, Pseudomonas syringae pv. tomato str. DC3000
MPAPLTDTPEDGTREQWYVACTQKQLRQGKPYRATILGLNIVLFRQRSGQAAALLDQCVHRGTRLSAGKITDDCLVCPYHGWRYDANGHVVHIPSVDAGQGEPKSPGYRYRQRHFAVCEQDGLVWVYTGAGDAHDTPIFRLPAYGERPWQSYFMINTFDADVGSLVQNFLDVPHTVFVHEGIFRSSSGRAMEATLACKAQSIEVVYHDEVDEIGLMQWLTNPDGEPLVHTDRFLAPNVTFCDYLWGARSGFLIVSQITPVNARQSRVYTYIAYRFPMPRWVLRMLRPFIHLYTHIVIQQDVKIIRAHREGLDNVANFKPCNVPADAIHVGVEQLLAAVRHGEALPEAQRRERRIRFEL

SEQ ID NO: 15367 - protein, 188 aa, Mougeotia scalaris
DDEHGEVVAEIRRSDLEPYLGLHYPATDIPQASRFLFIKNRIRMICDCTSPQVKVVQDSRIPQEMSLAGSTMRGVHGCHTQYMMNMGSTASLVMCVTINDTNEIAGGPGMKGRKLWGLIVCHHSTPRHIPFPIHSACEFLMQVFGLQLNMEAELAAQHREKHILRTQTLLCDMLLRDAPMGIVSQSPN

SEQ ID NO: 15368 - protein, 578 aa, Magnaporthe grisea 70-15
MPAAAGDSGGYGLALERREAMMGASGPRAILKNFKVFRVALFACIGGILYGYNQGMFSGVLAMPSFQRHMGEWAPLDPEADQAKKGWLTAILELGAWIGTLLSSFIAEILSRKYGILVACAVFMIGVVIQACAVTIDVDLAHNAILAGRFITGMGVGSLAMIIPIYNSEVAPPEVRGALVALQQLSICFGIMISFWIDYGTNFIGGTTVETQLDAAWLTPTTLQLFPALVLFIGMIFMPFSPRWLIHHDREEDGIRVLANLRGLPSDNELIQLEFLEIKAQSLFEKRSVAEQFPQLSNPTAWNTFKLQFVAIGRLFQTRSMWKRIIVATVTMFFQQWTGINAVLYYAPSIFKQLGLSNNEISLLATGVVGVVMFIATIPAVLWIDRAGRKPVLTIGALGMSFCHFVIAIILAKNIDRFDEQKAAGWAACAMVWLFVIHFGYSWGPCAWIIIAEIWPMSVRPYGVALGASSNWMNNFIVGQVTPIMLQKITYGTYLLFAILTLMGACFIYFFVPETKRLTLEEMDLVFGSSGTTQADLERQREINIEVGLDRAAGALGTSERPHSLSDEKEKQKTDAVV

SEQ ID NO: 15369 - protein, 226 aa, Spinacia oleracea
WEQEGSTNAVLEGESDPEGAVSWGSETQVSDEGGVEGGQGFSEPPEEAKLFVGNLPYDVDSEKLAGIFDAAGVVEIAEVIYNRETDRSRGFGFVTMSTVEEAEKAVELLNGYDMDGRQLTVNKAAPRGSPERAPRGDFEPSCRVYVGNLPWDVDTSRLEQLFSEHGKVVSARVVSDRETGRSRGFGFVTMSSESEVNDAIAALDGQTLDGRAVRVNVAEERPRRAF

SEQ ID NO: 15370 - protein, 476 aa, Candida albicans SC5314
MNTEETLLITPVDNYDAIVNDTKDDDSTPKSELKHLTRSSFPLVVSFVLQYVFSITSVYAAGRLGAKELAACSLAICTFNITGLAVFQGMATSLDTFCSQAYGSGNKKMVGVYFQRATLLMLATMVPLMLVWWYSGSILNQLVPDPELVSMAQLFLRIHAFGVPGLILFESGKRFLQAQHLFQASTYVLVVALPFNLLLNWLLVWNPNTGMGYTGIPLSIGITYWVISLLMFGYVIFIDGIECWGGIDWEKASSNWKPMLSLAVPGVIMVISDFLAFEILTIFASRFGTEALAAQSIVSNVATLCFQVPFAFAVAISTRMGHFIGDGNIASAKILNDLTVIIGGSIGLLSFCLFYFGRHVLGEFFTSDKMVLEISSKLLILAGINQISDSLNVVGTGVLRGQGRQRIGSILNIISYYFLAIPLGYVLAFKFGMEMSGLWIGLTIGVFVLAVTQCTSICLSNWEKILEHSHRIHDSV

SEQ ID NO: 15371 - protein, 328 aa, Ralstonia eutropha JMP134
MSMQALVLNHYNGPLEPTTQPRPTPGPGQVLVRIAASGLNPLDTKIRAGAAAHARHPLPLVLGIDMAGTVEAVGAGVTAFHPGDEVYGMTGGVGGLQGSLAQYAAVDANLLARKPSNLSMREAAALPLAFITAYAGIVDRAHLQTGQTVLVQGGAGGVGHIAVQLARALGATVFATASEKDLDLVGKLGATPIDYRAQPVEAYVAAHTQGEGFELVVDTVGGPTLDASFTAVKHFGHVVSALGWGTHALAPLSFREATYSGVFTLYPLLTGKLRAHHGEIMSEATRLVESGLLRPVVDPRRFTLAQAEQAYELVTAGTARAKVVVEIA

SEQ ID NO: 15372 - protein, 461 aa, Rhodopseudomonas palustris CGA009
MADFDADLFVIGGGSGGVRAARIAAGYGARVVVAEEYRFGGTCVIRGCVPKKLMVYASQVHEEIRDAAGFGWSIPTAEFNWSALIANKDKEIARLEQIYANNVEKAGARTIKARAVFDDPHTLLLSTGEKVRAKTILIATGGAPNHGKPIPGIEHVISSNEVFHLPQQPKRILIQGGGYIALEFACIFAGLGSDVTLVYRGDNILRGFDEDVRTHVRTEMERAGITIITGCTVTAVEKLGEEYTSHLSSGSSIASDQVMFAIGRHPAVASLGLEKAGVAINPDNGGIAVDDHCRTSVPHIYAVGDVTHRTNLTPVAIREGHAFADNVFGGKQIQVDYAYVPTAVFSQPQVGTVGLTEAQARAQYSVVDIYKTDFRPMKGTMSGSQSRVLMKLIVDGTTDRLLGCHIVGPDAAELVQVVAVAMKMKATKADFDGTMALHPTAAEELVTMRTRTARYQREAAE

SEQ ID NO: 15373 - protein, 382 aa, Triticum aestivum
MVAEAEVMHQQPAPVLEVQYRRCVAKGAGMSAVAVPEVEVEVAVELPRMGLANTDGATSVSAETLQFVPNIRSGSFADIGPRRYMEDEHIRIDDLSAHLGSLLVCPLPSAFYGVFDGHGGPDAAAYMKRHAMRFLFEDREFPQALQVDDVFLQSVEECIRSAFLQADLALADNLDISRSSGTTALAALVFGRQLLVANTGDCRAVLCRRGIAMEMSRDHRANYAEECERVAASGGYIEDGYLNGVLSLTRALGDWDMKVPDCSTSPLIAEPEFQQATLSEDDEFLIMGCDGIWDVMTSQHAVSVVRRGLRQHDDPERCARELVMEAKRLETADNLTVIVVCFGSELGSPPPPPAAAAARPRSCKGLSAEALCNLRSWLETDR

SEQ ID NO: 15374 - protein, 347 aa, Schizosaccharomyces pombe
MDTAIEDRPGQTLTDDHQVKVAIKATGICGSDVHYWKEGGIGDFILKKPMILGHESAGVVVEVGKGVSSLKPGDPVAVEPGCVCRLCDYCRSGRYNLCPHMEFAATPPYDGTLRTYYITTEDFCTKLPKQISVEEGALFEPMSVAVHAMTRGNLKCGSRVLVMGCGTVGLLMMAVAKAYGAIDIVAVDASPSRVEFAQKYVGAKPFTPIAAKENESLPDYAQRYKQAIIEKYGEFDFAVDATGVGICIHTAVLALKRGGTFVQAGNGKPVIDFPINHIINYEINVLGSFRYAHGCYKQSLFLVSNGLVDVKPLITHRFAFKDALKAYETVASGEEGVLKVIIGGPDA

SEQ ID NO: 15375 - protein, 379 aa, Sorghum bicolor
MATAGKVIKCKAAVAWEAGKPLSIEEVEVAPPQAMEVRVKILFTSLCHTDVYFWEAKGQTPVFPRIFGHEAGGIIESVGEGVTDVAPGDHVLPVFTGECKECAHCRSAESNMCDLLRINTDRGVMIGDGKSRFSINGKPIYHFVGTSTFSEYTVMHVGCVAKINPEAPLDKVCVLSCGISTGLGASINVAKPPKGSTVAIFGLGAVGLAAAEGARIAGASRIIGVDLNPSRFEEARKFGCTEFLNPKDHKKPVQEVLAEMTNGGVDRSVECTGNINAMIQAFECVHDGWGVAVLVGVPHKDAEFKTHPMNFLNERTLKGTFFGNFKPRTDLPNVVELYMKKELEVEKFITHSVPFTEINKAFDLMAKGEGIRCIIRMEN

SEQ ID NO: 15376 - protein, 318 aa, Oryza sativa (japonica cultivar-group)
MEEQKHTDKAKAKLSMLKSKVICCKLYISESQNAKVVDAITRIGQKDPEVVLLSKFEDDHYNRVRYTLASYIINENSTGEVKFSPMRRVLLEMIEKAFSTINLETHTGTHPRIGVIDDMSFHPLNQATMEDAAQLAKTVASDIGNFLQVPVFLYGAAHPTGKPVTAVRRELGYFQPNYMGIQWMGQVLPDILPVKPDEGPDHVSRERGAIMIGAAPLPLNYNVPVLSKDIPTIRRITRRVTGRGGGLPTVQALALSHGDDCTEIACFLDPDHVSADQVQQQVEQIAAEQGLEVEKGYFTDFSKDAMLEKYFKIVLSVD

SEQ ID NO: 15377 - protein, 478 aa, Zea mays
MAGGGAAYQSSSASPDWLNKGDNAWQMTSATLVGLQSMPGLVILYGSIVKKKWAINSAFMALYAFAAVWLCWVVWAYNMSFGDRLLPFWGKARPALGQRFLVAQSQLTATAVRYRDGSLEAEMLHPFYPAATMVYFQCVFASITVIILAGSLLGRMDIKAWMAFVPLWITFSYTVSAFSLWGGGFLFQWGVIDYSGGYVIHLSSGIAGLTAAYWVGPRSASDRERFPPNNILLVLAGAGLLWLGWTGFNGGDPYSANIDSSMAVLNTHICASTSLLMWTLLDVFFFGKPSVIGAVQGMITGLVCITPGAGLVQGWAAIVMGILSGSIPWYTMMVLHKKWSFMQRIDDTLGVFHTHAVAGLLGGATTGLFAEPVLCNLFLAIPDSRGAFYGGDGGSQFGKQIAGALFVIGWNIVITSIICVLIGLVLPLRIPDAQLLIGDDAVHGEEAYAIWAEGELNDVTRQDESRHGSVAVGVSQNV

SEQ ID NO: 15378 - protein, 405 aa, Oceanobacillus iheyensis HTE831
MINYNFRNRTSFPEDFLKKANVIKQIQNRFYTYGYDQIETPLFEDYDMYSNVQGTVQQDDMVKVIHSSGRVLVLRPDVTIPITRQYVETDMTSHYQRFSYCLDIFRFNETQQAYRTQAGVEFFGDESPEADAEVIALAIDSLKDLKIAPFKIEIGHSGIYKELLEQANLTDQEQQTLHALIQSKNISETSSFLDHLSIDQDLKQKIELIPMLYGDPSTVIKRAQAIVTNETMQQVVDTLFNVYSLLKDDQIEEYISFNLGLINNMNYYSGIIFQGFTEQIGQPILMGGRYDHLSSQFENEIPAVGFAFEIDKLLTLITPGDQPLITQADFLIEYQPNCRQDALLLARRLRQANKKVIIQPTESSSKIKASNIILVDSNSYQLKSSDIQTTFSSIDQTLQHVLKKR

SEQ ID NO: 15379 - protein, 254 aa, Oenococcus oeni PSU-1
MAHIDTILAQGGNGSDDQKTGAVVAPIYFSTAFRHPGLGESTGFDYARLQTPTWQILEKQLAEIEYGDNAFAVSSGMAAIDLLFSTFLKKGDNFITSDDLYGGSFRYFDDLVEKNGIDYSLWDGTDFSYLKQKISPKTRLIWLETPSNPTMKIIDIKKVADFVHKIDSKILVAVDNTFLSPILQNPIKLGADLVVHSATKYLGGHNDILAGVVVSSRSELSKSLQENLITRGQVLDPFSCWLLLRSLKTLSLRV

SEQ ID NO: 15380 - protein, 461 aa, Arabidopsis thaliana
MAKNVGILAMDIYFPPTCVQQEALEAHDGASKGKYTIGLGQDCLAFCTELEDVISMSFNAVTSLFEKYKIDPNQIGRLEVGSETVIDKSKSIKTFLMQLFEKCGNTDVEGVDSTNACYGGTAALLNCVNWVESNSWDGRYGLVICTDSAVYAEGPARPTGGAAAIAMLIGPDAPIVFESKLRASHMAHVYDFYKPNLASEYPVVDGKLSQTCYLMALDSCYKHLCNKFEKIEGKEFSINDADYIVFHSPYNKLVQKSFARLLYNDFLRNASSIDEAAKEKFTPYSSLTLDESYQSRDLEKVSQQISKPFYDAKVQPTTLIPKEVGNMYTASLYAAFASLIHNKHNDLAGKRVVMFSYGSGSTATMFSLRLNDNKPPFSISNIASVMDVGGKLKARHEYAPEKFVETMKLMEHRYGAKDFVTTKEGIIDLLAPGTYYLKEVDSLYRRFYGKKGEDGSVANGH

SEQ ID NO: 15381 - protein, 378 aa, Oenococcus oeni PSU-1
MTESDWTKLIKSTTKIGPLSGAVNTPIQFSSTFHQSNFDQFGESDYARSGNPTRKVAEYAIAELENGERGFLFSTGMAAISSVLLTFGQGDHLLVSKEVYGGTYRLLNDILPRFGINHSFVDFSDLSAIENSIKKETKAVYIETPSNPTLAVSDIKKISRLAHQNHLIVIADNTFMSPFLQKPLELGADIVVHSATKFLAGHSDLTAGGVVTKTKELGDQVYFVQNAIGATLGVTDAWLLLRSIKTLGVRIQREAASAQAIAEWFEKSGKKVFYPGLPSNPGYEIHKSQAKSGGAVLSVDLGSKEAARKFVEKIKIPVFSVSLGGVETIVSYPPKMSHAELSADDLAADGITPGLLRISVGLENADDLIDDFNQALED

SEQ ID NO: 15382 - protein, 397 aa, Salmonella typhimurium
MFQKVDAYAGDPILSLMERFKDDSRHDKVNLSIGLYYNEDGIIPQLKTVAEAEARLNAQPHGASLYLPMEGLNTYRHTIAPLLFGADHPVLQQQRVATIQTLGGSGALKVGADFLKRYFPDAGVWVSDPTWENHIAIFAGAGFEVSTYPWYDDATNGIRFNDLLATLNTLPARSIVLLHPCCHNPTGADLTPSQWDAVIEIVKARDLIPFLDIAYQGFGAGMDDDAYVIRAIASAGLPALVSNSFSKIFSLYGERVGGLSVVCEDAEIAARVLGQLKATVRRIYSSPPCFGAQVVATVLGDEALKAGWLAEVDAMRNRIISMRQTLVKELTAEMPDRNFDYLLQQRGMFSYTGLSEEQVDRLRDEFGVYLIASGRMCVAGLNASNVHRVAKAFAAVM

SEQ ID NO: 15383 - protein, 492 aa, Helianthus annuus
MDPYKYRSSSAYNAPFWTTNSGAPVYNNNNSLTVGSRGPILLEDYHLVEKLANFDRERIPERVVHARGASAKGFFEVTHDITALTCADFLRAPGVQTPVIVRLSTVIHERGSPETLRDPRGFAVKFYTREGNFDLVGNNFPVFFIRDGMKFPDMVHSLKPNPKSHIQEDWRIMDFFSHHPESLHMFTFLLDDIGVPQDYRHMDGSGVNTYTLINKAGKAYYVKFHWKPTCGVKSLLEEEAIKIGGANHSHATQDLYDSIAAGNYPEWKLFIQTIDPDHEDRLDFDPLDVTKTWPEDIFPLQPVGRLVLNKNIDNFFAENEQLAFCPAIIVPGIYYSDDKLLQTRIFSYSDTQRHRLGPNYLQLPANAPKCAHHNNHYDGFMNFMHRDEEIDYFPSRYDPARHAEQYPIPPVRLSGKRDKCVIEKENNFKQPGERYRSFSPDRQERFINRVVGGLSDPRVTHEVRSIWVSYWSQADKSLGQKIASRLNVKPNY

SEQ ID NO: 15384 - protein, 228 aa, Zea mays
MVCLDASKRIAGTLIICAFGISTQSNPGAARVDKLVKLRGELNPLQDASGGKKISINDLVIKAAALALRKVPQCNSSWMNDFIRQYHNVNITVPVQTEHGLFVPVIRDADKKGLGTIAEEVKQLAQKARDNSLKPADYEGGTFTVSNLGGPFGIKQFCAIINPPQSAILAIGSAEKRVIPGSADGLYEFGSFMSATLSCDHRVIDGAIGAEFLKAFKGYIENPTSMLL

SEQ ID NO: 15385 - protein, 403 aa, Vibrio parahaemolyticus RIMD 2210633
MTTEIKVERGLFDEVMVPCYNPMEMIPVRGKGSRIWDQDDNEYIDFAGGIAVSCLGHCHPVMVDALTEQGNKLWHLSNVMTNEPALRLAKKLTEVSFAERVFFANSGAEANEAALKLARRYAADVHGPEKSEIIAFKQGFHGRTFFTVTVGGQAAYSDGFGPKPGDVTHLPYNDIEALQAHMSDRTCAVMMEPLQGEGGIVPPTPEFAQAVRELCDKHNALLIFDEVQTGNGRTGHFYAYQGLGITPDILSTAKSLGGGFPIGAMLTTAKLAEHLKVGTHGSTYGGNPLACAVAEAVVNEVTKPEVLAGVLEREALFRAGLEKINAKYNLFSEVRGKGLLLGAALNEEWQGRARDVLVAAGKQGLLVLVAGANVVRFTPSLVITQQEIEEGLAKLDKAIATLV

SEQ ID NO: 15386 - protein, 436 aa, Oryza sativa (japonica cultivar-group)
MTSGLVTAGGGGGGKVMSLRLQYYVVLGGVTAVVLLACLRYTPTAAAVAAVGYGFWGNGDGASLAAAGAAATTVGGTGTSAAATTGGGGAGGGRSPSRVVIFNFGDSNSDTGGMAAAMGLNIALPEGRTYFRRPTGRISDGRLVIDFICESLNTPHLSPYLKSLGSDFSNGVNFAIGGSTATPGGSTFSLDVQLHQFLYFRTRSIELINQGVRTPIDRDGFRNAIYTIDIGQNDLAAYMNLPYDQVLAKIPTIVAHIKYTIEALYGHGGRKFWVHGTGALGCLPQKLSIPRDDDSDLDGNGCLKTYNAAAREFNAQLGAACRRLRQRMADAAVVFTDVYAAKYDLVANHTLHGIERPLMACCGNGGPPYNYNHFKMCMSAEMELCDMGARFASWDGVHYTEAANAIVAARVLTGEYSTPPVRFASLVNSTAVPNDG

SEQ ID NO: 15387 - protein, 579 aa, GIBBERELLA ZEAE PH-1
MCGIFACHRHPDVEKFKPTALKLAKQIRHRGPDWSGSVISNHTILCHERLSIVGVESGAQPLTNADDSIILAVNGEIYNHRHIRKHLKERYHFKTTSDCEVIIPLYTEFDTDAPNHLDGMFSFVLYDKKQDRTIAARDPIGITTFYQGWSSTEPGTIYFASELKCLHSVCDKIVAFPPGHVYDSKTGETTRYFNPSWWDPKKVPSTPVDYKVLRQALEKSVRKRLMAEVPFGVLLSGGLDSSLTASIAQREVTRLRKQALEANGNVLPVEDPDTGEGLVGVDDDDHLDTLTYLPQLNSFSIGLPGSPDNKAALEVAKFLGTKHHVMTFTIEDGLNALSDVIFHLETYDVTTIRASTPMYLLSRKIKAMGIKMVLSGEGSDEIFGGYLYFHAAPDKDSFHEETVRRVKNLHLSDCLRANKSTSAWGLEARVPFLDKEFLEYSMNIDPQDKMITKEKLEKYILRKAFDTSDEPGEQPYLPDNILWRQKEQFSDGVGYGWIDALKDTAEKQVTDEMMKNPKPEWGNDIPDTKEAYWYRCMFDEHFPPHCASTVMRWTPTWSKQTDPSGRAIATHNAKYDSAA

SEQ ID NO: 15388 - protein, 468 aa, Bordetella bronchiseptica RB50
MIPAAAPSPGFGATMRDIARQAWPVLISQWAGISFGVLDTAMTGHASPQDLAAMSLSVSVYITVFVGLMGVVHALIPILAQHFGAGQQREVGSTWGQGVWLALGLSVVGAILMLFPDAWLSLSGDVDPAVRDRVAAYLRALVLALPATLVFRTIYALGTAVSRPKVVMSINLAAVFVKAFCNWVLIYGKFGLPALGAVGAGLATAISGWLSLAAGLWIITHDRYYRRFRLRVGRPDWRALKELLRLGLPMGGSYLVEVSAFTFMALLVAREGTYVSGGHQIMSNLAALCYMMPMALGVATAALTAQAIGAGRPDLAHRTGMAGLALGLLGAALTAAVLLVGRPLIIAAYTDDLEVAAVAASLLAIIPLFHLCDSMQCINSYLLRAHKVAVMPLVLQTVALGGVGLLGGWWLGFGPGRGGLDPVRAALMPGSPAGAGTMWLMAMAGLGLSAVLLHYWYRRIARLALARG

SEQ ID NO: 15389 - protein, 303 aa, Oryza sativa (japonica cultivar-group)
MLKSKVICCKLYISESQNAKVVDAITRIGQKDPEVVLLSKFEDDHYNRVRYTLASYIINENSTGEVKFSPMRRVLLEMIEKAFSTINLETHTGTHPRIGVIDDMSFHPLNQATMEDAAQLAKTVASDIGNFLQVPVFLYGAAHPTGKPVTAVRRELGYFQPNYMGIQWMGQVLPDILPVKPDEGPDHVSRERGAIMIGAAPLPLNYNVPVLSKDIPTIRRITRRVTGRGGGLPTVQALALSHGDDCTEIACFLDPDHVSADQVQQQVEQIAAEQGLEVEKGYFTDFSKDAMLEKYFKIVLSVD

SEQ ID NO: 15390 - protein, 250 aa, Zea mays
MSRRYDSRTTIFSPEGRLYQVEYAMEAIGNAGSALGILAADGVVLVGEKKVTSKLLQTSRSAEKMYKIDSHLACAVAGIMSDANILINTARLHAQRYALSYQEPIPVEQLVQSLCDTKQGYTQFGGLRPFGVSFLFAGWDKHHGFQLYMSDPSGNYGGWKAAAVGANSQAAQSMLKQDYKDGLTREEAVALALKVLSKTMDSTSLTAEKLELAEVFLQPGSGEVQYQVCSPEALGKLLAKSGLTQPTPEA

SEQ ID NO: 15391 - protein, 514 aa, Triticum aestivum
MPGGGFAVSAPSGVEFEAKITPIVIISCIMAATGGLMFGYDVGISGGVTSMDDFLREFFPAVLRRKNQDKESNYCKYDNQGLQLFTSSLYLAGLTATFFASYTTRRLGRRLTMLIAGVFFIIGVIFNGAAQNLAMLIIGRILLGCGVGFANQAVPLFLSEIAPTRIRGGLNILFQLNVTIGILFANLVNYGTSKIHPWGWRLSLSLAGIPAAMLTLGALFVTDTPNSLIERGHLEEGKAVLKRIRGTDNVEPEFNEIVEASRIAQEVKHPFRNLLQRRNRPQLVIAVLLQIFQQFTGINAIMFYAPVLFNTLGFKSDASLYSAVITGAVNVLATLVSVYAVDRAGRRALLLEAGVQMFLSQVAIAVVLGIKVTDKSDNLGHGWAILVVVKVCTYVASFAWSWGPLGWLIPSETFPLETRSAGQSVTVCVNLLFTFLMAQAFLSMFCHLKFAMFILFSAWVLVISVFVLFFLPDTKNVPMEEMTDKVWKQHWLWKRFMDDDDQHHNIANGKNAPV

SEQ ID NO: 15392 - protein, 190 aa, Gossypium barbadense
MEGSVGYDNDLNLRATELRLGLPGTEPVSIVRSNKRSLQQVADDDCGVNGCRSDDQNETAPPPPKAQIVGWPPIRSYRKNNIQTKKNESEGGGIYVKVSMDGAPYLRKIDLKIYSGYPELLQAIENMFKFTIGEYSEREGYKGSDYAPTYEDKDGDWMLVGDVPWEMFITSCKRLRIMKGSEARGLGCGV

SEQ ID NO: 15393 - protein, 510 aa, Vibrio vulnificus
MSAKKPLALVILDGYGYREDTASNAIANAKTPVMDALIANQPNTLISASGMDVGLPDGQMGNSEVGHTNIGAGRVVYQDLTRITKSILDGEFQQTAALVEAIDTAVKAEKAVHIMGLMSPGGVHSHEDHILAAVEMAAERGAEKIYLHCFLDGRDTPPRSAEGSLQRFQDLFAKLGKGRVASLVGRYYAMDRDNNWDRVQVAYDLLTQAKADFTYDSAVAGLAAAYERGENDEFVKATEIKAEGQESAAMQDGDAVIFMNYRADRARQITRTFVADFAGFERAVFPAVNFVMLTQYAADIPLAIAFPPASLENTYGEWLSKQGQTQLRISETEKYAHVTFFFNGGVETEFAGEERQLVASPKVATYDLQPEMSSTELTEKMVAAIKSGKYDTIICNYPNADMVGHTGVYEAAEKAIEALDASVGQVVEAIKEVGGQLLITADHGNAEMMVDPETGGIHTAHTSLPVPLIYVGDKAVEFKEGGKLSDLAPTMLSLAGLEIPAEMTGQVLVK

SEQ ID NO: 15394 - protein, 263 aa, Oryza sativa (indica cultivar-group)
MEDGGKHFVFVHGLGYGAWCWYRVVAALRAAGHRAMALDMAAAGAHPARADEVGSLEEYSRPLLDAVAAAAPGERLVLVGHSLGGLSLALAMERFPDKVAAAVFLAACMPAAGKHMGITLEEFMRRIKPDFFMDSKTIVLNTNQEPRTAVLLGPKLLAEKLYNRSPPEDLTLATMLVRPGTNYIDDPIMKDETLLTEGNYGSVKRVFLVAMDDASSDEEMQRWTIDLSPGVEVEELAGADHMAMCSKPRELCDLLLRIAAKYD

SEQ ID NO: 15395 - protein, 220 aa, Pseudomonas fluorescens PfO-1
MHIQKLVLAMAIGAVLSASTVLIPDNLSGVSSVQAKEGGSGGGGSGGGGGGGGNGGGGGGNGGGGSGGGGGGNGGGGSGGGGGGNGGGGSGGNGGGHGGSGSGGNSGSGGGGNSGHSGSDHGSGHSGNTASSGRSGTHSEPGDDHGVHRAGEVGDDHGVHRAGEIGDDHGVHRAGEVGDDHGVHRAGEIGDDHGLHAAGQPGDDRGVHVGGEPGDDKRAN

SEQ ID NO: 15396 - protein, 590 aa, Pseudomonas syringae pv. tomato str. DC3000
MCGLAGELRFDHQPADLAAVERITHELAPRGPDAWGFHSQGPIALGHRRLKIMDLSDGSAQPMIDSNLGLSMAFNGAIYNFPELRAELESLGYQFHSGGDTEVLLKGYHAWGAEMLPKLNGMFAFAIWERDSKQLFIARDRLGVKPLYLSKTDKRLRFASSLPALLKGGDISGMLDPVALNHYLNFHAVVPAPRTLLAGVEKLPPASWMRIDASGKVEQKVWWTLPYGPHEDEKNLTLEDWRDRVLDSTREAVAIRQRAAVDVGVLLSGGVDSSMLVGLLREVGVEDLSTFSIGFQDAGGERGDEFQYSDLIAKHYGTRHHQLRIQESEIIEQLPAAFRAMSEPMVSHDCIAFYLLSREVAKHCKVVQSGQGADELFAGYHWYPQVDGASDPVAAYRYAFVDRSYAEYADTVQPKWRTANDAAGDFVRDHFAQPGASAAVDKALRLDSTVMLVDDPVKRVDNMTMAWGLEARTPFLDYRLVELSARIPGKFKLPDGGKQVLKEAARLVIPSEVIDRKKGYFPVPGLKHLQGDTLNWVRELLTDPSQDRGLFNPTMVDKLLTNPEGQLTPLRGSKLWQLAALNLWLSEQGL

SEQ ID NO: 15397 - protein, 262 aa, Oryza sativa (japonica cultivar-group)
SKKHFILVHGLCHGAWCWYRVVAALRAAGHRATALDMAASGAHPARVDEVGTFEEYSRPLLDAVAAAAAPGERLVLVGHSHGGLSVALAMERFPDKVAAAVFVAAAMPCVGKHMGVPTEEFMRRTAPEGLLMDCEMVAINNSQGSGVAINLGPTFLAQKYYQQSPAEDLALAKMLVRPGNQFMDDPVMKDESLLTNGNYGSVKKVYVIAKADSSSTEEMQRWMVAMSPGTDVEEIAGADHAVMNSKPRELCDILIKIANKYE

SEQ ID NO: 15398 - protein, 318 aa, Shewanella oneidensis MR-1
MANTLEQLKSYTTIVADTGDIEAIKRYQPEDATTNPSLILKAAQIPEYSALIDNAIAWAKLQSTDIEQQIDDASDKLAVNIGVEILKLVPGRISTEVDARLSFDKEKSIAKAHKLVRLYQEAGVDKSRILIKLASTWEGICAAKELEQEGINCNLTLLFSFSQARACAEAGVYLISPFVGRILDWYKKDTGKDYDAVNDPGVVSVTEIYNYYKQHGYNTVVMGASFRNIGEIIELAGCDRLTIGPSLLEELANSQLAIQPKLVPTSTTVAVAEPLTEAQFRWEFNQDAMAVDKLAEGIRNFAIDQGKLEVMLKAKLAN

SEQ ID NO: 15399 - protein, 545 aa, Shewanella oneidensis MR-1
MTILTQSTTWQALSAHSQDIPHMRELFAADPARFTKMSLSSCGLFLDYSKNRATPETLNLLFALAQEAKLDAKIKAMFAGDIINTTEKRAVLHTALRNTAEQCIIAEGQDIVPEVQQTLNKMQQFVTSVTSGQWKGYTGKAITDIVSIGIGGSFLGPKIVSQALRPYWITGLNCHFVANVDGTSISEKLKLLDPETTLFIMSSKSFGTQETLTNTLTAKAWFLAKGGSQSDVAKHFAAVTSNVVKATGFGIDANNIFPMWDWVGGRYSLWSAIGLPIALLIGMDNFRALLKGAHQMDTHFANAPLTENMPVIMGLLSLWYGNFFNAQSHVVLTYDHYLRGLPAYFQQLDMESNGKSVTLNGTHVDYSTGPVIWGGEGTNGQHAYHQLLHQGTALIPADFIMPLQSHNPIGEHHDQLASNCFGQTQALMQGRTLDEALAELSKSALSNEEKLLIAKHKVMSGNKPSNTLLMDKLTPETLGALIALYEHRTFVQGAIWDINSFDQWGVELGKTLGNDVLTRIGADQEATVLDASSNGLINLYRRGKI

SEQ ID NO: 15400 - protein, 137 aa, Oryza sativa (japonica cultivar-group)
MAMAALREASRRLVSRRESPAAYARPFLLTHSRGITYRLFIGGLSQFATEDSLAEAFSQYGQVLEATIVTDKMTNRPKGFGFVKFASEEAANKAKEEMNGKVLNGRVIYVDIAKAKMNRTTDSSPRATGPPKPPDRC

SEQ ID NO: 15401 - protein, 398 aa, Geobacter sulfurreducens PCA
MPIATKIAGHISKSSWIRKMFEEGERLRQIHGADNVYDFTIGNPDTEPPEQFREELLNLARHPVPGMHRYMSNAGYAETRGAVAEVLSEAAGFEVKADHVIMTCGAGGALNVVLKTILNPGEEVIILAPYFVEYKFYIDNHGGVPREVWTDRETFQLDVAAIEAAMTAKTRAIIICSPNNPTGVIYPEESLAALGEMVARMERRFDRQIYVISDEPYARISYDGKQVPNIFRFVQSSVIVTSHSKDLALPGERIGYLAANPRARGVEQFMEGAVFSNRVLGFVNAPALMQRLVAKLQRSSVDIGEYQAKRDLFYDSLTAMGFRMVKPDGAFYLFPQSPLADDVAFVTMAQKHRILLVPGAGFGAPGFFRIAYCVDRGVIERSLPAWRELARDAGLGGS

SEQ ID NO: 15402 - protein, 972 aa, Ustilago maydis 521
MDWDHNVTFSAVRSLQATTAVAQATDNVVDLDRNRVDSRPGVLPTKNESSPHSSASLPPPSPHPPPPPAFTPSPSPSPSPSPQTATARSSVTDAAPAPKRSPRSPLHSNGSFPPVSDPISSIDSRDALDIDHESTAMLASSSSARKSKPKLQPQLINHLPLAQQAAMATFHEITFNDYHDKKLGRPPGKFDDYMICDCTPNSGNLDMACTDYSGCINRMTQIECSASKCRWGKQCRNQRFHRRQYVDVDIVQTEKKGFGLRACQDIPKETFIYEYVGEVMNQTTFLQRMQQYRIEGIRHFYFMMLQPNEYLDATKKGGKGRFINHSCNPNCAVSKWQVGKHLRMGIFAKRNIQKGEELTFNYNVDRYGNDAQECFCGEPNCVGTLGGKTQTDLSGMDDLFLDALGISDEVEQTEAKGSRRKRGKRLDLDFIPQMRAIQEHEATRVMTAARQAGPKREILEKLLRRMEMTTDVNVQKSLVKLHGFILMQFLLEQWWNDRDIVILIINVLARWPLIARNKVIDCGVEDQVRILAQTYRPRSPEDQKPSLDALRQVKQDDSAADRNDYTQVQPTLAPVRIGAPPAPDAEVSARAEHLLEAWKKLDMTYRIARKDALKPDADDHKDATAVTTWIDRRRMQDLDDPLDLEHAQAPNAVSSELGNALSGDQELREIKPSWQPPPAPPSMPNAPAKRMGGAVHHRSPPGSFTPTRLQSSGQSPLTPDQVTSVLSSSLVKSLSGLVSSLKQQGIQLQQQQQQQPPAQQQPSAQPAAPSAKSIEDIIREANEQEERARKEAEAAAKAARELEVNGGQTSGSSRKRPSSASRHSDKRAKHSSLSSSSQAASKLISSNGSAADSTSKAGSVESVAANERRLRKLVGELVVRQMSKYKDDLERESFKRHAKELTNAIVGKEMRNPKSWPPARGALTELSLDKRAKIKAFAKEYIDKLLARKGKGKGSSTPSNNEGAGSSNNGIV

SEQ ID NO: 15403 - protein, 303 aa, Archaeoglobus fulgidus DSM 4304
MIGIVSYGSYVPKFRIRVEEIARVWGEDAKKIKDGLGVHEKSVPGMDEDAATIAVEAAREAIRRAGINPEEIGAVFVGSESHPYAVKPTATIVGEALGVGNDYFAADLEFACKAGTAGMQICYSMVKAGMIKYGLAIGADTSQARPGDALEYAAAAGGAAFIIGENPIAEVEATYSFTSDTPDFWRRDLQPYPSHGGRFTGLPAYFRHVISAAKGLMEKYGYKVEDFDYAVFHMPNAKFPVRAAKMLGFSMEHISQGLVVKAIGNTYSGSSLLGLAATLDVAEPDERILLVSSAQELEVMPLP

SEQ ID NO: 15404 - protein, 454 aa, Neurospora crassa
MATRPQNIGIKAIEIYFPSQYVEQSELEKFDGVSTGKYTIGLGQTKMAFCDDREDIYSLALTAVSRLLKNYEIDTNTIGRLEVGTETLLDKSKSVKSVLMQLFGENTNIEGVDTINACYGGTNAFFNSVNWIESSAWDGRDAIVVAGDIALYAKGNARPTGGAGCVAMLVGPNAPIAVEPGLRGSYMAHAYDFYKPDLTSEYPYVDGHYSVNCYTEALDGAYRAYNQREKLLTNGVNGHSEDSTKTPLDRFDYLAFHAPTCKLVQKSYARLLYHDYLANPESPVFADVPPEVRDMDYKKSLTDKVVEKTFMTLTKKRFQERVNPAIQVPTLCGNMYCGSVWGGLASIIGHVDSAQLEGKRIGLFSYGSGLAASFCSFRVTGSTEKLAKTLNLPARLAARRAVPPESYDAMCDLRKQAHLQKNYTPKGEVSTLEPGTYYLENVDDMFKRTYSIKA

SEQ ID NO: 15405 - protein, 190 aa, Prunus armeniaca
GFFEVTQDVPQLTCADFLRAPGVQTPVIVRFSTVIHERGSPETLRDPRGSAVKFYTREGNFDLVGNNFPVFFVRDAMKFPDAIRAFKPNPKSHIQETWRILDFFSHLPESLHTFAFFYDDLGIPQDYRHMEGSSVHAYTLVSKAGKVHYVKFHWKPTCGVKCLLEDEAIKVGGANHSHATKDLYDSIAAG

SEQ ID NO: 15406 - protein, 464 aa, Zea mays
MASEAKDVGILAMDIYFPPNCVLQEELETHDGVSKGKYTIGLGQESMAFCTEVEDVISMSLTVVKSLLKNYNIDPKCIGRLEVGSETVIDKSKSIKTWLMQIFEESGNTDIEGVDSSNACYGGTAALFNCVNWVESKSWDGRYGLVVCTDSAVYAEGPARPTGGAAAIAMLIGPNAPICFESKYRGSHMAHVYDFYKPDLASEYPVVDGKLSQTCYLMALDSCYNVFCKKYEKHEGKQFSISDADYVVFHSPYNKLVQKSFARLYYNDFLRNCSTVDEESREKLAPYAGLSSEESYQSRDLEKASQQVAKNLYESKVQPTTLIPKQVGNMYTASLYAALASVIHNRHETLAGQRIVMFSYGSGLTSTMFSFKINEGHHPFSLLNIANILDISKKLKARHVVPPEKFVEALKLMEHRYGARDFVTSQDTSLLSAGTYYLTHVDSKYRRFYDVKGDGVATAMSNGH

SEQ ID NO: 15407 - protein, 698 aa, Solanum demissum
MSLNRTCNSSFWTKEEDKAFENALAVFSGDNDKFLKIAAAVPGKSLQEIIDHYNVLVEDINDIESGKVPLPKYERMQSSSSCRRRSLGAGVERRKGLPWTAEEHRSFLQGLAKHGKGDWRGISRNFVFSRTPTQVASHAQKYYSRLNDNNAKRRKSIHDVTSVGAANITEPSQGQKSDELTGPCGGQSQWPIADYVTEAFDTGMLSLPGSVTNCTTDAIEGPSAVNPEKFPLVAALGSELNSSFPGVDEFLQSVEDLIIVPAEGTSGVCHGVDTRTSPSLSVQPSVTGGTGMYTHPVSFPDVHEFLQEVEDLITVPAEGTSGACHGIDTRTSPSLSLQSSVAGGTRMYTHSVTVPAEGTSGVRCGIDTRTSPSLSLQPSVAGGTRMYPHPVNVLAEGTSGASHGVDTRTSPSLSLQPSVAGGSRIYPHPVNVPAEGISGVSHGVDTRTSPSLSLQPSVGGGTGMYTHPVTVRVEGTSGARRGVDTRTSPSLSLQPSVVGGIGMYTHPIIVPAEGTSGTRRGVDTRTSPSLSFQPSVGGGTGMYTHPVTVLAEGTSGVRCGVGTRTSPSLGLQPSVAGGTRMYTHAVNNVGYDLEELMTKQLVGASQEGPSINTASLPSPIADHIGLHGCTTSSSVAKNGFVSTMEAPGGGFSVDSMQTPSIPGHIGGGTYPCWEPSSKDDSIFDLEYLYTDHMFGFRK

SEQ ID NO: 15408 - protein, 285 aa, Saccharomyces cerevisiae
MELSSPSKKTTTSPINIPGGNRDNLIIGPHSHSFKTDPFSSNNSSLLSKISTNPSLESPFSSKSLLDCSPVQAVKKSLESEAKTHSLDEETNEQTDVKILNIADFPTDELILMISALLNRIITANDETTDVSQQVSDETEDELLTPILAFYGKNVPEIAVVQYLERIQKYCPTTNDIFLSLLVYFDRISKNYGHSSERNGCAKQLFVMDSGNIHRLLITGVTICTKFLSDFFYSNSRYAKVGGISLQELNHLELQFLILCDFKLLVSVEEMQKYANLLYKFWNDQ

SEQ ID NO: 15409 - protein, 181 aa, Zea mays
  unsure (1)..(181): unsure at all Xaa locations
MASVRLSSATMTSSLAHATMVAPFIGLKSSAAFPVTCKANTEITSITSNGGRINCMKVWPPVGKKKFETLSYLPGLTDVEIAQEIDYLIRNKWTPCIEFEXEHGFVYREHGNIPGYYDGRYWTMWNLPLFGCTDPPQVLKEVQQCKREYPNAFIRIIGSDNNRQAQCISFIPHKPPSFTDA

SEQ ID NO: 15410 - protein, 459 aa, Fusobacterium nucleatum subsp. nucleatum ATCC 25586
MEKIYDLLVIGWGKAGKTLSAKLGAKGKKVAIIEENPKMYGGTCINVGCLPTKSLVHSAKILAEVKKYGIDGDYSFKNNFFKEAMKKKEEMTIKLRNKNFGLLDTNENVDIYNGRASFVSNNEVKITSSDNKEIVLKADKIVINTGSVSRTLNTEGIDNKNVMTSEGILELKKLPKKLLIIGAGYIGLEFASYFSNFGSEVSVFQFDDAFLAREDEDETKIIKEILENKGVKFFFNTSVKKFEDLGDSVKAICMKDGQEFSEEFNKVLVAVGRKPNTDNLGLENTSIQLGKFGEILVDDYLKTNAPNIWAVGDVKGGAQFTYVSLDDFRIVFPQILGENNRRKLSDRVLIPTSTFIDPPYSRVGINEKEAQRLGINYTKKFALTNTIPKAHVINEIDGFTKILINENDEIIGASICHYESHEMINLLALAINQKIKSKVLKDFIYTHPIFTESLNDILG

SEQ ID NO: 15411 - protein, 431 aa, Escherichia coli
MVSLEKNDHLMLARQLPLKSVALILAGGRGTRLKDLTNKRAKPAVHFGGKFRIIDFALSNCINSGIRRMGVITQYQSHTLVQHIQRGWSFFNEEMNEFVDLLPAQQRMKGENWYRGTADAVTQNLDIIRRYKAEYVVILAGDHIYKQDYSRMLIDHVEKGVRCTVVCMPVPIEEASAFGVMAVDENDKTIEFVEKPANPPSMPNDPSKSLASMGIYVFDADYLYELLEEDDRDENSSHDFGKDLIPKITEAGLAYAHPFPLSCVQSDPDAEPYWRDVGTLEAYWKANLDLASVVSKLDMYDRNWPIRTYNESLPPAKFVQDRSGSHGMTLNSLVSGGCVISGSVVVQSVLFSRVRVNSFCNIDSAVLLPEVWVGRSCRLRRCVIDRACVIPEGMVIGENAEEDARRFYRSEEGIVLVTREMLRKLGHKQER

SEQ ID NO: 15412 - protein, 158 aa, Oceanobacillus iheyensis HTE831
MSVHDFTVTTIEGEEKRLSDYKGKVILIVNTASQCGFTPQLEDLQKLYKQYQDNDFEILGFPCNQFGNQDPGASEEISAFCQKNYGVTFQMFKKVDVKGKEAHPLYKHLTEEKKGILGGQIKWNFTKFLIDQNGNVIERFSPQKNPNTLNKDIEVLLR

SEQ ID NO: 15413 - protein, 314 aa, Sinorhizobium meliloti 1021
MSIAFTFPGQGSQAVGMGKDLAEAFPEAAAVFAEVDDALSEKLSDIMWNGPEETLTLTANAQPALMAVSMAVIRVLEAKGLDLKSKVSFVAGHSLGEYSALCAAGTFSLADTARLLRIRGNAMQAAVPVGKGAMAAIIGLEHDDVEAVCRDASSFGSCQIANDNGGGQLVISGEKPAVEKAAALASEKGAKRALMLPVSAPFHSALMTPAAEAMRKALATVEKRDPVVPVVANVLAAPVSDAGEIARLLVEQVTGQVRWRETVEWFAAHEVTTLYEIGSGKVLTGLARRIDKTVTGIAVNSPADIDAALAVLLA

SEQ ID NO: 15414 - protein, 214 aa, Physcomitrella patens
LSDIHCTQCLPIRLSLVLSSALSKFRESVAMASAVVSTVVAPVALGGASSCVGAPSESSSVKAFSGLKSATLFSGKTQKLSSVQNGSRVQCMQVWNPIGQPKFETFSYLPPLTDDQIAKQVDYMIQQNLIPCIEFDTVGSVSRTNFSGAGSSGYYDGRYWTMWKLPMFGCTDSSQVLREIQECKSQFPSCWVRVLGFDSKKQVQICGFLVSRPN

SEQ ID NO: 15415 - protein, 368 aa, Bdellovibrio bacteriovorus HD100
MTNKRIEWPVALFLVLNPLITLILAPIYFYNFGFQWDILLFALVFAAATNLGITAGYHRLFSHKSYDAHPIVKALFLLIGASAFQGSALKWSSDHRRHHTHIDGEKDPYNINEGFWYAHMGWMFFKDSVDQKIHAPDLEKDWMVKFQNDHYVPIAILTGFIFPMLVGWAMGSWLGGLVIAGGLRIALTQQSTFFINSLCHTLGKQTYSKEISARDSWFVAILTHGEGYHNFHHKFQIDYRNGIKWYHWDPTKWVIRTLSAMGLATKLRQISNVEILKARLQAEAAELTKHGFAEEKLAQMKEKILEAQNRMKKLREDYEQFKVDAVRKREELKEAYDHKLEELRRDMEIARLEFQMGMKQWRVYLRSV

SEQ ID NO: 15416 - protein, 150 aa, Betula pendula
GVKCLLDDEAIRVGGANHSHATKDLYDSIGAGNYPEWKLYIQIIDPDHEDKFDFDPLDVTKIWPEDILPLQPVGRLVLNKNIDNFFAENEQLAFCPSIVVPGVYYSDDKLLQTRIFSYSDTQRHRLGPNYLQLPANAPKCAHHNNHHEGF

SEQ ID NO: 15417 - protein, 390 aa, Anabaena variabilis ATCC 29413
MQFAKRLEKIPPYLFAEINRKREALIAQGVDIINIGVGDPDKPTPAHILQAMREAIDEASNHNYPPYEGTQEFREAAVKWMERRFGVVDLNPNTEVVSSIGSKEAIHNTFLAFVEAGDYTLIPDPGYPVYRTSTIFAGGEPFTMPLKAENKFLPDLDLIPEEVARKAKMLWVNYPNNPTGALATLEFFEELVAFCQQHSILLCHDHAYSEMAYDGYKPPSVLQIPGAKDIAIEFHSLSKSYNMTGWRIGFAVGNAYAIQGLSQVKTNVDSGVFKAIQKAAIAAYNTDEVELQAVMSVYQNRRDIIVKGLQSLGWPIEPPKATLYVWVPVPPGYTSTEFTTLLLDKCGIVVPPGVGYGVSGEGYFRIALTICEERLHEAIQRMQDAGIRYS

SEQ ID NO: 15418 - protein, 294 aa, Glycine max
MVEQSVLVLEKQGPNPVLSEGIHDWVFECHGLLHNAVLIIASFLFVLYLALQAKKSFLRLSHGRSYIIISYYASLWLVSILNLLWCFSQAWECSPGKEFAWNLLSLFTTSGMLFLEVSLLAFLLQGNSTTGLEALTRTFGISGIIVGFDILLKAIYLFAFGIPIFINSGYPTPHVKWNLWVTHKLLLTLVYGFILFMYHSRWRERLPARPAYYKYVTIMFILNAIALFACGITGNGAAFGFWLYHFTVVCYHAAYLPLLYITFLADFFQEEDLHLENVYYSEMKDAGFFEADWN

SEQ ID NO: 15419 - protein, 502 aa, Pseudomonas aeruginosa
MEKTTTSPVGATYWRSRAENVEFEGRCLIDGKLIEAHSGQTFDCVSPVDGRVLTKVAEGGEADINKAVAAARAAFQDRRWAGQSPIFRKRTLQAFAALIRLHRDELALLETLDMGKPISASRSVDVEAVANCFDWYAEAIDKLYEQIAPTAENDLALITREPLGVVGAIVPWNFPMLTTAWKVAPALATGNSVVLKPAEQSPLTAIRLGQLALEAGIPEGVFNVVPGFGRSAGKALACHMDVDGIFFTGSTATGRLLTEYAAKTNLKRVCLELGGKSPNIILASYGDIEKAAVTAAESMFNNQGEVCIAPSRLIVERSIHKQVVEIVAEIARQRQPGDPLDPATRIGALVNAQHADRVMGFIERAKTDGATLAAGGTRALTETGGSYVVPTVFDNVSNDMEIAREEIFGPVLSVIPVSSVDEAVSVANDSPYGLGAGVWTDSLSDAHKISRKLRAGVVYVNCYNDCDITTPFGGVKQSGNGRDKSLYALDEYTELKTTWIRL

SEQ ID NO: 15420 - protein, 291 aa, Bacteroides thetaiotaomicron VPI-5482
MKGIILAGGSATRLYPLSKAISKQIMPVYDKPMIYYPLSTLMLAGIREVLIISTPRDLPMFRDLLGSGEELGMSFSYKIQEQPNGLAQAFVLGADFLNGEAGCLILGDNMFYGQGFSAMLRRAAGVEKGACIFGYYVKDPRAYGVVEFDEQGKVISLEEKPLVPKSNYAVPGLYFYDATVTEKAASLRPSARGEYEITDLNRLYLEEGTLNVELFGRGFAWLDTGNCDSLLEASNFVATIQNRQGFYVSCIEEIAWRQGWISSGQLLLLGQKLEKTEYGKYLIELSKQPLK

SEQ ID NO: 15421 - protein, 613 aa, Agrobacterium tumefaciens str. C58
MQPVTPEVEILILNNVNEPANAVPVASLLDVTDWASGPLGPRSEWPACLHAAIGIMLPSQAQIVMFWGQEFVALYNDIYAPTIGNKHPHAFGRPAREYWNELWDDLEPLLKRVLDKGETIAAKDRPFYIERHGYPETVYFDISYSPVTDQDGIVRGVFCIVNETTERVKADAALRESEERLRAIFAQSAVGIALGDLTGKLISVNDHFCQIVGRRRDELIGIQMQDITFAEDLPENQRLFKHMVETGESFEIEKRYVRGDGSLVWVLNSVSAIRDDQGNMSQAVAISADIGERRHAQEVERHLASMIASSNDAILGIDLDMTITSWNAAAEKLYGYSEDEVVGRTVLMLVPDDRQEEEPTILRQIKAGRIVEPYETQRLRKDGRLVEVLLSVSPIRDVNGRVIGASKTAHDITARKDADRLRSILVNELHHRVKNILATVTAIARQTIGRDKANHEDMEAFTSRLGSLSRAQDLLVHADWQHADLRAVLQQALSPYPAESFQISGPGVSLPPRAVVSLSLALHELATNAAKYGALSVPEGQVSISWQRQGTDGERLRVVWEERGGPEVMSPQRKGFGSTLVERLLSAELNGETKLFYEKNGVICVIEAEINHV

SEQ ID NO: 15422 - protein, 76 aa, Arachis hypogaea
DLRQRQLEGYQINPMQLNPGGVDDMGYARHPPQPQPDPLFQQLDCEPTLQIGYQPDPVSVVTAGPSMGNYMGGWLP

SEQ ID NO: 15423 - protein, 442 aa, Mycobacterium smegmatis
MVDGQDVVADVHDVLDRMGDFTDRLRSGEWTGATGERITTVVNIGIGGSDLGPVMVYDALRHYADAGISARFVSNVDPADLVAKLDGLEPAKTLFIVASKTFSTLETLTNATAARRWLTDALGDAAVAKHSSRCPPTRSWSTKFGINTDNMFGFWDWVGGRYSVDSAIGLSVMAVIGKERFAEFLAGFHIVDEHFRTAPLHQNAPALLGLIGLWYSNFFGAQSRAVLPYSNDLSRFAAYLQQLTMESNGKSVRADGTPVSTDTGEIFWGEPGTNGQHAFYQLLHQGTRLVPADFIGFSQPTDDLPTADGTGSMHDLLMSNFFAQTQVLAFGKTADAIASEGTPADVVPHKVMPGNRPTTSILATKLTPSVVGQLIALYEHQVFTEGVIWGIDSFDQWGVELGKTQAKALLPVLTGDKSPAAQSDTSTDALVRRYRTERGRPA

SEQ ID NO: 15424 - protein, 238 aa, Zea mays
GMAFLPRPAYGVAPPIYNPALNPLMARPPIWPAAPAQAWYPQQAAYPQQSAVSVPPIVAGLPPQQPLFPIQNVPTPMTSAAANVLQTSFPMAPPGVPSPVAPHVSQPLFPVNTSAVNGAVNSPFLASVAPGTIPASSPAAVGVAGIGYGTNNQGTRDPAVGSSPAVSNNKASGAQPATNEVYLVWDNKAMSMEERRLSLPKYQVHDETSQVSCVSYDTIIVVSQTKGLSLNLQFSNEQ

SEQ ID NO: 15425 - protein, 385 aa, Rhodopseudomonas palustris CGA009
MSNKVFADLPVTVFEAMSQLARDNDAINLGQGFPDDPGPEDIRRAAADAVLNGYNQYPSMIGLPELRQAISTHYAHWHGVQLDPMTEVMVTSGATEALASAILSVVEPGDEVIVFQPVYDSYLPIIRQAGGIPRLVRLEPPHWRITEESLRRVFNAKTKAIVFNNPLNPAAVVYPREDLELLARFCQEFDAVAICDEVWEHVTFDGLSHIPLITIPGMRDRTIKIGSAGKIFSLTGWKVGFVCAAPKLLRVAAKVHQFLAFTTAPNLQAAVAYGLGKSDDYFLQMRKDLARSRDRLAQGLSSIGFPVIRSQGTYFLTVDLSPLGLNETDEAFCKRIVTDYKVAAIPVSAFYEEEPVTSVVRFCFAKKDQTLDTALERLSDAVHGR

SEQ ID NO: 15426 - protein, 375 aa, Helicobacter pylori J99
MTFEPYPFERLRALFKEITPKKKGLDLGIGEPRFETPKFIQDALKSHTHSLNIYPKSAFEESLREAQRGFFKRRFKIELKENELVSTLGSREVLFNFPSFVLFDYPNPTIAYPNPFYQIYEGSAQFARAKSLLMPLVKENDFTPSLNEKELQEVDLVILNSPNNPTGRTLSLEELIAWVKLALKHDFILINDECYSEIYENTPPSSLLEACMLADNGAFKNVLVIHSLSKRSSAPGLRSGFIAGDSSLLEKYKAFRTYLGYTSANAIQKASEVAWLDDRHAEFFRNIYANNLKLARKIFKETLIYPYSFYAYLPVKDGENFAKTLYQNEGITTLPALYLGRNHIGADYVRLALVYDTSLLEKPLEIIEAYRENYA

SEQ ID NO: 15427 - protein, 237 aa, Oryza sativa
  unsure (1)..(237): unsure at all Xaa locations
MAGADVDVGTELRLGLPGGGGGAAEXAAAKAAKRGFEETIDLKLKLPTAGMEEAAAGKAEAPAAEKAKRPAEAAAADAEKPPAPKAQAVGWPPVRSFRRNIMTVQSVKSKKEEEADKQQQQPAANASGSNSSAFVKVSMDGAPYLRKVDLKMYNSYKDLSLALQKMFGTFTATGNNMNEVNGSDAVTTYEDKDGDWMLVGDVPWQMFVESCKRLRIMKGSEAIGLAPRAKDKYKNKS

SEQ ID NO: 15428 - protein, 369 aa, Escherichia coli
MKSRAAVAFAPGKPLEIVEIDVEPPRKGEVLVKITHTGVCHTDAFTLSGDDPEGVFPAVLGHEGAGVVVEVGEGVTSVKPGDHVIPLYTAECGECLFCKSGKTNLCVSVRATQGKGLMPDGTTRFSYKGQPLFHYMGCSTFSEYTVVAEVSLAKINPQANHEHVCLLGCGVTTGIGAVHNTAKVQPGDTVAIFGLGGIGLAAVQGARQAKAGRIFAIDTNPEKFDLARSFGATDCINPKDYDKPIQDVLIELTGWGVDHTFECIGNVNVMRSALEAAHRGWGQSVVIGVAGAGKEISTRPFQLVTGRVWKGSAFGGVKGRTQLPGMVEDAMKGEIDLAPFVTHTMGLEEINDAFDLMHEGKSIRTVIHY

SEQ ID NO: 15429 - protein, 245 aa, Oenococcus oeni PSU-1
MKKPIIAITSDISRFSSMSSNDQAIDYAPRDIIRAIYKVGGIPIILPSPTYVEDTNFEALLSTFDGLLIPGGPDIDPKFFKEEAIPEIGATFYERDQFEIPLIQEAQKYGKAILGICRGIQAINIACGGNVYQDLAKQYSNLKIKHRQSPTEGSFPTHKIKVEKDSRLAKIVGYESFVNSRHHQAIKDLGKNLKITATSSDGVIEGIESKNSDRILAVQWHPESMWQVFPDQLKLFEDLVKRAGN

SEQ ID NO: 15430 - protein, 313 aa, Ustilago maydis 521
MTKGETIKCKAAVAWEAGKPMSIEEVEVEPPRAGEVRVQVTHTGLCHTDAYTLSGSDPEGAFPAILGHEGAGIVESVGEGVDHVKEGDSVILLYTAECRQCKFCKSGKTNLCQAVRATQGQGVMPDKTKRFSCRGKQLFHFMGCSTFSQYTVVSQYSLVAIDPKAPRDKTCLLGCGVTTGWGAATHTAKVEKGSTVAVFGIGCVGLAVITGAVDAGAGRIIAIDTNDQKESWAKKFGATEFINPTKLGDKDIVSHLVDITDGGLDYTFDCTGNVKVMRSALEACHKGWGNRYAPLPTGYRSQVARLRFRRCQG

SEQ ID NO: 15431 - protein, 479 aa, Zea mays
  unsure (1)..(479): unsure at all Xaa locations
MAGGGAAYQSSSASPDWLNKGDNAWQMTSATLVGLQSMPGLVILYGSIVKKKWAINSAFMALYAFAAVWLCWVVWAYNMSFGDRLLPFWGKARPALGQRFLVAQSQLTATAVRYRDGSLEAEMLHPFYPAATMVYFQCVFASITVIILAGSLLGRMDIKAWMAFVPLWITFSYTVSAFSLWGGGFLFQWGVIDYSGGYVIHLSSGIAGLTAAYWVGPRSALDRERFPPNNILLVLAGAGLLWLGWTGFNGGDPYSANIDSSMAVLNTHICASTSLLMWTLLDVFFFGKPSVIGAVQGMITGLVCITPGAGLVQGWAAIVMGILSGSIPWYTMMVXHKKWSFMQRIDDTLGVFHTHAVAGLLXGGAITGLFAEPVXCNLFLAIPDSRGAFYGGDGGSQFGKQIAGALFVIGWNIVITSIICVLIGLVLPLRIPDAQLLIGDDAVHGEEAYAIWAEGELNDVTRQDESRHGSVAVGVTQNV

SEQ ID NO: 15432 - protein, 382 aa, Picea glauca
MSALVLSLAFSTPARGGGESRFAEGKALRRRLNASSCNASSKNAQLMCERRILSWCYGIRRRNSAGLWGKATRVQVSAVAEEEGGRILLSDVVVKKKRKPFLLELREWSLGDIGAAGTVFGMHALCLLAPFTFTWKAFGVFAVLYVVTGLLGITLSYHRNLSHRSFRLPKWLEYLFAYCGVQAVQGDPLDWVSTHRYHHEYCDSVKDPHSPNEGFWYSHMSWMFDEKTMFDRVGTRNNVSDLEMQPFYRFIRDTYIIHPIAMGLLLYALGGPPFVIWGMAVRIVWVYHITWLVNSAAHVWGYQAWNTGDLSRNNWWVAALAFGEGWHNNHHAFQYSARHGLEWWQFDPTWYVIKILEALGLAKDVRAPLEQHKTRMSSKPGL

SEQ ID NO: 15433 - protein, 331 aa, Tripsacum dactyloides
MHASLASYAAAAMPALDLRPEIAHAHQPVMSPSHHGWDGNGAAAVPTPMPKRLDGKVAIVTGGARGIGEAIVRLFAKHGARVVIADIDDAAGEALAAALGPQVSFVRCDVSVEEDVRRAVDWALSRHGGRLDVYCNNAGVLGRQTRAAKSILSFDAGEFDRVLRVNALGAALGMKHAARAMAPRRAGSIVSVASVAGVLGGLGPHAYTASKHAIVGLTKNAACELGAHGVRVNCVSPFGVATPMLINAWRQGHDGAADAELDLDINVPSDQEVEKMEEVVRGLATLKGPTLRPRDIAEAVLFLASDEARYISGHNLVVDGGVTTSRNLIGL

SEQ ID NO: 15434 - protein, 329 aa, Tripsacum dactyloides
MHASLASYAAAAMPALDLRPEIAHAHQPVMSPSHHGWDGNGAAAVPTPMPKRLDGKVAIVTGGARGIGEAIVRLFAKHGARVVIADIDDAAGEALAAALGPQVSFVRCDVSVEEDVRRAVDWALSRHGGRLDVYCNNAGVLGRQTRAAKSILSFDAGEFDRVLRVNALGAALGMKHAARAMAPRRAGSIVSVASVAGVLGGLGPHAYTASKHAIVGLTKNAACELGAHGVRVNCVSPFGVATPMLINAWRQGHDGAADAELDLDINVPSDQEVEKMDAGAVVDINVPFKFLFSFTDGRYIFGFSKANDQASHRMLDTFSKKKIMKFLII

SEQ ID NO: 15435 - protein, 448 aa, Bacillus subtilis
MTHDLIEKSKKHLWLPFTQMKDYDENPLIIESGTGIKVQDINGKEYYDGFSSVWLNVHGHRKKELDNAIKKQLGKIAHSTLLGMTNVPATQLAETLIDISPKKLTRVFYSDSGAEAMEIALKMAFQYWKNIGKPEKQKFIAMKNGYHGDTIGAVSVGSIELFHHVYGPLMFESYKAPIPYVYRSESGDPDECCDQCLRELEQLLKEHHEEIAALSIESIVQGASGMIVMPEGYLAGVRELCTTYDVLMIVDEVATGFGRTGKMFACEHENVQPDLMAAGKGITGGYLPIAVTFATEDIYKAFYDDYENLKTFFHGHSYTGNQLGCAVALENLALFESENIVEQVAEKSKKLHFLLQDLHALPHVGDIRQLGFMCGAELVRSKETKEPYPADRRIGYKVSLKMRELGMLTRPLGDVIAFLPPLASTAEELTEMVAIMKQAIHEVTSLEN

SEQ ID NO: 15436 - protein, 250 aa, Pseudomonas aeruginosa
MPRPVVAMPACIRELENTAWHCAQTQYVRAVTKVANLMTLIVPALVEGNDVDALLDRVDGLIVSGSATNVHPSLYGEAAEENDGPFDQARDATSIHLIRAAIERGMPLLAICRGIQELNVALGGTLGRDIHENWGIFDHRSPEGSRDDRFAIRHSISIEEGSCIARVLGANKAMVNSLHRQAIERLAPGLVVEARAEDGTIEAVSVKDARGFALGVQWHPEYWAETDSSSQKLLEAFGDAVRSYQKAKAT

SEQ ID NO: 15437 - protein, 435 aa, Pseudomonas aeruginosa
MTALISSSNYPLPVVHHARGVFIYDDSGKSYIDGSGGAMTVSIGHGVPEVLSAMSRQAQQVCFTYRTHFTSTAAEELAKEIVALAPGDLNKVFFVNSGSEATELSMRTAIQYWQARGQPTKTKILGRAISYHGMTMGSLSMSGHAARRADYSNLLHQFAVAPPPYAYRFEVPNDGTFGASVWEKIIQEQGADTIAAVIVEPIVGAAGGALTPPIGYLKALREICDRHSILLISDEVITGMGRTGTWFGCEHDGIVPDIIATGKGMSSGYTPMGGVIIRDGIMEALGERVKLFGHTFSANPLSAATCLAVIRYMKEHAILDNVAARSVQLESGLKDLSVRYPWMADVRGRGLLWGFEFVKDATTKEPIDAARQPNLRFAQHCFDAGLIAYPAGIAPLNNSALLAPPLVISASETEELLSRLEIGLQRFGNEMGLPA

SEQ ID NO: 15438 - protein, 204 aa, Zea mays
  unsure (1)..(204): unsure at all Xaa locations
WHTKRTVCTLLLSDLKRNKEDMHTYLNDPVDNAHNISDHXRIRASVPTMKILLKKMATDILASRLSXTKDGTPEYGLNPLVTHLSEILGDEGGMFXDRIGEETXTNIAALPXGSMLXLDNVIFYEEDEKNEXENAKNLASDADLNANDAFGTAHTARASTXGVTKXLKPADAGYRMQNEXDHLVXCVVHPKKPFAALAGASKGS

SEQ ID NO: 15439 - protein, 162 aa, Zea mays
  unsure (1)..(162): unsure at all Xaa locations
MAVTIAWVXARQTFDSRGNPTAEGDVGLRDSGYARGAGPRGASTAIYEALKLRNAGSDYLAKGALKGASMGNNIMGPIFVANPPTEQVEIDDFMGHQVDGTSNEXGWWEQNFGPNDILAVSLAGXELGAMVKKIPLDQNIEGLGGXNETLGVPVPAFKVIKE

SEQ ID NO: 15440 - protein, 503 aa, Capsicum annuum
MAIGSLARRKASTILSSSRYVSKYSSYYFSRSFASGSDENDVVVIGGGPGGYVAAIKAAQLGLKTTCIEKRGTLGGTCLNVGCIPSKALLHSSHMFHEAQHSFAQHGVKFSSVEVDLPAMMSQKDKAVAGLTRGIEGLFKKNKVNYVKGYCKFLSPSEVSVDTIDGGNTVVKGKNIIIATGSDVKSLPGLTIDEKRIVSSTGALALTEVPKNLVVIGAGYIGLEMGSVWGRLGSQVTVVEFASDIVPTMDGEVRKQFQRSLEKQKMKFMLKTKVVSVDTAGDVLKLTLEPAAGGEQTTLEADVVLVSAGRVPFTSGLGLDKIGVETDKAGRILVNERFASNVTGVYAIGDVIPGPMLAHKAEEDGVACVEFIAGKEGHVDYDLVPGVCYTHPEVASVGKTEEQVKALGLDYRVGKFPFLANSRAKAIDDAEGIVKVLAEKETDKILGVHIMAPNAGELIHEAVLALHYGASSEDIARTCHAHPTMSEALKEAAMATYDKPIHI

SEQ ID NO: 15441 - protein, 485 aa, Candida albicans SC5314
MAPTFTNSNGQPIPEPFATQRVGQHGPLLLQDFNLIDSLAHFDRERIPERVVHAKGSGAYGVFEVTDDITDICAAKFLDTVGKKTRIFTRFSTVGGELGSADTARDPRGFATKFYTEEGNLDLVYNNTPVFFIRDPSKFPHFIHTQKRNPETHLKDANMFWDYLTSNEESIHQVMVLFSDRGTPASYREMNGYSGHTYKWSNKKGEWFYVQVHFISDQGIKTLTNEEAGALAGSNPDYAQEDLFKNIAAGNYPSWTAYIQTMTEAEAKEAEFSVFDLTKVWPHKKYPLRRFGKFTLNENPKNYFAEVEQAAFSPAHTVPYMEPSADPVLQSRLFSYADTHRHRLGTNYTQIPVNCPVTGAVFNPHMRDGAMTVNGNLGSHPNYLASDKPVEFKQFSLQEDQEVWNGAATPFHWKATPADFKQAQELWKVLKRYPNQQEHLAHNIAVHAAGADAAIQDRVFAYFGKVSQDLADAIKKEVLELSPRK

SEQ ID NO: 15442 - protein, 474 aa, Streptomyces sp. CHR28
MLQAHTGYDLAIVGSGGGAFAAAIAARNKGRRVVMVERGTTGGTCVNVGCVPSKALLAAAEARHGARAASRFPGLQATEPALDFPALIGGKDALVEQLRAEKYTDLAAEYGWQIVHGTAAFADGPVLEVSLNDGGTTTIEAAHYLIATGSAPTAPPIDGLDQVDYLTSTTAMELQQLPEHLLVLGGGYVGLEQAQLFARLGSRVTLAVRSRLASREEPEISAGIEDVFREEGFAVHTRTQLRAVRRDGDGILATLTGPGGEQQVRASHLLIATGRRPVTDGLGLERVGVKTGERGEVVVDEYLRTDNPRIWAAGDVTGHPDFVYVAAAHGTLVADNALDGAERTLDYTALPKVTFTSPAIASVGMTDAQLAEAGIACQCRTLPMEYVPRALANRDTRGLVKLIAERGTGKLLGAHVLADGAGDIITAATYAITAGLTVDQLARTWHPYLTMAEALKLAAQTFTSDVAKLSCCAG

SEQ ID NO: 15443 - protein, 353 aa, Bacillus subtilis subsp. subtilis str. 168
MTHTVPQNMKAAVMHNTREIKIETLPVPDINHDEVLIKVMAVGICGSDLHYYTNGRIGNYVVEKPFILGHECAGEIAAVGSSVDQFKVGDRVAVEPGVTCGRCEACKEGRYNLCPDVQFLATPPVDGAFVQYIKMRQDFVFLIPDSLSYEEAALIEPFSVGIHAAARTKLQPGSTIAIMGMGPVGLMAVAAAKAFGAGTIIVTDLEPLRLEAAKKMGATHIINIREQDALEEIKTITNDRGVDVAWETAGNPAALQSALASVRRGGKLAIVGLPSQNEIPLNVPFIADNEIDIYGIFRYANTYPKGIEFLASGIVDTKHLVTDQYSLEQTQDAMERALQFKNECLKVMVYPNR

SEQ ID NO: 15444 - protein, 339 aa, Zea mays
MVRVGLSSAPGVNLTEQIDNVFDQLINKIEHADFDTRPFLKQLNVLGRYEPIKRNVYCTKRRIEDYGISCHCKPSPGSSVVCGRDCHCGMLFSCCSSQCECDDTCTNKSFQHRPLKKTKLIKTEKCGHGLVAEDEIKKGEFVIEYVGEVIDDRTCENRLWTMKRLLDTDFYLCEVSSNMVIDATNKGNRSRFINHSCEPNTAMQKWTVDGETRVGIFALRDIKIGEELTYDYKFVQFGAAQVCHCGSSNCRKMLGTTKYSGSSQNHHAKKKKRKTSCENCIQQFLRLWHPHKKMYVGCWIIDFDQETKMHTLKFNDLHTEKFNLKEEEWHFLEVDFDED

SEQ ID NO: 15445 - protein, 190 aa, Glomerella cingulata
MVVATIKCVVVGDGAVGKTCLLISYTTNKFPSEYVPTVFDNYAVTVMIGDEPYTLGLFDTAGQEDYDRLRPLSYPQTDVFLVCFSVTSPASFENVARSGSRGTSPLPGVLLIVAPVTERGSSVREKLSKQKMSPVRKEDGERMAKDLGAVKYVECSALTQFKLKDVFDEAIVAALEPPAPKKKSHKCLVL

SEQ ID NO: 15446 - protein, 254 aa, Glycine max
  unsure (1)..(254): unsure at all Xaa locations
MSRRYDSRTTIFSPEGRLYQVEYAMEAIGNAGTAIGILSKDGVVLVGEKKVTSKLLQTSTSTEKMYKIDDHVACAXVAGIMSDANILINTAXRVQAQRYTYAYQEPMPVEQLVQSLCDTKQGYTQFGGSSVHLESSFLFAGWDKNFGFQLYTSDPSGNYGGWKAAAYXVPNNQAAQSILKQDYKDDITREEAVQLALKVLSKTMDSTSLTSEKLELAEVFLSPSGKVKYQVCSPENLTKLLVKFGVTQPATDTA

SEQ ID NO: 15447 - protein, 123 aa, Zea mays
  unsure (1)..(123): unsure at all Xaa locations
DGRVLPTAFQLLYKLSLFMCLGDMSRLFYEIRVIKLVSAIRKILSAYEKYSDAVTGLSGKDPSYILLALEAMANGRDSTRLSWDLALXLASQTLLGPSTIVSHTCKHSKHLKDHVTSPPCTTI

SEQ ID NO: 15448 - protein, 277 aa, Pneumocystis carinii
MHKKDIKRSDSIYPKKKRDQGGQWMRRKEEKKRRKQGKKSILLNRTSGITWEKDFEGKKTDTIESKREKKEKNFVEENKGIYEEIREKELKRIKRSGLYAKDFFLYQKKNRQKNTYFFAKEWPGLFPIFQSWLKDSLIIIHLPSGPSFYFTISSITPTSCIYRHGRATSHIPELIINNFTTYLGLTVENMFRSLFPTQADFEGRQVVTIHNQRDFIFIRRHRYIFKNDIKVSLQELGPRFTLKLRRLQRGIHDRHADNVVYEYKPGEESNRTRFWLS

SEQ ID NO: 15449 - protein, 393 aa, Mycobacterium avium subsp. paratuberculosis str. k10
MTVSRLRPYATTVFAEMSALAARAGAVNLGQGFPDEDGPAEMLKAAQEAIADGVNQYPPGIGIAPLRHAIAAQRHRRYGIEYDPDTEVLVTVGATEAIASAVIGLVEPGSEVLLIEPFYDSYSPVIAMASAQRVAVPLVPHGRGFALDADALRRAVTPRTRALIVNSPHNPTGTVLGATELAAIAEVAVESDLLVITDEVYEHLVFDDHRHLPLAGFDGMAERTITISSAAKMFNCTGWKIGWACGPAHLIAGVRAAKQYLSYVGGAPFQPAVALALETQDAWVADLRDRLRARRDRLAAGLIDIGFEVHDSAGTYFLCADPRPLGYDDSVAFCAALPEKVGVAAIPLSPFCDPAGAHGPADVWNHLVRFTFCKRDDTLDEAIRRLAALRGAG

SEQ ID NO: 15450 - protein, 150 aa, Caulobacter crescentus CB15
MKRLRALLIAAAAVALTAGASDPSERLPDQAQEARARTLFKEVRCLVCQNESIDDSEAQLAGDLRQIVREQVKAGSSDAQIRDFLVERYGEFVLLKPRFSMGNAVLWLAPVVVLLVGGVLMAGLLRRRETPEPALSQDEEARVRRLLEGD

SEQ ID NO: 15451 - protein, 703 aa, Pneumocystis carinii
MAHNLSSQYFMNPGPAPAPPIKIPSYSSSNIYAGRCFDVSHTYKGSKGVLKAGWANVKEEGIKSWIWSKKYLVLTDKVLRVMKNESSTSPGLSIPLREIMNVSRAELKDYCFEILRDPGIGSGTKKSYFISLKSDNDLYSWMDEIYSRCPLMMVSNPTNFTHKVHVGFDPKSGGFTGLPEEWTRLLTASAITKEDYAKNPEAVIEVLQFYSDTQLREKEEFGEPSTLGPDLYNIENQDIKSLEQNKMTMEKHYVNNGFNSQYPVSSTSKGAVPLREWLKKMDIKDSEKMVPQRVPPALPSNLPTRLNTDMASFPHESDSFLTCGSSNVDKGFGVTAKKRQNVPLETLKHKQSQNNLAFISQAPTQPLPKIPTSSKNIPDIPTTFPETTMKQPNATKLPLSLSNARAMKQEPPSDEKVNDLTGSQVMERLRNVVSTNDPNPLYTKIKKVGQGASGSVYVARVAIKQMDIAHHPRRELIVNEILVMKESHHPNIVNFLDAYLAKNSELWVIMEYMEGGALTDIIDNNTLTEDQIAAISLEGLQHLHPTKIFHRDIKSDNVLLDFHGRVKITDFGFCAKLTEQKNKRATMVGTPYWMAPEVVKQKEYGAKVDIWSLGIMAIEMIETEPPYLNEEPLKALYLIATNGTPTLKKPDKLSKELKSFLAVCLCVDVKSRATAEELLEHDFLKKSCSLSNLSSLLAFKSGK

SEQ ID NO: 15452 - protein, 352 aa, Pseudomonas syringae pv. syringae
IKFPDMVRAFKPDPRTNLDNDSRRFDFFSRVPEATRTLTLLYSNEGTPAGYRFMDGNGVHAYKLVNAKGEVHYVKFHWKSLQGLKNLDPKEVAQVQSKDYSHLTNDLVGAIKKGDFPKWDLYVQVLKPEELAKFDFDPLDATKIWPDVPEKKIGQMVLNKNVDNFFQETEQVAMAPANLVPGIEPSETACCRPCVSYADTQMYRLGANGLSLPVNQPKVAVNNGNQDGALNTGHTTSGVNYEPSRLEPRPADDKARYSQLPLSGTTQQAKITREQNFKQAGDLYRSYSAKEKTDLVQSFGESLADTDTESKNIMLSYLYKADPDYGTRVAEVAKGDLSRFSSLAASLKELMI

SEQ ID NO: 15453 - protein, 232 aa, Vibrio parahaemolyticus RIMD 2210633
MNKYLAEAFGTFWLVLGGCGSAVLAAGFPDVGIGLLGVALAFGLTVLTMAFAIGHISGCHLNPAVTVGLWAGGRFDTKDVAPYIIAQVIGGLIAGGILYVIATGQAGFDVVGSGFAANGYGEHSPGQYSMLAALVSEIVMTMMFLIVIMGATDKRAPQGFAPIAIGLCLTLIHLISIPVTNTSVNPARSTAVAMYVGDWAVSQLWLFWVAPIVGGVLGAVIYKNLLGKESND

SEQ ID NO: 15454 - protein, 490 aa, Corynebacterium glutamicum ATCC 13032
MTINVSELLAKVPTGLLIGDSWVEASDGGTFDVENPATGETIATLASATSEDALAALDAACAVQAEWARMPARERSNILRRGFELVAERAEEFATLMTLEMGKPLAEARGEVTYGNEFLRWFSEEAVRLYGRYGTTPEGNLRMLTALKPVGPCLLITPWNFPLAMATRKVAPAIAAGCVMVLKPARLTPLTSQYFAQTMLDAGLPAGVLNVVSGASASAISNPIMEDDRLRKVSFTGSTPVGQQLLKKAADKVLRTSMELGGNAPFIVFEDADLDLAIEGAMGAKMRNIGEACTAANRFLVHESVADEFGRRFAARLEEQVLGNGLDEGVTVGPLVEEKARDSVASLVDAAVAEGATVLTGGKAGTGAGYFYEPTVLTGVSTDAAILNEEIFGPVAPIVTFQTEEEALRLANSTEYGLASYVFTQDTSRIFRVSDGLEFGLVGVNSGVISNAAAPFGGVKQSGMGREGGLEGIEEYTSVQYIGIRDPYAG

SEQ ID NO: 15455 - protein, 236 aa, Oryza sativa (japonica cultivar-group)
MGMGTFTTDESDKHEESYLSLGLTVSQSKKNNTEYPKVLLLLAAYLDRSVQKNEDLLDSNKIKDSSTIFHGHRAPDLSIKLYAERIFKYSECSPSCFVLALIYMERYLQQPHVYMTSLSVHRLLITSVVVAAKFTDDAFFNNAFYARVGGISTVEMNRLELDLLFNLDFRLKVDLETFGSYCLQLEKETMVLVIDRPIQQVHGVNSTKDLSRNSSIDESCKSELMRYSSQALQGCS

SEQ ID NO: 15456 - protein, 300 aa, Edwardsiella ictaluri
MTSLKAVIPVAGLGMKMLPATKAIPKEMLPIVDKPLIQKVVHECLSAGVKEIILVTHSSKNTIENHFDTSFELEALLEARVKRQLLDEVRSICPPGVTINSVRQHRQLGLGHAILCARPLVGEHPFIVALPDIWLDASTFDPETQNLAAMVRRFEESGRSQVLVQPMPLEALPEYSVINCADAVLEPGQSACMTSIVEKPEDAEKYHSDLSAVGRYVLSAAIWPILAATGFGAWERIQLSDAIATLLQHRPVEAYRQVGLSYDCGDKLGYAEAFVAGGLNHSQQGAAFTAWLQDVQTRIE

SEQ ID NO: 15457 - protein, 168 aa, Magnaporthe grisea 70-15
MSEGQLQKVNLQSNDGQSIEVDRAVACRSRLIKDLIGDLGEEMVASTPIPIPNVSEAVLRKVLEWCEHHRNDPVQTSDEDSESRKKTTDIDEWDQKFMQVDQEMLFEIILASNYLDIKPLLDVGCKTVANMIKGKSPEEIRKTFNITNDFTPEEEEQIRRENEWAEDR

SEQ ID NO: 15458 - protein, 251 aa, Lycopersicon esculentum
EGKVAIITGAASGIGEASARLFVEHGARVVVADIQDELGQKVVDSIGSDKASYRHCDVTDEKQVEETVAYAVEKYGTLDIMFSNVGTLNFCSVLDMDVLAFDETMAINVRIALAVKHAAKVMVDKKIRGSIICNASLEGILAGAASLAYIASKHAVVGIIKAAARELGPHGIRVNGVSPYGIATPLVTKAYGLDAALLEEAIYGNGHLKGVKLSTMHVAQSALFLASDESAYTSGQNLAVDGGLSSILKLQ

SEQ ID NO: 15459 - protein, 433 aa, Aeromonas hydrophila [sequence omitted]

SEQ ID NO: 15460 - protein, 236 aa, Candida albicans SC5314
MRSIKSVVVGDGGVGKTCLLISYTTNTFPNDYIPTVFDNYSASVMIDGEPIKLGLWDTAGQSEYDRLRPLSYPQTEIFLCCFSVISPDSFQNVKSKWIPEILHHCPKDILILLIGTKVDLRDDLHVLDELTARNLSPVTFDQGNKLAREIGAIKYMECSAATQVGVKEIFDYAIRAVLDPPNANKGEYVTNDSVPGMGVNNSSGSKKHNEKNGSGTATAGTGKKRKIKRAKKCTIL

SEQ ID NO: 15461 - protein, 343 aa, Candida albicans SC5314
MSTAAVATKPSVTSKPATKQVSNYTKEKKVGEGTYAVVYLGKQISTKRQIAIKEIKTGLFKDGLDMSALREVKYLQELKHPNVIELVDVFSATNNLNLVLEFLPCDLEVLIKDKSIVFKSADIKSWLLMTLRGIHHCHRNFILHRDLKPNNLLLAPDGQLKIADFGLARALVNPNEDLSSNVVTRWYRAPELLFGARHYTGAVDIWSIGIIFAELMLRIPYLPGKDDVDQLDVTFRAYGTPTEQIWPNVSSLPMYNALHVYPPPSRQELRNRFSAATEKALDLLISMTQLDPSRRCDSTLALLHDYFTESPRPTDPKKLPKKSSPEKRENEDEQNNGSKRRHV

SEQ ID NO: 15462 - protein, 565 aa, Methanosarcina mazei Goe1
MKGDNCKNPMDKNQLGEPLPSRNQTVGDTPELTTVAGAPVESNQDSMTSGRRGPLMLQDIWFLEKLAHFDREVIPERRMHAKGSGAFGTFTVTHDITSYTKAAIFSEIGKQTKMFARFSTVAGERGAADAERDIRGFALKFYTEEGNWDMVGNNTPVFFFRDPLKFPDLNHAIKRDPRTNMRSPNTNWDFWTSLPEALLQLTIIMGDRGLPSSFRHMHGFSSHAYSLINKNNERVWVRFHFRSQQGIRNLTDQEAVIVVGMDRESHQRDLYEAIEKGMFPKWKMYIQVMTEEQANSMKNNPFDLTKMWHKKDFPLMPVGEFELNKNPENYFADVEQAAFSPANVVPGISFSPDRMLQGRLFSYGDAHRYRLGVNHHQIPVNSPQGVKNYHSFHRDGQMRVDGNRGSQLHYEPNSYGNWKDQPQYALPVEKTGSTDILRYDFREDDSDYYTQPGELFRAMTPDQQQVLFENTARNMGDSTLQIKHRHIYNCYQADPKYGEGVAKALEIDISTVDLNLPARTSRKANYEANNKHPELNQPTMKKDSGREIDTNGDPYIEPENDPWLL

SEQ ID NO: 15463 - protein, 473 aa, Bacillus subtilis subsp. subtilis str. 168
MNKQGNQMSFLRTIILVSTFGGLLFGYDTGVLNGALPYMGEPDQLNLNAFTEGLVTSSLLFGAALGAVFGGRMSDFNGRRKNILFLAVIFFISTIGCTFAPNVTVMIISRFVLGIAVGGASVTVPAYLAEMSPVESRGRMVTQNELMIVSGQLLAFVFNAILGTTMGDNSHVWRFMLVIASLPALFLFFGMIRMPESPRWLVSKGRKEDALRVLKKIRDEKRAAAELQEIEFAFKKEDQLEKATFKDLSVPWVRRIVFIGLGIAIVQQITGVNSIMYYGTEILRNSGFQTEAALIGNIANGVISVLATFVGIWLLGRVGRRPMLMTGLIGTTTALLLIGIFSLVLEGSPALPYVVLSLTVTFLAFQQGAISPVTWLMLSEIFPLRLRGLGMGVTVFCLWMVNFAVSFTFPILLAAIGLSTTFFIFVGLGICSVLFVKRFLPETKGLSLEQLEENFRAYDHSGAKKDSGAEVIG

SEQ ID NO: 15464 - protein, 428 aa, Zymomonas mobilis [sequence omitted]

SEQ ID NO: 15465 - protein, 273 aa, Helicobacter pylori J99
MIKKCLFPAAGYGTRFLPITKTIPKEMLPIVDKPLIQYAVEEAMEAGCEVMAIVTGRNKRSLEDYFDTSYEIEHQIQGTNKENALKSIRNIIEKCCFSYVRQKQMKGLGHAILTGEALIGNEPFAVILADDLCISHEYPSVLKQMTSLYQKYQCSIVAIEEVVLEEVSKYGVIRGEWLEERVYEIKDMVEKPSQEDAPSNLAVIGRYILTPDIFDILRETKPGKNNEIQITDALLTQAKRKRIIAYQFKGKRYDCGSVEGYIEASNAYYKKRL

SEQ ID NO: 15466 - protein, 250 aa, Bacillus anthracis str. A2012
WCKFKEVVCESSGWIVITMGWGLAVAVAAYVVGSISGAHLNPALTIGLAFKGAFPWGDVPGYIAAQMIGAIIGAVIVYLHYLPHWKETEDPGTKLGVFATGPAIPNTFANLLSEMIGTFVLVFGILAIGANKFADGLNPFIVGFLIVSIGLSLGGTTGYAINPARDLGPRIAHFFLPIAGKGGSNWKYAWIPVVGPILGGSLAGLFHQVVFEGKQNAALIYVIIATVIVLAISYMTSKKSGSNTNSRKVA

SEQ ID NO: 15467 - protein, 387 aa, Fusobacterium nucleatum subsp. nucleatum ATCC 25586
MIRSYMAIIYLGDSKKNISPLTKVRALASIPVGGSYRIIDFSLSNVVNAGIRNVGLFCGNEELNSLTDHIGMGAEWDLARKKDGIFIFKRMLDDNFSLNQARISKNMEYFFRSTQQNIVVLNAHMVYNLDVSDLIEKHEASGKEITMVYKKVKKANEHFNHCSSVKIDENNRVIGIGQNLFFKEEENISLDAFVLSKELMLKLLVDSIQEGKYNVLSELIARNLPSLNINAYEFKGYLQCINSTREYFNFNMNLLNQKIRDDVFGIKSGRKIFTKVKDTPPTLFKETADVENSLVSNGCIIEGTVKNSILSRGAIIEKDVVLEECVILQDCHIKKGAHLKNVIVDKNNIIHENEKLSASKEYPLVIEKSMKWDTKQYQDLMDYIRNK

SEQ ID NO: 15468 - protein, 589 aa, Zea mays
MRVGGGRDDDDEVSRKLKSMDVDKLENGGGEESPRPAVKYHGWKAMPFIIGNETFEKLGTLGTSANLLVYLTQVFHMRSVDAATLLNGLNGTTSLAPIIGAFLSDAYLGRYLALAIASVASLIGMFLLTMTAGANSLHPPECSVGETCEKATSYQFAVLFVAFAFLVLGSAGIRPCSMPFGADQFDPNTESGKRGINSFFNWYYFTFTAAMMISATVIIYVQSNVSWPIGLGIPTALMFLACVLFFMGTRLYVRVTPEGSPFTSVVQVLSAALKKRSLKQPKDPKQDLFDPPHTSAIVTKLAHTDQFRCLDKAAIVASPDEVRSGGGAPADPWRLCSVQQVEEVKCLIRIVPVWSTGIIYYVAVVQQSTYVVLSALQSDRHLGRAGFQIPAASFTVFAMLAQTLWIPFYDRLLLPKLRKITGKEEGFTLLQRQGIGIALSTVAMVISAIVEDRRRAIALSQPTLGTTITGGAISAMSSLWMVPQLMILGLSEAFNLISQIEFYYKEIPEHMRSVAGALAFCNLALGNYLSGFLVTIVHRTTGSGQNWLAQDLNKGRLDLFYWTIAGIGVFNFIYFVICARWYRFKGASN

SEQ ID NO: 15469 - protein, 120 aa, Glycine max
  unsure (1)..(120): unsure at all Xaa locations
PAFSIPNGWRGLDIGPDFVXSFREALGSSPTLXWKGPMGGFGFSKFSFGPRVFSKKLVSLSGKGGAPIIGGGDFFPPLEKVGVFSVFSPIFPGGGARLGFLEGKKLPGVLVFYEPVPVPG

SEQ ID NO: 15470 - protein, 496 aa, Corynebacterium glutamicum ATCC 13032
MVKYPQSTLGDLVTATFAGIDATKHLIGGQWVEGNSDRISTNINPYDDSVIAESKQASIADVDAAYEAAKKAQAEWAATPAAERSAIIYRAAELLEEHREEIVEWLIKESGSTRSKANLEITLAGNITKESASFPGRVHGRISPSNTPGKENRVYRVAKGVVGVISPWNFPLNLSIRSVAPALAVGNAVVIKPASDTPVTGGVIPARIFEEAGVPAGVISTVAGAGSEIGDHFVTHAVPKLISFTGSTPVGRRVGELAINGGPMKTVALELGGNAPFVVLADADIDAAAQAAAVGAFLHQGQICMSINRVIVDAAVHDEFLEKFVEAVKNIPTGDPSAEGTLVGPVINDSQLSGLKEKIELAKKEGATVQVEGPIEGRLVHPHVFSDVTSDMEIAREEIFGPLISVLKADDEAHAAELANASDFGLSAAVWSKDIDRAAQFALQIDSGMVHINDLTVNDEPHVMFGGSKNSGLGRFNGDWAIEEFTTDRWIGIKRS

SEQ ID NO: 15471 - protein, 626 aa, Oryza sativa
MAYSLETSALLNSPRANNSALVPPPSSAINNHTRRTHGHPHRNSAPPPPPSPAMASSASLQRFLPPSSHVAASRRRPPAVRTRPVQSLTVSAPSSSTPVADDAVSAERLEPREKVKLGKEPISLFMEGGIKELAKMPMEEIEADKLSKEDIDVRLKWLGLFHCHKHQYGRFMMRLKLPNGVTTSEQTRYLASVIEAYGKDGCADVTTRQNWQIRGVTLPDVPAILDGLNAVGLTSLQSGMDNVRNPVGNPLAGIDPDEIVDTRSYTNLLSYITSNFQGNPTITNLPRKWNVCVIGSHDLYEHPHINDLAYMPAVKDGKFGFNLLVGGFISPKRWEEALPLDAWVPGDDIIPVCKAVLEAYCDLGTRGNRQKTRMMWLIDELGMEVFWSEVEKRMPNGVLERAAPKDLIDKKWQRRDYLGVHPQKQEGLSYVGLHVPVGRVQAADMFELARLADEYGSGELRLTVEQNIVIPNVKDEKVEALLAEPLLQKFSPQPSLLLKGLVACTGNQFCGQAIIETKQRALLVTSQVEKLVSVPRAVRMHWTGCPNSCGQVQVADIGFMGCLTKDSAGKIVEAADIFVGGRVGSDSHLAGVYKKSVPCDELAPIVADILVERFGAVRREREENEE

SEQ ID NO: 15472 - protein, 157 aa, Lactococcus lactis
MNFYDFSAVKMNGETVSMSDYKGKVVIVVNTASKCGFTPQFEGLEKLYETYKDQGLEILGFPCNQFANQDAGENTEINEFCQLNYGVTFTMFQKIKVNGKEAHPLYQFLKKEAKGALSGTIKWNFTKFLIDRDGQVIERFAPKTEPEEMEEEIKKLL

SEQ ID NO: 15473 - protein, 485 aa, Glycine max
MASAASPTTFSLLHSATPSSSSTATSASPSPSRVQLTSSLRARPLRRLGFAAADPLLAASVAARVAAVRGGGKGARGVVSMAKKSVGDLSAADLKGKKVFVRADLNVPLDDNQNITDDTRIRAAIPTIKHLIQNGAKVILSSHLGRPKGVTPKYSLAPLVPRLSELIGIQVVKAEDSIGPEVEKLVASLPDGGVLLLENVRFYKEEEKNDPEHAKKLASLADLFVNDAFGTAHRAHASTEGVTKYLKPSVAGFLLQKELDYLVGAVSSPKRPFAAIVGGSKVSSKIGVIESLLEKVDILLLGGGMIFTFYKAQGLSVGSSLVEEDKLDLATSLLAKAKEKGVSLLLPSDVVIADKFAPDANSKVVPASAIPDGWMGLDIGPDSVKSFSEALDTTQTIIWNGPMGVFEFDKFAVGTEAIAKKLADLSGKGVTTIIGGGDSVAAVEKVGVASVMSHISTGGGASLELLEGKELPGVLALDEAVPVAV

SEQ ID NO: 15474 - protein, 416 aa, Buchnera aphidicola str. Bp (Baizongia pistaciae)
MDKQVVMPDIGTDLVEVIEILVKIGDQVKKDDSLITVEGQKASIEIPASHTGTIKNIIVHIGEKITTGSLIAILNGIDDNVKSKNDSSSYSFKNSKNTSTNSNLGNVNNNINNRTILVHATPTVRRLARKFDIKLENITGTGRKGRILKEDVISYKNISLFNDIKKSLKKTNVNYYKDNVTCDDFKSIELTRTQIRSSKNLLKSWLTIPHVTQFDESDITELENFRQKYNSDLKDKSKKLTILIFVIKAVSKALEMFPKFNGRLINKDNRIAIVLNEHINIGIVVDTDDGLLVPVINRVNKKNISSISNDLRIISERARSRKLNFSDIKEYGSFTISNLGGIGGTNFTPIIKYPELAILGISRALIKPYWNSHAFIPKLMLPLSLSYDHRAIDGVAAVRFITFVKKMLTDIRFLMI

SEQ ID NO: 15475 - protein, 368 aa, Zea mays
EPAAAAGDEECSWSRGRWVYDNVSRPLYDGLKCAFIFPEVACDKYGRKDVMYQHWRWQPHGHGCDLPRFDGIKLLEELRNKRLVFVGDSVNRNQWVSLVCMVEASIPDDRLKRRIFNGSLISFKALEYNATIDFYWSPLLVESNSDNPIIHRVEYRIIRADRIEKHASVWRDADVIVFNSYLWWRKQKDDMRMKVMYGSFEDGDAKLDEMEMADGFEIAIKKLTEWLAENIDKNKTRIFFAGSSPTHSWASNWGGQDKNKCLNETEPISYRPGGGYKAATTDYSLMAMARSYFRRTLEPRGIRVQILNITELSDYRKDGHPTVFRRQFVPLTKEQIADPASYADCTHWCLPGVPDVWNEFLYGYLVHV

SEQ ID NO: 15476 - protein, 475 aa, Buchnera aphidicola str. Bp (Baizongia pistaciae)
MISKKVDTQVVIIGSGPSGYSAAFRCSDLGLNVVLIEQYYSLGGVCLNVGCIPSKYLLHIAKVIKDVKKLSRIGISFEKLDINLKEIQCNQKKIIESFSSGISNLARKRNVRIIFGYAKFLDANSIFVQGEHDSYVVSFNKIVIATGSLSKKLSYIPYDDIRIWNSSFAVSIPSIPKKLLIIGGGIIGLEMATIYSALGSNVDIIDNSHDILPHLDRDVIDIFKRSVNHDYNIFFNSNVIKIVQEKNGLLVHIAENDNKNKRFELYDIILVAIGRVPNTDMLDISKVGLKTDNNGFIKVNEQFCTNIPNIYAIGDVIGQPMLAHKGTHEGHIVAEVISGKKHYFNPFVIPCVSYTEPEIAWVGITENEARKNNINYEVSSVLWNTLGRAVSSQCSEGVTKLIFDKKTNKIIGGCIVGSNAGELLGEISLAIEMGCDAEDLALTIHAHPTLYESINLSAQIFQGTITDLINKKIKK

SEQ ID NO: 15477 - protein, 74 aa, Zea mays
  unsure (1)..(74): unsure at all Xaa locations
MGGGMEVHKKRXRXEEWNAGRENLEXFNFRWTRRXLXVVGLFXLAVPILVYXGIXREFHMQTEDXXRAIQEGKP

SEQ ID NO: 15478 - protein, 498 aa, Bordetella bronchiseptica RB50
MTLHDSAYWRAQAAALAPEGRAYIDGAYCDAADGATFAAHSPIDGRKLADVAACGAADVDRAVAAARRAFEAGVWSGLAPRERKHRLLRLAALITKHQEELALLETLDMGKPIRDALAFDLPETARCYAWYGEAIDKRYDEIAPTGADALATITREPLGVVAAVVPWNYPLMMAAWKVAPALAVGNSVILKPAEQASLSALRLAALAEQAGIPPGVFSVVPGLGAQAGQALGLHPDVDCIAFTGSTATGKRFMTYSGQSNLKRVWLECGGKSPHIVFADCPDLDRAAQVAALAIFSNQGEVCIAGSRLYVQHGIYDAFMEKVAAFAATLRPGNPLDPDSALGAMVDERQTQAVMARIAAGAQEGARLRLGGRQVLTNSGGYYIEPTIFDCPGQDNSLVREEIFGPVLAAQGFADEDEAVALANDSIYGLGAGLWTADLGRAHRLSRRLRAGLVWVNCYADGDITVPFGGVKQSGFGRDKSLHAMDKYSDLKTTWISLR

SEQ ID NO: 15479 - protein, 157 aa, Candida albicans SC5314
MSDYEDNAFNEVAENFEDFDAPDHFSDNEYDDPSANGGDAALKTTDGRTIINGGFGPDDAQAAGQPRKKTTKELAIPKEKRTTTPYMTKYERARILGTRALQISLNAPVLVDIEGETDPLQIAMKELAQRKIPLVIRRYLPDGSYEDWGCDELIVDQ

SEQ ID NO: 15480 - protein, 270 aa, Sphingopyxis macrogoltabida
MGWLDGKVALITGGGAGIGRALVERFVAEGAKVGVLEVNAGRAEELAAVLGDSVCVVTGSVASFADNAAAVQRTVEKFGRLDTFVANAGVFDFFQPLAQYEGDQIGAAFDELMSVNVKGGLLGVRAALPELVRSRGSVIFTISNAGFYAGGGGPLYTASKHALVGLVKQLAHELAPKVRVNAVAPGGMKTELSGLSATGTSGQSLSQMDGLDTLLKDITPLQVSPMPEQYCGPYVLLASDDSVVTTGAIINTDGGFGVRGITGVRGGEGL

SEQ ID NO: 15481 - protein, 464 aa, Mycosphaerella graminicola
MAKLYQNVDSAQLQRDADDCLLTYGTDFHPEIITNAEGQSITTASGHRMLDWTSGQMSTLIGHANPEIVETIHAHARNLDHLFSGMLSPPVISLAKRLTSVTPPGLDKALFLSTGGESNEAAIRLAKFYTGKFEIVGLASSWHGVTSGAIAAQYHAGRAGYGPNMPGNIALPTPNSYRSIFRHPDGSHDWKTELEYGFDLVDKQSCGSLAALILEPILSSGGMLVLPPGYLKAVKQHCERRGMLLIIDEAQTGIGRAGDMFAFQHFAEDDGVVPDILTLSKTLGNGLPLSAVVTSNKIASFAKENNFLFYTTHINDPLPAAVGDKVLEIVIRDHLVERSREMGKVFQERLRALQSRYGCIGDVRGRGLMAGVEIVADRVTKEGDIDLGAAIGKRMTENGLWAQLSTMASFGGVFRLAPPLTTTDEELMAGLDIIEEAFASTPGTKPLYERDVAAAYDSQVDARL

SEQ ID NO: 15482 - protein, 688 aa, GIBBERELLA ZEAE PH-1
MRPFTPTTRKLSGPAAKSSTPVRSILKPASVLGRRKAEDAGLSDPIDAPESPTKRRKVLFDDIRNVTVTYEVGKRTMDEVKLEVRTALEEHLRGNDGQYDTLKELFATDKQRYLPPVIGEDDDTLKPHELQVYVVALTGCVPILKDKACNGLVKTILNCSWLGRDDAFVKVFTHFLAALVSAQGSYLSPVLTMMVGKFTDSRSDVWSVPDFPEVNLETMRDRLHRTLQYLLQMFPSALPVLECLLGSKFPYQDGSKRVHMSYVKNLLRVKDYLPDLRDEVFDLILNRVVKIDSQMQVDLEDGDDEITAAVMYALEKQVFTGDWEENDDDDSDTESVDSDDPDYDTEAAKTKSITDNVSKMDAILDTLFEVYTPHFDNPGSDVAFDMFTILLREFEYMVLPTYKSRHTQFLIFHFAQMHDRLTDAFCGQLITTAFKSNTANSTKQAAASYLASFVARGARLPGSLIRSIFGLLLHHLDIYRKKYEPLCRGPDLRRFHPYYSLVQATLYIFCFRWQDLIVVAPESADPEDPASYIGQEMEWMGTCRRDLSAQIFGKLNPLKVCAPSIVEEFARIAHRLNFMYIYPLIESNKRIRLSQYLTATYSTGGALRDAGYDMQDESFHQLDPYFPFDPYQLPISKRWLENDYVEWKSITGLNAEDEDSDDADDEDELDEEEFEDKTSTDSDGDDYE

SEQ ID NO: 15483 - protein, 269 aa, Triticum aestivum
  unsure (1)..(269): unsure at all Xaa locations
RARRGGRRRWGRSGAKEGEGESEVRPGGMLVQRTEGEXGPAPRVKVXSRGPALRDVFVPAQATFGELKRRRSSPRGLDSEIRRRGSLXTESIEGPWMHASGASEGAKLLPLEKQISTNVXRKVEPVMMDESMMRACEAVVRVRSEVDKLSAKVCELEKSVLSREEGRWIKNLFDLTELLMVQLAXKLDGIGARGGSKGHKGKAEVRRVQNLVETLDKLKARNANPSSDSAKSVSVSTEWETFENGMGSLNAPPARFSSTQNDTDWEQFD

SEQ ID NO: 15484 - protein, 384 aa, Fusobacterium nucleatum subsp. nucleatum ATCC 25586
MVMKKKRIIAMILAGGQGTRLKELTEDLAKPAVAFGGKYRIIDFTLTNCSNSGIDTVGVLTQYEPRILNNHIGRGSPWDLDRMDGGVTVLQPHTRKNDEKGWYKGTANAIYQNIKFIEEYDPEYVLILSGDHIYKMNYDKMLQFHIQKDADATIGVFKVPLVDAPSFGIMNTKDDMSIYEFEEKPKEPKSDLASMGIYIFNWKLLKKYLDEDEKDPNSSNDFGKNIIPNMLNDGKKMFAYPFKGYWRDVGTIQSFWDAHMDLLSEDNELDLFDKSWRVNTRQGIYTPSYFTKESKIKNTLIDKGCIVEGEIEHSVIFSGVKIGKNSKIIDSIIMADTEIGDNVTIQKAIIANDVKIVDNIVIGDGKKIAVVGEKKIIDSQSLVK

SEQ ID NO: 15485 - protein, 434 aa, Triticum aestivum
MGAGAEPREEEPLEAEEGSGGKEEKAAVSCSICLDAVVAASAERSMARLQCGHEFHLDCIGSAFNAKGVMQCPNCRKIEKGNWLYANGSRPSHDINMDEWAHEEDLYDVSYSEMPFRFHWCPFGRLAQLPSFFEEGESPPPVTFHDFMGQHVFPENLSVSAAPGAHPCPYVAYLHPLPSLASSSSSHVPERTMDGSAYHDHWNHLAGPSHGWPLQTVQPTDFHHNHWAHLPHSYVQSNSNNGVTEQPGVPFGSMRAARVDGDSQRRGSVVSPSYFSNGSGSRSRAPNVPPLVPQFMRAHGNINEQYTQSSSSSLFAGAHRSGGMRPAPPPPQPENPTFCLFPPGSSGHSSMDTDEAGGSRFYAWERDRFAPYPLMPVDCETSWWSSQQSHGASESTPAPAPRRLFGQWIGLGRSSPENRSPEGSSYRQMHSPRM

SEQ ID NO: 15486 - protein, 235 aa, Lactobacillus rhamnosus
MWTQTLGEFIGTFILVLLGDGVVAGVSLNKSKANGAGWIAITLGWGLAVTMGVYAAAFLGPAHLNPAVTLAFAAIGQFPWAWVMPFVGAQMLGALLGAAVVWLHYYPHWEATNDPATTLGVFATGPAIRNYAANFISEFIGTAVLIFGLLAFTKGKWTDGLNPIGVGILITAIGLSLGGTTGYAINPARDLGPRLAHAILPIAHKGDSDWPYAWVPILGPLAGGVVGALIFTVLP

SEQ ID NO: 15487 - protein, 394 aa, Glycine max
  unsure (1)..(394): unsure at all Xaa locations
MEHKVATTTEGQSIRCKAAICRKAGEPLSIEEIIVAPPMPGEARIRIICSSLCQTDISFRNMQMYLLXLKDHPAIYPRILGHEAIGVVESVGEDVTEVTKGDVVVPIFLPDCGECIDCKSSKSNLCSKFPFEVSPWMPRYATSRFTDLKGEIIHHFLSVSSFSEYTVVDIAHLIKIDPAIPPNRACLISCGISAGIGAAWRAAGVEPGSTVAIFGLGSIGLAVAEGARLCGATKIIGVDVNPERYEIGKRFGLTDFVHSGECENKSVSQVIIEMTGGGADYCFECVGMASLMHEAYASCRKGWGKTIVLGVDKPGSKLNLSCSEVLVSGKSLRGCLFGGLKPKSHVPILLKRYMDKELNLDEFVTHEMEFKDINKAFDLLIEGQCLRCVIWMDK

SEQ ID NO: 15488 - protein, 460 aa, Cytophaga hutchinsonii
MALVELVMPKMGESVMEGTILNWLKKPGDRIQQDESVLEVATDKVDTEVPSPFNGILKEIKANQGDVVQVGTAIALIETDVNQAANSEPATTAPAANTNSGTATTQTVQQTAVAEKIPVSTPQTHIPAHTAGAKGGRFYSPLVLNIARQENISLAEVETIAGTGKDGRVTKNDLFDYLQAKKEGKVTAVTQETVVNETPQATEQKAPVAEPVYVNKPASSQSGNVEIIQMDRMRKMIADRMVESKRISPHVTSFVEADVTNIVYWRNRWKNDFMERENVALTFTPIFIEAVVKAIKDYPMVNISIEDDKIIVKKDINIGIAVALPNGNLIVPVIKNADQLNIVGLTKKVNDLAKRARQNKLTADDLSGGTYTVSNVGSFGNLMGTPIIVQPQAAILALGAVVKKPAVIETPQGDTLGIRHMMFLSHSYDHRAIDGSLGGMFVRRVADFLENFDVNRKIFV

SEQ ID NO: 15489 - protein, 101 aa, Cucumis sativus
HIQENWRILDFFSHHPESMNMFTFLFDDIGIPQDYRHMDGSGVNTYTLINKAGKAHYVKFHWRPTCGVKSLLEEDAIRVGGSNHSHATQDLYDSIAVETYP

SEQ ID NO: 15490 - protein, 218 aa, Cytophaga hutchinsonii
MKFFIDTANLNEIREAQELGILDGVTTNPSLMAKEGISGKDNVFKHYKAICDIVDGDVSAEVIATDYKGIIEEGEELITIDPKIVVKVPMIKDGIKAIKYFSQKGIRTNCTLVFSAGQALLAAKAGATYVSPFIGRLDDISQDGMELIAQIVGIYRNYDYQTEVLAASVRHTMHLINCAEVGADVVTCPLNVITGLLNHPLTDSGLAKFLADHKKVNG

SEQ ID NO: 15491 - protein, 311 aa, Zea mays
  unsure (1)..(311): unsure at all Xaa locations
MAVDLMSCGGGAYEQLAFQEAAAAGLRSLELLASSLSPCGAGRAESPPLGQIADQAVSRFRRVINLLDRTGHARFRRAPAVAAVEPIETETPASQQAAPEPPHQAQNKAPTLDFAKSVPPAANKKAPPAPAVSATSTSFLSSVTAGGEGSVSKGCSFAAVSSGKPPLPKRTFAVPRRCSAXAHHAESGAGGCHCSKKKRSRQGLSRRTVRLPAAAATPGSQPPGHVPASSDVPHDEYSWRKYGQKPIKGSPYPRGYYRCSSAKGCPARKHVERAADDPAVLVVTYEGDHRHDGDGDGDGGVGAGAARSRAA

SEQ ID NO: 15492 - protein, 254 aa, Pseudomonas syringae pv. tomato str. DC3000
MPRLPLIGVTACRQQLDKYSSHTAGDKYVEAAGFAGIPVILPALEMPTEPAHLLASLDGLLFTGSPSNVEPHHYQGAPSLEGTAHDVFRDRMTLPLLRAAIAQGVPVLCICRGFQELNVALGGSLHQRVQDLPGYLDHREPQSEVLSVQYAPQHAVRVQAGGLLDSLGLAPGFEVNSLHSQGIDRLALALRAEALAPDGLVEAVSLPGAPGFVLGVQWHPEWAFRDNPVSLSLFSAFRQACQTYARRRGDAISG

SEQ ID NO: 15493 - protein, 354 aa, Pseudomonas syringae pv. tomato str. DC3000
MHPKNAWYVACTADEVADKPLGRQICNEKMVFYRDQNQQVVAVEDFCPHRGAPLSLGYVENGQLVCGYHGLVMGGDGKTASMPGQRVRGFPCNKTFAAIERYGFIWVWPGEREKADPALIHHLEWAVSDEWAYGGGLFHIQCDYRLMIDNLMDLTHETYVHASSIGQKEIDEAPPVTTVEGEEVITARHMENIMPPPFWKMALRGNNLADDVPVDRWQICRFTPPSHVLIEVGVAHAGKGGYHAPHEFKASSIVVDFITPETDTSIWYFWGMARNFKPADEQLTATIREGQHKIFSEDLEMLERQQLNLLQHPHRNLLKLNIDAGGVQSRKILERLIAAEQADTADQIPVAAVK

SEQ ID NO: 15494 - protein, 286 aa, GIBBERELLA ZEAE PH-1
MPLVGGHEGAGVVVARGELVKDVEIGDHVGLKWLHGSCMSCEQCRQSNESLCSHASLSGYTVDGSFQQYAVGKAAHVARIPKDCDLAGVAPILCAGLTVYKALKSSNVRPGQSVVIAGAGGGLGVFAIQYAKAMGLHVTALDGGEEKRKVCTELGADTFIDFKTSADIVGEIKNATRGLGPDAVLLLAASEKPFQQASQYVKSKGTIVCVGLPANAFVKAPVFDTVVSIKGSYVGNRQDAAEAIEFYRQGLIHAPYKIVGLSELQKVYDMMIAGNIAGRYVVDTSR

SEQ ID NO: 15495 - protein, 492 aa, Gossypium hirsutum
MDPYKHRPSSAFNSPFWTTNSGAPVWNNNSSLTVGPRGQYLLEDYHLVEKLANFDRERIPERVVHARGASAKGFFDVTHDISHLTCADFLRAPGVQTPVIVRFSTVIHERGSPETLRDPRGFAVKFYTREGNFDLVGNNFPVFFIRDGMKFPDMVHALKPNPKSHIQENWRILDFFSHHPESLHMFTFLFDDLGVPQDYRHMEGSGVNTYTLINKAGKAHYVKFHWKPTCGVKCLLEDEAIKVGGANHSHATQDLYDSIAAGNYPEWKLFIQTIDPDHEDKFDFDPLDVTKTWPEDILPLQPVGRLVLNKNIDNFFAENEQLAFCPAIVVPGIYYSDDKLLQTRIFSYSDTQRHRLGQTYLQLPANAPKCAHHNNHHEGFMNFMHRDEEINYFPSRYDPVRHAEMFPIPPAVCTGRREKCIIEKENNFKQPGERYRSWAADRQERFICRWVDALSDPRVTHEIRSIWISYWSQADKSVGQKLASLLNVRPSI

SEQ ID NO: 15496 - protein, 389 aa, Magnaporthe grisea 70-15
MSTVGKVSKANTRMTITCKAAVAWEAGKDLSIEDIEVAPPKAHEVRIEIYHTGVCHTDAYTLSGKDPEGAFPIVLGHEGAGIVESVGEGVTNVKVGDHVVALYTPECKECKFCKSGKTNLCGKIRATQGKGLMPDGTSRFKCKGKDLLHFMGTSTFSQFTVVADISVVAVQPEAPMDRTCLLGCGITTGYGAARVTANVEEGSSLAVFGAGCVGLSVVQGAVINKAGKIIVVDVNPAKEEWARKFGATDFVNPTKLPEGKTVVDALVELTDGGCDYTFDCTGNVQVMRAALEACHKGWGESIIIGVAAAGQEISTRPFQLVTGRVWKGCAFGGIKGRSQLPGLVDDYLQGRLKVDEFITHRKKLVEINNAFETMKQGDCIRAVVDMRAV

SEQ ID NO: 15497 - protein, 546 aa, Candida albicans SC5314
MSQDNVSSTSTAEAVNNEIKVKDEFRQEEQAHTSLEDKPVSAYIGIIIMCFLIAFGGFVFGFDTGTISGFINMSDFLERFGGTKADGTLYFSNVRTGLMIGLFNAGCAIGALFLSKVGDMYGRRVGIMTAMIVYIVGIIVQIASQHAWYQVMIGRIITGLAVGMLSVLCPLFISEVSPKHLRGTLVCCFQLMITLGIFLGYCTTYGTKSYSDSRQWRIPLGLCFAWALCLVAGMVRMPESPRYLVGKDRIEDAKMSLAKTNKVSPEDPALYRELQLIQAGVERERLAGKASWGTLFNGKPRIFERVVVGVMLQALQQLTGDNYFFYYSTTIFKSVGMNDSFQTSIIIGVINFASTFVGIYAIERMGRRLCLLTGSVAMSVCFLIYSLVGTQHLYIDKPGGASRKPDGDAMIFMTSLYVFFFASTWAGGVYSIISELYPLKVRSKAMGLANASNWTWGFLISFFTSFITDAIHFYYGFVFMGCLVFSIFFVYFMVYETKGLTLEEIDELYSTKVLPWKSAGWVPPSEEEMATSTGYAGDAKPEEEHV

SEQ ID NO: 15498 - protein, 573 aa, Saccharomyces cerevisiae
MPIRSISSASQMNVFGKKEEKQEKVYSLQNGFPYSHHPYASQYSRPDGPILLQDFHLLENIASFDRERVPERVVHAKGGGCRLEFELTDSLSDITYAAPYQNVGYKCPGLVRFSTVGGESGTPDTARDPRGVSFKFYTEWGNHDWVFNNTPVFFLRDAIKFPVFIHSQKRDPQSHLNQFQDTTIYWDYLTLNPESIHQITYMFGDRGTPASWASMNAYSGHSFIMVNKEGKDTYVQFHVLSDTGFETLTGDKAAELSGSHPDYNQAKLFTQLQNGEKPKFNCYVQTMTPEQATKFRYSVNDLTKIWPHKEFPLRKFGTITLTENVDNYFQEIEQVAFSPTNTCIPGIKPSNDSVLQARLFSYPDTQRHRLGANYQQLPVNRPRNLGCPYSKGDSQYTAEQCPFKAVNFQRDGPMSYYNFGPEPNYISSLPNQTLKFKNEDNDEVSDKFKGIVLDEVTEVSVRKQEQDQIRNEHIVDAKINQYYYVYGISPLDFEQPRALYEKVYNDEQKKLFVHNVVCHACKIKDPKVKKRVTQYFGLLNEDLGKVIAECLGVPWEPVDLEGYAKTWSIASAN

SEQ ID NO: 15499 - protein, 550 aa, Oryza sativa (japonica cultivar-group)
MALLLRHSPKLRRAHAILGCERGTVVRHFSSSTCSSLVKEDTVSSSNLHPEYAKKIGGSDFSHDRQSGKELQNFKVSPQEASRASNFMRASKYGMPITANGVHSLFSCGQVVPSRCFSSGADLPPHQEIGMPSLSPTMTEGNIARWVKKEGDKVSPGEVLCEVETDKATVEMECMEEGYLAKIIHGDGAKEIKVGEIIAVTVEEEEDIGKFKDYKAPSSAESAAPAESKPQSEPTEPKKEKEQPKAPEPKATKTEESFLSEDRTFSSPIARKLAEDNNVPLSSIKGTGPDGRILKADIEDYLASVAKGAKKETAAAPGLGYVDLPNTQIRKVTANRLLHSKQTIPHYYLTVDTRVDKLIKLRSELNPLQDTSGGKKISINDLVIKAAALALRNVPECNSSWMNDFIRQYHNVNINVAVQTEDGLFVPVIRDADKKGLATIADEVKQLAQRARDNSLKPEDYEGGTFTVSNLGGPFGIKQFCAIVNPPQSAILAIGSAEKRVIPGAEGQFEVGSFMSATLSCDHRVIDGAIGAEWMKAFKGYIENPTTMLL

SEQ ID NO: 15500 - protein, 233 aa, Dianthus caryophyllus
MGRGRVELKRIENKINRQVTFAKRRNGLLKKAYELSVLCDAEVALIVFSNRGKLYEFCSTSCMNKTLERYQRCSYGSLETSQPSKETESSYQEYLKLKAKVDVLQRSHRNLLGEDLGELSTKELEQLEHQLDKSLRQIRSIKTQHMLDQLADLQKKEEMLFESNRALKTKLEESCASFRPNWDVRQPGDGFFEPLPLPCNNNLQIGYNEATQDQMNATTSAQNVHGFAQGWML

SEQ ID NO: 15501 - protein, 627 aa, Pseudomonas aeruginosa
MCGIAGFWNITGTLLGDNARVARQMAAAIHHRGPDESGIWYEAPRAPILVHARLAVLELSPAGSQPMHSDCGRYVLIYNGEIYNHLALRARLSEAGVTHSWRGGSDTETLLACFAQWGVESTLKLTVGMFALALWDRQEKTITLARDRMGEKPLYWGWQNGVLFFASELKALKEHPLFRGDIDRDALALFLRYGYVPAPYSIYKGIGKLRAGSYLVLSERSLNETCEPAAYWSANAAIEEALSNPFQGTDAEAVDLLESQLRTSISDQMVSDVPLGAFLSGGVDSSTVVALMQQQSSRPIRTFSIGFDEPGYDEAVYAKAVAEHIGTDHTELYVNSKDALDVIPSLPKIYCEPFGDSSQIPTLIVSGLARQQVTVALSGDGGDELFGGYNPYQFTPRVWRMLERFPHSMRRFASAFAQDLPLPDKLGKLRDVFASRTAEELFYRLNSHWRNHEYPVIGAKGHTALLDTPERWPRVDSFQHWMMAMDVQGYMPDDILVKVDRAAMANSLETRVPLIDHRVFELAWRMPLHMKIRNGKGKWLLREVLYRHVSRELIERPKKGFSVPVSDWLRGPLKEWAESLLDERRLQQEGYLDSRLIRRIWNDHLAGRRDHSRRLWSVLMFQAWLES

SEQ ID NO: 15502 - protein, 463 aa, Oryza sativa (japonica cultivar-group)
MALLLRHSPKLRRAHAILGCERGTVVRHFSSSTCSSLVKEDTVSSSNLHPEYAKKIGGSDFSHDRQSGKELQNFKVSPQEASRASNFMRASKYGMPITANGVHSLFSCGQVVPSRCFSSGADLPPHQEIGMPSLSPTMTEGNIARWVKKEGDKVSPGEVLCEVETDKATVEMECMEEGYLAKIIHGDGAKEIKVGEIIAVTVEEEEDIGKFKDYKAPSSAESAAPAESKPQSEPTEPKKEKEQPKAPEPKATKTEESFLSEDRTFSSPIARKLAEDNNVPLSSIKGTGPDGRILKADIEDYLASVAKGAKKETAAAPGLGYVDLPNTQIRKVTANRLLHSKQTIPHYYLTVDTRVDKLIKLRSELNPLQDTSGGKKISINDLVIKAAALALRNVPECNSSWMNDFIRQYHNVNINVAVQTEDGLFVPVIRDADKKGLATIADEVKQLAQRARDNSLKPEDYEV

SEQ ID NO: 15503 - protein, 334 aa, Glycine max
  unsure (1)..(334): unsure at all Xaa locations
PAPGALQSYKLAAKAITRLQSLPSGSMERLCDTMVQEXXELTGYDRVMAYKFHEDDHGEVIAEITKPGLEPYLGLHYPATDIPQASRXXFMKNKVRMIVDCHAKHVRVLQDEKLPFDLTLCGSTLRAPHSCHAQYMANMDSIASLVMAVVVNDNEEDGDTDAIQPQKRKRLWGLVVCHNTTPRFVPFPLRYACEFLAQVFAIHVNKEIELEYQIIEKNILRTQTLLCDLVMRDAPLGIVSESPNIMDLVKCDGAALIYKNKVWRLGVTPSESQIREIALWLSEYHMDSTGFSTDSLFDAGFPSALSLGDVVCGMASVRVTAKDVVFWFRSHTAA

SEQ ID NO: 15504 - protein, 260 aa, Oryza sativa
MAPLPAAGAAGRIILAHGACHGGWCWYKVAALLRAAGHRVDAPDLGAAGQRGLGVGGAPASSFADHARPLLDAVRALPDGERAVLVGHSFGGMSVALAAETFPDKVAAAVFVAAFLPDCANPPSHPIDTYQESDWMDTVIDPSHVPPSILFGPEFLKKKLYQLSSPEDYTLAKSLVRASSLYVDELRRRAAFREDRYGAVRKVYVVVENDMAIVQEHQRWMVANAEVAEVRVMDAGDHMAMLSAPEELAGHLADVANTYI

SEQ ID NO: 15505 - protein, 982 aa, Burkholderia fungorum LB400
MSDMLNSSTGGCGSGNCACKAQAQQQRSPRSFFDDTDYGTPERHADIDVTLEIDGQSVTVPAGTSVMRAAVEAGVNVPKLCATDSLEPFGSCRLCLVEIEGKRGYPASCTTPVEAGMKVRTQTDRLQSLRRNVMELYISDHPLDCLTCPANGDCELQDMAGVTGLREVRYGFDGANHLKDKKDESNPYFTYDASKCIVCNRCVRACEETQGTFALTIAGRGFESRVAASENVPFMESECVSCGACVAACPTATLQEKTVIMLGQAEHSVVTTCAYCGVGCSFKAEMKGNQVVRMVPHKNGQANEGHACVKGRFAWGYATHKDRITRPMIRAKITDPWREVSWEEALTYAASEFRRIQAKHGRDSIGGITSSRCTNEETYLVQKLVRAAFGNNNVDTCARVCHSPTGYGLKTTLGESAGTQTFASVDKADVIMVIGANPTDGHPVFGSRLKRRVREGAKLIVVDPRRIDIVDTPHVKASHHLQLRPGTNVAVVNALAHVIVTEGLVNEAFVAERCETRAFEQWRDFVALPENAPEATEAATGVPAQAVREAARIYATGGNAAIYYGLGVTEHAQGSTMVMGIANLAMATGNIGREGVGVNPLRGQNNVQGSCDMGSFPHELPGYRHISDTVTRTLFEEAWNVTLQPEPGLRIPNMFDAAVHGTFKGLYCQGEDIVQSDPNTHHVSAALSAMECIVVQDIFLNETAKYAHVLLPGSSFLEKDGTFTNAERRISRVRKVMPPVPGYADWEVTVLLARALGYEMDYTHPSQIMDEIARLTPTFHGVSYKKLDELGSIQWPCNENAPDGTPTMHIDTFVRGKGKFVITKFIATPEKVTRKFPLLLTTGRILSQYNVGAQTRRTENSRWHDEDRLEIHPHDAEERGIRTDDWVGIESRAGQTVLRAKVTERMQPGVVYTTFHFPESGANVITTDSSDWATNCPEYKVTAVQVMPVEQPSQWQRDYSRFNTEQLDLLKQRELANATSGK

SEQ ID NO: 15506 - protein, 216 aa, Ophioglossum pedunculosum
SKRRNGLLKKAYELSVLCDAEVAVIVFSGTGKLSEFASSSMMRRILEKHRQVVEGSQSIKPTSQDVVEYWRHEATRLKHQLGVVQETQRHMLGESLETLTYRDLQKLESKLNGALNQVRGRKNQIISERLVYLQEKEDLLNAENIMMRAKLAEIMAGGVPLMSQSMQDPAARESFLNESSTQPNPPIMKNQNGEETNLQLGLELFPTTSFGDGAST

SEQ ID NO: 15507 - protein, 364 aa, Thermococcus kodakaraensis
MFNVYEFFNRINEVRPESRLDAGQPDIPVRREIIEEAVESLRRGETGYTSTGGIRELRERIAEFEGVSADEVIVAPGAKILIAAEIASAKKVAVVSPRWNAYSLIARQFWREVEVIKTTLDERWIPRVEEIKADLIIINYPNNPTGRVLSGKEIRGLLDVAEENGVKVLSDEVYAELSFTRFTPARELYENVVTVKGFSKLYSMTGFRLGYAIGERNEIRRIQRFIESTVTCVPPFVQRAGVKALELRDELIKEVRRAYLERVRMASKMLRGFDFVEPEGAFYIFLRTPQDGMAFAERLLSRGVAVFPGMAFGDYPNFIRISLSGKGLERGLRVIREELECALESRATEGWEGSSRGVSAEGSR

SEQ ID NO: 15508 - protein, 131 aa, Flaveria ramosissima
SNGGRVQCMKVWPPLGKKKYETLSYLPNLTETQLAKEVDYLLRNKWVPCLEFELEHGFVYRENHRSPGYYDGRYWTMWKLPMFGCTDSSQVMKELGECKKEYPQAWIRIIGFDNVRQVQCISFIASKPDGY

SEQ ID NO: 15509 - protein, 493 aa, Arabidopsis thaliana
MADQISGEKPAGVNRFALQCAIVASIVSIIFGYDTGVMSGAMVFIEEDLKTNDVQIEVLTGILNLCALVGSLLAGRTSDIIGRRYTIVLASILFMLGSILMGWGPNYPVLLSGRCTAGLGVGFALMVAPVYSAEIATASHRGLLASLPHLCISIGILLGYIVNYFFSKLPMHIGWRLMLGIAAVPSLVLAFGILKMPESPRWLIMQGRLKEGKEILELVSNSPEEAELRFQDIKAAAGIDPKCVDDVVKMEGKKTHGEGVWKELILRPTPAVRRVLLTALGIHFFQHASGIEAVLLYGPRIFKKAGITTKDKLFLVTIGVGIMKTTFIFTATLLLDKVGRRKLLLTSVGGMVIALTMLGFGLTMAQNAGGKLAWALVLSIVAAYSFVAFFSIGLGPITWVYSSEVFPLKLRAQGASLGVAVNRVMNATVSMSFLSLTSAITTGGAFFMFAGVAAVAWNFFFFLLPETKGKSLEEIEALFQRDGDKVRGENGAA

SEQ ID NO: 15510 - protein, 131 aa, Flaveria ramosissima
SNGGRVQCMKVWPPLGKKKYETLSYLPDLTEAQLAKEVDYLLRNKWVPCLEFELEHGFVYRENARSPGYYDGRYWTMWKLPMFGCTDSAQVMKELQECKKEYPQAWIRIIGFDNVRQVQCISFIASKPDGF

SEQ ID NO: 15511 - protein, 500 aa, Burkholderia fungorum LB400
MSENKPENAGKPGDPTPPSASPAPSGAAPGASLPGFAPDEPATSLPLSHEDAIQSPVKDAVTPPVHAPAEAATPPAAGEAAVRSSTDDPDSASAVTPVDPQTARQRDAAEARSSAAASTAQQEAEVHEKAARRTGTYAARPAPKSSPTFASSEPVDAELVTSVEDAAVVDEVQASAGRQAGSPPPGFGAAPDFSASNPPPPNALPPSPPRYLKHNDSAWTVFGRIIAARARQLFDRAGQRITQRTLRIGVSARIFHPEPGAKGLRGKTLQYLEESIAHWVMSRDVLVFMIPTVGHQGMLHPSNIRLRDYAKHLDGLLLQGGADVSPQSYAEQATSHEWPGDRVRDMYELELLHEFIESGKPVLGVCRGCQLINVAFGGTLYQDIATDVPTAGAHVNENYDQHRHGIHFPDGSTLANMFPGQRDAIVNSIHHQAVKTLGRDLNIEAVSASDGIIEAVRYRRAPFVMGVQWHPEFHRAGGAELLDCTPLLDTFLRVARETRF

SEQ ID NO: 15512 - protein, 131 aa, Flaveria palmeri
SNGGRVQCMKVWPPVGKKKYETLSYLPELTEAQLAKEVDYLIRNKWVPCLEFELEHGFVYRENASSPGYYDGRYWTMWKLPMFGCTDSAQVMKELQECKKEYPQAWIRIIGFDNVRQVQCVSFISPKPTGF

SEQ ID NO: 15513 - protein, 109 aa, Nostoc punctiforme
MSIYVGNLSYEVTQDALSTVFAEYGSVKRVQLPTDRETGRLRGFAFVEMSSEDEETKAIESLDGAEWMGRDLKVNKAKPREDRGGGGSFGGNRGGGGGGYNRGGGGGRY

SEQ ID NO: 15514 - protein, 326 aa, Bacteroides thetaiotaomicron VPI-5482
MGTVKCIGILTSGGDAPGMNAAIRAVTRAAIYNGLQVKGIYRGYKGLVTGEIKEFKSQNVSNIIQLGGTILKTARCKEFTTPEGRQLAYDNMKREGIDALVIIGGDGSLTGARIFAQEFDVPCIGLPGTIDNDLYGTDTTIGYDTALNTILDAVDKIRDTATSHERLFFVEVMGRDAGFLALNGAIASGAEAAIIPEFSTEVDQLEEFIKNGFRKSKNSSIVLVAESELTGGAMHYAERVKNEYPQYDVRVTILGHLQRGGSPTAHDRILASRLGAAAIDAIMEDQRNVMIGIEHDEIVYVPFSKAIKNDKPVKRDLVNVLKELSI

SEQ ID NO: 15515 - protein, 413 aa, Bradyrhizobium japonicum USDA 110
MPGAQRAMEEFYRIRRLPPYVFEQVNRAKAAARNAGADIIDLGMGNPDLPAPPHVLEKLKETLGKPRTDRYSASRGIPGLRRAQAGYYARRFGVKLNPDTQVVATLGSKEGFANVAQAITAPGDVILCPNPSYPIHAFGFLMAGGVIRSVPSEPTPQFFEAVERAIVHSIPKPLALVVCYPSNPTAYVASLDFYKDLVAFAKKHEILILSDLAYAEVYFDENNPPPSVLQVPGAMDVTVEFTSMSKTYSMAGWRMGFAVGNERVIAALARVKSYLDYGAFTPVQVAATAALNGPDDCIKEMRDTYRKRRDALVESFGRAGWEIPPPEASMFAWVPLPEAFRSVGSMQFATLMVEKSGVAVSPGVGFGEHGEGYVRIAMVENEQRIRQAARGVRRFLESGIETLHNVVPLANRR

SEQ ID NO: 15516 - protein, 390 aa, Helicobacter pylori J99
MPYSSKVQSLSESATIAISTLAKELKSQGKDILSFSAGEPDFDTPQAIKDAAIKALNDGFTKYTPVAGIPELLKAIAFKLKKENNLDYEPSEILVSNGAKQSLFNAIQALIGEGDEVVIPVPFWVTYPELVKYSGGVSQFIQTDEKSHFKITPKQLKDALSPKTKMLILTTPSNPTGMLYSKAELEALGEVLKDTKVWVLSDEIYEKLVYKGEFVSCAAVSEEMKKRTITINGLSKSVAMTGWRMGYAASKDKKLVKLMSNLQSQCTSNINSITQMASIVALEGLVDKEIETMRQAFEKRCHLAHAKINAIEGLNALKPDGAFYLFINIGSLCGGDSMRFCHELLEKEGVALVPGKAFGLEGYVRLSFACSEEQIEKGIERIARFVKSKG

SEQ ID NO: 15517 - protein, 337 aa, Azotobacter vinelandii
MAPYTFERRELRPDDVALEILYCGVCHSDLHTARNDWGMSYYPIVPGHEIVGRVIETGTQVTGFKAGDYVAVGCMVDSCRECDQCRKGDEQLCRQGPIYTYSGHDRISGEPTQGGYAKHLVVSEAFCLHMPEGLDLAKAAPLLCAGITTYSPLRTWNVGSGSRVGVIGLGGLGHMAVKLAVGLGAEVTVLSRSADKRADALALGAARLLVSADEGAMAEAAGSFDLIIDTVPAKHDLDPYLPLLDVDGTLVIVGQLGPMSDFSTVPLLSGRRRVAGSPIGGIRETQELLDFCAKKNILPDCEMIRMDQINEAFERMEKADVRYRFVIDMASLSAAAA

SEQ ID NO: 15518 - protein, 487 aa, Ralstonia eutropha JMP134
MGKATGFLEFPRQNEGYEAVVKRVKHYKEFVFALSDSEAKIQGARCMDCGIPFCNNGCPVNNIIPDFNDLVYRQDWKSAIEVLHQTNNFPEFTGRICPAPCEAACTLGINELPVGIKSIEHAIIDKAWEEGWVAPQPPKHKTGKTVAVVGSGPAGMAAAQQLARAGHDVTVFEKNDRIGGLLRYGIPDFKMEKTLIDRRIEQMQAEGVTFRAGVMVTDGALPAGIKNYARETISAKDLMDQFDAVVLAGGSEVPRDLPVPGRDLDGIHFALEFLIPQNKEVAGDGENEIRAEGKNVIVIGGGDTGSDCVGTSNRHGATSVNQFELLPQPPEEEDKPLVWPYWPIKLRTSSSHEEGCDRDWSVATKEFIGENGKVTALKACRVEWKDGKMQEVPGSEFILPADLVLLAMGFTNPVGSMLDAFGVDTDARKNAKAATEGERAYHTNVPKVFAAGDVRRGQSLVVWAIREGRQAARSVDAFLMGHTELPR

SEQ ID NO: 15519 - protein, 131 aa, Flaveria palmeri
SNGGRVQCMKVWPPVGKKKYETLSYLPELTEAQLAKEVDYLHRNKWVPCLEFELEHGFVYRENASSPGYYDGRYWTMWKLPMFGCTDSAQVMKELQECKKEYPQAWIRIIGFDNVRQVQCVSFIASKPTGF

SEQ ID NO: 15520 - protein, 539 aa, Arabidopsis thaliana
MAVPFLSSSLQLTPTSPILFTKVTPTPIIHNHRSTCTIPTKPRLRLLRRSAVAGTAVSDQTEGGGDVLLNPEEEKRVEVADYDWTEEWYPLYLTKNVPEDAPLGLTVYDRQIVLYKDGEGTLRCYEDRCPHRLAKLSEGQLIDGRLECLYHGWQFEGEGKCVKIPQLPASAKIPKAACVKTYEVKDSQGVVWVWMSTKTPPNPEKLPWFENFARPGFFDISTTHELPYDHSILLENLMDPAHVPISHDRTDFTAKREDAQPLVFEVTERSNRGFAGTWGREKEGGKGSNLLRFDAPCVLQNNREFEGKDGVKNYFSGLFLCRPTGQGKSMLIVRFGVTKRSPLVSVLPQWFWHQNACKVFEQDMGFLSSQNEVLMKEKVPTKDLYLNLKSSDTWVAEYRKWMDKVGHGMPYHFGHRTISLPKVPPVVEHAPAGLIAALSASYPAKGGIGTMHAPNLANRYFRHIIHCRSCSNVIKSFELWKNILSATAVALTALAILVVSRQWKAVLLGSAALCSAAAYTCLRAINLNTNNFIRTHRRL

SEQ ID NO: 15521 - protein, 131 aa, Flaveria palmeri
SNGGRVQCMKVWPPVGKKKYETLSYLPELTEAQLAKEVDYLIRNKWVPCLEFELEHGFVYRENASSPGYYDGRYWTMWKLPMFGCTDSAQVMKELQECKKEYPQAWIRIIGFDNVRQVQCVSFIASKPTGF

SEQ ID NO: 15522 - protein, 487 aa, Oceanobacillus iheyensis HTE831
MSNKRNTLTTASGAPVGDNQNSITAGHNGPTLLQDFHLLEKLAHFNRERIPERVVHAKGAGAHGYFEVTNDEISKYTKADFLSEKGKRTDMFIRFSTVAGEQGSADTVRDPRGFAVKFYTEEGNYDLVGNNTPIFFIRDAIKFPDFIHTQKRNPQTHLKDKDMVWDFWSLSPESLHQVTYLHSDRGLPATLRHMNGYGSHTFKWVNAEGEAFWVKYHFISEQGIKNLDPALADKIAGENPDYHTEDLFNAIEEGDHPAWKLYVQIMPYEDAKTYKWDPFDVTKIWSKKDYPRIEVGRMVLDRNPENYFAEVEQAAFSPGQFVPGIEASPDKMLQGRLFGYSDAHRYRLGANHHSIPVNRPKNEVNNYQRDGFMSVDGNGGNKPNYEPNSVNGPTEDSEAKINPFEIYGQADSVTYDSDDHYTQAGDLYRLMSADEKDRLVEAFVGHMTPVTKDEIKLRQIEHIYKADAEWGERVAQGLGLQVPESVK

SEQ ID NO: 15523 - protein, 429 aa, Mycobacterium tuberculosis CDC1551
MDNDGTIVDVTTHQLPWHTASHQRQRAFAQSAKLQDVLYEIRGPVHQHAARLEAEGHRILKLNIGNPAPFGFEAPDVIMRDIIQALPYAQGYSDSQGILSARRAVVTRYELVPGFPRFDVDDVYLGNGVSELITMTLQALLDNGDQVLIPSPDYPLWTASTSLAGGTPVHYLCDETQGWQPDIADLESKITERTKALVVINPNNPTGAVYSCEILTQMVDLARKHQLLLLADEIYDKILYDDAKHISLASIAPDMLCLTFNGLSKAYRVAGYRAGWLAITGPKEHASSFIEGIGLLANMRLCPNVPAQHAIQVALGGHQSIEDLVLPGGRLLEQRDIAWTKLNEIPGVSCVKPAGALYAFPRLDPEVYDIDDDEQLVLDLLLSEKILVTQGTGFNWPAPDHLRLVTLPWSRDLAAAIERLGNFLVSYRQ

SEQ ID NO: 15524 - protein, 293 aa, Micromonospora griseorubida
MRGVLLAGGTGSRLWPITQAVSKQLMPVFDKPMIYYPLSTLIMAGVREIMVVTTPEDQPQFTRLLGDGQQWGLSLSYGVQPRPEGIAQAFVIARDFLDGGPAALILGDNIFHGVGLGRKLRGHTNPEGGEIFGYPVADPSAYGVVEFDESGRVLSIEEKPTRPKSRYVVPGLYFYDADVVEIASQLKPSDRGELEITAVNNEYLRRGQLTLTLLDRGTAWLDTGTFGDLVQAGEYVRVIEERQGFKIGCVEEAAWRAGFLSDDELRELAVPLLRTAYGEYLLRLLDWKGESSA

SEQ ID NO: 15525 - protein, 231 aa, Zea mays
MNLGWRCSDRAAGTLPHAVAPPQPVCLTGAEWRADPSGLTILGASRMRSWANRPHSSLLASFLAASWLLVAASPQELHEASGSRILHHTKSHTHEVHCSRERSRAAWKAVDEYLMPFVEKEKYELPSKCRLRPENDMFREQEQHKIHFDVNEWRCGFCKKSFRAEKFIDQHFANRHSNLLDNSQGRCLADLCGALHCDLTMEFKKPKSKCNAAAAARNRHLCESLADSCFP

SEQ ID NO: 15526 - protein, 396 aa, Bacteroides thetaiotaomicron VPI-5482
MNKITMQKDGTLSVPDVPVVPYITGDGVGAEVTPSMQSVVNAAVQKAYGGKRRIEWKEVLAGERAFNETGSWLPDETMKAFQEYLIGIKGPLTTPVGGGIRSLNVALRQTLDLYVCLRPVRWYQGVHSPVKAPEKVNMCVFRENTEDIYAGIEWEAGTPEAEKFYQFLKNEMGVTKVRFPETSSFGVKPVSREGTERLVRAACQYALDHHLPSVTLVHKGNIMKFTEGGFKKWGYELAQREFGDALADGRLVIKDCIADAFLQNTLLIPEEYSVIATLNLNGDYVSDQLAAMVGGIGIAPGANINYKTGHAIFEATHGTAPNIAGKDVVNPCSIILSAVMMLEYLGWKEAAALIEKALEQSFLDARATHDLARFMPGGTSLSTTAFTREIVERIEK

SEQ ID NO: 15527 - protein, 245 aa, Thermoanaerobacter tengcongensis
MNKPIIGIVGNISYETEGVMIGEERIYVMRPYVESVLKAGGVPVVLPIVLDKDTLKKQVEKVDGILITGGQDVNPLLYNEEPIEKQGGITPDRDWYDIEVIKYAYSLKKPILGICRGIQVMNVALGGTLYQDISQIPTAYIKHSQRAKPDLPTHTVEIKEGSRLYNILGKTIAVNSFHHQAVKEVAEGFKIVAQSKDGVIEAIELEKEDYFVVGVQWHPELMAYKGNEKMLEIFKQLVKACLKNE

SEQ ID NO: 15528 - protein, 260 aa, Schizosaccharomyces pombe
MPQNEYIEESIRKHGRRFDHEERKRKKAAREAHDASLYAQKTRGIKAKLYQEKRRKEKIQMKKTIKQHEERNATQRGSDAQTQGAVPTYLLDREQESQAKMLSSAVKQKRKEKAAKYSVPLPQVRGVAEEEMFKVIRTGKSKKNSWKRMITKATFVGDGFTRRPVKYERFIRPMALRQKKANVTHKELGVTMQLPIIGVKKNPQSPTYTQLGVLTKGTVIEVNVSELGLVTSGGKVVWGKYAQITNNPELDGCVNALLLT

SEQ ID NO: 15529 - protein, 161 aa, Vibrio parahaemolyticus RIMD 2210633
MRKVILAVFAALTFSLAAHAAIEVYEFDNLEQEQQFKELGHTLRCPKCQNNTISDSNAELAQDLRHKVYEMTKEGKSKEEIVDYMIARYGNFVTYNPPFTMSTAILWLGPLAVVLGGFGLIVLRSRKSKAKVTANNDEKWDEQKEARLKALLEEENNGDNK

SEQ ID NO: 15530 - protein, 556 aa, Thermoanaerobacter tengcongensis
MEKETLKRYEAWLNDPAISYEDKEKLKKMSPEEIKEAFFMDLEFGTAGLRGIMGLGANRMNFYTVGRATQALANYINKTVEEEKSVAVSYDTRKFSKEFAVESAQILAANGIKVYLFDDFRPTPLLSFAVRFLKATAGIMITASHNPPEYNGYKVYWSNGAQIIPPHDKGIIEEYEKLSFADVKRMSFDEAKDKGFVVMVGKEVDSAYFEKALSYSFGISSKDLKIVYTPLHGTGIKIVPPLLEKVGFDVYIQKEQQIPDGSFPTVSYPNPEFDEAFELALKDARSIDADIVVASDPDADRMGVLVKHKGDYVRIDGNQMGILLLNFLLTMYFEKGMPENPAVIESIVSSKLFAKIARAHGVEVSEVLTGFKWICNEADRLRKEGKTVFFAYEESYGYNVGDFVYDKDSGTPIMVTCEMAAYYKKKGMTLVDALEEIYKKYGYYLEDQLSPVYEGEKGLKKIKGIMERLREKPIESLAGHRLTRVVDYLKGYDRISPSDVLKMEFGEKLIVYVRPSGTEPKIKFYFMAMEMENIEEAKKLLKRAKEELVKVLDLEE

SEQ ID NO: 15531 - protein, 289 aa, Fusobacterium nucleatum subsp. nucleatum ATCC 25586
MKKPIIGISASMIYEEKDELFLGDKYSCVAYSYVDAVYKSWGIPVTLPILKDVSAIREQVKLLDGLILSGGRDVDPHFYGEEPLEKLEAIFPERDVHEMALIRAAIDLKKPILAICRGMQILNVTYGGTLYQDISYAPGEHIKHCQVGSSYQATHSINIDKNSILFKMADKSEIERVNSFHHQALKQVAKGLKVVATAPDGIIEAVERENEDEVFVIGVQFHPEMMFDKSIFARAIFKRFINICIDSRPAEVLLKDEVHHTEEHKEKNIDEKIKEIEDEEKKEFFKGDL

SEQ ID NO: 15532 - protein, 175 aa, Triticum aestivum
SEPAGPAPTNNVNWSLVVADKLELATSLIETAKSKGVKLLLPTDVVVADKFAADAESKIVPATAIPDGWMGLDVGPDSIKTFAEALDTTKTVIWNGPMGVFEFEKFAAGTDAIAKQLAELTGKGVTTIIGGGDSVAAVEKAGLADKMSHISTGGGASLELLEGKPLPGVLALDEA

SEQ ID NO: 15533 - protein, 403 aa, Lactobacillus delbrueckii subsp. lactis
MAKLIVSDVDVKDKKVLVRVDFNVPIKDGVIGDDNRIVAALPTIKYIIENGGKAILLSHLGRIKSDEDKKSLSLAPVAKRLGELLEKPVTFVPSNEGKEVEDAINNMKDGDVVVLENTRFQDIDNDFGKRESKNDPKLGEYWASLGDVFVNDAFGTAHRSHASNVGIATAMKAAGKPVAAGFLLEKEIKFLGNAVANPVHPFVTILGGAKVSDKIGVITNLIPKADHIIIGGGMAYTFLKAQGHNIGKSLVEDDKVEFAKELLEKAGDKLVLPIDHVAATEFNNDAASEVVGQDIPDNEMGLDIGPKTIELFKKTLEGAKTVVWNGPMGVFEMPNFAKGTLEVGRALADLPDATTIVGGGDSTAAAKQLGIAPKLTHISTGGGASLEYLEGKELPGIACVSDK

SEQ ID NO: 15534 - protein, 260 aa, Enterococcus faecalis V583
MKIGFIGAGSMGGAMIKGLLKAEAVKKEHLYVKGGSSGTAEALQKEWGFQLVTDYALFQECKVIFIATGAKVVLPVLQELAPHFSNESLLISVATGHTIQEAQMALGNKEAKVVHAIPNTPVSVNQGVIGVALAPTIEGQTKDLAMELLATLGLVKEIREAQLETFGTVAGCSPAFVDIFMEALGDAAVLEGLPRDLSYEIVAQMIKGTATLALDTKKHPGALKDEVTSPGGSTIRGVVALEKNGFRYAVMDAVQQANHE

SEQ ID NO: 15535 - protein, 574 aa, Enterococcus faecalis V583
MSWEQVYQQWLDEENIPENLKNELKDLNTDPEKCEDAFYAPLEFGTAGMRGILGAGINRMNIFTVRQATEGLARFMDTQDPETKRRGVAIAYDSRHMSPEFAMEAAKTLAKHDIPSFVFESLRPTPELSFAVRYFKAFAGIMITASHNPAAYNGYKVYGEDGGQMPPADADALTKYVRSIENPLKIDVLSDEEVAHSGLINIVGEEVDNAYLKEIKTVTINQELINEMGKELKLVYTPLHGTGKMLGEKALKQAGFEKFVLVPEQAVADPDFTTVKSPNPEEHSAFEYAIRLGEKEGADLLIATDPDADRLGAAVRMPNGDYQVLTGNQLGSIMIHYILEAHQQAGTLPQNAAVLKSIVSSELATAIAEKCNTKMFNVLTGFKFIAEKIQQYEEDHSQTFMFGFEESYGYLVKPFVRDKDAIQALVLLAEVAAFYKKQGKTLYDGLQDIFEEFGYFEEKTISVTMSGIEGSGKIKALMAKCREQAPTEFAGIQVAQTEDFKELTRTFADGQTEQLQTPPSDVLKYHLEDGSWIAIRPSGTEPKIKFYLATKATSSSEASEKIAAFEAVVNELTK

SEQ ID NO: 15536 - protein, 633 aa, Rhodopseudomonas palustris CGA009
MDHYLRWRKRQKLLADFGEFALSNDNLADILTEACRLVGNALGTQRANVLEIEPSKRSLFVRAGVGLDDGIVGKLRLPMREIASERFSPDGSPLDIIHDVHTEPQYDLAAFMEVAGVVALVNVPILLPGRTLYGLLQVESSEPREFSQDDVEFLRTYSTILGPVIDRLNKVRALRDAEERFRLIVEAARDYAIFTTDANDRIVDWLPGAEAVFGWTAAEAKGRSANMLFTAEDRASGADVKEIETARRDGSAPNIRWHAHKGGSRVFIEGSVTSVRGSDGQAHGFLKIGQDVTERRRNEERIRQSEARQRALIEGIPQLVWQASSDGGWIWSSPQWSDFTGLAPMRSLAFGWQDAVHPDDRRTASTAWSRANETGSFETEYRIRHGLTETYRWFAIRAAPVRDSDGAILTWLGTSTDIDDLRRMQQRQEVMVTELQHRTRNLIAVVQSIAEQTMASCGTMEEFRPQFNDRLTALARVQGLLSRSAQEPITIATLVRAALDALGTVDRNRVTISGPNVPLRNSSVQTLALALHELATNARKHGALSILVGRLEVAWEVRKAPDGRHLELAWIEHGRSSEQPDTPGAQNGGYGRKLIERALPYALSATTTFELRDVGVRCTISLPLDTTEAEQAS

SEQ ID NO: 15537 - protein, 228 aa, Rhodopseudomonas palustris CGA009
MRPMPTDDINSRIAELEADNRRLRQLLDKRDAPGELRHRLRSTVAMLRTIIRKSASKRHSLDTYVGHLEDRLDALMRAQAIADEQGAIDFHKLLADELLHYQARDGERVTFAGPDLHLQARAGQVLALAVHELAVNAVEHGALGGDGTIDIRWSVAGAGPAPLLTFVWKETDTAPVAEPSHHGFGTEVLTRTLEYELKAKTDLAFEPDGLRCTIRFPLSERVDGSQAG

SEQ ID NO: 15538 - protein, 518 aa, Lycopersicon esculentum
MDALCAGTAQSVAICNQESTFWGQKISGRRLINKGFGVRWCKSFTTQQRGRGVTSAVLTRDINKEMLPFENSMFEEQPTADPKAVASVILGGGVGTRLFPLTSRRAKPAVPIGGCYRLIDVPMSNCINSGIRKIFILTQFNSFSLNRHLARTYNFGNGVGFGDGFVEVLAATQTPGDAGKMWFQGTADAVRQFIWVFENQKNKNVEHIIILSGDHLYRMNYMDFVQKHIDANADITVSCVPMDDGRASDFGLMKIDETGRIIQFAEKPKGPALKVMQVDTSILGLSEQEASNFPYIASMGVYVFKTDVLLKLLKSAYPSCNDFGSEIIPSAVKDHNVQAYLFNDYWEDIGTVKSFFDANLALTKQPPKFDFNDPKTPFYTSARFLPPTKVDKSRIVDAIISHGGFLRECNIQHSIVGVRSRLDYGVEFKDTMMMGADYYQTESEIASLLAEGKVPIGVGPNTKIQKCIIDKNAKIGKDVVILNKQGVEEADRSAEGFYIRSGITVIMKNATIKDGTVI

SEQ ID NO: 15539 - protein, 500 aa, Escherichia coli K12
MMTEPHVAVLSQVQQFLDRQHGLYIDGRPGPAQSEKRLAIFDPATGQEIASTADANEADVDNAVMSAWRAFVSRRWAGRLPAERERILLRFADLVEQHSEELAQLETLEQGKSIAISRAFEVGCTLNWMRYTAGLTTKIAGKTLDLSIPLPQGARYQAWTRKEPVGVVAGIVPWNFPLMIGMWKVMPALAAGCSIVIKPSETTPLTMLRVAELASEAGIPDGVFNVVTGSGAVCGAALTSHPHVAKISFTGSTATGKGIARTAADHLTRVTLELGGKNPAIVLKDADPQWVIEGLMTGSFLNQGQVCAASSRIYIEAPLFDTLVSGFEQAVKSLQVGPGMSPVAQINPLVSRAHCDKVCSFLDDAQAQQAELIRGSNGPAGEGYYVAPTLVVNPDAKLRLTREEVFGPVVNLVRVADGEEALQLANDTEYGLTASVWTQNLSQALEYSDRLQAGTVWVNSHTLIDANLPFGGMKQSGTGRDFGPDWLDGWCETKSVCVRY

SEQ ID NO: 15540 - protein, 516 aa, Lycopersicon esculentum
MSVATDVRFALLRNNPAALTGTNLKIVKFCNGELMGKKLKYTKFQLRSNVVKPHICMSLTTDIAGEAKLKDLEAKKEDARTVVAIILGGGGGTRLFPLTKRRAKPAVPIGGAYRLIDVPMSNCINSGINKVYILTQFNSASLNRHIARAYNFGNGVTFGDGYVEVLAATQTPGELGKRWFQGTADAVRQFHWLFEDARSKDIEDVLILSGDHLYRMDYLHFVQSHRQSGADITISSLPIDDSRASDFGLMKIDDTGRVMSFSEKPKGDDLKAMAVDTTVLGLSPEEAKEKPYIASMGVYVFKKDILLNLLRWRFPTVNDFGSEIIPASTKEFCVKAYYLFNDYWEDIGTIRSFFEANLALTEHPPRFSFYDATKPIYTSRRNLPPSAIDNSKIVDSIVSHGSFLTNCFVEHSVVGIRSRIGTNVHLKDTVMLGADYYETDAEIASQLAEGKVPLGIGENTRIKECIIDKNARIGKNVVIANSEGVQEADRSSEGFYIRSGITVILKNSTIPDGTVI

SEQ ID NO: 15541 - protein, 277 aa, Corynebacterium sp.
TVPSIVLNDGNSIPQLGYGVFKVPPADTQRAVEEALEVGYRHIDTAAIYGNEEGVGAAIAASGIARDDLFITTKLWNDRHDGDEPAAAIAESLAKLALDQVDLYLVHWPTPAADNYVHAWEKMIELRAAGLTRSIGVSNHLVPHLERIVAATGVVPAVNQIELHPAYQQREITDWAAAHDVKIESWGPLGQGKYDLFGAEPVTAAAAAHGKTPAQAVLRWHLQKGFVVFPKSVRRERLEENLDVFDFDLTDTEIAAIDAMDPGDGSGRVSAHPDEVD

SEQ ID NO: 15542 - protein, 101 aa, Phaseolus vulgaris
MASSMISSPAVTTVNRAGAGAGMVAPFTGLKSLGGFPSRKMNNDITSVANNGGRVQCIQVWPTVGKKKFETLSYLPPLTKQQLAKEVDYLLRKGWVPCLEF

SEQ ID NO: 15543 - protein, 266 aa, Triticum aestivum
MAATPLDSAWEWLITNFSEFQLATVVTFVLHESVFFLSGFPSLLFERFGLFAKYKIQKKSNTSAYQNRCVMRLILYHVCVNLPVMIFSYPAFKFMGLRSSLPLPHWTVIVSQVLFYFILEDFIFYWGHRALHTKWLYKHVHSVHHEYATPFGLTSEYAHPAEILFLGFATVVGPALTGPHLFTLWLWMVLRVLETVEAHSGYHFPWSPSNFLPLYGGSDFHDYHHRVLYTKSGNYASTFVYMDWLFGTDKGYRKTKAIEGEEGKHL

SEQ ID NO: 15544 - protein, 277 aa, Zea mays
LEEDEILAPHTHFCTICGKGFKRDANLRMHMRGHGDEYKSPAALAKPPRDPGAEQEPAKRRYSCPFAGCKRNKLHKSFQPLKTILCVKNHYRRSHCEKSHTCGRCHAKKFSIVADLRTHEKHCGRRDRWVCSCGTSFSRKDKLFAHVALFQGHTRALSSPLEEEPPKACSDQHQTGRAGSHREPEPAKVPAGSVGGGSGSSSSSFVWGASSSGENSALDIKGFVDGCSGDFLSTANFGSFSLSFGPADGFTGEPSSGGSFSMLPPEHFQSAQKKGQN

SEQ ID NO: 15545 - protein, 424 aa, Oryza sativa
MAAAADAPPPPPEVAPPAPAPAPAPAPYQPPRLAVADGAGGGGGGGGKPCRHHAYSRKQKSLGLLCTNFVALYDREDVESVGLDDAARRLGVERRRIYDIVNVLESIGERSCSAFAKHFLAGRAQMLVRRAKNRYTWIGFGGVPAALAKLKVSDDEDDDKLDDAEGDAESEKLSLSQSIDNPSDKPDAPPCKLRSEHRKEKSLGLLTQNFVKLFLTMERNLYLIQIETISLDEAAKRLLGEGHAANNMRTKVRRLYDIANVLSSLNLIEKTQQADSRKPAFRWLGQAKRNEGVTVALPPTKTLPNKRAFGTDLTNIDNKRGKLDSTMENRGKPTQDGGNLFNNLQRQLGQENRSDFVYGPFHPAVARKQEHGNRTVQEKERKSIQDWENLASSFRPQYQNPGELQLSLYIYIAKRMLFQEPILH

SEQ ID NO: 15546 - protein, 522 aa, Bradyrhizobium japonicum USDA 110
MSGLIDIKVPDIGDFKDVPVIEVFVKPGDKVKAEDPLVALESDKATMEVPSPRDGVVKSVVVKVGDKVSEGAVIVQFEGAGAEQAETRPVVSAPPSPVSAPAGVAEVRVPDIGDFKDVPVIEIFVKPGDSVKAEDPLIALESDKATMEVPAPLSGTVREIKVKTGDKVSEGAIILVLATGDASAAANAAAPALAPASQATAAALAVQAAGVDEQAFALAYAGPAVRKLAREMGVDLGKIKGSGNHGRIVREDVEASAKGGAPAAKPQAAAASGGGVGSIDLLPWPKIDFAKFGPVERKELGRIKKISAANLHRNWVVIPHVTTHDEADITELEQFRVKMNKELEKSGVKLSLLPFMVKAAVAALKKFPEFNASLDGDTLVYKNYWHIGFAADTPNGLMVPVIRDADKKSLPEIANEMNALAKLAREGKIKPDQMQGGTFSISSLGGIGGIYFTPIINAPEVAIMGVCKGYWKQHSPDGKTWASRLTLPLSLSWDHRVIDGAAAARFNVYFASVLADLRRVLF

SEQ ID NO: 15547 - protein, 581 aa, Bradyrhizobium japonicum USDA 110
MAQQIEVKVPDIGDFKDVAVIEVMVKPGETVAVDTSLIMVESDKASMEIPSSHAGIVKEVKVRVGDKVSEGSIILVLETAGAAAAPPPAPASKPAATSSAAAPVPASHSGKADIECEMLVLGAGPGGYSAAFRAADLGMKTVLVERYDTLGGVCLNVGCIPSKALLHTASVVDEVKHLPDHGISFGAPQIDLDKLRGFKDGVIKKLTGGLAGMAKARKVEVVTGVGAFLDPHHLEVVTAGGKKTIKFAKAIIAAGSQAVKLPFLPEDPRIVDSTGALLLKSIPKRMLVIGGGIIGLEMATVYSALGARIDVVEMLDGLMQGADRDLVKVWEKMNAKRFDKAMLKTKTVGAKATEAGIEVSFEGEQAPSGSQVYDLVLVAVGRSPNGKKIGAEKAGVAVTDRGFIDVDKQMRTNVAHIFAIGDIVGQPMLAHKAVHEGHVAAEVAHGEKSYFDARQIPSVAYTDPEVAWAGKTEDECKAEGIKFGKSVFPWAASGRAIANGRDEGFTKLLFDTATHRVIGGGIVGTHAGDLISEVCLAIEMGCEPADIGKTIHPHPTLGESIGMAAEVFEGHCTDLPPQKKK

SEQ ID NO: 15548 - protein, 426 aa, Sporosarcina pasteurii
MLLTKEKNGMEIIEERESAVRSYSRSFPTVFEKAKDHLVWDVDGKEYIDFFAGAGSLNYGHNNEKMKTKIMDYVMNDGISHSLDMGTVARAEFLETFNEVILRPRNLDYKVMFPGPTGTNTVESALKIARKVTGRQNIISFTNAFHGMTLGSLSISGNSSIRNGAGVPLTNTISMPYDTFFKNGNAIDYLEQYLEDTGSGVDLPAAMILETVQGEGGINAASFEWLRGIEKLCRRYDILLIIDDVQAGCGRTGTFFSFEPAGIQPDIVCLSKSIGGYGLPLAITLIKPEHDIWEPGEHNGTFRGNNMAIVAATEALSYWKTDDLAKSVQKKSKIIKLRFEQIVEDYPELKATTRGRGFMQGIACGKGKEAYATKICAKAFEKGVIMETSGPSGEVVKFLGALTIDETSLIKGLGILEEATEEVVRQ

SEQ ID NO: 15549 - protein, 546 aa, Mesembryanthemum crystallinum
MAKMETHSKPMSKKLARNLILLAISIIVLTTSSSNPNFSYYLAIFLPIIVYLVHSICFHRAQNSGTTPPGPLALPIFGNWLQVGNDLNHRCLAALAKTYGPMFLLKLGVRNLVVVSNPELACEVLHAHGVEFGSRPRNVVFDIFTGGGQDMVFTEYGDHWRKMRRIMTVPFFTNKVVNNYSPMWEDEMDKVVNDLNHNEKISIKAKHEGFVIRKRLQLMLYNIMYRMMFDEGFESMEDPMFIDATKFNSERSRLAQSFEYNYGDFIPFLRPFLRSYLSKCRDLQKSRLAFFNNYFVEKRRKIMAANGEHHKISCAIDHIIEAQMKGEINAENVLYIVENINVAAIETTLWSMEWALAELVNHPEIQKKIRHEIAMKLEGKPVTESNLEQLPYLQAVVKETLRLHTPIPLLVPHSNLEEAKLGGYTIPKNSKVVVNAWWLANNPEWWRDAEEFRPERFLEEEAGADAAVGGGKVDFRFVPFGVGRRSCPGIILALPILGLVIAKLVSNFEMKPPPGEEKIDVSEKGGQFSLHIAKHSTVVFHPIHAA

SEQ ID NO: 15550 - protein, 425 aa, Streptomyces resistomycificus
MAYDARTTHLLTLSADTSHALDEVARDTAARLARLGGASPAAWCAEAAGGPHSGQRMGVVGRTAGEMADRIGAHLAGEPVREVSVGHADPARRPPVAFLFSGQGAQYAGMGRGLHRTEPVFRAAFDRCAEAARPFTAVPLQDLLDPGAGPAVVHRLAHAALGTFCVNYALAELWRSWGVEPAAVLGFSSGEYAATCWAGVLDPEDAVLLLGTQVTLAERVTDGAMAVVGLGEEAALELLAETGPSVGLAAVISPGEVSLSGRKAELARLVDRLTASGVRTSALPVSSGLHSPLQEPAADELRAVAAGIRTRPPRIPLVSTVTGAGVKGPPAPEHWVRHLSGPVRFLNAVRVLDELGVRAHVEAGPGRALVGLGARCLPGEGRLWLASLGRSTDGTGPMLMALGRLHTAGVPVGWSGVYPGSRSAV

SEQ ID NO: 15551 - protein, 1003 aa, Desulfovibrio vulgaris subsp. vulgaris str. Hildenborough
  unsure (1)..(1003): unsure at all Xaa locations
MRMPRRTFIKLASASAGALAFAGLGQSLAPTVARAAELKIAKAKVTPSVCCFCAVGCGLLVYTDTQTGRSINIEGDPDHPTNEGTLCPKGASIWQTTERSKRVTKVLYRAPGAAAWEEKSWDWALPRIARKIKETRDATFELTNDKGQTVNRTRGIASVGSAAVDNEEGWLMQAMMRALGLVYIESHARIXHSSTVGALAESYGRGAMTNHWIDLKNSDVILIMGSNAAENHPISFKWVTRAQERGATLIHVDPRFTRTSAKADIHAHIRSGTDIAFFGGLIRYIMENDLFFRQYVVDYTNASYIVGADYGFADGLFTGFDAEKGTYNTKKWAFAADENGMTLKDPTLNDPRCVFQLMKAHYARYDRKTVSDVTGISEEQLATLWSTFASTGKPDRAGTILYAMGQCQHTVGVQNIRALSMIQLLLGNIGIAGGGVNALRGESNVQGTTDISLLCDNLSGYLPTPKASWATFDDYVKGTTPVDKDPKSANWWSNRGKYLASYMKSVYPTASHQDGYLWHPKVDDGKITDYSWLQIFERMSKGGFKGAFVWGQNPCAGGANAGKNRKAMETLDWMVVVNLFENESSLFWKGPGVDPAKVKTEVFFLPACMSVEKGGSIANSGRWLQWREPGPKPMGDSRSDGDIVLDLYDEIRKLYREEKGAFPEPVLALDTDYRTDGKYDHHKVAKTLNGKFLTDVTIGDKTYKAGQQVPGFAMLQADGSTTSGCWIFTGCYTDAGNMMARRDRTQTPEQAAIGLFPNWSYAWPANRRILYNRAAVDMTGKPFDPKRAVIAWNGEKWVGDVPDGGWKPGEKLPFIMIREGRGQLFGPGRVDGPFPEHYEPFESPLESHPFSKQRVNPTALAFSHEPKAVRDKRYPFICTTYRVTEQWQSGTMTRNTGWLKEMQPEGFCEISRELAKELGIANGDAVVLESLRGKVQVVAIVTPRLKPFKVMGEVMHEVGIPWQFGWGQHVGKGDSANLLSPSVGDPNTGIPETKVFMVNLRKA

SEQ ID NO: 15552 - protein, 300 aa, Mesembryanthemum crystallinum
NRCFDPSDLIIDTKPSSESLIHTTTVSPGDMQAENNSGWSSCASSSRVSGQLISFGNSDYFDDGKPKSNNKKEETAVVVHDDVGDHVHGGSNYTKYSQQNKVRNNSSKFGSIGLCSQEHVLAERKRREKMTQRFHALSALVPGLKKMDKASILGDAAKYLKQLEEQVKLLEEQTASRTVESVVLVKNSNVQDPNLDHGGNSSSNENSNSSLNNPLLEIEAGACNNNVLIRIHAQKDQDLVRKVLNEIENLHLTTLNFNTIPFGGYAMDITIVAQMDDDFELTIKDVVMHLRLALQQCSNT

SEQ ID NO: 15553 - protein, 167 aa, Zea mays
  unsure (1)..(167): unsure at all Xaa locations
ITMDPTKFRPSSSHDTTVTTTNAGAPVWNDNEALTGGPRGPILLEDYHLXEKVAHFARERIPXERVVHARGASAKAFFEXTHDVTXSLTCADFLRAPXVXTPXVIVRSSTVSPERGSPEEIPDPGGFPVEFYPRGGNWDXLLGNNFPXVFFIPRGIRFPDVIPVVKA

SEQ ID NO: 15554 - protein, 148 aa, Gossypium arboreum
MASKRILKELKDLQKDPPTSCSAGPVAEDMFHWQATLMGPSDSPYAGGVFLVSIHFPPDYPFKPPKVAFRTKVFHPNINSNGSICLDILKEQWSPALTISKVLLSICSLLTDPNPDDPLVPEIAHMYKTDRAKYEATARGWTQKYAMG

SEQ ID NO: 15555 - protein, 162 aa, Triticum aestivum
RIRGRVDLGTVHHELHFTVQEGIDALEEVIYHIETYDVTTIRASTPMFLMSRKIKSLGVKMVLSGEGSDEIFGGYLYFHKAPNKKELHEETCRKIKALHLYDCLRANKATSAWGLEARVPFLDKNFINVAMDLDPECKMIRRDLGRIEKWVLRNAFDDEKKP

SEQ ID NO: 15556 - protein, 442 aa, Cytophaga hutchinsonii
MLKKFAPLIVLLVVCVLALLNPGLPKETITEGLDSGDIAWLLTSAAFVLLMTPGLAFFYGGMVNPKNVISTMLQSFVAMGIISILWVVIGFSMAFGDSFGGFVGDPRTYFMFNGVLEHAPFGTIPFVLFAFFQLKFAVITPALFTGSFSERIRFTSYIIFMILFCLFIYTPIAHWTWHADGFLYKMGVLDFAGGTVVHMSAGCAALAGAIYLGKRKDKNHPTAINVPYILLGTGLLWFGWFGFNAGSAAAANPLAASAFAATNVAAGAAGIAWLFVEAARGKKPSAMGFSIGAVVGLVAITPAAGFVTVSQALFIGSVASMISAAAIVLLAKTSIADDTLDVFPCHGVGGMTGMIMTGLFASTAVNAAVAEQGLFIDGSTTLILKHLLALVIVVAYSLIGSYILLFITDKISPLRVTAEEEELGLDTTQHDEKFVIADLVKK

SEQ ID NO: 15557 - protein, 233 aa, Kluyveromyces delphensis
MFRNNYDGDTVTFSPTGRLFQVEYALEAIKQGSVTVGLRSKGYAVLVALKRNADELSSYQRKIIKCDEHLGLSLAGLAPDARVLSNYLRQQCNYSQLVYNRKLSVEKAGHMLCDKAQKNTQSYGGRPYGVGLLIIGYDNSGPHLLEFQPSGNTLELYGSAIGARSQGAKTYLERTMDEFLEIDDADALIKAGVEALRQSLKDETLNTDNLSIAIVGKDVPFTIYDGESVAKYL

SEQ ID NO: 15558 - protein, 132 aa, Triticum aestivum
  unsure (1)..(132): unsure at all Xaa locations
MAAVARAIVCEAAPQRVAPPSQQQQQQKQTRRDKILLQPRLSTLRSYGADGSGAVTRKRLPGEALEEGGVGGAPPFFASLADYIESSRKSQDFETISGRLAMVXFAAAVAVEATTGDSLFKKLDTVQIEEAT

SEQ ID NO: 15559 - protein, 540 aa, Corynebacterium efficiens YS-314
MGVFPGGFCMPAGIPPISRWHPRTINPGAPVPVAWWGQSHLSRKDTPMTDPLDVSALLTKVPTGLLIGDTWRDSSDGSTYTVDNPATGQTIATLASATSDDALAALDAACEVQSSWARTPARERSEILRRAFDLINERAEEFATLMTLEMGKPIAEARGEVTYGNEFMRWFSEEAVRTYGRHGQTPEGTHRMLTVRKPVGPCLLITPWNFPLAMATRKVAPAIAAGCTMVLKPARLTPLTAQYFAQTMLDAGLPAGVLNVVSGASASAISNPIMEDDRLRKVSFTGSTPVGKQLLKKAADKVLRTSMELGGNAPFIIFEDADLDLAVEGAMGAKMRNIGEACTAANRFLVHDSIAQDFSRRLAERFNQLTLGNGLDDGVTVGPLVEAKARENVAKLVDDAVTEGATVLTGGTAGEGEGYFYQPTVLVDVAPGARILTEEIFGPVAPIITFTTEEEAIQLANDTEYGLASYLFTRDYARMFRISDQLEFGLLGFNSGVISNAAAPFGGVKQSGIGREGGTEGIDEYTQLQYIGIRDPYTDR

SEQ ID NO: 15560 - protein, 495 aa, Zea mays
MTMDPTKFRPSSSHDTTVTTTNAGAPVWNDNEALTVGPRGPILLEDYHLIEKVAHFDRERIPERVVHARGASAKGFFESTHDVTSLTCADFLRAPGVRTPVIVRFSQVIPEPGSGRTIRDARGFAVKFYTREGNWDLLGNNFPVFFIRDGIKFPDVIHAFKPNPRSHVQEYWRVFDFLSHLPESLHTFFFLFDHVGVPSDYRHMEGFGVNTYTFVSAAGKAQYVKFHWKPTCGERSILTDEEARVGGRNHSHTQDLYDSIAAEGSFPEWTLYVQVMDPAQQEQYDFDPLDDTKTWPEDLLPLRPVGRLVLDRNVDNFLNENEQLAFGPGLVVPGIYYSDDKMLQCRVFAYADTQRYRLGPNYLMLPVNAPRCGTHNNHYDGAMNLMHRDEEVDYYPSRHARRCGRAAPTPLPPRPVAGRREKATIRKPNDFKQPGERYRSWDADRQDRFVKAIRRLARTPKRQPELRSIWIDLLAKVDASLGMKIATRLNMKANM

SEQ ID NO: 15561 - protein, 242 aa, Thermoanaerobacter tengcongensis
MSDFAKYLAEFFGTMILIWLGDGVVANVVLNKSKGQNSGWIVITAGWGFAVMVGAYTVGWLSGAHLNPAVTIGLATIGKFSWSLVPGYIIAQVLGAFVGAIIVYLMYIDHFAATEDPTAKLGTFATIPAIRNLGKNFITEAFGTAMLLIGILGITNSNNPIGGMGPLLVGLLVWAIGLSLGGPTGYAINPARDFGPRLAHAILPIPGKRDSDWGYGLIVPIFGPIVGGIIGAWIYQLIMSVH

SEQ ID NO: 15562 - protein, 741 aa, Ustilago maydis 521
MVGRVGSESTATAAAGGTKRKRCTGWLYVLSLALLLAACPIGTALAATCGLHNVVAPASNVPSESLHETLLLKPLGDGRVLASFEFTLTSTSSSTSSFRLLPRALLQPIQHFGVSEVHLALNSGRWRYDSWGSPVTTLKQRRDYTSERWAHHPGYASSHGRVKLGEESVGTGAEVWARFDSHDAKREGWKGLTSALAGLFCTSLDALDERQTVEPHYAFSSSTNANASAQTLHALLPTEGVCTENLTPFLKLLPCKASAGLATLLNPLSLFSATFHGLAVHVTRLAQSDHAVDADAHHPGWNVVLTFTSVFSPALTRDVSIRDWSISSLFGRTIQSSCPLADSSLVRILKPADPETSAKYQVEPLPPLPACSKPGDEHHCDTSHGAKIGKRNGYHFLPVLEEQDEVTDELASSGLLAFETENERNEYEQRLHKRWAHYLDSVDGEYLYDLSSVSKDRGFSGLDVKMSWPHETRFTYPSTNNRTNVGGGAVNQVVHVERTLIGSGQERSTLQVTLTNTDARLAQRVLWYETLGYFVSPYLHTLRHSIELLPSAASADELLRSVADYQDPVEHITYQPTTSRRGGTSPFVIEAVVRIPASSTVVFTLELKKSFVPYSQHPPDAHRGFDLNPAIVIPLMPLDPRDSLTRHRPRHPANRIPPPRSDLYTSLLNLFPSLSPPPSSSIPIIPSKSHPRIYSPPSLLHLPTPDFSFVYTNIIFTSTVIALFFGSSLNTLLRTFTDFVF

SEQ ID NO: 15563 - protein, 363 aa, Pisum sativum
CINSGINKVYILTQFNSASLNRHIARAYNSGTGVTFGDGYVEVLAATQTPGEQGKKWFQGSADAVRQFHWLFEDARSKDIEDVLILSGDHLYRMDYMDFVKDHRESGADITLSCLPMDDSRASDFGLMKIDNKGRILSFSEKPKGADPKAMQVDTTVLGLSKDEALEKPYIASMGVYVFKKEILLNLLRWRFPTANDFGSEVIPASAKEFYMKAYLFNDYWEDIGTIRSFFEANLALTEHPSKFSFYDAAKPMYTSRRNLPPSTIDNSKVVDSIISHGSFVNNAFIEHSVVGIRSRINSNVHLKDTVMLGADLYETEEEVAALLAEGRVPVGIGENTKIKDCIIDKNARIGKNVTIANSEGVP

SEQ ID NO: 15564 - protein, 783 aa, Streptomyces coelicolor A3(2)
MRRLGDGDPVGVPPGVQHWGNIGVYRLLGRLGTGGMGHVYLARSDRGRTVAVKLVREELAALEEFRERFRHEVESARRVGGHWTAPVLDADTEAAVPWVATGYVAGPSLQQVVGHDHGALPERSVRTLGAGLAHALQDIHAAGIVHRDLKPSNVLVTIDGPRVIDFGIARALQTVADGGLTRTGALVGSPGFMAPEQVRGDRVTPACDVFCLGSVLAYAATGKLPFGSANSGAHALMFRIAQEEPDLEGVPEGIADLVRDCLRKDPAARPALADVLERTGAQDTVTGGRSRDPWLPSALVAQLGRHAVQLLDTENPEDPAHPAGGPDPSRTPGAAAATPGDALPDGASAPAAGVRPEGAGHGGVAPGSAGPGGGGRGGVGPGGAGPGGVGPGGVGPGGVGPGGVGSGGVGPGGAGPGGVGPGGAGSGGVGPGGAGSGGVGPGGAGSGGVGPGGAGSGSAGPDGADPGGVGPGGAWPGGGGARGGGSGGEGAAQGADPASGGPPPPREPGSGGGAPLNHLPTQVAGRHPATPPPGAHGHAQPPAPGYDPAPAWHASQPGHQHPYDGGGGLGPTPPQGPPPPYGPPHEPVRNGRSTALLIVVALVVALGAGGSVYALMRGDDDGRAGGDPTPTRSTGAPQDPGTGASGSSGATGGRSPSTGPAADEGTVPTGYLGDWSTSIDNASGTHPRTLSIVPGEVGDTVLTLVADGPTDTGTYHCVFEAALTAEPGSGGPLRLGPSAVRTGPASSCAPGGPSTVTLRPDGSLERTSDDTGESLLYTRAQGY

SEQ ID NO: 15565 - protein, 398 aa, Streptococcus agalactiae NEM316
MAKLTVKDVDLKGKKVLVRVDFNVPLKDGVITNDNRITAALPTIKYIIEQGGRAILFSHLGRVKEEADKEGKSLAPVAADLAAKLGQDVVFPGVTRGAKLEEAINALEDGQVLLVENTRFEDVDGKKESKNDEELGKYWASLGDGIFVNDAFGTAHRAHASNVGISANVEKAVAGFLLENEIAYIQEAVETPERPFVAILGGSKVSDKIGVIENLLEKADKVLIGGGMTYTFYKAQGIEIGNSLVEEDKLDVAKDLLEKSNGKLILPVDSKEANAFAGYTEVRDTEGEAVSEGFLGLDIGPKSIAKFDEALTGAKTVVWNGPMGVFENPDFQAGTIGVMDAIVKQLGVKSIIGGGDSAAAAINLGRADKFSWISTGGGASMELLEGKVLPGLAALTEK

SEQ ID NO: 15566 - protein, 292 aa, Dianthus caryophyllus
MATSTATNHFLKTLAISITTQKPTSIFPPKSLVLEKPTTNNSQFHYKTHHLCCMCCLQTSDFEQESSPNAVIDEEENVEKTEAAVNWEDASEPQPSSGFGSEDGFSEPSEDVKLYVGNLPFDVDSEKLANMFDAAGVVEIAEVIYNRETDRSRGFGFVTMSTVEEADKAVEMFHSYELNGRLLTVNKAAPRGSRPEKAPREFCPLLSESYVGNLPWDVDNDRLEQLSSEHGKVLSARVVSDRETERSRGFGFVTMASETEMNDATLGALDGESLEGRPIRVNVAEERPRRTF

SEQ ID NO: 15567 - protein, 222 aa, Triticum aestivum
  unsure (1)..(222): unsure at all Xaa locations
MASPSVFAGIAQGPEDPILGVTVRDNKGPSPVRVNLGGGAYXRTEEGKPLGLNVGRRAEQMLIQNESRVKEYLAITGLADFNKLSAKLIFGADSPAIQENRVATVQCLSGTGSLRVGGEFLARHYHERTIYIPQPTWGNHPKVFTLAGLTARSYRYYDPATWGLDFPGTLWKTSIKVPXGAIVLLHAWGHNPNCVDPTLEQWETXRQANGDQKHWLPFFDRA

SEQ ID NO: 15568 - protein, 778 aa, Thermoanaerobacter tengcongensis
MKGIIMAGGEGSRLRPLTFDIPKPLVPVANKPAIKHIVEHLHKYGVGELAVTLFYLPHKIKDYLLEEYGNEIKFYTEEKPLGTAGSVKNAKDFLKETFIVMSGDVITDVNIKEVYDFHRKKGSKVTLVLKKVEIPLEYGVVIVDETGKIVKFLEKPSWGEVFSDTVNTGIYIIEPEILEFIPEDRPFDFSKDLFPLLLKENIPMYGYITEGYWCDIGNTAQYLSSHFDVLEGKLDLGYRKILLEEGKVIGKKVLMSSGAKLILPLIIGNEVVIEENAVVGPNVVIGRGTIIKKGSHVKNSVLWEDVYVGENSELNGAVVCNKVRIDSNARILENAVIGEGVRIKAFAEIRPDVKVWPFKVIEEEAVVSKDVVWGNGRKNLSFGYRGIRGIFNEEIGPYQAVEIGEAFGDLMKGKVIVGSDEELASSLIADLIAYGLAFSGCEVLKSNSFLLPALRVGIRLRSAKGGVYVERIGEEIRILFLDGEGMDIDRNLEKKIENKLKIHDISRRKIEDIKPIKEVDVEGDYKDYLVKNRADSFKIKVKPHDEWTKKVLLQIKGEQILDDQNYHLKVKLKKNGEEIELYDEKDRKFDEDEVNYLKMLIAREKGLKKVVLPFNSSKYLAEFAEELAVETVVGKISPRDLMRSMTNLEEGRQVYFDLSFDGINFLLEVIEYVRLKNKRLSEIKDSFPLRYKTVKRIRCDWKDKGRIIRELFETRKNNVTFLDGLRFEEDEGWVLVVPDSELPFCNVYVEALTPEKAERLFTIYEKKIQDILLKNDGK

SEQ ID NO: 15569 - protein, 838 aa, Ustilago maydis 521
MKIKLSSSALVLASLSLVYAGDDTCAPPAAANATQAVPVPQSFPVPTYSQAPLAGCYCTCTSGWNPANGPWGGNGAGWGSGSGSGSGSGSGSGSGSGSGFGSGSGSGSGSGSGSGSGTKSPGSGSGSHDGGSNGGGGSHGGGSNGGGNGGGNGGGNGGGNGGGNGGGNGGGNGGGNGGGNGGGNGGGNGGGNGGGNGGGNGGGNGGGNGGGNGGGNGGGNGGGNGGGNGGGNGGGNGGGNGGGNGGGNGGGNGGGNGGGNGGGNGGGNGGGNGGGNGGGNGGGNGGGNGNGNSGIGNGIGNGNGNIGNNNGNNNGNNNSGIANGVGNGNLNLGDNNGNNNGNNNSGIANGVGNGNLNLGDNNGNNNGNNNSGIGNGVGNGNLNPGNNNGNNNGNNNSGILDGALNGNGNIGDNNGNKNGNGNSGILDGTGNGNLNLGDNNGNKNGNNNSGSLDGSGNGNANLGDNNGNQNGNNNSGSGNGDLSGNGNLGSNNGNQNGNGNSGSGNGLVDGNLNAGSNNGDKNGNSNSGLLNGVVDGNANLGSGNGNENGNKNPGSVNGVADGNLNAGSDNGNKNGNENSGLANGVADGNANLGSENGNNNGNKNDGIANGVGTGNANLGSDNGNDSGNNNSGIGNGVAGGNLNAGSGNGDKNGNNNSGLLNGVGDGNLNLAKDAGSNNGNNNDGALNGILNGNANVGGGKIGSNNGNSNTGSGNGSGTGNGNVSLGDNTVGSDNGNGGTGSGQGTGNGNLNLILGSGNKVGSGNQGSGNGNGNIIIGNDQTVGSNQSGSGHGNGNIIIGTGLGLDIGLPGTDNFHIHARRARPLGQRLWTGNTVNVVA

SEQ ID NO: 15570 - protein, 407 aa, Neurospora crassa
MANSPLVARPTDALQPPKSLPPSSGGTPSGGLPRSARGQQIAALARPTMDLMEQMNEDEKNKYIKGKKLGEGTYANVYLGHSRLDSSTQVAIKKIKVQKEYQDGIAPDAIREMKYLQKLRGHANIIILHSVFSSKDQNLNLVLEYLPLGDLEMLIRDVDHVRYGAADIKAWMGMLTRAIWWCHDNYVLHRDIKPNNLLIAADGEVKLADFGLARSFADPGVRMTANVITRWYRPPELLFGARHYSGAVDIWSVGLVFAELIIRAPYLPGNSEVEQIALICREIGTPTEENWPGVTQLKEYTVPSDVVPVAGKDKYMGRFGAVGSDGVDLLTKTLVLDPRRRITAREMLEHRWWKADPKPTPKHDLPKKTAGAEEKLAADLKRRNGMVEDDDVRGSKVARKLDFGTAR

SEQ ID NO: 15571 - protein, 238 aa, Oryza sativa
MDRTSAVPGRVSDPGSAWFGGGERSSSAGPGRNVRLIATAVAAFVSVLGLALFLHLYVCHVRRRNRRRAAEAAALATVNAGAPPKQVGLDPSAIAALPTAAYGKVAGGDAAGGTTECAICLGAMQEADAVRVLPACRHVFHVACIDKWLASSSSCPVCRAGVEPPPPPPSTAAARCVHEKQDAEKEEAAAGSSAPVRVLGASLMKMLSRERPSPRRQPGVHAVEMEDLESQLPRPQQQ

SEQ ID NO: 15572 - protein, 169 aa, Listeria welshimeri
VPERVVHARGAGAHGKFVTKKSMKKYTIANFLQEEGTETEVFARFSTVIHGQHSPETLRDPRGFSVKFYTEEGNYDFVGNNLPVFFIRDAIKFPDVIHSLKPDPRTNIQDGNRYWDFFSLSPEATTMIMYLFSDEGTPASYREIRGSSVHAFKWINEEGKTVYVKLRWI

SEQ ID NO: 15573 - protein, 258 aa, Saccharomyces cerevisiae
MGSRRYDSRTTIFSPEGRLYQVEYALESISHAGTAIGIMASDGIVLAAERKVTSTLLEQDTSTEKLYKLNDKIAVAVAGLTADAEILINTARIHAQNYLKTYNEDIPVEILVRRLSDIKQGYTQHGGLRPFGVSFIYAGYDDRYGYQLYTSNPSGNYTGWKAISVGANTSAAQTLLQMDYKDDMKVDDAIELALKTLSKTTDSSALTYDRLEFATIRKGANDGEVYQKIFKPQEIKDILVKTGITKKDEDEEADEDMK

SEQ ID NO: 15574 - protein, 386 aa, GIBBERELLA ZEAE PH-1
MFPSLFFTSILAAGISAQSIPDPALTANRAFQHLGCVAIRPGTFPRQFNLGQTGCASTCSSNGNIIGFRGNSCVCDRLDLSDRPITYRVVKVDNALCTQWCDPADKSKGTCGGASVQGWPIYDLYKRNNAQIVYENFPSATPTPMSSAYPVQTGGPKPGDVWHECPPHVVNCPYRNKCPSGNCHPVHKPIVKPCYGCSHNGTGNWTAPTCPPGGCGNGGKPAPAPVPVPVPNPPCKDCNNGNDGNGGNGGNGGNGGNGGNGNNEGNGGNGGNGGSGGNGGDGGSGGNGGSGGNGGNGGNGGNGGNGNNGGNGGSGGNGGSGGNGGNGGSGGDGSSGNSSDGQNGSDGNGNGNGGDTPPVIVNSAIKIQSASFISFFLTFSLTFILL

SEQ ID NO: 15575 - protein, 455 aa, Medicago sativa
MASSSLLSSVPSHSASLSILDTNIKGKLKLGINNFSNLRSSGRICMAVATNVSRFEGIPMAPPDPILGVSEAFKADTNDVKLNLGVGAYRTEELQPYVLNVVKKAENLMLERGENKEYLPIEGLAAFNKATAELLLGADNPAIKQQRVATVQGLSGTGSLRLGAALIERYFPGAKVLISNPTWGNHKNIFNDARVPWSEYRYYDPKTVGLDFEGMIEDIKSAPEGTFVLLHGCAHNPTGIDPTPEQWEKIADVIQQKNHFPFFDVAYQGFASGSLDEDAASVRLFESRGMEVLVAQSYSKNLGLYAERVGAINVISSSPESATRVKSQLKRLARPMYSNPPVHGARIVANIVGTPALFDEWKAEMEMMAGRIKTVRQALYDSISSKDKSGKDWSFILKQIGMFSFTGLNKSQSDNMTNKWHIYMTKDGRISLAGLSLAKCEYLADAIIDSYHNVS

SEQ ID NO: 15576 - protein, 99 aa, Glycine max
  unsure (1)..(99): unsure at all Xaa locations
MDATAAAAGGGDGTQRTLNPYVTGNSVIXMKYKDXXIMACDTGASYGSTLRYKSVERIKAVGKHSLIGGSGEFSDFQEILRYXDELXLNDHMWDDGNSL

SEQ ID NO: 15577 - protein, 455 aa, Triticum aestivum
MASALSAPAASAVAAARCKVFGGGRNDGRAGCRVGVARKNTGHITMALAVDASRFEGVPMAPPDPILGVSEAFKADTSDLKLNLGVGAYRTEELQPAVLNVVKKAEKLMLEKGENKEYLPIEGFAAFNKATADLLLGADNPVIKQGRVATLQSLSGTGSLRLAAAFIQRYFPDAKVLISSPTWGNHKNIFNDARVPWSEYRYYDPRTVGLDFEGMIADIQAAPEGSFVLLHGCAHNPTGIDPTPEQWEKLADVIEEKKHMPFFDVAYQGFASGSLDEDASSVRLFVKRGLEVFVAQSYSKNLGLYAERIGAINVICSAPEVADRVKSQLKRLARPMYSNPPIHGAKIVANVVGDPTMFGEWKEEMEQMAGRIKNVRQKLYDSLTEKDQSGKDWSFILRQIGMFSFTGLNRPQSDNMTDKWHIYMTKDGRISLAGLNLAKCEYLADAIIDSFHNVN

SEQ ID NO: 15578 - protein, 475 aa, Glycine max
  unsure (1)..(475): unsure at all Xaa locations
MTVFLATRLVLRRSPPLLWRRSFSRAAVEAEKDTVAVPSLPLFDYSPPPYAGPTADEILAKRREYLSPSILHFYKNPVNIVEGKKQYLFDEKGRRYVDAFGGIATVCCGHCHPDVVEAIVNQTKKLQHSTVLYLNNAIADFAQALTSKLPGNLKVVFFTNSGTEANELAILIARLYTGCHDIISLRNAYHGNAAGTMGATAQSIWKFNVVQSGVHHAVNPDPYRGIFGSDGEKYARDVQDIINFGTSGNVAAFISEAIQGVGGIIELAPGYLPAVYNTIKKTGGLFIADEVQAGFGRTGSHFWGFEAHNVVPDIVTMAKGIGNGIPLGAVVTTPEIAEVLTRRSYFNTFGGNPXCTAAGLAVLKVIEKEQLQQNAFVVGSYLKERLTALKDKYELIGDVRGRGLMLGVELVTDRELKTPAKGETLHVMDQMKELGVLIGKGGYYGNVFRITPPLCFTKEDADFVADAMDLTLSRM

SEQ ID NO: 15579 - protein, 503 aa, Hordeum vulgare subsp. vulgare
MDLRVAAPASVAAAARRGALGCARVRPLQGRRQCRPSVRVSVATTESAAAAAAVSASADEDAETTNPRTVVAVILGGGAGTRLFPLTKRRAKPAVPIGGAYRLIDVPMSNCINSGINKVYVLTQFNSASLNRHLFRAYNFSNGVGFGDGFVEVLAATQRPGSEGKRWFQGTADAVRQFAWLFDDAKSKDIEDVLILSGDHLYRMDYMDFVQSHRQRDAGISICCLPIDDSRASDFGLMKIDDTGRVISFSEKPKGADLKAMQVDTTLLGLPKEEAEKKPYIASMGVYIFKKEILLNLLRWRFPTANDFGSEIIPAAAREINVKAYLFNDYWEDIGTIKSFFEANLALAEQPSKFSFYDASKPMYTSRRNLPPSMISGSKITDSIISHGCFLDKCRVEHSVVGIRSRIGSNVHLKDTVMLGADFYETDAERGDQLAEGKVPIGIGENTSIQNCIIDKNARIGKNVTIANTEGVQESDRTSEGFHIRSGITVVLKNSVIADGLVI

SEQ ID NO: 15580 - protein, 391 aa, Stenotrophomonas maltophilia
MSNATSQDRALALATLAIHGGQSPDPSTGAVMPPIYATSTYAQSSPGEHQGFEYSRTHNPTRFAYERCVASLEGGTRGFAFASGMAASSTVIELLDAGSHVVAMDDIYGGSFRLFERVRRRTAGLDFSFVDLTDLAAFEAAITSKTKMVWIETPTNPMLKIVDIAAVTAIAKRHGLIVVVDSTFASPMLQRPLELGADLVLHSATKYLNGHSDMVGGMVVVGDNAELAEQMAFLQNSVGGVQGPFDSFLALRGLKTLPLRMKAHCANALALAQWLEKHPAVEKVIYPGLASHPQHELAGKQMAGYGGIVSIVLKGGFEAAKRFCEKTELFTLAESLGGVESLVNHPAVMTHASISVARREQLGISDALVRLSVGVEELGDLQVDLERALGG

SEQ ID NO: 15581 - protein, 457 aa, Escherichia coli K12
MQKYISEARLLLALAIPVILAQIAQTAMGFVDTVMAGGYSATDMAAVAIGTSIWLPAILFGHGLLLALTPVIAQLNGSGRRERIAHQVRQGFWLAGFVSVLIMLVLWNAGYIIRSMENIDPALADKAVGYLRALLWGAPGYLFFQVARNQCEGLAKTKPGMVMGFIGLLVNIPVNYIFIYGHFGMPELGGVGCGVATAAVYWVMFLAMVSYIKRARSMRDIRNEKGTAKPDPAVMKRLIQLGLPIALALFFEVTLFAVVALLVSPLGIVDVAGHQIALNFSSLMFVLPMSLAAAVTIRVGYRLGQGSTLDAQTAARTGLMVGVCMATLTAIFTVSLREQIALLYNDNPEVVTLAAHLMLLAAVYQISDSIQVIGSGILRGYKDTRSIFYITFTAYWVLGLPSGYILALTDLVVEPMGPAGFWIGFIIGLTSAAIMMMLRMRFLQRLPSAIILQRASR

SEQ ID NO: 15582 - protein, 270 aa, Oceanobacillus iheyensis HTE831
MNQTIAFMGAGSLAEAIISGITKAQIVPNENILVTNKSDINRLKRIEEGYDIQGNTNKQEVIKQADIIILAMKPKDAATSLSFMKEYIRPDQMVISVIAGLTTERMEAILEKEIPVIRTMPNTSALIGYSATAIAKGSYVTDEQLAVAEQLFQTVGMTTIIKEKDMHTVTAIAGSGPAFFYYMVEAMEQAAVEAGLDAEMASQLIAQTVIGAGKMLELSGDPITLRKNITSPGGTTEAGVQQLMSEDFASIVQSCVQRARERSMELAAKS

SEQ ID NO: 15583 - protein, 175 aa, Triticum aestivum
MAPAVMASSATSVAPFQGLKSTAGLPVSRRSSSAGLSSVSNGGRIRCMQVWPIEGIKKFETLSYLPPLSTEALLKQVDYLIRSKWVPCLEFSKVGFVFREHNSSPGYYDGRYWTMWKLPMFGCTDATQVLNEVEEVKKEYPDAYVRVIGFDNLRQVQCVSFIAFRPPGCEESGKA

SEQ ID NO: 15584 - protein, 459 aa, Shewanella oneidensis MR-1
MKHSGFQAKRLIQLALPVLIAQVTQTMMGFIDTVMAGRVSAVDMAAVAVGTSLWLPAILFVQGLLMAFTPLFAHHNGANNQKAIQPLAFQGAYLALIGGLGVMVFLASAPLVLSHMNLEPQLYNLTIGYIDGILWGAPAFVLYQVLRGCSEGISYTLPTMVIGFVGLAVNIPANYIFIYGHFGIPAMGGAGCGIATALVFWAMLIAMAIYMQFHKKFAALAPFSQFHRPDFATMKKMTKLGLPIAMALFFEVSLFAIIALLLAPLGATVVASHQIALNFSAIVFMLPLSIGIAVSIRIGYYLGRDRADISAVVAKVGLLLALSLALSTAILTVLFRFQIAELYNSDPEVVVLAGSLMLMAALYQLSDSVQVVAAGALRGYKDTRSAFYITLFSYWGIGMSLGYTLAYTDFIVPAMGAHGFWTGLIAGLTSAALLFFIRLRYIQKHRVHLSLIEGDSVHH

SEQ ID NO: 15585 - protein, 556 aa, Phytophthora erythroseptica
MINDTPAWKALAEHAAEIKSTHLRELLNDDARNAAMRTEQQGIYLDFSRQNATSKTLDSLFELAETAELKKKLQAIASGEHVNATEDRAVMHMALRAPKTEKIVVDGHDVVPDVHEVLDAIRAFTSNVRDGKFVGATGKQLKNVISIGIGGSHLGSEFVFESLRYEPVAKAAAEGRILRLLANVDPVDVARATSGLNPEETLVVVVSKTFTTAETMLNARTLRKWLVDDLTKKGSSEAGAVAKHMVAASSAVPLVQQFGIDRANIFGFWDWVGGRYSVTSAVGILPLALQYGFDITEKFLAGAHATDKHLLETPLRNNLPVIMGLLGVWNSSFLGHSSRALLPYSQALLRFAAHIQQVDMESNGKRVTVEGVDLPFQAGEVNFGEPGTNGQHSFYQLIHQGRVVPCDFLGFCESQNPVQLAGEPVSNHDELMSNFFAQPDALARGKSIEDLRAEGVPEKLQNHKLFPGNRPSISLLFKKLDAFSTGQLLALYEHRTVVQGAIWGINSFDQWGVELGKVLAKQVRAQLSASRTENAPVKGFNSATTSMLEAYLAHKA

SEQ ID NO: 15586 - protein, 462 aa, Bradyrhizobium japonicum USDA 110
MAEFDVDLFVIGGGSGGVRAARIAAGHGARVMIAEEYRMGGTCVIRGCVPKKLFVIGSHVRHEIEDAAGFGWTIPSMSFDWATLIANKDKEIARLEAAYTTNVEKSGAQIVKSRAVIEDKHTVRLLENDRKITARYILIATGGAPNHGASIPGIEHVISSNEAFHLKTLPKRIVIQGGGYIALEFAGIFAGYGSDVTVIYRGDNILRGFDEDVRTHVRSEMEKQGITILTGCTVAKVDRHGEEFTTHLSNGSSVASDQVMFAIGRHPSVANLGLEKACVAINPKNGGIAVDHFSKSSVDSIYAIGDVTHRHNLTPVAIREGHAFADTVFGKREVRVDHAYIPTAVFSQPEVGTVGLTETEARAQFSHVDIYKTTFRPIKATMSGRDTRVLMKLVVDGTSDRVLGCHIVGDAAAEITQAVAIAVKMKATKADFDATIALHPTAAEELVTMRTPTARHVRQAAE

SEQ ID NO: 15587 - protein, 845 aa, GIBBERELLA ZEAE PH-1
MVAPKRPNRSHTPKKGFSASQLPKKPAKANQSILSFFKKAEKTETSLFLGEAPATAETEDLYSADDADNSTRHNEADSPNKRRKLSQEPEQKIKPEASVKVEEVLVAKECPSPTKSDQEPQRKPTKPKIKTPFVDSDSEDESDDEAKAINNKSEKTGQCTELSPHKQVRTDGLTKDHEKKETDTRTPALKQEDSTYQHFDNLGDIPDEEFPDLNDLEGEEMRVMRLMREQARLEAEEAGISIEDLAEDPLDYDSMTESCPICNGSLEGISVDEATRHVNSCLDGHSIPLPKKEKTTPEKTSPAKPIPTPEVESKEVATRFARAAVPRPGQANPLEIIGPDSAPKTAFSKLMSSNAEDSAWQEAAAAENASRGKQAYERTCPFYKIMPGFSICVDAFRYGAVQGCKAYFLSHFHSDHYIGLTARWCHGSIYCSKVTGSLVKNQLRTAAKWVVELEFDKPYDIPGTEGATVTMIPANHCPGSSLFLFEKTMKQGANSRVQRILHCGDFRACPAHVKHPLLKPDIVDSISGKIKQQKIDICYLDTTYLNPKYSFPPQNDVIKACADLCGSMSPDPNCKDDIWEKAGGQGTLAVSKFFPNTKYDENDKLDTKKKPPQRLLVICGTYSIGKERICISIAKALKSKIFATPGKIKICKQLDDPELSALLTSDPLEAQVHMQMLMEIRAETLQEYLNSYKPHFSRIVGLRPSGWNFRPAGKSFGANTPPGSIHTQQILHDSNWRTRFGYKDFVPQRGSTKEAMCFGVPYSEHSSFRELAMFLMTLRIEKVVPTVNVGSEQSRKRMKGWIDRWLSERRRAGLVIPLIEGEDNGQVAEKELWDGKPGTAGKAFW

SEQ ID NO: 15588 - protein, 395 aa, Zea mays
  unsure (1)..(395): unsure at all Xaa locations
MQSAAAFRPCPTRLLVSSPCRPLLSARPLRASAAGAVATRSSAVGPRGLGLGLLPASPDRDGKCRQRQVSCSAAGDAVAGPXAEEGGGLMKTLWLGSLFGLWYLFNIYFNIYNKQVLKVFPYPINITEVQFAVGTVAALFMWITGIIKRPKISGAQLVAILPLAIVHTMGNLFTNMSLGKVAVSFTHTIKAMEPFFSVILSAIFLGELPTIWVVSSLLPIVGGVALASLTEASFNWAGFWSAMASNVTFQSRNVLSKKLMVKKEESLDNLNLFSIITVMSFFLLAPVTFFTEGVKITPTFLQSAGLNVNQVLTRCLFAGLCFHAYQQVSYMILAMVSPVTHSVGNCVKRVVVIVTSVLFFRTPVSPINSLGTAIALAGVFLYSQLKRLKPKPKTA

SEQ ID NO: 15589 - protein, 556 aa, Phytophthora erythroseptica
MINDTPAWKALAERAAEIKSTHLRELLNDDARNAAMRTEQQGIYLDFSRQNATSKTLDLLFELAETAELKKKLQAIASGEHVNATEDRAVMHMALRAPKTEKIVVDGHDVVPDVREVLDAIRAFTSNVRDGKFVGATGKQLKNVISIGIGGSHLGSEFVFESLRYEPVAKAAAEGRILRLLANVDPVDVARATSGLNPEETLVVVVSKTFTTAETMLNARTLRKWLVDDLTKKGSSEAGAVAKHMVAASSAVPLVQQFGIDRANTFGFWDWVGGRYSVTSAVGILPLALQYGFDITEKFLAGAHAMDKHLLETPLRNNLPVIMGLLGVWNSSFLGHSSRALLPYSQALLRFAAHIQQVDMESNGKRVTVEGVDLPFQAGEVNFGEPGTNGQHSFYQLIHQGRVVPCDFLGFCESQNPVQLAGEPVSNHDELMSNFFAQPDALARGKSIEDLKAEGVPEKLQNHKLFPGNRPSISLLFKKLDAFSTGQLLALYEHRTVVQGAIWGINSFDQWGVELGKVLAKQVRAQLSASRTENAPVKGFNSATTSMLEAYLAHKA

SEQ ID NO: 15590 - protein, 257 aa, Streptomyces virginiae
MTDRQGLLTDRIALITGASSGIGAAQRGLFAREGAAVVVTARREERLAGLVDELRAQGARAAYVVADVTRSEDAVRAVEFTVERFGRLDAAFNKRRHGAGRTPLHLMDDPVYDDIMDTNVRGVFNCLRPEIAAMLASGAGGSIVNTSSTGGLVATPVAAPYVVSKHAVLGLTKGPAAEYGAHGIRVNAIAPGTTRSEMVADWFAQNPDAEELLHRATPQPRTAEPQEIAEAAAWLCSERASFVTGSTLVVDGGFTIL

SEQ ID NO: 15591 - protein, 556 aa, Phytophthora erythroseptica
MINDTPAWKALAEHAAEIKSTHLRELLNDDARNAAMRTEQQGIYLDFSRQNATSKTLDLLFELAETAELKKKLQAIASGEHVNATEDRAVMHMALRAPKTEKIVVDGHDVVPDVHEVLDAIRAFTSNVRDGKLVGATGKQLKNVISIGIGGSYLGPEFVFESLRYEPVAKAAAEGRNLRFLANVDPVDVARATSGLNPEETPVVVVSKTFTTAETMLNARTLRKWLVDGLTKKGSSEADAVAKHMVAASSAVPLVQQFGIDRANIFGFWDWVGGRYSVTSAVGILPLALQYGFDITEKFLAGAHAMDKHLLETPLRNNLPVIMGLLGVWNSSFLGHSSRALLPYSQALLRFAAHIQQVDMESNGKRVTVEGVDLPFQAGEVNFGEPGTNGQHSSYQLIHQGRVVPCDFLGFCESQNPVQLAGEPVSNHDELMSNFFAQPDALARGKSIEDLKAEGVPEKLQNHKLFPGNRPSISLLFKKLDAFSTGQLLALYEHRTVVQGAIWGINSFDQWGVELGKVLAKQVRAQLSASRTENAPVKGFNSATTSMLEAYLAHKA

SEQ ID NO: 15592 - protein, 265 aa, Oryza sativa
MGIGASDELLGTFVPIAVYWLYSGLYLALDGVERLDVYRLHPREEEAAKNVVSRGTVVRGVLVQQAFQVAVSLTLFAVIGDESDIEQKQPSALVILLQFAIAMFVMDTWQYFMHRYMHINKFLYKHIHSKHHTLVVPYSFGALYNHPLEGLILDTIGGALSFLVSGMTPRTSIFFFSFATIKTVDDHCGLWLPGNILHALFNNNSAYHDIHHQLYGNKYNFSQPFFVIWDKILGTYMPYSIEHRKGGGFESRPVKLNIAEQTKTD

SEQ ID NO: 15593 - protein, 439 aa, Azotobacter vinelandii
MGGLLFGYDTGIIGVALLGLSQDFVLNDTLKQFVTGAIIFGALFGCLLTGPISDRIGRRRTIIGVGLVFALGSLLSALSPSVGFLVVSRFLLGLSAGSSTQIIPVYIAEVAPPQHRGKLVVLFQLMVMTGITVAYFTGFALGEHWRWMFGLGVVPALILLAGMAILPESPRWLLVRGREAAALSVLTHVRGDAHWAARELEEIKTVSREPQGTWRDLRLPWIRPAVIVGGAIAMFSQITGVNAMIYYAPTILTQAGFSTDTAVLATGSSTILVVLMTWFGSVLVDRIGRRRYLLWLIPGSIAALIGMGLLFQSGGPTTTLEQWLVVLCLAGYLMLNCGGFGVCIWLINSEVYPLFIRGKGASVGAFSHWFFDLLVTLTTLSLVTALGAANTFWMYAAISTGALLFIWRYVPETRGKSLEQIEHELREHRFYPFQQKTEH

SEQ ID NO: 15594 - protein, 556 aa, Phytophthora infestans
MINDTPAWKALAEHAAEIKSTHLRELLNDDARNAAMRTEQQGIYLDFSRQNATSKTLDLLFELAETAELKKKLQAIASGEHVNATEDRAVMHMALRAPKTEKIVVDGHDVVPDVHEVLDAIRAFTSNVRDGKLVGATGKQLKNVISIGIGGSYLGPEFVFESLRYEPVAKAAAEGRNLRFLANVDPVDVARATSGLNPEETLVVVVSKTFTTAETMLNARTLRKWLVDDLTKKGSSEADAVAKHMVAASSAVPLVQQFGIDRANIFGFWDWVGGRYSVTSAVGILPLALQYGFDITEKFLAGAHAMDKHLLETPLRNNLPVIMGLLGVWNSSFLGHSSRALLPYSQALLRFAAHIQQVDMESNGKRVTVEGVDLPFQAGEVNFGEPGTNGQHSFYQLIHQGRVVPCDFLGFCESQNPVQLAGEPVSNHDELMSNFFAQPDALARGKSIEDLKAEGVPEKLQNHKLFPGNRPSISLLFKKLDAFSTGQLLALYEHRTVVQGAIWGINSFDQWGVELGKVLAKQVRAQLSASRTENAPVKGFNSATTSMLEAYLAHKA

SEQ ID NO: 15595 - protein, 556 aa, Phytophthora infestans
MINDTPAWKALAEHAAEIKSTHLRELLNDDARNAAMRTEQQGIYLDFSRQNATSKTLDLLFELAETAELKKKLQAIASGEHVNATEDRAVMHMALRAPKTEKIVVDGHDVVPDVHEVLDAIRAFTSNVRDGKLVGATGKQLKNVISIGIGGSYLGPEFVFESLRYEPVAKAAAEGRNLRFLANVDPVDVARATSGLNPEETLVVVVSKTFTTAETMLNARTLRKWLVDDLTKKGSSEADAVAKHMVAASSAVPLVQQFGIDRANIFGFWDWVGGRYSVTSAVGILPLALQYGFDITEKFLAGAHAMDKHLLETPLRNNLPVIMGLLGVWNSSFLGHSSRALLPYSQALLRFAAHIQQVDMESNGKRVTVEGVDLPFQAGEVNFGEPGTNGQHSFYQLIHQGRVVPCDFLGFCESQNPVQLAGEPVSNHDELMSNFFAQPDALARGKSIEDLKAEGVPEKLQNHKLFPGNRPSISLLFKKLDAFSTGQLLALYEHRTVVQGAIWGINSFDQWGVELGKVLAKQVRAHLSASRTENAPVKGFNSATTSMLEAYLAHKA

SEQ ID NO: 15596 - protein, 237 aa, Zea mays
  unsure (1)..(237): unsure at all Xaa locations
MAGADVDVGTELRLGLPGGGADAAKAAKRGFEDTIDLKLKLPTAGMEEAAAAAAAKPEPAAEKAKRPADAPAADAEKPPAPKAQAVGWPPVRSYRRNVMTVQSVKSKKEEEPEKQQSAANAGGNGSAFVKVSMDGAPYLRKVDLKMYNSYTELSVALKKMYPXSILPGNNMNEGKLVDPVSGADVVTTYEDKDGDWMLVGDVPWEMFVESCRRLRIMKSSEAIGLAPRTKDKCKNRS

SEQ ID NO: 15597 - protein, 582 aa, Pisum sativum
MALFTVSRIQTTPFDGQKPGTSGLRKKVKVFVQPHYLENFVQASFNALTEGKVRGATLVVSGDGRYYSEQAIQIITKMAAANGVRRIWIGQNGLLSTPAVSAVIRERVGVDGSKATGSFILTASHNPGGPNEDFGIKYNMENGGPAPEGITNKIYENTTTIKEYLIAPDLPNVDITTVGVTNFTGPEGPFDIEVFDSASDYIKLMKSIFDFESIRKLLTSPKFSFCYDALHGVAGAYAKRIFVDELGAQENSLINCVPKEDFGGGHPDPNLTYAKELVARMGLGKSEPEGEVPEFGAAADGDADRNMVLGKRFFVTPSDSVAIIAANAVEAIPYFSAGLKGVARSMPTSAALDVVAKHLNLKFFEVPTGWKFFGNLMDAGLCSVCGEESFGTGSDHIREKDGIWAVLAWLSILAYKTKDNLESKLVSVEDIVRQHWATYGRHYYTRYDYENVDAGAAKELMAHLVKLQSSLPEVNEIIKGASSDVSKVVHGDEFEYNDPVDGSISSHQGIRYLFEDGSRLIFRLSGTGSEGATIRLYIEQYEKDPSKIGRLSHEALAPLVEAALKLSKMEEFTGRSAPTVIT

SEQ ID NO: 15598 - protein, 753 aa, Escherichia coli K12
MSQHNEKNPHQHQSPLHDSSEAKPGMDSLAPEDGSHRPAAEPTPPGAQPTAPGSLKAPDTRNEKLNSLEDVRKGSENYALTTNQGVRIADDQNSLRAGSRGPTLLEDFILREKITHFDHERIPERIVHARGSAAHGYFQPYKSLSDITKADFLSDPNKITPVFVRFSTVQGGAGSADTVRDIRGFATKFYTEEGIFDLVGNNTPIFFIQDAHKFPDFVHAVKPEPHWAIPQGQSAHDTFWDYVSLQPETLHNVMWAMSDRGIPRSYRTMEGFGIHTFRLINAEGKATFVRFHWKPLAGKASLVWDEAQKLTGRDPDFHRRELWEAIEAGDFPEYELGFQLIPEEDEFKFDFDLLDPTKLIPEELVPVQRVGKMVLNRNPDNFFAENEQAAFHPGHIVPGLDFTNDPLLQGRLFSYTDTQISRLGGPNFHEIPINRPTCPYHNFQRDGMHRMGIDTNPANYEPNSINDNWPRETPPGPKRGGFESYQERVEGNKVRERSPSFGEYYSHPRLFWLSQTPFEQRHIVDGFSFELSKVVRPYIRERVVDQLAHIDLTLAQAVAKNLGIELTDDQLNITPPPDVNGLKKDPSLSLYAIPDGDVKGRVVAILLNDEVRSADLLAILKALKAKGVHAKLLYSRMGEVTADDGTVLPIAATFAGAPSLTVDAVIVPCGNIADIADNGDANYYLMEAYKHLKPIALAGDARKFKATIKIADQGEEGIVEADSADGSFMDELLTLMAAHRVWSRIPKIDKIPA

SEQ ID NO: 15599 - protein, 351 aa, Corynebacterium efficiens YS-314
MQLVPQLLFALAHGLKDIPYFRWGTGFGQTPAGRVVSMSLSIKEHVNAVKTVVVPAAGMGTRFLPATKTVPKELLPVVDTPGIELIAEEAAKLGATRLAVITAPNKAGVLAHFERFTELEATLEERGKTDQLQKVRRAAGLIDAVPVTQEHPLGLGHAVGLAESVLDADEDVVAVMLPDDLVLPFGVMERMAQVRAEFGGSVLCAVEVADDEVSNYGIFRVENADDNGADQDVKRVTGMVEKPAVEDAPSNLAATGRYLLDRSIFDALRRITPGAGGELQLTDAIALLIDDGHPVHIVVHRGKRHDLGNPGGYIPACVDFGLDHPVYGPQLRRALAQIMVDHGVVDASAIR

SEQ ID NO: 15600 - protein, 250 aa, Glycine max
KSLGVKMVISGEGSDEIFGGYLYFHKAPNKEEFHQETCRKIKALHKYDCLRANKSTFAWGLEARVPFLDKEFIRVAMNIDPECKMIKKEEGRIEKWALRRAFDDEEHPYLPKHILYRQKEQFSDGVGYGWIDGLKAHAEKHVTDRMMLNAANIFPFNTPTTKEAYHYRMIFERFFPQNSARLTVPGGASVACSTAKAVEWDAAWSNNLDPSGRAALGVHISAYENQNNKGVEIEKIIPMDAAPLGVAIQG

SEQ ID NO: 15601 - protein, 497 aa, Pseudomonas putida KT2440
MYTLEFWQQRASDLYLPAHALIDGKPVNAQDGATFAAINPATNNVLAQVAACGHAEVDLAVASARRAFEQGPWPRMAPGERKKVLLRLAELIMAHREELALLDSLNMGKPVMDAYNIDVPGSAHVFAWYGEALDKLYDQVAPTAANALATITREALGVVAAVVPWNFPLDMAAWKLAPALAAGNSVVLKPAEQSPFSALRLAQLALEAGVPEGVLNVVPGLGEQAGQALGLHPDVDCLVFTGSTQVGKYFMQYSAQSNLKQVWLECGGKSPNLVFDNCQDLDLAAEKAAFGIFFNQGEVCSANSRLYVQRAIHDEFIERLQAKARQWLPGNPLDPASRAGAIVDAGQTGRIEAAIVRAGQEGARLVCGGRRLTIEGSDNYIEPTIFAGVEGRMSLAREEVFGPVLAVSAFDTEEEAVRLANDSIYGLVASVWSDDFNQVHRVARALKAGTVSVNTVDALDVTVPFGGGKQSGFGRDLSLHSFDKYSQLKTTWYQLRG

SEQ ID NO: 15602 - protein, 271 aa, Bradyrhizobium japonicum USDA 110
MFGESSYGGGRKRKMRKPVVGVIGNAHRVENRFQVQMVGERNLRAVAEVSGGLPVMFAGSPDITDIGALLDTVDGIVLTGARANVHPTRFNVDPCEKHEPYDIHRDEVALALSVACVARGIPLFGICRGLQEMNVAFGGSLHPEIREIPGRMNHRMPRLENGEIHPDPTVVFADRHDVDLTPGGAFARLLGCERIRVNSLHGQGILDPGKRVLIEGVAEDGTIEAIRIAEAPTFALGVQWHAEYDPQRNPINRKLFEAFGAALVERQRATA

SEQ ID NO: 15603 - protein, 638 aa, Azotobacter vinelandii
MSEIIRVPDIGGDGEVIELLVKTGDLIEVEQGLVVLESAKASMEVPSPKAGVVKSVSVKLGDKLKEGDAIIELEPAAGAAAAPAEAAAVPAAPTQAVDEAEAPSPGASATPAPAAASQEVRVPDIGSAGKARVIEVLVKAGDQVQAEQSLIVLESDKASMEIPSPASGVVESVAIQLNAEVGTGDLILTLRTTGAQAQPTAPAAAAAASPAPAPLAPAAAGPQEVKVPDIGSAGKARVIEVLVKAGDQVQAEQSLIVLESDKASMEIPSPAAGVVESVAVQLNAEVGTGDQILTLRVAGAAPSGPRARGSPGQAAAAPGAAPAPAPVGAPSRNGAKVHAGPAVRQLAREFGVELAAINSTGPRGRILKEDVQAYVKAMMQKAKEAPAAGAASGAGIPPIPPVDFAKYGEIEEVPMTRLMQIGATNLHRSWLNVPHVTQFESADITELEAFRVAQKAVAEKAGVKLTVLPLLLKACAYLLKELPDFNSSLAPSGQALIRKKYVHIGFAVDTPDGLLVPVIRNVDQKSLLQLAAEAAELAEKARSKKLGADAMQGACFTISSLGHIGGTAFTPIVNAPEVAILGVSKASMQPVWDGKAFQPRLMLPLSLSYDHRVINGAAAARFTKRLGDLLADIRAILL

SEQ ID NO: 15604 - protein, 810 aa, Yersinia pestis KIM
MLMNNNKTPLTGSLSRREFIQTSAVVTGAAAIAGSIALPFSVHAAASEHAPTAAEESIKYSACLVNCGSRCPLKVHVKNGEIIKIANEAIYDDSTFGLHQIRPCLRGRSVRWKTYNPDRVKYPMLRVGKRGEGKFKRISWDEATTIVADNLKKTIVQYGNEAIYYQYGTGSTGANLQGRNACKRMLSLIGGYLDQHGTYSTAQINTVMPYVYGNLDETLLDEIKNSDLVVMFGHNLAETRMSGGGQYIETVQALGQSRAKVIIIDPRMTDSVTTLNAEWIPIFPGTDAALVAALGHVLIKENLTDERFLQQYCVGWDATTLPSSAPANGSYKDYILGLGADETEKTPEWASEITGISPTRIIQLARELGNARAAWISQGWGIQRTANGEQASLSIMMLPLMTGNIGRAGTNTGAWGGNVKYPVPGFSIPNPVKTAIPCFMWTDAIFRGTEMTAKNAHVKNKEKLDTNIKFLWNYASNVIANQHSDLNKTNTILQDESLCEFILVWENHMTNSAKYADLLLPDVTSVESNDLIDNSYASGAYHYVTRMQNTIEPLWECRPSYDVLAEIATKLGVGDAFTEGHTQQEWIEISYNKMRDNNPALPPFSDTHNKGIIDRIFADSSQYIALKDFRDDPLNNPLKTPSGKIEIYSEALATLAHEWQLTPGDRITAVAEYCPTPEGVSDQETLKSYPLQMTGFHVKGHTHSTYYNVAMLREAVPHQFWMNPIDAQARGIQQGERVEIFNSRGRIHIAVKITERVLPGVIAVPQGAWRNLNKDGIDVGGCINTLTTQRPSPLAKGNPQHTNLVEVKRA

SEQ ID NO: 15605 - protein, 322 aa, Schizosaccharomyces pombe
MSSLEQLKATGTVVVSDTGDFESIAKYKPQDATTNPSLILAASKKPQYAALVDAAVDYAKAKGGSINSQIEIAFDRLLIEFGTKILAIVPGRVSTEVDARYSFDTQTTIEKARHLIKLYEAEGIGRERVLIKIASTYEGIQAAKQLEEEGIHCNLTLLFSFVQAVACAEANVTLISPFVGRILDFYKAKNNRDYTAQEDPGVVSVSNIFNYYKKFGYKTIVMGASFRNVGEIKELAGVDFLTISPALLEQLNNSTDAVPKKLDASKASSLNLEKVSYLTDEPKFRFDFNNDEMAVVKLSTGIAAFAKDADTLRTILKAKLEA

SEQ ID NO: 15606 - protein, 203 aa, Poa pratensis
MNPEYDYLFKLLLIGDSGVGKSCLLLRFADDSYLESYISTIGVDFKIRTVEQDGKTMKLQIWDTAGQERFRTITSSYYRGAHGIIIVYDVTDQDSFNNVKQWLNEIDRYASDNVNKLLVGNKCDLTDKKVVSYETAKAFADEIGIPFMETSAKNALNVEQAFMAMSASIKDRMASQPAANNARPATVQIRGQPVEQKTSCCSS

SEQ ID NO: 15607 - protein, 142 aa, Schizosaccharomyces pombe
MSDYEEDEAFGMDGAVMEEEVDELEMIDENGQSQQGVSHPGEPSTTVITEDVASSKTAQSGKAVAKEDRTTTPYMTKYERARILGTRALQISMNAPVLVDLEGETDPLQIAMKELAQKKIPLLVRRYLPDGSYEDWSVAELI

SEQ ID NO: 15608 - protein, 203 aa, Poa pratensis
MNPEYDYLFKLLLIGDSGVGKSCLLLRFADDSYLESYISTIGVDFKIRTVEQDGKTMKLQIWDTAGQERFRTITSSYYRGAHGIIIVYDVTDQDSFNNVKQWLNEIDRYASDNVNKLLVGNKCDLTDKKVVSYETAKAFADEIGIPFMETSLKNALNVGQAFMAMSASIKDRMASQPAANNARPATVQIRGQPVEQKGSCCSS

SEQ ID NO: 15609 - protein, 243 aa, Triticum aestivum
SGAQLVAILPLAIVHTMGNLFTNMSLGKVAVSFTHTIKAMEPFFSVLLSAIFLGEFPTVSGVASLLPIVGGVALASLTEASFNWIGFWSAMASNVTFQSRNVLSKKLMVKKEESLDNLNLFSIITVMSFFVLAPVTFFTEGVKITPTFLQSAGLNVNQVLTRSLLAGLCFHAYQQVSYMILAMVSPVTHSVGNCVKRVVVIVTSVLFFRTPVSPINSLGTAIALAGVFLYSQLKRLKPKPKTP

SEQ ID NO: 15610 - protein, 499 aa, Nostoc sp. PCC 7120
MTTETKLQGNSQNENLLDNATEEQSSKEENIFQWTKQWYPVAVVEFLDPSRPHAMQLLGKDIVLWRDGSSQWRCFEDFCPHRLAPLSEGRVEADGTLLCAYHAWRFDAEGNCVSIPQSKDEQTAAKNCESQKSCAVVYPTQERQGLLWVWAEAGEQAKVESQLQTPRIVPELEDNSGKVIKSPWNFRDLPYGWDYFMENVSDPAHVPVSHHGIIGDRYQDAKFYDMIPIRHISTQDGFAFEIQPTQGNTVQAIHDFQPPCYMRIASTSEDGGQLILALYATPTRPGWCRHIGCQVFVKNPQGKKPQGLSFFGLPLPVWLVHVLASLFLHQDMVFLHYQEKIIAQRRNGKWLNAVYTPNPQDKMVITLRQWWENRAGGGIPWAEGYSSDIPPAEKDKQKLFDVWTTHTQHCTVCQDALKNINRLTVLAYISAAVCLFLAVILDARSVAMQAALGASIFTVPPVEFWLALGGGILLAVVGYQLKRFSRLFYVYEFEHSRND

SEQ ID NO: 15611 - protein, 510 aa, Saccharomyces cerevisiae
MPTSGTTIELIDDQFPKDDSASSGIVDEVDLTEANILATGLNKKAPRIVNGFGSLMGSKEMVSVEFGKKGNEKKSNLDRLLEKDNQEKEEAKTKIHISEQPWTLNNWHQHLNWLNMVLVCGMPMIGWYFALSGKVPLHLNVFLFSVFYYAVGGVSITAGYHRLWSHRSYSAHWPLRLFYAIFGCASVEGSAKWWGHSHRIHHRYTDTLRDPYDARRGLWYSHMGWMLLKPNPKYKARADITDMTDDWTIRFQHRHYILLMLLTAFVIPTLICGYFFNDYMGGLIYAGFIRVFVIQQATFCINSLAHYIGTQPFDDRRTPRDNWITAIVTFGEGYHNFHHEFPTDYRNAIKWYQYDPTKVIIYLTSLVGLAYDLKKFSQNAIEEALIQQEQKKINKKKAKINWGPVLTDLPMWDKQTFLAKSKENKGLVIISGIVHDVSGYISEHPGGETLIKTALGKDATKAFSGGVYRHSNAAQNVLADMRVAVIKESKNSAIRMASKRGEIYETGKFF

SEQ ID NO: 15612 - protein, 464 aa, Saccharomyces cerevisiae
MGQILSNPVIDKESHSGADSLTAFGLCAMQGWRMSMEDSHILEPNVLTKSDKDHIAFYGIFDGHGGAKVAEYCGNKIVEILQEQKSFHEGNLPRALIDTFINTDVKLLQDPVMKEDHSGCTATSILVSKSQNLLVCGNAGDSRTVLATDGNAKALSYDHKPTLASEKSRIVAADGFVEMDRVNGNLALSRAIGDFEFKSNPKLGPEEQIVTCVPDILEHSLDYDRDEFVILACDGIWDCLTSQDCVDLVHLGLREGKTLNEISSRIIDVCCAPTTEGTGIGCDNMSIVVVALLKEGEDVAQWSDRMKSKAHRTSVRSFADKRRRVFSYYDFSKCNDEQVFAITTKKPQDKFTRDHEAAVASVTAADNDDPMDIDDTDADTDAENLDPSSQSKSKTSGPIDLASLEALLGATGGVKTDSNGNKVTYTLPQSALAQLLQTMGHDPASSHPENDSNTDHKAGRSHLQ

SEQ ID NO: 15613 - protein, 556 aa, Phytophthora infestans
MINDTPAWKALAEHAAEIKSTHLRELLNDDARNAAMRTEQQGIYLDFSRQNATSKTLDLLFELAETAELKKKLQAIASGEHVNATEDRAVMHMALRAPKTEKIVVDGHDVVPDVHEVLDAIRAFTSNVRDGKLVGATGKQLKNVISIGIGGSYLGPEFVFESLRYEPVAKAAAEGRNLRFLANVDPVDVARATSGLNPEETLVVVVSKTFTTAETMLNARTLRKWLVDGLTKKGSSEADAVAKHMVAASSAVPLVQQFGIDRANIFGFWDWVGGRYSVTSAVGILPLALQYGFDITEKFLAGAHAMDKHLLETPLRNNLPVIMGLLGVWNSSFLGHSSRALLPYSQALLRFAAHIQQVDMESNGKRVTVEGVDLPFQAGEVNFGEPGTNGQHSFYQLIHQGRVVPCDFLGFCESQNPVQLAGEPVSNHDELMSNFFAQPDALARGKSIEDLKAEGVPEKLQNHKLFPGNRPSISLLFKKLDAFSTGQLLALYEHRTVVQGAIWGINSFDQWGVELGKVLAKQVRAQLSASRTENAPVKGFNSATTSMLEAYLAHKA

SEQ ID NO: 15614 - protein, 403 aa, Haemophilus ducreyi 35000HP
MSIEILTPVLPESVADATVATWHKNIGETVKRDEVLVEIETDKVVLEVPAPNDGLLTEIIQPTGSSVVPKQLLGKLSTIQAGDMAQITAKQPPQRQTTEPRTDTHNDIDSQGPSIRRLLAEHNIEAHAIQGSGVDGRITREDIQQFLATQSSQQVASTDLTDSLNTIAYEDRSEKRVPMTRLRKRIAERLLEAKNSTAMLTTFNEVNMQPIMQLRKQYGEKFEKQHGVRLGFMSFYIKAVVEALKRYPEINASIDGEDVIYHNYFDISIAVSTPRGLVTPVIRDCDKLSMAEIEKAIKLFADKGRDGKLTVEELTGGNFTITNGGVFGSLMSTPIINPPQSAILGMHAIKDRPIAMNGEVVIRPMMYLALSYDHRLIDGKESVGFLVSIRDLLEDPTRLLLEI

SEQ ID NO: 15615 - protein, 503 aa, Panax ginseng
MAIRIPTRQLFIDGEWREPAKKNRIAIINPATEQIIGNIPAATSEDVDIAVEAARRALARNGGSDWASASGAYRAKYLRAIAAKITERKSELAKLETLDCGKPLEEAAWDIDDVAACFEYNADLAEALDGKQKSPISLPMETFKSYILKEPIGVVGLITPWNYPMLMATWKVAPALAAGCAAILKPSELASVTCLELGEVCKEVGLPPGILNILTGLGPEAGAPLASHPHVDKIAFTGSTATGSKIMTAAAQQVKPVTLELGGKSPILVFEDVDLDKAAEWTIFGCFWTNGQICSATSRLLVHESIAAEFLDKLMKWTKNIKISDPLEEGCRLGPVVSGGQYEKVMESISTAKKEGATILCGGARPKHLEKGFFIEPTIISDVTTSMQIWREEVFGPVLCVKTFRTEDEAIELANDTRYGLGGAVISNDLERCERVTKALQSGIVWINCSQPCFCQAPWGGKKRSGFGRELGEWGLDNYLSVKQVTQYVSDEPWGWYQSPSKL

SEQ ID NO: 15616 - protein, 153 aa, Nicotiana clevelandii
MKMIVLRSSDGETFEVEESVALESQTIKHMIEDDCADTSIPLPNVTSKILAKVIEYCKRHVDAASKTEDKAVEDDLKAFDADFVKVDQSTLFDLILAANYLNIKSLLDLTCQTVADMIKGKTPEEIRKTFNIKNDFTPEEEEEVRRENAWAFE

SEQ ID NO: 15617 - protein, 439 aa, Azotobacter vinelandii
MSNPSTSIQHVAAREILDSRGNPTVEAVVTLAGGATGVASVPSGASTGSREALELRDGALRYKGKGVMKAVDNVNGAIRERVVGLDALDQRAVDQAMLELDGTDNKAILGANAILAVSLATARAAAAARGLPLYAHLAELYGSPGEYSLPVPMMNILNGGEHADNNVDLQEFMIQPVGAASFKEALRIGAEVFHTLKQVLAERGLSTAVGDEGGFAPSLSSNEEALVVIQAAVERAGYVLGQDITLALDCAASEFYHDGQYRLAGEGKTFDSRGFADYLAGLCERYPIVSIEDGLDESDWAGWAYLTEKLGQKVQLVGDDLFVTNPKILREGIEQGIGNSILIKFNQIGSLSETLEAIRLAQQAGYTAVISHRSGETEDTTIADLAVATRAGQIKTGSLCRSDRVGKYNQLLRIEEALKGKAPYDASALLKRRCCGGKA

SEQ ID NO: 15618 - protein, 410 aa, Sinorhizobium meliloti
MTINATVKEAGFRPASRISSIGVSEILKIGARAAAMKREGKPVIILGAGEPDFDTPDHVKQAASDAIHRGETKYTALDGTPELKKAIREKFQRENGLAYELDEITVATGAKQILFNAMMASLDPGDEVVIPTPYWTSYSDIVQICEGKPILIACDASSGFRLTAQKLEAAITPRTRWVLLNSPSNPSGAAYSAADYRPLLDVLLKHPHVWLLVDDMYEHIVYDAFRFVTPARLEPGLKDRTLTVNGVSKAYAMTGWRIGYAGGPRALIKAMAVVQSQATSCPSSVSQAASVAALNGPQDFLKERTESFQRRRNLVVNGLNAIEGLDCRVPEGAFYTFSGCAGVARRVTPSGKRIESDTDFCAYLLEDSHVAVVPGSAFGLSPYFRISYATSEAELKEALERISAACKRLS

SEQ ID NO: 15619 - protein, 491 aa, Oryza sativa
MDPCKFRPSSSFDTKTTTTNAGAPVWNDNEALTVGPRGPILLEDYHLIEKVAHFARERIPERVVHARGASAKGFFECTHDVTDITCADFLRSPGAQTPVIVRFSTVIHERGSPETIRDPRGFAVKFYTREGNWDLLGNNFPVFFIRDGIKFPDVIHAFKPNPRSHVQEYWRVFDFLSHHPESLHTFFFLFDDVGIPTDYRHMDGFGVNTYTFVTRDAKARYVKFHWKPTCGVSCLMDDEATLVGGKNHSHATQDLYDSIAAGNFPEWKLFVQVIDPEEEERFDFDPLDDTKTWPEDEVPLRPVGRLVLNRNVDNFFNENEQLAFGPGLVVPGIYYSDDKMLQCRVFAYADTQRYRLGPNYLMLPVNAPKCAHHNNHYDGAMNFMHRDEEVDYYPSRHAPLRHAPPTPITPRPVVGRRQKATIHKQNDFKQPGERYRSWAPDRQERFIPLRRRVAHPKVSPELRAIWVNYLSQCDESLGVKIANRLNVKPSM

SEQ ID NO: 15620 - protein, 426 aa, Bradyrhizobium japonicum USDA 110
MSDRLPGFSTLAVHAGAQPDPTTGARATPIYQTTSFVFNDADHAASLFGLQAFGNIYTRIGNPTNAVLEERVAALEGGTAALAVASGHAAQVVVLQQLLQPGDEFIAARKLYGGSINQFTHAFKSFGWNVVWADSDDIASFERAVTPRTKAIFIESIANPGGSITDIEAVSTVARKAGVPLIVDNTLASPYLIRPIDHGADIVVHSLTKFLGGHGNSLGGIIVDAGTFDWSTGGKYPMLSEPRPEYHGIRLQETFGNFAFAIACRVLGLRDLGPALSPFNAFMILTGIETLPLRMQKHCDNAKAVAEFLAGHPAVASVSYAGLASDKYNRLARKYAPKGAGAVFTFSLKGGYDAGVSLVSKLQLFSHLANVGDTRSLVIHPASTTHSQLDDAAKVKSGAGPDVVRLSIGIEDKEDLIADLEQALGA

SEQ ID NO: 15621 - protein, 380 aa, Malus x domestica
MSNTAGQVIRCRAAVAWEAGKPLVIEEVEVAPPQANEVRIKILFTSLCHTDVYFWEAKGQNPLFPRIYGHEAGGIVESVGEGVTDLKAGDHVLPVFTGECKDCAHCKSEESNMCDLLRINTDRGVMLSDGKSRFSIKGKPIYHFVGTSTFSEYTVVHVGCLAKINPSAPLDKVCLLSCGISTGLGATLNVAKPKKGSTVAVFGLGAVGLAAAEGARLSGASRIIGVDLHSDRFEEAKKFGVTEFVNPKAHEKPVQEVIAELTNRGVDRSIECTGSTEAMISAFECVHDGWGVAVLVGVPHKDAVFKTHPVNFLNERTLKGTFFGNYKTRTDIPSVVEKYMNKELELEKFITHKVPFSEINKAFEYMLKGEGLRCIIRMEE

SEQ ID NO: 15622 - protein, 387 aa, Shigella flexneri 2a str. 2457T
MSVIKMTDLDLAGKRVFIRADLNVPVKDGKVTSDARIRASLPTIELALKQGAKVMVTSHLGRPTEGEYNEEFSLLPVVNYLKDKLSNPVRLVKDYLDGVDVAEGELVVLENVRFNKGEKKDDETLSKKYAALCDVFVMDAFGTAHRAQASTHGIGKFADVACAGPLLAAELDALGKALKEPARPMVAIVGGSKVSTKLTVLDSLSKIADQLIVGGGIANTFIAAQGHDVGKSLYEADLVDEAKRLLTTCNIPVPSDVRVATEFSETAPATLKSVNDVKADEQILDIGDASAQELAEILKNAKTILWNGPVGVFEFPNFRKGTEIVANAIADSEAFSIAGGGDTLAAIDLFGIADKISYISTGGGAFLEFVEGKVLPAVAMLEERAKK

SEQ ID NO: 15623 - protein, 78 aa, Arabidopsis thaliana
MGFWTLMEGLLLFANALAILNEDRFLAPKGWTLAELHQTGKRNSLKGQIIGLIHACHYMRLPLMLFNLIVIVFKLFSG

SEQ ID NO: 15624 - protein, 140 aa, Zea mays
  unsure (1)..(140): unsure at all Xaa locations
MCKILRSISSCSRRTSSVAHCSGYSEEHCLSWIQGDAEALSFEDGSMDGYTITFGIRNVTHIEKALSEAYRSXFRTLTIIIAHXKLLLFELQYMCLFFVIKFFCLRMEKFAQMIQEAGFQRVEYENLLSGVVALHSGLKL

SEQ ID NO: 15625 - protein, 255 aa, Glycine max
MVFWEGYVSDELMGTFAPIVLYWVYAGFYHLLPPLDRYRLHTRRDEETKNLVPFSTVVKGVLLQQLVQAIVALFLLTATASASGVIVQPSIPKQILQIAIAMFVMDTWQYFVHRYMHQNKFLYRHIHSQHHRLVVPYAIGALYNHPIEGLLLDTVGGAISYLVSGMTARTAVVFFCFAIVKTVDDHCGLWLPGNIFHIFFQNNTAYHDIHHQLQGLKYNYSQPFFSIWDKLLGTYMPFNLVKRPEGGFEARLAKE

SEQ ID NO: 15626 - protein, 186 aa, Glycine max
  unsure (1)..(186): unsure at all Xaa locations
TRLRKRVATRLKDSQNTFAMLTTFNEVDMXAVNALQHQPIVNAVIDGDDIIYRDYIDISIAVGTPKGLVVPVIRNADTMNFADIEKQINTFAKKANDGSLSIDEMAGGTLTISNGGVYGSLLSTPIINPPQSAILGMHSIVSRPTVVGGNIVPRPMMYVALTYDHRIIDGREAVFFLRRIKDIVED

SEQ ID NO: 15627 - protein, 502 aa, Sinorhizobium meliloti
MLHQKIVENPYKQKYGNFIGGEWREPVAGRYFDNTTPITGGTLCEVARSDAADIEIALDAAHAAREKWGRTSTTERSNILMKIAARMEDNLELLARAETWDNGKPIRETMAADIPLAIDHFRYFAACIRAQEGSIGEIDHDTVAYHFHEPLGVVGQIIPWNFPILMAAWKLAPALAAGNCVVLKPAEQTPGSILVWAELIGDLLPPGVLNIVNGFGLEAGKPLATSPRIAKIAFTGETTTGRLIMQYASQNLIPVTLELGGKSPNIFFADVASEDDDFFDKALEGFAMFALNQGEVCTCPSRALVQESIYDRFMERAVKRVEAIRQGNPLDEATMIGAQASSEQLEKILAYIEIGKEEGAEVLTGGGRNVLEGDLSGGYYVKPTVFHGHNRMRIFQEEIFGPVVSVTTFKTEAEALEIANDTLYGLGAGVWSRDANRCYRFGRAIEAGRVWTNCYHAYPAHAAFGGYKQSGIGRETHKMMLDHYQQTKNMLVSYSPKALGFF

SEQ ID NO: 15628 - protein, 142 aa, Triticum aestivum
YKHIHSKHHTLVVPYAFGALYNHPLEGLILDTIGGALSFLVAGMTPRTSIFFFSFATIKTVDDHCGLWLPGNILHMLFSNNSAYHDIHHQLYGNKYNFSQPFFVMWDKILGTYMPYTLEERKGGGLEARPVNLGLAAQSKSD

SEQ ID NO: 15629 - protein, 116 aa, Zea mays
QTPNIVEAPFVLKDIWDHTKIMSVKLEDQNAFERDFCQLKPYYMDTCGIIPASPEEYPILALNILRLLVHNRIAEFHTKLELLHVKALKHTCIKHARKLEQYFMEGAYNRKLSARQ

SEQ ID NO: 15630 - protein, 115 aa, Zea mays
MDVTIYLRWSAYATIASFIFMVLAFVFRWGFRFRLVGVTSFMTVLTIGIFGLGLGMFDRPTVEGSVKFNRVYDNGANQIVISVPVTVSATEVEATLKQAANNYFSLGRISTDGKE

SEQ ID NO: 15631 - protein, 1488 aa, Nostoc sp. PCC 7120
MNNPTGLEIAIIGINGKFPGANNLEEYWQNLRNGVESITNLTDEQIQKNGVDPTQLKHPNYVKRQAIIDNIEYFDAEFFGFNPREAEILDPQHRLFLECAWTALEDAGYNPENYTGAIGVYAGAAMNNYLLNLITNPQIQNQISRYQLFLSNDKDFLTTRVSYKLNLRGPSLDIQTACSTSLVAVHVACQSLLSGECDIALAGGVSLAKATGYLYQEGGIYSPDGHCRAFDADAQGTIAGSGLGIVVLKRLQEAIEDRDYIHAVIKGSAINNDGGLKVSYTAPRIDTQAAVIRAAQALAGVEPADISYIETHGTGTALGDPIEIAALTQAFRAGTEKTGFCAISSVKTNIGHLDAAAGIASLIKTVLALKHQQIPPNLHFQQPNPQIDFSQTPFYVNTNLVDWETDKTPRRAGVSSFGIGGTNAHVILEEAPIKFKIQNSKFKINYQMLCLSAKSEKALEEATINLATYLQQHPQFNLADIAYTLHIGRQHFAYRRMVLCQTTEEAAQILEKETKYTHTNSEKSPSIAFMFPGQGSHYLNMGKELYETEAIFREQIDHCCELLQHDLGLDLLSILFETESIPSPQSPVPSPQSQTIYAQPALFIIEYALAKLWISWGIQPQAMIGHSLGEYVVATLAGVFSLPDVLKLVALRGRLMQQCPTGAMLSVGMSAAKLQPLLTDNLVIAAYNAPELCVVSGTEAEIVQLETNLNKQGISNRRLQTSHAFHSPLMESMITPFIAAFQKITLQTPKIPFISNVTGTWITAEQATDPHYWVNHLRQPVQFATGIKELLTEPQQILLEVGAGRTLATLAKQQTNSHTILSSLRHPQDTQSDVAFLLQTLGQLWLAGVSIDWENFYTHQQRQRLPLPTYPFQRQRYWIDLKAGEQGSENIPSPRLYLPSWERSLPHPQVDIAEKRLCWLVFTDNYGIYQEIINTLQAVGHDVIIVSQGEKYDQPAYRTFTVNPQNSQDFVELWSDLELRELIPHHILYLWDLTDLQQQPLSLLYLAQAISSQSIEREITLTLVTNDGQLLLGNENIQPMKATVWGMGKVISQEIPQLTCRCVDISLSTVASTNEQIAQQLITECLNNQNDSVVAYRGNYRWNQIYKPLLMDDAQSKISVHEGGNYVILGDLTTGLGTVFAEFLMKNSVRLVLLSDVITETLKQSLDNVGIDYLSLNIDITKQAELENAIAQAETKFGQINGVFYSTPMSNEHSMAFLPQLTTKHWEYNYRTKIQGLCVLAEVLRDKPLDFCVLQSSLSTVLGGLGLAVYAAANAVIDMFAIQQNQNSKFPWISINWDACRSDLETDINHSFAANLVTLALTPAEVWQSTQHIIKLGLPESVVVTKSDLDKRLEKWVTNTPTKTKTETNNSYTRPQLTNEYIAPRDEIETAIAQIWQDLLGISPIGINDSFFDLGGHSLLAIQAISRLRDRFGVELSMRNLLYEAPTIAAIATIITTQNQNLEQMTALLTEIQTLTPEQIRQQLNHLS

SEQ ID NO: 15632 - protein, 396 aa, Streptomyces coelicolor A3(2)
MTSMSSSARPLLNRRLAEFGTTIFAEMSALAVRTGAINLGQGFPDTDGPEEVREAAVRALRDGRGNQYPPGPGVPELRAAVAGHQQRRYGLSYDPDTEVLVTAGATEAIAAALLALLEPGDEVVALEPYYDSYAACIAMAGGTRVPVTLRPHEGTFRLDLDELRDAVTDRTRLLLLNTPHNPTGTVLTRDELAAIAELAVERDLLVVTDEVYEHLVFGTAEHIPLASFPGMRERTVTIGSAGKTFSFTGWKVGWVTAAPALLTAVRSAKQYLTYVASGPFQYAVAEALALPESYFAAYRQDMEAKRDLLAAGLAEAGFGVYRPAGTYFVTTDIRPLGERDGFAFCRSLPERAGVVAVPNAVFYNHREEGAPFVRFAFCKRLPVLEEAVGRLKTLSA

SEQ ID NO: 15633 - protein, 380 aa, Halobacterium sp. NRC-1
MNFSTRVTSVEPSATLAVSTLASELEADGVDVVDLSVGEPDFDTPESIVDAGKAAMDAGHTGYAPSNGVPELRDAIAEKLQGDGLDYEAGNVIVTPGAKQALYETFQAVVDEGDEVALLDPAWVSYEAMAKLAGGELNRVDLAPHDFQLEPALDDLADAVSDDTELLVVNSPSNPTGAVYSRAAMEGVRDLAVDHDITVISDEIYQRVNYGPAHVSLAGLDGMFERTVTINGFSKAYSMTGWRLGYLAGPEALVDQAGKVQSHSVSSAANFIQRAGVEAIRHTDDAIDEMVAAFESRRDLLVDLFAEHGTDVSTPDGAFYLMLPVADDDQAWCQDALKDAHVATVPGSAFGAPGYARLSYAASTDRLEAAVDRLAAEGYL

SEQ ID NO: 15634 - protein, 315 aa, Azotobacter vinelandii
MRQHSIVVADTGDLEAIRRFAPEDATTNPSLILKAVQSGQYDGLVARVLGEVGGARSPEAAVDDACDRLVVALGERILASVPGRVSTEVNARLSFDREASIAKARRLVGLYEAAGIGRERILIKLAATWEGIRAAEVLEKEGIPCNLTLIFGFAQARACAEAGVHLISPFVGRILDWYRQADPATAYAPAEEPGVRSVRRIFDYFRRHAYPTVVMGASFRNVGEILALAGCDRLTISPALLEELAASEGVLAPALADTGEREARPAQRLGEAEFRWQMNEDAMATEKLAEGIRGFEADQLKLEALLRARLAGGVA

SEQ ID NO: 15635 - protein, 318 aa, Oryza sativa
  unsure (1)..(318): unsure at all Xaa locations
PRILPLVLTNANEQYLPPFVIVDDSDKAVGPIVDGDAVVTFNFRADRMVMIAKALEYEDFDKFDRVRVPKIRYAGMLQYDGELKLPSHYLVSPPEIERTSGEYLVKNGIRTFACSETVKFGHVTFFWNGNRSGTRGARKEEYVEIPSASGIXTFNVKPKMKALEIAEKARDAILSGKFDQVRVNLPNGDMVGHTGDIEATVVACKAADEAVKMILDAIEQVGGIYLVTADHGNAEDMVKRNKSGQPQLDKKGEIQILTSHTLQPVPVAIGGPGLHSGVRFRNDVQTPGLANVAATVMNLHGFEAPADYEPTLIEVVDK

SEQ ID NO: 15636 - protein, 168 aa, Avena clauda
VMASSATSVAPFQGLKSTAGLAVSRRSNAGLGSVSNGGRIRCMQVWPIEGIKKFETLSYLPPLSEEALLKQIDFLIRSKWVPCLEFSKVGFIFRVHGSTPGYYDGRYWTMWKLPMFGCTDASQVIKEVEEVKKEYPDAYVRIIGFDNIRQVQCVSFIAFKPPGCEESG

SEQ ID NO: 15637 - protein, 350 aa, Azotobacter vinelandii
MKAVMAYAPGDYRLEEVAVPKAGPGEIIAKVEACGICAGDIKSFGGAPSFWGDETQPAYIKAPMIPGHEFIAHIVELGKGVEGYELGDRVISEQIVPCWNCRFCKRGHYWMCQKHDLYGFQNNVNGAMAEYIRFTKESINYKVPRDLPIEKAVLIEPYACSMHAVQRAQIQFGDVVVLAGAGTLGLGMIGAAKKAGPGKLVVMDLFEDRLELAKKFGADLVINPAKEDPVARIKEITDGYGCDVYIEATGHPKSVEQGLSMIRNLGRFVEFSVFKDPVTVDWSIISDRKELDVLGAHLGPYCYPLVIEGIADGSLPTEGVVTHNFPLERFMDGFKLAMSGKDSLKVILTP

SEQ ID NO: 15638 - protein, 502 aa, Oryza sativa
MRRCPRFAHHLRLRSQLLRLRAEASSWRLPVAAVSSSNLHPEYAKKIGGSDFSHDRQSGKELQNFKVSPQEASRASNFMRASKYGMPITANGGNIARWVKKEGDKVSPGEVLCEVETDKATVEMECMEEGYLAKIIHGDGAKEIKVGEIIAVTVEEEEDIGKFKDYKAPSSAESAAPAESKPQSEPTEPKKEKEQPKAPEPKATKTEESFLSEDRTFSSPIARKLAEDNNVPLSSIKGTGPDGRILKADIEDYLASVAKGAKKETAAAPGLGYVDLPNTQIRKVTANRLLHSKQTIPHYYLTVDTRVDKLIKLRSELNPLQDTSGGKKISINDLVIKAAALALRNVPECNSSWMNDFIRQYHNVNINVAVQTEDGLFVPVIRDADKKGLATIADEVKQLAQRARDNSLKPEDYEGGTFTVSNLGGPFGIKQFCAIVNPPQSAILAIGSAEKRVIPGAEGQFEVGSFMSATLSCDHRVIDGAIGAEWMKAFKGYIENPTTMLL

SEQ ID NO: 15639 - protein, 302 aa, Thermoanaerobacterium thermosaccharolyticum
MKGIILAGGSGTRLYPITKAISKQIVPIYDKPMIYYPLSVLMLSGIRDILIISTPRDIDTFKELFGDGSQLGLHFEYAIQEVPRGLADAFIIGEKFIGKDNVALVLGDNIFYGYGFTERLERAASRKEGATIFGYHVSNPSDFGVVEFDDNFNVISIEEKPKYPKSNYAVPGLYFYDNDVIEIAKNVKPSARGEIEITSVNNEYLRRGKLKVELLGRGMAWLDTSTPAGLLNAANFVEAIQTRQGLYVACIEEIAYRKGYIDKEQLIKLAEPLKKVEYGKYLLNLLNDENTVQEVAAANVGL

SEQ ID NO: 15640 - protein, 414 aa, Vibrio vulnificus YJ016
MERYIMELTTTVSELRYALDTFFFLISGALVMWMAAGFAMLEAGLVRSKNTTEILTKNFCLYAIACTTYLVVGYNIMYVDNSEGGWLPSIGALIGSQAEGADHSLESDFFFQVVFVATAMSVVSGAVAERMKLWSFLLFSAILTAFIYPVEGYWTWGGGFLSAAGFSDFAGSGIVHMAGASAALAGVLLLGARKGKYGKNGEVYPIPGSNMPLATLGTFILWFGWFGFNGGSQLMVSDFENATAVGQIFLNTNAAAAAGAITALFVCKTTWGKADLTMILNGALAGLVAITADPLSPSPLYSVAIGAVAGALVVFSIVGLDKLKIDDPVGAISVHGVCGFFGLMVVPISNGDASFLSQLFGAVVIFAWVFGASLAVWAVLKATIGIRVSEEEEMEGMDMHDCGVGAYPEFVTVK

SEQ ID NO: 15641 - protein, 167 aa, Cicer arietinum
MAEQASKSIYDFTVKDIRGNDVSLSEYSGKVLLIVNVASQCGLTQTNYKELNVIYDKYKNQGFEILAFPCNQFRGQEPGSSEEIQNVVCTRFKAEFPIFDKVEVNGKNAEPLYKFLKGQQGGIFGDGIKWNFTKFLVNKQGKVVDRYAPTTAPLKIEKDIEKLIKSS

SEQ ID NO: 15642 - protein, 407 aa, Vibrio cholerae O1 biovar eltor str. N16961
MQDTLAVILAGGMGSRLSPLTDDRAKPAVPFGGKYRIIDFTLTNCLHSGLRRILVLTQYKSHSLHKHLRNGWSIFNPELGEFITVVPPQMRKGGKWYEGTADALFHNMWLLARSDAKYVVVLSGDHIYRMDYAAMLEEHISKNATLTIACMQVPRHEASAFGVMAIDDDSRITCFVEKPADPPCIPNRPDHSLASMGIYIFNMDVLKKALTEDAEIEQSSHDFGKDVIPKLIATGSVFAYSFCSGKGRVARDCYWRDVGTIDSFYDANMDLLQPVPPMNLYQKNWAIRTYEQQYPPARTVSSATGNEGIFINSIIANGVINSGGSVQHSIISSNVRINDSALIVDSILFDDVEVGEGCKLIHCIIDKHVKIPPYTEIGLNPIEDRKRFHISERGVVVVPESYQFSTE

SEQ ID NO: 15643 - protein, 279 aa, Bacillus cereus ATCC 10987
MSIQNISFLGAGSIAEAIIGGLLHANVVKGEQITVSNRSNETRLQELHNKYGVKGTHNKKELLTNTNILFLAMKPKDVAEALTPFKEDIHNNLLIISLLAGVSTHSIRSLLQKDVPIIRAMPNTSAAILKSATAISPSKHATKEHIQTAIALFETIGLVSVVEEEDMHAVTALSGSGPAYIYYVVEAMEEAATKIGLKEDVAKSLILQTMIGAAEMLKASEKHPSILRKEITSPGGTTEAGIEVLQEHQFQQALISCITQAAQRSHNLGKTLEQLTKEK

SEQ ID NO: 15644 - protein, 394 aa, Amycolatopsis orientalis
MNRVLSALAPHSSKRISEYAQRHPGTVDLTVGLPAFGPPRSFDERLAMLSSAPHVNARPEDQYAHSRGAIELRAAIAHVYKSEQGVDLDPDTQILVTNGAAGALWIAVLTLTEPGDEVLLADPGYMIYPPMIELLGRRVVRIPTSPADGFRLHLSDLRSRLTQRSRVVLVNSPGNPTGRVSSEDELADLCAFAVEHGLYVVHDEVLDRFAYGIEHRSVVALDHQGVGIAVNGLSKRFGMSGWRIGWLASSSAVIAEAAKAHTFFMLAVSHAVQLAAAAALSDPKADGEVSVYAAEIRRRGEVFLADLARIPGLGKTTVPDGGFYAFVDVGEFARLRGIRVAESTSAAVAEYLLHECGVAVVPGSVFGRAGEGFVRMSFAGSAEQLDRAVKRLAG

SEQ ID NO: 15645 - protein, 166 aa, Glycine max
  unsure (1)..(166): unsure at all Xaa locations
MRTKKKEVAYSMISCPVVTTRQRAHGDRYWTVPFTGLKSMAGFPTRKTNNDITXIASNGGRVQCMQVXWPPIGKKKIETLSYLPDLDDAQLAKEVEYLIRKGWIPXLEFELEHGFEYREHNGSPGYYQGLYWTXWKLPMSGCTDASQVLKEHQEAKTAYPNGFIRI

SEQ ID NO: 15646 - protein, 108 aa, Oryza sativa
MAAIIVSVKARQIFDSRGNPTVEVDVVLATYGSFARAAVPSGASTGVYEALELRDGGSDYLGKGVSKAVDDVNSVIAPALIGKDPTSQAGYTGKVVIGMDVASFGILQ

SEQ ID NO: 15647 - protein, 239 aa, Zea mays
  unsure (1)..(239): unsure at all Xaa locations
MPSQSTHTSSSLSSSTAPILPCSSAAALFRSVMAAVATETPFHVLAVDDSLPDRKLIERLLKTSSFQVTTVDSGSKALQFLGLHDQDSTVPPVHTHQLDVAANQDVAVNLIITDYCMPGMTGYDLLKKIKESSSLRDIPVVIMSSENIPSRINRCLEEGADEFFLKPVRLSDMNKLKPHILKSRCNQEQHQQSDSHSGERRNPTISSSAAAXDSINNRKRKGAGTEEILPQLANRSRHS

SEQ ID NO: 15648 - protein, 131 aa, Edwardsiella tarda
VTAINRGDYPKWDLYIQVLKPADLKNFDFDPLDATKVWPDVPERKIGEMVLNKNPDNVFQETEQVAMAPSNLIPGIEPSEDKLLQGRLFAYADTQFYRIGANGLSLPINKPHSVVNNGNQDGQLNSGHTLD

SEQ ID NO: 15649 - protein, 153 aa, Glycine max
  unsure (1)..(153): unsure at all Xaa locations
NFLYQWAFAIAAAGITSGSIAERTQFVAYLIYSSFLTGFVYPVVSHWFWSADGWASAISSADHVFSPGDRLLSTGVIDFAGSGVVHMVGGVAGFWGALIEGPRIGRFDHGGXRAXALRGHSASLVVLGTFMLWFGWYGFNPGSINKILVSYGN

SEQ ID NO: 15650 - protein, 561 aa, Pseudomonas putida
MTHLKITGMTCDSCAAHVKEALEKVPGVQSAIVSYAKGAAQLALDPGTAPDALTAAVAGLGYKAMLADAPPTDNRTGLFDKVRGWMGAADKGSGGERPLQVAVIGSGGAAMAAALKAVEQGAQVTLIERGTIGGTCVNVGCVPSKIMIRAAHIAHLRRESPFDGGMPPTPPTILRERLLAQQQARVEELRHAKYEGILDGNSAITVRHGEARFKDDRDLSVSLNEGGERVVMFDRCLVATGASPAMPPIPGLKESPYWTSTEALVSDTIPERLAVIGSSVVALELAQAFARLGSQVTILARSTLFFREDPAIGEAVTAAFRAEGIKVLEHTQASQVAHVDGEFVLTTGQGEVRADKLLVATGRTPNTRSLALEAAGVAVNAQGAIVIDKGMRTSSPNIYAAGDCTDQPQFVYVAAAAGTRAAINMTGGDATLDLDAMPAVVFTDPQVATVGYSEAEAQRIGLQTDSRTLTLDNVPRALANFDTRGFIKLVAEAGSGRILGVQAVTPEAGEIIQTAAIAIRARMTVQDLANQLFTYLTMVEGLKLVAQTFSKDVTQLSCCAG

SEQ ID NO: 15651 - protein, 424 aa, Escherichia coli O157:H7 EDL933
MAKNIQAIRGMNDYLPGETAIWQRIEGTLKNVLGSYGYSEIRLPIVEQTPLFKRAIGEVTDVVEKEMYTFEDRNGDSLTLRPEGTAGCVRAGIEHGLLYNQEQRLWYIGPMFRHERPQKGRYRQFHQLGCEVFGLQGPDIDAELIMLTARWWRALGISEHVTLELNSIGSLEARANYRDALVAFLEQHKEKLDEDCKRRMYTNPLRVLDSKNPEVQALLNDAPALGDYLDEESREHFAGLCKLLESAGIAYTVNQRLVRGLDYYNRTVFEWVTNSLGSQGTVCAGGRYDGLVEQLGGRATPAVGFAMGLERLVLLVQAVNPEFKADPVVDIYLVASGADTQSAAMALAERLRDELPGVKLMTNHGGGNFKKQFARADKWGARVAVVLGESEVANGTAVVKDLRSGEQTAVAQDSVAAHLRTLLG

SEQ ID NO: 15652 - protein, 224 aa, Oryza sativa
MTSMRGKGRRRERRRKRRAEERSCSVVCGMSLTHSLNNFFFFFFFFFFFFFFFFFFFFFFILSWTTKNIMGFPVGGYSGVPRLLLHLLFLLTHLRRLSSCLLRLAGADIDDSPTAVDAEYDGSYSYSSQSSQLLELDDHSPALRFDALSSSLQPPLHVATCAVCLRDFHKSAQVRRAHRCRHVFHRACLDAWAHHGHRTCPLCRSPLLPSSAPPVLLPLPLPAS

SEQ ID NO: 15653 - protein, 138 aa, Cicer arietinum
ENGLTDEKNFFHRPGFGGGAGGVVDLVVVVEEGLGSGLGGGFGAGGGGGAGGGTGGGAGGGFGGGGGGGFGGGGGVGGGSGFGGGSGFGSGVGNGGGLGGGSGGGFGGGGGGGLGGGAGAGGGFGGGAGGGVGGGGFP

SEQ ID NO: 15654 - protein, 550 aa, Shewanella oneidensis MR-1
MAIHQRAGQIASQMDLVNIPKLMSHYYSIKPNMDAAEQRVTFGTSGHRGTAFQGSFNQDHIWAITQAVVDYRQSVNIEGPLFLGIDTHALSYAAYVSAIEVLAANKVTVYIQQNDGFTPTPVVSHAIICANHAAAQNGALLSDGLIITPSHNPPQDGGIKYNPPHGGPAEGNITAWIESRANDYLRAALKGVNKLAYADALASGYVHAIDLITPYVADLENVVDMHAIAKANLKLGVDPLGGSGIHYWAPIAKHYGIDITLVNDKVDPSFSFMSLDKDGKIRMDCSSPYAMAGLLAHKESFDLCVGNDPDYDRHGIVCPGTGLMDPNHYLAVAIDYLLTHRPEWSDSLAIGKTLVSSALIDKICVFHGKKLLEVPVGFKWFVDGLAEATIAFGGEESAGAAFLRRDGTTWCTDKDGFILVLLAAEMLAVTGKTPGQRHQELVAQFGQSFYKRIDSPISLENKAKFAKLNADTLNATMLAGEKIEAVLTHAPGNNASIGGIKVTTTNGWFAARPSGTEALFKIYGESFISEQHLAEIIKDAQALIDKALSA

SEQ ID NO: 15655 - protein, 264 aa, Thermoanaerobacter tengcongensis
MKIGFIGAGNMGMALIKGILKSDFVEAEDLILYDPVREKVEGLEREFGTVTAKDNLELTEKSDVVIVAVKPNVYDEVLKEIREKVTEEKIIITIAPGITIDHVKKLLGRGKIVRTIPNTPALIGEGITAVTYSEEVKEEDKELVRKIFSTCGEIVEIEEKLIDVAMAVSSCSPAFVYMFIEALADGGVLLGLPRDVAYKLASKAVSGAGSMVFKTGFHPGQLKDMVTSPGGTTIEGIRVLEKSGMRSAVIEAVIAAYQKAKGLK

SEQ ID NO: 15656 - protein, 535 aa, Shewanella oneidensis MR-1
MIKDFILPDIGEGVVECELVEWLVKEGDTIVEDQPIADVMTDKALVQIPAPFAGVVTKLYYAKGDIAKVHAPLYAVQIEAEEPSSQVAPQTVEHSAPNQAAISAASSSIEQFLLPDIGEGIVECELVEWLVQEGDIVVEDQPIADVMTDKALVQIPAIKAGKIVKLHYRKGQLAKVHAPLYAIEVEGGVIPAVSAHETTNVAVANTATSAACATASVSQEPARQGKALASPAVRRMARALDIDLSRVPGSGKHGRVYKEDISRFQAQGSATPVVAPVATASTQQSSVTQSAVPITVASAARADIVEPIRGVKAVMAKLMVESVSTIPHFTYCEEFDLTDLVALRESMKAKYSSDEVKLTMMPFFMKAMSLALTQFPVLNSQVNADCTEITYKARHNIGMAVDSKVGLLVPNVKDVQDKSILEVAAEITRLTNAARSGRVAPADLKEGTISISNIGALGGTVATPIINKPEVAIVALGKLQTLPRFNAKGEVEARQIMQVSWSGDHRVIDGGTIARFCNLWKQYLEQPQDMLLAMR

SEQ ID NO: 15657 - protein, 451 aa, Shigella flexneri 2a str. 2457T
MTFFVCFLAALAGLLFGLDIGVIAGALPFIADEFQITSHTQEWVVSSMMFGAAVGAVGIGWLSFKLGRKKSLMIGAILFVAGSLFSAAAPNVEVLILSRVLLGLAVGVASYTAPLYLSEIAPEKIRGSMISMYQLMITIGILGAYLSDTAFSYTGAWRWMLGVIIIPAILLLIGVFFLPDSPRWFAAKRRFVDAERVLLRLRDTSAEAKRELDEIRESLQVKQSGWALFKENSNFRRAVFLGVLLQVMQQFTGMNVIMYYAPKIFELAGYTNTTEQMWGTVIVGLTNVLATFIAIGLVDRWGRKPTLTLGFLVMAAGMGVLGTMMHIGIHSPSAQYFAIAMLLMFIVGFAMSAGPLIWVLCSEIQPLKGRDFGITCSTATNWIANMIVGATFLTMLNTLGNANTFWVYAALNVLFILLTLWLVPETKHVSLEHIERNLMKGRKLREIGAHD

SEQ ID NO: 15658 - protein, 570 aa, Arabidopsis thaliana
MQSAMALSFSQTSFTRPNHVLGSSGSVFSTPRSLRFCGLRREAFGFSTSNQLAIRSNRIQFLSRKSFQVSASASSNGNGAPPKSFDYDLIIIGAGVGGHGAALHAVEKGLKTAIIEGDVVGGTCVNRGCVPSKALLAVSGRMRELQNEHHMKSFGLQVSAAGYDRQGVADHANNLATKIRNNLTNSMKAIGVDILTGFGSVLGPQKVKYGKDNIITAKDIIIATGSVPFVPKGIEVDGKTVITSDHALKLESVPEWIAIVGSGYIGLEFSDVYTALGSEVTFIEALDQLMPGFDPEISKLAQRVLINPRKIDYHTGVFASKITPARDGKPVLIELIDAKTKEPKDTLEVDAALIATGRAPFTNGLGLENVNVVTQRGFIPVDERMRVIDGKGTLVPNLYCIGDANGKLMLAHAASAQGISVVEQVSGRDHVLNHLSIPAACFTHPEISMVGLTEPQAKEKGEKEGFKVSVVKTSFKANTKALAENEGEGIAKMIYRPDNGEILGVHIFGLHAADLIHEASNAIALGTRIQDIKLAVHAHPTLSEVLDELFKAAKVESHATTRTVSEKVVV

SEQ ID NO: 15659 - protein, 803 aa, Bradyrhizobium elkanii
MLLDLASRDGEFKEVTARMRRLMLNLLGGAKDYSVVPIQGGGSFAMEAALSSFVSRNDKPLVCINGIYGERIFKILRLWGVEALKLVKRATEPLEPQEVAEQLSRNPGVTHLCLVHCETTTGIVNPVDAIIEEARRRGVKTIVDGMSSFGAIDIDLSRGGPDVLVTSSNKCIEGPPGVAFVIASRELLEKAVQEPRSFVLDVRDQWLSLERTGEWRSTPPTHIVQATTKALEILEGEGIDARRRRYEKVRDDLVQELEGVVSPLLSAELQSPVCVAFRAPSGIADQAGFDGLYRHLAAHNLYIYSKLHLATRSFRVGCIGEIQPSWIEQLGCAFRTYFRSGPASSMGTPSTRQACERGVEMSSSFAKDSQLPFSAETAVLHAGYRRDPVTKAVAVPIYQNTAYELDGDLNHIADVYNVKADGFTYTRIINPTTRALEKRYAAVDMGSDSLAVASGQAATFLAIVNLSSGEVGDNIVASPYLYGNTWNLLHNTLKRLGISVRTADPRRPETFERAIDDRTICLFGEVISNPCLIPLPVKQLAEIGRKHGVPLVVDNTTTPLVCRPSDLGAAITTYSATKYICGHGTTLGGLIVDNGKFSYRGASRFPLFNSPDEAHGGIIWRNALQDVDDLGKSEVLLKARMTWLRDTGAAIAPFASFQLIQGLETLPLRMKQHCANARIVADVLKEHPKVRRVFYPGLFEGADRETVDQTLNPAYGHGAMVMFEVEDEQAGRKFIQNVDLMYHVSNVGDARTLVTHPVSTTHTTVPREKREAAGIFGGSIRLCVGIEDVDDIVRDLDRALSAI

SEQ ID NO: 15660 - protein, 207 aa, Bradyrhizobium elkanii
MGALDGLVLTGDESNIDPAVLKAPASLPPADQQDVDGGIRDRPRDRLSAVAIGSAIALGMPILGICRGLQELNVYFGGTLHPSLAEWRLGSGLMHAEKPDRPRDRQYDAAHSVRISPDGALFPIVRAIEAQVNSLHNQGIELLAAALRREAWAPDGLVEAASVIGAPTLQIGVQWHPEWHASTDLLSQRLFTAFGEACVAYYQTKKH

SEQ ID NO: 15661 - protein, 444 aa, Glycine max
  unsure (1)..(444): unsure at all Xaa locations
MATIVSIKARQIFDSRGNPTVEVDLTCSDGTFARAAVPSGASTGIYEALELRDGGSDYLGKGVSKAVDNVNTVIGPALIGKDPTEQTAIDNLMVQQLDGTVNEWGWCKQKLGANAILAVSLAVCKAGASVLKIPLYKHIANIAGXKKLLKTFLVKVAYTGNDMMETNLPVQVFMVIPVGTYELKVAEDNGDGAXEHLWRRLERXYKSFVTEYPIVSIEDPFDQDDWEALXLSLMLRSEAMYKLIVIIGMDVAASEFYKEDKTYDLNFKEDNNDGSQRISGDALKDLYKSFVSEYPIVSIEDPFDQDDWEHYAKLTAEVGANVQIVGDDLLVTNPKRVQKAIDTKACNALLLKVNQIGSVTESIEAVRMSKKAGWGVMASHRSGETEDTFIADLSVGLATGQIKTGAPCRSERLAKYNQLLRIEEELGAEAVYAGANFRTPVEPY

SEQ ID NO: 15662 - protein, 373 aa, Lactobacillus plantarum WCFS1
MTKQAEKLHIETRLAQAGNRSDDEKTGAISAPIYLSTAYRHAGLGQSTGFDYPREAQPTRCILERVLAEMEHGIAAYALTSGMAAIQLVFTLFNSGDKIIVSDDLYGGSYRFFDLLHDHYHLDFAVWDGQDQATLAALADDQTVALWLETPSNPTMKVIDITATAATAHAHDLKLIVDNTFYTPLIQKPLDLGADIVVHSATKYLAGHNDVLAGAVVVKSQADADALEFNLVTTGAVLDPFDAWLLLRSLKTLPLRLHQQEANAQELVTVLEADEHVERVLYSGRGGMISFYLATGTDVDTFLRALNVISFAESLGGVESLLTVPAVQTHADLTEEQRQSKGITANLLRLSVGIENSADLAADLKQALIRATK

SEQ ID NO: 15663 - protein, 478 aa, Halobacterium sp. NRC-1
MAREFTLPDVGEGVAEGELVRWLVDEGDTVTEDQPVAEVETDKAQVEVPAPVDGTVQELHWAEGDVVPVGDLFVTFDVDGEASATADDGDESGDEAASATSEASGRTFAPPSVRTLARELGVDLDSVEGSGPSGRITDGDVRAAAEGGEDTTEPATEATSATERVDEDDTAASAGSQEPAGREKTLAAPATRGVARELGVDINDVPAVEQRDGEAFVTAEAVQAYAEGGQAAQGEAGGAATREFVAGGETTEPYRGIRRTIGEQMAESKYTAPHVTHHDTAVIDSLVETRSKLKARAEAEDVKLTYMPFVMKAVVAALKEFPVLNSELREDDEEIALKQDYNIGVAVATDAGLMVPVVEHVDQKSMLEISTEMNDLVEQARERSIAPADMDGGTFTITNFGAIGGEYATPIINYPETAILGLGAIDERPVAEDGDVRAAQTLPLSLSIDHRVIDGAEAAQFTNRVMEYLTDPELLLLE

SEQ ID NO: 15664 - protein, 474 aa, Halobacterium sp. NRC-1
MVVGDISTGTDVAVVGAGPGGYVAAIRAGQLGLDVTLVEKDAYGGTCLNYGCIPSKAMITASGVAHEAGHAEEMGVYADPDVDVAEMVDWKDGVVDQLTGGVEKLCKANGVNLIEGRAEFAGSDKLRVVHGGDGQGSETIEYEHAIVSTGSRPIEVPGFDFGDDPVLDSRQALAMAELPSSMVIVGGGYIGMELSTVFAKLGVDVTVVEMLDGILPQYGDDIARPVRQRAEELGIDFHFGLAADSWTDTDDGIVVTAADEDGEETEFETEKVLVAVGRQPVTDTLNLDAVGLEPNDDGRLETDHEARTDVENVFAIGDVAPGPMLAHKASKEGEVAAEVIAGEPAALDYQAVPAAVFTDPEIGTVGLTEDDAAAQGFDPVVGTFPFNASGRALTTGHDDGFVEVVADEESGFLLGAQIVGPEASELVAELGLAIEMGATLEDVASTIHTHPTLSEATMEAAEHALGHAVHTLNR

SEQ ID NO: 15665 - protein, 436 aa, Haemophilus influenzae R2866
MAKIVKVIGREIIDSRGNPTVEAEVHLEGGFVGLAAAPSGASTGSREALELRDGDKSRFLGKGVLKAVAAVNNEIAQAIVGKDATNQAEIDQIMIDLDGTENKSNFGANAILAVSLANAKAAAASKGLPLYAYIAELNGTPGVYSMPLPMMNIINGGEHADNNVDIQEFMIQPVGAKTLREALRIGAEVFHNLAKVLKSKGMSTAVGDEGGFAPNLASNADALACIKEAVEKAGYVLGKDVTLAMDCASSEFYNKENGMYEMKGEGKSFTSQEFTHYLEELCKEYPIVSIEDGQDESDWEGFAYQTKVLGDRVQLVGDDLFVTNTKILKEGIEKGIANSILIKFNQIGSLTETLAAIKMAKDAGYTAVISHRSGETEDATIADLAVGTAAGQIKTGSMSRSDRIAKYNQLIRIEEALERAGTPAAFPGLKAVKGQA

SEQ ID NO: 15666 - protein, 306 aa, Xanthomonas axonopodis pv. citri str. 306
MRVRASNRTYLMTQRKGIILAGGSGTRLYPITKGVSKQLLPVYDKPMIYYPLSVLMLAGIRDILIINTPHEQALFQSLLGDGSQWGVNIQYAVQPSPDGLAQAYLIGREFVDGKPSCLVLGDNIFHGHGLTDTLRRADAREQGATVFGYWVNDPERYGVAEFDQQGKVIDIAEKPAKPRSNYAVTGLYFYDGKASDYAAALKPSPRGELEITDLNRCYLDAGELHLEPLGRGYAWLDTGTHQSLHEAANFIETIQMRQGLQVCCPEEIAFGQGWIDAEQLERLAAPLLKNDYGKYLHELAVRGVVP

SEQ ID NO: 15667 - protein, 547 aa, Arabidopsis thaliana
MNAPIIDPLQGDFPEVIEEYLEHGVIKCVAFNHRGSLLAAGCADGGCVIWDFETRGIAKEIRDNDCSAAITSVSWSKYGHRLLVSAADKSLTLWDVSTGEKIARTILQQTPLQARLNPGLSSPSLCLACPLSSAPMIVDFDIDCTTLLPVSVPEMPDVLAPPQRSKCPESNPPFSPAAACFNKCGDLVYIGNSKGEILIVDYKSVRVLALVSASGAAPVENIVFSRNGQYLLTNSHDRTIRIYENLLPAKNVLKSLEDLGKNIDGLDGIEKMKTVGSKCLTLFREFQDSVTKMHWKAPCFSGDGEWVVGGSACKGEHKIYIWDRAGHLVKILEGPKEALIDLAWHPVHPIIVSVSLAGLVYIWAKDYTENWSAFAPDFKELEENEEYVEREDEFDLIPETEKVKVLDVNEDEEVDIDTVEKDAFSDSDMSVEELRYLPAEPIPDTNDQQDNLVESIKLIEGQISASPASEEAGQNGHHASSPQAEEMGETRGKRKRKPSEKAMELQAEKAKPLKGSGKTVRAKNRAAFDQETDDSINGGDDDDDAYY

SEQ ID NO: 15668 - protein, 176 aa, Vibrio vulnificus YJ016
MKHTVEVMISEQTVQERVRELGKQITAHYQGSEDLVLVGLLRGSFVFMADLARAIELTHQVDFMTASSYGNTMESSRDVRILKDLDDDIKGKDVLIVEDIIDTGNTLNKIKEILSLREPKSIEICTLLDKPSRREVPVPVKWIGFEIPDEFVVGVGIDYAQKYRHLPFIGKVVPQE

SEQ ID NO: 15669 - protein, 175 aa, Triticum aestivum
  unsure (1)..(175): unsure at all Xaa locations
MAPAVMASSATSVAPFQGLKSTAGLPVSRRSNGASLGSVSNGGRIRCMQVWPIEGIKKFETLSYLPPLSTEALLKQVDYLIRSKWVPCLEFSKVGFIFREHNASPGYYDGRYWTMWKLPMFGCXTDATQVINEVEEVKKEYPDAYVRIIGFDNMRQVQCVSFIAFKPPGCEESXG

SEQ ID NO: 15670 - protein, 142 aa, Schizosaccharomyces pombe
MSYFLPHLHSGWHVDQAILSEQERLVVIRFGRDHDEECIKQDEVLYRIAEKVVNMAVIYLVDIDEVPDFNKMYELYDRTTIMFFYRNKHMMIDLGTGNNNKINWPLEDKQEMIDIIETIFRGARKGKGLVISPKDYSTRHRY

SEQ ID NO: 15671 - protein, 397 aa, Shewanella oneidensis MR-1
MIFSQVVLAPADPILGLTDTFKADPRQDKVNLGVGIYKDEAGQTPVLQSVKKAEAILLEQEKTKNYLGIEGVQTYNRVVQELLFGEGSELVASGRAATAQAPGGTGALRIAAEFLLRNTPSRTIWVSNPTWANHQNIFETAGLTVKEFGYYNASAHDIDFDGMMTDLANAQAGDIILLHGCCHNPTGIDLTLAQWDLVANLCADKQLVPLFDFAYQGFGTGIEEDAAGLRLVASKVPELLVANSFSKNFGLYNERIGAVTVVAHNADEAVRAFSQVKRTIRANYSNPPAHGALIVSTILSDAALKALWVQELTEMRERIALMRTLFVQSLKDEGVTQDFSFISRQNGMFSFSGLNKSQVARLKDEFGVYIVGSGRISVAGMTKANMPAICKAIAQVV

SEQ ID NO: 15672 - protein, 175 aa, Triticum aestivum
  unsure (1)..(175): unsure at all Xaa locations
MAPTVMAXSATSVAPFQGLKSTAGLPVSRRSNGASLGSVSNGGRIRCMQVWPIEGIKKFETLSYLPPLSTEALLKQVDYLIRSKWVPCLEFSKVGFIFREHNASPGYYDGRYWTMWKLPMFGCTDATQVINEVEEVKKEYPDAYVRIIGFDNMRQVQCVSFIAFKPPGCEESGKA

SEQ ID NO: 15673 - protein, 475 aa, Vibrio vulnificus YJ016
MSKEIKAQVVVLGAGPAGYSAAFRCADLGLDTVLIERYNTLGGVCLNVGCIPSKALLHVAKVIEEAKALAEHGIVFGEPQTDIDKIRLWKEKVINQLTGGLGGMAKMRKVNVVNGFGKFTGPNTIEVEGEDGKTVVNFDNAIVAAGSRPIKLPFIPHEDPRIWDSTDALELKEVPGKLLIMGGGIIGLEMGTVYHSLGSQIDVVEMFDQVIPAADKDIVKVYTKRISKKFNLMLETKVTAVEAKEDGIYVSMEGKKAPAEAERYDAVLVAIGRVPNGKLIDGEKAGLEIDERGFINVDKQMRTNVPHIFAIGDIVGQPMLAHKGVHEGHVAAEVISGKKHYFDPKVIPSIAYTEPEVAWVGKTEKEAKAEGINYEVATFPWAASGRAIASDCADGMTKLIFDKETHRVIGGAIVGTNGGELLGEIGLAIEMGCDAEDIALTIHAHPTLHESVGLAAEVFEGTITDLPNAKAKKKK

SEQ ID NO: 15674 - protein, 631 aa, Vibrio vulnificus YJ016
MAIEINVPDIGADEVEVTEILVSVGDKVEEEQSLITVEGDKASMEVPASQAGIVKEIKVVAGDKVTTGSLIMVFEAEGAAAAAPAPAVAPVAAPAAASELKEVCVPDIGGDEVEVTEILVAVGDSIAEEQSLLTVEGDKASMEVPAPFAGTLKEIKVAAGDKVSTGSLVMVFEVAGSGAAAPAPVAAAAPAAAPAAVSGVKEVNVPDIGGDEVEVTEIMVAVGDTVSEEQSLITVEGDKASMEVPAPFAGTVKEIKVAAGDKVSTGSLIMVFEVAGAAPVAAAAPAQAAAPAPAAAPAPAVAPVAKAEAQATTSDFKENDEYAHASPVVRRLAREFGVNLSKVKGSGRKSRILKEDVQAYVKDALKRLESGAVAAASGKGDGAALGLLPWPKVDFSKFGETEVQPLSRIKKISGANLHRNWVMIPHVTQWDNADITELENFRKEQNAIEAKKDSGMKITPLVFIMKAAAKALEAFPAFNSSLSEDGESLILKKYVNIGIAVDTPNGLVVPVFKDVNKKGIYELSEELMVVSKKARAGKLTAADMQGGCFTISSLGGIGGTAFTPIVNAPEVGILGVSKSEIKPVWNGKEFAPRLQLPLSLSYDHRVIDGAEGARFITYLNECLSDIRRLVL

SEQ ID NO: 15675 - protein, 405 aa, Methanosarcina acetivorans C2A
MKAIILAAGEGLRCRPLTLTRSKVMLPVANRPILEHVISSLEKNGIKEIILIVGYEKERIMNYFEDGLNFGVNITYVEQKAQLGTAHAIEQAKKLISPEDSEFLVLNGDNLVESKTIADLLNNYKGDASLLTVRMEDTAGYGVVLKENKRVTRILEKRPGDLSHIVNTGIYIFTPQVFETIEKTPISENGEYAITDTLQLMIDEGKIVTSIPTESKWLDAVHAWDLLKANSTVLNSSRNLKQEGELEEGVIIRGKVAIGKNSRIRAGTYIVGPVVIGENCDIGPNVVILPSTTIGDNVSIRSFTEIQNSIIMNDCRISSHGQISNCIIGSNNTLGPGFTAEEKENLEININCKIHSAPKLGTIFGDDNRIGGRVLVKAGVMIAVNCQVESGNTIYRDLPRDSVVL

SEQ ID NO: 15676 - protein, 514 aa, Oryza sativa
  unsure (1)..(514): unsure at all Xaa locations
MNCTKGGGFPLLFCAVICLMAQQGACNVVLIANNTTLSFDDVEATFTPEVKDSGVNGAIYAVEPLDACSPLRKKAANGPVSPFALVIRGGCQFDDKVRNAQNAGFKAVIVYDDEDSGVLVSSNFTVAGSSSGIYIYAVFLSKASGEVLKKYSGQSDVEVWILPVYENSAWSIMAISFTSLLAMAAVLATCFFVRRHQIRRDRGRIPVTREFHGMSSQLVKAMPSLIFTKVQEDNSTSSSCAICLEDYSFGEKLRVLPCRHKFHATCVDMWLTSWKTFCPVCKRDASAGTSKPPASESTPLLSSVIHLSAESTALSSFRSTVAVSPPRPIRRHPSSQSTSRAYSISSAPRNYNLQRYYTNSPYISTSRSNVDLANMSSQWSHTPHQASMHSLRSGHLSLPINIRYTIPHVSRSDYGSASLGLSHDSCSHHGSPSYYHSSLGQQRSYLMHRTESGPSLSTMVLQSPQXVSSSTMANQEKSISCGLTRSLRQAYVQHCLDSDGSLSAVTSDQSLPRC

SEQ ID NO: 15677 - protein, 423 aa, Escherichia coli
AKNIQAIRGMNDYLPGETAIWQRIEGTLKNVLGSYGYSEIRLPIVEQTPLFKRAIGEVTDVVEKEMYTFEDRNGDSLTLRPEGTAGCVRAGIEHGLLYNQEQRLWYIGPMFRHERPQKGRYRQFHQLGCEVFGLQGPDIDAELIMLTARWWRALGISEHVTLELNSIGSLEARANYRDALVAFLEQHKEKLDEDCKRRMYTNPLRVLDSKNPEVQALLNDAPALGDYLDEESREHFAGLCKLLESAGIAYTVNQRLVRGLDYYNRTVFEWVTNSLGSQGTVCAGGRYDGLVEQLGGRATPAVGFAMGLERLVLLVQAVNPEFKADPVVDIYLVASGADTQSAAMALAERLRDELPGVKLMTNHGGGNFKKQFARADKWGARVAVVLGESEVANGTAVVKDLRSGEQTAVAQDSVAAHLRTLLG

SEQ ID NO: 15678 - protein, 263 aa, Mycobacterium tuberculosis CDC1551
MILDMFRLDDKVAVITGGGRGLGAAIALAFAQAGADVLIASRTSSELDAVAEQIRAAGRRAHTVAADLAHPEVTAQLAGQAVGAFGKLDIVVNNVGGTMPNTLLSTSTKDLADAFAFNVGTAHALTVAAVPLMLEHSGGGSVINISSTMGRLAARGFAAYGTAKAALAHYTRLAALDLCPRVRVNAIAPGSILTSALEVVAANDELRAPMEQATPLRRLGDPVDIAAAAVYLASPAGSFLTGKTLEVDGGLTFPNLDLPIPDL

SEQ ID NO: 15679 - protein, 261 aa, Saccharomyces cerevisiae
MPQNDYIERHIKQHGKRLDHEERKRKREARESHKISERAQKLTGWKGKQFAKKRYAEKVSMRKKIKAHEQSKVKGSSKPLDTDGDALPTYLLDREQNNTAKAISSSIKQKRLEKADKFSVPLPKVRGISEEEMFKVIKTGKSRSKSWKRMITKHTFVGEGFTRRPVKMERIIRPSALRQKKANVTHPELGVTVFLPILAVKKNPQSPMYTQLGVLTKGTIIEVNVSELGMVTAGGKVVWGKYAQVTNEPDRDGCVNAVLLV

SEQ ID NO: 15680 - protein, 397 aa, Methanosarcina acetivorans C2A
MKAVVLVAGKGTRMEPLTSDCPKVMLKVANKPILEHILNSAIEAGIEGFIFITGYLEEQIKAHFGDGSKWEVSIEYVQQKEQLGTANAIGYARGHVEGAFLVLNGDMLIEQEDLKALVSREEEAVICVKEVENPSDFGVLETENDKVVRIIEKPKNPPTNLANAGIYLFRESIFDFIDKTQPSVRRELEITDSIQMLINSGAPVGYSSLEGRWIDIGYPWDLLKANEHLLKDLKGSCEGTVEPYAIIKGEVSIGKGSLIRSGSYIEGPVVIGENCDIGPNCFIRPSTAIDNHIRIGNAVEVKNTIILEDTHVGHLSYVGDSVIGHHCNFGAGTKVANLRHDGKNIKVMLRGRILDSGRRKLGVIMGDDVHTGINTSINIGVVMHKGRATLPGEVVKH

SEQ ID NO: 15681 - protein, 536 aa, Arabidopsis thaliana
MNAAVFSPSALSLPISFSKTRSSFLSRKKGVKGEFRVFAVFGDESGLVEKKSQWRPLFDVEDPRSKAPPYKGKFLDVNQAIEVARFDIQYLDWRARQDLLTIMILHDKVVDVLNPLAREYKSIGTVKKELAGLQEELSKAHQQVHISEARVSTALDKLAHMEELVNDRLLPGRVVTELDKPSSSTTASAVELDREKTNTGAKSLNVSGPVPPYSPHLKNFWYPVAFTADLKHDTMVPIECFEQPWVIFRGEDGKPGCVRNTCAHRACPLDLGTVNEGRIQCPYHGWEYSTDGECKKMPSTKLLKVKIKSLPCLEQEGMIWIWPGDEPPAPILPSLQPPSGFLIHAELVMDLPVEHGLLLDNLLDLAHAPFTHTSTFAKGWSVPSLVKFLTPTSGLQGYWDPYPIDMEFKPPCIVLSTIGISKPGKLEGKSTQQCATHFHQLHVCLPSSKNKTRLLCRMSLDFAPILKNLPFMEHLWRHFAEQVLNEDLRLVLGQQERMLNGANIWNLPVAYDKLGVRYRLWRNAVDRGDDKLPFSG

SEQ ID NO: 15682 - protein, 907 aa, Sinorhizobium meliloti
MHGAEILPKTTIDDVTTSDTPDYRAVLDALAVPVYATDAEGIVTYCNAAAAAVAGREPELGKDRWCVSWQLRRPDGSPLPHDECPMARTLKEGQPVRGEEVVAVRPDGASVPLLPHPTPIFDDTGALTGAVNVLMDLSGAKDMERSSRYLAAIVESSDDAIVAKNLDGIITSWNRGAQRLFGYAAEEVIGESITILIPPERLSEEPGILERIRRGELVDHFETKRRRKDGTLVDISLTVSPVRDATGRIIGASKIARDITETKSAAEALAARFREQAALYRLTERVQRTKRIEEVYEATLDAIQGALNCDRASILLFDEAGTMRFVAARGLSEHYQRAVDGHSPWITGANEPEPIFVENVDDAEFSRELKESIVGEGIAALGFFPLVTEGRLIGKFMTYYDRPHRFADSEIGMALTIARQLGFSIQRMRAEYARRQAEEQLRRNEANERAHAAELAAIMEAVPALIWIARTPDCRVISGNNSSYEILRLPHDSNLSMSAPPGEHPTNFRVFSEGRALSPEELPVQRAARGEEVQNFEEEVRFDDGSSRHIFGNATPLRDVTGEVVGAVAAAVDITGRKQAEEALPGKRTALQLALDAGHMGAWEWNLETGEVIWSPGLEALHRIEPGSFGGTLADFKRDIHPDDLPLIEREMARAIETDGDYHVVYRAQLPDGTIRWMEAFGQLSPRNGPKRRLTGVCMDITERREAEAQRNLLVAELSHRVKNTLAIVGSIARQTFSTNPDAKAAHRSFDARIRALAQTHTRLAEASWSGVSLKTVLFDELSPYHDDSRTNVTLAGPPAMLPPKHALTLGMAAHELATNAAKHGALSVRSGKVDIEWMIDVASERLRICWSETGGPAVVAPKHNGFGRLLLERVLASDLGGEVHLEFAPQGLVCTIDVPYPRGAPG

SEQ ID NO: 15683 - protein, 361 aa, Mycobacterium avium subsp. paratuberculosis str. k10
MSQTVRGVISRKKGEPVELVDIVVPDPGPGEALVDVIACGVCHTDLTYREGGINDEYPFLLGHEAAGRVEAVGPDVTAVQPGDFVVLNWRAVCGQCRACKRGRPHLCFDTFNATQKMTLTDGTELTPALGIGAFADKTLVAAGQCTKVDPAADPAVAGLLGCGVMAGLGAAINTGAVARDDTVAVIGCGGVGNAAIAGAALVGARRIIAVDTDDTKLDWARGFGATHTVNARQADVVAAIQDLTDGFGANVVIDAVGRPETWKQAFYARDLAGTVVLVGVPTPDMTLEMPLVDFFSHGGSLKSSWYGDCLPERDFPTLIELYLQGRLPLEKFVSERIGLGDVEAAFHNMHDGKVLRSVVML

SEQ ID NO: 15684 - protein, 439 aa, Bacillus cereus ATCC 10987
MAVENITMPQLGESVTEGTISKWLVNVGDHVNKYDPLAEVMTDKVNAEVPSSFTGIVKELIASEGDTLAVGEVVCVIQVEGADEVAATAVEEKTKEEPKAEVATPEKAPKAKQPTDGKPRFSPAVLKLAGEHNVDLDQVEGTGANGRITRKDILKLVESGNIPQAGAAKKEEAVAAVVEARPEAPKAAPVAQKVESAKPVSVPTMPGDIEIPVTGVRKAIAANMLRSKHEAPHAWMMIEVDVTNLVSYRNSIKGDFKKREGFNLTFFAFFVKAVAQALKEYPQINSMWAGDKIVQKKDINLSIAVATEDELFVPVIKHADEKTIKGIAREITELAGKVRTKSLKADEMQGGTFTINNTGSFGSVQSMGIINYPQAAILQVESIVKRPVIMDNGMFGARDMVNLCLSLDHRVLDGLICGKFLGRVKEILENTSENNTSVY

SEQ ID NO: 15685 - protein, 440 aa, Staphylococcus aureus subsp. aureus MW2
MKTYDLIVIGFGEAGKTLAKYAASTGQHVAVIEQSPKMYGGTCINIGCIASKTLVHDGLEGKSFEASYNRKNDVVNALNNKNYHLLADDNNIDVLDFKAQFKSNTEVNLLDQHDDIADSITAPHIIINTGATSVIPNIKGLDQAKHVFDSTGLLNINYQPKHLVIVGGGYIALEFASMFANLGSKVTVLERGESFMPREDQDVVAHAITDLENKGITLHTNVETTELSSDNHHTTVHTNVGNFEADAVLLAIGRKPNTDLALENTDIELGDRGEIKVNAHLQTTVPHIYAAGDVKGGLQFTYISLDDYRIIKSALYGNQSRTTDNRGSVPFTVFIDPPLSRVGLTSKEAAAQHYDYTEHQLLVSAIPRHKINNDPRGLFKVVINNENNMILGATLYGKQSEELINIIKLAIDQNIPYTVLRDNIYTHPTMAESFNDLFNF

SEQ ID NO: 15686 - protein, 339 aa, Ralstonia eutropha JMP134
MMKAAVVRAFGAPLTIDEVPVPQPGPGQVQVKIEASGVCHTDLHAADGDWPVKPTLPFIPGHEGVGYVSAVGSGVSRVKEGDRVGVPWLYSACGYCEHCLQGWETLCEKQQNTGYSVNGGYGEYVVADPNYVGLLPDKVGFVEIAPILCAGVTVYKGLKVTDTRPGQWVVISGIGGLGHVAVQYARAMGLRVAAVDIDDAKLNLARRLGAEVAVNARDTDPAAWLQKEIGGAHGVLVTAVSPKAFSQAIGMVRRGGTIALNGLPPGDFGTPIFDVVLKGITIRGSIVGTRSDLQESLDFAAHGDVKATVSTAKLDDVNDVFGRLREGKVEGRVVLDFSR

SEQ ID NO: 15687 - protein, 503 aa, Arabidopsis thaliana
MALDPEQQQPISSVSREFGKSSGEISPEREPLIKENHVPENYSVVAAILPFLFPALGGLLYGYEIGATSCATISLQSPSLSGISWYNLSSVDVGLVTSGSLYGALFGSIVAFTIADVIGRRKELILAALLYLVGALVTALAPTYSVLIIGRVIYGVSVGLAMHAAPMYIAETAPSPIRGQLVSLKEFFIVLGMVGGYGIGSLTVNVHSGWRYMYATSVPLAVIMGIGMWWLPASPRWLLLRVIQGKGNVENQREAAIKSLCCLRGPAFVDSAAEQVNEILAELTFVGEDKEVTFGELFQGKCLKALIIGGGLVLFQQITGQPSVLYYAPSILQTAGFSAAGDATRVSILLGLLKLIMTGVAVVVIDRLGRRPLLLGGVGGMVVSLFLLGSYYLFFSASPVVAVVALLLYVGCYQLSFGPIGWLMISEIFPLKLRGRGLSLAVLVNFGANALVTFAFSPLKELLGAGILFCGFGVICVLSLVFIFFIVPETKGLTLEEIEAKCL

SEQ ID NO: 15688 - protein, 321 aa, Pseudomonas sp. SK-1-3-4
  unsure (1)..(321): unsure at all Xaa locations
CIGCHTCSITCKNVWTSREGMEYAWFNNVESKPGIGYPKEWENQDKWKGGWIRNANGTINPRIGGKFRVLANIFANPDLPSLDDYYEPFDFDYQHLHTAPLGEHQPTARPRPLISGKRMEKIEWGPNWEXILGTXFAKRRKDKNFDKIQADIYGEYENTFMMYLPRLCEHCLNPTCAVSCPSGAIYKREEDGIVLIDQEKCRGWRMCISGCPYKKIYFNWKSGKSEKCIFCYPRIEAGMPTVCAETCVGRIRYLGVLLYDADRISEVASTANEQDLYEKQLEIFLDPNDPAVIRAGLADRVPQSVIHSTQRSPVYKMAVDW

SEQ ID NO: 15689 - protein, 454 aa, Haemophilus influenzae R2866
MTMITPVQAILASNQHFLDRQDVMESNVRSYPRKLPFAYAKAQGCWVTDVEGNEYLDFLAGAGTLALGHNHPILMQAIKDVLDSGLPLHTLDLTTPLKDAFSEELLSFFPKDKYILQFTGPSGADANEAAIKLAKTYTGRGNIIAFSGGFHGMTQGALALTGNLGAKNAVENLMPGVQFMPYPHEYRCPFGIGGEAGAKAVEHYFENFIEDVESGVVKPAAVILEAIQGEGGVVPAPISFLQKVREVTQKHGILMIVDEVQAGFCRSGRMFAFEHAGIEPDIIVMSKAVGGSLPLAVLAIRKEFDAWQPAGHTGTFRGNQLAMATGYASLKIMRDENLAQNAQERGEYLTNALRELSKEYPCIGNVRGRGLMMGIDIVDERQSKDATGAYPRDCELAAAIQKACFKNKLLLERGGRGGNVVRVLCAVNINQNECEEFIKRFKQSVADALKVVRS

SEQ ID NO: 15690 - protein, 454 aa, Moraxella catarrhalis
MSVHTPVIPPQNATNDYYLTRQNEMESNVRSYPRKLPLAIAKAQGCWVTDVEGNEYLDCLAGAGTLALGHNHPATINAIKDVLDSGLPLHTLDITTPIKDAFTEKLLSFFPKDFVLQFCGPTGADGTEAAIKLAKTYTGRDNVIAFSGGYHGMTHGSLAMTGNLSAKEKVGNLMAGVQFMPYPHEYRCPLGLGGEAGVDALTYYFENFIEDVESGVVKPAAVILEAIQGEGGVVPAPKKWLQKIREVTTKHDIVLILDEVQAGFARSGKMFAFEHAEIIPDVVVMSKAVGGGLPLAVLAINKKFDAWSPAGHTGTFRGNQLAMAAGYNVLTQITENNLADNARIQGEFLRGELRKAAEQYPCIGHVRGRGLMTGVEIVDERQPADHMGSYPADGELAAAIQKACFDNKLLLERGGRGGTVVRLLCPITITQEECIEVITRFKKAVGEAVKAVRG

SEQ ID NO: 15691 - protein, 202 aa, Oryza sativa
  unsure (1)..(202): unsure at all Xaa locations
MLEEESGAFTSCVGTRWFRAPELLYGSTNYGQEVDLWSLGCISGAXLILGPYYSPGPIWIPIQIGRIIRVLGNHHRRNLSQAVQICPDYNKIFFNKVEXSPIGLEACLPDRSASEVSIIKRLLCYDPXKRASAADLLNDPYFAEEPLPVPIEGLQVPESKDEDDDSTEEWANFRGGDSDSDFDEFGSMDVTKTDKGFSIRFS

SEQ ID NO: 15692 - protein, 497 aa, Chromobacterium violaceum ATCC 12472
MSTGTINWQKKAEQLHFEGRAYIDGAYRKALSGKEFTTINPATGKVLASIEWCGKEDVELAVCAARRAFDGGAWSELATRSRMEILKRFASLIQDNIEELALLESLDVGKPIANSLSVDISNTAYCISWFAELIDKAPGEVVPVDPALLGMVTREPVGVVAAIVPWNFPLMMASWKFAPALAAGNAVILKPSEKSPLTAIRVAALAEAAGIPPGIFQVLPGAGDVGQALASHLDVDCVAFTGSTAVGKQIANYAAQSNLKRVWLELGGKSPNIILADCKDLKEAAKAAAGAICYNAGQMCTAGSRVLVAREIREAFLSELKVAMADYRPGDPLSPETNLGAVVDQRQFDKILSYITQGQNEGAKLLQGGAAVQTVHPNGLFIEPAIFDCPQPNLTICREEIFGPVLSVITFDDVDEAVRIANDSQYGLGAAVWTQNVSTAHKVARRLRAGTVWVNCYEEGGDMNLPFGGYKQSGNGRDKSLHALEKYTELKSTLIKL

SEQ ID NO: 15693 - protein, 546 aa, Pseudomonas aeruginosa
MSELIRVPDIGNGEGEVIELLVKPGDKVEADQSLLTLESDKASMEIPSPKAGVVKSIKAKVGDTLKEGDEILELEVEGGEQPAEAKAEAAPAQPEAPKAEAPAPAPSESKPAAPAAASVQDIKVPDIGSAGKANVIEVMVKAGDTVEADQSLITLESDKASMEIPSPASGVVESVSIKVGDEVGTGDLILKLKVEGAAPAAEEQPAAAPAQAAAPAAEQKPAAAVPAPAKADTPAPVGAPSRDGAKVHAGPAVRMLAREFGVELSEVKASGPKGRILKEDVQVFVKEQLQRAKSAVPAPRGAGIPPIPEVDFSKFGEVEEVAMTRLIEVGAANLHRSWLNVPHVTQFDQSDITDMEAFRVAQKAAAEKAGVKLTVLPILLKACAHLLKELPDFNSSLAPSGKALIRKKYVHIGFAVDTPDGLLVPVIRDVDRKSLLQLAAEAADLADKARNKKLSADAMQGACFTISSLGHIGGTGFTPIVNAPEVAILGVSKATMQPVWDGKAFQPRLMLPLSLSYDHRVINGAAAARFTKRLGELLADIRTLLL

SEQ ID NO: 15694 - protein, 270 aa, Schizosaccharomyces pombe
MSTLDLNHLADLYDRKDWNACKKELLKLKVELAKQNLFVPTSDKEKASFARNVFEYGVLVSIQTCDIESFARYASQVIPFYHDSLVPSSRMGLVTGLNLLYLLSENRIAEFHTALESVPDKSLFERDPYVEWVISLEQNVMEGAFDKVASMIRSCNFPEFSYFMKIVMSMVRNEIATCAEKVYSEIPLSNATSLLYLENTKETEKLAEERGWDIRDGVIYFPKEANALETEDGMLIDEEDELELPPTASKHTISSIRQLLSYTSELEQIV

SEQ ID NO: 15695 - protein, 473 aa, Bacillus cereus ATCC 10987
MAKEYDLVIVGGGTGGYVAAIRASQLGLKTALVEKENLGGTCLHKGCIPSKALLRSAEVYATAKKSEEFGVIASNVELNFAKVQERKEKIVTQLHKGVQHLMKQGKIDVFEGIGRILGPSIFSPMPGTISVELASGEENEMLIPKNVLIATGSRPNSLPGLELDGEYVMSSDHALKMETLPSSIIIVGGGVIGIEWASMLADFGVEVTVLEYAKTILPLEDQDVSKEMQRLFKKKGIKVVTGAKVLPETLVKDNGVTIQAEHNGENKEFKAEKMLVSVGRQANTQNIGLENTDIVVEKGYIQTNEFYQTKESHIYAIGDVIGGLQLAHVASHEGIAAVEHIAGKEVTPIDYSMVSKCVYSSPEVASVGLTEQEAKEKGYKLKVGKFSFRAIGKALVYGESDGFVKLVVDEETNDILGVHMIGPHVTDMISEAGLARVLDATPWEVAHTIHPHPSLSEAIGEAALAVDGKALHA

SEQ ID NO: 15696 - protein, 152 aa, Mesorhizobium sp. BNC1
MGQRQKRAVTGEGRLKNDIFEGLNILLVEEEALIAMDIEQLCYDLGAATVETVNSEAKLCPEALDSAGANARMLGFDAAILDAKVGEGCTTDLARRLKEHGIPFVFATGYTSGDAIFEEFPDVPVVSKPYTADELVSAIRSVVDRARLSHCR

SEQ ID NO: 15697 - protein, 456 aa, Eremothecium gossypii
MGQILSNPVIDKEQGRSGDALTAYGMCAMQGWRMSMEDSHIVDLDISPEGSDDHIAYYCVFDGHGGASVAQFCGEQFSRILQQQKDFGGDAPNFARALVAAFIAADEELLKDPVLANDHSGCTATTLLVSHKQQLLVCANSGDSRTVLSTDKNAKALSFDHKPTLRSEQSRIMAADGFVEMDRVNGNLALSRAIGDFEFKSNPNLAPHEQIVTCVPDVLEHKLDYEKDEFVILACDGIWDCLSSQECVDLIHYGIQQGMGLQDIASRVIDVCCSPTTEGTGIGCDNMSFIVVALLRENETEDQWFERMRAKKYQGLLSFEAQRRKVFSYHYDFINEDDDNLFDISTKRPEERNRGSGSLPPMHATTREDPDEEDGANPADGRQHLYSLEELINAGGIQITQGGNNTSYIHGSALSEVLASLVGATGGIVARPAQRADAEDNVSEEQDGKKLEEIQE

SEQ ID NO: 15698 - protein, 180 aa, Mesorhizobium sp. BNC1
MPVVRGKEIEVLYSASTIARRNLELAKEIAARDYTDLLVISVLKGSFIFAADLIRAMHDAGISPEVEFIMISSYGAGTTSGGIKVLRDIDNDVSGRDILLIDDILESGKTLQYTRDLMLSRGAKSVSIAVLLDKHSRRQASLEADFVGFECPDYFVVGYGMDVAHAFRELPFVGIVKGEA

SEQ ID NO: 15699 - protein, 496 aa, Oryza sativa
MARKMLKDEEVEVAVTDGGSYDYDLFVIGAGSGGVRGSRTSASFGAKVAICELPFHPISSDWQGGHGGTCVIRGCVPKKILVYGSSFRGEFEDAKNFGWEINGDINFNWKRLLENKTQEIVRLNGVYQRILGNSGVTMIEGAGSLVDAHTVEVTKPDGSKQRYTAKHILIATGSRAQRVNIPGKELAITSDEALSLEELPKRAVILGGGYIAVEFASIWKGMGAHVDLFYRKELPLRGFDDEMRTVVASNLEGRGIRLHPGTNLSELSKTADGIKVVTDKGEEIIADVVLFATGRTPNSQRLNLEAAGVEVDNIGAIKVDDYSRTSVPNIWAVGDVTNRINLTPVALMEATCFSKTVFGGQPTKPDYRDVPCAVFSIPPLSVVGLSEQQALEEAKSDVLVYTSSFNPMKNSISKRQEKTVMKLVVDSETDKVLGASMCGPDAPEIIQGMAVALKCGATKATFDSTVGIHPSAAEEFVTMRTLTRRVSPSSKPKTNL

SEQ ID NO: 15700 - protein, 553 aa, Mycobacterium tuberculosis CDC1551
MTSAPIPDITATPAWDALRRHHDQIGNTHLRQFFADDPGRGRELTVSVGDLYIDYSKHRVTRETLALLIDLARTAHLEERRDQMFAGVHINTSEDRAVLHTALRLPRDAELVVDGQDVVTDVHAVLDAMGAFTDRLRSGEWTGATGKRISTVVNIGIGGSDLGPVMVYQALRHYADAGISARFVSNVDPADLIATLADLDPATTLFIVASKTFSTLETLTNATAARRWLTDALGDAAVSRHFVAVSTNKRLVDDFGINTDNMFGFWDWVGGRYSVDSAIGLSLMTVIGRDAFADFLAGFHIIDRHFATAPLESNAPVLLGLIGLWYSNFFGAQSRTVLPYSNDLSRFPAYLQQLTMESNGKSTRADGSPVSADTGEIFWGEPGTNGQHAFYQLLHQGTRLVPADFIGFAQPLDDLPTAEGTGSMHDLLMSNFFAQTQVLAFGKTAEEIAADGTPAHVVAHKVMPGNRPSTSILASRLTPSVLGQLIALYEHQVFTEGVVWGIDSFDQWGVELGKTQAKALLPVITGAGSPPPQSDSSTDGLVRRYRTERGRAG

SEQ ID NO: 15701 - protein, 215 aa, Gossypium hirsutum
VYYWECKGYTPLFPRILGHEASGIVESVGEGVNDLKPGDHVLPIFTGECKECRHCLSEESNNMCELLRINCDRGVMLADGKTRFSINGKPIYHFVGTSTFSQYTVVHVGQVAKISPTAPLDKVCPISCGICTGFGATVNVAKPKKGQTVAVFGLGAVGLAAAEGARVCGASRIIAVDVNPRRFEEAKRFGITEFVNPKDYDKPVQEVIVEMTGGG

SEQ ID NO: 15702 - protein, 321 aa, Pseudomonas sp. SK-1-3-1
CIGCHTCSITCKNVWTSREGMEYAWFNNVQSKPGNGFPKKWENQDKWKGGWVRNSNGSIKPRIGGKFPLLANIFANPDLPSLDDYYEPFDFDYQHLHTAPLGEHQPGTRPRSLVSGKRMEKIEWGPNWEEILGTEFAKRRKDKNFDQIQADIYGEYENTFMMYLPRLCEHCLNPACAASCPSGAIYKREEDGIVLIDQEKCRGWRMCISGCPYKKIYFNWKSGKSEKCIFCYPRIEAGMSTVCAETCVGRIRYLGVLLYDADRISEVASTANEQDLYEKQLEIFLDPNDPAVIRQALADCVPQSVIDSAQRSPVYKMAVDW

SEQ ID NO: 15703 - protein, 824 aa, Haemophilus ducreyi 35000HP
MKKTENINTSRRGFIKNTSFGLAGTSLAGGSVNALLTTEAVAAEMQTVVTAAHWGALGVVVENGKVVKSGPAMPVSVENELQTVVPDQVHGETRIKYPMVRKGYLAGNKDTSLRGRDEWVRISWDKAFELVSDEMKRVRDTYGPSSIFGGSYGWYSSGSLHAARTLLQRYLNVTGGFVGVKGDYSTGAAQVIMPHVLGTIEVYEQQTSWEVVLENSDIVVLWSANPLNTLRIAWTSTDQQGIEYFKKLKESGKRVICIDPVKSESCEFLGAEWVPVNTGTDVALMLGMAHTLVAENKHDKEFLKKYTTGYEKFEEYLFGKEDKQVKDAEWASKICGVPAEVIKQLALDFQSKRTMLMTGWGIQRQRHGEQSHWMVVTLASMLGQIGLPGGGFGFSYHYSNGGAPTATGGILGSISANPSADAGAKTWLDETSKYSFPVARISDVLLNPGKKIDYNGTTVTYPDIKVVWWAGGNPFTHHQNTNLLVKAWQKPETIIINECHWTPTARMADIVFPVTTSYERNDLTMSGDYSMMNIFPMKQVIEPQFEAKNDYDIFAELAKRAGKEAEFTEGKSEMDWLKSFYQTAFDAARKNRVIMPKFEQFWADNKPLTFKASEKAKKWVRYQEFRQDPLLNPLGTPSGKIEIFSDVVAKMNYDDCKGHPMWMEHEEFSGKTTAEEPLALVTPHSKYRLHSQLAYTSLRKLYAVNDREPVLIHTEDAAARGIANGDIVRIFNKRGQVLAGAVVTDGIIKGTIALHEGAWYDPMDLGTADKPLCKNGNPNVLTRDEGTSKLAQGNSPNTATVQVEKFTGQAPEVTVFTEPKYTQA

SEQ ID NO: 15704 - protein, 216 aa, Gossypium hirsutum
VYYWECKGYTPLFPRILGHEASGIVESVGEGVNDLKPGDHVLPIFTGECKECRHCLSEESNNMCELLRINCDRGVMLADGKTRFSINGKPIYHFVGTSTFSQYTVVHVGQVAKISPTAPLDKVCPISCGICTGFGATVNVAKPKKGQTVAVFGLGAVGLAAAEGARVCGASRIIAVDVNPRRFEEAKRFGITEFVNPKDYDKPVQEVIVEMTGGGV

SEQ ID NO: 15705 - protein, 327 aa, Pseudomonas stutzeri
CIGCHTCSITCKNVWTSREGMEYAWFNNVETKPGIGYPKEWENQDKWKGGWVRNGDGTINPKIGGKFRVLANIFANPDLPTIDDYYEPFDFDYQNLHTAPISEHQPVARPRSLISGQRMEKIEWGPNWEEILGTEFAKRRKDKNFDKVQADIYGQYENTFMMYLPRLCEHCLIPACCASCPIGAIYKREEDGIVLIDQEKCRGWRMCISGCPYKKIYFNWKSGKSEKCIFCFPRIEAGMPTVCAETCVGRIRYLGVLLYDADRIHEVASTVNEQDLYAKQLEIFLDPFDPKVIEQALNDGVPMSVIEAAQKSPVYKMAVDWNAWPCR

SEQ ID NO: 15706 - protein, 333 aa, Prochlorococcus marinus subsp. pastoris str. CCMP1378
MKSILEQLSSITVVVADTGDLDAIKKFQPRDATTNPSLILAAAKNPDYIKLIDQALESSRKSLPAGFSESELIKETIDQVSVFFGKEILNLISGRVSTEVDARLSFDTEATVTKARKLINHYKSFGINKERILIKIASTWEGIKAAEILEKEGIKCNLTLLFNFCQAVACANAKITLISPFVGRILDWHKAKTGKDNFAGCEDPGVISVTKIYNYFKEKGFKTEVMGASFRNIDEIKELAGCDLLTIAPKFLDELNREEGELIKKLDEDTQSQSSIDYKFDEKDFRLSMLEDQMASEKLSEGITGFSKAIEELEELLLKRLSEINNQKLISTT

SEQ ID NO: 15707 - protein, 326 aa, Paenibacillus sp. A-234
  unsure (1)..(326): unsure at all Xaa locations
CIGCHTCSVTCKTTWTNRKGAEYMWVNNVETKPGIGYPKRWEDQELYKGGWTLRKGKLELKSGNKLSKIALGKIFYNPDMPEMKDYYEPWTYNYEYLTNAGEQKHSPVARAHSAVTGEQMDLEWGPNWXXDLAGEHVTGPHDPNIQKIEEEIKFNFEKSFMIYLPRLCEHCLNPSCVXSCPSGAMYKRDEDGIVLVDQEACRGWRYCMTGCPYKKVYFNWQTNKSEKCIFCFPRIEAGMPTVCAETCVGRIRYLGVLLYDADRIHEVASTVNEQDLYAKQLEIFLDPFDPKVIEQALNDGVPMSVIEAAQKSPVYKMAVDWKLLCR

SEQ ID NO: 15708 - protein, 243 aa, Oryza sativa
MLAKGRKVAGRGGDMSAHYAFGLQEDDAIIKRRLLTRTTTTRGEPPLKKLQKKFMSFATEVEKDADNISDCERLYKAFLQEINAFVLPLLKSKAVVDANLREKESFNELQDEIQRQILQAQTDIEELKKKLEQSRIERLYKEECEAIRKMISLQPPRSETEKLIAGLEKEIANLEAENTACIRTLELRKKQLSLLLHVVEELQISIEDEQRSIADELRAGAEEQQNMSTDEGSGDASDAMALD

SEQ ID NO: 15709 - protein, 373 aa, Oryza sativa
MAKNTCKLCYRRFGNPRALAGHMRSHSVAASRSQISSTSSASTSVAVGDDDGGGDAKRPIQGYVLREKPKRRVRLAESDFSDRESETEYYSSPPHGKRANTGSGDVEQVSSVSDATSEEDVALSLMMLSRDTWPATPPPPPPYRLRGAGYDDGSDGGDAPPAPAAAAAQKRTRFQCPACKKVFRSYQALGGHRASHMRGGRGGCCAPPPNPPPSPATPLQPLPECDGGEEEGAKPHPHECPYCFRVFASGQALGGHKRSQLCSAAAAAASGDDIPAMIKSNGFIDLNLPAPFDDVELSAVSDPFLSSKPAVLVPIVHGTGFGQTIGEIGAATAAFCSCFLSSLLPLPTTTTTCLPGLAAAYAAVTASPLPFSR

SEQ ID NO: 15710 - protein, 283 aa, Pyrococcus furiosus DSM 3638
MKVRKAVIPAAGLGTRMLPLTKAQPKEMLPVVRKPTIQYVLEEAYEAGIREVLIITGKHKRAIEDHFDRYEHEVKNPHLDKLDKILDDINIYYARQRVQRGLGDAIKYAEAFVGDEPFALLLGDTITLPSCTAGIIESYEELKAPVIAVEEVQEEKISLYGVVGIGRYINERIFEINKLVEKPEIHEAPSNLAILGRYILTPEIFEYLEEVKPDKKGEIQLTDALELMVQNGKKIYGYVFKGRRYDIGNIFDWLRANIELGLEDEELSEKLRELIKSLVGERI

SEQ ID NO: 15711 - protein, 501 aa, Staphylococcus sp. 1863A
VESALEKIGAKNIESSYRRGEAVFELPDDIEVESAIKAIDEANYQAGEIEEVSSLENVALINEDNYDLLIIGSGAAAFSSAIKAIEYGAKVGMIERGTVGGTCVNIGCVPSKTLLRAGEINHLSKDNPFIGLQTSAGEVDLASLITQKDKLVSELRNQKYMDLIDEYNFDLIKGEAKFVDASTVEVNGTKLSAKRFLIATGASPSLPQISGLEKMDYLTSTTLLELKKIPKRLTVIGSGYIGMELGQLFHHLGSEITLMQRSERLLKEYDPEISESVEKALIEQGINLVKGATFERVEQSGEIKRVYVTVNGSREVIESDQLLVATGRKPNTDSLNLSAAGVETGKNNEILINDFGQTSNEKIYAAGDVTLGPQFVYVAAYEGGIITDNAIGGLNKKIDLSVVPAVTFTNPTVATVGLTEEQAKEKGYDVKTSVLPLDAVPRAIVNRETTGVFKLVADAETLKVLGVHIVSENAGDVIYAASLAVKFGLTIEDLTETLAPY

SEQ ID NO: 15712 - protein, 210 aa, Solanum tuberosum
DVGIVIDLEPARTEDPALSIAGAVQSQKLAVRAISLLQSLPGGDIDLLCDTVVKSVRELTGYDRVMVYKFHDDEHGEVVAESRRSDLEPYIGLHYPATDIPQASRFLFKQNRVRMIVDCTATPVRVIQDELLKQPLCLVGSTLRAPHGCHPQYMVNMGNVASLTLAVVINGNDDEVAGGRNAMRLWGLVVGHHSSTRFTPYPLRYACEFL

SEQ ID NO: 15713 - protein, 320 aa, Pseudomonas sp. Ki-723
CIGCHTCSITCKNVWTSREGMEYAWFNNVESKPGIGYPKEWENQDKWKGGWIRNANGTINPRIGGKFRVLANIFANPDLPSLDDYYGPFDFDYQHLHNAPLGEHQPTARNRSLINGNRMEKIEWGPNWEEILGTEFAKRRKDKNFDKIQADIYGEYENTFMMYLPRLCEHCLNPTCAAACPSGAIYKREEDGIVLIDQEKCRGWRMCISGCPYKKIYFNWKSGKSEKCIFCYPRIEAGMPTVCAETCVGRIRYLGVLLYDADRISEVASTANEQDLYEKQLEIFLDPNDPAVIRQALAECVPQSVIDSAQRSPVYKMAVD

SEQ ID NO: 15714 - protein, 320 aa, Pseudomonas sp. Ki-1w
  unsure (1)..(320): unsure at all Xaa locations
CIGCHTCSITCKNVWTSREGMEYAWFNNVESKPGIGYPKEWENQDKWKGGWIRNANGTINPRIGGKFRVLANIFANPDLPSLDDYYEPFDFDYQHLHTAPLGKHQPTAGPRSLISGKRMEKIEWGPNWEEILGTEFAKRRKDKNFDKIQADIYGEYENTFMMYLPRLCEHCLNPACAASCPSGAIYKREEDGIVLIDQEKCRGWRMCISGCPYKKIYFNWKSGKSEKCIFCYPGIEAGMPPVCAETCVGRIRYLGVLLYDADRISEVASTANEQDLYEKQLEIFLDPNDPAVIRQALAXGVPQSVIDSAQRSPVYKMAVD

SEQ ID NO: 15715 - protein, 398 aa, Xanthomonas axonopodis pv. citri str. 306
MSNRTTHSHDGERALSLATLAIHGGQSPDPSTGAVMPPIYATSTYAQSSPGEHQGFEYSRTHNPTRFAYERCVAALEGGTRAYAFASGMAATSTVMELLDAGSHVVAMDDLYGGTFRLFERVRRRTAGLDFSFVDLTDPAAFEAAIRPDTKMVWIETPTNPMLKLVDIAAIAEIARKRGLLIVVDNTFASPMLQRPLSLGADIVVHSATKYLNGHSDMVGGIAVVGDNAELAEQMAFLQNSIGGVQGPFDSFLALRGLKTLPLRMRAHCENALALAQWLETHPAIEKVIYPGLASHPQHALAKSQMSGFGGIVSIVLKGGFDAAKRFCEKTELFTLAESLGGVESLVNHPAVMTHASIPVARRDQLGISDALVRLSVGIEDVEDLRGDLQAALAGDEG

SEQ ID NO: 15716 - protein, 492 aa, Triticum aestivum
  unsure (1)..(492): unsure at all Xaa locations
RPLLXAFNGTLPGALSNLTQLVALNLSNNSLSGRVPDLGLPALQFLNLSNNHLDGPVPGSLLRFSDASFAGNSMTRPAPVSPAVPPPSLAPPAAGAPAKKRARLSEAAVLAIIVGGCVMLFAVVAVLLIAFCSRRGGEEGSRAGSGKGGDKKGRESPESKAVTGRAGDGNRLVFFEGPSLAFDLEDLLHASAEVLGKGAFGTAYRALLEDATTVVVKRLKEVSAGRREFEQQMELIGRIRHDNVAELRAYYYSKDEKLLVYDYYSRGSVSNMLHGKRGLDRTPLDWETRVRIALGAARGIAHIHTENNGKFVHGNIKASNVFLNSQQYGCISDLGLAPLMNPITARSRSLGYCAPEITDTRKSTQCSDVYSFGVFVLELLTGKSPVQITGGGNEVVHLVRWVQSVVRXEEWTAEVFDGELMRYPNIEEEMVEMLQIAMACVSRNPERRPKMLDMVKMIEEVGRNDSGTRASTEASTPVGEARNKAESSSAAP

SEQ ID NO: 15717 - protein, 296 aa, Saccharomyces cerevisiae
MKLKREYDELIKADAVKEIAKELGSRPLEVALPEKYIARHEEKFNMACEHILEKDPSLFPILKNNEFTLYLKETQVPNTLEDYFIRLASTILSQQISGQAAESIKARVVSLYGGAFPDYKILFEDFKDPAKCAEIAKCGLSKRKMIYLESLAVYFTEKYKDIEKLFGQKDNDEEVIESLVTNVKGIGPWSAKMFLISGLKRMDVFAPEDLGIARGFSKYLSDKPELEKELMRERKVVKKSKIKHKKYNWKIYDDDIMEKCSETFSPYRSVFMFILWRLASTNTDAMMKAEENFVKS

SEQ ID NO: 15718 - protein, 339 aa, Fragaria x ananassa
  unsure (1)..(339): unsure at all Xaa locations
MRPSMSLIRSVSRVARRGYSSESVPQRKVAVLGAAGGIGQPLALLMKLNPLVSQLSLYDIAGTPGVAADVSHINTRSEVKGYAGEEQLGEALEGCDVVIIPAGVPRKPGMTRDDLFNINAGIVRSLTAAIAKYCPHAIINMISNPVNSTVPIASEVLKKAGVYDEKKLFGVTTLDVVRAKTFYAGKAGVPVAEVNVPVVGGHAGITILPLFSQATPKANLSDDYIKALTKRTQDGGTEVVEAKAGKGSATLSMAYAGALFADACLXGLNGVPDVVECSYVQSSITELPFFASKVRLGKNGVEEVLDLGPLSDFEKEGLKQLKPELKSSIEKGIKFANQS

SEQ ID NO: 15719 - protein, 294 aa, Xylella fastidiosa Ann-1
MIVGAFAERVKFAAVLLFIFIWFSFGYLPLAHMVWSTPGFMLSKGALDFAGGTVVHINAGIAGLVGAYFVGKRIGFGQVAVKPHNVPMTFTGAALLWVGWFGFNAGSALEANSIAALAFINTMLATAAAILVWSLLEKMTKGKFSALGVASGMIAGLVGVTPAAGTVGPFGAITIGAVAAVCCIWGITGLKRLLKVDDTLDVFGVHGIGGIVGAILTGVFTDKALGGQGYAEGMTMSNQVMIQAMGVGISIVWIGIVSLVGFLIVKLLFGLRVSEEAEREGLDITSHGESAYES

SEQ ID NO: 15720 - protein, 1012 aa, Bacillus cereus ATCC 10987
MLINYSTMIITCRNVVRIFSWWSFFYSQKGGKTMNNNMVHITIDGKKYTAEPGSTILGVMNENGIEHPQICYVPEVDPIQTCDTCIVEVDGKLMRSCSTVATEGMNIERNSTRAKEAQTEAMDRLLENHLLYCTVCDNNNGNCKLHNTAELMEIEHQKYPYEPKVDVSEVDMTHPFYRYDPNQCIACGQCVEVCQNLQVNETLSIDWEAERPRVIWDEGVNINDSSCVSCGQCVTICPCNALMEKTMLGEAGFMTGLKPDILEPMVDLIKEVEPGYSGIFAVSEVEAAMRDTRTKKTKTVCTFCGVGCSFEVWTKGRKILKVQPSSDAPVNAISTCVKGKFGWDFVNSKERITKPLIRKNGTFVESTWEEALNVVASKLGAIKEEYGKDAIGFISSSKITNEDNYVIQKLARQVFETNNIDNCSRYCQSPATDGLFRTIGMGGDAGTIKDIAQSGLVIIVGCNPTEGHPVLATRIKRAHKLHGQKLIVADLRKTEMAERSDVFISPKQGTDQVWLMAVTKYMIDQGWHDQRFIDENVNFFEDFKESLTAYTLEYAEEMTGISKETLIQMAEMIRDADGTCILWGMGVTQNTGGSDTSAAISNLLLATGNYRRPGAGAYPLRGHNNVQGACDMGTLPGWLPGYQHVTNDMERAKFEMAYGVKINSEPGLNNIEMLHAIDEGKMKAMYLVGEDMALVDSNANHVHEVLSSLDFFVVQDVFLSKTAQYADVVLPAAPSLEKEGTFTNTERRVQRLYQVLPTLGDAKPDWWIVQEVANKLGANWNYSHPSEIFAEMASLSPLFSQANYEVLEGWNSFLWGSFDGTNTPLLFQDGFNFPDKKARFAIADWVRPAEFPAEFDLHINNGRMLEHFHEGNMTNKSTGIQTKVPGVFVEVSPALAKERGVKTGSLVRLVSPFGALKLRALVTDRVKANELYLPMNSTDNETAINFLTGPAVDTRTNTPAYKQTKVRMEVLEVEGENPMPKANPRNKKRHPQAGIEVHRKWARPGYVHLTDK

SEQ ID NO: 15721 - protein, 225 aa, Arabidopsis thaliana
MRRGRGSSAVAGPTVVAAINGSVKEIRFRGVRKRPWGRFAAEIRDPWKKARVWLGTFDSAEEAARAYDSAARNLRGPKAKTNFPIDSSSPPPPNLRFNQIRNQNQNQVDPFMDHRLFTDHQQQFPIVNRPTSSSMSSTVESFSGPRPTTMKPATTKRYPRTPPVVPEDCHSDCDSSSSVIDDDDDIASSSRRRNPPFQFDLNFPPLDCVDLFNGADDLHCTDLRL

SEQ ID NO: 15722 - protein, 253 aa, Pseudomonas fluorescens PfO-1
MAFKPLIGVTACVKQIGLHPYHISGDKYVRAVSVAALGLPVVIPSLGQLTEIEDLLGQLDGLLLTGSPSNVEPFHYQGPDSAPGTDHDPARDATTLPLLRAAIAAGVPVLGICRGFQEMNVAFGGSLHQKVHELPGMLDHREADSPDVAVQYAPAHAVTVLPGGVFEALELPSEFQVNSIHSQGIDRLAPGLRAEAVAPDGLIEAVSVEHSPTFALGVQWHPEWQVLDNPNYLRIFQAFGEACRQRAARRNQR

SEQ ID NO: 15723 - protein, 179 aa, Haemophilus ducreyi 35000HP
MKKHHIESLISRKEVQTRIAELAEQINNHYQQTNCQNLVVVGLLRGSFMFMADLVRLIDIPVEVDFMTVSSYGSSTESSRDVKILKDLEGEINGKDVLIVEDIIDTGFTLNKVRDILRLRDPRSVSICTLLDKPSRREVAVPVEWVGFAIPDEFVVGYGIDYAQKYRNLDFIGKVVMDE

SEQ ID NO: 15724 - protein, 191 aa, Zea mays
TRPPPQSLTLDFTKPNLAVSAATSVTSTSFFSSVTAGEGSVSKGRSLMSSGKPPLSGHKRKPCAGAHSEATTNGSRCHCSKRRKNRVKRSIRVPAISSKVADIPPDEYSWRKYGQKPIKGSPYPRGYYKCSTVRGCPARKHVERATDDPAMLVVTYEGEHRHTPGAVQGPSPLATASPVPVAVSAGNGLVV

SEQ ID NO: 15725 - protein, 168 aa, Arabidopsis thaliana
MEVTNGLNLKDTELRLGLPGAQEEQQLELSCVRSNNKRKNNDSTEESAPPPTKTQIVGWPPVRSNRKNNNNKNVSYVKVSMDGAPYLRKIDLKMYKNYPELLKALENMFKFTVGEYSEREGYKGSGFVPTYEDKDGDWMLVGDVPWDMFSSSCQKLRIMKGSEAPTAL

SEQ ID NO: 15726 - protein, 240 aa, Chloroflexus aurantiacus
MNVLPPPEAKAAYVEQMFARIARGYDRVNRVMTFGLDQGWRRKVVEYVAPPVHGRALDVGTGTGDFLIELAAWAREGLVVGVDFTVPMMQAGQPKIADLAQSGRAAFVAGDALQLPFPDNTFDAITTGFVLRNVTDIPAALREMYRVARPGATMACLEVARPRHPLLRWGHRIYFEHVVPWIGALLGGDRRAYTYLPQSARAFPPPDDLAAMMREAGWSHVFYRLYGLGAVAIHVGAKKM

SEQ ID NO: 15727 - protein, 379 aa, Streptococcus agalactiae 2603V/R
MKNEMLALILAGGQGTRLGKLTQSIAKPAVQFGGRYRIIDFALSNCANSGINNVGVITQYQPLELNTHIGNGSSWGLDGIDSGVTVLQPYSATEGNRWFQGTSHAIYQNIDYIDRINPEYVLILSGDHIYKMNYDDMLQTHKDNLASLTVAVLDVPLKEASRFGIMNTDSNDRIVEFEEKPEHPKSTKASMGIYIFDWKRLRTVLIDGEKNGIDMSDFGKNVIPAYLESGERVYTYNFDGYWKDVGTIESLWEANMEYIGEDNKLHSRDRSWKIYSKNLIAPPNFMTEDANVKDSLVVDGCFVAGNVEHSILSTNVQVKPNAIIKDSFVMSGATIGEGAKINRAIIGEDAVIGDGVVIDGSKEVEVIGYKEVAGVPNED

SEQ ID NO: 15728 - protein, 336 aa, Staphylococcus aureus subsp. aureus MW2
MRAAVVTKDHKVSIEDKKLRALKPGEALVQTEYCGVCHTDLHVKNADFGDVTGVTLGHEGIGKVIEVAEDVESLKIGDRVSIAWMFESCGRCEYCTTGRETLCRSVKNAGYTVDGAMAEQVIVTADYAVKVPEKLDPAAASSITCAGVTTYKAVKVSNVKPGQWLGVFGIGGLGNLALQYAKNVMGAKIVAFDINDDKLAFAKELGADAIINSKDVDPVAEVMKLTDNKGLDATVVTSVAKTPFNQAVDVVKAGARVVAVGLPVDKMNLDIPRLVLDGIEVVGSLVGTRQDLREAFEFAAENKVTPKVQLRKLEEINDIFEEMENGTITGRMVIKF

SEQ ID NO: 15729 - protein, 328 aa, Pseudomonas sp. Ki-1z
CIGCHTCSITCKNVWTSREGMEYAWFNNVETKPGIGYPKEWENQDKWKGGWIRNANGSINPRIGGKFRVLANIFANPDLPSLDDYYEPFDFDYQHLHTAPLGEHQPIARPRSLVSGKRMEKIEWGPNWEEILGTEFAKRRKDKNFDKIQADIYGEYENTFMMYLPRLCEHCLNPACAASCPSGAIYKREEDGIVLIDQEKCRGWRMCISGCPYKKIYFNWKSGKSEKCIFCYPRIEAGMPTVCSESCVGRIRYLGVLLYDADRISEVASTANEQELYEKQLEIFLDPNDPAVIRQALAERVPKSVIDSAQRSPVYKMAVDWKLASCRS

SEQ ID NO: 15730 - protein, 379 aa, Oryza rufipogon
MATAGKVIKCKAAVAWEAAKPLVIEEVEVAPPQAMEVRVKILFTSLCHTDVYFWEAKGQTPVFPRIFGHEAGGIVESVGEGVTDLAPGDHVLPVFTGECKECAHCKSAESNMCDLLRINTDRGVMIGDGKSRFSINGKPIYHFVGTSTFSEYTVMHVGCVAKINPAAPLDKVCVLSCGISTGLGATINVAKPPKGSTVAIFGLGAVGLAAAEGARIAGASRIIGIDLNANRFEEARKFGCTEFVNPKDHDKPVQQVLAEMTNGGVDRSVECTGNINAMIQAFECVHDGWGIAVLVGVPHKDAEFKTHPMNFLNERTLKGTFFGNYKPRTDLPNVVELYMKKELEVEKFITHSVPFSEINTAFDLMHKGEGIRCIIRMEN

SEQ ID NO: 15731 - protein, 327 aa, Pseudomonas stutzeri
  unsure (1)..(327): unsure at all Xaa locations
CIGCHTCSITCKNVWTSREGMEYAWFNNVETKPGIGYPKEWENQDKWKGGWVRNGDGTINPRIGGKFRVLANIFANPDLPTIDDYYEPFDFDYQNLHTAPISDHQPVARPRSLISGQRMEKIEWGPNWXEILGTEFAKRRKDKNFDKIQADIYGQYENTFMMYLPRLCEHCLNPTCAASCPSGAIYKREEDGIVLFDQEKCRGWRMCISGCPYQQIYFNWKSGKSEKCIFCFPRIEAGIPTVCAETCVGRIRYLGVLLYDADRIHEVASTVNEQDLYAKQLEIFLDPFDPKVIEQALNDGVPMSVIEAAQKSPVYKMAVDWNAWPCR

SEQ ID NO: 15732 - protein, 361 aa, Cryptococcus neoformans var. neoformans
MSTLSNFTIPKTQTAAVVKTTGAELAIEKEHPVKQASELGPGQCLVKISHTGVCHTDLHAKSGDWPVPPSHPLIGGHEGVGIIVAIGDHTAASPVKLGDRVGIKWLADSCLSCEYCRRGYEMNCPNVKLSGYTTDGTFSEYVVSFVNHVTPIPESLDSAGAASILCAGVTTYKALKVSNTKVGDWVALPGAGGGLGHLAVQYAKAMGLKVIAIDSGAAKEKLVKSLGADAWVDFKTSKDIVADIKAATGGDGPAAAVVTAANKTGYAQAIEYLKPSGTLVAVGMPDAEMGANVFWTVFKSIRIQGSYVGNRQDAIEALDIAASGQVKVVFEEKGLDSLKGVFEDLEAGKIAGRVVLKVSDE

SEQ ID NO: 15733 - protein, 250 aa, Brassica napus
MNSVSTFSELLGSENESPVGSDYCPMLAASCPKKPAGRKKFRETRHPIYRGVRLRKSGKWVCEVREPNKKSRIWLGTFKTAEIAARAHDVAALALRGRGACLNFADSAWRLRIPETTCAKDIQKAAAEAALAFEAEKSDTTTNDHGMNMASQVEVNDTTDHDLDMEETIVEAVFREEQREGFYMAEETTVVGVVPEEQMSKGFYMDEEWMFGMPTLLADMAAGMLLPLPSVQWGHNDDFEGVADINLWSY

SEQ ID NO: 15734 - protein, 321 aa, Pseudomonas stutzeri
  unsure (1)..(321): unsure at all Xaa locations
CIGCHTCSITCKYVWTSREGMEYAWFNNVETKPGIGYPREWENQDKWKGGWVRNGDGTINPRIGGKFRVLANIFANPDLPTIDDYYEPFDFDYQNLHTAPISDHQPVARPRSLISGQRMEKIEWGPNWEEILGTEFAKRRKDKNFDKIQADIYGQYENTFMMYLPRLCEHCLNPTCAASCPSGAIYKREEDGIVSIDQEKCRGWRMCISGCPYKKIYFNWKSGKSEKCIFCFPRIEAGMPTVCAETCVARIRYLGVLLYDADRIHEVASTVNEQDLYAKQLEIFLDPFDPKVIEQALNDGVPMSVIEAXQKSPVYKMAVDW

SEQ ID NO: 15735 - protein, 392 aa, Thiomonas sp. VB-2002
CGYHAYTWDADREGGRAPHQNALGLDFRKQLPPFATIMTPAMTNVLTDKNGKRKAVMIVPDKACVVNQGLSSTRGGKMASYFYNADGLTKERLLHPRVYYGDQWMDTSWDYALQVYSGVVKKILDEDGPDEIAVAMFDHGGAGGGFENTWGTGKLIFTGIQTPTVRIHNRPAYNSECFGNRDMGIFELNNSYEDAELADVIWSIGNNPYENQTNYFLVHWLPNLQGGTVDKKKKMFPGEPVGPGKFIFVDPRRNPSISICEDLAKDQVLHLAINPGSDGALFNGLLTYIVDQGWINKDFIAKHTEGFEAAVKANAMSLDECSRITGVPVAQIKQAAEWSYKPKAPGKQPRTMHAFEKGIICGNNNYVTEQAIGAVVVATHNVGSRRGTGWVR

SEQ ID NO: 15736 - protein, 328 aa, Pseudomonas stutzeri
CIGCHTCSITCKNVWTSREALEYAWFNNVETKPGIGYPKEWENQDKWKGGWVRNGDGTINPKIGGKFRVLANIFANPDLPTIDDYYEPFDFDYQNLHTAPISEHQPVARPRSLISGQRMEKIEWGPNWEEILGTGSAKRRKGKNFDKVQADIYGQYENTFMMYLPRLCEHCLNPACAASCPSGAIYKREEDGIVLIDQEKCRGWRMCISGCPYKKIYLNWKSGKSEKCIFCFPRIEAGMPTVCAETCVGRIRYLGVLLYDADRIHEVASTVNEQDLYAKQLEIFLDPFDPKVIEQALNDGVPMSVIEAAQKSPVYKMAVDWKHGACRC

SEQ ID NO: 15737 - protein, 385 aa, Methanothermobacter thermautotrophicus str. Delta H
MFMTSVVVMAGGKGTRIRPLTFSRPKPLVPVANRPILDYIIHRVLDSGYSKVVMTLGYLKDQIRSHVLAEYPEIDFRFSVEKKPLGTAGGVKAAASEINETFIVLSGDVIFDLDLREMVKFHRKKNALVTVALTPVEDPSHYGIAVLDDDGKIKRFHEKPRPEEVFSKIANAGIYVMEPEVIEHIPQGSSDFSADIFPVLIERDAGMYGFLFDGYWNDAGKPNTFLRANHDVLNGTVTPEPDGEIAEEVPGRFGKIWIGRDVVIGDRVRIVGPAVLGDGSRVDDGAYIGKNTVIGSRVNVGENSFIRGSVILDGCVIGRGSQLLNCVVDEDCEIGAGCAIDRCAIIGRGAFIGPSTVIRSHCSVSNRLRILSGSLVDSDYPLVPE

SEQ ID NO: 15738 - protein, 327 aa, Pseudomonas stutzeri
CIGCHTCSITCKNVWTSREGMEYAWFNNVETKPGIGYPKEWENQDKWKGGWVRNGDGTINPKIGGKFRVLANIFANPDLPTIDDYYEPFDFDYQNLHTAPISEHQPVARPRSLISGQRMEKIEWGPNWEEILGTEFAKRRKDKNFDKVQADIYGQYENTFMMYLPRLCEHCLNPACAASCPSGAIYKREEDGIVLIDQEKCRGWRMCISGCPYKMIYFNWKSGNSEKCIFCFPRIEAGMPTVCAETCVGRIRYLGVLLYDADRIHEVASTVNEQDLYAKQLEIFLDPFDPKVIEQALNDGVPMSVIEAAQKSPVYKMAVDWNAWPCR

SEQ ID NO: 15739 - protein, 350 aa, Shigella flexneri 2a str. 2457T
MRFLLGVLMLMISGSALATIDVLQFKDEAQEQQFRQLTEELRCPKCQNNSIADSNSMIATDLRQKVYELMQEGKSKKEIVDYMVARYGNFVTYDPPLTPLTVLLWVLPVVAIGIGGWVIYARSRRRVRVVPEAFPEQSVPEGKRAGYVVYLPGIVVALIVAGVSYYQTGNYQQVKIWQQATAQAPALLDRALDPKADPLNEEEMSRLALGMRTQLQKNPGDIEGWIMLGRVGMALGNASIATDAYATAYRLDPKNSDAALGYAEALTRSSDPNDNRLGGELLRQLVRTDHSNIRVLSMYAFNAFEQQRFGEAVAAWEMMLKLLPANDTRRAVIERSIAQAMQHLSPQESK

SEQ ID NO: 15740 - protein, 151 aa, Triticum aestivum
YLQKKPGGEPEQQELKYPSLQEAISVPWKDLSKKTTKLYYAMRVLESYESSEGRDPGETSLSDLPAVLALRKDMCDRMSLDESRIPTSLLERLLAAGKKEHPPVCAILGGILGQEVIKSISCKGDPIKNFFYYDAADGKGAMEDTPPTPED

SEQ ID NO: 15741 - protein, 589 aa, Azotobacter vinelandii
MCGISGELRFDKRPADLAAVERITHQLTSRGPDAWGVHARGPIALGHRRLKIMDLAEASGQPMVDSDLGLDLVFNGAIYNYPELRDELQSLGYRFFSDGDTEVLLKGYHAWGEALLPRLNGMFAFAIWERDRQRLFLARDRLGVKPLYLTRNGHRLRFASSLPALLAGGDIGAALDPVALDHYLNFHAVVPAPRTLLAEVEKLPPATWLRVGADGEREQRTWWRLDYGPRDDERGFGLTEWRDTLLESLRAAVAIRQRAAVDVGVLLSGGVDSSLLVGLLREAGVENLPTFSIGFQDAGGERGDEFRYSDLIARHYATRHHQLRIDEREIIEQLPAAFRAMSEPMVSHDCIAFYLLSREVARHCKVVQSGQGADELFAGYHWYPALEGASDPYAAYRAAFFDRTHAEYLATVQPKWHGEDHAGAFVREHFARPGAQDPVDKALRLDSTVMLVEDPVKRVDNMTMAWGLEARTPFLDYRLVELSARIPPRFKLPGGGKHVLKEAARLVIPAAVIDRPKGYFPVPGLKHLQGATLDWVRELLLDPSQDRGLFDPGEVDRLLSDPQGQLTPLRGSKLWQLAALNLWLNEQGL

SEQ ID NO: 15742 - protein, 496 aa, Pseudomonas fluorescens PfO-1
MTTTRNDWEQRFQSLTLESRAFINGEYRPAISGETFECLSPVDGRFLASVASTDEADANLAVEAARQSFNAGVWANKAPAERKRILIRFADLILQHQEELALLETLDMGKPISDSMSIDIPATANAIRWSAEAIDKIYDEVAATPHDQLGLVTREPSGVVAAIVPWNFPLIMASWKFAPALAAGNSFILKPSEKSPLTAIRIAQLALDAGIPKGVFNVLPGFGHTVGKALALHMDVDVLAFTGSTAIAKQLMIYAGQSNMKRVWLEAGGKSPNVVFADAPDLRAAAQAAAGAIAFNQGEVCTAGSRLLVERSIREQFIPLLVEALQAWKPGHALDPATTVGAVVDQRQLDNVLRYISIGREQGAELIAGGRRTLEDTGGTYIEPTIFDGVTNAMTIAKEEIFGPVLSLITFDTVEEALHIANDSIFGLAAGVWTSNLSKAHTFARGLRAGSVWVNQYDGGDMTAPFGGFKQSGNGRDKSLHAFDKYTELKATWIKL

SEQ ID NO: 15743 - protein, 922 aa, Zea mays
  unsure (1)..(922): unsure at all Xaa locations
IRHEGYDRVMAYKFHEDEHGEVFAEITKPGIEPYIGLHYPATDIPQAARFLFMKNKVRMICDCRARSVKIIEDEALSIDISLCGSTLRAPHSCHLKYMENMNSIASLVMAVVVNENEEDDEPEPEQPPQQQKKKRLWGLIVCHHESPRYVPFPLRYACEFLAQVFAVHVNKEFELEKQIREKSILRMQTMLSDMLFKESSPLSIVSGSPNIMDLVKCDGAALLYGDKVWRLQTAPTESQIRDIAFWLSEVHGDSTGLSTDSLQDAGRHXSPPPPPHPGAASLGDMICGMAVAKITSKDILFWFRSHTAAEIKWGGAKHDPSDKDDNRRMHPRLSFKAFLEVVKTKSLPWSDYEMDAIHSLQLILRGTLNDASKPAQASGLDNQIGDLELDGLAELQAVTSXEMTRREGNQQTVPITAQDGSGLEHWMWNAAMTKLTGWHRDEVIDRMLLGEVFDSSNASCLLKSKDAFVRLCIIINSALAGEEAEKAPIGFFDRDGKYIECLLSIDLYGCSRGMHDHVAGLCFVPLXSFLHKLVMDKFTRVEGDYRAIIHNPNPLIPPIFGADQFGWCSEWNAAMTKLTGWHRDEVIDRMLLGEVFDSSNASCLLKSKDAFVRLCIIINSALAGEEAEKAPIGFFDRDGKYIECLLSVNRKVNADGVVTGVFCFIHVPSDDLQHALHVQQASEQTALRRLKAFSYMRHAIDKPLSGMLYSRETLKGTGLDEEQMRQVRVADNCHRQLNKILADLDQDNITDKSSCLDLDMAEFVLQDVVVSAVSQVLIGCQGKGIRVACNLPERSMKQKVYGDGIRLQQILSDFLFVSVKFSPAGGSVDISSKLTKNSIGENLHLIDFELRIKHQGAGVPAEILSQMYGEDNREQSEEGLSLLVSRNLLRLMNGDIRHLREAGMSTFILTAELAAAPSAAGH

SEQ ID NO: 15744 - protein, 1125 aa, Populus tremula x Populus tremuloides
MSSSRPSHSSSNSARSRHSARIIAQTTVDAKLHADFEESGSSFDYSSSVRVTDSVGGDQPPRSDKVTTAYLHHIQKGKLIQPFGCLLALDEKTFRVVAYSENAPELLTMVSHAVPSVGEHPVLGIGTDIRTIFTAPSASALQKAMGFGDVSLLNPILVHCKTSGKPFYAIVHRVTGSLIIDFEPVKPYEVPMTAAGALQSYKLAAKAITRLQSLPSGSMERLCDTMVQEVFELTGYDRAMAYKFHDDDHGEVVSEVTKPGMEPYLGLHYPATDIPQASRFLFMKNKVRMIVDCHAKHVKVLQDEKLPFDLTLCGSTLRAPHSCHLQYMENMNSIASLVMAVVVNDGDEDGDTPDSANPQKRKRLWGLVVCHNTSPRFVPFPLRYACEFLAQVFAIHVNKELELENQIVEKNILRTQTLLCDMLMRDAPLGIVTQSPNIMDLVKCDGAVLFYRNKIWRLGITPSDLQLQDIAFWLSEYHMDSTGLSTDSLYDAGYPGALALGDVVCGMAAVRITSKDMLFWFRSQTAAEIRWGGAKHEPGEKDDGRRMHPRSSFKAFLEVVKTRSLPWKDYEMDAIHSLQLILRNTFKDIETMDVDTKTIHARLSDLKIEGMQELEAVTSEMVRLIETATVPILAVDVDGLVNGWNTKISELTGLLVDKAIGKHLLTLVEDSSVDIVKRMLFLALQGKEEQNIQFEIKTHGSKSECGPICLVVNACASRDLHENVVGVCFVGQDITGQKMVMDKFTRIEGDYKAIVQNRNPLIPPIFGTDEFGWCSEWNPAMTNLTGWKREEVLDKMLLGEVFGLNMACCRLKNQEAFVNLGVVLNTAMTGQESEKVSFGFFARTGKYVECLLCVSKKLDREGAVTGVFCFLQLASQELQQALHVQRLSEQTALKRLKALAYLKKQIWNPLSGIIFSGKMMEGTELGAEQKELLHTSAQCQCQLSKILDDSDLDSIIEGYLDLEMVEFTLREYYGCYQSSHDEKHEKGIPIINDALKMAETLYGDSIRLQQVLADFCRCQLILTPSGGLLTVSASFFQRPVGAILFILVHSGKLRIRHLGAGIPEALVDQMYGEDTGASVEGISLVISRKLVKLMNGDVRYMREAGKSSFIISVELAGGHKSQKRA

SEQ ID NO: 15745 - protein, 181 aa, Oenococcus oeni PSU-1
MTDTDPRFSKILHDHREIETAAKRIGAQIDRDYAGKTPILVVVLKGAVMWAGDLFRNISIDVEMDFIDIASYHGGIASSNEITLRTDLTSDVKDRDVIIVEDIVDTGLSLRYLESLLSRRGARSVKTATMLNKQKGHKVDIRADYVGFEIDNEFVAGYGLDYQEIWRNLPFIGVVNPDIYS

SEQ ID NO: 15746 - protein, 312 aa, Haemophilus somnus 2336
MKKFAMVFPGQGSQAVGMLAELATEYPIVEETFQQASSVLGYDLWQLVQQGPAEELNKTWQTQPALLAASVAIYRVWQQKYPYLKPEVMAGHSLGEYSALVCAGVIDFQDGIKLVQLRGKLMQQAVPEGTGAMYAIIGLDNESIVQACKASEQGEIVSAVNFNSPGQVVIAGAKVAVERAAVACKEAGAKRALPLAVSVPSHCALMKPAAEELAVALEKMTFSIPQIPVINNVDVKAENETTKIRTALVRQLYSPVRWTEIVENMAREGIELLFEMGPNKVLTGLTSRIAKELNAKAVNDLSSLNTVEESLD

SEQ ID NO: 15747 - protein, 982 aa, Bacillus subtilis
MNMMDVKSISVRVDGTEIQARAGATILDILNENGIEYPQICHVPEVDPIQTCDTCIVEANGKLVRSCATVAENGMSIDLSGNRVKEAQTEAMDRLLENHLLYCTVCDNNNGNCTLHNTAEMMGIEHQKYPYTPKEDPSCAVDMSHPFYRYDPNQCIACGQCVEVCQNLQVNETLSIDWERERPRVIWDEGVPINESSCVSCGQCVTVCPCNALMEKSMLGQAGFMTGIKEDVMEPMIDLVKNVEPGYGSIFAISEVEAAMRETRTKKTKTVCTFCGVGCSFEVWTKGRDILKIQPVSDAPVNAISTCVKGKFGWDFVNSKERITKPLIRKNGAFVESSWEEALDLVASRLGSIKEQYGKGSVGFISSSKITNEENYVIQKLARQVFETNNVDNCSRYCQSPATDGLFRTVGMGGDAGTIKDIAKAGLVIIVGANPAEGHPVLATRVKRAHKLHGQKLIVADLRKNEMAERSDLFISPKQGTDQVWLMAVTKYMIDQGWHDQAFIDENVNYFEDYKETLKTYTLDYAERITGLSKENIIQIAEMIRDADGTCVLWGMGVTQNTGGSDTSAAISNLLLATGNYRRPGAGAYPLRGHNNVQGACDMGTLPGWLPGYQHITDDKARAKFEEAYGVEIDGKPGLDNIQMLHAIEEGKMKAMYLVGEDMALVDSNANHVHDILSSLDFFVVQDIFLSRTAQYADVVLPATPSLEKDGTFTNTERRVQRLYQALPTLGDAKPDWWIIQEVANRLGANWNYSHPSDIFSEMASLSPLFAKASYEVLEGWNSFLWGSFTGESTPLLYEDGFNFPDKKARFALSDWTEPAAFPEEYDLHINNGRMLEHFHEGNMTNKSKGIQAKVPNVFVEISPELAQERGVCDGSLVRLVSPFGAVKLNALITDRVRKNELYLPMNSTDKESAINFLTGPAADKRTNTPAYKQTKVRMEVLGGCETAPLPKTNPRNKKRHPQNGVEAERKWNRPGYVHLTD

SEQ ID NO: 15748 - protein, 722 aa, ASPERGILLUS NIDULANS FGSC A4
MRALGLVGLVGVANAVCPYMTGELGRRDTNPDATEATEEFLSEYYLDDTDSYLTTDVGGPIEDQQSLKAGARGSTLLEDFIFRQKIQRFDHERVPERAVHARGAGAHGVFTSYGDFSNITAASFLSAEGKETPVFVRFSTVAGSRGSSDLARDVHGFATRFYTDEGNFDIVGNNIPVFFIQDAIQFPDLIHAVKPKGDREIPQAATAHDAAWDFFSQQPSTLHTLLWAMAGHGIPRSFRHVDGFGVHTFRLVTEDGSTKLVKFHWKTLQGLASMVWEEAQQISGKNPDYMRQDLFESIEAGRYPEWELNVQIMDEEDQLRFGFDLFDPTKIVPEEYVPLTPLGKMTLNRNPRNYFAETEQVMFQPGHVVRGVDFTEDPLLQQGRLFSYLDTQLNRNGGPNFEQLPINQPRVAIHNNNRDGAGQMFIPLNPDAYSPNTLKGSTLKQANQTAGRGFFTAPDRTANGNLVRAKSSTFDDAWSQPRLFWNSLLPAEKQFVVNAIRFENANVKSDVVKNNVIVQLNRISNDLATRVAKAIGVDAPEPDNTYYHDNTTSNIGAFGHRLQSLAGLKIAVLASVDAEESFSAATALKAELSNDNLDVIVVAERFSNGVNQTYSASDAIQFDAVVVAPGAEKLFGAKSAANSSSTLYPAGRPLEILVDAFRFGKPVAALGSGSTAFDNAGINTAVEGVYVADAVDESFANNLEEGLTVFKFLDRFALDSDE

SEQ ID NO: 15749 - protein, 156 aa, Oryza sativa
MAPSVMASTATTVAPFQGLKYTVGMPVARRSGNSSFGNVSNGGRIRCMQVWPLEGIKKFETLFYLPPFTVEDLLKQIEYLLRYKWVPCLEFSKVGYVYRENHRSPGYYDGRYWTMWKPAMFWCTYATHVLKELEEAMKAYPDAFVRIIGFDNVRHV

SEQ ID NO: 15750 - protein, 920 aa, Nostoc sp. PCC 7120
MSPTAKPNSQVSLNQESVLRRITARIRQSLELEDIITATTAEVRALLGTDRVMIYKFHPDGSGQVIAESIYENRLPSLLGLNFPADDIPPQARELLVKSKVRSIVDVATGMIGQSPVHDLETGELISEDICYRPVDSCHVEYLTAMGVKSSVVAPIFCQDELWGLLVSHHSENRTVSEDELEAMQMIVDQLAVAIAQSHLLTQARKKAQKEAIINRIITLLHSLPTIVLKPALEAAVGAFAGVGGRLCLRNQAVESQHVVLRSLAECLIPGSNCVQLYTCGQQPITPEQTIYPLIEQYRVWQEHYTSHHDIWAIADIYQDSTLRSLQAVFQPTKIRGILIIPLEYRQQLLGYLSIFRNEIDTETLWAGRIDQDQRQMFPRVSFNLWRDAKKSQAQEWTSEEIELAKEIGQHFASAIQQYELYQQVQAFNENLEKQVQKRTLELRHTSEQQQAVFGVISKIRESLDTNTIFQITTKEACQLIKADRVSVYRFDNEWGGEFVGDFEATSPHWSNESKISINTVWNDTYLQNTQGGRYRYNETFAVDDIYKVGFTQCHVENLEQFQIYAFVLAPIFVGQKLWGLLATYQHSGPRQWKPSEVNFLTQIAAQLGIALQQAELLNQTQQQAQKLTQALHHLQQTQTQLIQTEKMSSLGQLVAGVAHEINNPVNFIYGNLSHVSEYAQNLLTMLELYQQELPNPSVEILEQADEIDLEFLAKDLPKTLSSMQIGVERIRQIVMSLRTFSRLDEAEMKAVNIHEGIDSTLLILQHRLKAKPETAGIKLTKKYAEIPLVECYAGQMNQVFMNVLSNAIDALEDCKETKSPNHNGEIIISTSFGQIRDSIQSIVIRIMDNGPGIPEDLRLRICDPFFTTKPVGKGTGLGLSISYKIVVDRHGGVFKCDSQLGSGTEFWIEIPIQQVNGNW

SEQ ID NO: 15751 - protein, 555 aa, Mycobacterium avium subsp. paratuberculosis str. k10
MTTARPVKTRNEGQWALGDREPLNDTEKIKLADGPLNVRERIINVYAKQGFDSIDKSDLRGRFRWMGLYTQREQGYDGSWTGDDNTDKIEAKYFMMRVRSDGKAMSAHTMRTLGQISTEFARDTADISDRENLQLHWIRIEDVPEIWRRLESVGLQTTEACGDCPRGIHGSPLAGDSLDEVLDPSPAIEEIVRRSLNNPEYANLPRKYKTAVSGLQDVSHETHDVAFVGVEHPEHGPGLDLWVGGGLSTNPMLAQRLSVWVPLDEVPDVWEAVTQLFRDYGYRRLRAKARLKFLVKDWGIEKFREILEQEYLNRRLIDGPAPAPVKHTIDHVGVQKIKNGLNAVGVAPIAGRVSGTTLSAVADLMEQVGSDRARWTPFQKLVILDVPDDKVDELVTGLDALGLPSRPSSWRKNTMACTGIEFCKLSFAETRVRTQTLVPELERRLADVDAQLDAPISVHLNGCPNSCARIQVADIGFKGQWIDNGDGTSVEGFQVHLGGGLGEQSGFGRKLRQHKVTSEELGDYIDRVTRKYLEGRNDGETFASWALRADEEELR

SEQ ID NO: 15752 - protein, 561 aa, Yersinia pestis biovar Medievalis str. 91001
MATPLLRTCIGVVTVANHPRAGQPAQQSDLINVAQLTSQYYVLQPDAEDPAHAVKFGTSGHRGSSVRHSFNEAHILAIAQAIAEVRHQHGISGPCYVGKDTHALSEPAFISVLEVLTANGVDVVVQQDNGFTPTPAISHVILCHNAQGKALADGIVITPSHNPPEDGGIKYNPPNGGPADTNLTSVIEKRANQLLSQNLKGVKRQTLDKAWQSNHLREQDLLQPYVEGLVDVVDIPAIQQAGLKLGVDPLGGSGIAYWQRIAEYYKLDLTLVNNAIDQTFRFMHLDHDGVIRMDCSSESAMAGLLALRDKFDLAFANDPDYDRHGIVTPAGLMNPNHYLAVSINYLFQHRPQWGAGVAVGKTLVSSAMIDRVVADLGRKLVEVPVGFKWFVDGLHDGSFGFGGEESAGASFLRFNGTPWSTDKDGIIMCLLAAEITAVTGKDPQRHYDDLAQRFGAPSYNRIQAPATQAQKNALSRLSPEMVKANTLAGDPITARLTNAPGNGASIGGLKVMTENGWFAARPSGTEEAYKIYCESFLGAEHREKIEQEAVKIVSEVLAEAK

SEQ ID NO: 15753 - protein, 713 aa, Pseudomonas fluorescens PfO-1
MSTKKPANDKSQLAGTDTPDRANTNAKLDSLEKFRSDATGQALRTNQGVKVADNQNTLKAGARGPSLLEDFIMREKITHFDHERIPERIVHARGTGAHGFFQSYENHSTLTKAGFLQDPGKKTPVFVRFSTVQGPRGSGDTVRDVRGFAVKFFTDEGNFDLVGNNMPVFFIQDAIKFPDFVHAVKPEPHNEIPTGGSAHDTFWDFVSLVPESAHMVIWAMSDRAIPKSLRSMQGFGVHTFRLINAEGKSRFVKFHWRPTAGTCSLVWDEAQKLAGKDTDYHRRDLWEAIEMGDYPEWELGVQVIEEENEHDFDFDILDPTKLIPEEIVPITPLGKMTLNRNPDNFFAETEQVAFCPGHIVPGIDFSNDPLLQGRLFSYTDTQISRLGGPNFHELPINRPVAPFHNGQRDAQHRTVIDKGRASYEPNSIDGGWPKETPPAAQDGGFESYPERIDANKIRQRSESFSDHFSQARLFFNSMSAHEKEHIIAAYSFELGKVEREFIRARQVNEILANIDLELAKRVAANLGLPAPGKGTVDVPKTSLDRSPSLSQANLLPENIKTRKVAILAANGVDGAAIDAMKKALAAEGAHAKLLGPTSAPVKTADGKSLAVDASMEGLPSVAFDAVFVPGGAASVKALSGDGVALHYLLEAYKHLKAIALQGEAKQLLDVLKLEADAGLLEGKDVGALTKPFFSAIGQHRVWDREAKAKAIPA

SEQ ID NO: 15754 - protein, 486 aa, Oryza sativa (japonica cultivar-group)
MSTAAAGAAPVSLDTINPKVLKCEYAVRGEIVTHAQLQQELQKNPDSLPFDEILYCNIGNPQSLGQQPVTFFREVLSLCDHPALLDKSETHALYSDAIERAWQILDKIPGRATGAYSHSQGIKGLRDEIAAGIAARDGFHASGDNIFLTDGASPAVHMMMQLLIRSENDGILCPIPQYPLYSASIALHGGSLVPYFLDEETGWGLEVDELKKQLEEAQSKGITVRALVVINPGNPTGQVLAEENQKKIVEFCKNEGLVLLADEVYQENIYVEDKKFHSFKKIARSMGYTDDDLPLVSFQSVSKGYYGECGKRGGYMEVTGFSADVREQIYKVASVNLCSNVSGQILASLIMNPPKAGDESYESFMVEKDGILSSLARRAKALEEAFNSLEGITCNKAEGAMYLFPRIYLPQKAIGAAQAAGTAPDAYYARRLLEATGIVVVPGSGFGQVPGTWHFRCTILPQEDKIPAIISKFKEFHEKFMDEFRD

SEQ ID NO: 15755 - protein, 266 aa, Triticum aestivum
  unsure (1)..(266): unsure at all Xaa locations
MEAPAGQTSSKHIVLVHGACVGGWAWFKVATRLRDAGXRVSTPDLAASGVDPRPLREVPTFFDYTKPLLDLLESLPPGEKVVLVGHSLGGVNIALACELFPEKVAAAVFLSAFMPDHRSSPAYVLEKFVEGGTLDWMDTEFKPQDPEGKLPTAMQFGPLVTRAKFLQLCSPEDLMLGRSLMRVGSMFVEDLRLQPPYTEARYGSVRRVFIVLKDDNAIVEGFQRWMVQNYPVDEVKEIDGADHMALFSTPAEVAHCLADIAVKYAA

SEQ ID NO: 15756 - protein, 396 aa, Gossypium hirsutum
  unsure (1)..(396): unsure at all Xaa locations
MSLSLQSSPSSFLSSSLPKLRLGFANGCPSSSLLFKFNASFPAIRASSGFSSSLDTGLRTELDAVSTFSEIVPDTVIFDDFEKFPPTAATVSSSLLLGILSLPDTIFRNAVDLALADSTCSRLDNPELRLACFFNKALVNVGGDLAKLVPGRVSTEVDARLAYDTHGIIRRVHDLLKLYNEIDVPPERLLFKIPXTWQGIEASRLLESEGIQTHLTFVYSFAQAAAAAQAGASVIQIFVGRVRDWARNHSGDPEIEAAIQRGEDPGLGLVTKAYNYIHKYGHKXKAYGLQQFETKQDLFSXLGVDYIIAPLKILQSLKESITAPDEKYSYIRRLSPQSAANHDFTAEELTKWDQLSLASAMGPASMQLLAAGLEGYVNQANRVEELLDKIWPPPNV

SEQ ID NO: 15757 - protein, 520 aa, Ralstonia eutropha JMP134
MRDWFTGPQGQARSVRLTVEACGLTLDYAKNRVTEDTLSLLFALARQARVCERRDAMFAGEPVNTTERRAALHMALRAHPGDGYRALGVPVEADVSAVLAQMERFARDVRSGSWTGFDGRAITDVVNIGIGGSDLGPRMVCRALEQDTEPGPRLHFVANVDGYDLARTLARLDAATTLVIVCSKTFTTLETMANARTARDWFLRHGVTHSDLARHFVAVSTNRDAVAAFGIDPVNMFPFWDWVGGRFSLWSAVGLSIAVAIGFDRFRQLLDGARAMDRHFAGAPPEQNLPMILGLLDVWYRSFLGTASRCVAPYCEPLDLLPAFLQQLEMESNGKSVQHDGAALEAGSAAVVWGTTGTNGQHAYFQMVHQGSQLVPVDFIACLQPHSDLPGHHTKLLANCFAQGEALLRGRTADEVRAEGKADEALVPHLVFEGNRPSNTLLLQRLDAFHLGALLAMSEHRTFVQGALWNINPFDQWGVELGKMLARPIERELEGAPPQPHDASTAALIRRAAQFCASTD

SEQ ID NO: 15758 - protein, 168 aa, uncultured crenarchaeote DeepAnt-EC39
MTKLEKNLNENYVDTNQENESDSKNDDISNILTASVEAAIEQFRKIREGDNKELTEKQIAEIDKECEIIRNREIITKDLQHEVVEITSDGGHVIVGPITLTRFEKARIMGARALQLSLGAPVFVEIPKNTTTSLQIAMEELKKRVIPIVIKRTLPNQDYQNIPLDKFQ

SEQ ID NO: 15759 - protein, 379 aa, Oryza rufipogon
MATAGKVIKCKAAVAWEAAKPLVIEEVEVAPPQAMEVRVKILFTSLCHTDVYFWEAKGQTPVFPRIFGHEAGGIVESVGEGVTDLAPGDHVLPVFTGECKECAHCKSAESNMCDLLRINTDRGVMIGDGKSRFSINGKPIYHFVGTSTFSEYTVMHVGCVAKINPAAPLDKVCVLSCGISTGLGATINAAKPPKGSTVAIFGLGAVGLAAAEGARIAGASRIIGIDLNANRFEEARKFGCTEFVNPKDHDKPVQQVLAEMTNGGVDRSVECTGNINAMIQAFECVHDGWGVAVLVGVPHKDAEFKTHPMNFLNERTLKGTFFGNYKPRTDLPNVVELYMKKELEVEKFITHSVPFSEINTAFDLMHKGEGIRCIIRMEN

SEQ ID NO: 15760 - protein, 129 aa, Pseudomonas alcaligenes
CIGCHTCPVTCKNVWTSREGMEYAWFNNVETKPGIGYPKEWENQETWKGGWVRNKDGSINPKIGGKFRVLANIFSNPDLPSIDDYYEPFDFDYQHLHNAPLGNHQPVARPRSVISGKRMEKIEWGPNWE

SEQ ID NO: 15761 - protein, 190 aa, Glycine max
  unsure (1)..(190): unsure at all Xaa locations
IRLWVDGEKFLTSEPPEVVQARNDNSHGTNFPDSPEPIYGTQFLPRKFKIAVTVPTDNSVDILTNDIGVVVVMDDDGEPQGFNIYVGGGMGRTHRLETTFPRLAEPLGYVPKEDILYAVKAIVVTQRENGRRDDRKYSRLKYLISSWGIEKFRGVVEQYYGKTFEPFRALPEWEXKSYFGWHEQGDGSSL

SEQ ID NO: 15762 - protein, 457 aa, Halobacterium sp. NRC-1
MDEVISFGTDGWRAPLSEFTSDRVRIVAQGVADHLAADGGAGDTVAVGYDARDTSAGFAADAADVLAANGFDVVLPERDCPTPAVSHAIVERDLAGAVVITASHNPPEYNGVKFIPADGAGALPSDTDGIMANLGTPAAGDPTGEIRRVDFTGPHVAHCRRLVDASLDGLTVVYDAMHGSGRGVTGDALEAAGADVIRRRCTQDAAFGGTPPEPTPEHLAGLADAVDEHDADLGIANDGDADRVAAVTPERGVLDGNWFYVLAYDYLLESGTGPAVRTVSTTGHVDAVAAAHDCEVVEVPVGFKWVAAAVDDHDALFGGEESGGYTMRGHVRQKDGVLMGLLAAAAASETALDDRIDAIEDAHGEIHQDKTSVDCPDDRKQAVLDGLDAALPDSVAGVAVDSVNDTDGFKIVLADGSWLLVRPSGTEPKMRVYAEAGSAARVAALLDAGRELVAPVV

SEQ ID NO: 15763 - protein, 479 aa, Corynebacterium efficiens YS-314
MLCRTRIVEIVTEHYDVVVLGAGPGGYVSAIRAAQLGKKVAVIEKQYWGGVCLNVGCIPSKALIKNAEIAHIFNHEKKTFGINGEVTFNYEDAHKRSRGVSDKIVGGVHYLMKKNKITEIDGFGTFKDAKTIEVTDGKDAGKTVTFDDCIIATGSVVNSLRGVEFSENVVSYEEQILNPVAPKKMVIVGGGAIGMEFAYVLGNYGVDVTLIEFMDRVLPNEDPEVSKVIAKAYKKMGIKLLPGHATTAVRDNGDSVEVDYQKKGSDKTETITVDRVLISVGFRPRVEGFGLENTGVKLTERGAIDIDEHMRTNVDGIYAIGDVTAKLQLAHVAEAQGIVAAETLAGAETQTLGDYMMMPRATFCNPQVASFGYTEEQAKEKWPDREIKVSSFPFSANGKAVGLAETDGFAKIVADAEFGELLGGHIVGANASELLNELVLAQNWDLTTEEISRSVHIHPTLSEAVKEAAHGVNGHMINF

SEQ ID NO: 15764 - protein, 278 aa, Corynebacterium sp.
MTVPSIVLNDGNSIPQLGYGVFKVPPADTQRAVEEALEVGYRHIDTAAIYGNEEGVGAAIAASGIARDDLFITTKLWNDRHDGDEPAAAIAESLAKLALDQVDLYLVHWPTPAADNYVHAWEKMIELRAAGLTRSIGVSNHLVPHLERIVAATGVVPAVNQIELHPAYQQREITDWAAAHDVKIESWGPLGQGKYDLFGAEPVTAAAAAHGKTPAQAVLRWHLQKGFVVFPKSVRRERLEENLDVFDFDLTDTEIAAIDAMDPGDGSGRVSAHPDEVD

SEQ ID NO: 15765 - protein, 425 aa, Corynebacterium efficiens YS-314 [sequence omitted]

SEQ ID NO: 15766 - protein, 828 aa, Shigella flexneri 2a str. 2457T
MKLSRRSFMKANAVAAAAAAAGLSVPGVARAVVGQQEAIKWDKAPCRFCGTGCGVLVGTQQGRVVACQGDPDAPVNRGLNCIKGYFLPKIMYGKDRLTQPLLRMKNGKYDKEGEFTPITWDQAFDVMEEKFKTALKEKGPESIGMFGSGQWTIWEGYAASKLFKAGFRSNNIDPNARHCMASAVVGFMRTFGMDEPMGCYDDIEQADAFVLWGANMAEMHPILWSRITNSRLSNQNVTVAVLSTYQHRSFELADNGIIFTPQSDLVILNYIANYIIQNNAINQDFFSKHVNLRKGATDIGYGLRPTHPLEKAAKNPGSDASEPMSFEDYKAFVAEYTLEKTAEMTGVPKDQLEQLAQLYADPNKKVISYWTMGFNQHTRGVWANNLVYNLHLLTGKISQPGCGPFSLTGQPSACGTAREVGTFAHRLPADMVVTNEKHRDICEKKWNIPSGTIPAKIGLHAVAQDRALKDGKLNVYWTMCTNNMQAGPNINEERMPGWRDPRNFIIVSDPYPTVSALAADLILPTAMWVEKEGAYGNAERRTQFWRQQVQAPGEAKSDLWQLVQFSRRFKTEEVWPEELLAKKPELRGKTLYEVLYATPEVSKFPVSELAEDQLNDESRELGFYLQKGLFEEYAWFGRGHGHDLAPFDDYHKARGLRWPVVNGKETQWRYSEGNDPYVKAGEGYKFYGKPDGKAVIFALPFEPAAEAPDEEYDLWLSTGRVLEHWHTGSMTRRVPELHRAFPEAVLFIHPLDAKARDLRRGDKVKVVSRRGEVISIVETRGRNRPPQGLVYMPFFDAAQLVNKLTLDATDPLSKETDFKKCAVKLEKV

SEQ ID NO: 15767 - protein, 205 aa, Juglans regia
KRRNGLLKKAYELSVLCDAEVALIVFSSRGRLYEYANNSVKSTIDRYKKARADSSNTGSVSEANTQFYQREAATLRQQINSVQESNRKMLGESLSGMAFRDLKSLESKLESGIRRIRSKKNELLFAEIEYMQKREVDLHNNNQLLRAKIAENERNQQNLNVMPGGGNLELMHSQPFDSRNYFQVDALQPNHDQYPRQDQMALQLV

SEQ ID NO: 15768 - protein, 291 aa, Leuconostoc mesenteroides subsp. mesenteroides ATCC 8293
MKPVRKAIIPAAGLGTRFLPATKALAKEMLPIVDTPTIEYIVREAIESGIEDIVIVDGKSKRSIEDHFDSNPELENNLREKGKDELLKLVEETTDINMYFIRQSHPKGLGDAVLTAKAFIGDEPFVVLLGDDLMQDEVPLTKQLIQRYEETGESTLAVMKVPHDQVSEYGVIDPAAQVDKGGLYRVKSFVEKPKPEDAPSDLAIIGRYLLTPEIFEELENTKPGKGNEIQLTDAIDSLNNRQHVYAHEFKGSRYDIGSKIGFLETNIEFGLKHPQTKDALRAYIKELASKL

SEQ ID NO: 15769 - protein, 157 aa, Glycine max
  unsure (1)..(157): unsure at all Xaa locations
MSSAKKITLKSSDGEAFEVEEAVAXLESQTIKHMIEDDCADSGIPLPNVTSKILAKVIEYCKKHVEAANPEDKPSEDDLKAWDAEFVKVDQATLFDLILAANYLNIKSLLDLTCQTVADMIKGKTPEEIRKTFNIKNDFTPEEXEEEVRRENQWAFE

SEQ ID NO: 15770 - protein, 477 aa, Burkholderia fungorum LB400
MSQYRSFINGEWLGTTSTLPNLNPSDLSDVVGEALLADDALVADAIAAARHAFRSWSLTTPQQRADILDAAGTRILQRKEELGTLLAREEGKRLPEAIGEVGRAGNIFKFFAGEALRIGGEVVSSVRPGMTVEVTREPLGVIGMITPWNFPIAIPAWKIAPALAYGNTVVIKPAEAVPACATELVKILEESGLPAGVVNLLLGPGRVVGEALVASPDIDAISFTGSESTGRAIAVKCVTSGKKVQLEMGGKNPLVVIDDADLDVAVEAALDGSFFSTGQRCTASSRLIVTSAIHGQFVAALQRKASELVVGHALDKATQIGPVLDDRQLQQNLKYLKIAAEEGGQVLGGERVERPTRGYFMRPALVIGTDNTMRINREEVFGPVASVIKVADYEEALAVSNDTPYGLAAGICTTSLKYASHFRRHAEAGMVMVNAPTAGVDYHVPFGGRKRSSYGPREQGTYAREFYTVVKTAYVKA

SEQ ID NO: 15771 - protein, 409 aa, Methanobacterium bryantii
MSLPFYTIDDFNLEDKTVLVRVDINSPVDPSTGSILDDTKIKLHAETIDEISKKGAKTVVLAHQSRPGKKDFTTLQQHAKALSNILNRPVDYIDDIFGTAAREEIKRLKKGDILLLENVRFYPEEILKRDPHQQAETHMVRKLYPIIDIFINDAFAAAHRSQPSLVGFAVKLPSGAGRIMEKELKSLYGAVDNAEKPCVYVLGGVKVDDSIMVLENVLRNGSADYVLTTGLVANIFLWASGINLGKYNEDFIINKGYIDFVEKGKQLLEEFDGQIKMPDDVAVCVDNARVEYCTKNIPNKPIYDIGTNTITEYAKFIRDAKTIFANGPAGVFEQEGFSIGTEDILNTIASSNGYSIIGGGHLAAAANQMGLSSGITHISSGGGASINLLAGEKLPVVEILTEVKMKGRK

SEQ ID NO: 15772 - protein, 410 aa, Methanothermus fervidus
MFKFYTMDDFDYSGSRVLVRVDINSPVDPHTGRILDDTRMRLHSKTLKELVDENAKVAILAHQSRPGKRDFTTMEEHSKVLSNILDMPVTYVEDIFGCAARESIRNMENGDIILLENVRFYSEEVLKRDPKVQAETHLVRKLSSVVDYYINDAFAAAHRSQPSLVGFPLKLPSAAGRLMEREVKTLYKIIKNVEKPCVYILGGVKIDDSIMIMKNILKNGSADYILTSGLVANVFLEASGIDIKEKNRKILYRKNYKKFIKMAKKLKDKYGEKILTPVDVAINKNGKRIDVPIDDIPNFPIYDIGMETIKIYAEKIREAKTIFANGPAGVFEEQQFSIGTEDLLNAIASSNAFSVIAGGHLAAAAEKMGISNKINHISSGGGACIAFLSGEELPAIKVLEEARKRSDKYI

SEQ ID NO: 15773 - protein, 237 aa, Pinus taeda
MGSLETEKTVTGYAARDSSGHLSPYTYNLRKKGPEDVIVKVIYCGICHSDLVQMRNEMGMSHYPMVPGHEVVGIVTEIGSEVKKFKVGEHVGVGCIVGSCRSCGNCNQSMEQYCSKRIWTYNDVNHDGTPTQGGFASSMVVDQMFVVRIPENLPLEQAAPLLCAGVTVFSPMKHFAMTEPGKKCGILGLGGVGHMGVKIAKAFGLHVTVISSSDKKKEEAMEVLGADAYLVSKDTEK

SEQ ID NO: 15774 - protein, 315 aa, uncultured crenarchaeote DeepAnt-EC39
MNEPIKNIRLLLEEITIKCDASWIAFSGGLDSSILAEIKKEQNLNAITIISKDFLATDLSYSQITAKHIDIPLEIKYVSIDQMLGAIESTIKILKNFNDIEIRNSIVPYLYMNALKEKNITNVITGDGADEIFAGYNFLLKKDHNELKNELKRIKKIMHFTSQKIANKLGMSIQMPFIDEKIIELVETLPINLLINQKNGIKFGKWVLRKAFENTLPTNVIWRKKTAMQDGSGTTNLTKLFDSIITDDIFTKKVKKIKSECNIKIRTKESLYYYELFKENFIIPECEDKKNICPDCNAEIVSNSKFCRMCGKFPI

SEQ ID NO: 15775 - protein, 84 aa, Oryza meridionalis
ARYVKFHWKPTCGVSCLMDDEATLVGGKNHSHATQDLYDSIAAGNFPEWKLFVQVIDPEEEERFDFDPLDDTKTWPEDEVPLRP

SEQ ID NO: 15776 - protein, 379 aa, Oryza rufipogon
MATAGKVIKCKAAVAWEAAKPLVIEEVEVAPPQAMEVRVKILFTSLCHTDVYFWEAKGQTPVFPRIFGHEAGGIVESVGEGVTDLAPGDHVLPVFTGECKECAHCKSAESNMCDLLRITTDRGVMIGDGKSRFSINGKPIYHFVGTSTFSEYTVMHVGCVAKINPAAPLDKVCVLSCGISTGLGATINVAKPPKGSTVAIFGLGAVGLAAAEGARIAGASRIIGIDLNANRFEEARKFGCTEFVNPKDHDKPVQQVLAEMTNGGVDRSVECTGNINAMIQAFECVHDGWGVAVLVGVPHKDAEFKTHPMNFLNERTLKGTFFGNYKPRTDLPNVVELYMKKELEVEKFITHSVPFSEINTAFDLMHKGEGIRCIIRMEN

SEQ ID NO: 15777 - protein, 289 aa, Streptococcus pneumoniae
MKGIILAGGSGTRLYPLTRAASKQLMPVYDKPMIYYPLSTLMLAGIKDILIISTPQDLPRFKDLLLDGSEFGIKLSYAEQPSPDGLAQAFLIGEEFIGDDSVALILGDNIYHGPGLSKMLQKAAKKEKGATVFGYQVKDPERFGVVEFDTDMNAISIEEKPENPRSNYAVTGLYFYDNDVVEIAKGIKPSARGELEITDINKAYLNRGDLSVELMGRGFAWLDTGTHESLLEASQYIETVQRMQNVQVANLEEIAYRMGYISCEDVLELAQPLKKNEYGQYLLRLIGEA

SEQ ID NO: 15778 - protein, 85 aa, Oryza barthii
KARYVKFHWKPTCGVSCLMDDEATIVGGKNHSHATQDLYDSIAAGNFPEWKLFVQVIDPEEEERFDFDPLDDTKTWPEDEVPLRP

SEQ ID NO: 15779 - protein, 84 aa, Oryza glaberrima
ARYVKFHWKPTCGVSCLMDDEATIVGGKNHSHATQDLYDSIAAGNFPEWKLFVQVIDPEEEERFDFDPLDDTKTWPEDEVPLRP

SEQ ID NO: 15780 - protein, 86 aa, Oryza glaberrima
GKARYVKFHWKPTCGVSCLMDDEATIVGGKNHSHATQDLYDSIAAGNFPEWKLFVQVIDPEEEERFDFDPLDDTKTWPEDEVPLRP

SEQ ID NO: 15781 - protein, 526 aa, Chlamydophila pneumoniae CWL029
MERKRFIDCDSTKILQELALNPLDLTAPGVLSAERIKKFSLLGGGFTFSFATERLDDAILAALISLAEERGLHESMLAMQQGQVVNYIEGFPSEMRPALHTATRAWVTDSSFTGEAEDIAVRSRVEAQRLKDFLTKVRSQFTTIVQIGIGGSELGPKALYRALRAYCPTDKHVHFISNIDPDNGAEVLDTIDCAKALVVVVSKSGTTIETAVNEAFFADYFAKKGLSFKDHFIAVTCEGSPMDDTGKYLEVFHLWESIGGRFSSTSMVGGVVLGFAYGFEVFLQLLQGASAMDQIALQPNARENLPMLSALISIWNRNFLGYPTEAVIPYSSGLEFFPAHLQQCCMESNGKSIAQDGRRVGFSTSPVIWGEPGTNGQHSFFQCLHQGTDIIPVEFIGFEKSQKGEDISFQGTTSSQKLFANMIAQAIALACGSENTNPNKNFDGNRPSSVLVSSQLNPYSLGELLSYYENKIVFQGLCWGINSFDQEGVSLGKALANRVLELLEGADASNFPEAASLLTLFNIKFR

SEQ ID NO: 15782 - protein, 856 aa, Rhodospirillum rubrum
MDTVHSTCDQEPIHVPGLVQPHGFLVVLDSKSGRIAQVTPGIEAVAGVVAQRLIGEPLERVLDPRSAQRCRHRIARPEYPHLIDPFPVRAPGGQSFSAVAHATDQADLVELWSDDQETTVEGVFGRLPFAIGHASRAASIEDLCGRAAATVADLTGYERVMVYRFAENWEGEVIAETLNGPVESYKGQRFPASDIPAQARALYSRNLLRSIPDVHYRPLPLVGRSPDGRELDMTFCNLRSVSPVHLEYLRNMGVAASFSVSLVVDGRLWGLVACHDRVPRRLSLATMGACQVYAETIAQQVLRLDNTRRSRHRSRTGDLIDDISVLLGSGRSLAEALDYTLDDTLALFGASRAVISLDGRQWTAEGPLEGAPIQVPPHQRLLLSERLGGRLRLPAELAGSFVGGVLLPLSDQPDRDFLLLGRPETLRSIEWAGRPEKQPEITPEGGLKIHPRTSFSLWREEVRGRSVAFDPLDRETAETLSLFLAERLAKQRRQQAVVALEETRQRLRDLAECSSDWLWETTGDGTLALVSDRINGLGDLRPEELVGRKLVDLVGGGDSGGAPGVDADEIASAFDEGRAFHGLTVSLALLGRGQWWVRLSGVPQYDGRGQLLGFRGTGTDVTPFKRLQEERVRTQRLEALGRLAGGIAHEIGNVLQPVLTMAHYASKRLDDRDFLEAALADICEGGARAKDIVRSVLTFARQTPAERRPLVLAPALARSVAFAAKGHPGLEIITDIPDTAGEIAANSTELSQIVLNLVGNAADAMGGRGRVFVSLAEAPDLGRMVITIRDEGPGMTLQTQARVFEPFFTTKPEGSGTGMGLAVVHGLVEAWGGTIGLESAPGSGTKFVISFPINNP

SEQ ID NO: 15783 - protein, 264 aa, Poa pratensis
MSRKKKVRRRSTGPDSVAEIIKKWKEQNQKLQEENGSRKAPAKGSKKGCMAGKGGPENSNCKYRGVRQRTWGKWVAEIREPNRGNRLWLGSFPTAVEAAHAYDEAARAMYGATARVNFSERSPDANSGCTSAPPVLMSNGPTAVSYPSDEKDESESPPSLMSDAPTATLHRSDAKGEPESAGTLVHEVKTEVSNDSRSIREERKTVEVFQPEGKALHKEEKVSYDYFNVEEVLDMIIVELSADRKMEVHEEYQDGDDGFSLFSY

SEQ ID NO: 15784 - protein, 324 aa, Arabidopsis thaliana
MAGAKDSGCDDDLRIAGGCDPGKRGNPEDSSSPVEVSCSICLESVLDDGTRSKAKLQCGHQFHLDCIGSAFNMKGAMQCPNCRNVEKGQWLYANGSTRPFPEFSMEDWIPEEDLYGLSYPEMQYRVHWCPFGELSQAAASFELLILQTRKLELTFALCFRELEPATTTYHTEFHGHHAAAVNHSYLAYVGPGPAATPRTSDNNSTDDHPWNSHSNDHFHQLPVAPQYHHHSPSFSLPAAHVVDGEVDSSAARGLPYAHPFLFSHRVFYNILLELGIVGLIKGPHQQLTVTKEAAPKCVNSIMLIIIRGNNIMPMVPLSHHLSSP

SEQ ID NO: 15785 - protein, 510 aa, Ralstonia metallidurans CH34
MKTWFKRILTAGAMTLALGTAGLGLSTHAVAQDKPAAEASAATASATPAAAVAAPAAATPAAAPAEAAAAPAAPVPNKGDTAWLLVSTTFVILMTLPGLALFYGGLVRSKNMLSVLMQCLMIFSVISILWAIYGYSFAFTEGNAFFGGTDRLFMKGLTVDAVAATFSKGVVVPELGYFAFQCAFAAITCSLIIGAFAERAKFSAVLVFVVLWFTFAYIPMAHMVWFWPGPDAYTDAAAGTAATAKAGWLFQKGALDFAGGTVVHINAAVAGLVGAFMFGKRIGFGREAIRPHSLTFTMVGASLLWFGWFGFNAGSALEANGSAALAFVNTLLATAAAVVSWTFGEWIGKGKPSMLGGASGAVAGLVAITPAAGFVGPMGSIAMGLIAGLLCLWGVTGLKRLLGMDDSLDVFGVHGVGGILGALLTGVFAAPSLGGTGIYDYVANKVADDYSIAGQVWIQFEGVLTTIVWSGVVALVAYKLIDMLIGLRVPEEEEREGLDITSHGETAYEV

SEQ ID NO: 15786 - protein, 320 aa, Lactobacillus plantarum WCFS1
MKRIGILTSGGDAPGMNAAVRAVAGKAMAEGLEAYGINYGFAGLVAGDIHKIEAADLDGVIQRGGTLLYSARYPEFAHEEGQLKGIEQLKRFGIDALVVIGGDGSYHGALRLTEHGYNTIGLPGTIDNDIPYTDFTIGFDTAVNTNVQALDRIYDTAHSHDRTFVVEVMGRGAGDVALWSGVSIGATAIVVPEVDWDMEEIANKIKHNRANGHRSNLIVLAEGVMGAQEFVEKLSEYGDFDARGNTIAHMQRGGNPTAKDRVMASKMGAYAVELLLAGKGGLAVGIQNNQLVNHNILDLFESKHDVEVSLDKLNEEISFK

SEQ ID NO: 15787 - protein, 806 aa, Haemophilus influenzae R2866
MSNFNQISRRDFVKASSAGAALAVSNLTLPFNVMAKETQRLNENNQERIVWSACTVNCGSRCPLRMHVKDNRITYVETDNTGTETYNLDHQVRACLRGRSMRRRVYNPDRLKYPMKRIGKRGEGKFKRISWDEALTEIADALKRNIKKYGNESIYLNYGTGTLGGTMAKSWPPASTMIARFMNCIGGYLNHYGDYSTAQIAVGLDYTYGGGWALGNGMADIENTKLIVLFGNNPAETRMSGGGLTYCIEQAKARSNAKMIIIDPRYNDTGAGREDEWIPIRPGTDAALVSALAYVMIQENLVDQPFLDKYCVGYDEKTLPTDAPKNGHYKAYILGYGNDGIAKTPEWAAKITGIPAERIIKLAREIGSTKPAFISQGWGPQRRSNGELISRAIAMLPILTGNVGIHGGNTGARESAYSIPFVRMPTLKNPVKASIPMFLWTDAIIRGTEMTALTDGIRGVDKLSSPIKVIWNYASNCLINQHAQINRTHDILQDDTQCEMIITIDNHMTSTAKYSDILLPDCTTSEQMDFALDAFVSNMAYVIFADQVIKPSFECRPIYDMLSDLAEKMGVKEKFTEGRTQEEWLRHIYEQSREKLPELPTFEEFRQQGIFKKVDPNGFKVAYKDFRDNPEAHPLQTPSGKIEIYSSRLAEIAKTWKLAEDDVIHPLPIHAQSFEHYGDPLIEKYPLQLSGFHYKARTHSTYGNVDVLKAANPQEVWMNPIDAEPRNIKNGDMIRIFNDRGEVHINVKITPRIIPGVVALSEGAWYAPDKDRIDHSGCINVLTTQRPSPLAKGNPQHSNLVQVERL

SEQ ID NO: 15788 - protein, 186 aa, Streptomyces avermitilis MA-4680
MRVDAKDMGTDLKSVLITKEEIDAKLAELAAKIDAEYAGKDLLIVGVLKGAVMVMADLARALSTPVTMDWMAVSSYGAGTQSSGVVRILKDLDTDIKGKHVLIVEDIIDSGLTLSWLISNLGSREPASLKVCTLLRKPEAAKVAIDVEWVGFDIPNEFVIGYGLDYAEKYRNLPFVGTLAPHVYGG

SEQ ID NO: 15789 - protein, 425 aa, Brucella melitensis 16M
MTAIIDIVGREILDSRGNPTVEVDVVLEDGSFGRAAVPSGASTGAHEAVELRDGGSRYLGKGVEKAVEVVNGKIFDAIAGMDAESQLLIDQTLIDLDGSANKGNLGANAILGVSLAVAKAAAQASGLPLYRYVGGTNAHVLPVPMMNIINGGAHADNPIDFQEFMILPVGATSIREAVRYGSEVFHTLKKRLKDAGHNTNVGDEGGFAPNLKNAQAALDFIMESIEKAGFKPGEDIALGLDCAATEFFKDGNYVYEGERKTRDPKAQAKYLAKLASDYPIVTIEDGMAEDDWEGWKYLTDLIGNKCQLVGDDLFVTNSARLRDGIRLGVANSILVKVNQIGSLSETLDAVETAHKAGYTAVMSHRSGETEDSTIADLAVATNCGQIKTGSLARSDRTAKYNQLIRIEEELDKQARYAGRSALKLL

SEQ ID NO: 15790 - protein, 506 aa, Pseudomonas putida KT2440
MIYAQPGTPGAVVSFKPRYGNFIGGEFVQPLAGQYFINSSPVNGQPIAEFPRSTAQDVERALDAAHAAAEAWGKTSVQDRARVLLKIADRIEQNLEVLAVTESWDNGKAIRETLNADVPLAADHFRYFAGCIRAQEGGVGEINEGTVAYHIHEPLGVVGQIIPWNFPLLMAAWKLAPALAAGNCVVLKPAEQTPLSITVFAELIADLLPAGVLNIVQGFGREAGEALATSKRIAKIAFTGSTPVGSHIMKCAAENIIPSTVELGGKSPNIFFEDIMQAEPAFIEKAAEGLVLAFFNQGEVCTCPSRALIQESIYEPFMAEVMKKIAKITRGNPLDTETMVGAQASEQQYDKILSYLEIAREEGAQLLTGGGAERLQGDLASGYYIQPTLLKGNNKMRVFQEEIFGPVVGVTTFKDEAEALAIANDSEFGLGAGLWTRDINRAYRMGRGIKAGRVWTNCYHLYPAHAAFGGYKKSGVGRETHKMMLDHYQQTKNLLVSYDINPLGFF

SEQ ID NO: 15791 - protein, 447 aa, Brucella melitensis 16M
MPINITMPALSPTMEEGNLSKWLVKEGDKVAPGDVIAEIETDKATMEVEAVDEGTVAKIVVPAGTEGVKVNALIAVLAEEGEDVAAAAKGAGAAPKAEAPKDEPKPAEAKKEAAAPAAAPAPARSEQPAVAPAVNKGERVFASPLARRIAKDAGVDISAVKGSGPHGRVIQRDVEAALASGGAKAVSAQAESAAAPKPMSDDAILKLFEDGSYEVVPHDGMRKTIARRLVESKQTVPHFYLTIDCELDALLALRSQINAAAPMLKTEKGEVPAYKLSVNDMVIKATALALRDVPEANVSWTEGGMIKHKCSDVGVAVSIPGGLITPIVRHAESKTLSVISNEMKDMARRARDRKLKPEEYQGGSTSVSNLGMFGVKDFAAIINPPHATIFAIGAGEERAVVKKGEIKVATVMSVTLSTDHRAVDGALAAELAQAFKRHIENPMGMLV

SEQ ID NO: 15792 - protein, 326 aa, Bacillus subtilis
MKAVTYQGIKNVVVKDVPDPKIEKSDDMIIKVTSTAICGSDLHLIHGFIPNMQEDYVTGHEPMGIVEEVGSGVTKLKKGDRVIIPFNIACGECFFCKNQLESQCDQSNDNGEMGAYFGYSGQTGGYPGGQAEYLRVPFANFTHFKIPESCEEPDEKLSVIADAMTTGFWSVDNAGVKKGDTVIVLGCGPVGLFAQKFCWLKGAKRVIAVDYVNYRLQHAKRTNKVEIVNFEDHENTGNYLKEITKGGADVVIDAVGMDGKMSDLEFLASGLKLHGGTMSALVIASQAVRKGGTIQITGVYGGRYNGFPLGDIMQRNVNIRSGQAPV

SEQ ID NO: 15793 - protein, 490 aa, Podospora anserina
MLSQRLLLGRTAVRSALKPSGCAEEKDLVIIGGGVAGYVAAIKAGQEGMKVACIEKRGTLGGTCLNVGCIPSKSLLNNSHLYHQILHDTKHRGIEVGDVKLNLQQLMKAKETSVTGLTKGVEFLLKKNGVEYIKGTGSFQDEHTVKVELNDGGETSVTGKNILIATGSEVTPFPGLTIDEQTVISSTGAIALEKVPEKLVVIGGGIIGLEMASVWSRLGSKVTVVEYLDQIGGPGMDTEVAKGIQKILKKQGITFKTGTKVLSGEKTGDEVKVQTEAAKGGKEETLDADVVLVAIGRRPYTGGLGLENIGLELDERGRVIIDAEYRTKIPHIRCVGDATFGPMLAHKAEEEAVAVVEYIKKGYGHVNYGCIPSVMYTFPEVAWVGQSEQDLKKADIPYRVGTFPFSANSRAKTNLDTEGFVKILADPETDRLLGIHIIGPNAGEMIAEGTLALEYGASSEDIARTCHAHPTLSEAFKEAAMATHAKAIHF

SEQ ID NO: 15794 - protein, 237 aa, Pinus taeda
MGSLESEKTVTGYAARDSSGHLSLYTYNLRKKGPEDVIVKVIYCGICHSDLVQMRNEMGMSHYPMVPGHEVVGIVTEIGSEVKKFKVGEHVGVGCIVGSCRSCGNCNQSMEQYCSKRIWTYNDVNHDGTPTQGGFASSMVVDQMFVVRIPENLPLEQAAPLLCAGVTVFSPMKHFGMTEPGKKCGILGLGGVGHMGVKIAKAFGLHVTVISSSDKKKEEAMEVLGADAYLVSKDTEK

SEQ ID NO: 15795 - protein, 489 aa, Glycine max
MALNLIHRPATKPPSSSSSFVTPRPLRTTQSIPVRNSRRSIAVRAAATEAPVATITAARECRVKSVKARQIVDSRGNPTVEVDLVTDGLFRAAVPSGASTGIYEALELRDGDKSVYGGKGVLNAVRNINEVLAPILVGVDVRNQADVDAIMLEIDGTPNKSKLGANAILGVSLSVCRAGAGAKGVPLYRHIQEISGTKELVMPVPAFNVINGGSHAGNNLAMQEFMILPVGATSFAEALRMGSEVYHVLKGIIKAKYGQDACNVGDEGGFAPNVQDNREGLVLLMDAIDKAGYTGKIKIGMDVAASEFYTKDGKYDLNFKKQPNDGAHVHSAQSLGQLYKDFVKEFPIVSIEDPFDQDDWGSWASLLASVDIQLVGDDLLVTNPKRIAEAIKKKACNGLLLKVNQIGTVTESIQAALDSKAAGWGVMVSHRSGETEDNFIADLSVGLASGQIKTGAPCRSERLAKYNQLLRIEEELGSVRYAGETFRSP

SEQ ID NO: 15796 - protein, 203 aa, Capsicum annuum
MNPEYDYLFKLLLIGDSGVGKSCLLLRFADDSYLDSYISTIGVDFKIRTVEQDGKTIKLQIWDTAGQERFRTITSSYYRGAHGIIIVYDITDQESFNNVKQWLSEIDRYASENVNKLLVGNKSDLNDNRAVSYDTAKAFADEIGIPFMEASAKSATNVEQAFMAMAAEIKNRMATQPASNNAKPPTVQIRGQPVNQKSGCCSS

SEQ ID NO: 15797 - protein, 87 aa, Leersia perrieri
KARYVKFHWKPTCGVSCLMDDEATLVGGKNRSHATQDLYDSIAAGNFPEWKLFVQVIDPEEEERFDFDPLDDTKTWPEDEVPLRPVG

SEQ ID NO: 15798 - protein, 501 aa, Sinorhizobium meliloti 1021
MREKTEAMLPAVAQVLDAPERLGVLQAAVPDMSVPDEDFDGLARLAASLFDAPIALVSLVDREWQWFKACIGTTETRSHVRESFCVHTIAAGDGGPFLVLDASRHPAFRHRRAVGSPPFVRFYAGAPIVLDGQAIGTVAVLDVEPRSEVSAKRQSELQRIAGVAASLFKLKDEARRRALKEAALSREEQRLAMALDAANVGSWLWDIRAGTVSGNGAMMRMFGLPPERTVGAKAIFSAIHPEDRIPTFSKLRQAMAANEEYDGMFRIGTNGRWLLGRGRVHDRDSKGAPLSFLGMTIDVSDQQASVNRTRLLLKELNHRVKNTLAMLQSLARQTLRQTSDPAEFMTAFAGRLQAISEAHGLLSDYEWGTIHLSELISKQLLPYVSDYSQQVELHKDEILLGPDQAVGLGLVLHELATNAVKYGALSVPTGKIVLTARRVVEDGESVLHLTWTEVGGPPIREPRRRGFGSILIERSLDKIIGSSVKVEYLPAGVTALIRLPL

SEQ ID NO: 15799 - protein, 379 aa, Oryza rufipogon
MATAGKVIKCKAAVAWEAAKPLVIEEVEVAPPQAMEVRVKILFTSLCHTDVYFWEAKGQTPVFPRIFGHEAGGIVESVGEGVTDLAPGDHVLPVFTGECKECAHCKSAESNMCDLLRINTDRGVMIGDGKSRFSINGKPIYHFVGTSTFSEYTVMHVGCVAKINPAAPLDKVCVLSCGISTGLGATINVAKPPKGSTVAIFGLGAVGLAAAEGARIAGASRIIGIDLNANRFEEARKFGCTEFVNPKDHDKPVQQVLSEMTNGGVDRSVECTGNINAMIQAFECVHDGWGVAVLVGVPHKDAEFKTHPMNFLNERTLKGTFFGNYKPRTDLPNVVELYMKKELEVEKFITHSVPFSEINTAFDLMHKGEGIRCIIRMEN

SEQ ID NO: 15800 - protein, 462 aa, Streptococcus agalactiae 2603V/R
MAVEIIMPKLGVDMQEGEILEWKKQVGDVVNEGDVLLEIMSDKTNMEIEAEDSGVLLKITHGNGDVVPVTETIGYIGAEGEEVTEASSSENTSVEENATQVTSEPEKVEETSEPSVPAATSGEKVRATPAARKLAREMSIDLALVSGTGANGRVHREDVENFKGAQPRITPLARRIAEDQGVDIAEITGSGIRGKIVKNDVLAAMSPQAAEAPVETKATPTTEEKQLPEGVEVIKMSAMRKAISKGMTNSYLTAPSFTLNYDIDMTEMMALRKKLIDPIMAKTGLKVSFTDLIGMAVVKTLMKPEHRYLNASLINDAQEIELHNFVNIGIAVGLDDGLIVPVVHNADQMSLSDFVIASKDVIKKTQEGKLKSAEMSGSTFSITNLGMFGTKTFNPIINQPNSAILGVGATIPTPTVVDGEIVARPIMAMCLTIDHRIVDGMNGAKFMVDLKNLMENPFGLLI

SEQ ID NO: 15801 - protein, 90 aa, Porteresia coarctata
RDGKARYVKFHWKPTCGVSCLMDDEATLVGGKNHSHATQDLYDSIAAGNFPEWKLFVQVINPEEEERFDFDPLDDTKTWPEDEVPLRPVG

SEQ ID NO: 15802 - protein, 186 aa, Zea mays
  unsure (1)..(186): unsure at all Xaa locations
MAPTVMMASSATAVAPFQGLKSTASLPVARRSSRSLGNVSNGGRIRCMQVWPAYGNKKFETLSYLPPLSTDDXLLKQVDYLLRNGWXIPCLEFSKVGFVYRENSTSPVLXDGRYWTMWKLPMFGXCTTPTQVYKELQEAIKSYPDAFHRVIGFDNIKQTQCVSFIAYKPPGQRLDRAAPAAPPPAS

SEQ ID NO: 15803 - protein, 490 aa, Ipomoea batatas
LNNNVLLSQSRKSLRLDGNKRKIKPGVAFSVLTRENGTETLTVEAPILERRRANPKNVAAIILPGGAGTQLFPLTNRAATPAVPLGGCYRLIDIPMSNCINSGVNKIFVLTQFNSASLNRHISRTYFGNGVSFGDGFVEVLAATQTQGETGMKWFQGTADAVRQFTWVFEDAKNKDIDNIVILSGDQLYRMDYMDLVQNHIERNSDITLSCATVGDSRASDFGLVKIDRRGRVVQFCEKPKGTDLKAMQVDTTLLGLPPQDARLNPYIASMGVYVFKTDVLLRLLRWRYPTSNDFGSEILPAAVMEHNVQAYIFRDYWEDIGTIKSFYDANLALTEEFPKFEFYDPKTPFYTSPRFLPPTKIDNCKIKDAIISHGCFLRECTVEHSIIGERSRLDCGVELKDTLMMGADNYETESEIASLLADGKVPIGVGENTKIRNAIIDKNVRIGKHVVITNKDGVQESDRPDEGFYIRSGITIIMEKATIRYGTVI

SEQ ID NO: 15804 - protein, 423 aa, Rhodospirillum rubrum
MDQITEFQLDINRALKETLALVLAGGRGSRLRDLTNRESKPAVPFGGKYRIIDFPLSNCMNSGIRRMCVITQYRAHTLIHHIQRGWGFLRAEIGEFVELWPAQQQTDKESWYLGTADAVHQNLDLIRMHDPRFVLILAGDHIYKQDYSKLLAHHIARGSDCTVACVDVPREEATGYGCVEVDNDDNIVHFLEKPANPPGIPGRPDRAFASMGIYIFNADFLYEILESDALNEASQHDFGRDIIPSQVGKARIVAHRFSQSCVYSVGRREPYWRDVGTVDAYWSANIDLVSVTPALDLYDADWPIWTYQMQRPPAKFVFDTDERRGMAKDSLVSAGCIVSGGAVTGSLLFNDVRVNSYSSVIDTVILPMGDIGRHARLTKCILDTGCRIPEGLVIGEDPILDAKRFHVTEQGITLVTPDRLALL

SEQ ID NO: 15805 - protein, 532 aa, Brucella melitensis 16M
MRRHSSAISKTRWVCWSDGTDAALVFVAYTKNSAAFPFSGIRAKIMADIYDVIVIGSGPGGYVTAIRAAQLGLKTAIVEREHLGGICLNWGCIPTKALLRSAEILHFGEHAKDYGLKLDGTITPDVKAVVQRSRGVSARLNGGVAFLMKKNKIDVIWGEAKLVKAASGSNPAEISVGKTSKQPMQPQNPVPKGVLGEGSYKAKHIIVATGARPRALPGIEPDGKLIWTYFEAMVPQALPKSMLVMGSGAIGIEFASFYHDMGVDVTVVEVMSQIMPVEDAETSAIARKQLEKRGLKIITDAKVAKVEKGANSVTAHVETKDGKTQTLTVDRMISAVGVQGNIENLGLEALGVKTDRGCIVIDGYGKTNVAGIYAIGDVAGPPMLAHKAEHEGVICVEKIAGLPNVHPLDMGKIPGCTYCNPQVASVGLTEAKAKEQGYDIRVGRYSFSANGKAIALGEDQGLVKTIFDRKTGQLLGAHMVGAEVTELIQGFVIAMNLETTEEELMHSVFPHPTLSETMKESVLDAYGRVLNA

SEQ ID NO: 15806 - protein, 240 aa, Nostoc punctiforme PCC 73102
MPSLREQQHPLIRQLADCIEAAWHQHLDLSPYHLPDELGYVEGRLEGEKLTIENRCYQTPQFRKMHLELANIGNMLDILHCVMFPRPQYNLPMFGCDLVGGRGQISAAIADLSPIQLERTLPESYTTALAQLPVLNFSQPRELPEWGNIFSDFCIFVRPGSPEEEAMFLSRVREFLDIHCMQAIASHPVSVEQVTQNLAGQHNYCTKQQQNDKTRRVLEKAFGPVWAENYMTTVLFDLPT

SEQ ID NO: 15807 - protein, 164 aa, Glycine max
  unsure (1)..(164): unsure at all Xaa locations
LVPSTLARPSTHLEAPFKEDLDRFPAXYLYQHCMETNGXTITSDGSFDAFTTXGPILCGEPCSNAQHSFFQRVHQCTKRIRNDFILPYKSHNPVSDNLHHRMLGSGYYDQDEALMGGKTDDHARAKGTCDELDDHKRYRGNRPTTYILGRGAIGPAELGAQIVY

SEQ ID NO: 15808 - protein, 366 aa, Bacillus coagulans
MKMKLAVLPGDGIGPEVMDAAIRVLKTVLDNDGHEAVFENALIGGAAIDEAGTPLPEETLDICRRSDAILLGAVGGPKWDHNPASLRPEKGLLGLRKEMGLFANLRPVKAYATLLNASPLKRERVENVDLVIVRELTGGLYFGRPSERRGPGENEVVDTLAYTREEIERIIEKAFQLAQIRRKKLASVDKANVLESSRMWREIAEETAKKYPDVELSHMLVDSTSMQLIANPGQFDVIVTENMFGDILSDEASVITGSLGMLPSASLRSDRFGMYEPVHGSAPDIAGQGKANPLGTVLSAALMLRYSFGLEKEAAAIEKAVDDVLQDGYCTGDLQVANGKVVSTIELTDRLIEKLNNSAARPRIFQ

SEQ ID NO: 15809 - protein, 292 aa, Methanothermobacter thermautotrophicus str. Delta H
MKGIVLAGGSGTRLYPITRAVSKQLLPIYDKPMIYYPLSVLMLAGIRDILIISTPRDLPLYRDLLGDGSQFGVRFSYRVQEEPRGIADAFIVGKDFIGDSKVALVLGDNVFYGHRFSEILRRAASLEDGAVIFGYYVRDPRPFGVVEFDSEGRVISIEEKPSRPKSNYVVPGLYFYDNQVVEIARRIEPSDRGELEITSVNEEYLRMGKLRVELMGRGMAWLDTGTHDGLLEASSFIETIQKRQGFYIACLEEIAYNNGWITREDVLEMAEKLEKTDYGKYLRDLAEGNFHG

SEQ ID NO: 15810 - protein, 384 aa, Dechloromonas sp. RCB
MYITNRPDLVFERGEGSWLIDHQGKRYLDFIQGWAVNCLGHCPPEITEALVEQAGRLINPSPAFYNGPMVELAGLLTANSCFDRVFFANTGAEANEGAIKLARKWGRLHKGGAHEIITFEHSFHGRTLATMSASGKAGWDTLYAPQVSGFPKAAYNDIAAVEALIGPKTVAVMLEPVQGEGGVIPAGIEFLKALRELTRQRGILLIVDEVQTGVGRTGKLFAHEHADIEPDIMTLGKGIGGGVPLAALLAREAICCFEPGDQGGTYNGNPLMTAVGVAIMKRMLAPGFLAEIEARGQYLAKCLRELSAKHGLKGERGSGLLRALILDDERAPQIVQRALTMQPVGLLLNAPRPTLLRFMPALNVSETEIDQMIAMLDELLAKQD

SEQ ID NO: 15811 - protein, 117 aa, Zea mays
  unsure (1)..(117): unsure at all Xaa locations
EFGTRAVQRVAKAINFKTCNALLLKVNQIGSVTESIEAVRMSKRAGWGVMASHRSGETEDTFIADLSVGLSTGQIKTGAPCRSERLAKYNQLLRIEEELGDAAVYAGAKXRAPVEPY

SEQ ID NO: 15812 - protein, 251 aa, Brassica oleracea var. botrytis
MPIRNIAVGRTDEATRPDALKAALAEFISTMIFVFAGSGSGMAFNKLTENGATTPSGLVAAALAHAFGLFVAVSVGANISGGHVNPAVTFGAFVGGNITLLRGILYWIAQLLGSVVACLLLKFATGGLVVPAFGLSAGVGVSNALVFEIVMTFGLVYTVYATAVDPKNGSLGTIAPIAIGFIVGANILAGGAFSGASMNPAVAFGPAVVSWSWNNHWVYWAGPLIGGGVAGLIYEVFFINTTHEQLPTTDY

SEQ ID NO: 15813 - protein, 237 aa, Pinus taeda
MGSLESEKTVTGYAARDSSGHLSPYTYNLRKKGPEDVIVKVIYCGICHSDLVQMRNEMGMSHYPMVPGHEVVGIVTEIGSEVKKFKVGEHVGVGCIVGSCRSCGNCNQSMEQYCSKRIWTYNDVNHDGTPTQGGFASSMVVDQMFVVRIPENLPLEQAAPLLCAGVTVFSPMKHFGMTEPGKKCGILGLGGVGHMGVKIAKAFGLHVTVISSSDKKKEEAMEVLGADAYLVSKDTEK

SEQ ID NO: 15814 - protein, 294 aa, Bdellovibrio bacteriovorus HD100
MPRVKKAIIPAAGLGTRFLPATKTVPKEMLTIVDAPIILYVVEEAVKAGIEDIILIAGRGKHAIEDFFDTSYELEDKLAKDGKEKLLERVTRIRDSANIISIRQKQAMGLGHAVLCGLPIVGKEPFAVLLGDEITMGFHGEPNVTSQLVSSFEETGTSTISVMKVEDKDVSKYGIAEIEEKSTGFFKVTSLVEKPKASETNSRWALPGRYVFDNAIMDILQNAKPTLNGEIQLTDSMKVLCAQHGLNAMTFTAQRFDAGDKLGYLQANIELALQSPELNQELKSYILSLAEKLK

SEQ ID NO: 15815 - protein, 537 aa, Zea mays
  unsure (1)..(537): unsure at all Xaa locations
MMAAVLKTSGSFCSTQQQHFQQSRRDQFLHGSYSYFKHCKSKKIIKPAPLCARVTSSKVELDVKDPYWKQKFQEDWENRFDLPSITDIYDXNQGRCSTICCCPSRTLTGDENVDMWNGYVNNDDRALLKVIKYSSPTSAGAECVDLDCSWVEQWVHRAGPRKEIYYEPEEVKAAIVTCGGLCPGLNDVIRQIVFTLETYGVKNIVGIPFGYRGFFEKGLKEMPLSRGLVENINLNGGSFLGVSRGGAKTSEIVDSIQARRIDMLFVLGGNGTHAGANAIHEECRKRKLKVSVVAVPKTIDNDILLMDKTFGFDTAVEEAQRAINSAYIEARSAYHGIGLVKLMGRSSGFIAMHASLSSGQVDVCLIPEVPFTLDGEFGVLRQLEHLLKSKGFCVVCVAEAAGQXYAKIHSCLDLLQESGATDASGNVILSDIGVHMQQKIKMHFKDIGVPADVKYIDPTYMVRACRANASDAILCTVLGQNAVHGAFAGFSGITSCICNTHYVYLPITEVITAPKRVNPNSRMWHRCLTSTGQPDFH

SEQ ID NO: 15816 - protein, 525 aa, Triticum aestivum
  unsure (1)..(525): unsure at all Xaa locations
LSPPSLITPSPARPLRSLHSPNLPGQGGAAATCAACPAALRGAAGATATNSPCYRCTGSTAAVASTDPTFSAFPAFRVSARLLPFSTPCAASARXTMNIMIINVLKRARRRRPSALLXLFRFPFAFRSNGFVGKDFFGLRDMAQPGFDYGFFFFXLWAVVRAPDGMTYGVLLSVKXHLICDLIIGRCFPGTVXPMLCRSCVRWQDCKIGTQVRGASLLXSVIDYTRSGVVHIVGMVTCWWGVFTLGTRIDRFDHACRSVALKGHSASLVVLGTFLLWFGWYGFNPGSFVTILKSYGPPGSINGQWSGVGRTAVTTTLAGSVAALTTLFGKRLQTGHWNVVDVCNGLLGGFAAITAGCSVVDPWAAVICGFVSAWVLIGLNALAGRLKYDDPLEAAQLHGGCGAWGIIFTALFAKKQYVEEIYGAGRPYGLFLGGGGRLLAAHIVQILVIAGFVSCTMGPLFLALKKLGLLRISAEDEMAGMDLTRHGGFAYVYHDDDEHDKSVGGFMLRSAQTRVEPAAAANSQV

SEQ ID NO: 15817 - protein, 379 aa, Oryza australiensis
MATAGKVIKCKAAVAWEAGKPLVIEEVEVAPPQAMEVRVKILFTSLCHTDVYFWEAKGQTPMFPRIFGHEAGGIVESVGEGVTDLAPGDHVLPVFTGECKECPHCKSPESNMCDLLRINTDRGVMIGDGKSRFSINGKPIYHFVGTSTFSEYTVMHVGCVAKINPEAPLDKVCVLSCGISTGLGATINVAKPPKGSTVAIFGLGAVGLAAAEGARIAGASRIIGIDLNANRFEEARKFGCTEFVNPKDHDKPVQQVLAEMTNGGVDRSVECTGNINAMIQAFECVHDGWGVAVLVGVPHKDAEFKTHPMNFLNERTLKGTFFGNYKPRTDLPNVVELYMKKELEVEKFITHSVPFSEINTAFDLMHKGEGIRCIIRMEN

SEQ ID NO: 15818 - protein, 347 aa, Mesorhizobium loti
MKSYSIAMIPGDGIGRDVTAAAWTVLEAAAKHAGFALTGTEFPWSCKFYKDTGRMMPEDGIETLRGFDAILLGAVGWPAEVPDSVSLHGLLLPIRKAFVQYANIRPHRLLPGVTGPLRAEGFDILCIRENTEGEYSGAGGRVHQGTLDEVAVETSIFTRAGVERILRFGFEQARTRNGKLASVTKSNAQKYSMVFWDEITRKLAAEYSDVAVTSYHVDALAARMIMAPESLDVVVASNLFGDILTDIGAAIQGGLGYAASANINPDHSAPSMFEPVHGSAPDIAHLGIANPIATIWSGAMMLDHLGEKPAADRVMKAVEVATARGIGTIPAKDRTEAITAAVVAALT

SEQ ID NO: 15819 - protein, 230 aa, Cucumis sativus
MEKKKMGFEETELRLGLPGNNNIGSSELGEVAARKRGFAETVSSETISKVDLKLNLSSKETVGVGDDDLVADSNPSNKDKAVLTADPAKPPAKAQVVGWPPVRSFRKNNMLAFVKVSMDGAPYLRKVDLKMYKSYKQLSDALAAMFGSFTTIGNCGSQEMKDFMNESKLMDLLSGSDYVPTYEDKDGDWMLVGDVPWEMFVESCKRLRIMKGKEAIGLAPRAMEKCKNRS

SEQ ID NO: 15820 - protein, 250 aa, Glycine max
  unsure (1)..(250): unsure at all Xaa locations
VTPQTPPARSHRRRGPPRVTVVGPGPRVEINVTHGSSHHDLHLPAQSTFGDVKKLLVNKTGLEPAEQRLSFTRTQKGDNQRLHAEGVKDXSKLFLLEGIGSKERKLEETREDNEMSKAFEAIASVRAEVDKLSYRVTYIEVSINGGGNKASEKEFLVLTELLMSQLLKLDGIEAEGEAKLQRKAEVNRVQNLVDKLDSLKARNANPFSNSSNAVKVTTQWETFDSGMESLDAPSDNPSSTKVTQEWERFD

SEQ ID NO: 15821 - protein, 429 aa, Lactobacillus plantarum WCFS1 [sequence omitted]

SEQ ID NO: 15822 - protein, 291 aa, Oenococcus oeni PSU-1
MKGIILAGGSGTRLYPITKATSKQLVPIYDKPMIYYPMSVLMLAGIQDILLISAPEFVDQFKALFGDGSQIGLNISYKVQEKPNGLAEAFILGADFIGNDNVALVLGDNIYYGAGLTKLLRTAAAKKNGATVFGYRVKDPERFGVVDFDADGRALSIVEKPKKPKSHYAVTGLYFYDNDVVEISKGIKPSSRGEIEISDINAEYLRRGSLEVEVMGRGFAWLDTGTHDSLLDAANFIATIEKQQNLKVAALEEIAFRMGYINSKQLRGLAQSLKKNDYGRYLLRIADEENK

SEQ ID NO: 15823 - protein, 367 aa, Zea mays
SARDKIHFVPGDIVKVGETLLKMVVGDSQIVSPDNIVPSAGKSLGVESAVFSSEGNVPGGNLSTPAVRHLAKQYGISINEIVGTGKDGRVLKEDVLNYAVSKGVCKQQSLASEGNIGQVELLEEGKALLDEDFYEDKKILLRGYQRSMVKSMSLAAKVPHFHYLEEINCDSLVQLKTTFQNENKDQTIKHTFLPFLIKSLSMALSKYPMLNSSFIEETNEVVFKGPHNIGVAMATTHGLVVPNIKKVQSLSILEITKELARLHEMASQNRLSAADIEGGTITLSNIGAIGGKFGSPLLNLPEVAIIALGRIQKLPRFDDDENVYPSSIINVTVGADHRVVDGATVARFCNEWKSLVEKPELLLLHMR

SEQ ID NO: 15824 - protein, 347 aa, Clostridium thermocellum ATCC 27405
MKGKMKVCVLTGKEKLEWVERDIPQPGRGELQIKLKHVGVCGSDLHFYKEGRLANWELDGPLALGHEPGGIVSAIGEGVEGFEIGDKVALEPGVPCGECEDCRKGHYNLCKHIKFMAIPHEKDGVFAEYCVHSASMCYKLPENVDTMEGGLMEPLSVALHATELSNAKIGETAIVLGSGCIGLCTVMALKARGVSEIYVTDVVDKRLEKALEVGATRVFNSQREDIVEFAKTLPGGGADQVYECAGSRVTTLQTCKLIKRAGKVTLVGVSPEPVLELDIATLNAMEGTVYSVYRYRNMYPIAIAAVSSGVIPLKKIVSHVFDFKDCIEAIEYSTNHKDEVIKSVIKF

SEQ ID NO: 15825 - protein, 237 aa, Pinus taeda
MGSLESEKTVTGYAARDSSGHLSPYTYNLRNKGPEDVIVKVIYCGICHSDLVQMRNEMGMSHYPMVPGHEVVGIVTEIGSEVKKFKVGEHVGVGCIVGSCRSCGNCNQSMEQYCSKRIWTYNDVNHDGTPTQGGFASSMVVDQMFVVRIPENLPLEQAAPLLCAGVTVFSPMKHFGMTEPGKKCGILGLGGVGHMGVKIAKAFGLHVTVISSSDKKKEEAMEVLGADAYLVSKDTEK

SEQ ID NO: 15826 - protein, 503 aa, Oryza sativa (japonica cultivar-group)
MATAIPQRQLFVAGEWRAPALGRRLPVVNPATESPIGEIPAGTAEDVDAAVAAAREALKRNRGRDWARAPGAVRAKYLRAIAAKIIERKSELARLETLDCGKPLDEAAWDMDDVAGCFEYFADLAESLDKRQNAPVSLPMENFKCYLRKEPIGVVGLITPWNYPLLMATWKVAPALAAGCTAVLKPSELASVTCLELADVCKEVGLPSGVLNIVTGLGSEAGAPLSSHPGVDKVAFTGSYETGKKIMASAAPMVKPVSLELGGKSPIVVFDDVDVEKAVEWTLFGCFWTNGQICSATSRLILHKKIAKEFQERMVAWAKNIKVSDPLEEGCRLGPVVSEGQYEKIKQFVSTAKSQGATILTGGVRPKHLEKGFYIEPTIITDVDTSMQIWREEVFGPVLCVKEFSTEEEAIELANDTHYGLAGAVLSGDRERCQRLTEEIDAGIIWVNCSQPCFCQAPWGGNKRSGFGRELGEGGIDNYLSVKQVTEYASDEPWGWYKSPSKL

SEQ ID NO: 15827 - protein, 316 aa, Streptomyces coelicolor A3(2)
MLVLVAPGQGAQTPGFLTDWLALPGAADRVAAWSDAIGLDLAHFGTKADADEIRDTSVAQPLLVAAGILSAAALGTQTSVADATGPGFTPGAVAGHSVGEITAAVFAGVLDDTAALSLVRRRGLAMAEAAAVTETGMSALLGGDPEVSVAHLERLGLTPANVNGAGQIVAAGTMEQLAALNEDKPEGVRKVVPLKVAGAFHTRHMAPAVDKLAEAAKALTPADPKVTYVSNKDGRAVASGTEVLDRLVGQVANPVRWDLCMETFKELGVTAIIEVCPGGTLTGLAKRALPGVKTLALKTPDDLDAARELVAEHTQA

SEQ ID NO: 15828 - protein, 223 aa, Triticum aestivum
  unsure (1)..(223): unsure at all Xaa locations
MKLFCDEVLATVVPIAVYWVYSGVYMWLGQCQSMDRYRLHPRKEENGKNLVSKRDAVKGVVLQQLLQAATAAAMFTLVGESTATATGRAPQRTWTGTCLTVACQIGVAMAVLDGWQYVWHRCMHLNRFLYRHVHSWHHRLVVPYAFGXLYNNHRGLLLDTMGGALGFLASGFPPPSPSSSARSPPSRASPPTAHGLPGKVHRCFWRVHISQQCHYGNFEPLRK

SEQ ID NO: 15829 - protein, 469 aa, Glycine max
  unsure (1)..(469): unsure at all Xaa locations
MFSSAISPKPFLRSLVIDRYAQSTTTATRWECLGFNKSENFSTKRELCAEGFKLNCLVENREMDVESSSSSSLVDDASMSLSEEDLGEPSISTMVMNFESKFDPFGAISTPLYQTATFKQPSAIENGPYDYTRSGNPTRDALESLLAKLDKADRALCFTSGMAALSAVVRLVGTGEEIVTGDDVYGGSDRLLSQVVPRTGIVVKRVNTCDLDEVAAAIGLKTKLVWLESPTNPRLQISDIRKISEMAHSHGALVLVDNSIMSPVLSRPLELGADIVMHSATKFIAGHSDIMAGVLAVKGEKLGKEMYFLQNAEGSGLAPFDCWLCLRGIKTMAXLRIEKQQDNAQKIAEFLASHPRVKEVNYAGLPGHPGRDLHYSQAKGAGSVLSFLTGSLALSKHIVETTKYFSITVSFGSVKSLISMPCFMSHASIPAAVREARGLTEDLVRISVGIEDVNDLIADLGNALRTGPL

SEQ ID NO: 15830 - protein, 250 aa, x Aranda deborah
MGRGRVELKMIENKINRQVTFAKRRKRLLKKAYELSVLCDAEVALIIFSNRGKLYEFCSSTSMLKTLEKYQKCNFGSPESTIISRETQSSQQEYLKLKNRVEALQRSQRNLLGEDLGPLGSKELEQLERQLDSSLRQIRSTRTQFMLDQLADLQRREQMLCEANKTLKRRFEESSQANQQQVWDPSNTHAVGYGRQPAQHHGEAFYHPLECEPTLQIGYHSDITMATATASTVNNYMPPGWLGQISGSYE

SEQ ID NO: 15831 - protein, 601 aa, Mycobacterium avium subsp. paratuberculosis str. k10
MCGVTGEVRLDGRAPDVAAVSAMAAVLTPRGPDAGGAWSQGRVALGHRRLKIIDLTEAGAQPMVDSELGLSIAWNGCIYNYKELRSELSGYGYRFFSHSDTEVLIKAYHRWGDDFVSHLFGMFAFAIVERDSGRVLLGRDRLGIKPLYLTEDSHRVRFASTLPALLAGGGVDTRIDPVALHHYMSFHSVVPAPATILRGVRKVPPASLVAIEPDGKRTVTTYWAPDFTRHADRADWSERDWEDAVLSTLRLAVKRRLVADVPVGCLLSGGVDSSLIVGLLAEAGQHGLSTFSIGFESAGGVKGDEFQYSDIVAQRFETNHHQIRIDSDRMLPALDGAIGAMSEPMVSHDCVAFYLLSQEVARHVKVVQSGQGADEVFAGYHWYPPMGEPAAATLDGAVAQYRRAFFDRDTAGVAQLVGPGILAPGDPSLRFVTEHFAQAGAETGIDRALRLDTTVMLIDDPVKRVDNMTMAWGLEGRVPFLDHELVELAATCPPEYKIAHEGKGVLKQAARRVIPSEVIDRPKGYFPVPALTHLEGPYLDMDRDALYAPTAKERGLFNTDAVDALLANPNGKLTPLRGNELWQIALLELWLQRHGVTGPVA

SEQ ID NO: 15832 - protein, 450 aa, Triticum aestivum
  unsure (1)..(450): unsure at all Xaa locations
MGALPRGLLVLGVCAVLVAAVLADASPASSMVVGLAKCADCTRKNMKAEAAFAGLQVAVKCKNAHGEYETKAIGTVDKSGAFGVPLGADLLREDGELKQDCFAQLHSAPDHPCPGQEPSMIVRQSADGAEKKSFVAVPGEVHYSSQECASAFLCHFFHKKHLFHKKSALVVPHLKKKAIVIPHIHKKPIVIPHFHKKPAPVPVPEYKPPTPTPVYTHPKPVPEIQAXPTPVYPHPAPIYHPPAADQKAALNPETDPQLFKKLLHKKPIVIPHLPIVIPHFHKKPAPVPVPEYKPPTPTPVYTAPDAGARVQATDSGVPAPVADLPPSCRRSEGSRRANYPTRVAKAIQEKSCNALLLKVNQIGSVTESIEAVKMSKHAGWGVMTSHRSGETEDTFIADLAVGLSTGQIKTGAPCRSERLAKYNQLLRIEEELGDAAVYAGLKFRAPVEPY

SEQ ID NO: 15833 - protein, 248 aa, Mesorhizobium loti MAFF303099
MSTPVVLITGALTGIGRETAIAFAKEGSRLVIAGRHEEAGRKLATELQSFGAEVEFIRADVRHDDEVRDLIDRAVARFGRLDVAVNNAGTEGKPGPVTEQTAETYAATFDTNVLGTLLSLKHELRIMLTQGGGSIVNISSTYGHEGAKGASIYAASKHAVEGLTKSAALEAAASGVRVNAVAPGPTNTGMLDRFTGTSEVKASLALTVPMGRVGQPSELARAIVFLASKEASFITGHVLTVDGGKTAG

SEQ ID NO: 15834 - protein, 685 aa, Pisum sativum
MTTSFAAAALRDPKLQIPNYHGLRSSSAASSLSRNALSVPSSTRSSSLIRAVSTPAKSETATEKKRSKVEIFKEQSNFIRYPLNEDMLTDAPNLSEAATQLIKFHGSYQQYNRDERGSRTYSFMIRTKNPCGKVSNQLYLTMDDLADQFGIGTLRLTTRQTFQLHGVVKKDLKTVMGSIIRNMGSSLGACGDLNRNVLAPAAPIVSKDYLFAQETSENIAALLTPQSGFYYDVWVDGERFMSAEPPEVIQARNDNSHGTNFTDSPEPIYGTQFLPRKFKIAVTVPTDNSVDILTNDIGVVVVTGDGGEPQGFNLYVGGGMGRTHRMETTFPRLAEPLGYVPKEDILCAVKAIVVTQRENGRRDDRRYSRMKYLIDSWGIDKFRNVVEEYYGKKFEPFRSLPEWEFKSYLGWHQQGDGGLFCGLHVDNGRIAGKMKTALREVIEKYHLNVRLTPNQNLILTDIRAAWKRPITTILSQAGLLLPRYVDPLNITAMACPAFPLCPLAITEAERGIPSILKRIRDMFEKVGLKYNESVVVRITGCPNGCARPYMAELGLVGDGPNSYQIWLGGSSNQTSIARSFMDKVKPQDLEKVLEPLFYHWKQKRQSKESFGDFTVRLGFEKLKEFIEKWEGPAVPPTRHNLKLFTDKDTYEAMDGLAKLQNKNAHQLAMEVVRNYIASNLNGKGE

SEQ ID NO: 15835 - protein, 259 aa, Glycine max
MDLGVSDEMLGTFVPIVVYWIYSGIYVVLGLFAENYRLHSKQEEDEKNLVSKGAVVKGVLLQQLVQAVVATLLFALTGSDNQNTTSQNTSLLVLARQFVTAMLIMDAWQYFMHRYMHHNKFLYKHIHSLHHRLIVPYSYGALYNHPVEGLLNDTVGGALSFLLSGMSPRASIFFFSFATIKTVDDHCGLLLPGNLFHIFFKNNSAYHDVHHQLYGNKYNFSQPFFVMWDKILGTYMPYTLEEREGGGFETRPCKDYKDD

SEQ ID NO: 15836 - protein, 450 aa, Escherichia coli K12
MNAFRQEIIMNKYQAVIIGFGKAGKTLAVTLAKAGWRVALIEQSNAMYGGTCINIGCIPTKTLVHDAQQHTDFVRAIQRKNEVVNFLRNKNFHNLADMPNIDVIDGQAEFINNHSLRVHRPEGNLEIHGEKIFINTGAQTVVPPIPGITTTPGVYDSTGLLNLKELPGHLGILGGGYIGVEFASMFANFGSKVTILEAASLFLPREDRDIADNIATILRDQGVDIILNAHVERISHHENQVQVHSEHAQLAVDALLIASGRQPATASLHPENAGIAVNERGAIVVDKRLHTTADNIWAMGDVTGGLQFTYISLDDYRIVRDELLGEGKRSTDDRKNVPYSVFMTPPLSRVGMTEEQARESGADIQVVTLPVAAIPRARVMNDTRGVLKAIVDNKTQRMLGASLLCVDSHEMINIVKMVMDAGLPYSILRDQIFTHPSMSESLNDLFSLVK

SEQ ID NO: 15837 - protein, 456 aa, Oryza sativa
TYPNPLQDHPAYSTVKQYFVNEDDTVPQKVVVQKNSRRGVHFRRAGPRQKVYFESDEVKACIVTCGGLCPGLNTVIRELVCGLAHMYNVSKIYGIQNGYKGFYSSNYLTLTPKSVDDIHKRGGTVLGTSRGGHDTKKIVDNIQDRGINQVYIIGGDGTQKGAYEIFKIIDKSFGFDTAVEEAQRAIDSAHVEACSAENGIGLVKLMGRYSGFIAMYATLASRDVDCCLIPESPFYMDGEERRLKENKHMVIVVAEGAGQDLIAKSLSTSEQQDASGNKLLLDIGLWLTHKIKDHFKSKKMEMTIKYIDPTYMIRAIPSNASDNVYCTLLAHSAIHGAMAGYSFTVGNVNGRHAYIPFYSRAELPDVPDKIQTNSGTSHKINNQPGKIVDDNKKPITSTQYAKCRTSSHEIMANDLICTNCPHRMLVAVSGAAKKSRVHWPIMRPAALKSTPTHVNM

SEQ ID NO: 15838 - protein, 175 aa, Oryza sativa
  unsure (1)..(175): unsure at all Xaa locations
NAYVEKAEEQLXVNEDEYVDIETXYDKNSTFSDLDDXSSSTTMELIYLAAIPFPDTPDEQPDKCLGSSSKLEDSNHSDSPSSLDAVQNGQAIPPASSPMEVDNSTAEEPAEAVNSKRRRRLSAKGLELQQAEKGKKPTTKNKSNGKSPGSNGKQLEPANGNSSAVDDEATEDDEI

SEQ ID NO: 15839 - protein, 607 aa, Xanthomonas axonopodis pv. citri str. 306
MAVIEIKVPDIGDYSDVPVIEVLVAVGDSVAKDQGLVTLESDKATLEVPSSAAGVVKELKVKVGDTLSEGALVLLLETEGEAAAPAKAEPKAAPAAAAPAAAPGSKPPVTPSHRAPAEPAAPKPALASGKPADIECKMVVLGAGPGGYTAAFRAADLGLDTVLIERYASLGGVCLNVGCIPSKALLHAAAVIDEVAHAGDFGVDFGQPKITLDKLREYKEKVVGKLTGGLASMAKQRKVRTVTGVASFVSPNELEIVGDDGKTQLLRFEHCIIAAGSQAVKLPNFPWDDKRVMDSTDALELHDIPKTLLVVGGGIIGLEMATVYSALGSKVTVVEFMDQLMPGADKDLVKPLADRLKKQGVEVHLKTKATDVKADKSGITVSFEAAVEGEKPGLQATAYDRVLVAVGRSPNGKKIGAEKAGVTITERGFIPVDRQMRTNVPHIFAIGDIVGNPMLAHKATHEGKLAAEVAAGEKKEWVARVIPSVAYTNPEIAWVGVTETEAKAKGLKVGVAKFPWAASGRAIGIGRTEGFTKLIFDEQTHRVIGGAIVGVHAGDLLAEIGLAIEMGAEAEDIGHTIHAHPTLSESVGMAAEVYDGTITDLYIPKKK

SEQ ID NO: 15840 - protein, 729 aa, Synechococcus sp.
MFDLSKFLPVITPLMIDTAKTLCPYCGVGCGLEAVPPAQPGRATVRDREGTPIWQIRGDRQHPSSQGMVCVKGATVAESVSKSRLKYPMFRASLDDPFTEISWDEALDRLCDRIQQTQADYGKDGICFYGSGQFQTEDYYIAQKLVKGCLGTNNFDTNSRLCMSSAVSAYSLCLGSDGPPACYEDLDLADCLLIVGSNTAECHPILFNRYRKRHKQGGTNLIVVDPRCTPTAEVADLHLALKPGSDVALLNGLGWLLYQMGYVKKDFIANQTEGFEDWLAIIEDYPPQRTAELTGLAVAELVRAADLIASAQRWLSLWSMGVNQSIQGTAKATSLINLHLLTRQIGLPGCGPFSLTGQPNAMGGRETGGLAHLLPGYRKVIDPQHRADVETIWGLPMGSISPQPGRTAWQMIEGLEQGAVGFLWVAATNPAVSLPDVKRAQAALKRSPFTVLQDAYHPTETTTYAHLLLPAAQWSEKTGTMTNSERRVTLCQAFRQPPGEARADWQIFAEVGRRLGFAFDYTDAAAVFAEYVQVTAGRLCDLSGLSHELLAQAGPQQWPFPAGAEPTTESKRLYTKHHFAYADGRARFQPFHHLGVAEPPDDRYPLVLTVGRLYPDWHTQTRTGRIDKINKLHPSAFVEIHPRDADRYNISEGQAVVIRSRRGEGCFPAKVTTAISPGVLFVPMHWGALWGDRTEANALTHPAACPISGEPELKACAVQIEAASSTFTI

SEQ ID NO: 15841 - protein, 592 aa, Xanthomonas axonopodis pv. citri str. 306
MAEIKEALVPDIGDYSDVPVIEVLVSVGDTVSKDQSLVTLESDKATMEVPSSVAGVVKEIKVKVGDSLSQGALVALIEVADAGADAAKPAAAAAPAAPAKAAPAATPAPAARAESAAPAASSDGGGLIEARVPDIGDYTDIPVIEVLVAVGDTVAKDQSLVTLESDKATMEVPSSAAGVVKELKVKVGDTLSQGNVVAIIAAADGGAGAAQSPAKPTTDTAETAGKVEPVAVPAEPDKLAQREIAQVQGARSGTGTPAAQGGQPSAGNPSSPPVTFDADSVLPSKVPYASPVVRVFARELGVDLNQLKGSEKGGRITREDVQRFVKAALSGGAPAAAGAAPAGGGNGLNLLAWPKVDFSKFGETETQPLSRIKKVSGANLARNWAMIPHVTQFESADITDLEALRVALNKENEKAGIKLTMLAFLVKASAAALKKFPEFNASLDAAGDNLTLKKYFHIGFAADTPNGLVVPVIRDVDKKGVLQIAQESGELAKKARDGKLGPADMSGGCFSISSLGGIGGTAFTPIINAPEVAILGVSKSAMQPVWNGKDFAPKLMLPLSLSYDHRVIDGALAARFTTYLSQVLADMRRVLL

SEQ ID NO: 15842 - protein, 218 aa, Glycine max
MAGYKGDDEYDYLFKLVLIGDSGVGKSNLLSRFTRNEFNLESKSTIGVEFATKSLNIDAKVIKAQIWDTAGQERYRAITSAYYRGAVGALLVYDVTRRATFENAARWLKELRDHTDPNIVVMLIGNKSDLRHLVAVPTEDGKSFAEKESLYFMETSALEATNVENAFTEVLSQIYRIVSKRTVEAGKNASSSAVPSKGQTINVKDDSSVLKKIGCCSN

SEQ ID NO: 15843 - protein, 908 aa, Pseudomonas syringae pv. tomato str. DC3000
MRMTSMAIQTTQVTASTCCYCGVGCGVLIEHDGQRILGVSGDPQHPANFGKLCSKGSSLHLTGDIEARALYPELRLSKGLARSVTDWDTALEHAATVFAESIREHGPDSVAFYISGQLLTEDYYAFNKLARALVGTNNIDSNSRLCMSSAVAGYKRSLGADAPPCSYEDLELSDCVMIVGSNMAYAHPILFRRLEEAKSRRPAMKLIVIDPRRTDTCELADLHLAIQPGTDVALFHGILHVLMSENLIDPQFIAAHTLGYDELAALVCDYPPERVANICGISQQHLHTCARWLGKSAGFLSLWCMGLNQSTAGSAKNSALINLHLATGQIGRPGAGPFSLTGQPNAMGGRETGSLSNLLPGHRDAANPEHRAEVAEYWGIDSLPATPGLSAIELFEQLQNGTIKALWIACTNPAQSLPDQNRIRQALETCPFVVLQEAFKTTETARFADLLLPAASWGEKEGTVTNSERRISNVRKAIQAPGEARSDWAITVDFAQRLQKRLQPEAPALFDFQTPKSLFDEFKGLTVGRDLDMSGIDRELIDRQGPQQWPFPTGASVGTPRLYLDGIFPTASGRAQFLAEPYIAARELRDAEYPLTLNTGRLRDQWHGMSRTGTAARLFGHVSEALLSLNPKQMLGHDLQNGDLVKLISRRGELLLPVSSDDSVVAGQAFLPMHWGERFLKGGVNVLTQPAFDPLSKQPELKHSGVRIEKARLPWQFFALIEGNVQQHMERLRPLCEAFTYLSMGLIGRERPALVVRAASTEAPDSTLLQRIDSLLNLDEGPVMAYDDPKRSIGKRVRIDNGRITAIRLAGETLAQHWLQTLWLQERADPALRRWLLAPLSSEPGKDSTLSRDKTLCNCMNVSQSTVMSGIERGLNLNQLKTQLGCGTQCGSCVPEIKRLINAVAVTE

SEQ ID NO: 15844 - protein, 294 aa, Populus tremula x Populus tremuloides
MDQYEKVEKIGEGTYGVVYKARDRVTNETIALKKIRLEQEDEGVPSTAIREISLLKEMQHGNIVRLQDVVHSEKRLYLVFEYLDLDLKKHMDSSPEFAKDPRLVKTFLYQILRGIAYCHSHRVLHRDLKPQNLLIDRRTNALKLADFGLARAFGIPVRTFTHEVVTLWYRAPEILLGSRHYSTPVDVWSVGCIFAEMVNQKPLFPGDSEIDELFKIFRILGTPNEDTWPGVTSLPDFKSAFPKWPSKDLATVVPTLEKAGVDLLSKMLFLDPTKRITARSALEHEYFKDIGFVP

SEQ ID NO: 15845 - protein, 336 aa, Glycine max
  unsure (1)..(336): unsure at all Xaa locations
LEANAILAVSVSLAVCNAGAAVKKIPLYKHIAXAGNKTLVLPVPSFNVINGGSHAGNKLAMQEFMILPVGASSFKEAMKMGVEVYHHLKAVIKKKYGQDATNVGDEGGFAPNIQENKEGLELLKTAIAKAGYTGKVVIGMDVAASEFYDNKDKTYDLNFKEENNDGSQKISGDSLKNVYKSYVTDYPIVSIEDPFDQDDWEHYAKLTAEVGQQVQIVGDDLLVTNPKRVEKAIKEKACNALLLKVNQIGSVTESIEAVRMSKQAGWGVMASHRSGETEDTFIADLSVGLATGQIKTGAPCRSERLAKYNQLLRIEEELGSAAVYAGAKFRAPVEPY

SEQ ID NO: 15846 - protein, 158 aa, Triticum aestivum
  unsure (1)..(158): unsure at all Xaa locations
MAPTVMASSATSVAPFQGLKSTAGLPVSRRSNGASSAAXHNGGRIRCMQVWPIEGIKKFETLSYLPPLSTEALLKQVDYLIRSKWVPCLEFSKVGFIFREHNASPGYYDGRYLTMWKLPMFRXTDAKKVIXNEVEXVKKXYPXAXVRIIRFXKWARMR

SEQ ID NO: 15847 - protein, 312 aa, Salmonella typhimurium LT2
MKVAVLGAAGGIGQALALLLKNQLPSGSELSLYDIAPVTPGVAVDLSHIPTAVKIKGFSGEDATPALEGADVVLISAGVARKPGMDRSDLFNVNAGIVKNLVQQIAKTCPKACVGIITNPVNTTVAIAAEVLKKAGVYDKNKLFGVTTLDIIRSNTFVAELKGKLPTEVEVPVIGGHSGVTILPLLSQIPGVSFTEQEAAELTKRIQNAGTEVVEAKAGGGSATLSMGQAAARFGLSLVRALQGEKGVVECAYVEGDGQYARFFSQPLLLGKNGVEERKSIGTLSAFEQHSLDAMLDTLKKDIQLGEDFINK

SEQ ID NO: 15848 - protein, 387 aa, Bdellovibrio bacteriovorus HD100
MKKMNDNLGFSTRAIHAGQAPDPSTGAIMTPVYLTSTYVQESPGVHKGWEYSRTHNPTRHAYESCMASLEGGKHGFAFSSGCAATTTVLHLLKGGDHVIAMDDMYGGTFRLFDKILKHDGMEFSFVDLTKVENFEKAVKPNTKLVWLETPTNPTLKLVDIKKIAAIAKAKGILVAVDNTFMSPYFQRPLELGADIVVHSATKYIGGHSDTVGGMVVVSRADLAERMAFLSNGIGATQGAFDSFMFLRSLKTLPLRMKAHQENAMAIAKFLESHPKVDKVIYPGLESHPQHALAKEQMHGFGGMITFYIKGGLDSARKFLENVNVFSLAESLGGVESLIEHPAIMTHASVPPENRKALGIDDTLIRLSVGVEDLNDLIADLKTAFDKA

SEQ ID NO: 15849 - protein, 484 aa, Mycobacterium avium subsp. paratuberculosis str. k10
MSRDDWISADEGPRRTVSTTIPVFNPSTEEQIAEVPDSDQAAVDAAVARARETFELGVWRKAPASHRANVLFRAARIIEERKDELAALESQDNGMNLTAAGHIIPVSVDMLKYYAGWVGKIHGESANLVSDGLLGTWETYHTFTQLEPVGVVGLIIPWNGPFFVAMLKVAPALAAGCSAVLKPAEETPLTALKLEEIFREAGLPDGVLNVITGYGETTGAALTAHPDVDKISFTGSTEVGRLIVKAAAGNLKRLTLELGGKSPLIMFDDANLDKAIMGAGMGLLAGSGQNCSCTSRIYVQRGIYDQVVEGLAEFAKMLPMGGSDDPNSVLGPLISEKQRQRVEGIVNDGVAAGAKVITGGKPMDRKGYFYEATIITNTTPDMRLIREEIFGPVGCVIPFDDEDEVIAAANDTHYGLAGAIWTENLSRAHRVVNELRAGQIWVNSALAADPSMPISGHKQSGWGGERGRKGIEAYFNTKAVYIGL

SEQ ID NO: 15850 - protein, 429 aa, Anabaena variabilis ATCC 29413
MKKVLAIILGGGAGTRLYPLTKLRAKPAVPVAGKYRLIDIPVSNCINSEIFKIYVLTQFNSASLNRHIARTYNFSGFSEGFVEVLAAQQTPENPNWFQGTADAVRQYLWMLQEWDVDEFLILSGDHLYRMDYRLFIQRHRETNADITLSVIPIDDRRASDFGLMKIDNSGRVIDFSEKPKGEALTKMRVDTTVLGLTPEQAASQPYIASMGIYVFKKDVLIKLLKESLERTDFGKEIIPDASKDHNVQAYLFDDYWEDIGTIEAFYNANLALTQQPMPPFSFYDEEAPIYTRARYLPPTKLLDCHVTESIIGEGCILKNCRIQHSVLGVRSRIETGCVIEESLLMGADFYQASVERQCSIDKGDIPVGIGPDTIIRRAIIDKNARIGHDVKIINKDNVQEADRESQGFYIRSGIVVVLKNAVITDGTII

SEQ ID NO: 15851 - protein, 432 aa, Haemophilus somnus 2336
MKKFILLGLLLSFSSSSIAELSDWIKPISDISSGDTAWVMISAILVLFMTIPGLALFYGGMVRKKNVLSTMAQSFAVSGLIAVIWLCFGYSLSFTPNNAFIGGMDRFFLQGLNVFTEQKMLTVYPGAGTIPESVFMIFQMTFAIIAGAIITGATVERMKFSALLLFVGLWSLLIYVPTAHWVWGIGGWLVNDGVLDYAGGTVIHINAGVAGLVAAIVIGKRVGYRHEVMMPHNLVLTLIGTAMLQIGWFGFNAGSALAADARAGMALATTQISASVGALTWILVEVFCKHKPSALGLASGAVAGLVGITPAAGFVSVQSALFIGMITSAVCFVGVMKLKYWFRYDDTLDAFGIHGLGGIVGAVLTGIFVSPDISATETTLWTQIESVLITIIFSASGSFVLLKIIDKTVGLRVERDEERQGLDLSCHGERIE

SEQ ID NO: 15852 - protein, 957 aa, Gluconobacter oxydans
MADTISNTGLNEVGSVLRDLEKYGQSPWLDFIQRSFTEDGSLSKLVEEDGLRGVTSNPAIFEKAIGHGTEYDPQIRKLLEGEGLSPGELYEHLAIDDIRSACAVLDPVFEKTKGLDGYVSLEVSPYLAFDAHGTITEERRLWKAVGRPNLMIKIPGTVEGTGAIREAIADGINANVTLLFSLDAYKAVLEAYISGLEARVARGEEISRISSVASFFVSRIDAKIDAEIDRRVAAGDPEAEAPKAIRGKVAIANAKMAYQYYLEVRNSPRWKALAEKGANPQRLLWASTGTKDKAYSDVLYVEELIGPETVNTIPPATFDAYRDHGKSRASLTENVDQARHVMAEAERLGLGPDGITAKLVKDGCAAFSVSFDTLLTAVATKREAVLGDRLLRVSADLPPDLRDDVAAAEKDWSHSGGLRRIWKKDPSVWTNGPEAGWLNWLTVVQDRLWHIEELEVLARDVRSRGFKDILLLGMGGSSLGPEVLAETFGKREGWPKPHVLDSTDPQQVTAFEKAIDPKNTLFIVASKSGGTLEPNILFAHFWQVAGQALGKKPGDSFIAITDPGSHMQKVAEENGFWRIFYGDPKIGGRYSVLSNFGLVPAAASGIDVRKLLTVTRLMVESCGGSAPPSANPGAVLGLILGHAAHCFNRDKVTILASEGIASLGAWLEQLIAESTGKKGLGLIPIDEEELGTPDVYGTDRVFVDLLLGDDAPDSRLGALRAAGAPVVTIRLADKAQIGQAFFLFEFATAVAGAVLGIDPFDQPDVEFSKLETRKLTSAYAETGSLPPETPFAKDGPLSFYADAKNTEASGNKGDAVSILKALFDRVKPGDYVGLLAYIRRDQQTRDWAQSVRMELRDALKVATAAEFGPRFLHSTGQAYKGGPDSGVFLQVTATDAADVPVPGHGFSFSVVKAAQARGDFEVLAARGRRALRVHIDGPLEDGLKALETAIHKALAGA

SEQ ID NO: 15853 - protein, 257 aa, Marsilea quadrifolia
MASSTTSWGFVLLWLWSLLLLSFFLAPGYAGGSGWRDAHATFYGGSDASGTMGGACGYGDLYSSGYGIHTAALSTALFNGGLSCGACFELKCSGGSRWCLSGTVTISATNFCPPNNALSSTNGGWCNPPLEHFDMAQPAYQQIAKYQGGIVPVQYRRVPCSKEGGVHFTINGHAFFNLVLITNVGGAGDVHAVSVKGSRTGWQPMTRNWGQNWQSNANLCGQALSFMVTTSDGRTLTSFNAAPSSWQFGQTFVGEQL

SEQ ID NO: 15854 - protein, 252 aa, Regnellidium diphyllum
MASSATLSWAFVLSLFSFSGLSYGSSGWNDAHATFYGGSDASGTMGGACGYGDLYTSGYGTNTAALSTALFNGGLSCGACFAVKCSGNTRWCLPGTVEVTATNFCPPNWAEASDNGGWCNPPRKHFDMAQPAFEQIAKYRGGIVPVKYRRVPCQKKGGVRFTINGNPNFNLVLLTNVGGAGDVVAVSIKGSRTGWIPMTRNWGQNWQCGTVLTGQALSFAVTLDNGSVLTTYNVANADWRFGQTFEGDQFNT

SEQ ID NO: 15855 - protein, 454 aa, Pyrococcus furiosus DSM 3638
MELRPNVKEIPGPKAREIIEKHHKYMATTTNDPNEYFLVIERAEGVYWIDVDGNVILDFSSGIGVLNVGLRNPRVVEAIKKQLDLVLHAAGTDYYNPYQVALAEKLVQITPGDFEKKVFLSNSGTEANEAALKIAKWSTNRKMFIAFIGAFHGRTHGTMSLTASKPVQRSRMFPTMPGVEHVPYPNPYRNPWHIDGYENPDELINRVLEYIEEYLFSHYVPAEEVAGIVFEPIQGEGGYVVPPRNFFKELKKLADKYGILLIDDEVQMGIGRTGKMWAIEHFGIAPDIITTAKALGGGIPIGATIFRKDLDFGVSGVHSNTFGGNAVAAAAALAVMEELENGLLENVQKLEPLFRERLEEMKEKYEIIGDVRGIGLAWGVEFVKDRKTKEYATKERNEVVVEALKRGLALLGCGKSAIRLIPPLIISEEEAKIGLDIFEEAIRVVSERYGYKIH

SEQ ID NO: 15856 - protein, 490 aa, Escherichia coli K12
MSRMAEQQLYIHGGYTSATSGRTFETINPANGNVLATVQAAGREDVDRAVKSAQQGQKIWASMTAMERSRILRRAVDILRERNDELAKLETLDTGKAYSETSTVDIVTGADVLEYYAGLIPALEGSQIPLRETSFVYTRREPLGVVAGIGAWNYPIQIALWKSAPALAAGNAMIFKPSEVTPLTALKLAEIYSEAGLPDGVFNVLPGVGAETGQYLTEHPGIAKVSFTGGVASGKKVMANSAASSLKEVTMELGGKSPLIVFDDADLDLAADIAMMANFFSSGQVCTNGTRVFVPAKCKAAFEQKILARVERIRAGDVFDPQTNFGPLVSFPHRDNVLRYIAKGKEEGARVLCGGDVLKGDGFDNGAWVAPTVFTDCSDDMTIVREEIFGPVMSILTYESEDEVIRRANDTDYGLAAGIVTADLNRAHRVIHQLEAGICWINTWGESPAEMPVGGYKHSGIGRENGVMTLQSYTQVKSIQVEMAKFQSIF

SEQ ID NO: 15857 - protein, 715 aa, Escherichia coli
MKKVVTVCPYCASGCKINLVVDNGKIVRAEAAQGKTNQGTLCLKGYYGWDFINDTQILTPRLKTPMIRRQRGGKLEPVSWDEALNYVAERLSAIKEKYGPDAIQTTGSSRGTGNETNYVMQKFARAVIGTNNVDCCARVCHGPSVAGLHQSVGNGAMSNAINEIDNTDLVFVFGYNPADSHPIVANHVINAKRNGAKIIVCDPRKIETARIADMHIALKNGSNIALLNAMGHVIIEENLYDKAFVASRTEGFEEYRKIVEGYTPESVEDITGVSASEIRQAARMYAQAKSAAILWGMGVTQFYQGVETVRSLTSLAMLTGNLGKPHAGVNPVRGQNNVQGACDMGALPDTYPGYQYVKDPANREKFAKAWGVESLPAHTGYRISELPHRAAHGEVRAAYIMGEDPLQTDAELSAVRKAFEDLELVIVQDIFMTKTASAADVILPSTSWGEHEGVFTAADRGFQRFFKAVEPKWDLKTDWQIISEIATRMGYPMHYNNTQEIWDELRHLCPDFYGATYEKMGELGFIQWPCRDTSDADQGTSYLFKEKFDTPNGLAQFFTCDWVAPIDKLTDEYPMVLSTVREVGHYSCRSMTGNCAALAALADEPGYAQINTEDAKRLGIEDEALVWVHSRKGKIITRAQVSDRPNKGAIYMTYQWWIGACNELVTENLSPITKTPEYKYCAVRVEPIADQRAAEQYVIDEYNKLKTRLREAALA

SEQ ID NO: 15858 - protein, 548 aa, Pseudomonas fluorescens
MTEITVNGMTCTSCATHVKDALEKIPGVNAAVVSYPESRAQVMADTAVSHNQLLAAIAALGYQGSIRVGDFKDEPKIRDALEGAGLHIAIIGSGGAAMAAALKAVEQGATVTLIERGTIGGTCVNIGCVPSKIMIRAAHIAHLRRESPFDGGIAATVPAIDRSKLLAQQQARVDELRHAKYEGILDGNPAITVLHGEARFKDDQSLVVRLNEGGEREVTFDRCLVATGASPAVPPIPGLKESPYWTSTEALVSDTIPARLAVIGSSVVALELAQAFARLGSQVTILARSTLFFREDPAIGEAVTAAFRAEGIEVLEHTQASQVAHVNGEFVLTTGHGELRADKLLVATGRAPNTRSLALDAPGVTVNAQGAIVIDQGMRTSNPNIYAAGDCTDQPQFVYVAAAAGTRAAINMTGGDRALNLTAMPAVVFTDPQVATVGYSEAEAHHDGIETDSRTLTLDNVPRALANFDTRGFIKLVIEEGSGRLIGVQAVAPEAGELIQTAVLAIRNRMTVQELADQLFPYLTMVEGLKLAAQTFNKDVKQLSCCAG

SEQ ID NO: 15859 - protein, 273 aa, Corynebacterium efficiens YS-314
MEGMTIIAVIGGGQIGEALVSGLVAADVNPQNIRVTNRREERGAELEERYGVVTMTDNAQAVDGADVVFLCVKPKMILDVLAEIATTVDNNSVSTVVVSMAAGINLASMEEKVSAGMPIVRVMPNTPMLVRKGMCTVTGGRFVDAEQLELVQELLTSVGDVMVVEESDLDAVTALSGSSPAYLFLVTEALIDAGVSLGLTRAAAKQLAVSAFDGAGTMLKETGREPSDLRAGVSSPAGTTVAALRELEESGIRGAFFRAAQACADRSAEMGRN

SEQ ID NO: 15860 - protein, 204 aa, Streptococcus suis
QTCFVQAIEDAGGLPLILPATEPDLAKYYIHLIDKLILTGGQNVQPSYYHEKRTIDSDNYLPKRDEFELALIRAAQENQKPIFGICRGLQLYNVAQGGSLHQSISEHWQDIDGQEVSQTIQLTQNSPLYDIYESNPSVNSFHRQAIKDLAPDLEIIALSDNQQIIEAVHSAYPTKFLGVQWHPELLYGKREIEKELFHYIVNKL

SEQ ID NO: 15861 - protein, 428 aa, Coxiella burnetii RSA 493
MTATITDINAHEILDSRANPTLEVRVTLSSQAYGCAAVPSGASTGEREAVELRDNDLERYGGKGVLQAVENVNGPIRDALLGQDPRSQEEIDRIMIELDGTENKANLGANAILGVSLAVAYAAANNADLPLYRYLGGDGGPFSMPVPMMNIINGGAHATNNLDFQEFMIVPVGAPTFAEALRYGAEVFHALKKRLVSRGLMSAVGDEGGFAPDLPNNEAAFELILEAIEDANYVPGKDIYLALDAASSELYQNGRYDFENNQLTSEEMIDRLTEWTKKYPVISIEDGLSENDWAGWKLLTERLENKVQLVGDDIFVTNPDILEKGIKKNIANAILVKLNQIGTLTETLATVGLAKSNKYGVIISHRSGETEDTTIADLAVATDARQIKTGSLCRSDRVAKYNRLLQIERELNDQAPYAGKEAFLFNRK

SEQ ID NO: 15862 - protein, 213 aa, Streptococcus suis
ITEPLFSYTQTCFVQAIEDAGGLPLILPVTEPDLAKYYIHLIDKLILTGGQNVQPSYYREERTIDSDNYLPKRDEFELAIIRAAQENQKPIFGICRGLQLYNVAQGGSLHQSISEHWQDIDGQEVSQTIQLTQNSPLYDIYESDPSVNSFHRQAIKDLAPDLEIIALSDNQQIIEAVHSAYPTKFLGVQWHPELLYGKREIEKELFHYIVNKL

SEQ ID NO: 15863 - protein, 270 aa, Spirulina platensis
MTIATETKLKLDWMTIVFMAFLHIGALFVLVPSNFSWAAVGLALFLHWVTGGLGITLGFHRLITHRSFETPKWLEYFLAFCGTLACQGGPIQWVGLHRMHHLYSDQTLDPHDSNKGFWWSHMGWMLREIPADADVPRFTKDINEDPVYLFLQNYFIPIQVALGVVLYLLGGWPLVVWGIFFRIVVVFHCTWFVNSATHKFGYQTYQSNDNSKNCWWVALVTYGEGWHNNHHAFQYSARHGLKWWEIDLTWMTIQLLQFLGLAKKVKLVEN

SEQ ID NO: 15864 - protein, 71 aa, Zea mays
MGGGMEVHKNKWIEEWNAGRENLEFNFRWTRRSLAVVGLFGLAVPILVYKGIVRDFHMQDEDAGRPPRKFL

SEQ ID NO: 15865 - protein, 523 aa, Bordetella parapertussis 12822
MPENAQPHAVIPAADLQLSAQSPQWRVFAAAAAGASLVARPLRVIEAAGIYVDLSMQRHSSALAQAGLALLQARDVLGARAALFAPGAPDAAHGRYPVLRAGYGAHPEEQCDIEVEIEYARMLEFVRELDRGGACPAVLYLGGGAGQWALRLALQAFGGPAQRRQLRFVSGGDAAALHEALAGLGPRRTLVVAASRGFEPSETLDNARAAIDWLRRAGIDDVSAHLVTVTGNESAARALGVAAARVFRLPSWLQPRHELWSVGALPVALALSVDMLKALRSGAAAMDQHFLQAAPAVNAPMQMALAAVANTSAMHWPTHALAVYSARLAALPACVQQLEMTLAGRAPASLPAYSVVWSPAGAPGPGAFFEWLHRAPAGAPVDFIAGLDEYPASPPAHRALLANCLAQREALLRGLPAGPGQPAAGGGRPSTLVVLRQVDPRAVGALLALYEHKAFVQAALWGAALGGADQAQACQRLAQDIARQLAVPPAAGPVDWGHDSSTAFWIDRYREQGGAGAAAGRTA

SEQ ID NO: 15866 - protein, 510 aa, Vibrio parahaemolyticus RIMD 2210633
MSAKKPLALVILDGYGYREDTASNAIANAKTPVMDALIANNPHTLISASGMDVGLPDGQMGNSEVGHTNIGAGRVVYQDLTRITKSIADGEFEQTPALVEAIDAAVKAEKAVHIMGLMSPGGVHSHEDHIYAAVEMAAARGAEKIYLHCFLDGRDTPPRSAENSLQRFQDLFAKLGKGRVASLVGRYYAMDRDNNWERVQVAYDLLTQAKAEFTAETAVAGLEAAYARDENDEFVKATAIKAEGQEDAIMQDGDAVIFMNYRADRARQITRAFVPGFDGFERAVFPAINFVMLTQYAADIPLATAFPPASLENTYGEWLSKQGQTQLRISETEKYAHVTFFFNGGVENEFEGEERQLVASPKVATYDLQPEMSSPELTEKLVAAIKSGKYDTIICNYPNADMVGHTGVYEAAEKAIEALDESVGKVVEAIKEVGGQLLITADHGNAEMMIDPETGGVHTAHTNLPVPLIYVGDKAVEFKEGGKLSDLAPTMLSLAGLEIPAEMSGDVLVK

SEQ ID NO: 15867 - protein, 205 aa, Pseudomonas aeruginosa PAO1
MSELNLTTDEARVSYGIGRQLGDQLRENPVPGMTLDAVLAGLSDAFAGIDSRVSGEALSASFQVIRERMQAEAQAKAEAAAGEGRAYLAENAKREGVTVLPSGLQFEVLSTGEGAKPSREDTVRTHYHGTLIDGTVFDSSYQRGQPAEFPVGGVIAGWVEALQLMNAGSKWRLHVPSELAYGGQAVGSIPPHSVLVFDVELLEIL

SEQ ID NO: 15868 - protein, 421 aa, Methylococcus capsulatus str. Bath
MKARIESVQAMPIYDSRGVPTVRVRLTLTDGTAATASIPSGASTGENEAVELRDGDPKAHGGKGVLKAVSNVNDVIAPAVMGLEPWRQAEIDRLMIELDGTANKERLGANAILGVSEAVAAAAAKSAGLPLYAYLGGAGQARLPIPMINILNGGKHADSSLDFQEFMIMPVGAPSFAEAMRYATETFQALKSILKAKGHATSVGDEGGFAPQLQSNDEACDLIVEAITKAGYEPGEDIAIALDPAASSFHENGVYRLTRSGQGDKTSSEMTDLYRRWIDKYPIVSIEDGLAENDWDGFREHTAVLGEKIQIVGDDLLVTNTRFIQRAIEEKSCNAVLIKLNQIGTVTETVEAIHLCRKAGWGFVISHRSGETEDTFMADFAVAMGGGQIKTGSVCRSERMAKYNRLLEIESDLGKAARFGR

SEQ ID NO: 15869 - protein, 330 aa, Photorhabdus luminescens subsp. laumondii TTO1
MPLVNEPLVEKSLVEKVSVEKTSVEKTSVEKIVKKAVIPVAGLGTRMLPATKAIPKEMLPLVDKPLIQYVVNECIAAGINEIILVTHSSKNSIENHFDTSFELEAILEKRVKRQLLDEVQSICPSHVTIMQTRQGIAKGLGHAVLCAKPLIGDEPFAVILPDVILDEYSTDLTRYNLSEMLVRYNETGASQILVEPVPHEEVSSYGIVDCQGENLQPGDSKLIKRVVEKPKPKEAPSNLSIVGRYVLSEKIWPLLAKTAPGAGDEIQLTDAIAMLIEREPVEAYHLQGVSHDCGNKLGYMQAFVRYGMKHHALGKEFTDWLVALQDQVKE

SEQ ID NO: 15870 - protein, 205 aa, Streptococcus suis
YPDLLVQAIEDAGGLPLILPVTEPDLAKYYIHLIDKLILTGGQNVQPSYYHEERTIDSNNYLPKRDEFELALIRAAQENQKPIFGICRGLQLYNVAQGGSLHQSISEHWQDIDGQEVSQTIQLTQNSPLYDIYKSDPSVNSFHRQAIKDLAPDLEIIALSDHQQIIEAVHSAYPTKFLGVQWHPELLYGKREIEKDLFHYIVNKL

SEQ ID NO: 15871 - protein, 273 aa, Glycine max
MESTQSNTSVMNHFILVHGLCHGAWCWYKVVAALQAAGHRVTAVDLAASGAHPARIDEVHSFEEYSQPLLDVVAAAPEGDGERLILVGHSHGGLSLALAMERFPGKVAAAVFAAAGMPCVGKHMGVTTEEFMRRTSSEGLMDCKMLPINNNHGAGVAMIMGPNFLAHKNYQQSSPEDLALAKMLVRPGNLFMEDPVMKDASLLTDTNYGSVKKVYVVAKADGSSTEEMQRWMVLLSPGTEAEEIAGADHAIMSSRPRELCDALVKIADSLNTC

SEQ ID NO: 15872 - protein, 217 aa, Brucella melitensis 16M
MKFFVDTADVKEIRELNDLGLVDGVTTNPSLILKSGRDIIEVTKEICNIVKGPVSAEVAATEYEQMMKEAAVIARIADNICIKLPVTLDGLKACKALTSEGHKVNMTLCFSANQALLAAKAGATFISPFIGRLDDTGINGMELIAEIRTIYDNYDFRTEILAASVRTVNHVKEAALIGADVVTAPPATLKALVKHPLTYKGLETFLADWAKTGQKIA

SEQ ID NO: 15873 - protein, 273 aa, Podospora anserina
MADRQLTTLLTQLRTPSLPFPQSTTLLSKAKLLLLQLSALTPSPTILPANLTLAREVYELGALHSLRAKNPDSFTRYVSQLQPFYELPPSAFSSPSQNQNKVTALWLLFLLTQGRYTEFHSDLEGLSTRGSVAEVENDKFLGYPIKLERWLMEGAYDRVWKAMKKGEVPSENANINKKVLTPQIRREIASSSERAYPSLPFLSAQSLLFLDSEGAVVDFAHSRGWVIKDRTIYFPTAAELNADEEGEQEQEKEVGQMVIENTLGYARQLETIV

SEQ ID NO: 15874 - protein, 1139 aa, Triticum aestivum
MSSSRSNNRPACSRGSSARSKHSERVVAQTPVDARLHAEFEGSQRHFDYSSSVSALNRSGASTSSAVSAYIQNMQRGRYIQPFGCLLAIHPESFALLAYSENAAEILDLTPHAVPTIDQRDALAVGADVRTLFRSQSAVALHKAAVFGEVNLLNPILVHARTSGKPFYAILHRIDVGLVIDLEPVNPADVPVTAAGALKSYKLAAKAISRLQSLPSGNLSLLCDVLVREVSELTGYDRVMAYKFHEDEHGEVIAECRRSDLEPYLGLHYPATDIPQASRFLFMKNKVRMICDCAASPVKLIQDDNLSQPISLCGSTMRAPHGCHAQYMANMGSIASLVMSITINEDDDEDGDTGSDQQPKGRKLWGLVVCHHTSPRFVPFPLRYACEFLLQVFGIQLNKEVELASQAKERHILRTQTLLCDMLLRDAPVGIFTQSPNVMDLVKCDGAALCYQNQIMVLGSTPSEGEIKKIVAWLLECHDGSTGLSTGLTLEAGYPGASALGEVVCGMAAIKISSKGFIFWFRSHTAKEIKWGGAKHEPGDADDNGRRMHPRSSFRAFLEVVKWRSVPWEDVEMDAIHSLQLILRGSLQDEDANDNNARSIVEAPSDDIKKIQGLLELKIVTNEMVRLIETATAPILAVDIVGNINGWNNKVAEITGLPTTEAIGMLLVDLVEGDSVEVVKQMLNSALQGTEEQNLEIKLKTMHQQESKGPVVLMVNACCSRDLSDKVVGVCFVAQDLTGHKMVMDKYTRIQGDYVAIVKNPNELIPPIFMINDLGSCLEWNEAMQKITGIKREDAIDKLVIGELFTLHDYGCRVKDQVTLTKLSILMNTVISGQEPEKLAFGFFNTDGKYMESLLTANKRTDAEGKITGALCFLHVASPELQHALQVQKMSEQAATHSFKELTYIRQELKNPLNGMQFTRKLLEPSDLTEEQRQLFASNVLCQEQLKKILHDNDLEGIEQCYMEMNTVEFNLEEALNTVLMQGMSVSKEKQISLDRDWPVEVSSMYLYGDNLRLQQVLADYLACTLQFTRPAEGPIVLQVIPKKEHIGSGMQIAHLEFRLVHPAPGVPEALIQEMFRHGPGVSREGLGLHISQKLVKTMSGTVQYLREAESSSFIVLVEFPVAQLNSKRSRPSTSKSNF

SEQ ID NO: 15875 - protein, 289 aa, Streptococcus thermophilus
MKGIILAGGSGTRLYPLTRAASKQLMPIYDKPMIYYPLSTLMLAGIKEILIISTPQDLPRFKDMLGDGSELGITLSYAEQPSPDGLAQAFIIGEAFIGDDNVALILGDNIYHGNGLTKMLQRAASKEKGATVFGYQVKDPERFGVVEFDADMNAISIEEKPEEPKSNFAVTGLYFYDNDVVEIAKNIKPSPRGELEITDVNKAYLDRGDLSVELMGRGFSWLDTGTHESLLEAAQYIETVQRLQNVQVANLEEIAYRMGYITKEQVYELAQPLKKNEYGQYLLRLIGEA

SEQ ID NO: 15876 - protein, 584 aa, Arabidopsis thaliana
MCGILAVLGCSDDSQAKRVRVLELSRRLRHRGPDWSGLYQNGDNYLAHQRLAVIDPASGDQPLFNEDKTIVVTVNGEIYNHEELRKRLKNHKFRTGSDCEVIAHLYEEYGVDFVDMLDGIFSFVLLDTRDNSFMVARDAIGVTSLYIGWGLDGSVWISSEMKGLNDDCEHFETFPPGHFYSSKLGGFKQWYNPPWFNESVPSTPYEPLAIRRAFENAVIKRLMTDVPFGVLLSGGLDSSLVASITARHLAGTKAAKQWGPQLHSFCVGLEGSPDLKAGKEVAEYLGTVHHEFHFSVQDGIDAIEDVIYHVETYDVTTIRASTPMFLMSRKIKSLGVKMVLSGEGADEIFGGYLYFHKAPNKKEFHQETCRKIKALHKYDCLRANKSTSAFGLEARVPFLDKDFINTAMSLDPESKMIKPEEGRIEKWVLRRAFDDEERPYLPKHILYRQKEQFSDGVGYSWIDGLKDHAAQNVNDKMMSNAGHIFPHNTPNTKEAYYYRMIFERFFPQNSARLTVPGGATVACSTAKAVEWDASWSNNMDPSGRAAIGVHLSAYDGKNVALTIPPLKAIDNMPMMMGQGVVIQS

SEQ ID NO: 15877 - protein, 433 aa, Bordetella parapertussis 12822
MHTAFHLPNEPEMKNRDLNTRRTLATPRGVGVMCDFYAVRAENSTLWDAEGKEYIDFAGGIAVLNTGHRHPKVKAAIAAQLDNFTHTAYQIVPYEGYVSLAERINAVAPIEGLKKTAFFTTGVEAVENAVKIARAYTGRSGVVAFSGAFHGRTMMGMALTGKVAPYKLAFGPMPGDVFHVPFPNATQAISVADSLKALDLLFKVDIDPKRVAAIIIEPVQGEGGFNVTPPELMQALRKVCDEHGILLIADEVQTGFARTGKLFAMQHHSVQADLITMAKSLGGGMPISGVVGRAEVMDGPAAGGLGGTYAGNPLAVAAAHAVLDVIAEEKLCERAAELGKRLMDRLEGLRAKCPAIADVRGLGSMVALELNDPATGKPDAEAVKRIQQQAIERGLILLSCGVYGNVLRFLYPLTIPDDQFARALDILAETIAA

SEQ ID NO: 15878 - protein, 300 aa, Bacteroides thetaiotaomicron VPI-5482
MNWSKIIECVPNFSEGRDLEKIDKIVAPFRGKSGVKLLDYSNDEDHNRLVVTLVGEPEALRDAVIEAIGIAVRLIDLNHHSGQHPRMGAVDVVPFIPIKNTTMEEAVALSKEVASRVAELYNLPVFLYEKSATAPHRENLASVRKGEFEGMAEKIRLPEWQPDFGPAERHPTAGTVAIGARMPLVAYNINLSTNNLEIATKIAKNIRHINGGLRYVKAMGVELKERNITQVSINMTDYTRTALYRAFELVRIEARRYGVAIVGSEIIGLVPMEALIDTASYYLGLENFSMQQVLEARIME

SEQ ID NO: 15879 - protein, 278 aa, Bacillus cereus ATCC 14579
MWRDTMSAFLGELIGTALLIVLGGGVCAGVSLKKSFAKDSGWIVITMGWGLAVAVAAYAVGSISGAHLNPALTIGLAFKGAFPWSDVPGYIVAQMIGAIIGAVIVYLHYLPHWKETEDPGTKLGVFATGPAIPNTFANLLSEMIGTFVLVFGILAIGANKFADGLNPFIVGFLIVSIGLSLGGTTGYAINPARDLGPRIAHFFLPIAGKGGSNWKYAWIPVVGPILGGSLAGLFHQVVFEGKQNSALIYVIIATVIVLAISYMTSKKSGSNTNSRKVA

SEQ ID NO: 15880 - protein, 279 aa, Caulobacter crescentus CB15
MSKLVPAVRSGDVLMPALGFGTWQLENGTAVPLVEKALEIGYRHIDTAQIYGNERDVGAAIRNSGVKRDEIFLTTKVWIDQFADGDLQRSAEKSLEKLGVDQVDLLLLHWPKPEVPLAETLKALNAVRAKGWTRAIGLSNFPSAQLEEAAKLSEAPIATDQVEYHPYLSLKTLKAKADQLGVSITAWSPLAQGKVAQDPVLIEIGRAHGKTPGQVTLRWIIQQGIIAIPRTSNPKRIEENFDILDFELSEKEMAQIHGLARPDGRIGDWIDRAYAWDAE

SEQ ID NO: 15881 - protein, 368 aa, Nostoc punctiforme PCC 73102
MTTNVTSSIVERGKTNVKAQVFRGVNQLSYEDIPVPTVEPDEVLVQVRVVGLCQSDIKKIRYPLYEPPRIFGHETAGTIAAIGNNVKGWQVGQRVAVMHHIPCMRCAYCLNDNFSMCDVYKNISTTAGFNASGGGFADYVKVPGHIVENGGLIPIPDNISFEEASFVEPTNCCLKAVRKAQIAPGQTVLVTGAGPIGLMFIMLVKYFGAKAIATDLLPSRIDKALSVGAEAAFDARDPDLPAKISALTGGLGVDVTLLAVPSEKAFFQALDSTRKGGKILFFAEFPDEVEIPINPNILYRREIDLIGSYSSSYRLQNLSADIVFNQRIDVKALISDRYPLKDLSAAVEQAIAPTPDTYKILIYPQKED

SEQ ID NO: 15882 - protein, 292 aa, Ralstonia eutropha JMP134
MRKGIILAGGSGTRLYPITRSVSKQLLPVYDKPMIYYPLSTLMLAGIRDILIISTPEDTPRFSDMLGDGSKWGLNLQYAVQPSPDGLAQAFIIGRDFIGNDPSTLILGDNIFHGHDLVSQLTRSSAQSQGATVFAYHVHDPERYGVVEFDQNFRALSLEEKPLKPRSNYAVTGLYFYDNQVCDIAADIKPSARGELEITDVNKQYLSQNQLDVEIMGRGYAWLDTGTHDSLLEAASFIATLQNRQGLMVACPEEIAYRSKWISVEQVAALAQPLAKNGYGQYLQRIVSDPVK

SEQ ID NO: 15883 - protein, 162 aa, Capsella rubella
AAPVYLSEVAPPRWRGAFNSGFQFFIGVGVVAANLINYGTDSHRNGWRISLGLAAVPAAIMTVGCLFISDTPSSLLARGKHENAHASLLKLRGVENIADVETELAALARSSQLAIEARAEPFAKTILERRYRPHLVVAVAIPCFQQLTGITVNAFYAPVLFR

SEQ ID NO: 15884 - protein, 269 aa, Streptomyces avermitilis MA-4680
MTQKVAVLGTGKIGEALLSGMIRAGWAPTDLLVTARRPERAEELRARHGVTPVTNAEAAKTADTLILTVKPQDMGTLLTELAPHVPTDRLVISGAAGIPTSFLEERLAQGTPVVRVMTNTPALVDEAMSVISAGSHATAGHLAHAEEIFGAVGKTLRVPESQQDACTALSGSGPAYFFYLVEAMTDAGILLGLPRDKAHDLIVQSAIGAAIMLRDSGEHPVKLRENVTSPAGTTINAIRELENHGVRAALIAALEAARDRSRELASGSS

SEQ ID NO: 15885 - protein, 122 aa, Triticum aestivum
  unsure (1)..(122): unsure at all Xaa locations
MAPTVMASSATSVAPFQGLKSTAGLPVSRRSNGASLGSVSNGGRIRCMQVWPIEGIKKFETLSYLPTXSTTEALLKQVXYLIRSKWVPCLXFNKVGFIFREHNASPWVLXWPYWXMWKLLSG

SEQ ID NO: 15886 - protein, 272 aa, Bacillus subtilis subsp. subtilis str. 168
MEQIGLIGYGSMADMIARQLLKHEQIKENELFIETRTKGERLRALMSDYPNVSADPLENWANTCQLILICVPPLHVIETMRRLYPYVNRNTHIVSIAAGVPLRLLEAETEAGISRVIPAITSEAEAGISLVVHSEALAAEKKERLNELLSVFSRVREIKESNLDVASNLTSSAPGFIAAIFEELALSAVRNSSLSKEEAFDFLIHSLYGTGKMLIEKNMSFEETLERVATKGGITGEGAEVIHASVPDVFDEVFERTLRKYELLTEQVGKQT

SEQ ID NO: 15887 - protein, 446 aa, Fusobacterium nucleatum subsp. vincentii ATCC 49256
MISNLSELQKKDLKYVFHPCAQMKDFEENPPLVITKGDGIYLIDENGNRYMDCISSWWVNLFGHCNKRINKVITEQVNTLEHVIFANFAHEPAAELCEELTKVLPKGINKFLFSDNGSSCIEMALKLSFQYHLQTGNPQKTKFISLENAYHGETIGALGVGDVDIFTETYRPLIKEGRKVRVPYINSKLSDEEFTKLEDECIKELEDLIKKKHNEIACMIVEPMVQGAAGIKIYSARFLKAARDLTKKYNIHLIDDEIAMGFGRTGKMFACEHAGIEPDMMCIAKGLSSGYYPIAMLCITTDIFNAFYADYKEGKSFLHSHTYSGNPLGCRIALEVLKIFKDDDVLRTINKKGTHLKNKMEEIFKDKSYIKDIRNIGLIGAIELKDNLLPNVRIGREIYNLALKKGIFVRPIANSVYFMPPYIITYEEINKMLQVCKESIEEILKI

SEQ ID NO: 15888 - protein, 338 aa, Burkholderia fungorum LB400
MGGVRHHVTGRRGAGAFTEATMSTMLAYRIHRFGGPEVFRSERIDVPEPGAGQVRVRVLTASANPVDIKTRAGDYPLIREDSLPYTLGRDFAGVVERVGAGVGEWKQGDEVYGFVGQGQGAYAEFVVVDAQALARRPAKVDMAAAGAVPLAALTAWQGLFEQGDLAGGQRVLIHAGSGGVGHFAVQFAKHEGAEVFVTASGDGLAFVRSLGADHVIDYRTQRFEELARDMDLVFDLVGGDTQKRSWAVVARGGALISTLAEPSQTEAASHGARAARYTARPDGYQLSEIAALIDDGKVRVKVAETYPFDAAADALARLEKGHVRGKIVIAVAPASTNS

SEQ ID NO: 15889 - protein, 507 aa, Xanthomonas campestris pv. phaseoli
MRPGHLMVLALLAPTLIAPPVFAQSVLTRDNGAKVGDNQNSQTAGATGPTLLQDVQLIQKLQRFDRERIPERVVHARGTGVKGEFTATADLSSLTKAKVFSAGEKTPVFVRFSSVVHGNHSPETLRDPHGFATKFYTSEGNWDLVGNNFPTFFIRDAIKFPDMVHAFKPDPRTNLDDDSRRFDFFSHVPEATRTLTLLYSNEGTPAGYRFMDGNGVHAYKLVNAQGEVHYVKFHWKTLQGIKNLDPKQVAAVQAKDYSHLTNDLVGAIKKGDYPKWDLYVQVLKPEDLAKFDFDPLDATKIWPDVPEQKVGQMVLNKNVDNFFQETEQVAMAPANLVPGIEPSEDRLLQGRIFSYADTQLYRIGANGLSLPVNRPRVAVNNGNQDGQGNIGQTTSGVNYEPSRLEPRPQDTAARYSELPLSGTTQQAKITREQNFKQAGELYRSYSKKDRADLVQSFGESLATTDTESKHLMLSFLYKADPEYGTGVTRVAKGDLARVKQLASSLQD

SEQ ID NO: 15890 - protein, 98 aa, Oryza sativa
PRFREERYSQLILWSGHTFVCLVDHVIIPTDHLHMDGFGVNTYTFFTRYAKARYVMFHWKPTCGVSCLMDDKATLVVGKNHFHASHDLYDFIVSGNFL

SEQ ID NO: 15891 - protein, 378 aa, Burkholderia fungorum LB400
MKALVYEGPRKVTVKEMPDAKIERPTDVLVKITTTNICGSDLHMYEGRTNMETGRILGHENLGVVVEVGAGVERIKVGDRVCLPFNIGCGFCKNCERGLTGFCLTTNPGMAGAAYGFAGMGPYSGGQAEYLRVPFGDFNCLVLPPDAEEKENDYVMLSDIFPTGYHATVLAGVEPGDSVVIYGAGPVGLMAALSASIKGASKIMVVDSHPDRLKLAEKIGAIPVDDTDGSSAERILEMTGGEGADRGCECVGYQCSCKGHEVPNLTMNNLIKAVRPTGGIGVVGVFVAEDPKAGDELAKKGQLALDFGQLWMKGQHIATGQANVKAYNRKLRDLIAAGKARPSQIISHELPLDKAPDGYKHFDERDDGWTKVVLKPAA

SEQ ID NO: 15892 - protein, 246 aa, Methanothermobacter marburgensis str. Marburg
MVSLTKRCIAEFIGTFILVFFGAGSAAVTLMIASGGTSPNPFNIGIGLLGGLGDWVAIGLAFGFAIAASIYALGNISGCHINPAVTIGLWSVKKFPGREVVPYIIAQLLGAAFGSFIFLQCAGIGAATVGGLGATAPFPGISYWQAMLAEVVGTFLLMITIMGIAVDERAPKGFAGIIIGLTVAGIITTLGNISGSSLNPARTFGPYLNDMIFAGTDLWNYYSIYVIGPIVGAVLAALTYQYLTSE

SEQ ID NO: 15893 - protein, 465 aa, Canavalia lineata
MASSVLSGANQSSPSSTVLNTHLKGKPRLGDNALRFSGNKGGSNAFSSRSRGRISMAVADNVSRFEGIPMAPPDPILGVSEAFKADNSDVKLNLGVGAYRTEELQPYVLNVVKKAENLMLERGQNKEYLPIEGLAAFNKATAELLLGADNPAIKQQRVATVQGLSGLVSLRLGAALIERYFPGAKVLISSPTWGNHKNIFNDARVPWSEYRYYDPKTVGLDFEGMIEDIKSAPEGTFVLLHGCAHNPTGIDPTPEQWEKIADVIEEKNHRPFFDVAYQGFASGSLDEDAASVRLLVARGIELFIAQSYSKNLGLYAQRIGAINVISSSPESAARLTSQLKRIARPMYSNPPVHGARIVADLVGNPLLFEEWKAFMEMMAGRIKNVRQLLYDSISSKDKSGKDWSFILKQIGMFSFTGLNKEQSDNMTNKWHVYMTKDGRISLAGLSLAKCEYLADAIIDSYHNVS

SEQ ID NO: 15894 - protein, 242 aa, Glycine max
VTPQTPPARSHRRRGPPRVTIKINVTHGSSHHDLHLPAQSTFGDVKKLLVNKTGLEPAEQRLFFRGIEKGDNQRLQAEGVKDKSKLFLLEGIGSKERKLEETRKENEMSKAFEAIASVRAEVDKLSNRVTSIEVSINGGNKASEKEFLVLTELLMSQLLKLDGIEAEGEAKLQRKAEVNRVQNLVDKLDSLKARNANPFSNSSNDVKVTTQWETFDSGMESSDAPSDNSSSTKVTQDWEQFD

SEQ ID NO: 15895 - protein, 193 aa, Monacrosporium haptotylum
MADIRRKLVIVGDGACGKTCLLIVFSKGTFPEVYVPTVFENYVADVEVDGEHVELALWDTAGQEDYDRLRPLSYPDSHVILICFAIDSPDSLDNVQEKWISEVLHFCQGLPIILVGCKKDLRFDSKTMEELRKTSQKPVTPEEGEQVRGKIGAAKYLECSAKTNDGVREVFEHATRAALTTFKKKKSSKCSIL

SEQ ID NO: 15896 - protein, 194 aa, Monacrosporium haptotylum
MTTQSLKCVVTGDGAVGKTCLLISYTTNAFPGEYIPTVFDNYSASVMVDGKPISLGLWDTAGQEDYDRLRPLSYPQTDVFLICFSLVSPPSFENVKTKWFPEISHHAPNVPIILVGTKLDLRDDPKIQQSLKDKKMAPIQFTNGVAIAKDIGAVKYLECSALTQKGLKNVFDEAIRAVLSPPPKPTKSKKCTIL

SEQ ID NO: 15897 - protein, 398 aa, Trichodesmium erythraeum IMS101
MTKKTVASLSKSDLSGKKVLMRADFNVPVDNGSITDDTRIRAALPTIQDLTEKGAKVILTSHFGRPKGKVNEKMRLTLVGERLSEVLGKEVKKCDDCIGDEVTSTVAEMKDGDVVLLENVRFYSGEEGNDPEFAKQLASVADLYVNDAFGTAHRAHASTEGVTKYLSPSVAGYLIEQELKFLQGAIDSPQKPLAAIIGGSKVSSKIGVIEALLDKCDKLLLGGGMIFTFYKARGLSVGKSLVEEDKIELAKSLEAKAKEKGVTMLLPTDVVVADKFDPEANTQTVSIEAIPDGWMGLDIGPESAKVFQDALADCKTVIWNGPMGVFEMEKFAKGTEAIAQTLADKQDAITIIGGGDSVAAVEQLGLGEKMSHISTGGGASLELLEGKKLPGIVALDDQ

SEQ ID NO: 15898 - protein, 189 aa, Oryza sativa
MSRAECGGGEEEERCRYRGVRRRRWGKWVSEIRVPGTRERLWLGSYATPEAAAVAHDTAVYFLRGGAGDGGGGGATLNFPERAAATYGGGAAVARLSPRSVQRVASDAGMAADAQLVAARDAAPAPAPATAYARPDHCAGATTARHDELARRGMYGAHAHAAGANARTSGERQLVCAEEISVDDMEILM

SEQ ID NO: 15899 - protein, 450 aa, Bacillus anthracis str. Ames 0581
MMKTKQTDELLAKDEQYVWHGMRPFSPNSTMVGAKAEGCWVEDIQGKRYLDGMSGLWCVNSGYGRKELAEAAYKQLQTLSYFPMSQSHEPAIKLAEKLNEWLGGEYVIFFSNSGSEANETAFKIARQYYAQKGEPHRYKFMSRYRGYHGNTMATMAATGQAQRRYQYEPFASGFLHVTPPDCYRMPGIERENIYDVECVKEVDRVMTWELSETIAAFIMEPIITGGGILMPPQDYMKAVHETCQKHGALLISDEVICGFGRTGKAFGFMNYDVKPDIITMAKGITSAYLPLSATAVKREIYEAFKGKGEYEFFRHINTFGGNPAACALALKNLEIIENENLIERSAQMGSLLLEQLKEEIGEHPLVGDIRGKGLLVGIELVNDKETKEPIDNDKIASVVNACKEKGLIIGRNGMTTAGYNNILTLAPPLVISSEEIAFVIGTLKTAMERI

SEQ ID NO: 15900 - protein, 320 aa, Vibrio parahaemolyticus RIMD 2210633
MIKKIGVLTSGGDAPGMNAAIRGVVRTALSEGLEVFGVYDGYLGLYEGRIEKLDRSSVSDVINKGGTFLGSARFPEFKQVEVREKAIENLKKHGIDALVVIGGDGSYMGAKKLTEMGYPCIGLPGTIDNDIAGTDYTVGYLSALNTVIDAIDRLRDTSSSHQRISIVEIMGRHCGDLTLMSAIAGGCEYIITPETGLDKDKLISNIQDGIAKGKKHAIIALTELMMDANELARDIEAATGRETRATVLGHIQRGGRPTAFDRVLASRMGNYAVHLLLEGHGGRCVGIVKEQLVHHDIIDAIENMKRPVRNDLYKVAEELF

SEQ ID NO: 15901 - protein, 405 aa, Xanthomonas axonopodis pv. citri str. 306
MSFRDPADAPCTAATAAVRAGIDRDTAYGAVTPPIVVSSNFSFDGFGNKRQYDYTRSGNPTRDLLGEALAELEGGAGGVITSTGMGAINLVLNAVLQPGDTLVVPHDAYGGSWRLFNALAKKGHFALVTADLTDPRSLADALAQSPKLVLIETPSNPLLRITDLRFVIEAAKKVGALTVVDNTFLSPALQKPLDFGADLVLHSTTKYINGHSDVVGGAVVARDAQLHQQLVWWANALGLTGSPFDAFLTLRGLRTLDARLRVHQENADAIAALLDGHAAVNQVYFPGLASHPGHALAARQQKGFGAMMSFELEGGEAAVRAFVDGLRYFTLAESLGGVESLIAHPASMTHAAMTAEARAAAGISDGLLRLSIGIESAEDLLADLRAGLARAEATLTNASRKQVDA

SEQ ID NO: 15902 - protein, 523 aa, Glycyrrhiza echinata
MEPQLVAVSVLVSALICYFFFRPYFHRYGKNLPPSPFFRLPIIGHMHMLGPLLHQSFHNLSHRYGPLFSLNFGSVLCVVASTPHFAKQLLQTNELAFNCRIESTAVKKLTYESSLAFAPYGDYWRFIKKLSMNELLGSRSINNFQHLRAQETHQLLRLLSNRARAFEAVNITEELLKLTNNVISIMMVGEAEEARDVVRDVTEIFGEFNVSDFIWLFKKMDLQGFGKRIEDLFQRFDTLVERIISKREQTRKDRRRNGKKGEQGSGDGIRDFLDILLDCTEDENSEIKIQRVHIKALIMDFFTAGTDTTAISTEWALVELVKKPSVLQKVREEIDNVVGKDRLVEESDCPNLPYLQAILKETFRLHPPVPMVTRRCVAECTVENYVIPEDSLLFVNVWSIGRNPKFWDNPLEFRPERFLKLEGDSSGVVDVRGSHFQLLPFGSGRRMCPGVSLAMQEVPALLGAIIQCFDFHVVGPKGEILKGDDIVINVDERPGLTAPRAHNLVCVPVDRTSGGGPLKIIEC

SEQ ID NO: 15903 - protein, 102 aa, Zea mays
  unsure (1)..(102): unsure at all Xaa locations
MSSSSTLALSDGCSNMLWSPQADPKLDPYQGEFPETIEEYLHHGTMKCIAFNRKGTLLAAGCSNGSCIIWDFETRGLAKEFRDKDSTAPITSVSWSRYGHXL

SEQ ID NO: 15904 - protein, 379 aa, Cercospora zeae-maydis
MATEQIPDKGLAGVCVNEGPDFKVEVQEVDIPEPSKQNCWTISVNSSLTERWPESGELLIRLNCTGLCMSDIHFMVNDWAVPPMSQFGTKCAGHEGAGVVVKLGPNVSGWEVGDRAGIKPLWDVCHNCEHCWNGRENYCQHGVYTGLVAEGTYRQYLTSPAIYTSRIPEGVPDEVAGPIMCSASTMHRALVDSGLKAGDFVVFPGGGGGVGIQGVQLAKAMGMRPIVIDSGEAKSKLSKELGAEEFIDFKEHEDVAARVKEVAGGIGAHGVLVTAYQAYKDSFSYLGNRIGGRIMCIALPPAGTVNMGTDPNFIVFKNVRVIGTLVGTMQDTAAALEYARRGLLKGIAKVQGVSRFDKSVQALQRGKVAGRIVIDFNKK

SEQ ID NO: 15905 - protein, 704 aa, Sinorhizobium meliloti 1021
MNVATPIRQEKTIGHSVCPHDCPSACALEVDLTAEGRIGRVRGAAENTYTAGVICAKVARYAERIYHPGRLMVPQRRVGAKGEGRWQEISWETALDEIADQFVKAEQRHGSEAVWPYFYAGTMGQVQRDSIERLRHAKRYSGFFGSICTNMAWTGYTMGTGTLRGPDPREMAKSDCVVIWGTNAVATQVNVMTHAVKARKERGAKIVVIDVYDNPTIKQADMGLVLKPGTDAALACAVMHVAFRDGHAGRAYMAEFADDPAGLEAHLKTRGPEWASAITGLSVEEIEAFARLVGTTPRTYFRLGYGFTRQRNGSVAIHAAASVATVLGSWKHEGGGAFHSNNDIFRLDKRELVGSAFHDPDVRMLDQSQIGRVLTGDAEALRHRGPVTALLIQNTNPVNVAPEQRLVKRGFLRDDVFVAVHEQFMTDTAQLADIVLPATMFLEHDDLYRGGGHQHILLGPKVVEPPPTVRTNLFVIEELAKRLGVADCPGFRLTERQHIDQLLANYGIGYDEMKERKWLDCQPAFDEAHFLNGFGHPDGRFRFKADWTGTPAPNRPPKAMGAQGPHGQLPEFPDHVDLIEVADERHPFRLATSPARSFLNSTFAETPSSIQKEGRPEVMIHAEDAAELGIAEGDVVRLGNGRGEIRLHAKIGGGTRRGVVIAEGLWPNGAHLDGEGINVLTGADAVAPYGGAAFHDNRVWMRRA

SEQ ID NO: 15906 - protein, 402 aa, Helicobacter pylori J99
MLAKMSFMQNVKNIQEVDVNHKRVLIRVDFNVPLDENLNITDDTRIRESLPTIQFCIDNKAKDIILVSHLGRPKGVEEKLSLKPFLKRLERLLNHEVVFSQNIAQLKQALNENAPTRIFLLENIRFLKGEEENDENLAKDLASLCDVFVNDAFGTSHRKHASTYGTAKFAPIKVSGFLLKKEIDSFYQAFNHPLRPLLLIVGGAKVSSKLTLLKNILDLIDKLIIAGAMSNTFLKALGYDVQDSSVEDALINDALELLQSAKEKKVKVYLPIDAVTTDDILNPKHIKISPVQDIEPKHKIADIGPASLKLFSEVIESAPTILWNGPLGVHEKQEFARGTTFLAHKIANTYAFSLIGGGDTIDAINRAGEKDNMSFISTGGGASLELLEGKILPCFEVLDKRH

SEQ ID NO: 15907 - protein, 168 aa, Avena agadiriana
VMASSATTVAPFQGLKSTAGLPVSRRSSGSLGSVSNGGRIRCMQVWPIEGIKKFETLSYLPPLSEEALLKQIEFLIRSKWVPCLEFSKVGFIFREHGSTPGYYDGRYWTMWKLPMFGCTDASQVIKEVEEVKKEYPDAYVRIIGLDNIRQVQCVSFIAFKPPGCEESG

SEQ ID NO: 15908 - protein, 1171 aa, Oryza sativa (japonica cultivar-group)
MASGSRATPTRSPSSARPAAPRHQHHHSQSSGGSTSRAGGGGGGGGGGGGGAAAAESVSKAVAQYTLDARLHAVFEQSGASGRSFDYTQSLRASPTPSSEQQIAAYLSRIQRGGHIQPFGCTLAVADDSSFRLLAYSENTADLLDLSPHHSVPSLDSSAVPPPVSLGADARLLFAPSSAVLLERAFAAREISLLNPLWIHSRVSSKPFYAILHRIDVGVVIDLEPARTEDPALSIAGAVQSQKLAVRAISRLQALPGGDVKLLCDTVVEYVRELTGYDRVMVYRFHEDEHGEVVAESRRNNLEPYIGLHYPATDIPQASRFLFRQNRVRMIADCHAAPVRVIQDPALTQPLCLVGSTLRSPHGCHAQYMANMGSIASLVMAVIISSGGDDDHNISRGSIPSAMKLWGLVVCHHTSPRCIPFPLRYACEFLMQAFGLQLNMELQLAHQLSEKHILRTQTLLCDMLLRDSPTGIVTQSPSIMDLVKCDGAALYYHGKYYPLGVTPTEVQIKDIIEWLTMCHGDSTGLSTDSLADAGYPGAAALGDAVSGMAVAYITPSDYLFWFRSHTAKEIKWGGAKHHPEDKDDGQRMHPRSSFKAFLEVVKSRSLPWENAEMDAIHSLQLILRDSFRDSAEGTSNSKAIVNGQVQLGELELRGIDELSSVAREMVRLIETATVPIFAVDTDGCINGWNAKVAELTGLSVEEAMGKSLVNDLIFKESEETVNKLLSRALRGDEDKNVEIKLKTFGPEQSKGPIFVIVNACSSRDYTKNIVGVCFVGQDVTGQKVVMDKFINIQGDYKAIVHNPNPLIPPIFASDENTCCSEWNTAMEKLTGWSRGEVVGKLLVGEVFGNCCRLKGPDALTKFMIVLHNAIGGQDCEKFPFSFFDKNGKYVQALLTANTRSRMDGEAIGAFCFLQIASPELQQAFEIQRHHEKKCYARMKELAYIYQEIKNPLNGIRFTNSLLEMTDLKDDQRQFLETSTACEKQMSKIVKDASLQSIEDGSLVLEKGEFSLGSVMNAVVSQVMIQLRERDLQLIRDIPDEIKEASAYGDQYRIQQVLCDFLLSMVRFAPAENGWVEIQVRPNIKQNSDGTDTMLFLFRFACPGEGLPPEIVQDMFSNSRWTTQEGIGLSICRKILKLMGGEVQYIRESERSFFHIVLELPQPQQAASRGTS

SEQ ID NO: 15909 - protein, 132 aa, Glycine max
  unsure (1)..(132): unsure at all Xaa locations
FRFRPRVRPRVRPRVRDGFMNLMHRHEEVNYFPPRYDPARHAEXRVPVPPRTLGGKREKCMIHKETNFKQPGERYRSWPSDRQERFVRRWVDALSDPRVTHEIRSIWISYWSQADRALGQKIASHLNLKPSI

SEQ ID NO: 15910 - protein, 168 aa, Avena strigosa
VMASSATSVAPFQGLKSTAGLPVSRRSNAGLGSVSNGGRIRCMQVWPIEGIKKFETLSYLPPLSEEALLKQIDFLIRSKWVPCLEFSKVGFIFREHGSTPGYYDGRYWTMWKLPMFGCTDASQVIKEVEDVKKKYPDAYVRIIGFVNIRQVQCVSFIAFKPPGCEESG

SEQ ID NO: 15911 - protein, 1123 aa, Solanum tuberosum
MSSSRPSQSSTTSSRSKHSARIIAQTSIDAKLHADFEESGDSFDYSSSVRVTNVAEGEQRPKSDKVTTAYLHQIQKGKFIQPFGCLLALDEKTLKVIAFSENAPEMLTMVSHAVPSVGEHPVLGIGIDIRTIFTGPSGAALQKALGFGEVSLLNPVLVHCKNSGKPFYAIVHRVTGSLIIDFEPVKPYEVPMTAAGALQSYKLAAKAITRLQSLPSGSMERLCDTMVQEVFELTGYDRVMGYKFHDDDHGEVVSEITKPGLEPYLGLHYPATDIPQAARFLFMKNKVRMICDCRAKHVKVVQDEKLPFDLTLCGSTLRAPHYCHLQYMENMNSIASLVMAVVVNDGDEEGESSDSSQSQKRKRLWGLVVSHNTTPRFAPFPLRYACEFLAQVFAILVNKELELENQFLEKNILRTQTLLCDMLMRDAPLGIVSQSPNIMDLIKCDGAALLYKNKIHRLGMNPSDFQLHDIVSWLCEYHTDSTGLSTDSLYDAQFPGALALGDAVCGMAAVRISDKDWLFWYRSHTAAEVRWGGAKHEPGEKDDGRKMHPRSSFKQFLEVVKTRSIPWKDYEMDRIHSLQLILRNAFKDADAVNSNTISIHTKLNDLKIDGMQELEAVTAEMVRLIETASVPIFAVDVDQGVNGWNTKVAELTGLPVDEAIGKHLLTLVEDSSVDTVNKMLELALQGQEERNVEFEIKTHGPSRDSSPISLIVNACASKDVRDSVVGVCFIAQDITGQKSIMDKFTRIEGDYRAIIQNPHPLIPPIFGTDQFGWCSEWNSAMTMLTGWRRDDVMDKMLLGEVFGTQAACCRLKNQEAFVNFGVILNNAITGQESEKIPFGFFARYGKYVECLLCVSKRLDKEGAVTGLFCFLQLASHELQQALHVQRLSEQTALKRLKVLAYIRRQIRNPLSGIIFSRKMLEGTSLGEEQKNILHTSAQCQRQLDKILDDTDLDSIIEGYLDLEMLEFKLHEVLVASISQVMMKSNGKNIMISNDMVEDLLNETLYGDSPRLQQVLANFLLVSVNSTPSGGKLSISQKLTKDRIGESVQLALLEFRIRHTGGGVPEELLSQMFGSEADASEEGISLLVSRKLVKLMNGEVQYLREAGRSTFIISVELAVATKSS

SEQ ID NO: 15912 - protein, 168 aa, Avena clauda
VMASSATTVAPFQGLKSTAGLPVSRRSSASLGSVSNGGRIRCMQVWPIEGIKKFETLSYLPPLSEEALLKQIDFLIRSKWVPCLEFSKVGFIFREHGSTPGYYDGRYWTMWKLPMFGCTDASQVIKEVEEVKKEYPDAYVRIIGFDNIRQVQCVSFIAFKPPGCEESG

SEQ ID NO: 15913 - protein, 475 aa, Geobacter sulfurreducens PCA
MAKRYKVLVGGEWTGDDRPGIEVVNPYDDSVIGVVPEATNEDVDHAIRAAQAGFAEMSALPAYRRSDILDRTSELIKRDREEIAEIIAREAGKSWKFALAEADRSAETFRFASLEARNAHGEIVPMDASPVSAGRFGFYLRTPIGVIGAIAPFNFPLNLVAHKVAPAIAAGNAIVLKPATKTPLSSIKLAELMVEAGLPAGALNLVIGSGRTVGNRLVEDDRLAMVTFTGSPPVGVQIKERSGLKRVTLELGSNSPTIIEDDGDVDAAVARCVVGSFANSGQVCISVQRIFVHQRRYREFVDKFVAATQKLKVGDPMDRDCDIGPMISREELQRAVEWLGEATSLGARLETGGTVAGNCLTPAILSGVTPDMKVVCSEVFAPIVSVIPYETFDQALDMADDSIYGLQAGVYTSDINKAFKAIRRLDVGGVIINDIPTFRVDHMPYGGNKQSGLGREGIRYAMEEMTNIKFVCLNL

SEQ ID NO: 15914 - protein, 369 aa, Ustilago maydis 521
MTASTVPIIVNAASQLEIDVDTLDVALTQQLASVGVQPNDMTSNQFIVADALRLAQNEALLDDVVRGSGAGDWLAILDRVSVRLCAQNLANISGRALLQVSPTHAYDTEQIVEHALAYDREFSALGIGKHRYCIKILATPAGVKAAWILESQHAIRTLATGVFSVAQALAAAQAGCLYISPYYNEILAHFTAPDERAVYDDPVSQHPMSPRMAHIYQAYRELTLANPAARPPVIKSASFIGINEVLAMPQLGAQQATILAPILSEMIQRTGMRATTKPYRPSKTYDVALPDSTLALLKIDRLRADGVAQQFDLSVDYLSHNAQQLALAISNDPETQRRLNDAIRVFETAQLNAKTVIDAAIARVNAAHS

SEQ ID NO: 15915 - protein, 421 aa, ASPERGILLUS NIDULANS FGSC A4
MSLTSKLSITDVDLKDKRVLIRVDFNVPLDKNDNTTITNPQRIVGALPTIKYAIDNGAKAVILMSHLGRPDGKKNPKYSLKPVVPKLKELLGRDVIFTEDCVGPEVEETVNKASGGQVILLENLRFHAEEEGSSKDADGNKVKADKDAVAQFRKGLTALGDIYINDAFGTAHRAHSSMVGVDLPQKASGFLVKKELEYFAKALEEPQRPFLAILGGSKVSDKIQLIDNLLPKVNSLIITGGMAFTFKKTLENVKIGSSLFDEAGSKIVGNIIEKAKKHNVKVVLPVDYVTADKFAADAKTGYATDEQGIPDGYMGLDVGEKSVESYKQTIAESKTILWNGPPGVFEMEPFAKATKATLDAAVAAVQNGATVIIGGGDTATVAAKYGAEDKISHVSTGGGASLELLEGKELPGVAALSEKSK

SEQ ID NO: 15916 - protein, 334 aa, Nostoc punctiforme
MSKNLLEQLREVTVVVADTGDIQAIEKFKPQDATTNPSLITAAAQMPEYQGIVDQTLLQAKKDAGDGATQAQIVSLAFDRLAVAFGLKILQIIPGRVSTEVDARLSYDTEATLTKARDLIAQYKAAGIGRDRVLIKIASTWEGIRAAEILEKEGIHCNLTLLFGLHQAIACAEAGVTLISPFVGRILDWYKKDTGRDSYPATEDPGVLSVTKIYNYYKKFGYKTEVMGASFRNLGEITELAGSDLLTISPSLLAELQSTVAELPRKLDPAKAASLSIEKISIDKASYDKMHAADRMATDKLDEGIKGFTKALEDLEKLLADRLVRLEGEVVASH

SEQ ID NO: 15917 - protein, 247 aa, Gerbera hybrid cultivar
MGRGRVELKRIENKINRQVTFAKRRNGLLKKAYELSVLCDAEVALIIFSNRGKLFEFCSTSNMLKMLERYQNCTYGSMEVDRSTPNAEQSSYKEYMKLKAKYESLQQYQRQLFGEDLGPLSLKELEQLERQLDSTLRQIRSIRTQSMLDRLSELQVKERMWVEANKALQNKLEEVYAENQAGPSWAAGEHHSSYGQEHQHQHQSQGFFQPLDCNSNLQIGYNTVDSSHITASTNGQNLNGLIPGWML

SEQ ID NO: 15918 - protein, 117 aa, Triticum aestivum
MPGLAALAARPSSRPWPSPLACLAAAPLAVPMAAPMVASPWPRARPRRARRGRPALCPRPGRVHPSDAAVDHEKDSIELLLARRCIERNGPFLGICRGSQVLNVACGGSLYQDVGHG

SEQ ID NO: 15919 - protein, 287 aa, Lactobacillus plantarum WCFS1
MKGIILAGGSGTRLYPVTKVTSKQLLPIYDKPMIYYPLSTLMLSGIKDILIISTSRDSNSFKALLGDGSELGIHIEYAIQQEPNGLAEAFIIGKQFIGDDSVCLILGDNIFYGNGLSETLQKAVRLKDGAIVYGYRVKDPERFGVVSFDNKKNVISIEEKPTDPKSDFAVTGIYFFDNDVVSIAESIKPSARGELEITDINNVYLKRKKLKVELLSRGFAWLDTGTHESLQDASSFIQTVERRQNILIASIEEVAFRMGYIDSKQLQSLAAPLHKTRYGQYLASLVE

SEQ ID NO: 15920 - protein, 232 aa, Streptococcus agalactiae 2603V/R
MDIFGEFLGTALLVLLGNGVVAGVVLPKTKNHNSGWIVITFGWGLAVAIAALVSGNISPAHLNPAVSLAFAIKGDLAWGTAILYMIAQIIGAMLGSLLVYLQFRPHYEAAENRADILGTFATGPALKDNFSNFLSEVLGTLVLVLTIFAIGKYNMPPGVGTMSVGMLVVGIGLSLGGTTGYAINPARDFGPRLLHALLPMKNKGDSDWTYSWIPIVGPMVGAILAALIFAMM

SEQ ID NO: 15921 - protein, 116 aa, Glycine max
MASSMISSPAATTDNRAGAAMGASFTGLKPMAGYPTRKTSSDITYIASNGGRVHCLLVWPPGGLKKYVTLSYLPDLDDAQLAKAVEYLITMGRIPCSAFEMERCFQHREHTREPGY

SEQ ID NO: 15922 - protein, 134 aa, Triticum aestivum
VRGRWAVYLRPRAEARAHFSPRRRKYGNGLIVQTVALGKPDGKKATPGKKVFVTYTGKLKNGKIFDSNVGRKPFSFRLGVGQVIKGWDIGVNGMRIGDKRKLTIPPSMGYGNQKAGEIPPNSTLMFDVELMNVQ

SEQ ID NO: 15923 - protein, 380 aa, Glomerella cingulata
MPATQGKRPRTALFFPGQGVQKVGMITPWLEAFPATAKPILEEIDHYMGFKLSDIIANGPGKLLTKTPNAQPAIMATSILILRILEREFGFDIPQRVDVTLGHSLGEFAALVAGGYLEFEDSLYLVRKRAEAMHEATRRAVDEYGGEYGMVAIVTEPEYLKGLIEAIHDFVGHSSAGSKGESSEDVPPIEQVLIANINSKNQIVLSGNIERIKTLATHVRQFLGHDPRAVRLNSDSPFHSPIMKPAVSVVKSILNKKSRVKGREGEDIITFPGKLPCISNVSARPFESKEDVKDLLARQCLETVRWWDSIKYLDQEEKVRRWVGIGPGKVGRNLVGKEVGMRGKDSVKGGGVWAITDPSEIEEVLRGLEDTEHWSDDDAE

SEQ ID NO: 15924 - protein, 489 aa, Vibrio cholerae O1 biovar eltor str. N16961
MGKATGFLEFGRELPKKIDPAERIKNNKEFVLNQEFGKKINQQASRCMDCGVPFCHNGCPIGNIIPEFNDAVYRDSWEEAWNILSSTNNFPEFTGRVCPAPCETACVLGINQDPITICNIEKTIVERAYQEGYAKPKTPRSRTGKTVAIIGSGPAGLAAAEQLNAAGHSVTVFERDEKVGGLLRFGIPDFKLGMDVIDRKINLMEQAGVKFVVNAHIGVDINAQQLRQEFDAVLLTGGSTVPRDLSIPGRDLKGVYFAMQFLAQNNRRANGMDLKGEEIHAKGKHVVVIGGGDTGSDCVGTSNRHGAASITQVEIMPIPPQKRPVNMPWPQYPMILRTSTSHEEGCERHWNILTKEFIGNEQGEVTGLRIADIVWKDAAPGERPSFDEVVGSERVIPCDMAFLAMGFLHPEPHGVLAQLGIKLDERGNVATQDFATNQKGVFAAGDMRTGQSLVVRCINEGRECARAVDTFLMGNTHLEAKADSLMLSA

SEQ ID NO: 15925 - protein, 471 aa, Vibrio cholerae O1 biovar eltor str. N16961
MMSQNVYQFIDVNRVDPAKKPLHIRKIEFVEIYEPFTKQQATAQADRCLDCGNPYCEWKCPVHNYIPQWLKLANEGRILEAADLAHQTNSLPEVCGRVCPQDRLCEGSCTLNADFGAVTIGNIEKYITDTAFEMGWKPDMSNVVWTDKKVAIIGAGPAGLAAADILVRNGVRPVVFDRYPEIGGLLTFGIPSFKLEKGVMENRRRIFSEMGIEFRLNVEVGQDITLQQLLDEYDAVFLGVGTYQYMRAGLANEDAPGVYDALPFLISNTYKVMELNNEAPFIDMAGKNVVVLGGGDTAMDCVRTSIRQGASRVICAYRRDEENMPGSRREVKNAKEEGVEFMFNLQPLGIEVNAQGQVTGVKVVKTALGEPDAAGRRKPEPVAGSEHVLPADAVIMAFGFQPHKMAWLEPFDVELDQWGRIKAPAKQTYQYQTTNPKIFAGGDAVRGSDLVVTAIDEGRKAAEGILDYLGV

SEQ ID NO: 15926 - protein, 205 aa, Triticum aestivum
  unsure (1)..(205): unsure at all Xaa locations
PPPSKLYTYIVQPWPPPVMASSATSVAPFQGLKSTAGLPVSRRSNGASLGSVSNGGRIRCMQVWPIEGIKKFETLSYLPPLSTEALLKQVDYLIRSKWVPCLEFNKLGSSSXEHNASPGYXMAGYWDNWKLPKFGCXTDATQVXINEVEGXQERITLDPYVRIIXGFDNMRQVQCVNLIAXKPTGCXDPXRLNTHHKGIYKVHCL

SEQ ID NO: 15927 - protein, 513 aa, Solanum tuberosum
MALLHLPPVTQRRLQSFFLPYTDNHVSLVPDDSGDVAMNQILKIGVVLSGGQAPGGHNVISGIFDYLQTHCKGSTMYGFRGGPAGVMKGKYVVLTPEFIYPYRNQGGFDMICSGRDKIETPEQFKQAEETAKKLDLDGLVVIGGDDSNTNACLLAENFRSKNLKTRVIGCPKTIDGDLKSKEVPTSFGFDTACKIYAEMIGNVMIDARSTGKYYHFVRLMGRAASHITLECALQTHPNVTLIGEEVFAKKLTLKNVTDYIADVVCKRAESGYNYGVILIPEGLIDFIPEVQQLIAELNEILAHDVVDEAGVWKKKLTPQCLELFELLPLAIQEQLLLERDPHGNVQVAKIETEKMLIQMVETELDQRKQKGAYNAQFKGQFHFFGYEGRCGLPSNFDSTYCYALGYGAGSLLQSGKTGLISSVGNLAAPVEELTVGGTALTALMDVERRHGKFKPVIKKAMVELEGAPFKKFASKREEWALNNRYINPGPIQFVGPVANKVNHTLLLELGVDA

SEQ ID NO: 15928 - protein, 566 aa, Oenococcus oeni PSU-1
MVKEKTIQEKIKDWEVADLPEDLRLEFANSSQSQLEDAFYQDLNFGTAGMRGLLGVGTNRMNIYTVAQTTEALARHMEKQGESAKQRGVVISGDSRINSELFKKISAEVLRAHGITVYLFNGPHPTPELSFAVMHLHTYAGIMITASHNSKEYNGYKLYGEDGGQLPPKPADEIVRERQEVTDIFHIKKVSGGIKKIGSEIDKEYLNQVKTIPINRDLIKKWGDKLTISFTPLHGAGGDLGSKALKEAGFNKILTVKEQFKPDGTFPTVKYPNPEFHEVFKISESYGADVELAVDPDSDRMGVGYRTKDGSYNYLTGNQIAALMVNYILTAQQKAGTLPKNGAIVTSIVSSNLPELIAKSFKVKQFTVLTGFKYIADKIVEFDKKQNYSFEFGFEESYGFLIKPFVHDKDAIQAITLMSELAAYYKDRGMTIGDGLDEIHAKFGAFAEETKATEFPGEKGQEEMTAVMTKFRNRGPKEIGNLKINLVEDNDLRIAKDLNTGATKKISLPRANVIKYWLEDGSWVALRPSGTEPKLKVYIGAKGENMSSANKRLDYLQTELEKLLKK

SEQ ID NO: 15929 - protein, 77 aa, Glycine max
  unsure (1)..(77): unsure at all Xaa locations
MVSSFTCLKSMAGFPTRKTNNDITSIACNRLRVQCIHVSPPIVKKKFDTFSYLPYLYYSQLSNEVXYLLTKGLIPFF

SEQ ID NO: 15930 - protein, 463 aa, Oryza sativa (japonica cultivar-group)
MAAERKDVGILAMDIYFPPTCVLQDELENHDGVSKGKYTIGLGQDSMAFCTEVEDVISMSLTVVKSLLENYKIDPKCIGRLEVGSETVIDKSKSIKTWLMQIFEECGNTDIEGVDSSNACYGGTAALFNCVNWVESNSWDGRYGLVVCTDSAVYAEGPARPTGGAAAIAMLIGPNAPVSFESKYRGSHMAHVYDFYKPDLASEYPVVDGKLSQTCYLMALDSCYNVFCKKYEKLEGKQFSIHDADYFVFHSPYNKLVQKSFARLYYNDFLRKCSTVEDGSREKLEPYSGLSSEESYQSRELEKASQQVAKHLYDSKVQPITLIPKQVGNMYTASLYAALASVMHNKNETLAGQRIVMFSYGSGLTSTMFSFKINEGQHPFILSNIAGILDVSKKLESRHVVAPEKFVAALKLMEHRYGAKDFTTSQDTSLLAPGTYYLTHVDSMYRRFYAVKGQAVTEVSNGH

SEQ ID NO: 15931 - protein, 210 aa, Zea mays
  unsure (1)..(210): unsure at all Xaa locations
MDPYKRRAGSAFNAPCWATNSGAPVWDNDSSLTVGARGPILLEDYHLGEKLANGGRERVPERVVHARGASAKGFFEGTHDITHLTCADFLRAPGVQTPVIVRFSTVIHERGSPETLRDPRGFGGKVYTREGNWDLGGNNFPGFFIRDGIKFPDMGHALKPNPRXTHIQDNWRILDFFSHHPESLHMVSFLFDDVGIPADYRHMDGSRGAH

SEQ ID NO: 15932 - protein, 569 aa, Magnaporthe grisea 70-15
MEDSSPLAAIRRPTHLFGDRLGGYRTNIGHYSPDSKPRAFNLREQLGIHNSKKAYLQDDFSRGSSPSICLAADLGQNFRIDQDSSPKFPTPRRALFTSMNMGDMGMRDCTSAPPLMSSPTPGGLMEMMDISPLPHKLPATSSLICESQVESPVLMDDTESNASSEKTEDESASIEPSLPQPTTAELPRPLAAERRRIALRRPSLSRAKGYSTSALLTRGQPDNQLPPFRFGGNPSLSRESSSLSLSECFQNSPTPEKRPSTANSPIANVPGPLRVRTQFSSLNGSSASRTGSPISSHSRRPSNPFMRPRKQYRRSLSMFENSGEVMKPKQEEPPAAPALSSVMDIEEPAEPILPHFFPEGESDNIPRIKRQTLLDVLDGQYNERYDNKLIIDCRFEYEYDGGHIDGAINYNDKDLLVTHLLRTPMEGRTLIVFHCEYSAHRAPLMARHVRAEDRSANAEHYPRLTYPEIYILEGGYSGFFEEHRDRCYPQAYVEMGAAEHAFTCEREMGRLRQNRKGLSRAATYAFGTGIQDSPTAPGRSTCQDSPMSMLGASPILGSDRFHGRRMASY

SEQ ID NO: 15933 - protein, 352 aa, Amycolatopsis methanolica
MTSTTFRRSDQMRVGVLTGGGDCPGLNAVIRAVVRKGIEAHGWEIVGFRSGWRGPLTGDSRPLGLDDVEEILIRGGTILGSSRTNPYKEEGGVEKIRAVLADQGVDALIAIGGEDTLGVAKKLTDDGIGVVGVPKTIDNDLAATDYTFGFDTAVHIATEAIDRLRTTAESHYRAMVVEVMGRHAGWIALHAGLAGGANVILVPERPFSVEQVVEWVERRFEKMYAPIIVVAEGAVPEGGAEVLRTGEKDAFGHVQLGGVGTWLADEIAERTGKESRAVVLGHTQRGGTPTAYDRVLATRFGLHAVDAVADGDFGTMVALRGTDIVRVKLAEATAELKTVPPERYEEAEVFFG

SEQ ID NO: 15934 - protein, 421 aa, Escherichia coli O157:H7 EDL933
MSNNEFHQRRLSATPRGVGVMCNFFAQSAENATLKDVEGNEYIDFAAGIAVLNTGHRHPDLVAAVEQQLQQFTHTAYQIVPYESYVTLAEKINALAPVSGQAKTAFFTTGAEAVENAVKIARAHTGRPGVIAFSGGFHGRTYMTMALTGKVAPYKIGFGPFPGSVYHVPYPSDLHGISTQDSLDAIERLFKSDIEAKQVAAIIFEPVQGEGGFNVAPKELVAAIRRLCDEHGIVMIADEVQSGFARTGKLFAMDHYADKPDLMTMAKSLAGGMPLSGVVGNANIMDAPAPGGLGGTYAGNPLAVAAAHAVLNIIDKESLCERAMQLGQRLTKTLIDAKENVPAIAAVRGLGSMIAAEFNDPQTGEPSAAIAQKIQQRALAQGLLLLTCGAYGNVIRFLYPLTIPDAQFDAAMKILQDALRD

SEQ ID NO: 15935 - protein, 244 aa, Nostoc punctiforme PCC 73102
MYKPFLEFLEKELFQRFDLQSRVIPPGLEFKVSDRGRNPATIRSWCYQSQELRKIRYTYIDAGESAQIFNSVVYPSHNYDLPLLGIDFLSFGKVKNLIVLDFQPLFQDEDYQNKYIAPLKYLHNKYPDLAQNLEMKFYDANQYFSKYLLFAKTDAETVSTRVFEAFQDYLNLYWQMLADAQALHDPEDIQRIVKAQKDYDQYSADRDPASGLFSSYFGHEWAERFLHEFLFEDAVPLAVSASKR

SEQ ID NO: 15936 - protein, 495 aa, Escherichia coli O157:H7 EDL933
MNFHHLAYWQDKALSLAIENRLFINGEYTAAAENETFETVDPVTQAPLANIARGKSVDIDRAVSAARGVFERGDWSLSSPAKRKAVLNKLADLIEANAEELALLETLDTGKPIRHSLRDDIPGAARAIRWYAEAIDKVYGEVATTSSHELAMIVREPVGVIAAIVPWNFPLLLTCWKLGPALAAGNSVVLKPSEKSPLSAIRLAGLAKEAGLPDGVLNVVTGFGHEAGQALSRHNDIDAIAFTGSTRTGKQLLKDAGDSNMKRVWLEAGGKSANIVFADCPDLQQAASATAAGIFYNQGQVCIAGTRLLLEESIADEFLALLKQQAQNWQPGHPLDPATTMGTLIDCAHADSVHSFIQEGESKGQLLLDGRNAGLAVAIGPTIIVDVDPNASLSREEIFGPVLVVTRFTSEEQALQLANDSQYGLGAAVWTRDLSRAHRMSRRLKAGSVFVNNYNDGDMTVPFGGYKQSGNGRDKSLHALEKFTELKTIWISLEA

SEQ ID NO: 15937 - protein, 1012 aa, Ralstonia eutropha JMP134
MILTRKRAAQGASTRLADGLAQASTTSTTSGSGRLATRLAAGLAGAMPTMDRRSFLKRSGIGVGVGLAASQLTLLRKADAADDKTVAAAEGKGGIVVKRTVCGHCSVGCAVDAVVQNGVWVRQEPVFDSPINMGAHCAKGAALREHGHGEYRLKYPMKLINGKYQRISWDQALDEITAKMKEMRQQTGPDSLFFVGSSKHSNEQSYLLRKWVSFFGTNNTDHQARICHSTTVAGVANTWGYGAMTNSYNDMQNAKAALYIGSNAAEAHPVSMLHLLHAKENGCKVIVVDPRFTRTAAKADHYVRIRSGTDIAFLFGVLYHIFQNGWEDPKYLQDRVYGMDKVRAEVLAKWTPDKVEEVCGVPEAQVKMVAETMAKNRPSTLVWCMGQTQHTIGNAIVRASCIVQLALGNIGVSGGGANIFRGHDNVQGATDVGPNPDSLPGYYGLATGAWKHYAAVWGVDYEWIKKQFASQTMMEKSGTTVSRWIDIVTEKNELIDQDNNVRSVFFWGHAPNSQTRGLEMKKAMDKLDLLVVIDPYPSATAAMANMPPAEGDKVNPNRAVYLLPACTQFETSGSCTASNRSLQWREKVIEPLFESMPDHTIMQAFADKLGFGKELSKNYKMIEVKRAGRTWMEPEIESILREINRSNWTIGYTGQSPERLKAHMRNMQMFDVKTLRCSGGKDAATGYDLTGDYFGLPWPCYGNPELKHPGSANLYDTSKHVMDGGGNFRANFGVERDGVNLLAEDGSCSKGAEITTGYPEFDHVLLKKLGWWDDLTDDEKKAAEGKNWKTDLSGGIQRVVLKVHGCHPFGNAKARAVVWNFPDPIPQHREPLYSTRPDMVAKYPTHDDKMAFWRLPTLYKTVQQRNIENKVYEKFPIILTSGRLVEYEGGGEETRSNPWLAELQQENFVEINPRAASDRGIRNGDFCWVKTPTGARIKVRALVTERVGPDTAFIPFHFSGWWQGKDLKDYYPDGAMPIVRGEAVNTATTYGYDSVTMMQETKTTICQIERFA

SEQ ID NO: 15938 - protein, 285 aa, Populus tremula x Populus tremuloides
MGKDFEGGGELSAKDYHDPPPAPLIDAEEITQWSFYRAIIAEFVATLLFLYITVLTVIGYKNQTDVHKNGHECGGVGILGIAWAFGGMNFILVYCTAGISGRHINPAVTFGLFLARKVSLVRAILYMVAQCLWAICGCGLVKAFPKSYYTNHGGGTHGLAIRYSKGTGLGAEIIGTFVLVYTVFCATDPKRNARDSHVPVLAPLPIGFAVFMVHLATIPITGTGINPARSFGAAVIYNKEKAWDDHWIFWVGPFIGAAIAALYHQFILRAAAVKSLGSFRSSPNI

SEQ ID NO: 15939 - protein, 243 aa, Oenococcus oeni PSU-1
MFDRLKGKVAIVTGGNSGIGKAIAADFIAEGAKVVITGRNQEKGRQTALEIAGDILFIQQDVSQEADWQKVISKTIEKFGKFDILVNNAGVGGVGKPLAEMSLSEFNWTQSINLSGNFLGIHFALNKMTEPGSIIDVSSAAGLRGFPGAADYSASKGGTRLLTRAAALEALQMGKKIRVNSIHPGWIDTDIVPKDMREQVIAMTPMHHLGQPKDIAKLATYLASDESEYTTGSELAADGGLMA

SEQ ID NO: 15940 - protein, 1010 aa, Oryza sativa (japonica cultivar-group)
MGDGRHHRGSDPLAAAAGSGEEAAVTCPIYVKPFPSELAVSDHLVGCLVVAGGACPYAATYLAGDPLAFVMEVVKKLLGSLPAHAPKNFLTRPNKIAVRICTQRHGGRQAAQQAAVCATAAARRHGPPGRQHVQYAVRYPKRSSNPGHRPFRRRRKGAWVAEPHEEMPAQKRPLQPADSDDSDGHVPVGRAASSRGGGGGVSHESDGEDAARRAREPPRDQRDGDPDEGDGGGGDGSGGGSDSESSLNGAGDKDDSYALQAYKKYRDRFVSLRRRLLQDRLDRSPQRPSRWMKFSRRVTRHLPLLHTPTYMRRAATAAGRTKSATQHDPPSEPDPALRRLASVFHLTQLTFFDQSRTQTSGMEAHPLPWPVAATATQLVRDSEYSRGSSFQQRKEKYGRRPACMPRWIAATAARSYGQRARMPAQKRRLSSSPSSRPRDHVETNGMTGASKAAAGSGGGGGGGSGGGVPLPPRGGSAAAAAAKRAADPQPQREGGEFFVASTSRPPISPAAGRDMHVAFGVSVRIWLRGLCVSMGLADSDAEFGGGVDGDSESSQSDGDMDDPPRGATTRILAPVRRIVLRWFCEMPPCRPELVHNSEISRNTKGGPMPYLFRNNECPACRTHCASRRSLRDDPNYDALIAALYPDIDKYEEEELAFSEEERSRNKKIQATIEETIRRQSEAVGKKRSTAKATATVFARKYRRNMRTRGRGKTIAPDIAPTGSDNEDREEGNAIDTTKESSSADDRSSDLMPKRGRKRPASRASPARTIGSSDHVFEENDELIGGKESFTTSPLRGEMLAWGKNGTRSQTRHGSVGGSNGRMAKGGRVAKLVDHLRTTDDMDKEFIALQLSRQVEELDIFMRIDHCNGSVTTQDCTTGVAKMRLSDGLERIREDKLLSELHPSFTSHHGDLRLPVRHGDARVGGQHGVQRVHCPHGVHRLHHPHDTGKRKAPSLVPPPERAEYLEKDSNEEDEDLQGSTCTSRPSVLRRISPNAVKKLTPDNGWFFVTGI

SEQ ID NO: 15941 - protein, 553 aa, ASPERGILLUS NIDULANS FGSC A4
MPSFSQAVELPAWKELQDHHGSVGRNIVLKECFEKDPQRFEKFSRTFQNTVDNNEILFDFSKNFLTEETLALLVKLAKQAGVEELRDQMFAGEPINFTENRAVYHAALRNVSNQPMQVNGKSVVEDVNSVLEHMKEFSEQVRSGEWKGYTGKKINTIINIGIGGSDLGPVMVTEALKPYGHPDLKLHFVSNIDGTHIAEALKDSDPETTLFLIASKTFTTAETTTNANTAKSWFLEHAKDGAHIAKHFVALSTNAEEVAKFGIDTKNMFGFESWVGGRYSVWSAIGLSVALYIGYDNFHQFLAGAHAMDKHFRETPLEQNIPVLGGLLSVWYSDFFGAQTHLVAPFDQYLHRFPAYLQQLSMESNGKAITRTGEYVKYTTGPVLFGEPATNAQHSFFQLLHQGTKLIPADFIMAAESHNPVEGGKHQRMLASNFLAQSEALMVGKTPEQVKAEGAADNLVPHKTFLGNRPTTSILAQKITPAALGALITYYEHLTFTEGAIWNINSFDQWGVELGKVLAKKIQKELETEGEGSGHDSSTSGLLLAFKKKAKLA

SEQ ID NO: 15942 - protein, 380 aa, Candida boidinii
MSTVGKTITCKAAVAWKPGEDLSIETIEVAPPKAHEVRIKIEYTGVCHTDAYTLSGADAEGEFPVVFGHEGAGIVESVGEGVTSVKVGDSVICLYTPECRECKFCKSGKTNLCGKIRATQGKGLMPDGTSRFTCKGQPLLHYMGCSTFSQYTVVADISVVAVNPEAPKDRTCLLGCGITTGYRAATNTVKMNEGDNIAVFGVGCIGLSVIQGAVAKKAGKIIAIDINDGKTEWAEKFGATDFVNPTKLAEGETIVSKLIDMTDGGCDFTFDCTGTVQVMRNALEACHKGWGESVIIGVAAAGKEISTRPFQLVTGRVWRGCAFGGVKGRTQMPGIVEDYLSGTLKVDEFITHRHKLDDINKAFHDMHAGDCIRAVITMEE

SEQ ID NO: 15943 - protein, 104 aa, Zea mays
KEKGTPPTTRRQGLGVGGGTPYGFAAGNSERGNVLKELDLGAEGIKAGGQRLIIVPPELAYGKKGVQEIPPNATIEREAELQPTKQSPFGTPVKIVEGKLCKEF

SEQ ID NO: 15944 - protein, 395 aa, Ustilago maydis 521
MTTRTATSTSTTVHGHLGDLKLRNAAITGPHLQPKAAKQDLADTKPDSARTFPGLGFKLSPTEERLRAKRNWGFLETAYDNSKVMGLTTHFVTITMAIVFNKSWLAKPVYDWLNTYDRFTIHTVHTWILLSTCQLLVIGLFALTDLSGRPSWLARYRMQPHKPPTLAQYKKLIPVVLFNLVVVNTISNIIYYPLAEWRGIQTTYETLPSGKKLVAQWLVCLLMEDIGFYTVHRALHHPRIYKYIHKKHHEFSAPIAGASTYAHPLEHYFSNLVPILVGLLITRAHISVQYLFFTGLMIGSHVQHSGYNRFANYCAVRVAPVPFLTCALVHDWHHYFNTENYGPVGLLDAIFKTNKTFKAWTSETVAAFHGDRAKARQAALEKLAQIEAEEQERIR

SEQ ID NO: 15945 - protein, 431 aa, Salmonella typhimurium
MVSLEKNDRVMLARQLPLKSVALILAGGRGTRLKDLANKRAKPAVHFGGKFRVIDFALSNCLNSGIRRIGVITQYQSHTLVQHIQRGWSLFSEEMNEFVDLLPAQQRMKGENWYRGTADAVTQNLDIIRRYKAEYVVILAGDHIYKQDYSRMLIDHVEKGARCTVACMPVPIKEATAFGVMAVDESDKIIDFVEKPANPAMLGDASKSLASMGIYVFDADYLYELLAADDKDDASSHDFGKDIIPKITREGMAYAHPFPLSCVQSDPQAEPYWRDVGTLEAYWKANRDLASVTPQLDMYDQNWPIRTHMESLPRAKFVQERSGSHGMTLKSLVFGGCIISGSVVVQSVLFPRVRINSFCNIDSAVLLPEVWDGRSCRLRCCVIDRACIIPEGMVIGENAEEDARRFYRSEEGIVLVTREMLRKLQGHKQER

SEQ ID NO: 15946 - protein, 479 aa, Bacillus cereus ATCC 14579
MLEKKVGIYFAIKRENNVKKRMGYAMNTKKFAKVNEQIPGPKAASLLERRQNIVPKGVSNGIPTFVRSANGALVTDVDGNQYIDFAGAIGTINVGHCHPTVKEALHKQVDQYIHTGFNVMMYEPYIELAEKLAALAPGSFDKQVLFLNSGAEAVENAVKIARKYTKRPGIIAFSKGFHGRTLMTMTMTSKVKPYKFGFGPFAPEVYKAPFPYEYRRPEGLTEEQYDDFIIEEFKNFFISEVAPETIAAVVMEPVQGEGGFIVPSKKFVQEVRRICSENGILFVADEIQTGFSRTGKYFAIDHYDVVPDLITVSKSLGAGVPISGVIGRKEIMNESAPGELGGTYAGSPLGCAAALAVLDVIENEKLNDRAIELGKVVMNRFEEMKNKYHCIGDVRGLGAMCAFEVVQDRKTKAPDKTLTANLCAEANKRGLLLLSAGTYGNVIRVLMPLVITDEQLEEGLTIIEESLQACYEQTNIARV

SEQ ID NO: 15947 - protein, 144 aa, Arabidopsis thaliana
MADDDYNEVDDLGYEDEPAEPEIEEGVEEDADIKENDDVNVDPLETEDKVETEPVQRPRKTSKFMTKYERARILGTRALQISMNAPVMVELEGETDPLEIAMKELRQRKIPFTIRRYLPDMSYEEWGVDELIVEDSWKRQVGGD

SEQ ID NO: 15948 - protein, 180 aa, Triticum aestivum
  unsure (1)..(180): unsure at all Xaa locations
MAPTVMASSATSVAPFQGLKSTAGLPVSRRSNGASLGSVSNGGRIRCMQVWPIEGIKKFETLSYLPPLSTXGLLKQVDYLIRSKWXPCLDSASWXIFREHNXTPGYYDGVLACGTAYFGALTHTVSTSGGVKKIPDPIPHHPIDTCSGECSLSHGCRIGSQTPSKAKFILHPNAWFLHYF

SEQ ID NO: 15949 - protein, 260 aa, Nicotiana tabacum
MKEGKHFVLVHGACHGGWSWYKLKPLLEAAGHKVTALDLAASGTDLRKIEELRTLYDYTLPLMELMESLSADEKVILVGHSLGGMNLGLAMEKYPQKIYAAVFLAAFMPDSVHNSSFVLEQYNERTPAENWLDTQFLPYGSPEEPLTSMFFGPKFLAHKLYQLCSPEDLALASSLVRPSSLFMEDLSKAKYFTDERFGSVKRVYIVCTEDKGIPEEFQRWQIDNIGVTEAIEIKGADHMAMLCEPQKLCASLLEIAHKYN

SEQ ID NO: 15950 - protein, 202 aa, Triticum aestivum
  unsure (1)..(202): unsure at all Xaa locations
LPIPKTVSKRRTWLARKCAAELLQPTLSRPEPALPDGSSADVPGSSLTVTGEEVTEKSPAPGRKTAYRGIRRRPWGRWAAEIRDPXKGARVWLGTYASAEEAARAYDVAARDIRGPKAKLNFPPAVGAPQEAAAVAGAGAPKKRRIVAAEESSASWSPLPAPASGGGGGTDSLRERMSGLEAFLGLEDGNVEPWEAVNLIME

SEQ ID NO: 15951 - protein, 258 aa, Escherichia coli O157:H7 EDL933
MRLRMENIMNNPVIGVVMCRNRLKGHATQTLQEKYLNAIIHAGGLPIALPHALAEPSLLEQLLPKLDGIYLPGSPSNVQPHLYGENGDEPDADPERDLLSMALINAALERRIPIFAICRGLQELVVATGGSLHRKLCEQPELLEHREDPELPVEQQYAPSHEVQVEEGGLLSALLPECSNFWVNSLHGQGAKVVSPRLRVEARSPDGLVEAVSVINHPFALGVQWHPEWNSSEYALSRILFEGFITACQHHIAEKQRL

SEQ ID NO: 15952 - protein, 397 aa, Pirellula sp. 1
MLFFRRKRDVGHLLAASHDLFNAPRDQDRSLMSTVVEPKKNRGPGKSKGNADQPNTHVPESTTLELPQTGGKLRLDQPQAEDADGFSSLVAQKAAKKRDLAKPTKADRVRASNISWWAVGWLAMAHIVCLAAPFTFTWTALITALVLHWVAGSLGICLGYHRLLTHTGMKTYNWVRYAFAAIGCFAGEGSPLDWVADHRKHHAHSDLEGDPHSPHDGGIWSHIFWLAFHTHNGDRDAYLTRWVPDLYKDPAMRAFDMLFLPIHIVASFALLGIGYAFGGWELGVSMLVWGMFVRLVAVLHATWMVNSASHMWGYQNYETTDDSRNNWLVAIVAYGEGWHNNHHAYPRMAKHGHKWWEFDITWQAIKLLRAVGLVWDVVDYRTVAEKKARDAKQSAAA

SEQ ID NO: 15953 - protein, 170 aa, Zea mays
  unsure (1)..(170): unsure at all Xaa locations
MAPTVMMASSATAVAPFQXLKSAASLPVARRSTRSLGNVSNGGRIRCMQVWPAYGNKKFETLSYLXPLSTDDLLKQVDYLLRNGWIPCLEFSKLGFVYRENSTSPCYYDGRYWTMWKLPMFGCTDATQVYKELQEAIAAYPDAFHRVIGFDNVRQTQCVSFIAYKPPGSE

SEQ ID NO: 15954 - protein, 136 aa, Arabidopsis thaliana
MRGVGGPLLSIGDLLADLGDETGHSPQNHPNPEVSSKSYSDDTISGPLDLTRLFQENYDKLNDAFAGSDHSWTSLTLELCTSLETANKLVHATTTNARLLSEKVEELEKIVKRGDSAVAAARTVHATVNQKGLPST

SEQ ID NO: 15955 - protein, 534 aa, Pirellula sp. 1
MQLSLTRRCVCEVIGTYCLVLIGCGAMVVDNQTGMLTHVGVATVWGLIVMTMIYSIGDLSGAHMNPAVSIAFASVGRFPIVDAAAYVVAQCVGALLAAGSLGIVFGVDDVKLGATMASLPTGSAWAVEFMMTTILMWVVLGVSTGAKEKSITAGLAVGATIAMEAFVAGPLTKASMNPARSLGPAVMSSHYNLLWLYLTAPIVGAIAGGCLYRFVRGNDELDTEEGSMAKKISALVLFAFLIGACGSTSMAEEGSSLLRPNDRVAVIGGTFVERMQPRDELEAALQTQRPDWKLSFRNLGWSGDTVSAIARKRFDNIEAGRARRLADIDAADPTVALIWYGQSEAGKFAEDSERIQTDLMRLVDDLKQRQTRVILLTPVAMPGDRRPNYESGLEAFEQMLRNVARAQSLALVELNWKPSDQQLTDDRMLPNNVGYRELAHLLATALLNESVTGDDATSNLAVTRELTESPERELLLEAIARKNEFFFHRYRPQNETYLFLFRKHEQGNNAVELEQFDPIIQEADQAIWDAAGRQ

SEQ ID NO: 15956 - protein, 473 aa, Trichodesmium erythraeum IMS101
MAVKYDIVIIGGGSAGLVVASAAAQLKAKVALVERDKLGGDCLWFGCVPSKSLIHASRVAYQVKNAARFGIYTQPPEIEFAKVTSHVQQVIANIQPHDSPERFRGLGVEVIFGEGEFIDQKTFEVNGQKLTARAFVISTGSRPAIPSFEGLNSADFLTNEKVFDLKQRPNNLAIIGAGPIGCELGQAFSRLGSNVTIISSKSHILPKEEPEAALVVQKQFESEGINILKEVRAEKVEVVDGKKQVTAGGKNIIVDEILFAGGRLPNVESLNLEVAGVEVGKQGIIVNEKLQTTNSKIYACGDVIGGYQFTHVAGYEAVVALTNALFFPISKVNYRVIPWATFTDPELARVGLTEQQAKERYGDDVCVLKQPFSGVDRAQAEAATNGFCKIITKGNGEILGAHLVGISAGELIHEIVLAMSNNLPVSALTGIHVYPTLSEVNSKAGLLLKKQKYAKNLSQQNLLEQFFNWRRSF

SEQ ID NO: 15957 - protein, 1139 aa, Triticum aestivum subsp. spelta
MSSSRSNNRPACSRGSSARSKHSERVVAQTPVDARLHAEFEGSQRHFDYSSSVSALNRSGASTSSAVSAYLQNMQRGRYIQPFGCLLAIHPESFALLAYNENAAEILDLTPHAVPTIDQRDALAVGADVRTLFRSQSAVALHKAAVFGEVNLLNPILVHARTSGKPFYAILHRIDVGLVIDLEPVNPADVPVTAAGALKSYKLAAKAISRLQSLPSGNLSLLCDVLVREVSELTGYDRVMAYKFHEDEHGEVIAECRRSDLEPYLGLHYPATDIPQASRFLFMKNKVRMICDCAASPVKLIQDDNLSQPISLCGSTMRAPHGCHAQYMANMGSIASLVMSITINEDDDEDGDTGSDQQPKGRKLWGLVVCHHTSPRFVPFPLRYACEFLLQVFGIQLNKEVELASQAKERHILRTQTLLCDMLLRDAPVGIFTQSPNVMDLVKCDGAALCYQNQIMVLGSTPSEGEIKKIVAWLLECHDGSTGLSTDSLLEAGYPGASALGEVVCGMAAIKISSKGFIFWFRSHTAKEIKWGGAKHEPGDADDNGRRMHPRSSFRAFLEVVKWRSVPWEDVEMDAIHSLQLILRGSLQDEDANDNNARSIVEAPSDDIKKIQGLLELKIVTNEMVRLIETATAPILAVDIVGNISGWNNKVAEITGLPTTEAIGMLLVDLVEGDSVEVVKQMLNSALQGTEEQNLEIKLKTMHQQESKGPVVLMVNACCSRDLSDKVVGVCFVAQDLTGHKMVMDKYTRIQGDYVAIVKNPNELIPPIFMINDLGSCLEWNEAMQKITGIKREDAIDKLLIGELFTLHDYGCRVKDQVTLTKLSILMNTVISGQEPEKLAFGFFNTDGKYMESLLTANKRTDAEGKITGALCFLHVASPELQHALQVQKMSEQAATHSFKELTYIRQELKNPLNGMQFTRKLLEPSDLTEEQRQLFASNVLCQEQLKKILHDNDLEGIEQCYMEMNTVEFNLEEALNTVLMQGMSVSKEKQISLDRDWPVEVSSMYLYGDNLRLQQVLADYLACTLQFTRPAEGPIVLQVIPKKEHIGSGMQIAHLEFRLVHPAPGVPEALIQEMFRHGPGVSREGLGLHISQKLVKTMSGTVQYLREAESSSFIVLVEFPVAQLNSKRSRPSTSKSNF

SEQ ID NO: 15958 - protein, 251 aa, Desulfovibrio vulgaris subsp. vulgaris (strain Hildenborough)
MKEISLGKEMLSEFMGTMVLIIFGAGNVAMTVLFGKTLNITWDNITFGWGLAVLLGIMAGLPSGAHINPAVSLALAATGRFPWRKVLPYSVAQVAGGFAGAAIVFLDFKAKWLGVDPQLASTAGIFCTFPAITTSYLPGFIDQIIGTAVLMFGILAIGDFAGKNNVGWMGPVLVAALIVAIGMSLGAMHGYAINPARDFGPRFFALVAGFTQPNLMEPGIVLVPIVGPIIGGPLGAFIYDWTTGAVNKAQG

SEQ ID NO: 15959 - protein, 472 aa, Xanthomonas axonopodis pv. citri str. 306
MHRHVHEPEILADPAAAQTAEHWRQRDLAVVWHPCTQMREHPHTLPLVPIVGGEGAWLVGHDGRRYLDAVSSWWTNLFGHTEPRIGAAIARQAGELEQVMLAGFTHTPAVQLAEQLLAIAPRQAGRAPLSKVFYADNGSAGVEVALKMAFHYFHNRGDHRRTRFIALENGYHGETIGALSVGDIPLYRRVYAPLLLEAMFTPSPDAYLAEPGQSAEDHALQAADALQALFEHSPGEICALILEPRVQCAGGMRMYHPAYLRRARELCDAHGAFLIADEIATGFGRTGTLFACEQAGVMPDLLCLSKGLTGGFLPLSAVLATQQLYDAFLDDSRERAFLHSHSYTGNPLACAAALATLKIFADDDVIARNQPIAARMRALAAQIGEHPSVADVRQAGMIVAFELTQGGNKRTPFASAARVGLKAYRAALEKGVVLRPLGDVLYWMPPYCVDEAQLALLADTTRHAITEAVACA

SEQ ID NO: 15960 - protein, 260 aa, Lycopersicon esculentum
MCGGAILADIIPPRDRRLSSTDLWPTDFWPISTQNVPLNPKRARPSTGGEQMKKRQRKNLYRGIRQRPWGKWAAEIRDPRKGVRVWLGTFNTAEEAARAYDREARKIRGKKAKVNFPNEDDDHYCYSHPEPPPLNIACDTTVTYNQESNNCYPFYSIENVEPVMEFASYNGIEDGGEEMVKNLNNRVVEEEEKTEDEVQILSDELMAYESLMKFYEIPYVDGQSVAATVNPAAETAVGGGSMELWSFDDVSRLQPSYNVV

SEQ ID NO: 15961 - protein, 115 aa, Zea mays
  unsure (1)..(115): unsure at all Xaa locations
MKSRFLVLCAIVCVMAQMGDANVVLLGNNLTLSFADIEESFSPGVQGSGVHGIVYASEPLNACSPLTIKEDKGPPXSPFALIVRGGCTFDEKVKNAQEAGFKAANVNDNENSGVL

SEQ ID NO: 15962 - protein, 128 aa, Zea mays
  unsure (1)..(128): unsure at all Xaa locations
MGPTELRPSTSHDTTVTTTNAGAPVWNDNEALTVVPRGPILLEDYHLIEKVAHFARERILERVVHARGAFANGFFXCTHDVTSLTCADFLRAPGVRTPVIVRFSTVIHERRSTETIRDLRRIVLKFYT

SEQ ID NO: 15963 - protein, 724 aa, Oryza sativa
  unsure (1)..(724): unsure at all Xaa locations
MAVKWDYTFDLAEIACDAIQYVGKNDSFALSQGHSPGGLNICLSHSHTHSTCHVVVTMPSGDEAGREEGVVVIVSGGRGGRRRRHCVSEVGQPSAGSPLSSPPLVVPLWLTALVGXGRAEAGAPLVLALGLSVTVVPAAACCFCASGMDADSPRRPTTVPSNTPQVSGLIPWYXRYHPVSWVPSIRYRSIPNWYQRKRESHLKYSAATAVGVAPAPAGVPEKKLLEVKESRKAAPAAPSTSMAAKWAMKKKLVGGDAGYVLEDVPHLTDYLPELPVRATAPICLFFFXTYPNPLQDNPAYSVVKQYFVNTDDTVTQKIVVHKTSARGTHFRRAGPRQRVYFQSDEVNAAIVTCGGLCPGLNTVIRELVCGLYDMYGVTSVVGIEGGYKGFYSRNTVALTPKSVNDIHKRGGTVLGTSRGGHDTGKIVDSIKDRGINQVYIIGGDGTQKGASVIYEVIDKSFGFDTAVEEAQRAINAAHVEAESAENGIGVVKLMGRNSEGKGGLLEFIEKRLKDNGHMVIVVAEGAGQDLIAKSMNFVDTQDASGNKLLLDVGLWLSQKIKDHFKKKRNFPITLKYIDPTYMIRAVRSNASDNVYCTLLAHSALHGAMAGYTGFTVAPVNGRHAYIPFYFSSRITEKQNKVVITDRMWARVLCSTNQPCFLSHEDVEHLKHDDDEHHLHNTQLLEGESSPVKDSSKCNGTAAPVTLSTGRCTENISQPHAVNTR

SEQ ID NO: 15964 - protein, 65 aa, Glycine max
MGGGMEANKNKFIEDWGTARETHASADAWARRNLALVGIFGIAIPVLVYKGIVREFVSSHFPIPN

SEQ ID NO: 15965 - protein, 101 aa, Triticum aestivum
MRGVGGPLLTVSDLLSDLAVEGGDDHLDGGGDASVPSSPLAAHQVEEADPSELQRLFAEDYDNLMKSLQENDPAWPSLTLKVCRALKTFDKLLSLPNVKAE

SEQ ID NO: 15966 - protein, 320 aa, Arabidopsis thaliana
MSSIRNTHWCHRCQRAVWLRARDAVCSYCGGGFVEEIDIGPSRAHRDVERDPTFDLMEAFSAFMRSRLAERSYDREISGRLGSAGSESFSNLAPLLIFGGQAPFRLAGGDNSSVEAFVNGAAPGIGIARGTNAGDYFFGPGLEELIEQLSSGTHHRGPPPAPKSSIDALPTIKITQKHLKSSDSHCPVCKDEFELKSEAKQMPCHHIYHSDCIVPWLVQHNSCPVCRKELPSRGSSSSTQSSQNRSTNGRENSRRRNIFSNLWPFRSSSSSSTQNRRDTNNTATAEEGHYHHHQQQQQQHQHQHQQQQSHMGYSGWPFDY

SEQ ID NO: 15967 - protein, 476 aa, Ralstonia eutropha JMP134
MQQRDKLFINGKWVSPHGTGLIDVIHSTTEAVMGRIPEGSARDAEDAIQAARAAFDGWAATPPAERAGYIRKIAEGLKARTEELAQLIAGEVGMPIKLARAIQVGGPVYNWGQAAKLLEGFDFEEEVGNSLVVREPVGVVAAITPWNYPLNQITLKVAPALAAGCTVVLKPSEVAPLNAFVLAEVIAEAGLPPGVLNLVTGYGPVVGEVLASHPEVDMVSFTGSTRAGKRVSELASQSVKRVALELGGKSASVILDDADLPAAVKGTINACFLNSGQTCSAHTRMLVPRSRYDEVKAIAAKVVEGFTVGDPLQETTRLGPLISAVQKDRVMGYIRRGLEEGAELVAGGPDAPAGLEKGFFVKPTVLGNVEPRATVAQEEIFGPVLSIICYNTEEDAVRIANDSIYGLGGGVWAGDEARAVRVARRIRTGQVDINGGPFNMSAPFGGYKQSGNGREAGKYGLEEFLEYKSLQFKKPA

SEQ ID NO: 15968 - protein, 445 aa, ASPERGILLUS NIDULANS FGSC A4
MSTPSSVSSSSYSAAKSRLASLASHIMGSSSASPVFSTAVVPSAPEDPLFGLAQAYRQDPSDKKVDLVIGAYRDDNAKPWVLPVVKKADELIRNDPNLNHEYLPIKGLAEYTTAAQKLIIGADSPAIAENRVCTFQTISGTGAVHLGALFLARFHPATPKPTLYLSSPTWANHHQIFTNVGFTLANYPYFSPQTKGLDFDGMINALRSAPAGSIILLHACAHNPTGVDLTQEQWKEVAVVMRDRSHFPFFDCAYQGFASGDLARDAWAIRYFVEQGFELCIAQSFAKNFGLYGERTGAFHFVSAPGPEAAQSSAHVASQLAILQRSEISNPPAYGARIASKVLNDPELFAQWEDDLRTMSGRIVEMRKGLRQRLEEKKTPGSWNHITDQIGMFSFTGLSEAQVKVLREKWHVYMTKNGRISMAGLNSHNLDYFAEAVDSVVRETS

SEQ ID NO: 15969 - protein, 1135 aa, Sorghum bicolor
MSSPLNNRGTCSRSSSARSRHSARVVAQTPVDAQLHAEFESSQRNFDYSSSVSAAIRPSVSTSTVSTYHQTMQRGLYIQPFGCLLAVHPDTFTLLAYSENAPEMLDLTPHAVPTIDQRDALAVGADVRTLFRSQSSVALHKAATFGEVNLLNPILVHARTSGKPFYAILHRIDVGLVIDLEPVNPVDVPVTAAGALKSYKLAAKAISRLQSLPSGNLSLLCDVLVREVSELTGYDRVMAYKFHEDEHGEVISECRRSDLEPYLGLHYPATDIPQASRFLFMKNKVRMICDCSATLVKIIQDDSLAQPLSLCGSTLRASHGCHAQYMANMGSVASLVMSVTISNDEEEDVDTGSDQQPKGRKLWGLVVCHHTSPRFVPFPLRYACEFLLQVFGIQLNKEVELAAQAKERHILRTQTLLWDMLLRDAPVGIFTQSPNVMDLVKCDGAALYYQNQLLLLGSTPSESEIKSIATWLQENHDGSTGLSTDSLVEAGYPGAAALREVVCGMAAIKISSKDFIFWFRSHTTKEIKWGGAKHEPVDADDNGRKMHPRSSFKAFLEVVKWRSVPWEDVEMDAIHSLQLILRGSLQDEDANRNNVRSIVKAPPDDTKKIQGLLELRTVTNEMVRLIETATAPVLAVDIAGNINGWNNKAAELTGLPVMEAIGRPLIDLVVVDSIEVVKRILDSALQGIEEQNLEIKLKAFHEQECNGPIILMVNSCCSRDLSEKVIGVCFVGQDLTTQKMIMDKYTRIQGDYVAIVKNPSELIPPIFMINDLGSCLEWNKAMQKITGIQREDVIDKLLIGEVFTLHDYGCRVKDHATLTKLSILMNAVISGQDPEKLLFGFFDTDGKYIESLLTVNKRINAEGKITGAICFLHVASPELQHALQVQKMSEQAATNSFKELTYIHQELRNPLNGMQFTCNLLEPSELTEEQRKLLSSNILCQDQLKKILHDTDLESIEQCYMEMNTVEFNLEEALNTVLMQGIPLGKEKRISIERDWPVEISRMYLYGDNLRLQQVLADYLACALQFTQPAEGPIVLQVIPKKENIGSGMQIAHLEFRIVHPAPGVPEALIQEMFRHNPEVSREGLGLYICQKLVKTMSGTVQYLREADTSSFIILIEFPVAQLSSKRSKPSTSKF

SEQ ID NO: 15970 - protein, 435 aa, Glycine max
MSSDICGILPRILIVSRRTVRKNKFVDFVGEYHLDLIVSYGGVPVIVPRVSGVHTLLNSFEPIHGVLLCEGEDIEACWYDHNDDHDSDGLDLSQEELEEIRRLHASDTSIDKEKDSIELSLAKLCLERNIPYLGICRGSQVLNVACGGTLYQDIGKELSKKCDQSQRVMHINYDDYDGHRHAVKLVKNTPLCHWFQGEEEEKEEGEEMEILVNSYHHQGVKKLAERFIPMAFASDGLIEGFYDPECYNPQDGKFIMGLQFHPERMRKPDSDEFDYPGCPFAYKEFVKAVIAYQKKLNSLTSVPKPLKLNKEMESKRKIIVRSFSLAKNLYTMGRGNCSSKDSELEIGAEFLESNTALSVQQENRLKQMGATVRNGGSYVERLKLNEVREKMAKNVMGKMSVEQLSDLLSFYRTMDQICSQVLERKLHDVVNDFTS

SEQ ID NO: 15971 - protein, 289 aa, Streptococcus thermophilus
MKGIILAGGSGTRLYPLTRAASKQLMPIYDKPMIYYPLSTLMLAGIKEILIISTPQDLPRFKDMLGDGCEFGISLSYAEQPSPDGLAQAFIIGEDFIGDDNVALILGDNIYHGNGLTKMLQLAASKEKGATVFGYQVKDPERFGVVEFDADMNAISIEEKPEEPKSNFAVTGLYFYDNDVVEIAKNIKPSPRGELEITDVNKAYLDRGDLSVELMGRGFAWLDTGTHESLLEAAQYIETVQRLQNVQVANLEEIAYRMGYITKEQVYELAQPLKKNEYGQYLLRLIGEA

SEQ ID NO: 15972 - protein, 442 aa, Solanum tuberosum
QTCLDPDASRSVLGIILGGGAGTRLYPLTKKRAKPAVPLGANYRLIDIPVSNCLNSNISKIYVLTQFNSASLNRHLSRAYASNMGGYKNEGFVEVLAAQQSPENPHWFQGTADAVRQYLWLFEEHTVLEYLILAGDHLYRMDYEKFIQAHRETDADITVAALPMDEKRATAFGLMKIDEEGRIIEFAEKPQGEQLQAMKVDTTILGLDDKRAKEMPFIASMGIYVISKDVMLNLLRDKFPGANDFGSEVIPGATSLGMRVQAYLYDGYWEDIGTIEAFYNANLGITKKPVPDFSFYDRSAPIYTQPRYLPSSKMLDADVTDSVIGEGCVIKNCKIHHSVVGLRSCISEGAIIEDSLLMGADYYETDADRKLLAAKGSVPIGIGKNCHIKRAIIDKNARIGDNVKIINKDNVQEAARETDGYFIKSGIVTVIKDALIPSGIVI

SEQ ID NO: 15973 - protein, 442 aa, Solanum tuberosum
QTCLDPDASRSVLGIILGGGAGTRLYPLTKKRAKPAVPLGANYRLIDIPVSNCLNSNISKIYVLTQFNSASLNRHLSRAYASNMGGYKNEGFVEVLAAQQSPENPDWFQGTADAVRQYLWLFEEHTVLEYLILAGDHLYRMDYEKFIQAHRETDADITVAALPMDEKRATAFGLMKIDEEGRIIEFAEKPQGEQLQAMKVDTTILGLDDKRAKEMPFIASMGIYVISKDVMLNLLRDKFPGANDFGSEVIPGATSLGMRVQAYLYDGYWEDIGTIEAFYNANLGITKKPVPDFSFYDRSAPIYTQPRYLPPSKMLDADVTDSVIGEGCVIKNCKIHHSVVGLRSCISEGAIIEDSLLMGADYYETDADRKLLAAKGSVPIGIGKNCHIKRAIIDKNARIGDNVKIINKDNVQEAARETDGYFIKSGIVTVIKDALIPSGIVI

SEQ ID NO: 15974 - protein, 1139 aa, Triticum aestivum
MSSSRSNNRPACSRGSSARSKHSERVVAQTPVDARLHAEFEGSQRHFDYSSSVSALNRSGASTSSAVSAYLQNMQRGRYIQPFGCLLAIHPESFALLAYSENAAEILDLTPHAVPTIDQRDALAVGADVRTLFRSQSAVALHKAAVFGEVNLLNPILVHARTSGKPFYAILHRIDVGLVIDLEPVNPADVPVTAAGALKSYKLAAKAISRLQSLPSGNLSLLCDVLVREVSELTGYDRVMAYKFHEDEHGEVIAECRRSDLEPYLGLHYPATDIPQASRFLFMKNKVRMICDCAASPVKLIQDDNLSQPISLCGSTMRAPHGCHAQYMANMGSIASLVMSITINEDDDEDGDTGSDQQPKGRKLWGLVVCHHTSPRFVPFPLRYACEFLLQVFGIQLNKEVELASQAKERHILRTQTLLCDMLLRDAPVGIFTQSPNVMDLVKCDGAALCYQNQIMVLGSTPSEGEIKKIVAWLLECHDGSTGLSTDSLLEAGYPGASALGEVVCGMAAIKISSKGFIFWFRSHTAKEIKWGGAKHEPGDADDNGRRMHPRSSFRAFLEVVKWRSVPWEDVEMDAIHSLQLILRGSLQDEDANDNNARSIVEAPSDDIKKIQGLLELKIVTNEMVRLIETATAPILAVDIVGNINGWNNKVAEITGLPTTEAIGMLLVDLVEGDSVEVVKQMLNSALQGTEEQNLEIKLKTMHQQESKGPVVLMVNACCSRDLSDKVVGVCFVAQDLTGHKMVMDKYTRIQGDYVAIVKNPNELIPPIFMINDLGSCLEWNEAMQKITGIKREDAIDKLLIGELFTLHDYGCRVKDQVTLTKLSILMNTVISGQEPEKLAFGFFNTDGKYMESLLTANKRTDAEGKITGALCFLHVASPELQHALQVQKMSEQAATHSFKELTYIRQELKNPLNGMQFTRKLLEPSDLTEEQRQLFASNVLCQEQLKKILHDNDLEGIEQCYMEMNTVEFNLEEALNTVLMQGMSVSKEKQISLDRDWPVEVSSMYLYGDNLRLQQVLADYLACTLQFTRPAEGPIVLQVIPKKEHIGSGMQIAHLEFRLVHPAPGVPEALIQEMFRHGPGVSREGLGLHISQKLVKTMSGTVQYLREAESSSFIVLVEFPVAQLNSKRSRPSTSKSNF

SEQ ID NO: 15975 - protein, 175 aa, Oryza sativa
MGPTVMASSATSVAPFQGLKSTAGLPVSRRSTNSGFGNVSNGGRIKCMQVWPIEGIKKFETLSYLPPLTVEDLLKQIEYLLRSKWVPCLEFSKVGFVYRENHRSPGYYDGRYWTMWKLPMFGCTDATQVLKELEDAKKAYPDAFVRIIGFDNVRQVQLISLIANKPPGRAEFGGN

SEQ ID NO: 15976 - protein, 1139 aa, Triticum aestivum
MSSSRSNNRPACSRGSSARSKHSERVVAQTPVDARLHAEFEGSQRHFDYSSSVSALNRSGASTSSAVSAYLQNMQRGRYIQPFGCLLAIHPESFALLAYSENAAEILDLTPHAVPTIDQRDALAVGADVRTLFRSQSAVALHKAAVFGEVNLLNPILVHARTSGKPFYAILHRIDVGLVIDLEPVNPADVPVTAAGALKSYKLAAKAISRLQSLPSGNLSLLCDVLVREVSELTGYDRVMAYKFHEDEHGEVIAECRRSDLEPYLGLHYPATDIPQASRFLFMKNKVRMICDCAASPVKLIQDDDLSQPISLCGSTMRAPHGCHAQYMANMGSIASLVMSITINEDDDEDGDTGSDQQPKGRKLWGLVVCHHTSPRFVPFPLRYACEFLLQVFGIQLNKEVELASQAKERHILRTQTLLCDMLLRDAPVGIFTQSPNVMDLVKCDGAALCYQNQIMVLGSTPSEGEITKIVAWLLECHDGSTGLSTDSLLEAGYPGASALGEVVCGMAAIKISSKGFIFWFRSHTAKEIKWGGAKHEPGDADDNGRRMHPRSSFRAFLEVVKWRSVPWEDVEMDAIHSLQLILRGSLQDEDANDNNARSIVEAPSDDIKKIQGLLELKIVTNEMVRLIETATAPILAVDIVGNINGWNNKVAEITGLPTTEAIGMLLVDLVEGDSVEVVKQMLNSALQGTEEQNLEIKLKTMHQQESKGPVVLMVNACCSRDLSDKVVGVCFVAQDLTGHKMVMDKYTRIQGDYVAIVKNPNELIPPIFMINDLGSCLEWNEAMQKITGIKREDAIDKLLIGELFTLHDYGCRVKDQVTLTKLSILMNTVISGQEPEKLAFGFFNTDGKYMESLLTANKRTDAEGKITGALCFLHVASPELQHALQVQKMSEQAATHSFKELTYIRQELKNPLNGMQFTRKLLEPSDLTEEQRQLFASNVLCQEQLKKILHDNDLEGIEQCYMEMNTVEFNLEEALNTVLMQGMSVSKEKQISLDRDWPVEVSSMYLYGDNLRLQQVLADYLACTLQFTRPAEGPIVLQVIPKKEHIGSGMQIAHLEFRLVHPAPGVPEALIQEMFRHGPGVSREGLGLHISQKLVKTMSGTVQYLREAESSSFIVLVEFPVAQLNSKRSRPSTSKSNF

SEQ ID NO: 15977 - protein, 758 aa, Rhodopseudomonas palustris CGA009
MTEGSVARQPDLSTCDDEPIHIPGAIQPHGLLLALAADMTIVAGSDNLPELTGLAIGALIGRSAADVFDSETHNRLTIALAEPGAAVGAPIAVGFTMRKDAGFVGSWHRHDQLVFLELEPPQRDVAEPQAFFRRTNSAIRRLQAAETLESACAAAAQEVREITGFDRVMIYRFASDFSGEVIAEDRCAEVESYLGLHFPASDIPAQARRLYTINPVRIIPDINYRPVPVTPDLNPVTGRPIDLSFAILRSVSPVHLEYMRNIGMHGTMSISILRGERLWGLIACHHRKPNYVDLDGRQACELVAQVLAWQIGVMEEQAITRQTLKGQAIQRSLINDIEQLHDHRAGLARNSEALLELMGASGLCLHSREGVITIGQTPPGPIIDQLAQLAGRSGGSELFQTDRLSTIIPEAGAFAEVASGVLAVPLSRTPPRRVMLWFRPEVAQTVYWAGNPDKSVTAESGRLRPRTSFAAWTEQTHGRAIAWQPHEVAAAVEIRDLIIDVILRNTEKLERINTQLARSNEELESFAHVASHDIKEPLRHIEAFAGLLADNIREMGDERLGVMVSGIEKSSRRLRNLINDLAEFSQLGRRSKPLSWVSLETVLNEVLADLQPRITEARAEIQADRLPFARCDHNQIRQVLQNLIANSLKYRDPARPCRIRIFAQPDDNGGRAEIGSAPAIRICVTDNGIGFDKKYIDQVFEPFQRLHGPDDYEGSGIGLAICRKIVQRHGGRVGVDTVPGQGSTFWFTLPVSDDHGQG

SEQ ID NO: 15978 - protein, 1139 aa, Triticum aestivum
MSSSRSNNRPACSRGSSARSKHSERVVAQTPVDARLHAEFEGSQRHFDYSSSVSALNRSGASTSSAVSAYIQNMQRGRYIQPFGCLLAIHPESFALLAYSENAAEILDLTPHAVPTIDQRDALAVGADVRTLFRSQSAVALHKAAVFGEVNLLNPILVHARTSGKPFYAILHRIDVGLVIDLEPVNPADVPVTAAGALKSYKLAAKAISRLQSLPSGNLSLLCDVLVREVSELTGYDRVMAYKFHEDEHGEVIAECRRSDLEPYLGLHYPATDIPQASRFLFMKNKVRMICDCAASPVKLIQDDNLSQPISLCGSTMRAPHGCHAQYMANMGSIASLVMSITINEDDDEDGDTGSDQQPKGRKLWGLVVCHHTSPRFVPFPLRYACEFLLQVFGIQLNKEVELASQAKERHILRTQTLLCDMLLRDAPVGIFTQSPNVMDLVKCDGAALCYQNQIMVLGSTPSEGEIKKIVAWLLECHDGSTGLSTDSLLEAGYPGASALGEVVCGMAAIKISSKGFIFWFRSHTAKEIKWGGAKHEPGDADDNGRRMHPRSSFRAFLEVVKWRSVPWEDVEMDAIHSLQLILRGSLQDEDANDNNARSIVEAPSDDIKKIQGLLELKIVTNEMVRLIETATAPILAVDIVGNINGWNNKVAEITGLPTTEAIGMLLVDLVEGDSVEVVKQMLNSALQGTEEQNLEIKLKTMHQQESKGPVVLMVNACCSRDLSDKVVGVCFVAQDLTGHKMVMDKYTRIQGDYVAIVKNPNELIPPIFMINDLGSCLEWNEAMQKITGIKREDAIDKLLIGELFTLHDYGCRVKDQVTLTKLSILMNTVISGQEPEKLAFGFFNTDGKYMESLLTANKRTDAEGKITGALCFLHVASPELQHALQVQKMSEQAATHSFKELTYIRQELKNPLNGMQFTRKLLEPSDLTEEQRQLFASNVLCQEQLKKILHDNDLEGIEQCYMEMNTVEFNLEEALNTVLMQGMSVSKEKQISLDRDWPVEVSSMYLYGDNLRLQQVLADYLACTLQFTRPAEGPIVLQVIPKKEHIGSGMQIAHLEFRLVHPAPGVPEALIQEMFRHGPGVSREGLGLHISQKLVKTMSGTVQYLREAESSSFIVLVEFPVAQLNSKRSRPSTSKSNF

SEQ ID NO: 15979 - protein, 529 aa, Plantago major
MTADHQKSSVASFAVSSGDAGKLGLSSTLDTLPKKPLKRNKYALAISILASMTSVLLGYDCGVMSGATQFIQEDLIITDVQVELLVGTINIYSLVGSAVAGRTSDWVGRRYTIVFASTIFFLGAILMGFATNYAFLMVGRFVAGIGVGYALMIAPVYAAEVAPASCRGFLTSFPEVFINFGVLLGYVSNFAFAKLPLTLGWRMMLGVGAVPSVLLGVGVLYMPESPRWLVLQGRLGDAKKVLDKTSDSLEESKLRLADIKEAAGVPLDCHDEIVQVQKRSQGQGVWKELLLHPTKPVLHILICGVGIHFFQQGIGIDSVVLYSPRIYEKAGIKNTSDKLLATIAVGVSKTFFILITTFFVDRFGRRPLLLTSCAGVALSMFALGTSLTIIDRNPDGNIKGLLIFAVILTMAIVGFFSMGLGPIAWVYSSEIFPLKLRAQGCSMGVAMNRFMSGVILMSFISLYKAITIGGAFFLFGGITTVAFIFFYTLFPETQGRTLEEMEELFGTFFSWRTRMKELDAKKKTGSEAT

SEQ ID NO: 15980 - protein, 1139 aa, Triticum aestivum
MSSSRSNNRPACSRGSSARSKHSERVVAQTPVDARLHAEFEGSQRHFDYSSSVSALNRSGASTSSAVSAYLQNMQRGRYIQPFGCLLAIHSESFALLAYSENAAEMLDLTPHAVPTIDQRDALAVGADVRTLFRSQSAVALHKAAVFGEVNLLNPILVHARTSGKPFYAILHRIDVGLVIDLEPVNPADVPVTAAGALKSYKLAAKAISRLQSLPSGNLSLLCDVLVREVSELTGYDRVMAYKFHEDEHGEVIAECRRSDLEPYLGLHYPATDIPQASRFLFMKNKVRMICDCAASPVKLIQDDNLSQPISLCGSTMRAPHGCHAQYMANMGSIASLVMSITINEDDDEDGDTGSDQQPKGRKLWGLVVCHHTSPRFVPFPLRYACEFLLQVFGIQLNKEVELASQAKERHILRTQTLLCDMLLRDAPVGIFTQSPNVMDLVKCDGAALCYQNQIMVLGSTPSEGEIKKIVAWLLECHDGSTGLSTDSLLEAGYPGASALGEVVCGMAAIKISSKGFIFWFRSHTAKEIKWGGAKQEPGDADDNGRRMHPRSSFRAFLEVVKWRSVPWEDVEMDAIHSLQLILRGSLQDEDATDNNAGSIVEAPSDDIKKIQGLLELRIVTNEMVRLIETATAPILAVDIVGNINGWNNKVAEITGLPTTEAIGMLLVDLVEGDSVEVVKQMLNSALQGTEEQNLEIKLKTFHQQESKGPVVLMVNACCSRDLSEKVVGVCLVAQDLTGHKMIMDKYTRIQGDYVAIVKNPNELIPPIFMINDLGSCLEWNEAMQKITGIKREDAIDKLLIGEVFTLHDYGCRVKDQATLTKLSILMNTVISGQEPEKLAFGFFNTDGKYMESLLTANKRTDAEGKITGALCFLHVASPELQHALQVQKMSEQAATHSFKELTYIRQELKNPLNGMQFTRKLLEPSDLTEEQRQLFASNVLCQEQLKKILHDNDLEGIEQCYMEMNAVEFNLEEALNTVLMQGMSLSKEKQISLDRDWPVEVSSIYLYGDNLRLQQVLADYLACTLQFTRPAEGPIVLQVIPKKEHIGSGMQIAHLEFRLVHPAPGVPEALIQEMFRHGPGVSREGLGLHISQKLVKTMSGTVQYLREAESSSFIVLVEFPVAQLNSKRSRPSTSKSNF

SEQ ID NO: 15981 - protein, 530 aa, Plantago major
MNSEHHNSGGLASFSVDAGKSQKPDAASVLDTLPKKPVTRNKYALAISILASMTSVLLGYDTGVMSGATLYIKDDLKISDVQVELLVGTINIYSLVGSAVAGRTSDWVGRRYTTVFASVVFFVGAILMGIATNYVFLMAGRFVAGIGVGYALMIAPVYAAEVAPASCRGFLTSFPEVFINFGVLLGFVSNYAFAKFPLKLGWRMMLGVGAIPAVFLAIGVIYMPESPRWLVLQGRLGDARRVLDKTSDSLEESKLRLADIKEAAGIPEDCNDDFVQVQKHSQGQGVWRELLLHPTKPVLHILICGVGIHFFQQGIGIDSVVLYSPRIYDRAGITDTSDKLLATIAVGISKTFFILITTFYVDRFGRRFLLLVSCAGVALSMFALGTVLTIIDRNPDAKQTGVLVLVVLLTMVIVGFFSMGLGPIAWVYSSEIFPLKLRAQGCGLGVAMNRFMSGVILMSFISLYKEITIGGSFFLFGGITTLGWIFFFTLFPETRGRTLEEMEGLFGTFFKWRTTMKELDAKKRSGTDGA

SEQ ID NO: 15982 - protein, 1139 aa, Triticum aestivum
MSSSRSNNRPACSRGSSARSKHSERVVAQTPVDARLHAEFEGSHRHFDYSSSVSALNRSGASTSSAVSAYLQNMQRGRYIQPFGCLLAIHPESFALLAYSENAAEMLDLTPHAVPTIDQRDALAVGADVRTLFRSQSAVALHKAAVFGEVNLLNPILVHARTSGKPFYAILHRIDVGLVIDLEPVNPADVPVTAAGALKSYKLAAKAISRLQSLPGGNLSLLCDVLVREVSELTGYDRVMAYKFHEDEHGEVIAECRRSDLEPYLGLHYPATDIPQASRFLFMKNKVRMICDCAASPVKLIQDDNLSQPISLCGSTMRAPHGCHAQYMANMGSIASLVMSITINEDEDEDGDTGSDQQPKGRKLWGLVVCHHTSPRFVPFPLRYACEFLLQVFGIQLNKEVELASQAKERHILRTQTLLCDMLLRDAPVGIFTQSPNVMDLVKCDGAALCYQNQIMVLGSTPSEGEIKKIVAWLLECHDGSTGLSTDSLLEAGYPGASALGEVVCGMAAIKISSKGFIFWFRSHTAKEIKWGGAKHEPGDADDNGRRMHPRSSFRAFLEVVKWRSVPWEDVEMDAIHSLQLILRGSLQDEDANDNTARSIVEAPSDDIKKIQGLLELKIVTNEMVRLIETATAPILAVDIVGNINGWNNKVAEITGLPTTEAIGMLLVDLVEGDSVEVVKQMLNSALQGTEEQNLEIKLKTFHQQESKGPVVLMVNACCSRDLSDKVVGVCFVAQDLTGHKMVMDKYTRIQGDYVAIVKNPNELIPPIFMINDLGSCLEWNEAMQKITGIKREDAIDKLLIGEVFTLHDYGCRVKDQVTLTKLSILMNTVISGQEPEKLAFGFFNTNGKYMESLLTANKRTDAEGKITGALCFLHVASPELQHALQVQKMSEQAATHSFKELTYIRQELKNPLNGMQFTRKLLEPSDLTEEQRQLFASNVLCQEQLKKILHDNDLEGIEQCYMEMNTVEFNLEEALNTVLMQGMSLSKEKQISLDRDWPVEVSSMYLYGDNLRLQQVLADYLACTLQFTRPAEGPIVLQVIPKKEHIGSGMQIAHLEFRLVHPAPGVPEALIQEMFRHGPGVSREGLGLHISQKLVKTMSGTVQYLREAESSSFIVLVEFPVAQLNSKRSRPSTSKSNF

SEQ ID NO: 15983 - protein, 433 aa, Methylococcus capsulatus str. Bath
MPLIFGVCCLVVAAAHMVPAARAAAGEFFNGLLGKRMTKSADVLFVLLGAIMVLAMHAGFAFLEVGTVRRKNQVNALVKILSDFAMSTIAYFFIGYELAYGVDFFDSALALTVDNGYGLVKFFFLLTFAAAIPAIVSGGIAERSKFNPQLAATFLLVGFVYPLFEGIAWNSNLGFQGWLQTRFGAQFHDFAGSVVVHAVGGWIGLAAVLLLGPRRGRYHRDGMIAAHPPSSIPFLALGAWILTVGWFGFNVMSAQNLNGISGLVAVNSLMAMVGGTLAALLAGRNDPGFVHNGPLAGLVAVCAGSDLMHPIGALAVGAVAGFLFVYLFTLTQNRWKIDDVLGVWPLHGLCGAWGGIAAGIFGQSALGGIGGISFMAQVLGTGLGVAIALAGGLAVYGAAKTLIGLRLTPEEEFDGADLTLHRISSSPEKEAGW

SEQ ID NO: 15984 - protein, 104 aa, Triticum aestivum
MDEGLVSVDTFSGGSQAYFLTHLHQDHTRGLGAAAGWRHGPLYCSPVTARLLPTRFPGVDASLIRPIAAGASASLSLTSPISGRTVSLHVTALPAIHCPGSLMF

SEQ ID NO: 15985 - protein, 183 aa, Pseudomonas syringae pv. tomato str. DC3000
MKIRFVSIPLLLLSMSGAVMAADCPPLLQGELPKLRAKENIDLCKRFAGKPLVVVNTASFCGFAPQFKGLEELSQRYKGQGLEVLGLPSNDFKQEAKDGEETAKVCYVNYGVTFTMTEPQAVRGDDATHLFKVLAEQSSAPRWNFYKYVVDRQGKVVANFSSMTKPDDPELIAAIEKAIASKP

SEQ ID NO: 15986 - protein, 199 aa, Colletotrichum trifolii
MAQPGVQSLKCVVTGDGAVGKTCLLISYTTNAFPGEYIPTVFDNYSASVMVDGKPISLGLWDTAGQEDYDRLRPLSYPQTDVFLICFSIVSPPSFDNVKAKWYPEIDHHAPNIPIILVGTKLDLREDPNTLESLRQKRMEPVSYDQALICAKEIKAHKYLECSALTQRNLKSVFDEAIRAVLNPRPVAQQKKKSKCTIL

SEQ ID NO: 15987 - protein, 290 aa, Vicia faba
MEAKEQDVSLGANKFPERQPIGIAAQSHDDGKDYKEPPPAPLFEPSELTSWSFYRAGIAEFVATFLFLYITILTVMGVNKSQSKCATVGIQGIAWSFGGMIFALVYCTAGISGGHINPAVTFGLFLARKLSLTRAVFYIVMQVLGAICGAGVVKGFEGKAFFGEKGGGANFVAPGYTKGDGLGAEIIGTFVLVYTVFSATDAKRSARDSHVPILAPLPIGFAVFLVHLATIPITGTGINPARSLGAAIIFNQDRGWNDQWIFWVGPFIGAALAALYHTVVIRAIPFKSRS

SEQ ID NO: 15988 - protein, 261 aa, Rhodopseudomonas palustris CGA009
MGRLEGKSIIITGAGSGIGRAASLLFTKEGAQLIAVDRTEGVQETVEQVRKAGGTAEAVMADAGSEDDVKGFVAKAIAVYGKLDGIWANAGISGGLLPLPEQTPEHWQEILRVNLIGPFLAIKHATPHLIKQGHGAIVCTASVAGLKSGASGHPYAASKAGVISLVQTTAYSLSGTGVRINAVCPGLIETGMTKPVFDGARARGTDHKIGQLNPLKRAGQPHELATMGLFLLSDEASYVNGQAFPVDGGLTASMPYAGKPI

SEQ ID NO: 15989 - protein, 315 aa, Oenococcus oeni PSU-1
MEVTAIKLAYLFSGQGGKIEPLDQSLYLESSSFRETFDQAKSLLGVDLWNLWQSGDKRLAETRFAQPAIFVLSTALYRAIKNELPQASALVGLSLGEYSALVAGDALDFSEGLKLIEKRGQLMQQASEEFPGAMAAVMSQDTKLIEDVCQDVFQSSGQKVQIANYNYPKQTVIGGQVDAVKTAVEALHQAGVQRIVDLPVSGAFHTPLMESANRQFLPDLEKIQFKDPIIPVVSNTTGKVFTDSSIGETLSKQMISSTRFTDCLFELRDLGVDSVVELGPGHSLVSFAKKTLKLDGYYAVNDSASLKKALAALTA

SEQ ID NO: 15990 - protein, 304 aa, Glycine max
  unsure (1)..(304): unsure at all Xaa locations
HYGSINENVKKSQYAVRGELYLRASXELQKEGKKIIFTNVGNXPHALGQKPLSFRXRRVVALCQAPFLLDDPNVGXLFPADAIARAKHYLSLTSGGLGAYSDSRGLPGVRKEVAEFILRRDGYPTDPELIYLTDGASKGVMQILNTIIRGQDDGILVPVPQYPLYSATIALLGGTLVPYYLEETANWGLDVNELRQSVEQARFKGITXVKAMVIINPGNPTGQCLSEANLREVLQFCYQENLALLGDEVYQTNIYQDERPFISSRKVLMDLGPPISKEVQLISFHSVSKGYYGECGQRSGYFEM

SEQ ID NO: 15991 - protein, 775 aa, Rhodopseudomonas palustris CGA009
MSSRSDPGQPMASATDPSGRLALDLTECDREPIHIPGAIQPHGYLFVVSETDLRIASVSANVEDLLRQPPASLLNVPIAHYLTAASAARLTHALHGGDPAAINPIRLDVVTPDGERAFNGILHRHDSIVILELEPRDESRYTNEFFRSVRVAIRRLQTAADLPTACWIAASEVRRITGFDRIKVYQFAADWSGQVIAEDRDSGIPSLLDFHFPSSDIPAQSRALYTINPVRIIPDIGYRPSPLVPDINPRLGGPIDLSFSVLRSVSPTHLEYMVNMGMHAAMSISIVRDNRLWGMISCHNLTPRFVSYEVRQACELIAQVLTWQIGVLEEAEIVRHSVRMRAIQNRLLHELGDEQGLTAGLSRVSEEMLALMGASGFALCSFDGVAAFGRTPSDDEIQALASWLSHRESRGIFQTQQLSASFPEAEVYSDIASGLLAVPLGRASTTLMLWFRPEVAQTVTWGGDPHKPVQIGPRGRRLQTRASFEAWREEVRDRSRPWRSHEIVAAEEIRDLVVDVILGRAEELENANRELSRSNDELESFAYVAAHDLKEPLRHIEAFAGLLNDLLLPEARSRLSLMVNGIEASSRRLRALINDLAEYSRIGRQARPLQPVDLNQILTEVLSDLKPMLQDARAEVVSEPLPTVLCDGSQIRQLLQNLISNAVKYRDAERLPHVTIAATIDSPPPAAPAGANVRRARITIADNGIGFDEQYREQIFEPFQRLHGPDEYQGTGIGLAICRKIVHRHGGTISATSRVGEGSVFTFTLPLCDQDAAES

SEQ ID NO: 15992 - protein, 388 aa, Pseudomonas syringae pv. syringae B728a
MPQDKDPRAHTALSQRGRSAGSGPGIAVNPPVVRLSTVLFDSLESLRQAEIRTTGPERSLTYGANGNPTAFALQDLISELEGAHGTCLYPTGLAAVAQMFQSFLRPGDHVLITESVYGPVRRLAKTMLTAFDIQFDFYAADGSNVESLIKANTRMIYAEVPGSLTFDMCDLPALSQLCKARNLLLAVDNSWGSGVLYKPLALGADISLMALTKYVAGHSDVMMGSVSTTEAHWHTLKTMNTAVGNTVSPDDAYLVLRGARSLAARMAMHERHALQIAQWLQAQPQVARVLYPALPDDPGHAIWKRDFHGCNGLLSFEFNTADRQVLDRFTGALKLFGIGYSWGGFESLITEVEQHGPERGAGPMLRLQVGLESPEDLIADLRNGFAAE

SEQ ID NO: 15993 - protein, 516 aa, Gentiana triflora
MSPIYTTLTLHLATALFLFFHVQKLVHYLHGKATGHRCRRLPPGPTGWPILGALPLLGNMPHVTFANMAKKYGSVMYLKVGSHGLAIASTPDAAKAFLKTLDLNFSNRPPNAGATHLAYNAQDMVFAHYGPKWKLLRKLSNLHMLGGKALENWADVRKTELGYMLKAMFESSQNNEPVMISEMLTYAMANMLSQVILSRRVFNKKGAKSNEFKDMVVELMTSAGYFNIGDFIPSIGWMDLQGIEGGMKRLHKKFDVLLTRLLDDHKRTSQERKQKPDFLDFVIANGDNSDGERLNTDNIKALLLNLFTAGTDTSSSIIEWALAELLKNRTLLTRAQDEMDRVIGRDRRLLESDIPNLPYLQAICKETFRKHPSTPLNLPRNCIRGHVDVNGYYIPKGTRLNVNIWAIGRDPSVWGDNPNEFDPERFLYGRNAKIDPRGNHFELIPFGAGRRICAGTRMGILLVEYILGTLVHSFDWKLGFSEDELNMDETFGLALQKAVPLAAMVIPRLPLHVYAP

SEQ ID NO: 15994 - protein, 510 aa, Eustoma grandiflorum
MAVGNGVLLHIARSLMLFFHVQKLVQYLWMNSRRHRLPPGPIGWPVLGALPLLGTMPHVALANMAKKYGPVMYLKVGSCGLAVASTPEAAKAFLKTLDMNFSNRPPNAGATHLAYNAQDMVFADYGPRWKLLRKLSNIHILGGKALQGWEEVRKKELGYMLYAMAESGRHGQPVVVSEMLTYAMANMLGQVMLSKRVFGSQGSESNEFKDMVVELMTVAGYFNIGDFIPSIAWMDLQGIQGGMKRLHKKFDALLTRLLEEHTASAHERKGSPDFLDFVVANRDNSEGERLHTVNIKALLLNMFTAGTDTSSSVIEWALAELLKNPIILKRAQEEMDGVIGRDRRFLEADISKLPYLQAICKEAFRKHPSTPLNLPRIASQACEVNGHYIPKGTRLSVNIWAIGRDPSLWENPNEFNPDRFLERKNAKIDPRGNDFELIPFGAGRRICAGTRLGILLVEYILGTLVHSFDWELPSSVIELNMDEPFGLALQKAVPLAAMVTPRLPLHIYCP

SEQ ID NO: 15995 - protein, 313 aa, Neurospora crassa
MATPKFNSKSPTIRRILREAQEISASPSPDYTATPLESDLFEWHFTLRGPPNSVYADGIYHGRIVLPQAYPLRPPSFRFVTPSGRFEANREICLSISGHHEETWQPAWGVRTSLVALRSFMETDPKGQLGGLDATEAVRRRMATESRAWKCQACGKTNEEIIWECEEAAKEHQGEGQAEVEVPSDLKMGWRDEMDKNSSGAVAASRSGAQQDEEDAESAELAEGFVQTVPLPPAPQPRSVGVTSSSSTPAQPGQGVPQPTRTIPLPSQFNPHPPPMMQHRRPQQVRAFWHAVWFCRYWYSVTPRALPYKGIEV

SEQ ID NO: 15996 - protein, 214 aa, Beta vulgaris subsp. vulgaris
MANRVDHEYDYLFKIVLIGDSGVGKSNILSRFTRNEFCLESKSTIGVEFATRTLQVEGKTVKAQIWDTAGQERYRAITSAYYRGAVGALLVYDITKRQTFDNVQRWLRELRDHADSNIVIMMAGNKSDLKHLRAVSEEDGQALAEKEGLSFLETSALEAVNIEKAFQTILTEIYHIISKKALAAQEASSNLPGQGTTINVADASANQRRSCCST

SEQ ID NO: 15997 - protein, 334 aa, Bradyrhizobium japonicum USDA 110
MSIADAEFAQAKTAQSAPTAAKPQLPPGVVTEGPLVKAKLRESYLLLGILYVGAVAGIIWAVTQGVGKVELFTFAWMFALTTFGIGAGMHRLFVHRSFRTGPIMRVFFCAIAQMAVQGSIAKWVANHRRHHLYADDVGDPHSPQFDGFGNRYVSALKGFLHAQGSWVFDQATTDNEYYAKDILADPIAMFFVRTRWVWYGMSAVFIPGFIGYVFGGVHTMIGCVLFSGLLRAYLLILVSQLTGSVCHAYGYRRFEVDDASTNEFVTTILTFGEGLHNNHHRFPRDAYISHAWWEIDLNGLIILGMEKIGLVHDVFHASHRQLERASEAQAASTR

SEQ ID NO: 15998 - protein, 434 aa, Cattleya bicolor
MSKVFGIEAPLSKIALSKAHGEDSPYFAGWKAYEENPYDAMNNPNGVIQMGLAENQLSFDLLEEYLEQHPDAFGWGSDLSGFRENALFQDYHGLQTFRKAMASFMEKIRGGRSKFDPNRIILTAGATAANELLTFILANPGDAILVPTPYYPGFLRDLQWRTGVTIFPVHCDSSNGFQLTLSSLEKAYADAKASNFKVKGLLITNPCNPLGTTASFSLLQDIILFISDKNIHLISDEIYSGSVFSSTNLFSISDLITDAVSEQIHIVYSLSKDLGLPGFRVGALYSYNDRVVKTARRMSSFSLVSSQTQKLLAFMLSDEEFTVRYIEKNRERLTERYELVVEGLKEARIECLKGEAGLFCWVNMEELMEEKTMEEELKLWKVIVEELKLNITPGSSCCCSEPGWFRVCFANMSRETLEVALRRLKDFAQKKDCR

SEQ ID NO: 15999 - protein, 163 aa, Saccharomyces cerevisiae
MSEFYKLAPVDKKGQPFPFDQLKGKVVLIVNVASKCGFTPQYKELEALYKRYKDEGFTIIGFPCNQFGHQEPGSDEEIAQFCQLNYGVTFPIMKKIDVNGGNEDPVYKFLKSQKSGMLGLRGIKWNFEKFLVDKKGKVYERYSSLTKPSSLSETIEELLKEVE

SEQ ID NO: 16000 - protein, 404 aa, Brucella melitensis 16M
MIRTERRNMMFRTLDDANVQSKRVLVRVDLNVPMANGEVTDLTRIERIVPTIAELSRKGAKVILLAHFGRPKGVASDENSLKHVVKPLSKVLDHSVHFAEDCIGDKAKAAVDALKDGDVLLLENTRFHKGEEKNDPEFVQALAANGDLYVNDAFSAAHRAHASTEGLAHVLPAFAGRAMQAELEALEKGLGNPARPVVAIVGGAKVSTKLDLLSNLIEKVDALVIGGGMANTFLAAKGLDVGKSLCEHELASTAREIMAKAETTKCAIILPVDAIVGWHFAADTPHQTYGVDSVPGDAMILDAGELSTDLIASAIDDAATLVWNGPLGAFELRPFDTATVKVARHVAKRTKEGKLVSVGGGGDTVAALNHAGVADDFTYISTAGGAFLEWMEGKPLPGVDVLKK

SEQ ID NO: 16001 - protein, 328 aa, GIBBERELLA ZEAE PH-1
MATPKFSSKSPTIRRILREAAEISNSPSADYTAEPLESDLFEWHFTLRGPPNSVYSNGIYHGRIVLPPTYPLRPPSFRFMTPSGRFEANREICLSISGHHEETWQPAWGVRTALVALRSFMETDARGQLGGLETTDAVRQQLANESSTFKCPACGKTNSEIIQECEERAKEASSSAQEVEVPKELNMGWRDEMGAKKEGENKTEQTNDDAETAQLAEGFVQTVPDAGPAGDNTPAPQPQIDNRNPTPTRTIPLPAPAPAAQAQVHAPMAVQGQQARRASDDGVPLWLDRAIVVLVVLLVALVLKIIFAWPIFNDENAHYKALSTIERG

SEQ ID NO: 16002 - protein, 548 aa, Pseudomonas syringae pv. syringae B728a
MSLSPFAGKLAPAQLLVDIPRLVTAYYTGQPDASVPTQRVAFGTSGHRGTSFDLGFNEWHVLAISQAICLYRKANGIDGPLFLGADTHALSTPAAATALEVLAANGVQVMISQGDEYTPTPAVSHAIICYNRGRTSGLADGIVITPSHNPPQSGGFKYNPPNGGPADSDVTKWIENKANELLAENVTGVSRISHEKALRADTTHRHDYVNTYVADLKNVIDMDAIRNSGLRLGVDPLGGAGVNYWSAIGEHYGLNLDVVNKFVDPTFRFMTVDWDGQIRMDPSSSHAMQSLIGLKDRYQVAFACDPDHDRHGIVTPSGGLMTPNSYLAVSIDYLFQNRPEWRADAAVGKTVVSSGMIDRVAKRLGRRLYEVPVGFKYFAQGLFEGSLGFGGEESAGASFLRRDGTVWTTDKDGLIPALLAAEMTARTGRDPSQIYKTMTEELGEPFSTRVDAKANPQQKALLSKLSPEQVTSTELAGEPIQQVLSNAPGNDQAFGGVKVMTENGWFAARPSGTEDIYKIYAESFVSEDHLKRLVAEAQVLVDGAISPN

SEQ ID NO: 16003 - protein, 475 aa, Vibrio cholerae O1 biovar eltor str. N16961
MSKEIKAQVVVLGAGPAGYSAAFRCADLGLDTVIIERYNTLGGVCLNVGCIPSKALLHVAKVIEEAKALTEHGIVFGEPKTDIDKVRLWKEKVINQLTGGLAGMAKMRKVNVVNGYGKFTGPNTIEVDGEEGKTVVTFDNAIVAAGSRPIKLPFIPHEDPRIWDSTDALELKEVPGKLLIMGGGIIGLEMATVYHSLGSKIDVVEMFDQLIPAADKDMVKVYTKRIKDKFNLMLETKVTAVEAKEDGIYVSMEGKSAPAQAERYDAVLVAIGRVPNGKLLDAEKAGLEVDERGFIRVDKQMRTNVPHIFAIGDIVGQPMLAHKGVHEGHVAAEVISGKKHYFDPKVIPSIAYTEPEVAWVGKTEKEAKAEGINYEVATFPWAASGRAIASDCADGMTKLIFDKETHRVIGGAIVGTNGGELLGEIGLAIEMGCDAEDIALTIHAHPTLHESVGLAAEVFEGTITDLPNAKAKKKK

SEQ ID NO: 16004 - protein, 635 aa, Vibrio cholerae O1 biovar eltor str. N16961
MKVGKVMAIEIYVPDIGADEVEVTEILVKVGDKVAEEQSLITVEGDKASMEVPASQAGIVKEIKVVAGDKVSTGSLIMVFEAEGAAAAAPAPAPQAAAPVAAAPAAAALKEVQVPDIGGDEVEVTEIMVKVGDVVAEEQSLITVEGDKASMEVPAPFAGTVKEIKIAAGDKVSTGSLIMVFEVAGAAPLAAPVQAAAPAAAAAPAVAALKEVQVPDIGGDEVTVTEIMVNVGDSISEEQSLITVEGDKASMEVPAPFAGTLKEIKVATGDKVKTGSLIMVFEVAGAAPVAAPVQAAAAPAAAPAQAATPAAAAPATSGEFQENHEYSHASPVVRRLAREFGVNLAKVKGSGRKNRILKEDVQNYVKEALKRLESGAQAAASGKGDGAALGLLPWPKVDFSKFGDTEVQPLSRIKKISGANLHRNWVMIPHVTQWDNADITELEKFRQEQNAMEAKRDTGMKITPLVFIMKAAAKALEAFPAFNSSLSDDGESLILKKYVNIGIAVDTPNGLVVPVFKDVNKKGIYELSKELAEVSKKARGGKLTAADMQGGCFTISSLGGIGGTAFTPIVNAPEVAILGVSKSEMKPVWNGKEFAPRLQLPLSLSYDHRVIDGAEGARFITYLNECLSDIRRLVL

SEQ ID NO: 16005 - protein, 328 aa, Ideonella dechloratans
MSQRQVAYVFDLNKCIGCHTCTMACKQLWTNRDGREYMYWNNVETRPGKGYPKNWEGKGGGFDQEGKLKTNGIIPIMADYGGRIGDFNLNEVLLEGKADQVVPHEKATWGPNWDEDEGKGEFPNNHSFYLPRICNHCSNPACLAACPTKAIYKRPEDGIVVVDQTRCRGYRYCVKACPYGKMYFNLQKGKSEKCIGCYPRVEKGEAPACVKQCSGRIRFWGYRDDKNGPIYKLVEQWKVALPLHAEYGTEPNVFYVPPMNTTPPPFEEDGRLGDKPRIPIEDLEALFGPGVKQALATLGGEMAKRRKAQASELTDILIGFTNKDRYGV

SEQ ID NO: 16006 - protein, 197 aa, Beta vulgaris subsp. vulgaris
MSASRFIKCVTVGDGAVGKTCLLISYTSNTFPTDYVPTVFDNFSANVVVNGATVNLGLWDTAGQEDYNRLRPLSYRGADVFILAFSLISKASYENVSKKWIPELKHYAPGVPIVLVGTKLDLRDDKQFFIDHPGAVPITTAQGEELRKLIGAPAYIECSSKTQQNVKAVFDAAIKVVLQPPKTKKKKSKAQKACSIL

SEQ ID NO: 16007 - protein, 249 aa, Methanosarcina mazei Go1
MQMAPQMGYDRAITVFSPDGRLFQVEYAREAVKRGTTAVGIKAADGVVLLVDKRITSRLVEAESIEKIFQIDDHIGAATSGLVADARSLVDRARVEAQVNRVSYDELIGVEVISKKICDHKQTYTQYGGVRPYGTALLIAGVDDNKPRLFETDPSGALLEYKATAIGAGRNAVVEVFEADYREDMNIDAAILLGMDALYKAAEGKFDAGTLEVGVVSLEDKKFRKLGPEEVENYVHQILEKHKGNENKE

SEQ ID NO: 16008 - protein, 230 aa, Methanosarcina mazei Go1
MVSLDEAVTARLKRGSKHFEVLVEPEGALAYKRGEEVNLEDILAVETIFEDANRGDRAAESDIINSFETTDPFEIAAVILKSGELQLTAEQRKRMLEEKKKKVIYTISRNAINPQTRAPHPPARIERAMEEAKVHIDPLKSVDQLVAITMKAIRPLIPIRFEEISIAVKIPPEYAPKAYGDISKAGTITKEEWQRDGSWIAVVRIPAGVQTDFYALINHLTKGEAQTKLL

SEQ ID NO: 16009 - protein, 474 aa, Arabidopsis thaliana
MVMEEGRSIEEGLLQLKNKNDDSECRITACVILSTFVAVCGSFSFGVATGYTSGAETGVMKDLDLSIAQFSAFGSFATLGAAIGALFCGNLAMVIGRRGTMWVSDFLCITGWLSIAFAKEVMLLNFGRIISGIGFGLTSYVVPVYIAEITPKHVRGTFTFSNQLLQNAGLAMIYFCGNFINWRTLALLGALPCFIQVIGLFFVPESPRWLAKVGSDKELENSLFRLRGRDADISREASEIQVMTKMVENDSKSSFSDLFQRKYRYTLVVGIGLMLIQQFSGSAAVISYASTIFRKAGFSVAIGTTMLGIFVIPKAMIGLILVDKWGRRPLLMTSAFGMSMTCMLLGVAFTLQKMQLLSELTPILSFICVMMYIATYAIGLGGLPWVIMSEIFPINIKVTAGSIVTLVSFSSSSIVTYAFNFLFEWSTQGTFFIFAGIGGAALLFIWLLVPETKGLSLEEIQVSLIHQPDERNQT

SEQ ID NO: 16010 - protein, 487 aa, Methanosarcina mazei Goe1
MRGIRMKDYDLIVIGTGSGMNYVNSIIDSNPKMKIAVIDKDEPGGICLTRGCIPSKLLLYPAELVRDLETAPLFGIKLEIKDIEFRTIMERMRKRIGEDIEMIRQGLTENDYLDYYPETAEFISPYTLKAGDEILHSEMIFLCTGSKPAVPPVRGLEEAGYLTSDTVLGLNECPKSLAILGGSYIGAEYGHFFSAMGAEVTVIGRNQHFLPQEEPEVSELARIKMSEYMRILTNHEAIEVRKEKGGQKTVIAKDRDSGEETEVTADEILVATGRAPNNDILHPEKAGIKTDPHGWILVNEYLETSQPNIWAFGDANGKYLLKHVGNYESGIVYLNAIMQEKVKVDYHAVPHAVFSYPEIAGVGMSEKEAIEEFGEKRVIIGFKLFEDTAKGSAMETRDYFVKVILDGLEDKILGAHIIGPHASVLIHQIIPLMYTASRSAKPMMQMMDIHPALSEVVKRAFYSRLSPEHYHHVMKHLGLEDEDSVEG

SEQ ID NO: 16011 - protein, 486 aa, Neurospora crassa
MSSSNSRRLNIDNINPHVRAAKYAVRGELAVKSEEFRAALLRGTSDIPFSQVISANIGNPQQLDQKPITFFRQVLSLLENPLLLEHEDVLINHLGYKTDVIERAKWFLKNVGSVGAYSASNGAPAIRQHIAEFLERRDGFPANWQDIYLSAGASSGVNTLLHIICADEKSGILVPIPQYPLYTASLSILNATCVPYLLDESKNWGTDINTIKESYQKAKDAGVDTRAIVIINPGNPTGASLSEEDIRAVLEFARQERLVVLADEVYQTNVFIGEFISFKRVLRQLQKENPDGKYDCVELASLHSISKGMVGECGHRGGYFELVNFDPEVQAEIYKFVSIMLCAPVIGQCLVELMVNPPKPGEPSYELYEKEYRGIYEGMRERANALHKAFEQMEGVECGAPQGAMYLFPTINLPPKAAEAAAKEGRTPDEFYCMKLLEATGVCVVPGSGFGQKEGSLHFRTTFLAPGTEWVGSIVKFHKEFMDQYR

SEQ ID NO: 16012 - protein, 174 aa, Triticum aestivum
MAPAVMASSATTVAPFQGLKSTAGLPVSRRSSGSLGRVSNGGRIRCMQVWPIEGIKKFETLSYLPPLSTEALLKQVDYLIRSKWVPCLEFSKVGFVFREHNSSSGYYDGRYWTMWKLPMFGCTDATQVLNEVEEVKKEYPDAYVRVIGFDNLRQVQCVSFIAFRPPGCEESGKA

SEQ ID NO: 16013 - protein, 287 aa, Zea mays
MATSPALLFPSPSSASSAPSSARVEAVVLFNVCDSYVRRPDQADRVIGTLLGSLLSDGTVHVRNSYVVPHSESADQVAIDIDYHHNMYASHQKVNPKEVIVGWFSTGFGVSGGSTLIHEFYSREVQNPIHLTVDTGFTRGEASIKAYISSNLSLRDSQLAAQFQEIPLDLKMIEAEKAGFEILKSTMVEKLPNDLEGMESSMGKLYILIDEIYKYVDDVVEGRVAPDNRIGRFISDSFASVPKLSPAAFDKLFNDKIQDNLALVYLSSITRTQISIAEKLNTAAQVL

SEQ ID NO: 16014 - protein, 163 aa, Methanococcoides burtonii DSM 6242
MSYEPLLQSMGRTAVGGTFEFLHDGHMALIRKAFELAKGDVVDIGLTSEEMAGRKNRIIPDIATRKKSLTAFIKELGFPEEKYNIQTLKDPYGSTLEEDYEYLVVSPETLPVARKINEIRKTNGKREIKIVSINYVMAEDDLPISSTRIEQGEIDVHGHLKHN

SEQ ID NO: 16015 - protein, 184 aa, GIBBERELLA ZEAE PH-1
MTVHKVNFITGNANKLTEVKAILEPEIEVLSQPIDLEEMQGTLEEVTESKCRRAAELVKGPVLVEDTALCYNALKGLPGVYIKWFMTSIGHEGLNNLLAAYTDKSAEAVCTFGYCAGPGEKVILFQGRCPGKIVPARGPPAFGWDAVFEYEGQTFAEMVKTEKNKISHRGRALAKLQAWFKDQQ

SEQ ID NO: 16016 - protein, 295 aa, Glycine max
MVSHYYLASLLLLLLLNPHTTLGAQNLMLPYHNGALLKGTITVNLLWYGSFTPIQRSIILDFINSLSSTAGAPLPSVASWWKTTDKYRGGSTTIVLGKQILEQTYSLGNYLNGTQLVSLSSRFDHLNAINVVLTSSDVGVDGFCRSRCGTHGSITNGQKARIPYVWVGNSEAQCPGQCAWPFHQPAYGPQAPPLIAPNGDVGLDGMVINVATLLAGTVTNPFNEGFYQGPPTAPLEAVSACTGIFGSGAYPGYPGRVLVDKTTGASYNSYGAGNGRKYLLPAMWDPQTSACKTQV

SEQ ID NO: 16017 - protein, 391 aa, Trichodesmium erythraeum IMS101
MEFAKKLEKISPYPLTEINRKKNELIDRGVDIINFGAGDPDQPTPNHIVQAMHEAIKDSTNHHYPPIKGLKEYRQAAADWMKRRFGIEDLNSETEVISSIGSKESIHNLFLAFVNPGDYAIIPDPGYPVYRTSTIFTLGQPYSMQLRAENGFLPILSNIPQEVAEKAKLLWINYPNNPTGATASLEFFEELVGFCKHYDILLCHDNAYSEIAYDNYKPPSILQVPNAKDIAIEFHSLSKTYNMSGWRIGFVAGNSLGIKGLSQVKSNIDSGVFQAIQKAATEAFVSTTEKHLQSLVAVYQKRRDILIKGLQSLGYPIKANLASLYAWVPVPKNYTSQEFATLLLEKCGIIVVPGNAYGTSGEGFIRIALTVEDKRISQALQRIKDSGLNYI

SEQ ID NO: 16018 - protein, 267 aa, Pseudomonas fluorescens PfO-1
MSVPAFGLGTFRLQGQVVIDSVSTALELGYRVIDTAQIYENEADVGEAIAASGIARDKLFITSKIWIANFAKDRLIESLKASLQKLQTDYLDLTLIHWPSPEDQVPVEEFMGALLEAKRLGLTRQIGVSNFTIDLMKQAIAAVGAENIATNQIELHPYLQNRKVVEFAQSQGIQITSYMTLAYGEVLKDPLIVQIAERLQATPAQVTLAWAMQSGYAVIPSSTKRANLQGNLGAMALTLSDADMALIATLDRGHRLTSPKGIAPQWD

SEQ ID NO: 16019 - protein, 215 aa, Burkholderia fungorum LB400
MNEVKQVNGAAASGSPLKKVVLASNNAGKLREFAALLGAAGIELIAQGELNVPEAEEPHPTFVENALAKARHAAKLTGLPALADDSGLCVRALGGAPGVYSARYAQLAGGEKSDAANNAHLMSALRGETDRRAYYFCVLALVRHADDPEPLIAEGRWHGEMLDAPRGTHGFGYDPYFFLPALNASAAELDPAVKNAGSHRAIALRQLLARLTEEA

SEQ ID NO: 16020 - protein, 518 aa, Oryza sativa
  unsure (1)..(518): unsure at all Xaa locations
MEEGVVGGGGAAVLVALLVTVVLAVMRSAGSRSSKRGRLPPSPMALPIIGHLHLIXPPPHRAFDRILARHGPLVYLRLGPSTHCXVIGSADVARDFLKFEASIPERPPTAVTRQLAYGKAGFAFAPYGAYWRFVKRLCMSELLGPRTVELLRPVRAAELADVLRAAQSAAERGEGVDMSHELVRMANNSIMRMVASALPGEMAEAARDCAKQVAELVGAFNAEDFVAVCRGWDLQGIGRRTNEVHARFDALLETIIEAKEEARRRSLRLGRRESSSKDLLDMLMDAAEDDTAEVKLTRDNIKAFVLDIFTAGSDTTATTVEWMLAELVNHPECMAKLRGELDAVVGRSRLVGEQDVARLPYLQAVLKETLRLRPPAVFAQRVTVEPVQVRGYTIPTDTQVFFNIFSIGRDATYWDQPLHFRPDRFLPDGAGATVDPKGQHPQLMPFGSGRRACPGMGLAMQAVPAFLAALVQCFDWAPPPSQPLPLDMEEAAGLVSARKHPLLLLPTPRIQPLPSFYS

SEQ ID NO: 16021 - protein, 867 aa, Ustilago maydis 521
MPPFTPAVRAENTFAAQSTSTKPFSSKFAPASHDGQPRRLAVMTSGGDSAGMNAAVRSVVKMAIFRGCEAFVIREGWEGLVRGNQTPENTPSATPSVSRSASTFFDSPNIQAKPSHLEANPEQSDFVPTYGEGELLREGVGEAQELGLRGRYIIRVGWDDVRGWMDQGGTLIGTARSKTFRTPEGREQAAYNLIINGIDALAVCGGDGSLTGADKLRAEWPDLVASLKAKSKITEEQATKFAHLNIVGLVGSIDNDMATTDITIGASTALQRICEAVDSISSTAASHSRAFVVEVMGRHCGWLALMAGIATGADYVFIPERPPQGEQWHSEMSAVLQKHRDLGKRKSIVIVAEGAIDRELNDISPEMIKQVLSNDLGLDTRVTTLGHTQRGGKPDANDRILATLQGIEAVDAVLEATPETPSYVIGISENKITRIPLMFAVEQTQKVAKLIESKDFDGALALRDPEFAEGLRAFKYISQITEDEMLPQNKRLRMGVINVGAPAGGMNAATRTAVRYCLAKGHEAVVIYNGFPGLLEDNVSVLNWLRVDNWATRGGSELGVNRHLPDIDIGAVAAKLQEHKIEGLLIVGGFEAFSSVKILNDNRDRYPAFRIPIVGLPATISNNVPMNEFSLGSDTSLNALVDACDAVKQSASASRNRVFVVETQGGKCGYIAVMGALAAGAVLVYTPEVGIGLQQLGKDVAFLKKRFLLDVKGKSEGRLVIRNEKSSDVFTTEVITKILKEEGNSLFDARSASLGHTLQGGVPSPLDRVRATRLALKCCEFLESQALKQRSGSSASSKTGSGSSSDKSYSDDTAVMITIQGSTICFTSATEMSRNADMKNRRGKTAWWHELKALVELLGGRTALAEL

SEQ ID NO: 16022 - protein, 705 aa, Rhodopseudomonas palustris CGA009
MAKSAKPTKNRTATIHDQKMSRGEGGELHQTAEDLGTEVMTTAQGGPISDDQNTLKIGPRGPALIEDFHFREKIFHFDHERIPERVVHARGYGAHGFFETTHSLAKFSRADLFQRVGERTPAFVRFSTVAGSKGSVDLARDVRGFAVKIYTKEGNWDLVGNNIPVFFIQDAIKFPDLIHSVKEEPDRAFPQAQSAHDNFWDFISLTPESMHMVMWVMSDRAIPRSFRFMEGFGVHTFRLVNADGESTFVKFHWKPKLGMQSVLWNEAVKINGADPDFHRRDLWTAISTGNFPEWELRVQLFDQEFADKFDFDILDATKIIPEEIIPPVPVGRLVLDRMPDNFFAETEQVAFMTQNVPPGIDFSNDPLLQGRNFSYLDTQLKRLGSPNFAHLPINAPKCPFAHFQQDGHMAMHNPVGRANYQPNSHGLGPRESPQRGFVPFPEAEEGAKAKFRAESFADHYSQARQFYLSQTRTEQHHIVSALTFELSKVEISVIRERVLSHLLLIDETLATNVANRLGIKAMPKPADAAVPTRQDLPPSPALSIIENGPERFGGRKLGILITDGTDAALLKSLQKAVEKAGATFELIAPRVGGVIASDGSEIAAHQMIDGGPSVLYDAVALLPGDDEIDDLLQESTARDFVADAFAHCKFIGYVAAARPLFAKAGIGDDLDEGCIELAARKDAGAFVDQLGKLRVWARESVVKMR

SEQ ID NO: 16023 - protein, 263 aa, Mycobacterium avium subsp. paratuberculosis str. k10
MILDRFRLDDKVAVITGAGRGLGAAIAVAFAEAGADVLIASRTESQLEAVAEQVRAAGRRAHVVAADLAHPESTAELAARAVEAFGKLDIVVNNVGGTMPNTLLTTSTKDLKDAFTFNVATAHALTVAAVPLMLEHSGGGNIIKITSTMGRLAGRGFAAYGTAKAALSHYTRLTALDLCPRIRVNAIAPGSILTSALDVVASNDELRAPMEKATPLRRLGDPVDIAAAAVYLASPAGEFLTGKTLEVDGGLTYPNLDIPVPDL

SEQ ID NO: 16024 - protein, 844 aa, Geobacter sulfurreducens PCA
MVSLTIDGKDITVAKETTILDAAALLGITIPTLCWLKKVSPTGACRVCAVEIEGVDRPMTACNTPVKDGIKVTTQSEKLSRIRQKIMELMLVNHPLDCPVCDAGGECDLQNACYGLGAAKQEYGAVLERRKIRYDWPLIESDPNRCILCEKCVKVDHEIVGCNAIRVVNRGEATIIDTVDGNPLNCEFCGNCVAACPTGTLISKPFKFRGRPWAFTTTPSVCPFCATGCQIEYHSRNGRVERVTSDDSTYNSGNLCINGRFGYSYINSPDRLAEPMVKGQKADWNTAMGTAATALKQIVASHGADAVAGFGSPRVTNEDNYLFQKLMRSAIGTGNIDSEARLGFAATQKVLREMLGIAGASTTIDAIDRATAVLVVGCDLNAEATGMEYRVIKAATKNNAKLVLAAMRDIKLKKFANSHLKYRPGNETLLINALTKAVLEEGLENKEFCSANISNLSDLTAALAGVSIADAAAATGVTEADLRAAARLVGGKKGVAVIFGAELMRGGNTDAVKALINLALILGATAGDTGGLFPVYEKTNIRGLLDMGVAPDHFPGHQTDGTTFEKAWGKKLPAAAGKDLWQIIEGIEQGSVKALYLLGCDPVASFPEGERIRKALEKLELLIVQDPFPGEAAKMAHVVFPSSVAAEKNGTFTTIDGRVQPLAKAVAPSGDAREDWDILTELYNRLTGESRIHSPAAVLDEVAALVPAYASVGRTGGTITAQPRSGGLALAPVSARAVAGSPTTLLVGTILYHSGTTTTWSKNNLEIIPKGYIEIHPNDAAKLGIAEGGKVRLSAGSVKVEGTAKITPRVQPGLLFAPSHFRGMNVNALLSRDGGVVPVTVEKA

SEQ ID NO: 16025 - protein, 425 aa, Buchnera aphidicola str. Bp (Baizongia pistaciae)
MKEIIRSIKGMHDYIPDDVITWQYIEYIVKRILKNYCYNEIRFPLIEKTSLFAHSIGNITDIIEKEMYSFKDKKNKKITLRPEGTIGCMRACINKGLLRTSKQKLWYLGPMFRYERPQHGRYRQFHQFGIEVLGMSGPDIDLEIILLVERILRTLNISNYVQLELNSIGSYESRLHYKKILFSYFKQYEACLDEDCKRRLYVNPLRILDSKDKNIKAIINNAPILMDFIDDNSLIHFENLCKLMKNIGISYVVNYKLVRGLDYYNKTVFEWKTNLLGAKDAICAGGRYDNLSKSLGVTFIPAIGCAIGMERLVLLIKSLKLKPKTNNAIDVFIIFLKDNIQIEAIKLSELVRTQFPKKKIMLSILSSNLRKQFSTANKIKARIVLLLGPNEVKNNLILLKDLTSGYQKSFLKNKIIEELELAFKN

SEQ ID NO: 16026 - protein, 506 aa, Pseudomonas syringae pv. syringae B728a
MRYAHPGTEGAIVNFKERYGNYIGGEFVAPVKGQYFTNTSPVTGKAIAEFPRSTAEDIDKALDAAHAAAAAWGSTSVQARSLVLLKIADRIEANLEVLAITETWDNGKAIRETLNADIPLAADHFRYFAGVLRAQEGSAAEIDGNTVAYHIHEPLGVVGQIIPWNFPLLMAAWKLAPALAAGNCIVLKPAEQTPLGISVLIELIGDLLPPGVLNIVQGYGREAGEALASSKRIAKIAFTGSTPVGSHIMKLAADNIIPSTVELGGKSPNIFFEDIMSAEPEFIDKAAEGLVLAFFNQGEVCTCPSRALVQESIYPQFMEAVLRKVEKIKRGDPLDTDTMVGAQASEQQFDKILSYLDIAKGEGAELLTGGKVEKLEGSLSTGYYIQPTLLKGNNKMRVFQEEIFGPVVSVTTFKDEAEAVAIANDTEFGLGAGLWTRDINRAYRVGRAIKAGRVWTNCYHLYPAHAAFGGYKKSGVGRETHKIALEHYQQTKNLLVSYDTNPLGFF

SEQ ID NO: 16027 - protein, 556 aa, ASPERGILLUS NIDULANS FGSC A4
MEHSSPLAAMQPPSVMLGHCFRSDAPTSYHGFSPLPGLGPGGFNFKDLSMKRSNGDYFGTKVVRGSSPTASLAADLSQNFHIDQSPQVATPRRSLFSACLLGNGNRRGVDDAMTTPPLPSSSPAPAMDIMDMSPLPHKPPFISTPEIELDSPTLESSPMDTTMMSTDGLVPDSPTVLPKDGKQERRRPTFLRPSLARSKAQSFQVGMTRPAPESQGPPFKFQTNGINKTSSGVAASLEDMFGESPQRERPMMRINSTSGLNSRLRPPLGSGSHVRGNGSPSAASVRKSAHPNMRPRKQCRRSLSMYEHPEDVIADSEVSYTSNAPLQSISDFEETQALQLPHFIPEEQADNLPRIDKATLVDIKEGKYDNMFDNIMIIDCRFEYEYDGGHIVGAVNYNDKENLAAELFADPKPRTAIVFHCEYSVHRAPLMAKYIRHRDRAYNVDHYPQLSYPDMYILEGGYSGFFAEHRSLCYPQNYVEMSAKEHEFACERGLGKVKQRSKLSRAQTFAFGQQSPEMEDSPTGRCRNNPGDRKLLASPFNDSPGSRFPGRRMLSY

SEQ ID NO: 16028 - protein, 518 aa, Oryza sativa (japonica cultivar-group)
MEFMMPLDTNACAQPMRRAGEGAGTERLMERLNIGGMTQEKALRKRCFGDGVTGTARCVFTSDADRDTPHLRTQSSRKNYADASHVSAVILGGGTGVQLFPLTSTRATPAVPVGGCYRLIDIPMSNCFNSGINKIFVMTQFNSASLNRHIHHTYLGGGINFTDGSVQVLAATQMPDEPAGWFQGTADAIRKFMWILEDHYNQNNIEHVVILCGDQLYRMNYMELVQKHVDDNADITISCAPIDGSRASDYGLVKFDDSGRVIQFLEKPEGADLESMKVDTSFLSYAIDDKQKYPYIASMGIYVLKKDVLLDILKSKYAHLQDFGSEILPRAVLEHNVKACVFTEYWEDIGTIKSFFDANLALTEQPPKFEFYDPKTPFFTSPRYLPPARLEKCKIKDAIISDGCSFSECTIEHSVIGISSRVSIGCELKDTMMMGADQYETEEETSKLLFEGKVPIGIGENTKIRNCIIDMNARIGRNVIIANTQGVQESDHPEEGYYIRSGIVVILKNATIKHGPII

SEQ ID NO: 16029 - protein, 122 aa, Triticum aestivum
VGPVHVPRERGATMVGAQPLVESYNVPIFCKDVPTVRRITRRVTGRSGGLPSVQALALFHGDNCTEIACFLLDPDHVGADRVQWLVEQIAEEQGLEVEKGYFTDLSKHMMLERYSEMVSAAD

SEQ ID NO: 16030 - protein, 459 aa, Ipomoea nil
MFDLNLSAVEAIGDRGVAASEKVLELSGTSNSSVVNAETSSTAGDDEYSCSDGYAFEILRREEDGKEYGESENRGGFETMELFPLSGGEAALFNQQQQQWLDLSANYGIVADPRIMILPPQRPQVKKSRRGPRSRSSQYRGVTFYRRTGRWESHIWDCGKQVYLGFDTAHAAARAYDRAAIKFRGLDADINFNVTDYEEDLQQMKNLTKEEFVHILRRQSTGFSRGSSKYRGVTLHKCGRWEARMGQFLGKKYIYLGLFDSEIEAARAYDKAAIKLSGREAVTNFELSAYEQELTSEVDTGGGSQDLDLHLGIAPTSFVDGMGTLQLQSGLASPKHWGVGTSASNTVESELLPHGFELLSEHPPICNGVNTQFFPIYKGTAIGKGMEIDSSPNWAQAYGGTPPATLFSTAASSGFANATFTSSPAAPRLPHFSSGMLPYHHSSPPIPTMNSTAHFCCRS

SEQ ID NO: 16031 - protein, 567 aa, Saccharomyces cerevisiae
MSGVNNTSANDLSTTESNSNSVANAPSVKTEHNDSKNSLNLDATEPPIDLPQKPLSAYTTVAILCLMIAFGGFIFGWDTGTISGFVNLSDFIRRFGQKNDKGTYYLSKVRMGLIVSIFNIGCAIGGIVLSKVGDIYGRRIGLITVTAIYVVGILIQITSINKWYQYFIGRIISGLGVGGIAVLSPMLISEVAPKQIRGTLVQLYQLMCTMGIFLGYCTNYGTKNYHNATQWRVGLGLCFAWTTFMVSGMMFVPESPRYLIEVGKDEEAKRSLSKSNKVSVDDPALLAEYDTIKAGIELEKLAGNASWSELLSTKTKVFQRVLMGVMIQSLQQLTGDNYFFYYGTTIFKSVGLKDSFQTSIIIGVVNFFSSFIAVYTIERFGRRTCLLWGAASMLCCFAVFASVGVTKLWPQGSSHQDITSQGAGNCMIVFTMFFIFSFATTWAGGCYVIVSETFPLRVKSRGMAIATAANWMWGFLISFFTPFITGAINFYYGYVFLGCLVFAYFYVFFFVPETKGLTLEEVNTMWLEGVPAWKSASWVPPERRTADYDADAIDHDDRPIYKRFFSS

SEQ ID NO: 16032 - protein, 427 aa, Dechloromonas aromatica RCB
MSSIVDVIAREILDSRGNPTVEADVLLESGVMGRAAVPSGASTGTREAIELRDGDASRYLGKGVMQAVENVNTEISEAIIGLDAQEQAFIDQTMIDLDGTDNKSRLGANAILAVSMAVAKAAAEESGLPLYRYFGGMSPMQMPVPMMNIINGGEHANNSLDIQEFMVMPVGAANIREAIRCGAEIFHALKKLLNKKGHSTAVGDEGGFAPNLGSHAEALQIIMEAIEIAGYVPGQDVLLALDCAASEFYKDGKYKLAGEGLELTSAQFVDYLANLADQFPIVSIEDGMSEADWDGWKLLTDRLGDKVQIVGDDIFVTNTKIFKEGIKKGIGNSILIKINQIGTLSETFAAVEMAKRAGYTAVISHRSGETEDSTIADIAVGLNAGQIKTGSLSRSDRIAKYNQLIRIEEDLGDTASYPGRETFYNLR

SEQ ID NO: 16033 - protein, 231 aa, Solanum demissum
MLGTMDNYRLHSKKDEDEKNLVSKKEVVKGVLLQQIVQAAVATVLFAVTGDDGESGGDQHASIFVLGRQLFVAMLMLDTWQYFMHRYMHQNKFLYKHIHAQHHRLIVPYAFGALYNHPLEGLILDTIGGALAFLVSGMSPRTSIFFFSFATIKTVDDHCGLWLPGNLFHIFFKNNSAYHDIHHQLYGTKYNYSQPFFVTWDRILGTYMPYELERRPEGGFEAKPVKDCKEH

SEQ ID NO: 16034 - protein, 509 aa, Brassica rapa
MTSVNVKLLYHYVITNLFNLCFFPLTAIVAGKAYRFTIDDLHHLYYSYLQHNLITIASLFAFTVSGFGLYIARLPKPLYLVEYSCYLPPRHLKVSVSKIMDIFYQIKADTSSRNVACDDPSSLDFLRKIQERSGLGDETYSPEGLIHVPPRKSFAGSREETEKVIIGGIENLFENTKVKPKDIGILVVNSSKFNPTPSLSAMVVNTFKLRSNIKSFNLGGMGGSAGVIAIAIDLAKDLLHVHKNTYALVVSTEGITQGIYAEENRSMMFSNCLFRVGGAAILLSNKSGDRRRSKYELVHTVRTHTGADDKSFRCVQQGDDEDGKTGVCLSKDITNVAGTTLTKHIAICRPLILPLSEKFLFFATSVAMKLLKDKIKHYYVPDFKLAVDHFCIQPGGRAVIDELEKNLGLSPIDVEASRSTLHRFGNTSSSSIWYELAYIEPKERLKKGNKKGWQIALGLGFKGNSAVWVALNNVKASANSPWEHCIDRYPVKNDSDLSKSKHQVQNGRS

SEQ ID NO: 16035 - protein, 426 aa, GIBBERELLA ZEAE PH-1
MAPSLLLLPSPPHPSSPSTLSAAYSAPLTSVLQKLKSASSPQTLVVGLALPILTGPSANSKQIAWPIAQSLLASLYTLTSVVCAKEDIPVDVGAGKGSVDVRVVLIDHEKGRRYEPNFEGQFEANCTAVLDLAAFATKVRTWDMVYHPSCEEGYELLSTFLQLAEKKQTFMQNQLVAIEGGISLTTEEKLNTEDLQRGFNTVCLGGTFDHLHPGHKLLLHTSAILLNIPPKDSDKTCTLVVGISSDELLAKKKYAEELQPWTERTQAVLSFLSTLLEYDTTATSPPTQSTPDETIAMLRDGRVKVRCIVLRDPFGPPIHEEDADAIVVSGETRSGGKAINDRRTEKGWKPLEVFEIDVLDAEEVDGEGVSKTEDFASKISSTAIRQKRAEEKRLSERVSGKIAAYDVVTHFTVTCVRTLSRLSYEI

SEQ ID NO: 16036 - protein, 569 aa, Saccharomyces cerevisiae
MTDRKTNLPEEPIFEEAEDDGCPSIENSSHLSVPTVEENKDFSEYNGEEAEEVVVPEKPASAYATVSIMCLCMAFGGFMSGWDTGTISGFVNQTDFLRRFGNYSHSKNTYYLSNVRTGLIVSIFNVGSAIGCLFLSKLGDIYGRCMGLIIVIVVYMVGIVIQIASIDKWYQYFIGRIIAGIGAGSISVLAPMLISETAPKHIRGTLLACWQLMVTFAIFLGYCTNYGTKTYSNSVQWRVPLGLCFAWAIIMIGGMTFVPESPRFLVQVGKIEQAKASFAKSNKLSVDDPAVVAEIDLLVAGVEAEEAMGTASWKELFSRKTKVFQRLTMTVMINSLQQLTGDNYFFYYGTTIFKSVGMNDSFETSIVLGIVNFASCFFSLYSVDKLGRRRCLLLGAATMTACMVIYASVGVTRLYPNGKSEPSSKGAGNCTIVFTCFYIFCFSCTWGPVCYVIISETFPLRVRSKCMSVATAANLLWGFLIGFFTPFITSAINFYYGYVFMGCLAFSYFYVFFFVPETKGLTLEEVDEMWMDGVLPWKSESWVPASRRDGDYDNEKLQHDEKPFYKRMF

SEQ ID NO: 16037 - protein, 258 aa, Desulfovibrio vulgaris subsp. vulgaris str. Hildenborough
MSTSEDTLRTSPDTFDADSVTSKGAPQEHARQVSGMFGRIARWYDLLNHVLSGGLDLYWRYRLVRQVVPGPTGRVLDLAAGTLDVAREIHRQHPGMRVPALDFCEAMLRAGQPKLVDGVQDVIWPAVADGRRLPLADASVDCVTIAFGIRNIVPRREAFEEMLRVLVPGGRACILEFGTGKTPVWKGLYNFYLNTLLPLVGRCVSGDAGAYRYLADTIMSFPDADALAAEMHDAGFTRVYHLPLTSGIVRLHVGEKPL

SEQ ID NO: 16038 - protein, 357 aa, Helicobacter pylori J99
MKASIYDFTLDELSQLLKPSFRAKQLYLWLYAKYKTSFKDMQNNFSKDFIAYLEQEFTLRTIEIAHVRESVDGSKKYLFKSLRDNHTFEAVLLKMKDKKIDEETNAVLEGEKYTVCVSCQIGCQVGCSFCFTQKGGFVRDLKASEIIQQALLIKEANNLPIEKALNIVFMGMGEPLNNLDEVCKAVEIFNTGMQISPKRITISTSGVADKIPILAGKNLGVQLAISLHAVDDKTRSSLMPLNKKYNIECVLNEVRKWPLEQRKRVMFEYLLIKDLNDSLDCAKKLLKLLNGIKSKVNLILFNPHEGSKFERPSLESARMFADFLNAKGLLCTIRESKALDIEAACGQLREKKLQQKI

SEQ ID NO: 16039 - protein, 545 aa, Fragaria vesca
MGVYTCPRVFTSSSSSSTYCCRHHPDLATRAAVNPRPGFAAGRVDSPAPFHGLSSLILRFPPNFVRQLSTKARRNCSNIGVAQIVAASWSNKDSDLSAVPAASAVDAAATAADLVVPAQIGTEDDLAAVDAEYAVFGNGVQLGGLPDLKDASFLSSDGSIAIHAGERLGRGIVTDAITTPVVNTSAYFFKKTADLLDFKEKRATSFEYGRYGNPTTVVLEEKISALEGAESTLLLASGMCASTVLLMALVPAGGHIVTTTDCYRKTRIFIETILPKMGITATIIDPADVGALETALNENKVSLFFTESPTNPFLRCVDINLVSDLCHSKGAVVCINGTFATPINQKALALGADLVVHSATKYLAGHNDVLAGCISGSMKLVSEIRILHHILGGALNPNAAYLIIRGMKTLHIRIQQQNSTALRMAKILEAHPKVAHVYYPGLPSHPEHELAKRQMTGFGGVVSFEIDGDLKRTIKFIDALKIPYIAPSFGGCESIVDQPAIMSYWDLSQSDRLKYGIKDNLVRFSFGIEDFNDLKADILQALEKI

SEQ ID NO: 16040 - protein, 235 aa, uncultured bacterium
GISHGIDALVVIGGDGSLTGAHLFYQEYGIPAIGLPGTIDNDLSGTDSTIGFDTACNTAIEAIDKIRDTATSHDRLFFVEVMGRDAGFIAINAGIGSAAAAILIPENKTPIETLVEKLKTRTKAKKTSNIFIVAEGGKSGSAQEIADKVKKHLPYYDIKVTILGHLQRGGAPTSFDRLLSFQMGVAAIEGLMAGKYDVMAGMINNKIVYTPIVKAIVDDKTVDEEDLRVANILST

SEQ ID NO: 16041 - protein, 128 aa, Glycine max
  unsure (1)..(128): unsure at all Xaa locations
ASSMISSPPVTTINRAXAGMAATFTGLTSMAGSPTRNTNNDITYIASNSGRVHCMHVWPPDDKKNFETISYLPDLDDAQLAKEVKYLLRKGWIPCLEFELEHGFVFREHNKSPEYYDGHYCTMWKPPI

SEQ ID NO: 16042 - protein, 180 aa, Zea mays
MASSMLSSAAVGTSPAQATMVAPFTGLKSSAAFPVTRKANNDITSITSNGGRVSCMQVWPPIGKKKFETLSYLPDLTDAELAKEVDYLLRNKWIPCVEFELEHGFVYREHGNSPGYCDGRYWTMWKLPLFGCTDSAQVLKEVEECKKEYPNAFIRIIGFDNTRQVQCISFVAYKPPSFTG

SEQ ID NO: 16043 - protein, 1046 aa, Rhodopseudomonas palustris CGA009
MSVGKSGQETGASMVSPRRRPPSLVVGIGASAGGLAAFKTFFDNMPADTGMAFVLVQHLDPDHKSLLVELLRPHSAMPVVEAQDHDPLAPNQVYVIPPNATLSLEGDVLRVATPSPAREYRRPIDTFFASLAESQEDCAVGIILSGVGSDGSLGIKAIKEHGGFTLAQAEFDDTAMTGMPSSAAATGLVDRVASVESLPTKLLEHQAYLTKVEEQKGADGAREDVRGSLSAITAVLRRRLKHDFSGYKQNTLIRRIQRRMQVLQIESVTAYAEHLRKEPSEGDALFRELLIGVTQFFRDEDAFDSLKANFLPSLFTGRDADDPIRVWVAGCATGEEAYSIAIMLQELLGSHQHEAAVTIFATDIDPQAVAFARAARFRRIDGLSQERLQRWFVKDGDDYVPTHVIREMCVFSEHNLVRDPPFSRIDLITCRNVLIYMENDFQHRVMQTFHYALRPGGYLFIGPSESISRETGLFSIVDKKHRILQRRDGARASLPHFVPQAGAISSPQLPANRIEDQIDKSARRVMAKHSPAYFVVDRNHNIVRFSGGETGRYLEPSEGNASLDLFANLARSLRTQVRRAVETAFSSGRAVEEENLRLEGKPPVDLVVEPIIEVGHPPSLVVVAFRTTSQTRDLPQEAEISPANRRELEAIQQEFRALQIQHRATSEELESQIENMKSVTEEFQSVNEELQSSNEELETAKEEMQSVNEELQTINSELHGKNELLLQANNDLQNLLDNTQIATIFLDDDLTVRNFTPAAREVFSLRDGDRGRPVTEITSLLSYDKLCEDVRTVQRTLGVVESQLDLEDESATYIMRIRPYRTVANVISGVVITFSNITEQKQQHDHLQVLMGELQHRTNNVFAVILAIARQTVRNSASLETFEQQFGTRLLALAQANALLVDQEWKGVSLEKLIEAQLAPFIGGDSTRLELVGPPVTMAGATIQTIGLALHELATNASKYGSLSVPGGKVVVSWSFDEGGTSPESFRLEWREQDGPPVKPSDRKGFGHFVTKQMVTRSLNAKVDVDLAPEGLRWSMQMPANEARSG

SEQ ID NO: 16044 - protein, 531 aa, Sorghum bicolor
MATTATPQLLGGSVPQQWQTCLLVLLPVLLVSYYLLTSRSRNRSRSGKLGGAPRLPPGPAQLPILGNLHLLGPLPHKNLRELARRYGPVMQLRLGTVPTVVVSSAEAAREVLKVHDVDCCSRPASPGPKRLSYDLKNVGFAPYGEYWREMRKLFALELLSMRRVKAACYAREQEMDRLVADLDRAAASKASIVLNDHVFALTDGIIGTVAFGNIYASKQFAHKERFQHVLDDAMDMMASFSAEDFFPNAAGRLADRLSGFLARRERIFNELDVFFEKVIDQHMDPARPVPDNGGDLVDVLINLCKEHDGTLRFTRDHVKAIVLDTFIGAIDTSSVTILWAMSELMRKPQVLRKAQAEVRAAVGDDKPRVNSEDAAKIPYLKMVVKETLRLHPPATLLVPRETMRDTTICGYDVPANTRVFVNAWAIGRDPASWPAPDEFNPDRFVGSDVDYYGSHFELIPFGAGRRICPGLTMGETNVTFTLANLLYCYDWALPGAMKPEDVSMEETGALTFHRKTPLVVVPTKYKNRRAA

SEQ ID NO: 16045 - protein, 142 aa, Oryza sativa
MADDDYNDMDMGYEDEPPEPEIEEGAEEEPENNEDGPDEVVGAEAEDKEQEKTQRPRKTSKYMTKYERARILGTRALQISMNAPVMVELEGETDPLEIAMKELRARKIPFTIRRYLPDGSYEDWGVDELIVEDSWKRQVGGG

SEQ ID NO: 16046 - protein, 410 aa, Buchnera aphidicola str. Bp (Baizongia pistaciae)
MNIINIFIPDLPESVTDATIIKWHKKKGDKVQEDTILVDIETDKVILEIPSPSDGILNSIIADKGKIVLPGQVIGTLLKIGIKNEEKIIKTTNNVVNTDNNQNINLKLLEKTYSPTVRRLISMHDLRDVDIIQGTGTKNRLTRKDILNYLKNIRSNTNKKINNYDLNAYNFNTTHKNHRSIKRVKMTRLRKKISERLLSTKNNTASLTTFNEVNMQSILNLRRKYGELFKQKHGIKLGLMSFYVKAVIEALKIFPEINASIDNDEIIYYNYFDISIAISTPRGLVTPVLKNADLMSMAEIEIKIKDFSEKGKNSKLTIDDLIGGNFTITNGGVFGSLFSTPLINPPQSAILGMHAIHKRPVIVDENIEVHPMMYLALSYDHRLIDGKESVGFLLKIKEFLEDFSRIVLNI

SEQ ID NO: 16047 - protein, 320 aa, Buchnera aphidicola str. Bp (Baizongia pistaciae)
MIKRIGVLTSGGDAPGMNAAIRGVVRTALSRNLEVFGIYDGYLGLYENRMILLDRYSVSDIINKGGTFLGSARFSNFFKKDIRSIAIKNMQQRNIDFLVVIGGDGSYVGAQKLTEMGFPCISIPGTIDNDVAGTDYTIGYFTALETVVEAIDRLRDTSSSHQRISIVEVMGRNCGDLTLSAAIAGGCEFIVLPEIEFTKEELVKEIKNGIKKGKKHAIVAITEYICNVEKLAKYIQRETCRETRATILGHIQRGGAPVVYDRILASRMGEYSVDILLQGFQGRCIGTINEKMVHHDISDALKNMKRPFKFDWLKTAKQLY

SEQ ID NO: 16048 - protein, 246 aa, GIBBERELLA ZEAE PH-1
MSGLWAQVVTQYGTFKVEIIGSLAIQVLFWWVPSAGFVLLDRLAPSFAAKHKIQPAPKQPTSSEIFDAVLISFRNQLIITGLQVTPAILSTRSSAFQITPSLPSTKDFILHFLICLIAREILFYYAHRLLHLPYLYRRIHKIHHKFTAPVSFASQYAHPVEHIVANTIPIVLPPVLLQTHILTMWAFVSWQLIETATVHSGYDFFGGAAYRHDRHHERFNVHFGGMPWLDRLHGTDEIEGLVKKHN

SEQ ID NO: 16049 - protein, 242 aa, Euphorbia esula
TTIFSPEGRLYQVEYAMEAIGNAGTAIGILSKDGVVLVGEKKVTSKLLQTSTSTEKMYKIDDHVSCAVAGIMSDANILINTARVQAQRYYFSYQEPMPVEQLVQSLCDTKQGYTQFGGLRPFGVSFIFAGWDKNFGFQLYTSDPSGNYGGWKAAAIGANNQAAQFMLKQDYKDEITREEAVQLALKVLSKTMDSTSLTSDKLELAEVFLLPSGKVKYQVCSPETVSKLLVQYGVTQPSADAS

SEQ ID NO: 16050 - protein, 424 aa, Dechloromonas aromatica RCB
MAKPPRRKIRMKHVKKSAKLANVCYDIRGPVLQKAKQMEEEGHKIIKLNIGNLAAFGFDSPEEIQQDMIRNLPNAAGYTDSKGIFAARKAIMHYTQQKGIKGVTLEDIYVGNGVSELIVMAMNALLDAGDEVLVPAPDYPLWTAAISLSGGTPKHYLCDESKGWLPDLDDIRSKINAHTKAIVLINPNNPTGALYPDDLLYEIIDIARQHHLTIYADEVYDKVLYDDVKHTSIASLAEDVLMITFNGLSKNYRSCGYRAGWMVVSGDKRHAKDYIEGLDMLASMRLCANAPGQHGIQTALGGYQSINDLIKDGGRLRRQRDIAHELITAIPGVTCVKPKAALYMFPRLDPKIYPIKNDQQFISELLQEEKVLLVQGTGFNWPHPDHFRLVFLPHEDDLREAVARIARFLENYRKRHNTNQLIKD

SEQ ID NO: 16051 - protein, 497 aa, Zea mays
  unsure (1)..(497): unsure at all Xaa locations
CIRSSDLIDALDLRDSSFLQHRPSSGSNSSFWTTNSGAPVWNNNSALTVGQRGPILLEDYHLIEKLAQFDRERIPERVVHARGASAKGFFEVTHDVSHLTCADFLRAPGVQTPVIVRFSTVVHERGSPETLRDPRGFAVKFYTREGNFDLVGNNMPVFFIRDGMKFPDMVHAFKPNPKTNLQENWRIVDFFSHHPESLHMFTFLFDDVGIPLXTYTLINRDGKPHLVKFHWKPTCGVKCLLDNEAVTVGGTCHSHATKDLYDSIAAGNYPEWKLYIQTIDLDHEDKFDFDPLDVTKTWPEDIIPLQPVGRMVLNKNVDNFFAENEQIAFCPAIIVPGIHYSDDKLLQTRIFSYADTQRHRLGPNYLMLPVNAPKCAHHNNHHDGFMNFMHRDEEVNYFPSRFDPARHAEKVPIPPRVLTGCREKCIIQKENNFKQAGERYRSFDPARQDRFIQRWVDALTDPRVTHEHRTIWISYWSQCDAALGQKLASRLNLKPSM

SEQ ID NO: 16052 - protein, 162 aa, Triticum aestivum
  unsure (1)..(162): unsure at all Xaa locations
MAPTVMASSATSVAPFQGLKSTAGLPVSRRSNGASLGSVSNGGRIRCMQVWPIXGIKKFETLSYLPPLXTEALLKQVDYLIRSKWVPCLELTXLGYLXXEXNASPGXTKGRXGTMWKLPMFGCTDATXVXXEVEEVKKXYXPYVRIXXFXICXKVXCVSSSL

SEQ ID NO: 16053 - protein, 554 aa, Mycobacterium avium subsp. paratuberculosis str. k10
MTSVHTLPDITATPAWDALRKHHDRIGDTHLRQFFEEDPDRGRELTVTVGDLYIDYSKHRVTRETLRLLVDLARTAKLEERRDQMFAGVHINTSEDRAVLHTALRLPRDAELIVDGRNVVADVHEVLDAMGEFTDRLRSGEWTGATGKRISTVVNIGIGGSDLGPVMVYQALRHYADAGISARFVSNVDPADLIATLADLDPATTLFIVASKTFSTLETLTNATAARRWITDALGDAAVAHHFVAVSTNKRLVDDFGINTDNMFGFWDWVGGRYSVDSAIGLSVMAVIGREAFADFLSGFHIVDRHFQTAPLESNAPVLLGLIGLWYSNFMGAQSRAVLPYSNDLARFAAYLQQLTMESNGKSTRADGSPVTTDTGEIFWGEPGTNGQHAFYQLLHQGTRLVPADFIGFSQPIDDLPTAEGSGSMHDLLMSNFFAQTQVLAFGKTAEEIAAEGTPADIVPHKVMPGNRPSTSILANRLTPSVLGQLIALYEHQVFTEGVIWGIDSFDQWGVELGKTQAKALLPVITANNSPAPQSDSSTDALVRRYRSERGRTS

SEQ ID NO: 16054 - protein, 389 aa, Methanosarcina mazei Goe1
MTFPMYSDRINALPPYLFAAIDEARDELIAKGVDVIDLGVGDPDLPTHPHIVEAMQKAVCDPGTHQYPSYAGMPEFRKAAAEWCRKYKGIEIDPATEVLSLIGSKEAVAHIPLAFVNPGDVVLYTEPGYPVYKIGTLFAGGEPYPLPLKAENSFLPDLDSIPEDVLKKSRLFFFNYPNNPTAATADMAFFEKVVKFCKKHDIIAVHDNAYCQMAYDGYEAPSFLAAEGAMDIGMELYSHSKTYNMTGWRLGFAVGNKDLIKGLGKVKSNVDSGVFDAIQIAGIAALSSPQDCVNETNKIYEERRNALIEGLTAMGLEVKPPKATFYIWAPVPKGFTSISFAKLLLEEAGIVATPGVGFGDAGEGYIRFALTKPVERIKEAVERMKKLQL

SEQ ID NO: 16055 - protein, 506 aa, Zea mays
MSFRDQESGGEDGGRTSSASDLRKPLINTGSWYRMPPAGGVMGSRQSSLMERLGSSAFSLRDVAISATLCTLIVALGPIQFGFTCGYSSPTQDAIIADLGLSLSEFSLFGSLSNVGAMVGAISSGQLAEYIGRKGSLMIAAIPNIIGWLAISFAKDSSFLFMGRLLEGFGVGVISYTVPVYIAEIAPQDQRGALGSVNQLSVTIGILLAYLFGMFVPWRILAVLGILPCSILIPGLFFVPESPRWLAKMGKMEDFEYSLQVLRGFQTDITAEVNEIKRSLASSRRRTTIRFADIKQKRYSVPLVIGIGLLVLQQLSGVNGILFYAASIFKAAGITNSNLATFGLGAVQVIATGVTTWLTDKAGRRLLLIISTTGMVITLVIVSVSFFVKDNIAAGSHLYSVMSMLSLAGLVAFVIAFSLGLGAIPWIIMSEILPVNIKSLAGSVATLANWLTAWAITMTASLMLNWSSGGTFAIYAVVSTMALIFVCLWVPETKGRTLEEIAFSFR

SEQ ID NO: 16056 - protein, 145 aa, Triticum aestivum
AESYCIVHDYQCTIKSTFCLVKAGAVNPLVKILEGEEREADGAVLEALATLVQDEIWENGSRAIEKASGVHALLRVAEAGELTSQDKAIWILERFFRLEEHREQYGGIAQALLIDLAQKGDPVLKPMIGRILAHLQLLQTQSSYF

SEQ ID NO: 16057 - protein, 1025 aa, Bordetella bronchiseptica RB50
MKPIFRIEHPFGSLPARAARGGLLLAGALACCAAAHAELLGVDGGGPSGGAGASGPGLAGQPGSGPAPGLGGDRTTPVPGGNGGAGGGAGAAGGSGESTHYGGGGGGSDSGGGGGALVYEMAGGAAGGNGGGVAQALSVGADLQSSRGGAGDDGGAPSYGTEPGGGGGGGGSGAAVLAGGGYRALGAAIVGGRGGAGGAGFESGGGGGGGHGIRVDAADVRIDLFATQVAGGQGGDGGAGSGGSGGGGDGGHGLAGAANDLRLRVGADSSLRGGDGGATWPVTHRAGAGGAGGAGLFVSASRWQVETAGLIQGGNGARGEASRELDGGDGGAGGAGIALAGDTGRLVNRGEIRGGSGATGGTSERAAPGAAGAGGAGVRIAGNGNRLVNAGRIAGGLSADGQQADAVRIDGAGNTFELRAGSVLQGNAVATGGANVLALGGAQPGVFDVSALVAGAPAAWSGVARYGGFTAYEKTGTGSWRLTGGNAAALSWTVRAGRLAVDAEMAGSAMTVAAGGTLGGTGTVGDTTVRAGGALAPGNSIGTLRVAGDLVFEPGSRFEVEADPAGTASDRVTVSGTADIRGGTVLHVGPEGGFEARQRYVILTAGRRLGQFDAVGSGYAYLAPALSYDATSVALTLQRRGAAGSGELAFADLADTANQRATARAAETLPAAHPVYRAIETLPEGAPPAAFDALSGEVHASTRSALLTGARQAQQVNLGRLRDHLGLAWQAGAPMAASGSAPGAAALPGALSPAWAEVVGAWQRLDGDGNAAQVRQHVGGLFVGADTALANGWRVGGSLGFTDGRIEVDARASQTDVASYTAALYGGRAWDTGAGRLNLLAGAAYTWHDIASERRVDVGDLRQELTADYGASTTQLFTELSYAMPLGMTAELEPFAGLAWNQLRVRGFTETGGSAALSGASSRDDMATTTLGARVAVPLGAGATLRAMAGWRHAFGDRTPQSTLAFGQGSAFEVAGAPIARDAALLGVGAGIEVAHNAFLDVAYAGEFGGGNRQHTANAVLRWRF

SEQ ID NO: 16058 - protein, 220 aa, Triticum aestivum
MARFQETKPDLLNSGSDTRMMAEARLPKARKPYMITKQREKWTEEEHKLFLEAMQLHGRAWRRIQEHIGTKTAVQIRSHAQKFFSKVTRDSSGDSGGSSSGAGPPIQIPPPRPKRKSVHPYPCNLRSAQPGKHAHAALLRVDKPQLSMCEQGNGSPTSVVTTSQIGLGSESFDSDTSTIDVEERCPTPSTGTAEVAVQAPPTNDAKKSKGSSSTSEEVGL

SEQ ID NO: 16059 - protein, 393 aa, Desulfovibrio vulgaris subsp. vulgaris str. Hildenborough
MAVIKMTDLDLKGKRVLLREDLNVPLKEGRITSDKRIRAALPSIRMAMEAGARVLIVSHLGRPVEGEFDEAFSLAPVAAHLSRELGRDVRLVKDYIDGVDVAEGDCVLCENVRFLKGEKKNTEELGRRLAALCDIFVMDAFGAAHRAQASTHAVARFAPVACAGPLLAAELDALERALDAPKHPLVGIIGGSKVSTKLTLLDNLSHRVDRLIVGGGIANNFIKAAGYEVGKSLYEPELVEEAARLMAAARAAGGEIPVPLDVVVGPELADGAPATVRKVSEVGPDEMILDIGPATATRYREILLAAGTIVWNGPVGAFEWEQFGAGTRALCEAVADSPAFSIAGGGDTVAAVEKYGVASRVGYISTGGGAFLEFLEGKELPAVAILQERAAQS

SEQ ID NO: 16060 - protein, 380 aa, Triticum aestivum
  unsure (1)..(380): unsure at all Xaa locations
RGPPGAFPGHTTSNHNKITSKVPRAQIPPRRRRLPARRPPSPILVFMSKVDGKFQFSPISVNFLTEVAKVIFAIVMLIIQSRKQKVGEKPLLARSTLIQAARNNVLLAVPALXYAINNYLKFIMQLYFNPXTVKMLSNLKVLVIAVLLKFIMRRRFSVIQWEALALLLIGISINQLRTAPAGDTAFGLPITAIAYIYTLXFFETVNCXVTVPSLASVYNEYAMKSQDTSIYLQNLFLYGYGAIFNFLGILGTALFQGPENFNILQGHSRATMFLICNXAAQGILSSFFFKYADTILKKYSSTVAIIFTGLASAAFLGHTLTINFLLGISVVFISMHQFFSPIAKVKGDKPGELLELQDTQNHRSSDSSFVNMTAGAAXDA

SEQ ID NO: 16061 - protein, 356 aa, Streptomyces antibioticus
MKALVLAGGSGTRLRPITHTSAKQLVAVANKPVLFYGLEAIAAAGITDVGLIVGDTAGEVRAAVGDGAKFGLDITYIEQSRPLGLAHAVLIAHTYLGDDDFVMYLGDNFIVGGIDDLVRTFRDGRPPAARILLTHVSDPSAFGVAELDDDGRVVGLEEKPRHPKSDLALVGVYFFTPAIHEAVRAIEPSWRGELEITHAIQHLIDNGADIQSMVIEGYWKDTGNVADMLEVNRTVLEDLEPRIEGTVDEHTVVIGRVVVGEGARVTNSRIMGPAIIGAGAEISDSYIGPFTSVGDNCRITGSEMEFSIMLAESAITGVRRIEGSLIGRNVQVTQSLHAPNAHRFVLGDHSKVEIQS

SEQ ID NO: 16062 - protein, 391 aa, Corynebacterium crenatum
MSTLETWPQVIINTYGTPPVELVSGKGATVTDEQGNVYIDLLAGIAVNALGHAHPAIIEAVTNQIGQLGHVSNLFASRPVVEVAEELIKRFSLDDATLAAQTRVFFCNSGAEANEAAFKIARLTGRSRILAAVHGFHGRTMGSLALTGQPDKREAFLPMPSGVEFYPYGDTDYLRKMVETNPTDVAAIFLEPIQGETGVVPAPEGFLRAVRELCDEYGILMITDEVQTGVGRTGDFFAHQHDGVVPDVVTMAKGLGGGLPIGACLATGRAAELMTPGKHGTTFGGNPVACAAAKAVLSVVDDAFCAEVTRKGELFKELLAKVDGVVDVRGRGLMLGMVLERDVAKQAVLDGFKHGVILNAPADNIIRLTPPLVITDEEIADAVKAIAETIA

SEQ ID NO: 16063 - protein, 246 aa, Oryza sativa
MAHRVDNEYDYLFKIVLIGDSGVGKSNILSRFTRNEFCLESKSTIGVEFATRTLQIHRYRATEIVQVDPVQKYFRRRVTFWGGRKGIEGQTIKAQIWDTAGQERYRAITSAYYRGAVGALLVYDITKKQTFENIQRWLRELRDHADSNIVIMMVGNKSDLNHLRSVPEEDGQALAEKEGLSFLETSALEALNVEKAFQTILKDIHQIISKKALAAQEAAGSGPPTQGTTINVTDSAVNTKRGCCSS

SEQ ID NO: 16064 - protein, 107 aa, Zea mays
  unsure (1)..(107): unsure at all Xaa locations
VVAGYKNGKPFLGYTDLLGSNFIDETMATGYGAYLAQHILRKFVDEKGGVDNISXANAKDLLEKCIKVLYYIYAKSFNKMQLATVSDSGITISEPYSLPTECTFKGF

SEQ ID NO: 16065 - protein, 218 aa, Eustoma grandiflorum
MGRGKIDIKRIENNTNRQVTFCKRRNGLLKKAYELSVLCDAEVALIIFSSRGRVYEYANNNIKSTIDRYRKATSDASTVFTTQEINAQFYQQESKKLRQQIQVLQNSNRHLMGEGLSSLNVKELKQLESRLERGISRTRSKKHEMILAEVEYLQKREIQLEQENACIRSKIAEQERLQELSMMPPGQDYNAMQAYLAQNFMQVNGLMEGPPVYSMLHK

SEQ ID NO: 16066 - protein, 764 aa, Rhodobacter sphaeroides f. sp. denitrificans
  unsure (1)..(764): unsure at all Xaa locations
GCHWGVFKARVENGRAVAFEPWDKDPAPSHQLPGVLDSIYSPTRIKYPMVRREFLEKGVNADRSTRGNGDFVRVTWDEALDLVARELKRVQESYGPTGTFGGSYGWXSPGRLHNCQVLMRRALNLAGGFVNSVGXYSTAGAQIIMPYVMGXLEVYEQQTAWPVVVENTDLMVFWAADPMKTNEIGWVIPDHGAYAGMKALKEKGTRVICINPVRTETADYFGADVVSPRPQTDVALMLGMAHTLYSEDLHDKDFLENCTTGFDLFAAYLTGESDGTPKTAEWAAEICGLPAEQIRELARSFVAGRTMLAAGWSIQRMHMAQQAHWMLVTLASMIGQIGLPGGGFGLSYHYSNGGSPTSDGPALGGISDGAKAVEXGAACLSESGATSIPCARVVDMLLNPGGEFQFNGATATYPDVKLAYWAGGNPFAHHQDRNRMLKAWEKLETFIVQDFQWTATARHADIVLPATTSYERNDIESVGDYSNRAILAMKKVVDPLYEARSDYDIFAALAERLGKGAEFTEGRDEMGWISSFYEAAVKQAEFKNVAMPSFEDFWSEGIVEFPITEGANFVRYADFREDPLFNPLGTPSGLIEIYSKNIEKMGYDDCPAHPTWMEPAERLGGAGAKYPLHVVASHPKSRLHSQLTGTSLRDLYAVVGHEPCLINPADAAARGIADGDVLRVFNDRGQILVGTKVSDAVIPGAIQIYEGGWYDPLDPSEEGTLDKYGDVNVLSLDVGTSKLAQDNCGQTILADVEKYAGAPVTVTV

SEQ ID NO: 16067 - protein, 391 aa, ASPERGILLUS NIDULANS FGSC A4
MGANAKAQSWLHKLEEQGMLCAFHEEGTGSLTNQTMPVNVDVDAMDPDFIKSLPITPHDMTSNQIHVHGQISEPKNRQLLLDVAREYKDRSWVDVYTRVAVLLCKKNINLISGRVLLQILPSYAYDRDKVLSHARLYAKEFESVEITKDRFCIKIPSTGPALSVCSTLEAEGIRTLGTAVFSLPQAIAASQAGCLYISPYFNEIRANFNLSLWPNVEDPATQHTMSARLMQMLEMYRKLYKETGKTQPLIKNANFISPKEALAQGEFGVDSATVSAEVLSQLANIPYDVSVRPSGIVDIPKPQYPEHQNSVSSTPKRLQHLATTDPLAAADWDGSIASTDVDYLKHNGAELEKAIKADPIASARISDALDVFLKVEGESRELIEGVMKELA

SEQ ID NO: 16068 - protein, 178 aa, Bdellovibrio bacteriovorus HD100
MTMTNLSLKPYITEEQIQQKVKELGATLSKKYKNEKVVAICVLKGSFMFYSDLVRNIEADITCEFFGVASYHGGTSSSGEVKVTLDLAGPVENCHVILVEDIVDTGLTMNYLKNAIQSRKPKSLTTVALLEKPDALKVKCDIDHVGFKIANDFVVGYGLDYQGYYRNLPYIAQVQNFQ

SEQ ID NO: 16069 - protein, 136 aa, Pisum sativum
NTDITSNGERVKCMQVWPPIGKKKFETLSYLPPLTRDQLLKEVEYLLRKGWVPCLEFELLKGFVYGEHNKSPRYYDGRYWTMWKLPMFGTTDPAQVVKEVDEVVAAYPEAFVRVIGFNNVRQVQCISFIAHTPESY

SEQ ID NO: 16070 - protein, 323 aa, ASPERGILLUS NIDULANS FGSC A4
MENYQKIEKIGEGTYGVVYKARELTHPNRIVALKKIRLEAEDEGVPSTAIREISLLKEMNDPNIVRLLNIVHADGHKLYLVFEFLDLDLKKYMEALPVSEGGRGRALPDGSTLSRNLGLGDAMVKKFMAQLIEGIRFCHSHRVLHRDLKPQNLLIDRDGNLKLADFGLARAFGVPLRTYTHEVVTLWYRSPEILLGGRQYSTGVDMWSCGAIFAEMCTRKPLFPGDSEIDEIFKIFRILGTPDETIWPGVTSFPDFKPTFPKWKREDIQNVVPGLEEDGLDLLEALLEYDPARRISAKQACMHPYFQHGSSYYSGRARRNGFH

SEQ ID NO: 16071 - protein, 635 aa, Dechloromonas aromatica RCB
MCGITGIFDTRSKRDIDRAVLHRMNESQIHRGPDEGGTHVEPGVGLGHRRLSIIDLSTGQQPLYNEDNSVCVVFNGEIYNYQELIPELQALGHVFHTRSDTEVIVHAWEAWGESCVDRFRGMFAFALWDRNRETLFLARDRLGVKPLFYALLDDGTFLFGSELKSLLAHGGLKRDIDPCAVEEYFALGYVAEPRSIFKQALKLPPASTLLVRRGQPVGTPREYWDVRFTLDNPISDADAQAELTHRLEESIKLRMISEVPLGAFLSGGVDSSAVVALMAGLSQKPVNTCSIGFSDPAFNESEFAKMVADRYQTNHHLDIVESDDFDLIDTLARLYDEPYADSSAIPTYRVCQLARKHVTVALSGDGGDESFGGYRRYRLHMMEEKMRSALPLGLRRPLFGALGKLYPKADWAPRVFRAKTTFEGMARNSVEAYFHSVSILRAPMRDRLFSTQFKSALSGYDALKVFTDHAAKADTTDPLALIQYLDLKTYLIGDINTKVDRASMAHSLEVREPLMDHKLVEWLATLPSTLKIRGQEGKYLLKKSMEPHLPNDVLYRPKMGFSVPLARWFRGPLKTRVQESILGSRLADTGWFNRDYLQKLVTDHNNGSRDYSASIWTILMFEAFLRNVMEQGEAA

SEQ ID NO: 16072 - protein, 460 aa, Triticum aestivum
  unsure (1)..(460): unsure at all Xaa locations
MNSLQSFLAVAPVKPAAAAARLPSSRRARVSACLATPAPAPTAXRRPPSARRELSAASRAVMADEAKYIVGTYKRAQVVFVAGRGCKLYDIDGREYLDMAAGIAVNALGHGDPDVDAAAADQRGRLVHASNVGYTVPQVELAKRLVEASFADRAFFANSGTEANEAAIKFARKYQRVAHPNGDAPTEFMSFTNCFHGRTIGSLALTSKVQYREPFEPVMPGSTFVEYGNLEEAKKVIQSGKIAAVFVEPVQGEGGIHSATKEFLQGLRDACDEAGALLVFDEVQCGLGRTGYLWAHEVYGVVPDIMTLAKPLANGLPIGVALVTEKVAAAINYGDHGTTFGGGPFVCHAALATLDKIQKPGFLAEVTRKGEYFKQLLKAKLSGNPHVKEIRGAGLIVGIELDVPAGPLVDACLNAGVFLLTAGKGNVVRLVPALIVSEKELEQAAEAIRECLPALDASTS

SEQ ID NO: 16073 - protein, 553 aa, GIBBERELLA ZEAE PH-1
MGVQTVEFKPFQDQKPGTSGLRKKVVVFQQPHYSEAFITSILLSIPEGVEGSNLVIGGDGRYFNPEAIQLIAKIGAAYGVKKLIIGQNGILSTPAASHVIRIRKATGGILLTASHNPGGPKNDFGIKYNLANGGPAPESVTNKIYEFSKTLTSYKIADIPDVDITTVGTQTYGALEVEVIDSTADYVAMLKDIFDFDLIKKFFSSHPDFKVLFDGLHGVTGPYGKAIFEQELGLSNSTQNCIPSPDFNGGHPDPNLTYAHSLVEVVDKHNIPFGAASDGDGDRNMIYGANAFVSPGDSLAIIAHYAHLIPYFKKNGVNGLARSMPTSGAVDLVAKAQGLDCYEVPTGWKFFCALFDAKKLSICGEESFGTGSDHIREKDGLWAVIAWLNIIAGVGIQNPEVTPSIKEIQKEFWTKYGRTFFTRYDYEDVDSEGANKVIGELEKLVADSNFVGSTIEGRKVTKAGNFSYTDLDGSVASKQGLYAGFSSGSRIVVRLSGTGSSGATIRLYIEQHTSDPSKYELDAQDFLKEEVKFATELLKFKEHVGRDEPDVKT

SEQ ID NO: 16074 - protein, 633 aa, Magnaporthe grisea 70-15
MSGTGSRQPLDASAGRDVVYCHACENEWFQDQNGLVCPQCHSEATEIVTPENDPRPVNTHDSRTEPQGHRDRYDDSDPEEEDIEEHSHRAPGGIYFTSRVFRMPVNHGAGTESPHVHPSDGNAVMERFYEMMNRDMGSSAAPGASNSDGTRSATGQGASENSGTRHYTTRTTMFPGGSTSFTITTAPLQRDGNNPPIGEFDAYADPHPRTRRRIVIVMLDSRGADSNASILSTIMGNITNPVGNTPHRGGETSSNDEASGLPPHGFPIAFQQLLGALMTGYGGTRNWGDVVTSQEEFDRIISQMMEANPMSNAAPPASEAAIEKLERKKLDEKMLGTDETVECTICMDDLSLGDEATVLPCKHFFHGECVTIWLKEHNTCPICRTPMEQRSSAERTQAPQNQSSSGPRAARPEPPRGIFPWAFQPSGSGTGSFVNSSSQRPSQSSQQSPIDIQQNDSGHTSHRRELLRSPSTNEERLRAIRDLANSDRHGGSDRPTTPPFAGRRRNSLSPPSPSMQAPWNLSYDPVHDFTSASRDRTRERDGDRSNSQSSSRFTSTNRDQEGHRDRERYRQQTYESSQPPSREQRDQERNDDNGSRRGDPNQTSSGSTFDPFSWIRDRLPGGGNSSGDSHRRG

SEQ ID NO: 16075 - protein, 175 aa, Fusobacterium nucleatum subsp. nucleatum ATCC 25586
MNYRIENLIDKEAVEKRIKELAREIEKDYAGEEVYCVGLLKGSVIFLSDLVKEINIPVIIDFMSVSSYGSETVSSGDVKILKDTDLDLRGKHVLIVEDIIDTGLTLEYVIKYFKEGKGVKSLRTCTLLNKPERRKVDVKVDYIGFDVPDKFVIGYGLDYDQKYRNLPYIAVVIPE

SEQ ID NO: 16076 - protein, 394 aa, Bradyrhizobium japonicum USDA 110
MDSSHPSQQQAETRLVTSGRDTKAQKGFVNPPVFHGSTVLYPTAEDLHAHRGEFTYGRHGTPTTRAFQDTLMALEGPQCAGVGIVPSGLSAISTTLLSVLKTGDHILVCDNVYRPSRNFCNGMLARYGVETTYFDPLIGAGIDKLFKPNTRAVLVEAPGSQSFEMPDIRAIAEVAHARDALVIDDNTWATPLYHRSLEQGVDISMQAATKYIGGHSDIMFGTISANAKAWPQIAEGIRLLGVCAGPDDVFLALRGLRTLSVRLAQHHRSGLDMARWLASRPEVARVLHPGLETDPGHAIWKRDFTGASGLFSIVLKPAPQKAVDTMLNTLKLFGMGFSWGGFESLAIPFDCDGYRTATKWAPGGPTLRLHIGLESTDDLKADLDRGFAALKTAM

SEQ ID NO: 16077 - protein, 647 aa, Zea mays
  unsure (1)..(647): unsure at all Xaa locations
MASISGAAAPPSSAVCRLRLRRHLLLRPSHLRLRAPHSIADLSRSSNSAPSPARPALGSGPENGSGGVRAVEKDPIKLWERYVEWLYQHKELGIFVDVSRMGFTEEFLRQMEPRMQQAFVDMRELEKGAIANPDEGRMVGHYWLRDPALAPNSFLRNKIETALDRILAFSQDVISGKILSPSGRFTSILSIGIGGSALGPQFVAEALAPDNPPLKIRFIDNTDPAGIDHQIAQLGPELATTLVIVISKSGGTPETRNGLLEVQKAFRDAGLQFSKQGVAITQENSLLDNTARIEGWLARFPMFDWVGGRTSEMSAVGLLPAALQGIDIKEMLVGAALMDEETRNTVVSHYXITRTTCSDGMIIYIVSCQTCLSFYXQVKANPAALLALCWYWASEGIGKKDMVVLPYKDSLLLLSRYLQQLVMESLGKEFDLDGNRVNQGLTVYGNKGSTDQHAYIQQLREGVHNFFVTFIEVLRDRPAGHDWELEPGVTCGDYLFGMLQGTRSALYANDRESISVTVQEVTPRAVGALIALYERAVGIYASLVNINAYHQPGVEAGKKAAGEVLALQKRVLTVLKEAICENPTEPLTLDEIADRCHCPEDIEMIYKIIQHMAANDRALIAEGSCGSPRSVKVYLGECSVDEDMQAA

SEQ ID NO: 16078 - protein, 540 aa, Corynebacterium glutamicum ATCC 13032
MADISTTQVWQDLTDHYSNFQATTLRELFKEENRAEKYTFSAAGLHVDLSKNLLDDATLTKLLALTEESGLRERIDAMFAGEHLNNTEDRAVLHTALRLPAEADLSVDGQDVAADVHEVLGRMRDFATALRSGNWLGHTGHTIKKIVNIGIGGSDLGPAMATKALRAYATAGISAEFVSNVDPADLVSVLEDLDAESTLFVIASKTFTTQETLSNARAARAWLVEKLGEEAVAKHFVAVSTNAEKVAEFGIDTDNMFGFWDWVGGRYSVDSAVGLSLMAVIGPRDFMRFLGGFHAMDEHFRTTKFEENVPILMALLGVWYSDFYGAETHAVLPYSEDLSRFAAYLQQLTMESNGKSVHRDGSPVSTGTGEIYWGEPGTNGQHAFFQLIHQGTRLVPADFIGFARPKQDLPAGERTMHDLLMSNFFAQTKVLAFGKNAEEIAAEGVAPELVNHKVMPGNRPTTTILAEELTPSILGALIALYEHIVMVQGVIWDINSFDQWGVELGKQQANDLAPAVSGEEDVDSGDSSTDSLIKWYRANR

SEQ ID NO: 16079 - protein, 329 aa, Deinococcus radiodurans
MAYPNPAGIKRVAVLTSGGDAPGMNAAIRAVVRTGAQQGIEVVGVRRGFSGLHRGEVQLLGPRDVANTIQRGGTILLTARSHTWRSPEGRAKGAAVLREWGVDGLVVIGGDGSFHGGYFLQEEHGIPVIGVPGTIDNDLYGTDHTIGYFTAVETALEAVDKLRDTGASHERIFVIEVMGRHAGHIALDVAVAGGAEEVFIPEDKKPIGDVVNIVKDSIAKGKRGSIIIVAEGYDGGAEAVAQAIHAGTGLETRVSILGHIQRGGTPVSSDRILASRLGEAAVYALMDGKKGVMVGRIGGGIAYTPLHETWEKRKDVSRDLYRCAKMLSI

SEQ ID NO: 16080 - protein, 232 aa, Lilium longiflorum
MGRGKIEIKRIENTTNRQVTFCKRRNGLLKKAYELSVLCDAEVALIVFSSRGRVYEYSNNSIKQTIDRYKKACDSSNSNSLIQVNSQQYFQQESAKLRHQIQILTNANRHLVGEALSSLTVKELKQLENRLERGLTRIRSKKHELLFAEIEFSQKREVELQSDNMYLRAKIAENERTQAAIVQARAEFDALPTFDSRNFYQVNNMLEAPPHYHHQDQTALHLGYEAKDDSVP

SEQ ID NO: 16081 - protein, 208 aa, Zea mays
RERDHMPGPCYGDRLRGGGGCLCVRREAVDWIWKAYTHHRFRPLTAYLAVNYLDRFLSLSEVPDCKDWMTQLLAVACVSLAAKMEETAVPQCLDLQEVGDARSVFEAKTVQRMELLVLTTLNWRMHAVTPFSYVDYFLNKLNNGGSTAPRSCWLLQSAELILRAARGTGCVGFRPSEIAAAVAAAVAGDVDDADADGVENACCAHVDK

SEQ ID NO: 16082 - protein, 337 aa, Zea mays
  unsure (1)..(337): unsure at all Xaa locations
PSTRRRRHHSGGDGGRRYPGEKARPSPRPGALLCRRAAPSSYAASTVVQALMRPPVLPRMSCSTLGGASSAVVEQGSGGAPVFTAGQHVSISITVPYGAGLPTYSVAPAPLTVARPPEVSAAEGASLPTAASTALQQLKAAGVSSFDGGSGSGADSDGPKNVLVTAGGGGHGHYAVQLAKLAGLRVTATXGARNLGLVAGLGADWTTNSKTPEGARLLSPSGTRYDAVAHCATGTPWSVFAPVLADRATVVDVTPGVAAAAKSFLQKVTFSRKRLVPLVLIPKKEEMEWLVEMTRQGKLRTVVDSRYSLSRAQEAWAKSIDGHATGKIVVEMGGAAE

SEQ ID NO: 16083 - protein, 242 aa, Vitis vinifera
MGRGRVELKRIENKINRQVTFAKRRNGLLKKAYELSVLCDAEVALIIFSNRGKLYEFCSSSSMLKTLERYQKCNYGAPETNVSTREALELSSQQEYLKLKARYEALQLSQRNLLGEDLGPLSTKELESLERQLDVSLKQIRSTRTQYMLDQLTDLQRKEHMLNEANKTLKQRLLEGTQVNQLQWNPNAQDVGYGRQQAQPQGDGFFHPLECEPTLQIGYQPDPITVAAAGPSVNNYMPGWLP

SEQ ID NO: 16084 - protein, 287 aa, Arabidopsis thaliana
MGRPPCCDKIGIKKGPWTPEEDIILVSYIQEHGPGNWRSVPTNTGHYLFSTWLLRCSKSCRLRWTNYLRPGIKRGNFTPHEEGMIIHLQALLGNKWASIASYLPQRTDNDIKNYWNTHLKKKLNKSDSDERSRSENIALQTSSTRNTINHRSTYASSTENISRLLEGWMRASPKSSTSTTFLEHKMQNRTNNFIDHHSDQFPYEQLQGSWEEGHSKGINGDDDQGIKNSENNNGDDVHHEDGDHEDDDDHNATPPLTFIEKWLLEETSTTGGQMEEMSHLMELSNML

SEQ ID NO: 16085 - protein, 399 aa, Mycobacterium abscessus
MPGDHPGQFARPPCAVGTTTSEASLDRRDFNMKTRAAVLWGLEQKWEVEEVDLDPPGPGEVLVRLAATGLCHSDEHLVTGDLPIPLPVVGGHEGAGTVVECGEGVEDLSEGDSVILTFLPSCGRCSYCARGMGNLCELGAALMMGPQIDGTYRFHARGEDVGQMCLLGTFSEYTVVPQASVVKIDGGIPLDRAALIGCGVTTGYGSAVRTGEVRAGDTVVVVGAGGIGMNAIQGARIAGALAIVAVDPVNFKREQASGFGATHTAASMDEAWSLVSDMTRGKLADVCILTTDVAEGSYTAEALALVGKRGRVVVTAIGHPDESSISGSLLEMTLYEKQIRGALYGSSNAPHDIPRLVELYSAGLLKLDELVTREYSLDQINEGYQDMRSGRNIRGLVRF

SEQ ID NO: 16086 - protein, 163 aa, Escherichia coli
IDDASADPLRYNLAAMIARFNETGRSQVLAKRMPGDLSEYSVIQTKEPLDREGKVSRIVEFIEKPDQPQTLDSDIMAVGRYVLSADIWPELERTQPGAWGRIQLTDAIAELAKKQSVDAMLMTGDSYDCGKKMGYMQAFVKYGLRNLKEGAKFRKGIEKLLSE

SEQ ID NO: 16087 - protein, 403 aa, Pseudomonas syringae pv. tomato str. DC3000
MQFNKSNKLANVCYDIRGPVLKHAKRLEEEGHRILKLNIGNPAPFGFEAPDEILQDVIRNLPTAQGYSDSKGLFSARKAVMQYYQQKQVEGVGIEDIYLGNGVSELIVMSMQALLNNGDEVLVPAPDYPLWTAAVALSGGSPVHYLCDEQANWWPDLEDIKAKITPNTKAMVIINPNNPTGAVYSREVLLGMLELARQHNLVVFSDEIYDKILYDDAVHICTASLAPDLLCLTFNGLSKSYRVAGFRSGWIAISGPKHNAQSYIEGIDILANMRLCANVPSQHAIQTALGGYQSINDLILPPGRLLEQRNRTWELLNDIPGVSCVKPMGALYAFPRIDPKVCPIFNDEKFVLDLLLSEKLLVVQGTAFNWPYPDHFRVVTLPRVDELEQAIGRIGNFLKGYRQ

SEQ ID NO: 16088 - protein, 161 aa, Pseudomonas syringae pv. tomato str. DC3000
MSENLLNIPVTTIKGEQKTLADFAGKAVLVVNTASKCGFTPQYKGLEKLWQDYKDQGLVVLGFPCNQFGKQEPGDEGAISGFCELNYGVSFPLFKKVDVNGDQAHPLFVQLKEQAPGLLGTERIKWNFTKFLIGQDGKLVKRFAPLTKPEELTDEIEALLR

SEQ ID NO: 16089 - protein, 385 aa, Triticum aestivum
PRVRSAMLVSATVIIYVQSNVNWAIGLGIPTALMFLACVLFFMGTRLYVRVVPEGSPFTTIVQVFAAAFAKRSLKQAKDPKQDLFDPPHTSAIVTKLAHTDQFRCLDKAAMVASPEEVRSGGAAAADPWRLCTVQQVEEVKCLIRIVPVWSTGIIYYVAVVQQSTYVVFSALQSDRRLGSSFHVPAASFTVFAMLAQTLWIPIYDRLLVPRLRKVTGKDEGFTLLQRQGIGIALSTVAMIISAVVEDRRRDIALNQPTIGTTQTGGGISAMSSFWMVPQLMILGLSEAFNLISQIEFYYKEIPEHMRSVAGALAFCNLALGNYLSGFLTTIVHRTTGGGQNWLAQDLNKGRLDLFYWMIAGIGVFNFVYFMICARWYRFKGTRDA

SEQ ID NO: 16090 - protein, 271 aa, Sporobolus stapfianus
NEVEEEGEEFAAYCRRGKGRRRVEMEDRHVAKVALGGDPKAALFGVFDGHGGKNAAEFAAENMPKFVAEEMTKADGGESEIEGAVKRGYLKTDEEFLRRGESGGACCVTAVLQKGGLVVSNVGDCRAVLSRSGKAEALTSDHRASREDEKERIENLGGFVVNYRGTWRVQGSLAVSRGIGDAHLKQWIVADPDTRTLLVDQHCEFLILASDGLWDKIDNQEAVDLARPLCTSNDKASRMAACRMLVETSISRGSTDDISVVIIQLQNFSSS

SEQ ID NO: 16091 - protein, 510 aa, Phormidium laminosum
MTSTVPAETSLNKFEKLKSEKDGLAVKSELEDFARLGWEAMDETDRDHRLRWMGVFFRPVSQGKFMLRMRIPNGILTSGQIRVLAEVVERYGEDGNADITTRPNLQLRGIRLEDIPDIFRRFEQAGLTSIQSGMDNVRNITGSPVAGIDADELIDTRGLVRKVQDMITNNGEGNPSFSNLPRKFNIAIAGCRDNSVHAEINDIAFVPAYKDGKLGFNVLVGGFFSAKRCEAAVPLNAWVDPRDVVALCEAILIVYRITGCGANRQKSRLMWLIDEWGMDKFRAEVEQQLGHPLQTAAPKDEILWDKRDHIGIHAQKKPGLNYVGLLVPVGRLYAPMFDLARIAEVYGDGEMRLTVERKRDHSRTCPMSSVASLLKEPLLEKFSVSPGLLVRSLVSCTGAQFCNFALIETKNRAMALIRELESELELARPVRIHWTGCPNSCGQPQVADIGLMGTKVRKDGKATEGVDLYMGGKVGKHAELGTCVQKGIPCDDLKPILRNLLIEHFGARPK

SEQ ID NO: 16092 - protein, 329 aa, Zea mays
MEPHHANKPKPRPKLSATKHSKFISCKLYISESRNATAVDAVERASKSDPQVVVVSQFGDHHYNRFRYTLVSYIVVVDGGGGSSAAGEATVVHSPIRKVLLAMIEAAFSSIDLESQSGAHPRIGVVDDLSFHPVGQATIEDAASLARQVASDIACIAAVPVFLYAAAHPAGKSVGAVRRELGYYRPNYRGNQWSGSVLPNVLPVKPDVGPAHVVSHKRGATTVGVTPWIENYNVPVLCKDVATVRRITRGVTGRSGGLPTVQALALFHGDDCTEIACLLDPDHASAYQVQTVVEQIAGDQGLEVEQGYYTDITKDEALDKYLKIACADD

SEQ ID NO: 16093 - protein, 197 aa, Zea mays
  unsure (1)..(197): unsure at all Xaa locations
MAHTHRLAVLLILLSATIGFSSAALVEEQPLVLKYHNGILLKGNVTLNLVWYGKFTSIQRSIIVDFIRSLSSSAVPSKGPSVASWWKTTEKYKGGSSKIVVGKQLLLENYPLGKSLKSPYLRALSGKLNGGGVRSITVVLTAKDVAVEGFCMNRCGTHGXGKARSVNSGAYVWVGNSETQCAGYCAWPFHXPMYGPP

SEQ ID NO: 16094 - protein, 276 aa, Pirellula sp. 1
MNLEMQLTGLTVIGGGQMARALVGGMLESGCLKASELTIVHKTKSTGEWWSSKYSECTTTTDTVEAVAGAKVVMLAVKPHIIAEVLAVKNSAGKSADWSGKLIVSIAAGIGLDKLIDGVGHDRVVRVMPNTPSLVGEGASGFCVSGGVSDDDVQLIETMLNSVGIAAQVTEPQMNGVTGVSGSGPAYVFLIIEALADGGVAAGLPRATALQLATQTVLGAAKMVRETGEHPGFLKDNVCSPGGTTIAAMSVLEQNAVRGAMIQAVQASANRSRELA

SEQ ID NO: 16095 - protein, 156 aa, Pisum sativum
GPFGGLKFMTGFPVKKVNTDITSITSNGGRVKCMQVWPPIGKKKFETLSYLPPLTRDQLLKEVEYLLRKGWVPCLEFELEKGFVYREHNKSPRYYDGRYWTMWKLPMFGTTDASQVLKELDEVVAAYPQAFVRIIGFDNVRQVQCISFIAHTPESY

SEQ ID NO: 16096 - protein, 619 aa, Candida albicans SC5314
MSSSHPDRTHQFTHSNTKRRASIVYGSVGKGGLYLPSDFIPTKDNGHNNTFDNEDEEADNNNETQPLLPDSFGNSPSTLLYNKKKIRRKSSVINHELIEEERELLKDNHIPIPETNGSTNAIQDEAVAQEEEDQEDNIIRDTFENAIINKEIQSTTSTIELKNLIKSSIPLVLTFLLQNSLSTVSVFSVGHLGATELAAVSMGAMTANITGYATIQGIATALDTLCPQAFGAKKYKLVGSYLQKCTALISVIMLPIFIIWIFFGYDLICLILPDKETAKLSAVYLKYLTFGMPAYILFECGKRFLQAQGIYHISTYVLLIAAPSNLIMNLLFVKHIGYLGAPIAVAINYWIMFSGLIILTVFYVKPEDTPSGLHPMECWGGFSIKDAFHDWKKLIVLAIPGLIMLEAEFLAFEILTLMASYLGTIALAAQSVGTTMAALTYQVPFAIGIASSTRIANFLGAGLGDAAKITTKVALLFGLFISVFNFLVLFIFQTQIAKAFTNDEKVISAVTNVMWLIALMQISDAMNANSAGCLRGQGQTKIGGIVNLFSYYVVGLPLSVYLSFYSPWKGSLHGLWIGSTVALTIIGSVQSYYALTVDFNKLCDDARKRTNTENHHNHV

SEQ ID NO: 16097 - protein, 470 aa, Solanum tuberosum
NKIKPGVAYSVITTENDTQTVFVDMPRLERRRANPKDVAAVILGGGEGTKLFPLTSRTATPAVPVGGCYRLIDIPMSNCINSAINKIFVLTQYNSAPLNRHIARTYFGNGVSFGDGFVEVLAATQTPGEAGKKWFQGTADAVRKFIWVFEDAKNKNIENIVVLSGDHLYRMDYMELVQNHIDRNADITLSCAPAEDSRASDFGLVKIDSRGRVVQFAEKPKGFDLKAMQVDTTLVGLSPQDAKKSPYIASMGVYVFKTDVLLKLLKWSYPTSNDFGSEIIPAAIDDYNVQAYIFKDYWEDIGTIKSFYNASLALTQEFPEFQFYDPKTPFYTSPRFLPPTKIDNCKIKDAIISHGCFLRDCSVEHSIVGERSRLDCGVELKDTFMMGADYYQTESEIASLLAEGKVPIGIGENTKIRKCIIDKNAKIGKNVSIINKDGVQEADRPEEGFYIRSGIIIILEKATIRDGTVI

SEQ ID NO: 16098 - protein, 700 aa, Ustilago maydis 521
MYASSVRRSANFTLANGAQIPKLGFGTWKMSKEQATPAVAHAIKTGYRHIDCAWAYRNEDAVAAGIKKAGVPRSQLWLTSKLWNSFHHPEHVEKALDASLKDLGTDYLDLYLMHWPVAFLNSKGSMVPSIRSTGGHPVESEDLSRDFMATYRVMEEMVKKGKVRNIGVSNFNIRRTSEVVDEASIKPVVNQVEVNLGVHNEELRNYAHAHGVTLQAYSPFGSNQNVAKSLEDPVVVDVAQRNNITPAQVLLAWTLGRDIIPISKSVTPERIEENFRVLDIQLAEEEIKHLTNEALSRPIERTVDPTEGWGVADEIFEDGVDQTREMELKGGSYVPPPAHESPAEHRLEPRNDPETPARMLHTAAHPLASSSRSTLVSRRRTAVQAKSSSSFFRGFATTSRVAAVAEVAPPSASEAPAVSESALLRTTSKSALATPGLKFLDGEQRIERETKKMNMYTVRRMSTSTTTQASVRASARVTATSSAVKPTTRKYPAKKSFLYEKYLRLLSDSQMVLVLQHNNLSVAELAQVRSDIAAINLAEGQTSKASLTVVRAGLIKAVTRQLSEKNAAMKSLQPALSGPIALLTCEHLTPAYLSALLNVVDRALGHVPPRAPAVGAKFPETAVANPRLVPLAAVLEGKRLLHVPQTRDVGRIGGLDQLRSQIVGLLSAPAQQLAHVLTHASGQQLAMTLEARKRDLEAKQ

SEQ ID NO: 16099 - protein, 521 aa, Solanum tuberosum
MAASIGALKSSPSSNNCINERRNDSTRAVSSRNLSFSSSHLAGDKLMPVSSLRSQGVRFNVRRSPMIVSPKAVSDSQNSQTCLDPDASRSVLGIILGGGAGTRLYPLTKKRAKPAVPLGANYRLIDIPVSNCLNSNISKIYVLTQFNSASLNRHLSRAYASNMGGYKNEGFVEVLAAQQSPENPDWFQGTADAVRQYLWLFEEHTVLEYLILAGDHLYRMDYEKFIQAHRETDADITVAALPMDEKRATAFGLMKIDEEGRIIEFAEKPQGEQLQAMKVDTTILGLDDKRAKEMPFIASMGIYVISKDVMLNLLRDKFPGANDFGSEVIPGATSLGMRVQAYLYDGYWEDIGTIEAFYNANLGITKKPVPDFSFYDRSAPIYTQPRYLPPSKMLDADVTDSVIGEGCVIKNCKIHHSVVGLRSCISEGAIIEDSLLMGADYYETDADRKLLAAKGSVPIGIGKNCHIKRAIIDKNARIGDNVKIINKDNVQEAARETDGYFIKSGIVTVIKDALIPSGIII

SEQ ID NO: 16100 - protein, 370 aa, Pseudomonas syringae pv. syringae B728a
MIKSRAAVAFEAKKPLEIVEVDVAMPKAGEVLLRVVASGVCHTDAYTLSGADPEGIFPSILGHEGGAIVEAVGEGVTSVVVGDHVIPLYTPECRQCKFCRSGKTNLCQAIRATQGKGLMPDGTTRFSYKGEPIFHYMGTSTFSEYTVLPEISVAKIDKQAPLEKVCLLGCGVTTGIGAVLNTAKVKPGDTVAIFGLGGIGLSALIGAVKAKAARIIAIDINPAKFEIAKQLGATDCVNPKDFDRPIQEVIVDMTDGGVDFSFECIGNVQLMRAALESCHKGWGESVIIGVAGAGQEIATRPFQLVTGRVWRGSAFGGVRGRTELPSYVDMAQTGEIPLDTFITHTMGLEGINKAFDLMHEGKSIRTVIHF

SEQ ID NO: 16101 - protein, 71 aa, Glycine max; identical to SEQ ID NO: 211

SEQ ID NO: 16102 - protein, 329 aa, Methylococcus capsulatus str. Bath
MSKNLLDQLREVTVVVADTGDIEAIEKFKPRDATTNPSLITAAAQMPQYQDIVDDTLKGARQTLGPGASAAQVANRAFDRLAVSFGLKILQIIEGRVSTEVDARLSYDTEGTIEKAREIIKQYEAAGVSKERVLIKIAATWEGIEAAAVLEKEGIHCNLTLLFGLHQAIACAENGITLISPFVGRILDWYKKDTGRESYAPHEDPGVLSVTQIYNYYKKFGYKTEVMGASFRNIGEITELAGCDLLTIAPSLLAELQATEGELPRKLDPAKAKDYPIEKIHVNKYTFDKMHAENRMATEKLEEGIQGFTKALEQLEKLLADRLAHLEAA

SEQ ID NO: 16103 - protein, 111 aa, Oryza sativa (japonica cultivar-group)
MAAAEEKKKKKMIKIIEYCTKHAAVEGRSTAAAELKRFDEELIDVDTDTLYHLLMAGNLMGVEGVLELAVQRTAELIRGKSPEEIRDTFKIANDFTPEEEEIIKENAWALQ

SEQ ID NO: 16104 - protein, 413 aa, Fusobacterium nucleatum subsp. nucleatum ATCC 25586
MKLIKAVRGTKDIIGEEAKKYIYISNVAQKMFENYGYNFVKTPIFEETELFKRGIGEATDVVEKEMYTFKDRGDRSITLRPENTASLVRCYLENAIYAKEEISRFYYNGSMFRYERPQAGRQREFNQIGLEVFGEKSPKVDAEVIAIGYKFLEKLGITDLEVKINSVGSKASRTVYREKLIEHFKSHLDDMCEDCRDRINRNPLRLLDCKVDGEKDFYKSAPSIIDYLFEDERKHYDDVKKYLDIFGIKYTEDPTLVRGLDYYSSTVFEIVTNKLGSQGTVLGGGRYDNLLKELGDKDIPAVGFATGVERIMMLLEENYPKNTPDVYIAWLGENTSETALKIAESLRDNDIKVYIDYSEKGMKSHMKKADKLETRYCVILGEDEFNKGIVLLKDFSTREQKEIKIEEIINYIK

SEQ ID NO: 16105 - protein, 433 aa, Zea mays
  unsure (1)..(433): unsure at all Xaa locations
MGVGAEPKDQAATAAGVPAEQDEAGGKEDKAAAVSCSICLDAVLAASGERSTARLHCGHEFHLDCIGSAFNAKGVMQCPNCRKIEKGNWLYANGSRSAHDVSMDEWAHDEDLYDVSYSDMPFRFHWCPFGRLTQLPSLFEEGESSPPVTFHDFMGQHVFTEQVAVSAAAGTTNPCPYVAYLHPLTPLTSLSSSHVPDRTMDRPAYHDHWNPMAGPSDVRSMQTMQPADFHHSHWAHVPHSYGQPNSNNEQPGIPFGARAVRVDGDSQRRASVVSPSYFSNGSGSRSRPPNVPPLMPQFMRAHGXISEQYQQNSSSSLFAGAHRSGGMRPAPTPLPENPTFTLFPPGSSGHSSMETDDAGGSRFYAWEGDRFAPYPLMPVDCETSWRTSQQQSHQSTSEPTSAPRRLFGQWLAVGRPSPSPEGSSYRQLHSPRM

SEQ ID NO: 16106 - protein, 208 aa, Zea mays
MDPKLVEVTQLFDRFKASNFDVCATLLSQLKVLLTKFPSLPPLFQQTPNAVEELKLAREIYEQAVILSVKMEDQDAFERDFCQLKPYYMDTCGIIPPSSVEYPIMGANLLRLLVQNRIAEFHTELELLPTKALDNAYIKHGVELEQSFMEGAYNRVLSARQTAPHETYIYFMDLLVKTVRDEIAGCSEKGYDYLSINDAKQMFKFSSD

SEQ ID NO: 16107 - protein, 253 aa, Rumex acetosa
MEFSNELSRDMEDGSPQRKMGRGKIEIKRIENVTNRQVTFCKRRNGLLKKAYELSVLCDAEVALIVFSSRGRLYEYANHSVKATIERYKKTCSDSTGVTSVEEANAQQEAAKLRNQIRTLQNQTRNTSRNLMGEGLTSMNMKDLKNLETRLEKGISRVRAKKNELLFGEIEFMQKKEIELHNNNQFLRAKIAESERSQQSMNLMPGSSSGEQHYELMPQSQAGPFDSRNFFQVSDLQPDERYSCQNQTPLQLV

SEQ ID NO: 16108 - protein, 283 aa, Glycine max
IAISNVSSGHGFYDWLFECHGFWHNATLNIPSFLFVFYLALQARHSLLKLSLARSYIIISYNLCLWLITLLNLAWCFLQAWECTSGRKLTWNLLSLFTTSGMLFLEVSLLAFLFQGNNAGGLDAMKRTFGISTLVVGLDILLKAIYLFVFGIPLFVDSNEHTHGKWNLWVVHKLLLTAVYGFIMFIYHSGWKETLPAKIAFYKYVAIMFIFNAIATLACGLAGTGAAFAFWLYRVTVVFYHAFYLPFLYTTFLADFFQEENFHLENVYYSEMKDAGFFDTDWE

SEQ ID NO: 16109 - protein, 656 aa, Burkholderia cenocepacia
MCGIDGFLNSVAFDEETARGTLARMTASLAHRGPDGQGIWVDPEAGIALGHRRLAIVDLSVHGRQPMASACGRYVLVFNGEIYNHRELRAELERAGRAPAWRGHSDSEVLIAAIVAWGVEATLRRATGMFAFALWNRASRVLTLARDRIGEKPLYYGRIGDALVFASELKALRGYPGFDGTVDRDALCLYLRQSSVPAPYTIYRGIRKLPPGTYIQFEHARDTPRLRAYWTLEQVIEAGRAQPFEGTPDEAVGQLDAILRQAVARQMEADVPLGAFLSGGVDSSAIVALMQAQSATPVDTFTIGFHEAGYDEAGYAKAVARHLGTRHTELYVTADHALGVVPKLPSIYDEPFSDASQIPTFLVSELTRRHVKVSLSGDGGDELFGGYTRYFLTPRLWRKLHRVPGAVRARIAAALHALRPDHADQLAAVAQGAWGGGVEARESTSRIGDRLHKLGHVMTAESRIGLYRLLMSSVHHPERIALSGQEPPTPLDTVSAWPAHLSFAEQAMAIDTLTYLPTDILAKVDRAAMAVSLETRMPFLDHHVVEFAWRVPASVRLPEGQSKALLRRLLDRYVPSALIDRPKQGFCAPVDHWLRGALRDWAEALLRPSRLREEGFFDAAAVERLWRQHQTGRMNWQHQLWTVLMFQAWLEAQRAA

SEQ ID NO: 16110 - protein, 384 aa, Arabidopsis thaliana
  unsure (1)..(384): unsure at all Xaa locations
MSGSLMNLFSLCFKPFGHVCDNSEAGSGGGGGVSGGTGREGKDGLLWFRDLGKYCGGDFSMAVIQANQVLEDQSQVESGNFGTFVGVYDGHGGPEAARYVCDHLFXHFREISAETQGVVTRETIERAFHATEEGFASIVSELWQEIPNLATVGTCCLVGVIYQNTLFVASLGDSRVVLGKKGNCGGLSAIQLSTEHNANNEDIRWELKDLHPDDPQIVVFRHGVXRVKGIIQVSRSIGDMYMKRPEFNKEPISQKFRIAEPMKRPLMSATPTILSHPLHPNDSFLIFASDGLWEHLTNEKAVEIVHNHPRAGSAKRLIKAALHEAARKREMRYSDLRKIDKKVRRHFHDDITVIVVFLNHDLISRGHINSTQDTTVSIRSALEH

SEQ ID NO: 16111 - protein, 491 aa, Corynebacterium glutamicum ATCC 13032
MASTFIQADSPEKSKKLPPLTEGPYRKRLFYVALVATFGGLLFGYDTGVINGALNPMTRELGLTAFTEGVVTSSLLFGAAAGAMFFGRISDNWGRRKTIISLAVAFFVGTMICVFAPSFAVMVVGRVLLGLAVGGASTVVPVYLAELAPFEIRGSLAGRNELMIVVGQLAAFVINAIIGNVFGHHDGVWRYMLAIAAIPAIALFFGMLRVPESPRWLVERGRIDEARAVLETIRPLERAHAEVADVEHLAREEHAVSEKSMGLREILSSKWLVRILLVGIGLGVAQQLTGINSIMYYGQVVLIEAGFSENAALIANVAPGVIAVVGAFIALWMMDRINRRTTLITGYSLTTISHVLIGIASVAFPVGDPLRPYVILTLVVVFVGSMQTFLNVATWVMLSELFPLAMRGFAIGISVFFLWIANAFLGLFFPTIMEAVGLTGTFFMFAGIGVVALIFIYTQVPETRGRTLEEIDEDVTSGVIFNKDIRKGKVH

SEQ ID NO: 16112 - protein, 199 aa, Oryza sativa (indica cultivar-group)
MGCSSSVPARSTGGLNNISNDNSATDSKDLRAKLVLLGDSGVGKSCIVLRFVRGQFDPTSKVTVGASFLSQTLALEDSTIVKFEIWDTAGQERYAALAPLYYRGAAAAVVVYDITSPESFSKAQYWVKELQKHGSPDIIMVLVGNKADLHENRHVSSQEAQEYAEKNNMVFIETSAKTADNINQVFEEIAKRLPRPTAS

SEQ ID NO: 16113 - protein, 369 aa, Ustilago maydis 521
MVQDPRETQLEVTPTNRVAIFYENGGPDKISIKQLDNIKPSELNAGEVLVRVLFTGVCHSDLHALQGDWPFPPKLPLIGGHEGAGVVVALGAGSQEYVQIGDRVGIKWIADACLNCEYCRLSHEINCAQYKSSGCECGSALKLVGFERDKYVRHTARYLTKIPDALDLAQAASILCAGVTIYRALKEAHLEAGNWVVIPGSGGGLGHLGVQYALNAGLRVIGIDTGSDKQHMSLSLGCEVFVDFKTSDVATAIKAATGGIGAHAAVVAAASSAAYELALDYIRPRGTLVIVGMPNSILPLSIFKTVLMTHKIVGSAVGNRQDAVEALDIASRGKVKVHFTMKGLTDLPHVFQDMIHGRIAGRIVLDVDK

SEQ ID NO: 16114 - protein, 392 aa, Bradyrhizobium japonicum USDA 110
MSKSSSLNKVFADLPVTIFEAMSQAARDNAAINLGQGFPDDPGPEDIRRAAADASLNGYNQYPSMMGLPELRQAIATHYGHWHGLKLDPMSEVMVTSGGTEALTSAILAVVQPGDEVVCFQPVYDSYLPIIRQAGGIPRLVRLEPPHWRLNEDMLKSVFNSKTKAVLFNNPLNPSAVVYPREDLELLARYCQEFDVIAICDEVWEHVTFDEHKHIPLITIPGMRERTIKVGSAGKIFSLTGWKIGFVCAAPPLLRVAAKVHQFLTFTTAPNLQAAVAYGLGKSDDYFLSMRKDLTRSRDRLTKGLESLGFPVLKSQGTYFLTVDLSPLGLNESDTEFCWRIVKDYKVAAIPVSAFYEQDPVTSVVRFCFAKKDQTLDTALERLSDAVRGRKR

SEQ ID NO: 16115 - protein, 506 aa, Corynebacterium glutamicum ATCC 13032
MADPQGFIKYSRREPAHRPVPLRLMDHSEVYEKAPAGQIEEQAARCMDCGVPFCHEGCPLGNIIPEWNDLVRQGRWKEAYDRLHATNNFPEFTGRLCPAPCEGACVLGINDDSVTIKNVELEIVEKAFREGWVQPVIPSMSTGLSVAVVGSGPAGLAAAQQLTRAGHSVTVFERDDRLGGLMRYGVPEYKMENRWIDRRIEQMEAEGTTFQVGTSPRAAELALFDAILLATGTPVARELSVPGHDLNGIHAAMDYLTAQNRINEGDGEVSPINAKGKKVVIIGGGDTGTDCFGTALRQGAESVTQFDIRPRAPFQRADSTPWPMYPNLFRTATAHEEGEYIITGDESADEIAALGLAERAAGSTLGERKFAVNTVEFHGNNGHVTGLTGNQIRVVNGKREPIEGTEFPFEADLVLVALGFTGAEQGGLAHELGVGFDDRGRILRDSEYRSPTNSRVYIAGDNGRGQSLIVWAIAEGRACAAAIDADLMGETALPVAVAPQDVPLAV

SEQ ID NO: 16116 - protein, 542 aa, Desulfovibrio vulgaris subsp. vulgaris (strain Hildenborough)
MSTSPFNSRVAPMPHDDATAPVLHYAHDAAGAHDAADAAGAHDAADAAGTPPCAASRTARLRSLDAAHVWHPFTQMRDWMGSEPCIIDAADGNHLIDTDGNRYLDGVSSLWTNVHGHRHPHIDEAIRRQLDRVAHSTLLGLGGTPSIELAARLTAIAPAGLTRVFYSDSGSTAVEAALKIAFQYHRQAPEGDARRTRVMAFSNAYHGDTIGSVSLGGMSLFHGIYGPLLFDPVRAPAPHCYRCPADLRPETCGMACLGEVERLMRHHGHELCAVVVEPLVQGAAGMLVQPRGWLRGLRDLCDRHGVFMVADEVAVGFGKTGTMFACEQEGVVPDMLCLAKGITGGYLPLAATLVTEHIHDGFLGGYADFRTFFHGHTYTGNALACAAALASLDVFEEERTLETLRPRIERLATLLAPLNDLPHVGDIRRVGVMTGIELVADRETRTPYRPEERIGHRVTLEARRRGVIVRPLGDVMVLMPPLSITETELETLVHTVRGAIIAVTEHGADGGLWTKRPDGPDNPDKANTPDTPDGARTGETVV

SEQ ID NO: 16117 - protein, 184 aa, Methanosarcina acetivorans C2A
MHKIVFVTGNKGKFAEIRDILKTFGIEVIQEKNGYPELQEDELEPIAAHGAQYVANKLNMPVMVDDSGIFINALNGFPGPYSRFVEDKLGNLKVLKMMEGEEDRTAYFKTVIGYCEPGKEPLVFPGVVEGKIAYEERGTGGFGYDPIFEYQGLTFGELGDTEKNKVSHRRRAVDEFLEWFTSKA

SEQ ID NO: 16118 - protein, 733 aa, Saccharomyces cerevisiae
MSKNQSVSASEDEKEILNNNAEGHKPQRLFDQEPDLTEEALTKFENLDDCIYANKRIGTFKNNDFMECDCYEEFSDGVNHACDEDSDCINRLTLIECVNDLCSSCGNDCQNQRFQKKQYAPIAIFKTKHKGYGVRAEQDIEANQFIYEYKGEVIEEMEFRDRLIDYDQRHFKHFYFMMLQNGEFIDATIKGSLARFCNHSCSPNAYVNKWVVKDKLRMGIFAQRKILKGEEITFDYNVDRYGAQAQKCYCEEPNCIGFLGGKTQTDAASLLPQNIADALGVTVSMEKKWLKLKKLSGEPIIKNENENINIEFLQSLEVQPIDSPVDVTKIMSVLLQQDNKIIASKLLKRLFTIDDDSLRHQAIKLHGYTCFSKMLKLFITEQPQVDGKGNETEEDDIKFIKGILDFLLELPKTTRNGIESSQIDNVVKTLPAKFPFLKPNCDELLEKWSKFETYKRITKKDINVAASKMIDLRRVRLPPGWEIIHENGRPLYYNAEQKTKLHYPPSGSSKVFSSRSNTQVNSPSSSGIPKTPGALDSKKHKLSDEEYERKKQKRLEYERIALERAKQEELESLKQKLKLENERKSVLEDIIAEFNKQKELQKEESKKLVEAKEAKRLKRKTVSQSQRLEHNWNKFFASFVPNLIKKNPQSKQFDHENIKQCAKDIVKILTTKELKKDSSRAPPDDLTKGKRHKVKEFINSYMDKIILKKKQKKALGLSSASTRMSSPPPSTSS

SEQ ID NO: 16119 - protein, 240 aa, Dactylis glomerata
IPKVPPGPNITATYGDKWLDAKSTWYGKPTGAGPKDNGGACGYKDVDKAPFNGMTGCGNTPIFKDGRGCGSCFEIKCTKPESCSGEAVTVHITDDNEEPIAPYHFDLSGHAFGSMAKKGEEQKLRSAGELELQFRRVKCKYPEGTKLTFHVEKGSNPNYLALLVKYVDGDGDVVAVDIKEKGKDKWIALKESWGAIWRVDTPDKLTGPFTVRYTTEGGTKSEVEDVIPEGWKADTSYEAK

SEQ ID NO: 16120 - protein, 264 aa, Dactylis glomerata
MASSSSSVLLVVALFAVFLGSAHGIPKVPPGPNITATYGDKWLDAKSTWYGKPTGAGPKDNGGACGYKDVDKAPFNGMTGCGNTPIFKDGRGCGSCFEIKCTKPESCSGEAVTVHITDDNEEPIAPYHFDLSGHAFGSMAKKGEEQKLRSAGELELQFRRVKCKYPEGTKVTFHVEKGSNPNYLALLVKYVDGDGDVVAVDIKEKGKDKWIALKESWGAIWRVDTPDKLTGPFTVRYTTEGGTKSEVEDVIPEGWKADTSYEAK

SEQ ID NO: 16121 - protein, 243 aa, Oceanobacillus iheyensis HTE831
MGGIFMKPVIGITSSMETDCSQYTINNRNIRAIENAGGIPVMLPYLKNDEDIDYMMNKLDGLYLTGGYDIDPTLFGEEPLPGLGIIIPERDRSEIAYVEKMIERDKPILGVCRGSQILNIALGGLMYQDIYSQLDTVKLLQHRQKAPIDHRSHFVHVKEGSLLYQLTGLDKFKVNSYHHQTNNRVPEDYQICATASDGIIEAFESEKHRFVLGLQWHPEGLIDCKDDPSFAIYQGFIKACMNQ

SEQ ID NO: 16122 - protein, 230 aa, Saccharomyces cerevisiae
MKRTNKLPDYHLKIVVVGDGAVGKTCLLISYVQGTFPTDYIPTIFENYVTNIEGPNGQIIELALWDTAGQEEYSRLRPLSYTNADVLMVCYSVGSKTSLKNVEDLWFPEVKHFCPSTPIMLVGLKSDLYEADNLSDLVEPSSAESLAKRLGAFAHIQCSARLKENIDEVFETAIHTLLSDSLYAPREPTHTIKNPFKRNTTRSDIDSSTGDTSVSISGTKRLRKNKCIIM

SEQ ID NO: 16123 - protein, 492 aa, Nicotiana glutinosa
MDPYKYRPSSAFNSPFCTTNSGAPEKNNNSYLTVGARGLVLLEDYHLVEKLANFDRERVPERVVHARGASAKGFFEVTHDITHLTCADFLRAPGVQTPVIVRFSTVIHERGSPETLRDPRGFAVKFYTREGNFDLVGNNFPVFFIRDGMKFPDMVHALKPNPKSHIQENWRVLDFFSHVPESLHMFTFLFDDIGIPQDYRHMDGSGVHTFTLINKAGKSTYAKFHWKPTCGVQSLLEDEAARVGGANHSHATQDLYDSIAAGNYPEWKLFIQTMDPSHEDRFDFDPLDVTKTWPEDILPLQPVGRLVLNKNIDNFFNENEQLAFCPSIVVPGVYYSDDKMLQTRIFSYSDTQRYRLGPNYLQLPANAPKCAHHNNHYDGSMNFMHRDEEIDYFPSRYDPVRHAEKYPIPSTMCTGKREKCVILKENNFKQPGERYRSFTPDRQERFIRRWVEALSDPRITHEIRSIWISYWSQADKSLGQKLASRLNVRPSI

SEQ ID NO: 16124 - protein, 480 aa, Lactobacillus acidophilus
MKLQNKAILITYPDSLGHNLKDLDHVMDRYFNKTIGGIHLLPFFPSNGDRGFSPTRYDVVEPKFGSWEDVEKLSQKYYLMFDFMINHLSKKSSYFEDFEAKHDKSKYSDLFLSWDKFWPKGRPTKEDIDLIYKRKDKAPYQNIKFEDGTHEKMWNTFGPDQMDLDVRTKTTQDFIKHNLQNLSKHGASLIRLDAFAYAIKKLDTNDFFVEPEIWNLLEKVNDYLKDTPTTILPEIHEHYTMPFKVAEHGYFIYDFALPMVLLYSLYSGNSTQLAAWLKKCPMKQFTTLDTHDGLGVVDAKDILTDDQISYTTNELYKIGANVKKKYSSAEYHNLDIYQINTTYYSALGNDDKKYFIARLLQIFAPGIPQIYYVGLLAGENDIQLLEKTKEGRDINRHYYDLDEIAEQVQRPVVKSLIKLLEFRNSVPAFDLEGSIKVETPSEHEIIVTRSNKAGTEVASTYVDFKNLDYQVKYNDQVFNF

SEQ ID NO: 16125 - protein, 324 aa, Magnaporthe grisea 70-15
MVCTGIGSVYIGTSPADGLQAAGGDTQGTVPPTHQYRIRLVTRSEHHIADLQHRYPGSLITSCIRNMSLWGALPRHEVFGLHVVLICTQPQFTRDVCVDLRAIYASAKHLNTDDPAVKQSMVSSSSLLSSWPKTVLEIPTVFVTACPGIRVKTLASWLPQNAAIVRTMPNTPACIRQGATAAFAGPTVTAIPGAAEAVAALIRHVSPSLCFVPTEDLLDVAASVSGSAPAYIFTLMQAMVEAGVRRGLPPDIAASLVKQSAFGSAGLALQTGQLGCLEKLTSDVCVPGGSTSQAMMVLHEEGFVSAVDRAIGVSLAANRAMSNN

SEQ ID NO: 16126 - protein, 184 aa, Glycine max
DAFVEKHGVKLGLMSGFVKAAVNALQHQPIVNAVIDGDDIIYRDYIDISIAVGTPKGLVVPVIRNADTMNFADIEKQINTFAKKANDGSLSIDEMAGGTLTISNGGVYGSLLSTPIINPPQSAILGMHSIVSRPTVVGGNIVPRPMMYVALTYDHRIIDGREAVFFLRRIKDIVEDPRRLLLDI

SEQ ID NO: 16127 - protein, 184 aa, Oceanobacillus iheyensis HTE831
MLQDNIHGDIQDILITEEQIQEKCKELGSIISKEYDGKFPLAIGVLKGAMPFMSDILRYSEIHLEMDFMDVSSYDGGTTSTGEVKILKDLNTKVEGRDLIIVEDIIDSGLTLSYLVDLFKYRKANSIKIVTLLDKPSGRNAAIKADVVGFEVPDEFVVGYGLDYAEKYRNLPYIGILKPEVYGG

SEQ ID NO: 16128 - protein, 527 aa, Marchantia polymorpha
MANGGEGSPMHPSPSEQHSMLHGERVAVQINSRRRLPDFLQSVNLKYVKLGYHYLITHLVILLFIPLLLAVTLEVGRMGPEEMWQLWVNLQFNLVSVLICSALLVFGVTVYVMSRPRPVYLVDYACHLPAENTRVKFSLFMDHSEKSGFFDERALEFQRKILERSGLGEETHLPVSLHRLPANANMAEARNEAEEVMFGALDELFEKTKVKPKDIGILVVNCSLFNPTPSLSAMIVNKYHMRGNIRTYNLGGMGCSAGVISIDLAKDMLQVHGGTYAIVVSTENITQNWYYGNRRSMLIPNCLFRVGGAAILLSNKRSEKRRAKYQLVHTVRTHKGADDKCFRCVYQEEDEKNFMGVSLSKDLMAIAGDALKTNITTLGPLVLPLSEQLLFFGILVARKVFNMKVKPYIPDFKLAFDHFCIHAGGRAVIDELEKNLQLTKDHVEPSRMTLHRFGNTSSSSIWYELNYIESKGRMKKGDRVWQIAFGSGFKCNSAVWQAVRTLKPPARGPWTHCIDSYPVKIPEVYKF

SEQ ID NO: 16129 - protein, 336 aa, Oryza sativa (japonica cultivar-group)
MAGAAATPPAMMRAVQYDASGGGAAGLKHVEVPVPSAKKNEVLLKLEAATINPVDWKIQKGMLRPLLPRRLPFIPVTDVAGVVAGVGPGVNDFAVGDQVVAMLNSMNGGGLAEYAVAAANLTVKRTPNVSAAEGAGLPIAAGTALQALRSIGAKFDGTGEPLNVLVTAASGGVGLYAVQLAKLANLHVTATCGARNAELVRGLGADEVLDYRTPEGAAMRSPSGRRYDGVVHCTVGVGWPAFEPLMAPRGKVIDITPNFSAMLTSALHAVTLRRKRLVPLLLSPNKADLEFLVGLVGEGKLRTVVDSRFPLGDAAKAWQKSIDGHATGKIVVEMEG

SEQ ID NO: 16130 - protein, 268 aa, Oryza sativa
MEISSSSKKHFILVHGLCHGAWCWYRVVAALRAAGHRATALDMAASGAHPARVDEVGTFEEYSRPLLDAVAAAAAPGERLVLVGHSHGGLSVALAMERFPDKVAAAVFVAAAMPCVGKHMGVPTEEFMRRTAPEGLLMDCEMVAINNSQGSGVAINLGPTFLAQKYYQQSPAEDLALAKMLVRPGNQFMDDPVMKDESLLTNGNYGSVKKVYVIAKADSSSTEEMQRWMVAMSPGTDVEEIAGADHAVMNSKPRELCDILIKIANKYE

SEQ ID NO: 16131 - protein, 330 aa, Geobacter sulfurreducens PCA
MRAMLFEEVGKPLRPVRVPVPEPGPGEVLLKVHACGICRTDVHIVDGELTEPALPLIPGHQIVGSVAKLGEGVERFREGTRVGVPWLGATCGACRYCRSGRENLCDHARFTGYQRDGGFAEFTVADARFCFPIPGGYPDLQAAPLLCAGLIGYRSLVMAGEGERLGIYGFGAAAHIVTQVARFRGWRVYAFTRPDDRAGQAFAREMGAVWAGASHERPPEELDAAIIFAPAGELVPAALRAVGKGGVVVCGGIHMSDIPPIPYDILWGERSIRSVANLTRRDGEEFLALAPKVPVRTEVTAYPLSAANEALDDLRRGRLRGAGVLVIDEG

SEQ ID NO: 16132 - protein, 175 aa, Triticum aestivum
MAPAVMASSATTVAPFQGLKSTAGLPVSRRSGSASLSSVSNGGRIRCMQVWPIEGIKKFETLSYLPPLSTEALLKQVDYLIRSKWVPCLEFSKVGFVFREHNSSPGYYDGRYWTMWKLPMFGCTDATQVLNEVEEVKKEYPDAYVRVIGFDNMRQVQCVSFIAFRPPGCEESGKA

SEQ ID NO: 16133 - protein, 308 aa, Hordeum vulgare subsp. spontaneum
MATAGKVIKCKAAVAWEAGKPLSMEEEEVEVAPPQAMEVRDKILYTALCHTDVYFWEANGQTPVFPRILGHEAGGIVESVGEGVTELVPGDHVLPVFTGECKECAHCMSEESNLCDLLRINVDRGVMIDDGQSRFTIDGKPIFHFLGTSTFSEYTVIHVGCVAKIDPEAPLDKVCLLSCSISTGLGATLNVTKPKKGMTVAIFGLGAVGLAAMEGARMSGASRIIGVDLNPAKHEQAKKFGCTDFVNPKDHTKPVQEVIVEMTDGGVNRAVECTGNADAMISAFECVHDGWGVAHKEAVFKTHPMNFL

SEQ ID NO: 16134 - protein, 542 aa, Oryza sativa
MAVPGPLKQQFRTDCTEYFLWRYPFDGGGRKERLVNSQKLFMHPRSDPANGAGSSGYVGNTMRSNDLPSSSYAGQAYGQQNRAPIHASYSGHAPAGSSSGSYAPYNTQHMPASSYPHGSEDNFIPSSHVDGRRVALKRRNPIIHPTDGFGVGNYYAGSSSNTQFSRPMPPNPIPPPESCVRMPSHLGSNHWNDHRYVNHEGSQRNVRGRHDHSTIHLEQSPAAACPSSSINVPPYHPNANGPFGSAPVQRDRAPLSVHPRILPPGPDGSSIAFRERPYYPAPQSTNISAPVPTLPISCDSAPFAHGGYAPRSAHRNNLRTYPPPAFASSSNPGAVSHEPAIPSYPPAAPSYPPATSAASSSVQPFHAEAAAHLRHPRHVSVGGRGGAGRRRMRDSYHGFHHLMIEDNNLGRSAAERFMMLDQLVIHESREAFDPHWDMRLDIDDMSYEELLALEERIGHVNTGLADEKISGCVMEVACCSSSHLQDDQDNERCVICLEEYKHEDTLGRLKCGHGFHCNCIKKWLQVKNTCPVCKAAAADEGS

SEQ ID NO: 16135 - protein, 213 aa, Gossypium hirsutum
YWECKGYTPLFPRILGHEASGIVESVGEGVNDLKPGDHVLPIFTGECKECRHCLSEESNNMCELLRINCDRGVMLADGKTRFSINGKPIYHFVGTSTFSQYTVVHVGQVAKISPTAPLDKVCPISCGICTGFGATVNVAKPKKGQTVAVFGLGAVGLAAAEGARVCGASRIIAVDVNPRRFEEAKRFGITEFVNPKDYDKPVQEVIVEMTGGG

SEQ ID NO: 16136 - protein, 306 aa, Hordeum vulgare subsp. spontaneum
MATAGKVIKCKAAVAWEAGKPLSMEEVEVAPPQAMEVRDKILYTALCHTDVYFWEANGQTPVFPRILGHEAGGIVESVGEDVTELVPGDHVLPVFTGECKECAHCMSEESNLCDLLRINVDRGVMIDDGQSRFTIDGKPIFHFLGTSTFSEYTVIHVGCVAKIDPEAPLDKVCLLSCGISTGLGATLNVTKPKKGMTLAIFGLGAVGLAAMEGARMSGASRIIGVDLNPAKHEQAKKFGCTDFVNPKDHTKPVQEVIVEMTDGGVNRAVECTGNADAMISAFECVHDGWGVAHKEAVFKTHPMNFL

SEQ ID NO: 16137 - protein, 345 aa, Candida albicans SC5314
MGQLLSHPIEEKELDYKSYTNLTYCIGSMQGYRMTMEDAHDVKINEHENLAVFGIFDGHGGKNCSQYLAEHLPKLVFTKLNKIASAVYLKQVKDIDLKDVFDILKNSFFKIDKDLSHHANMVNCGSTATVVTIIANYIVVANTGDSRCIVSRNGHAKPLSFDHKPSNMGERVRIENSNGYILNNRINEVLALSRAFGDFKFKLPYLSSSRNKYIKENQKLLGDKLITLPPELFQVTVEPDIMLYDMQKLDSPEFLVIACDGVWDCFKNGQLVKLIRDKLSLGWRLNKIVEYILNDSLTMANNYTGIGFDNMTLIIVAIHKKEGETMDDWYESMKEKILKEKGITR

SEQ ID NO: 16138 - protein, 292 aa, Salmonella enterica
MKTRKGIILAGGSGTRLYPVTMAVSKQLLPIYDKPMIYYPLSTLMLAGIRDILIISTPQDTPRFQQLLGDGSQWGLNLQYKVQPSPDGLAQAFIIGEEFIGNDDCALVLGDNIFYGHDLPKLMEAAVNKESGATVFAYHVNDPERYGVVEFDQSGTAVSLEEKPLQPKSNYAVTGLYFYDNSVVEMAKNLKPSARGELEITDINRIYMDQGRLSVAMMGRGYAWLDTGTHQSLIEASNFIATIEERQGLKVSCPEEIAYRKGFIDAEQIKNLAKPLSKNAYGQYLLNMIKGY

SEQ ID NO: 16139 - protein, 480 aa, Lactobacillus acidophilus
MPIENKVMLITYPDSLGKNLKELDEILSEDLKGAVGGIHLLPFFPSTGDRGFAPTGYTEVDPKFGDWSDIEKIGKKYYLMFDFMINHISRQSKFYKDFKQKKDKSKYADLFLSWDKFWPEGRPTRKDIDLIYKRKDRAPYQEITFTDGSKEKLWNTFGEEQIDMDVRKEVTQKFIKDTLRALIDHGADIIRLDAFAYAVKKLDTNDFFVEPEIWDLLKQVQDDISDKGAMILPEIHEHYSMPFKISKHGYYIYDFALPMVTLYSLYSGKSNRLADWLKKCPMKQFTTLDTHDGIGVVDARDILSPDEIKYTSNELYKVGANVKKKYSSAEYHNLDIYQINTTYYSALGNDDKKYFIARLIQMFAPGIPQVYYVGMLAGKNDIELLEKTKEGRNINRHYYGREEVAEETKRPLVAALLKLFNFRNNEAAFDLDGSIEITTPNENVIQITRMNKDKTRKARAVINLKNLTYQVTVNNEVINF

SEQ ID NO: 16140 - protein, 1478 aa, Saccharomyces cerevisiae
MPFLRKIAGTAHTHSRSDSNSSVKFGHQPTSSVASTKSSSKSPRATSRKSIYDDIRSQFPNLTPNSTSSQFYESTPVIVQSFNWTTDDHISAGTLENPTSFTNSSYKNDNGPSSLSDSRKSSGGNSVNSLSFDKLILSWDPTDPDEWTMHRVTSWFKFHDFPESWILFFKKHQLFGHRFIKLLAYDNFAVYEKYLPQTKTASYTRFQQLLKKTMTKNVTNSHIRQKSASKLKSSRSSSESIKSKLKNSKSQEDISNSRSTSESALSPTKSGPSKTDEKNFLHSTSTHQKTKSASSLYRRSFISLRGSSSSNASSAKSPSNIKLSIPARPHSIIESNSTLTKSASPPASPSYPSIFRRHHKSSSSESSLLNSLFGSGIGEEAPTKPNPQGHSLSSENLAKGKSKHYETNVSSPLKQSSLPTSDDKGNLWNKFKRKSQIGVPSPNTVAYVTSQETPSLKSNSSTATLTVQTADVNIPSPSSSPPPIPKTANRSLEVISTEDTPKISSTTASFKETYPDCINPDKTVPVPVNNQKYSVKNFLLDQKFYPLKKTGLNDSENKYILVTKDNVSFVPLNLKSVAKLSSFKESALTKLGINHKNVTFHMTDFDCDIGAAIPDDTLEFLKKSLFLNTSGKIYIKDQMKLQQKPKPAPLTSENNVPLKSVKSKSSMRSGTSSLIASTDDVSIVTSSSDITSFDEHASGSGRRYPQTPSYYYDRVSNTNPTEELNYWNIKEVLSHEENAPKMVFKTSPKLELNLPDKGSKLNIPTPITENESKSSFQVLRKDEGTEIDFNHRRESPYTKPELAPKREAPKPPANTSPQRTLSTSKQNKPIRLVRASTKISRSKRSKPLPPQLLSSPIEASSSSPDSLTSSYTPASTHVLIPQPYKGANDVMRRLKTDQDSTSTSPSLKMKQKVNRSNSTVSTSNSIFYSPSPLLKRGNSKRVVSSTSAADIFEENDITFADAPPMFDSDDSDDDSSSSDDIIWSKKKTAPETNNENKKDEKSDNSSTHSDEIFYDSQTQDKMERKMTFRPSPEVVYQNLEKFFPRANLDKPITEGIASPTSPKSLDSLLSPKNVASSRTEPSTPSRPVPPDSSYEFIQDGLNGKNKPLNQAKTPKRTKTIRTIAHEASLARKNSVKLKRQNTKMWGTRMVEVTENHMVSINKAKNSKGEYKEFAWMKGEMIGKGSFGAVYLCLNVTTGEMMAVKQVEVPKYSSQNEAILSTVEALRSEVSTLKDLDHLNIVQYLGFENKNNIYSLFLEYVAGGSVGSLIRMYGRFDEPLIKHLTTQVLKGLAYLHSKGILHRDMKADNLLLDQDGICKISDFGISRKSKDIYSNSDMTMRGTVFWMAPEMVDTKQGYSAKVDIWSLGCIVLEMFAGKRPWSNLEVVAAMFKIGKSKSAPPIPEDTLPLISQIGRNFLDACFEINPEKRPTANELLSHPFSEVNETFNFKSTRLAKFIKSNDKLNSSKLRITSQENKTE

SEQ ID NO: 16141 - protein, 415 aa, Fusobacterium nucleatum subsp. nucleatum ATCC 25586
MLAKRYTGKKLVDNIFATSKKAKQAIVKFGKENVINATIGSLYNEDEKLAVYDVVESVYRNLPPEDLYAYATNVIGEDDYLEEVIKAVFFDDYKEALKELHIASIATTGGTGAISNTVKNYMDTGDKVLLPNWMWGTYKNIVIENGGKIETYQLFNENGDFNFEDFKNKVLELAKIQKNVVLILNEPSHNPTGFRMTYEEWVNLLDFFKSIKDTNIIVIRDVAYFEYDDRGEEETKKLRKLLIGMPKNILFMYAFSLSKSLSIYGMRIGAQIAVSSDEEVIQEFKDALPFSCRTTWSNIPKGGMKLFATIMKNPELKANFLKEKQGYMNLLNERANIFLKEAKEENLKVLPYKSGFFVTVPVGETVDKIIEDLESKNIFVIKFDTGIRIGLCSVPKRKIKGLAKKIKDSINKFKN

SEQ ID NO: 16142 - protein, 281 aa, Physcomitrella patens subsp. patens
MGRGKIEIKKIENTTSRQVTFSKRRGGLLKKAHELAVLCDAEVALVIFSSTGKHFEFASSGSMRDIIERYRKSSDGAVKRGTNTDLLGREVIKLKQQVERLESSQRHMLGEDLSALKVSDLLELEQQLDQGASRVRARKNQLILEEIEDLRRKEHELMIANEALRKKIADAEGAAEAAARANFPDARLESPKPFASDFSRDMSVSSQLAASVYPHPNLLQAQRSQTSLQLGWLSEQQIPSTEEGCAGESSLKWDHPHFHIQNRLHANISPSVRTYKLHVDR

SEQ ID NO: 16143 - protein, 518 aa, Pichia angusta
MLRTSLRSLAKPASRVSLRYYSSYPLSTTVTLPNGKSYEQPTGLFINNEFVPSKQHKTFEVINPATEEEICHVYEARKEDVDVAVDAAEKAFKGSWSTADPAIRGKALWNLAELLEAHKDTLAAIESLDNGKALQLAQGDVALVINYIRSCAGWADKLTGQYIDTGDTHHTYTKREPIGVCGQIIPWNFPLLMWSWKVGPALAAGNTVVLKTAESTPLSALYASQLVKEAGIPAGVVNIVSGFGKITGDAIASHPKIKKLAFTGSTATGRHIMKVAADSNLKKVTLELGGKSANIVFDDADVKTAISALVAGIFYNSGEVCSAGSRVFVQEGIYEEILREFKAAAETLKVGDPFDLSTFQGAQTSQMQLNKILGYVDIAHQEGGRLITGGERLGNKGFFVKPTIFADVTPDMRAYKEEIFGPFAVITPFKTADEVIELANDSEYGLAAGVHTKSLDTATYVSNKLEAGSVWINTYNDFHQMVPFGGYKQSGIGREMGAQALDNYTQWKAVRIGLQKPT

SEQ ID NO: 16144 - protein, 535 aa, Oryza sativa
  unsure (1)..(535): unsure at all Xaa locations
MAALLGILLVAFLAAAVPFALRLLHSFLWVPRRLERRFRRQGIRGPPRRPLSGNAAGYRDLLAAAQSAPLASFHHAVVARVAPHYREWPERYGRPFVFWLGPRPRLVVSDPEVVKAVLTDPTGTFDKAGSGGGNPLARQLFGEGLVGLTGEKWARHRRVIAPAFNMERIKIMLGTSRSQNKRLEIIVTLKHMYFLDGWISEITAITSSMLDKWEVQDEARAEFEIDVHKEFHTLIADVISSVAFGSSYEEGKRVFELQEEQLKLAILAMTTVYIPGFRFVPTKKNRRRHMLNQEVRNSLRKLIEINGRKCEDSNNLLGMMLSASKLGSEFRMGIEEIIDECKTFYFTGKETTANLLTWATLLLALHQEWQNKARDEVLQACGKSEHPNAENLSNLKIVNMVLKETLRLYPPAMFLNRMVNRDVKLGKLDIPAGTQLHFPILDIHHDVNIWGTNADEFDPSRFAEGKSYHLGAYFPFGIGPTICVGQNLTMVEEKVALAMILQRFALVVSXSYVHAPMHGVTLQPQYGAQVLAHKI

SEQ ID NO: 16145 - protein, 214 aa, Triticum aestivum
  unsure (1)..(214): unsure at all Xaa locations
HQETCRKIKALHQYDCLRANKATSAWGLEVRVPFLDKEFINEAMSIDPEWKMIRPDLGRIEKWILRKAFDDEERPFLPKHILYRQKEQFSDGVGYSWIDGLKDHAASNVNEQFFYFKPPFMKKGXAVTRTFPXFFPQTISDLTGPGGPSVACSPAKAVEWDAQWSGNLDPSGRAALGVHLSAYEQEHLPATILTGTSKKPRMIEVAAPGVAIES

SEQ ID NO: 16146 - protein, 246 aa, Malus x domestica
MGRGRVELKRIENKINRQVTFAKRRNGLLKKAYELSVLCDAEVALIIFSNRGKLYEFCSSSSMLKTLDRYQKCSYGAVDQVNRPAKELESSYREYMKLKGRYESLQRTQRNLLGEDLGPLNTKELEQLERQLEGSLKQVRSTKTQYMLDQLSDLQNKEQLLIEANRDLTMKLDEISSRNQLRQSWEGGDQGMAYATQHHHAQSQGFFQPLDCNPTLQMGYSAVGSEQMSATTNAQQVNCFIPGWML

SEQ ID NO: 16147 - protein, 532 aa, Nostoc punctiforme PCC 73102
MTKAPVAPVVLVILDGWGYCEEKRGNAIVAAKTPIVDSLWAAYPHTLIRTSGKAVGLPEGQMGNSEVGHLNIGAGRVVPQELVRISDAVEDGSIALNPALVKICQEVRSRNSKLHLVGLCSEGGVHSHITHLFGLLDLAKNQQIPEVCIHAITDGRDTAPTDGVRAITMLQNYIDRTGIGRIVTLSGRYYAMDRDHRWDRVKRAYDVMTQDGVGDNRTAVEILQASYAEGVKDEFVNPIRIAPGAIEPGDGVIFFNFRPDRSRQLTQALVSPTFNGFERQQITPLSFVTFTQYDSDLPVAVAFEPQNLSNILGEVIANHGLNQFRTAETEKYAHVTYFFNGGLEEPFAGEDRELVSSPMVATYDHAPAMSAVAVTDVAIAAIQKGTYSLVVINYANPDMVGHTGQIDATITAIETVDRCLGRLLESVIKAGGTTIITADHGNAEYMLDDGGNPWTAHTTNPVPFILVEGEKVKIPGYGTNVELRSDGKLSDIAPTILEILQLPQPPEMTGRSLLKTADYELQRTRTPVQVGL

SEQ ID NO: 16148 - protein, 138 aa, Sulfolobus shibatae
MTKFETVRGMKDYIGIDAEKIRYLESIFRDLAIKYGYSEIITPVVEEFKLFALKGGEELRETMYVFKDKADRELSLRPEITPGVARAYIQNLQSSPKPIRLFYFGTVYRYDEPQYGRYREFRQAGIEMIGDSSILDDL

SEQ ID NO: 16149 - protein, 273 aa, Pisum sativum
MEILPILSDSYTLGFIGAGKMAESIAKGASRSGVLPSSRIVTAHSNPSRRAAFESIGITVLSSNDDVVRASNVVVFSVKPQLVKDVVLKLKPLLTKDKLLVSVAAGIKLKDLQEWAGHERFIRVMPNTPAAVGQAASVMSLGGAATEEDANLISQLFGSIGKIWKADDKFFDAITGLSGSGPAYIYLAIEALADGGVAAGLPRDLALSLASQTVLGAASMATLSGKHPGQLKDDVTSPGGTTIAGVHELEKGGFRGTLMNAVVAAAKRSRELS

SEQ ID NO: 16150 - protein, 507 aa, Mycobacterium tuberculosis CDC1551
MTVFSRPGSAGALMSYESRYQNFIGGQWVAPVHGRYFENPTPVTGQPFCEVPRSDAADIDKALDAAHAAAPGWGKTAPAERAAILNMIADRIDKNAAALAVAEVWDNGKPVREALAADIPLAVDHFRYFAAAIRAQEGALSQIDEDTVAYHFHEPLGVVGQIIPWNFPILMAAWKLAPALAAGNTAVLKPAEQTPASVLYLMSLIGDLLPPGVVNVVNGFGAEAGKPLASSDRIAKVAFTGETTTGRLIMQYASHNLIPVTLELGGKSPNIFFADVLAAHDDFCDKALEGFTMFALNQGEVCTCPSRSLIQADIYDEFLELAAIRTKAVRQGDPLDTETMLGSQASNDQLEKVLSYIEIGKQEGAVIIAGGERAELGGDLSGGYYMQPTIFTGTNNMRIFKEEIFGPVVAVTSFTDYDDAIGIANDTLYGLGAGVWSRDGNTAYRAGRDIQAGRVWVNCYHLYPAHAAFGGYKQSGIGREGHQMMLQHYQHTKNLLVSYSDKALGFF

SEQ ID NO: 16151 - protein, 180 aa, Pisum sativum
MASMISSSAVTTVSRASTVQSAAVAPFGGLKSMTGFPVKKVNTDITSITSNGGRVKCMQVWPPIGKKKFETLSYLPPLTRDQLLKEVEYLLRKGWVPCLEFELEKGFVYREHNKSPGYYDGRYWTMWKLPMFGTTDASQVLKELDEVVAAYPQAFVRIIGFDNVRQVQCISFIAHTPESY

SEQ ID NO: 16152 - protein, 190 aa, Triticum aestivum
MIAAPVSGDSPTGAPPPPAPAAEDSPPYGSVVLGGTFDRLHDGHRRLLKASADLARDRIVVGVCTGPMLAKKEYAELIEPVEKRIKAVEDYIKSIKPELIVQVEPIEDPYGPSIIDDKLDAIIVSKETLSGGLAVNQKREGKELPLLKVEVVDLLSGDTEGEKLSSSALRKLEAAQAQQQKATIANQKGV

SEQ ID NO: 16153 - protein, 139 aa, Oryza sativa
SKASGEVLKKYSGQSDVEVWILPVYENSAWSIMAISFTSLLAMAAVLATCFFVRRHQIRRDRGRIPVTREFHGMSSQLVKAMPSLIFTKVQEDNSTSSSCAICLEDYSFGEKLRVLPCRHSMFLSHLDLWIQTQLSITR

SEQ ID NO: 16154 - protein, 341 aa, Candida albicans SC5314
MWPITTLSKSKQHFRFFSKYAVTCPGQGLYRNGVLELVKTQKSLFQHYLDELDAALNCKFSDKLFANSSETEAKQWLSKTANAQPAILASTCILSNLVETEHQISIIDNASYLLGHSLGEYTALVLSGIIDFTTGIKVVRRRGQLMEDLCSGQNYGMIALLIKPKFAKEVIELAQEHNVLGNINSNYQVVISGEITKLKEFIDILRKIQKMALIKAVQLPVSIPFHSEILKPVVPELKSLLDGALNDQKIPIISNLNGQVSYEKESTIRNILEANYQPVQWQKSIAYLENSPVSTIFNLGPGEALHGINKKYNVKSVSLDDVKSLDKNSEFMELKQQLKQN

SEQ ID NO: 16155 - protein, 180 aa, Pisum sativum
MASMISSSAVTTVSRASRGQSAAVAPFGGLKSMTGFPVKKVNTDITSITSNGGRVKCMQVWPPIGKKKFETLSYLPPLTRDQLLKEVEYLLRKGWVPCLEFELEKGFVYREHNKSPGYYDGRYWTMWKLPMFGTTDASQVLKELDEVVAAYPQAFVRIIGFDNVRQVQCISFIAHTPESY

SEQ ID NO: 16156 - protein, 292 aa, Salmonella enterica
MKTRKGIILAGGSGTRLYPVTMAVSKQLLPIYDKPMIYYPLSTLMLAGIRDILIISTPQDTPRFQQLLGDGSQWGLNLQYKVQPSPDGLAQAFIIGEEFIGHDDCALVLGDNIFYGHDLPKLMEAAVNKESGATVFAYHVNDPERYGVVEFDQNGTAVSLEEKPLQPKSNYAVTGLYFYDNSVVEMAKNLKPSARGELEITDINRIYMDQGRLSVAMMGRGYAWLDTGTHQSLIEASNFIATIEERQGLKVSCPEEIAYRKGFIDAEQIKNLAKPLSKNAYGQYLLNMIKGY

SEQ ID NO: 16157 - protein, 829 aa, Bordetella bronchiseptica RB50
MARRDFIKQTAAAAAATVAGVPLTGYTQNIVTESEAAKLKWSKAPCRFCGTGCGVNVAVKDNQVVATHGDFNAEVNKGLNCVKGYFLSKIMYGSDRLTQPLLRMKDGKYAKDGEFAPVSWDQAFDVMAEQFKRVLKDKGPEAVGMFGSGQWTVWEGYAALKLMKAGFRTNNLDPNARHCMASAAVGFMRTFGADEPMGCYDDIENADAFVLWGSNMAEMHPILWTRVTDRRLSAPATKVAVLSTFEHRSYELADLTLTFEPQSDLAILNYIANHIIRTKRVNRDFVDKHTVFREGNADIGYGLRPEHPLQQAARNAGDAGGSKPITFDDFARFVSKYDLEYTAKLSGVPKNRLEELAELYADPKVRVTSFWTMGFNQHTRGVWCNNMVYNIHLLTGKISTPGNSPFSLTGQPSACGTAREVGTFSHRLPADLVVTNPEHRRHAEEIWKLPDGTIPSKVGAHAVLQNRMLKDGKINAYWVMVNNNMQAAANLMNEGLPGYRNPENFIVVSDAYPTVTTLSADLILPAAMWVEKEGAYGNAERRTQFWHQLVDAPGQARSDLWQLVEFSKRFKVEEVWPADLLAKKPEYRGKTLYDVLFANGKVNQFPNTELDAEYANQEAQAFGFYLQKGLFEEYAEFGRGHGHDLAPFDVYHKARGLRWPVVDGKETLWRYREGSDPYVKPGTGFQFYGNPDGKAVIFALPYEPPPEAPDKEYPFWLSTGRVLEHWHSGSMTRRVPELYKAFPEAVCFMHPDDAQALGVRRGVEVEVVSRRGRMRTRVETRGRDKPPRGLVFVPWFDAGQLINKVTLDATDPISFQTDFKKCAVKIVKV

SEQ ID NO: 16158 - protein, 289 aa, Salmonella enterica
MKTRKGIILAGGSGTRLYPVTMAVSKQLLPIYDKPMIYYPLSTLMLAGIRDILIISTPQDTPRFQQLLGDGSQWGLNLQYKVQLSPDGLAQAFIIGEEFIGNDNCALVLGDNIFYGHDLPKLMNAAVNKEDGATVFAYHVNDPERYGVVEFDQNGTAVSLEEKPLQPKSNYAVTGLYFYDNSVVAMAKNLKPSARGELEITDINRIYMEQGRLSVAMMGRGYAWLDTGTHQSLIEASNFIATIEERQGLKVACLEEIAYRKNYISKEKIQNAILKFGKSAYGAYLKSLF

SEQ ID NO: 16159 - protein, 217 aa, Gossypium hirsutum
DVYYWECKGYTPLFPRILGHEASGIVESVGEGVNDLKPGDHVLPIFTGECKECRHCLSEESNNMCELLRINCDRGVMLADGKTRFSINGKPIYHFVGTSTFSQYTVVHVGQVAKISPTAPLDKVCPISCGICTGFGATVNVAKPKKGQTVAVFGLGAVGLAAAEGARVCGASRIIAVDVNPRRFEEAKRFGITEFVNPKDYDKPVQEVIVEMTGGGV

SEQ ID NO: 16160 - protein, 396 aa, Haemophilus ducreyi 35000HP
MFNHIEAALTDPILGLNDAFRADIRKTKTNLGIGVYMNAEGQTPIMNAVKLAETRLLAEESQKNYLQIDGIAHFNSYTQTLLFGQDADVIQTGRVKTAQSLGGTGALRIAMEFIKRQTDAKTIWISNPTWPNHNAIAEAVGLTIKNYRYYNPETNGLDWDNLLADLQQAERGDVVLLHGCCHNPTGIDPTAEQWDKLAILSAEKGWLPLFDFAYQGLANGLDEDAYGLRAFAKNHKELLIASSYSKNFGLYNERVGAFTLVAENAEIANNAFTQIKSIIRVLYSNPAAHGAHTVTTVLADDQLRANWIAELSEMRDRIKTMRTKMVQLLAEKGAKKDFSFISDQNGMFSFSGLTATQVDRLRDEFAIYAVRSGRINVAGLTDDNIEAFCDAVVKVL

SEQ ID NO: 16161 - protein, 218 aa, Gossypium hirsutum
DVYYWECKGYTPLFPRILGHEASGIVESVGEGVNDLKPGDHVLPIFTGECKECRHCLSEESNNMCELLRINCDRGVMLADGKTRFSINGKPIYHFVGTSTFSQYTVVHVGQVAKISPTAPLDKVCPISCGICTGFGATVNVAKPKKGQTVAVFGLGAVGLAAAEGARVCGASRIIAVDVNPRRFEEAKRFGITEFVNPKDYDKPVQEVIVEMTGGGVD

SEQ ID NO: 16162 - protein, 634 aa, Xanthomonas axonopodis pv. citri str. 306
MNQPTEPLDMDVCAQEPIHIPGLIQPYGVLLVIEPADGRIVQASSTAADLLGVPMDALLGTPYTQVLELPDAQPFAVDDQPQHLLHADVRFPQRSAPTDHPWVAAWHLYPEQWLVEIEPRDARLMDVTLREALPLLRSIERDAGIDEAAVRAAKGLRSMIGFDRVMVYRFDEEWNGDVIAEARQPELEAYLGLHYPASDIPAQARALYLRNRVRQIADVRYQPSPIQPTLHPRLGTPVDLSDVSLRSVSPVHLEYLANMGVSATLVSSIVVNDALWGLISCHHYSPHFTSHAMRDATDAVTRALAGRIGALQAVGRARLESVLLTIREKLITDFNDAEHLTVDMLADMAPDLMDVVDADGVAIFHGNEISRHGSVPDAEALRRIREHLESEHHDALREDAVGALHVDAIGEVFPELADLAPLAAGFIFVPLMPQSRSALLWTRREQVQQVKWAGNPQLAKLQDIPNSRLSPRKSFDLWQQTVRGRARRWSPLHLESARSLRVLIELMERKRFQQDFTLLEASLSRLRDGVAIIERGAKGAAHRLMFVNPAFAELSQTEVADLIGCDILALLDDDAARGKVELLEEALRLGRAAYVTLPLRTRDGAPVYRQFHLEPLPSPSSITAHWLLQLRDPE

SEQ ID NO: 16163 - protein, 231 aa, Bdellovibrio bacteriovorus HD100
MNKLVLGGLVVAAMAFTTACQKKVKLDTDMKKASYAIGQQIGGNLKQQNIDFDADALAMALKDAAAGKNEMSKEDMQAAMMKLQEMAMKKQQEQAEGNAKAGKDFLEKNKSAAGVKTTASGLQYIVEKEGTGASPKKEDVVKVHYKGTLTNGEQFDSSYDRGQPAEFPVGGVIPGWTEALQLMKVGGKAKLFIPPELAYGPSGRPGIPPNSVLVFEVELIDIVKQDTKKKK

SEQ ID NO: 16164 - protein, 464 aa, Mycobacterium tuberculosis CDC1551
MTHYDVVVLGAGPGGYVAAIRAAQLGLSTAIVEPKYWGGVCLNVGCIPSKALLRNAELVHIFTKDAKAFGISGEVTFDYGIAYDRSRKVAEGRVAGVHFLMKKNKITEIHGYGTFADANTLLVDLNDGGTESVTFDNAIIATGSSTRLVPGTSLSANVVTYEEQILSRELPKSIIIAGAGAIGMEFGYVLKNYGVDVTIVEFLPRALPNEDADVSKEIEKQFKKLGVTILTATKVESIADGGSQVTVTVTKDGVAQELKAEKVLQAIGFAPNVEGYGLDKAGVALTDRKAIGVDDYMRTNVGHIYAIGDVNGLLQLAHVAEAQGVVAAETIAGAETLTLGDHRMLPRATFCQPNVASFGLTEQQARNEGYDVVVAKFPFTANAKAHGVGDPSGFVKLVADAKHGELLGGHLVGHDVAELLPELTLAQRWDLTASELARNVHTHPTMSEALQECFHGLVGHMINF

SEQ ID NO: 16165 - protein, 439 aa, Corynebacterium efficiens YS-314
MDPSDLAWILAAFALVSLMFPGLALLYGGMLGGHQVLNTLMMVMGALAVTCLVYVTYGHGLVMGNSIGGLGIIGNPLDHLGFHDIMADDGAGGLMWAGFYVLFAAISLALVASGAAGRMKFGAWMVFGAIWLTLVYAPLAHWVFGGGWMITALGFHDFAGGTAIHMNAGASGLALALVLGRRHSMAVRPHSLPMTLLGAGMIMVGWFGFNGGTAGGANFLASYVVVTTLLATGGGMLGFILIERIREGRSTLLGLATGIIAGLVAITPAADAVSPVGALITGFLGSAVAAWVISWKRTHRIDDTLDVFAVHGMAGVAGALFVMLLGSPDAPAGLAGVLRGGELSLLWREPLAIIITLGYAFGMTWLIATVMNRITPIRIASEDEYTGIDTAIHAESAYSLTPVGMASRTNPETRIPEETAPADRAGVAKRNTDQKEDAR

SEQ ID NO: 16166 - protein, 265 aa, Zea mays
MRALLADGGMALAMAPEVNESSGGAALSQGLLWWASECHGVLYSLAVMLPSLAFVGFLAWQARRSFRRISYGRSHVVVVAYYALLWVVAVLNLLWCFLQAWQCMPDRAFSWNVLSLFTKSGMLFLEVSLIAFLLQGNDATDALLKTIYVFGFGVPLFIDADQGTGGKWGLWILHKLVLTGVYGLIVFMHHSRWRNRLPAKPAYYNYVCAMLLLNGVSLFGCFLVASEAGFGLWLHNLTIVCNHSHYLRLLYVTFLSYFFQDPSCV

SEQ ID NO: 16167 - protein, 457 aa, Bacteroides thetaiotaomicron VPI-5482
MKQYDAIIIGFGKAGKTLAAELSNRGWQVAVVEQSDEMYGGACPNVACIPTKTLIHESEISTLLYHNDFDKQSNMYRQAIARKNKLTSFLRENNYEKLSKRPNVTIYTGKGSLVSANTVKVALPEEEIELQGKEIFINTGSTPIIPSIEGIQQSRNVYTSTTLLELDILPKHLIIVGGGYIGLEFASMYAGFGSKVTLLEAGNRFMPRNDSDIAKSVREVMEKKGVEIRLNVRTQSIHDTHDGVTLTYSDTSDGTPYFVDGDAILIATGRKPMIEGLNLQAAGVEVDAHGAIVVNDQLHTNAPHIWAMGDVKGGAQFTYVSLDDFRIIRDQLFGDKKRDINDRDPLPYAVFIDPPLAHIGITEEEALRKGYSFKVSRLPATSVVRSRTLQQTDGMLKAIINSHSGKIMGCTMFCTDAPELINMVAMAMKTGQTSTFLRDFIFTHPSMSEGLNQLFDV

SEQ ID NO: 16168 - protein, 229 aa, Triticum aestivum
  unsure (1)..(229): unsure at all Xaa locations
MVLPGIMLRLPILTVSVPGLDYIWAKEHVXNWSAFAPGFVELEENEEYLDREDEFDLNPREEQAEKVVIDEDADVDIETSEKNTVFSDVEDSVDEISYLPAIPYPDSPDEQPEKCLGSSKLEDSNHSGSPSSMDAVQNGQAIPPASSPMEVDNSTAEDPEEGPNSKRKRRLSVKGLELQQSEKGKKGSTKNKSLGKSTKSSAKKMESANGNSSAFDDEATEDDEINIDS

SEQ ID NO: 16169 - protein, 504 aa, Matthiola incana
MLAAYAIPILTAILSIFWYLLKRVQRRPPLPPGPRGLPIVGNLPFLDPDLHTYFTSLAQTHGSIFKLNLGSKLTVVISSPSLAREILKDQDINFANHDVPLTGRAATYGGLDILWSPYGAEWRMLRKVCLLKLLSRKTLDSFYELRRKEIRERTRFLYKQSRGEAPVNVGDQLFLTMMNLTMNMLWGGSVKAEEMASVGTEFKGVISEITRLIGEPNVSDFFPWLARFDIQGLVKSMRVSARQLDAVFDRAIKQMQQITSSDGECKDFLQYLMKLKDQESDSEVPITLNHVKAVLTDMVVGGTDTSMNTVEFAMAELINKPELMKKAQQELDQVVGKDNIVEESHITKLPYIVAIMKETLRLHPTLPLLVPRRPAEAAVVGGYTIPKDTKIFINVWCIQRDPNVWEKPTEFRPERFLDNNKPRDFTGTDYSYFPFGSGRRICAGVALAERMVLYTLATLLHSFDWKIPQGHVLDLEEKIGIVLKLKTPLVALPVPRLSDSNLYI

SEQ ID NO: 16170 - protein, 265 aa, Petunia x hybrida
MAQLRADDLSFIFGLLGNIVSFMVFLAPVPTFYKIYKRKSSEGYQAIPYMVALFSAGLLLYYAYLRKNAYLIVSINGFGCAIELTYISLFLFYAPRKSKIFTGWLMLLELGALGMVMPITYLLAEGSHRVMIVGWICAAINVAVFAAPLSIMRQVIKTKSVEFMPFTLSLFLTLCATMWFFYGFFKKDFYIAFPNILGFLFGIVQMLLYFVYKDSKRIDDEKSDPVREATKSKEGVEIIINIEDDNSDNALQSMEKDFSRLRTSK

SEQ ID NO: 16171 - protein, 581 aa, Bacteroides thetaiotaomicron VPI-5482
MENQELIKQVTEKAEKWLTPAYDAETQAEVKRMLENEDKTELIEAFYKDLEFGTGGLRGIMGVGSNRMNIYTVGAATQGLSNYLKKNFKDLPQISVVVGHDCRNNSRLFAETSANIFSANGIKVYLFDDMRPTPEMSFAIRHLGCQSGIILTASHNPKEYNGYKAYWDDGAQVLAPHDAGIIDEVNNIASAADIKFKGNPDLIQIIGEDIDKIYLDMVKTVSIDPEAIARHKDMKIVYTPIHGTGMMLIPRALKMWGFENVFTVPEQMIKDGNFPTVISPNPENAEALSMAVNLAKEIDADLVMASDPDADRVGIACKDDKGEWVLINGNQTCMMYLYYILTQYKQLGKIKGNEFCVKTIVTTELIKKIADKNNIEMLDCYTGFKWIAREIRLREGKKKYIGGGEESYGFLAEDFVRDKDAVSACCLIAEVAAWAKDNGKSLYQLLLDIYVEYGFSKEFTVNVVKPGKSGAEEIKAMMENFRANPPKELGGSKVILSKDYKTLKQTDAEGKVTDLDMPETSNVLQYFTEDGSKVSVRPSGTEPKIKFYMEVQGEMGCRNCFASADAAAMEKIEAVKKSLGI

SEQ ID NO: 16172 - protein, 292 aa, Salmonella enterica
MKTRKGIILAGGSGTRLYPVTMAVSKQLLPIYDKPMIYYPLSTLMLAGIRDILIISTPQDTPRFQQLLGDGSQWGLNLQYKVQPNPDGLAQAFIIGEEFIGNDDCALVLGDNIFYGHDLPKLMDVAVNKENGAYGIAYHVNDPERYGVVEFDQNGTAVSLEEKPLQPKSNYAVTGLYFYDNSVVAMAKNLKPSARGELEITDINRIYMEQGRLSVAMMGRGYAWLDTGTHQSLIEASNFIATIEERQGLKVSCPEEIAYRKGFIDSQKVMSLAKKLSKNAYGQYLINMIKGR

SEQ ID NO: 16173 - protein, 599 aa, Candida albicans SC5314
MSDENEITPLLPFTSHRSRRSSKCSEIDENEIVSYVQQRRQSIASVGHDKIPKSFALPVTTAATGVTSGGVGVVTGGGTSGVASPRLARSISRSSLISGKSYSINDIIEIHQQEIDPEPKTTILNEIKVIIKYSLPLIVTFLLQYSLTVASVFSVGRLGSTELAAVSLSSMTANISGYAMIQGVSTCLDTLCAQAFGRKDYNSVGVHFIRCNYLLLLLYIPMAIFWVFGAEPLLVTIIGQDSIAMCQLAGKYLRILTIGLPGFILFENAKHFLQTQGIFHASTLVLIICAPLNAFLNYLLVWNKSIGLGFIGAPISVVITNWIMCFMLYGYIFCIDGYQCWPQREYRKLYHKIFFKHWNKMIKLSVPGVLMVEAEWLAFEIITFQAAKFGTEVLAAQSIINTTCVIFYQIPFALSIAAGTRIAWYIGAASETAAKKSTYAVLYAATFIGLFNCGFMLTFRHSLASLYTEDNAVIELAAKVLIVGSIYQINDCLSCATAGVLRGQGRQMIGGIVNLIGYYLIALPFAYTLAFIFQFGLLGLWFGMIIALIFVSFTQTFFVISSNWQKIIDDCIEEAIIEDGNLNIDAHSILPSMSNSIVV

SEQ ID NO: 16174 - protein, 217 aa, Gossypium hirsutum
VYYWECKGYTPLFPRILGHEASGIVESVGEGVNDLKPGDHVLPIFTGECKECRHCLSEESNNMCELLRINCDRGVMLADGKTRFSINGKPIYHFVGTSTFSQYTVVHVGQVAKISPTAPLDKVCPISCGICTGFGATVNVAKPKKGQTVAVFGLGAVGLAAAEGARVCGASRIIAVDVNPRRFEEAKRFGITEFVNPKDYDKPVQEVIVEMTGGGVD

SEQ ID NO: 16175 - protein, 515 aa, Zea mays
  unsure (1)..(515): unsure at all Xaa locations
MASADLAEAMEPGKKSNVKYASVCAIMASMACVILGYDIGVMSGAAIYIKKDLKITDVQLEILIGIISLYSLFGSFAGARTSDRIGRRLTVVFAAVIFFVGALLMGFSVNYGMLMVGRFVAGVGVGYGGMIAPVYTAEISPAASRGFLTSFPEVFINLGILLGYLSNFAFARLPLHLGWRVMLGIGAVPSALLALLVFCMPESPRWLVMKGRLADARVVLERTSATPEEAAARLADIKAAAGIPRDLDGDVVAVPNKGRDGGSSETQVWKQLILSPTPAVRRILLSAVGLHFFQQASGSDSVVQYSARLFKSAGITDDNKXLGVTCAVGVTKTFFILVATFLLDRAGRRPLLLTSTGGMIVSLIGLGTGLTVVGHHPDAKIPSAVALCIASTLAYIAFFSIGLGPITGVYTSEIFPLQVRALGFAVGVASNRVTSAVISMTFLSLSKAITIGGSFFLYSGIAAVAWVFFFTCLPETRGRTLEEMGKLFGMPDTGMAEEAEDAAAKEKVVELPSSK

SEQ ID NO: 16176 - protein, 339 aa, Corynebacterium glutamicum ATCC 13032
MPKYIAMQVSESGAPLAANLVQPAPLKSREVRVEIAASGVCHADIGTAAASGKHTVFPVTPGHEIAGTIAEIGENVSRWTVGDRVAIGWFGGNCGDCAFCRAGDPVHCRERKIPGVSYAGGWAQNIVVPAEALAAIPDGMDFYEAAPMGCAGVTTFNALRNLKLDPGAAVAVFGIGGLVRLAIQFAAKMGYRTITIARGLEREELARQLGANHYIDSNDLHPGQALFELGGADLILSTASTTEPLSELSTGLSIGGQLTIIGVDGGDITVSAAQLMMNRQIITGHLTGSANDTEQTMKFAHLHGVKPLIERMPLDQANEAIARISAGKPRFRIVLEPNS

SEQ ID NO: 16177 - protein, 140 aa, Bordetella bronchiseptica RB50
MRRAAVLLGLWLLLGAPAAADIAQRELRLAHSLRCLVCQNQTLAESNAPLAHDMRALIRQQLADGRSDEEVMQFFEDRYGDFVRYEPPFKPATWLLWLGPFALLLAGFVVLWRALARRPGAAPLTDAQRARAERFLDEES

SEQ ID NO: 16178 - protein, 292 aa, Salmonella enterica
MKTRKGIILAGGSGTRLYPVTMAVSKQLLPIYDKPMIYYPLSMLMLAGIRDILIISTPQDTPRFEQLLGEGSQWGLNLQYKVQPTPDGLAQAFIIGEEFIGNDDCALVLGDNIFYGHDLPRLMETAVNKESGATVFAYHVNDPERYGVVEFDKDGTAISLEEKPLEPKSNYAVTGLYFYDNDVVEMAKNLKPSARGELEITDINRIYMEQGRLSVAMMGRGYAWLDTGTHQSLIEASNFIATIEERQGLKVSCPEEIAYRKGFIDSEQVKKLAIPLSKNAYGQYLIRMVKGY

SEQ ID NO: 16179 - protein, 785 aa, Candida albicans SC5314
MINITKPLTPKSISQQKQQQQHPYKNISTTKSNNNPQASGSKSFVQEKYPSQLYESEIKIHNQSLAEYDLDIYDIMVNLIETNKPNLSLYKQQPYLTFTIRLKLIDFLLKMSIRLKILPFVFFKAVKIFDRYCSKRIVLLDQSQLIITTCLWIASKVMGGNNHFVNINNLDKIGQENFRTINDLGYGCGGKYLGPTERFRLPKLHELVKLCGAKCKYDQGMFKQMEVHVLNTLEWSLNDPSIEEFIIDSHEFNVININNNNEYEQTITTNDESANANANDGNEFFKIKEFLSYAALYSHDLIDTNIIELGQVIMDLINETFQLQPFDKHYQTILNCDSDHPIRFDMQRYKHIKKAVIKSVLNASDFMMKVFHSKGPQFIYQQFNLQYKLNYTTNSIIGGFGNSGYSPTTTTTTTTSDNISTTPTSSTGSTTPVSSYIGYANSRSSSVSSTSSVASSSNANTPSSSCSTTSTTPLGMTPHKRQKNYSNYSNYSNYSNSSTSLGLTNNNNNNTTISPVDSTTINSHTKNSSQLNYQYHNGGSNNNNHHHHHKPSLSVSIPPPQMHSHHHSSTVYQMVTPPNSANKNSNKSNSANNNNTTTIATTTTTTNNNNNNSQLPAPHQLSYNNYFNSPNMQPPPPMKYTPGRKQQQQQNQGQNQQQPLQLYQGDNNNNGTNTNSKFNSIAGSRAVSSSSSSAVSIASSISTNNYDKYDDDDDDDNSNDLFSSSRRFMNYSNYSSSTINGSVMSGVINNNSGNGKGNGNGGSGTPISENDSPIYTKTRLCNMIH

SEQ ID NO: 16180 - protein, 438 aa, Aspergillus oryzae
MPITKIHARSVYDSRGNPTVEVDVVTETGLHRAIVPSGASTGQHEAHELRDGDKTHWGGKGVLKAVENVNKTIAPAVIEENLDVKDQSKVDEFLKKLDGSANKSNLGANAILGVSLAIAKAGAAEKGVPLYAHISDLAGTKKPYVLPVPFQNVLNGGSHAGGRLAFQEFMIVPSAAPSFSEALRQGAEVYQKLKTLAKKKYGQSAGNVGDEGGVAPDIQTAEEALDLITEAIEQAGYTGKMKIAMDVASSEFYKADVKKYDLDFKNPDSDSSKWLTYEQLADLYKTLASKYPIVSIEDPFAEDDWEAWSYFYKTSDFQIVGDDLTVTNPLRIKKAIETKACNALLLKVNQIGTLTESIQAAKDSYADNWGVMVSHRSGETEDVTIADIAVGLRSGQIKTGAPARSERLAKLNQILRIEEELGNNAIYAGEKFRTSVNL

SEQ ID NO: 16181 - protein, 218 aa, Gossypium hirsutum
VYYWECKGYTPLFPRILGHEASGIVESVGEGVNDLKPGDHVLPIFTGECKECRHCLSEESNNMCELLRINCDRGVMLADGKTRFSINGKPIYHFVGTSTFSQYTVVHVGQVAKISPTAPLDKVCPISCGICTGFGATVNVAKPKKGQTVAVFGLGAVGLAAAEGARVCGASRIIAVDVNPRRFEEAKRFGITEFVNPKDYDKPVQEVIVEMTGGGVDR

SEQ ID NO: 16182 - protein, 527 aa, Emericella nidulans
MADAVIAGQRVEAPVTWKAYLMCVFAAFGGIFFGYDSGYINGVMGMDYFIQEFTGKVKSETPAAQFVISSSNKSLITSILSAGTFFGAIIAGDLAEWYGRRITIINGCGVFMAGVAFQIASTTVPMLVVGRLIAGVGVGFVSAIIILYMSEISPRRFRGAIVSGYQFCITIGLMLASCVNYGTENRNDSGSYRIPIALQLLWAIILGIGLFVLPESPRYYVRKNNLAEAAKTLARVRGQPPESEYITQELAEIVANNEYEMQVIPQGGYFATWLNCFRGGLRSPNSNLRRVILGTSLQMMQQWTGVNFVFYFGTTFFQNLGTIDDPFLISMITTIVNVFSTPISFYTMEKLGRRPLLLWGALGMVVCQFIVAIAGTVDGDNSKTVSAQISFICIYIFFFASTWGPGAWVVIGEIFPLPIRSRGVALSTASNWLWNCIIAVITPYMVDIDKGNLKSRVFFIWGSLCACAFVYVYFLIPETKGLTLEQVDKMMEETTPRTSAKWKPHSTFATEMGMTEKNASTTVESAA

SEQ ID NO: 16183 - protein, 987 aa, Saccharomyces cerevisiae
MQSQDSCYGVAFRSIITNDEALFKKTIHFYHTLGFATVKDFNKFKHGENSLLSSGTSQDSLREVWLESFKLSEVDASGFRIPQQEATNKAQSQGALLKIRLVMSAPIDETFDTNETATITYFSTDLNKIVEKFPKQAEKLSDTLVFLKDPMGNNITFSGLANATDSAPTSKDAFLEATSEDEIISRASSDASDLLRQTLGSSQKKKKIAVMTSGGDSPGMNAAVRAVVRTGIHFGCDVFAVYEGYEGLLRGGKYLKKMAWEDVRGWLSEGGTLIGTARSMEFRKREGRRQAAGNLISQGIDALVVCGGDGSLTGADLFRHEWPSLVDELVAEGRFTKEEVAPYKNLSIVGLVGSIDNDMSGTDSTIGAYSALERICEMVDYIDATAKSHSRAFVVEVMGRHCGWLALMAGIATGADYIFIPERAVPHGKWQDELKEVCQRHRSKGRRNNTIIVAEGALDDQLNPVTANDVKDALIELGLDTKVTILGHVQRGGTAVAHDRWLATLQGVDAVKAVLEFTPETPSPLIGILENKIIRMPLVESVKLTKSVATAIENKDFDKAISLRDTEFIELYENFLSTTVKDDGSELLPVSDRLNIGIVHVGAPSAALNAATRAATLYCLSHGHKPYAIMNGFSGLIQTGEVKELSWIDVENWHNLGGSEIGTNRSVASEDLGTIAYYFQKNKLDGLIILGGFEGFRSLKQLRDGRTQHPIFNIPMCLIPATVSNNVPGTEYSLGVDTCLNALVNYTDDIKQSASATRRRVFVCEVQGGHSGYIASFTGLITGAVSVYTPEKKIDLASIREDITLLKENFRHDKGENRNGKLLVRNEQASSVYSTQLLADIISEASKGKFGVRTAIPGHVQQGGVPSSKDRVTASRFAVKCIKFIEQWNKKNEASPNTDAKVLRFKFDTHGEKVPTVEHEDDSAAVICVNGSHVSFKPIANLWENETNVELRKGFEVHWAEYNKIGDILSGRLKLRAEVAALAAENK

SEQ ID NO: 16184 - protein, 589 aa, Zea mays
  unsure (1)..(589): unsure at all Xaa locations
MCGILAVLGCSDCSQARRARILACSRRLKHRGPDWSGLYQHEGNFLAQQRLAIVSPLSGDQPLFNEDRTVVVVANGEIYNHKNVRKQFTGAHSFSTGSDCEVIIPLYEKYGENFVDMLDGVFAFVLYDTRDRTYVAARDAIGVNPLYIGWGSDGSVWMSSEMKALNEDCVRFEIFPPGHLYSSAGGGFRRWYTPHWFQEQVPRTPYQSLVLREAFEKAVIKRLMTDVPFGVLLSGGLDSSLVASVTKRHLVETDAAEKFGTELHSFVVGLEGSPDLKAAREVADYLGTTHHEFHFTVQDGIDAIEEVIYHDETYDVTTIRASTPMFLMARKIKSLGVKMVLSGEGSDELLGGYLYFHFAPNREELHRETCRKVKALHQYDCLRANKATSAWGLEVRVPFLDKEFVDVAMGMDPEWKMYDKNLGRIEKWVLRKAFDDEEHPYLPEHILYRQKEQFSDGVGYNWIDGLKSFTEQQVTDEMMNSAAQMFPYNTPVNKEAYYYRMIFERLFPQDSARETVPWGPSIACSTPAAIEWVEQWKASNDPSGRFISSHDSAATDRTXATSWRWPTAAGTXAANGTVNGNDVAVAIAV

SEQ ID NO: 16185 - protein, 295 aa, Haemophilus ducreyi 35000HP
MKVIIPVAGLGTRMLPATKAIPKEMLTIADKPLIQYIVNECVAAGIKEIVFVTHSSKNAIENHFDTSFELETMLEKRVKRQLLDEVRSIVPNDVTLMHVRQGQAKGLGHAVLCGKAVVGKEPFAVVLPDVILADFTANPKTENLAAMIKRFSETQCSQIMVAPVPQEDVSNYGIVDCATDNIRAGETAKIAKMVEKPSIENAPSNLAIVGRYVFSATIWDLLERTPVGVGDEIQLTDAIDMLIEKETVEAFHMTGRAFDCGDKLGYMEAFVEYSLRHEKCGQQFQKIIKELAKSL

SEQ ID NO: 16186 - protein, 459 aa, Ralstonia metallidurans CH34
MAQRFDAIIIGTGQAGPALAARLAGAGMKLAVIERGRFGGTCVNTGCIPTKALIASAYAAQLARRAAEYGVTIGGPVAVDMRQVKARKDEISGRSSQGVEQWMRGLDNVTVHQGHARFEHARGVRVNGELLEADQIFINVGGRALIPPMPGLDQVSYLTNSSMMEVDFLPEHLIIVGGSYIGLEFGQMYRRFGARVTIVEKGPRLIQREDEDVSQAVREILEREGIEVRLDANCLSARKDGDHIAVGLDCAGGAPEVHGSHLLMAVGRVPNTDDLGLDKAGIETDARGYIKVDDQLRTSVPGIWALGDCNGRGAFTHTSYNDYEIVAANLLDNDPRAVTDRIPAYALFTDPPLGRIGMTEREARQSGRKVLVGTRPMSRVGRAVEKGESQGFMKILVDADTRLLLGAAILGLNGDEVVHSLLDVMYAGAPYTTISRAVHIHPTVSELVPTVLQGLRALT

SEQ ID NO: 16187 - protein, 572 aa, Escherichia coli
MSMSEKHPGPLVVEGKLTDAERMKLESNYLRGTIAEDLNDGLTGGFKGDNFLLIRFHGMYQQDDRDIRAERAEQKLEPRHAMLLRCRLPGGVITTKQWQAIDKFAGENTIYGSIRLTNRQTFQFHGILKKNVKPVHQMLHSVGLDALATANDMNRNVLCTSNPYESQLHAEAYEWAKKISEHLLPRTRAYAEIWLDQEKVATTDEEPILGQTYLPRKFKTTVVIPPQNDIDLHANDMNFVAIAENGKLVGFNLLVGGGLSIEHGNKKTYARTASEFGYLPLEHTLAVAEAVVTTQRDWGNRTDRKNAKTKYTLERVGVETFKAEVERRAGIKFEPIRPYEFTGRGDRIGWVKGIDDNWHLTLFIENGRILDYPARPLKTGLLEIAKIHKGDFRITANQNLIIAGVPESEKAKIEKIAKESGLMNAVTPQRENSMACVSFPTCPLAMAEAERFLPSFIDNIDNLMAKHGVSDEHIVMRVTGCPNGCGRAMLAEVGLVGKAPGRYNLHLGGNRIGTRIPRMYKENITEPEILASLDELIGRWAKEREAGEGFGDFTVRAGIIRPVLDPARDLWD

SEQ ID NO: 16188 - protein, 429 aa, Oryza sativa (japonica cultivar-group)
MQRAAAASRATAWSTARHGAARVTASASFSGGGGIVAGAALPLRVRGGQLMSLPLLSGGRAVTARVAAAEAPLPADDADAAAGRERGALAETAQLGAMIVAWYLLNIYFNIYNKQVFLPPQEPSPSSSSPSLNPISHGESQVLQPLPFPYTITAFQLAFGSFVIFLMWALKLHPAPRISISQLAKIAPLAAGHMLGTVFTNMSLSKVAVSFTHTIKASEPFFTVLLSAFFLGEVGDTIQWVPVNRFRDEIGAEFKFVFELQTPSLLVLGSLVPIVGGVALASLTELSFNWIGFWSAMASNLLYQSRNVLSKKLLGGEEEALDDINLFSILTILSFLLSLPLMLFSEGVKFSPGYLRSTGLNLQELCVRAALAGFCFHGYQKLSYLILARVSPVTHSVANCVKRVVVIVASVLFFRTPISPVNALELNSS

SEQ ID NO: 16189 - protein, 446 aa, Triticum aestivum
MAATIQSVKARQIFDSRGNPTVEVDVCCSDGTFARAAVPSGASTGVYEALELRDGGSDYLGKGVSKAVDNVNLIIAPALIGKDPTAQTELDNFMVQQLDGTKNEWGWCKQKLGANAILAVSLAICKAGASIKKIPLYQHIANLAGNKQLVLPVPAFNVINGGSHAGNKLAMQEFMILPTGAASFKEAMKMGVEVYHNLKSVIKKKYGQDATNVGDEGGFAPNIQENKEGLELLKTAIEKAGYTGKVVIGMDVAASEFYNDKDKTYDLNFKEENNDGSQKISGDSLKNVYKSFVSEYPIVSIEDPFDQDDWVHYAKMTEECGEQVQIVGDDLLVTNPTRVAKAIKEKSCNALLLKVNQIGSVTESIEAVKMSKHAGWGVMTSHRSGETEDTFIADLAVGLSTGQIKTGAPCRSERLAKYNQLLRIEEELGAAAVYAGLKFRAPVEPY

SEQ ID NO: 16190 - protein, 277 aa, Salmonella enterica
QLPSGSELSLYDIAPVTPGVAVDLSHIPTAVKIKGFSGEDATPALEGADVVLISAGVARKPGMDRSDLFNVNAGIVKNLVQQIAKTCPKACMGIITNPVNTTVAIAAEVLKKAGVYDKNKLFGVTTLDIIRSNTFVAELKGKLPTEVEVPVIGGHSGVTILPLLSQIPGVSFTEQEAAELTKRIQNAGTEVVEAKAGGGSATLSMGQAAARFGLSLVRALQGEKGVVECAYVEGDGQYARFFSQPLLLGKNGVEERKSIGTLSAFEQHSLDAMLDTL

SEQ ID NO: 16191 - protein, 175 aa, Oryza sativa
MAPSVMASSATTVAPFQGLKSTAGMPVARRSGNSSFGNVSNGGRIRCMQVWPIEGIKKFETLSYLPPLTVEDLLKQIEYLLRSKWVPCLEFSKVGFVYRENHRSPGYYDGRYWTMWKLPMFGCTDATQVLKELEEAKKAYPDAFVRIIGFDNVRQVQLISFIAYKPPGCEESGGN

SEQ ID NO: 16192 - protein, 405 aa, Corynebacterium efficiens YS-314
MAVKTLKDLLDEGVDGRHVIVRSDFNVPLNDDREITDKGRIIASLPTLKALTEAGAKVIVMSHLGRPKGEVNEKYSLAPVAEALSDELGQYVALAADVVGEDAHERANGLTEGDILLLENVRFDPRETSKDEAERGAFADELAALAADNGAFVSDGFGVVHRAQTSVYDIAKRLPHYAGRLVENEISVLEKIAENPEAPYTVVLGGSKVSDKLGVIEALASKADSIIIGGGMCYTFLKAQGHDVQKSMLQDEMIDTCKDLLERFGDKIVLPVDLTWASEFAKDAEKKVTDLDSAPEGWLSLDIGPKSVEKFADVLGASKTIFWNGPMGVFEFEAFSDGTRGVAQAIIDATANNGAFSVVGGGDSAASVRVLGLDEEGFSHISTGGGASLEFLEGKELPGVAILKD

SEQ ID NO: 16193 - protein, 175 aa, Zea mays
MGNYLSCTLAKAPGPRPGGKRARVILPDDGGVRQVALPATAAELMMDAPGHFLVHVHARGAGLGLGARLAALPADEELQLGAVYATFPMKRLGTPLAAPDLARLAAAAAREAHRSAKVAVVAAPPPEDAPRLRLEEMVDDAAAAEIAVTKHRASGARSRRPTLETIDEESYLSSR

SEQ ID NO: 16194 - protein, 330 aa, Pyrus communis
DVDFWDAKGQTPLFPRIFGHEASGIVESVGEGVEGLEVGDHVLPVFTGECGDCAHCKFEESNMCDLLRINTDRGVMLSDGKTRFSINGTPINHFLGTSTFSEYTVIHSGCLAKTNPLAPLDIVCILSCGISTGLGATLNVAKPKKGSSVAIFGLGAVGLAAAEGARICGASRIIGVDRNPKRFEEAKKFGVNEFVNPKDHDKPVQEVIAEMTNGGADRSIECTGYINAMISAFECVHDGWGVAVLVGVPNKDAVFMTKPINVLNERTLKGTFFGNYKPRTDLPLVVEMYMSKKLEVEKFITHRVPFSEINKAFDYMTKGEGLRCIVSMEE

SEQ ID NO: 16195 - protein, 238 aa, Zea mays
MDPTKFRPSSSHDTTVTTTNAGAPVWNDNEALDDTKTWPEDLLPLRPVGRLVLDRNVDNFFNENEQLAFGPGLVVPGIYYSDDKMLQCRVFAYADTQRYRLGPNYLMLPVNAPRCAHHNNHYDGAMNFMHRDEEVDYYPSRHAPLRQAAPPTPLPPRPVAGRREKATIRKPNDFKQPGERYRSWDADRQDRFVRRFADSLGHPKVSQELRSIWIDLLAKCDASLGMKIATRLNMKANM

SEQ ID NO: 16196 - protein, 330 aa, Pyrus communis
DVYFWEAKGQNPLFPRIYGHEAGGIVESIGEGVTDLKAGDHVLPVFTGECKDCAHCKSEESNMCDLLRINTDRGVMLSDGKSRFSIKDKPIYHFVGTSTFSEYTVVHVGCLAKINPLAPLDKVCLLSCGISTGLGATLNVAKPKKGSTVAVFGLGAVGLAAAEGARFSGASRIIGVDLHSGRFEEAKKFGVTEFVNPKEHKKPVQEVIAELTNGGVDRSIECTGSVEFMISAFECVHDGWGVAVLVGVPHKEAVFKTHPLNFLNERTLKGTFFGNYKPRTDIPSVVEKYMNKELQLEKFITHKVPFSEINKAFEYMLKGEGLRCIIHMED

SEQ ID NO: 16197 - protein, 353 aa, Schizosaccharomyces pombe
MAVKGDDVKWKGIPMKYIALVLLTVQNSALILTLNYSRIMPGYDDKRYFTSTAVLLNELIKLVVCFSVGYHQFRKNVGKEAKLRAFLPQIFGGDSWKLAIPAFLYTCQNNLQYVAAGNLTAASFQVTYQLKILTTAIFSILLLHRRLGPMKWFSLFLLTGGIAIVQLQNLNSDDQMSAGPMNPVTGFSAVLVACLISGLAGVYFEKVLKDTNPSLWVRNVQLSFFSLFPCLFTILMKDYHNIAENGFFFGYNSIVWLAILLQAGGGIIVALCVAFADNIMKNFSTSISIIISSLASVYLMDFKISLTFLIGVMLVIAATFLYTKPESKPSPSRGTYIPMTTQDAAAKDVDHKH

SEQ ID NO: 16198 - protein, 290 aa, Salmonella enterica
MKTRKGIILAGGSGTRLYPVTMAVSKQLLPIYDKPMIYYPLSTLMLAGIRDILIISTPQDTPRFQQLLGDGSQWGLNLQYKVQPNPDGLAQAFIIGEEFIGNDDCALVLGDNIFYGHDLPKLMDVAVNKENGATVFAYHVNDPERYGVVEFDQNGTAVSLEEKPLQPKSNYAVTGLYFYDNSVVAMAKNLKPSARGELEITDINRIYMEQGRLSVAMMGRGYAWLDTGTHQSLIEASNFIATIEERQGLKVACPEEIAYRKGFIDIKELKVLAKPLLKNNYGQYLLKIMK

SEQ ID NO: 16199 - protein, 219 aa, Gossypium hirsutum
DVYYWECKGYTPLFPRILGHEASGIVESVGEGVNDLKPGDHVLPIFTGECKECRHCLSEESNNMCELLRINCDRGVMLADGKTRFSINGKPIYHFVGTSTFSQYTVVHVGQVAKISPTAPLDKVCPISCGICTGFGATVNVAKPKKGQTVAVFGLGAVGLAAAEGARVCGASRIIAVDVNPRRFEEAKRFGITEFVNPKDYDKPVQEVIVEMTGGGVDR

SEQ ID NO: 16200 - protein, 476 aa, Mycobacterium tuberculosis CDC1551
MGRPHLNIVAVRRISMSFVNVAPQLVSTAAADAARIGSAINTANTAAAATTQVLAAAHDEVSTAIAALFGSHGQHYQAISAQVAAYQERFVLALSQASSTYAVAEAASATPLQQIEQALLGVINTPTEALVGRKLIGDRAHGAPGTGQAGGAGGILWGNGGNGGSGAPGQAGGAGGAAGLIGNGGAGGTGGQGLPFEAGANGGAGGAGGWLFGNGGAGGVGGAGGAGTTFGVAGGDGGTGGVGGHGGLIGVGGHGGDGGTGGTGGAVSLARAGTAGGAGGGPAGGIGGAGGVGGAGGAAGAVTTITHASFNDPHGVAVNPGGNIYVTNQGSNTVSVIDPVTNTVTGSITDGNGPSGVAVSPVTGLVFVTNFDSNTVSVIDPNTNTVTGSIPVGTGAYGVAVNPGGNIYVTNQFSNTVSVIDPATNTVTGSPIPVGLDPTGVAVNPVTGVVYVTNSLDDTVSVITGEPARSVCSAAI

SEQ ID NO: 16201 - protein, 315 aa, Mesorhizobium loti MAFF303099
MAVAFTFPGQGSQAVGMGKDLADAFPEARRVFQEVDDALGENLSKLIWEGPEETLTLTANAQPALMAVSLAAIRALEARGFSLKDKVAYVAGHSLGEYSALAAAGFVSVADAARLLRIRGNAMQAAVPAGEGAMAAIIGLEQPDVEAACIEAAQGASKVCQIANDNGGGQLVISGAKAAVELAAKLCTEKGAKRALMLQVSAPFHSALMAPAANVMREALAGVTKHAPGVPVVSNVTVTPTSDPDEIARRLVEQITGRVRWRETVEWFGANGVTTLYEIGAGKVLSGLARRINRDIATSAVGTPADVEAALATFA

SEQ ID NO: 16202 - protein, 473 aa, Ralstonia metallidurans CH34
MKTLDRFYIDGQWVTPAAAARSMPIVNPATEEVAGHVTLGSAEDVNRAVAAARAAFPAWSETSREERLALLERITALYKARLGDFAEAVRTEIGAPVSLCNTLQAPIGLAHLGAATETLRAFQFETAHGNNYVRHEPIGVAALITAWNWPLSLICAKVAAALAAGCTIVLKPSEIAPLDAALFAEVMHEAGTPAGVFNMVFGDGQEVGARLAAHPDVDVISITGSTRAGIAVAQAAAATVKRVHQELGGKSPLLILDDADLQAAVAQGVGHVMLNSGQTCIAPTRMLVPRDRYDEAVRVAAATANALQVGDPAEPGTRIGPISNKAQYEKVQRMIGTGIEEGARVVAGGPGRPDGLTRGFYARPTIFADVDNSMTIAREEIFGPVLVMIPYDDEAQGVDIANDTPYGLAAYVASGDPARARRVAARLRAGSVRINGGQVDLSMPFGGYRASGNGRENGAHGLAEYLEVKAVTV

SEQ ID NO: 16203 - protein, 292 aa, Salmonella enterica
MKTRKGIILAGGSGTRLYPVTMAVSKQLLPIYDKPMIYYPLSTLMLAGIRDILIISTPQDTPRFQQLLGDGSQWGLNLQYKVQPSPDGLAQAFIIGEEFIGNDDCALVLGDNIFYGHDLPKLMDAAVNKEDGATVFAYHVNDPERYGVVEFDQNGTAVSLEEKPLQPKSNYAVTGLYFYDNSVVEMAKNLKPSARGELEITDINRIYMDQGRLSVAMMGRGYAWLDTGTHQSLIEASNFIATIEERQGLKVSCPEEIAYRKGFIDAEQIKNLAKPLSKNAYGQYLLNMIKGY

SEQ ID NO: 16204 - protein, 289 aa, Streptococcus pneumoniae
MKGIILAGGSGTRLYPLTRAASKQLMPVYDKPMIYYPLSTLMLAGIRDILIISTPQDLPRFKELLQDGSEFGIKLSYAEQPSPDGLAQAFIIGEEFIGDDSVALILGDNIYHGPGLSKMLQKAAKKEKGATVFGYQVKDPERFGVVEFDTDMNAISIEEKPEYPRSNYAVTGLYFYDNDVVEIAKSIKPSPRGELEITDVNKAYLDRGDLSVELMGRGFAWLDTGTHESLLEASQYIETVQRMQNVQVANLEEIAYRMGYISREDVLALAQPLKKNEYGQYLLRLIGEA

SEQ ID NO: 16205 - protein, 213 aa, Gossypium hirsutum
GYTPLFPRILGHEASGIVESVGEGVNDLKPGDHVLPIFTGECKECRHCLSEESNNMCELLRINCDRGVMLADGKTRFSINGKPIYHFVGTSTFSQYTVVHVGQVAKISPTAPLDKVCPISCGICTGFGATVNVAKPKKGQTVAVFGLGAVGLAAAEGARVCGASRIIAVDVNPRRFEEAKRFGITEFVNPKDYDKPVQEVIVEMTGGGVDRSV

SEQ ID NO: 16206 - protein, 277 aa, Salmonella enterica
QLPSGSELSLYDIAPVTPGVAVDLSHIPTAVKIKGFSGEDVTPALEGADVVLISAGVARKPGMDRSDLFNVNAGIVKNLVQQIAKTCPKACVGIITNPVNTTVAIAAEVLKKAGVYDKNKLFGVTTLDIIRSNTFVAELKGKLPTEVEVPVIGGHSGVTILPLLSQIPGVSFTEQEAAELTKRIQNAGTEVVEAKAGGGSATLSMGQAAARFGLSLVRALQGEKDVVECAYVEGDGQYARFFSQPLLLGKNGVEERKSIGTLSAFEQHSLDAMLDTL

SEQ ID NO: 16207 - protein, 411 aa, Glycine max
MDPPPKSWSIHTRSEIIAKYEVMERVGSGAYADVYRGRRLSDGLTVALKEIHDYQSAFREIDALQLLEGSPNVVVLHEYFWREDEDAVLVLEFLRTDLATVIADTAKANQPLPAGELKCWMIQILSGLDACHRHMVLHRDLKPSNLLISEHGLLKIADFGQARILMEPGIDASNNHEEYSRVLDDADNKDTITSTHDGKATCTTSGVDREEEEKELGCLTSCVGTRWFRAPELLYGSRDYGLEVDLWSLGCIFAELLTLQPLFPGTADIDQLSRIIGVLGSLDESAWAGCSKLPDYAIISFSKVENPAGLEACLPNRSPDEVALVKKLVCYDPAKRATAMELLHDKYFSDEPLPVPVSELRVPMTRKEQDGDSPGGWGDINDMDSDSDSQFDEFGPLNITRTGTGFSIQFP

SEQ ID NO: 16208 - protein, 511 aa, Psychrobacter sp. 273-4
MNKQPDTASDPSAPFDHSTHQNVTRKVSVAVIGAGTAGQNAFRQAKKSVEDIIIINDGFWTTTCIAVGCMPSKLLIAAADRAHDANHSGEFGIHATAHIDGKQVMERVRAERGHFSSYIEKYVDSWSEDSKIAGRAYINKQGLIEVNDELIQADKIIVATGSSTFIPDGWADKLGDTMLTSDTVFELVDLPKSMAVIGAGAIGLELAQAFTRLGVKVTVFNRAKRVAGLKDNDINNKAIDCLSRELTMHLGSKITDIGQKLDGNIDKNIDKKNIAAFIDYEDSAGKVQQWQGDYVLVATGRRNNIDTLGVENLGVELDDKNRPKNLDKKTGKIGDLDVYIVGDANAHIPLLHVASDEGFSAGSMVCGNKKDAYIRPPATPFSIVFSSPQIVNVGMSLPDIEQDPTLEHVIGKVNFDNQGRSRVMGVNCGLLHIYGCEKTDRILGASMVGPDAEYIGHILAMAITNDLSIKDILDTPFYHPTILEALRAALRDVQDLMEIPYQSLDTQQHSS

SEQ ID NO: 16209 - protein, 251 aa, Sphingomonas sp. P2
MAVVTGGAQGIGLATARRLAVEGASVVIADRAAEAAEASAAQLQAEGSNALAVAVDLEHCEGAVELYQTVIDRFGRIDVAVHNVGGTIWAKPYWDYTPQEITAEINRSLWPTLWCCHAVLPHMRTAGRGAIVNIGSVATRGVNRVPYAAAKGGVAALTAALSLELEASGIRVNCVAPGGVNVTRVTPRNPAAPTEADRLGFSQVFEQTLRDTPMARFGEPDELAAAICFFASDDASYVTGQTLFVAGGGIG

SEQ ID NO: 16210 - protein, 320 aa, Saccharopolyspora erythraea
MKAVAIRTFGPPEGLAVIDLPAPTPAAGQVLIETEAIGVGGVDALIRSGALASYGFEEGHILGSEVAGTVTAVGDGVAASWVGRRVWAFTGVGGGYVESAIAPVEEVVPLPANISPADAVTLGNSGVVAHFGLAHAHFVPGESVLVRGAAGSIGITTVQLAARGGADAVAVTTSSAERGDRLRELGATHVLDRSGDGGEDAPAGYDVVIDIIAGADMPAFFDKLNPNGRMVAVGIVGGPPPAGFGMRMFEAFRKSMSFATFSADTVPEPGRRAVRTEQFAAAGRGELHTVVHELLPLEQAVLAHQKMDTGEVFGRIVLTP

SEQ ID NO: 16211 - protein, 379 aa, Thermoanaerobacter tengcongensis
MIYLPDGVQDFLPEEYEFKRNIEDKFREVFKSFGYKEIMPPTFEYSENFSHLFDENSMYRFFDKKGNILALRPDVTAQIARIVSTKLEGRYPLKLCYVANVYRYEDTQVGKMREFTQAGVELIGTNHEESDAEVIALSIEALKSTGLKDFKIDIGHAEVFGSIVRNLNLGNEDVNLLRELLEQKNQSAIEDFIKQKEIKREEAKLLRELPLLFGGEEILEKLKKENFKETEGVLEYLDRVYKILEDFGMKEYISFDLGMVQNLNYYTGIIFRGFVKGLGYAICTGGRYDKLLKIYGKDLPATGFAISVERVMLALQRQSKGEWVKPRRVLVRYKEEERRRAYEKANVLRKEGNVVEMYTFKRCENIDLKSFDEVVDVGE

SEQ ID NO: 16212 - protein, 181 aa, Zea mays
  unsure (1)..(181): unsure at all Xaa locations
RLLLFFLVHTQYDKNLGRIEKWVLRKAFDDEEHPYLPQHILYRQKEQFSDGVGYNWIDGLKSFTEQQVTDEMMNSAAQMFPYNTPVNKEAYYYRIIFERLFPQDSARETVPWGPSIACSTPAAIEWVEQWKASNDPSGRFISSHDSAATDRTXTSWRWSTATGTXANGTVNGNDVAVAIAV

SEQ ID NO: 16213 - protein, 396 aa, Shewanella oneidensis MR-1
MFNSLIAMPADPILGLLTQYREDTHPQKVDLGVGVYKDPAGNTPILNCVKKAEKFRLETETTKVYIGPTGSPQFNTLMTELAFGSDHSAIIANRIRTVSTPGGTGALRVAGDFIKRCNPNAVLWVSDPTWANHTGLFEAAGITVKTYPYYDYDSKSLKFDEMLAALSQVSPDDVVLLHACCHNPSGMDLTTDQWDKVVTLTKEQGFTPLIDMAYQGFGDGVDIDAYGVRKMAAAVDNMILCSSCSKNFGLYRERIGSCSVVAKDANTANIAQSVLLYVVRCLYSMPPAHGAAIVETILGSKELTQEWLDELKVMRDRINGNRAILVEKLKANGVARDFSFIARQKGMFSFLGVNPEQVARLQKEFSIYMVGSSRISIAGISEDNVDYLAQSIAKVL

SEQ ID NO: 16214 - protein, 247 aa, Oryza sativa
MAGGEHGVNGQHEETRAMEEGSRDHQARCENSEQDGGSKSSSNNHPMFSVQFAQKVIAEILGTFFLIFAGCATVAVNKRTGGTVTFPGIFITWGLAVMVMVYSVGHISGAHLNPAVTLAFATCGRFPWRRVPAYAAAQVAGSAAASAALRALFGGAPEHFFGTAPAGSDVQSLAMEFIITFYLMFVVSGVATDNRAIGELAGLAVGATVLVNVLFAGSINSINENVYTSFGCALAVYTNTNKVLYKI

SEQ ID NO: 16215 - protein, 838 aa, Saccharopolyspora erythraea
MPRPTATSRRLEKLVKFGFLAHPVNTGQRNYVRAAALLSSMADERTGRAPSGAARHTVPMPMFGTVVSATGHRCEGDLRYLPHTAEDLLRRATDAVDHVVAQVEDLRRAGAQLVGLGGATSIVGNRGLTTQRRVDVPLTSGNSLTTYSAHELLRTVIARLGRRPSDVEVGIVGFPGAIGLAMARLLLDDGCRLHLVHRKGRMRPEQLLDELPAAAHDRVTIGDDVAECLRRTRLIVAASSAGGLIDCDDLRPGSVVVDVALPRDVRRPVRERRDVLVLDGGLVSASDAVVLDGMELATSEQINGCLAETVVLALEERAESFSLGRELDPGRVREIGELARRHGFLPSAPSSWGRLVRLDRIDELPGWSAERPDPAESTRRRFRDNVNPPLAGFYAVHGMDRVFTRGSGSTLTTADGVEYLDFIGGYGSLNVGHNHPAVTAAVGQFLTAGEPTFVQYASIPHRTAELAERLCEIAPGGMRRAFFGNSGAEAVEAALKLARAATGRTRFVHAENSYHGKTFGALSVTGRDHYRDPFRPMVPDCVGVPFGDENALREAIAGAAAFIVEPVQGEGGVVLPPPGYLTAAQRICREAGAVFIVDEIQTGLGRTGAMFACEHEGVEPDVLCLAKSLSGGLVPIAATLSTAEVWDAAYGSSSGSLLHTSTFGGGNLASVAALATLDLIESEKLAARAEVMGRRLRDALTEACAPFEFVGEVRGIGLMNAIAFDARYDGAVRTAVEDMASRLPGDFRAIAELLPDPVREVLRQAGSSVETALGDLLCLRFVAAMGRDHRILTFVTANRNQVVRLQPPLVVTEAEIDRFAESARAVCETATGIHNNWE

SEQ ID NO: 16216 - protein, 272 aa, Ustilago maydis 521
MSRRYDSRTTTFSPEGRLYQVEYAMEAISHAGTVIGILAKDGIVLAAEKKVTSKLLEQDQSSEKIFAVSDNVMAGVAGYTADANSLVNFARNAAQQYLASYDDDMPVEQLAQRLCDYKQGYTQFGGLRPFGVSILYAGYDDHHHFQLYHSDPSGNYSGWKATCIGNNNGTATSLLKQDYKDDLGIQDAMAMAVKILSKTMDSTSLDSEKLEFATLTLNAKTGQPQTNIFKPNDIDRLLHKHGLAKPKDEDEATTTATGATTTTGETAMSLDS

SEQ ID NO: 16217 - protein, 445 aa, Nicotiana tabacum
MAKAVDAAAAAAAAIAPVDTTVVNEDVALVENETCNDQNVQFDSLPSMKYASFLNSDGSVAIHAGERLGRGIVTDAITTPVVNTSAYFFNKTSELIDFKEKRRASFEYGRYGNPTTVVLEEKISALEGAESTLLMASGMCASTVMLLALVPAGGHIVTTTDCYRKTRIFIETILPKMGITATVIDPADVGALELALNQKKVNLFFTESPTNPFLRCVDIELVSKLCHEKGALVCIDGTFATPLNQKALALGADLVLHSATKFLGGHNDVLAGCISGPLKLVSEIRNLHHILGGALNPNAAYLIIRGMKTLHLRVQQQNSTALRMAEILEAHPKVRHVYYPGLQSHPEHHIAKKQMTGFGGAVSFEVDGDLLTTAKFVDALKIPYIAPSFGGCESIVDQPAIMSYWDLSQSDRAKYGIMDNLVRFSFGVEDFDDLKADILQALDSI

SEQ ID NO: 16218 - protein, 295 aa, Triticum aestivum
  unsure (1)..(295): unsure at all Xaa locations
MNLAAPISTSTSTSTSTAVRPHAHGLMPLNLPSAASSSLRRSIFASLRKKISPMASAPASASAALSTAAPADNGAAKPTEQRPVQVAKRLEKFKTTIFTQMSMLAVKHGAINLGQGFPNFDGPDFVKEAAIEAIKAGKNQYARGYGVPELNSAVAERFLKDSGLQIDPDKEVTVTSGCTEAIAATILGLINPGDEVILFAPFYDSYEATLSMAGANVKAITLRPPDFAVPLEELKAAVSKNTRAIMINTPHNPTGKMFTREELEFIADLCXENDVLLFADEVYDKLAFEADHISM

SEQ ID NO: 16219 - protein, 292 aa, Salmonella enterica
MKTRKGIILAGGSGTRLYPVTMAVSKQLLPIYDKPMIYYPLSTLMLAGIRDILIISTPQDTPRFQQLLGDGSQWGLNLQYKVQPSPDGLAQAFIIGEEFIGNDDCALVLGDNIFYGHDLPKLMDAAVNKEDGATVFAYHVNDPERYGVVEFDQNGTAVSLEEKPLQPKSNYAVTGLYFYDNSVVAMAKKLKPSARGELEITDINRIYMEQGRLSVAMMGRGYAWLDTGTHQSLIEASNFIATIEERQGLKVSCPEEIAYRKGFIDAEQIKNLAKPLSKNAYGQYLLNMIKGY

SEQ ID NO: 16220 - protein, 300 aa, Triticum aestivum
MEMPRVSEETVAAVVPIAVYWAYAGVHTALGHSRLMDKYRLNTKDEEDRKNMVSKRAVILNVLMQHLMQLAALAVLAMVTGGRGATASKAAGGSRAAVYLTAAARIAVAVLVFDAYRYAWHRLAHINRFIYRHLHSWHHRIVVPYAFGAIYGHPIEVLIADTAGASLAVLVTGLSPSSPRATAVFLTLCTVKAIDNHCGVCLLPRRLQSVWNGAAYHGVHHMPRGVRYNFSDLFFVTWDHVFGTHTIYPSPVATGPIATAQRETQSTTLHTPAIPFRSALPPRPVAEFPSARPGRAVRRR

SEQ ID NO: 16221 - protein, 363 aa, Glycine max
  unsure (1)..(363): unsure at all Xaa locations
ARESGAIGETVGSIMLPALVDRLLELDVEIGWDGILQEDSAKGIFEMELEDVTEFADEDENCDSMPPSELLNRKNLQGNLVVEKLDSLMVLAFLHLESCQNSGRLAEVFNTLLASFQRTVLNAYKSKFTQFVMFYACALDPEGCGVKFAMVLADMFGGDANPPITRMSAVAYLASYLTRAKFLSAALVTSIIQSLVDWCYAYCKFRDFDMNPRAHQVFYSGCQAIMYIMCFRMRSLMDVPRLKLQLLNMPMEAILKHKLSPLKVCLPTVVVVFLSQAKAAQLFMASXSVVFDDILEXDLSTSFDGMYRRSMFLPSASCLRKRSEMYIGTQLVLRSKVSXAYDVDDDIDEVTCIVAVTYLLMIL

SEQ ID NO: 16222 - protein, 437 aa, Saccharomyces cerevisiae
MAVSKVYARSVYDSRGNPTVEVELTTEKGVFRSIVPSGASTGVHEALEMRDGDKSKWMGKGVLHAVKNVNDVIAPAFVKANIDVKDQKAVDDFLISLDGTANKSKLGANAILGVSLAASRAAAAEKNVPLYKHLADLSKSKTSPYVLPVPFLNVLNGGSHAGGALALQEFMIAPTGAKTFAEALRIGSEVYHNLKSLTKKRYGASAGNVGDEGGVAPNIQTAEEALDLIVDAIKAAGHDGKIKIGLDCASSEFFKDGKYDLDFKNPNSDKSKWLTGPQLADLYHSLMKRYPIVSIEDPFAEDDWEAWSHFFKTAGIQIVADDLTVTNPKRIATAIEKKAADALLLKVNQIGTLSESIKAAQDSFAAGWGVMVSHRSGETEDTFIADLVVGLRTGQIKTGAPARSERLAKLNQLLRIEEELGDNAVFAGENFHHGDKL

SEQ ID NO: 16223 - protein, 306 aa, Mycobacterium tuberculosis CDC1551
MSRPEVLTPFTAIVPAAGLGTRFLPATKTVPKELLPVVDTPGIELVAAEAAAAGAERLVIVTSEGKDGVVAHFVEDLVLEGTLEARGKIAMLAKVRRAPALIKVESVVQAEPLGLGHAIGCVEPTLSPDEDAVAVLLPDDLVLPTGVLETMSKVRASRGGTVLCAIEVAREEISAYGVFDVEPVPDGDYTDDPNVLKVRGMVEKPKAETAPSRYAAAGRYVLDRAIFDALRRIDRGAGGEVQLTDAIALLIAEGHPVHVVVHQGSRHDLGNPGGYLKAAVDFALDRDDYGPDLRRWLVARLGLTEQ

SEQ ID NO: 16224 - protein, 163 aa, Triticum aestivum
  unsure (1)..(163): unsure at all Xaa locations
GKELTALYSSFASKYPIVSIEDAFDQDDWEAWTHLNETSEFQLGGEDLLVTTPKRIAXTAIEKKSCNALLLKVNQIGTLTESIQAAKDSQAAGWGVMVSHRSGETEDTTIADLVVGLRTGQIKTGAPCRSERLAKYNQLLRIEEELGENCIYAGENFRNAHEL

SEQ ID NO: 16225 - protein, 292 aa, Salmonella enterica
MKTRKGIILAGGSGTRLYPVTMAVSKQLLPIYDKPMIYYPLSTLMLAGIRDILIISTPQDTPRFQQLLGDGSQWGLNLQYKVQPNPDGLAQAFIIGEEFIGNDDCALVLGDNIFYGHDLPKLMDVAINKENGATVFAYHVNDPERYGVVEFDQNGTAVSLEEKPLQPKSNYAVTGLYFYDNSVVEMAKNLKPSARGELEITDINRIYMEQGRLSVAMMGRGYAWLDTGTHQSLIEASNFIATIEERQGLKVSCPEEIAYRKGFIDSQKVMSLAEKLSKNAYGQYLINMIKGR

SEQ ID NO: 16226 - protein, 277 aa, Salmonella enterica
QLPSGSELSLYDIAPVTPGVAVDLSHIPTAVKIKGFSGEDATPALEGADVVLISAGVARKPGMDRSDLFNVNAGIVKNLVQQIAKTCPKACVGIITNPVNTTVAIAAEVLKKAGVYDKNKLFGVTTLDIIRSNTFVAELKSKLPTEVEVPVIGGHSGVTILPLLSQIPGVSFTEQEAAELTKRIQNAGTEVVEAKAGGGSATLSMGQAAARFGLSLVRALQGEKGVVECAYVEGDGQYARFFSQPLLLGKNGVEERKSIGTLSAFEQHSLDAMLDTL

SEQ ID NO: 16227 - protein, 459 aa, Prochlorococcus marinus subsp. pastoris str. CCMP1378
MILKVLEFEFDLIVLGAGSGGLAAAKRAASYGAKVAIIEVNKIGGTCVIRGCVPKKLMVYAANNRRNMLSSEGYGLISKEITFESNILLKNVREEVSRLSVLHSNSLKKLNVKVFEGLGRFLNQNTVEVVCPKTKNILRKVSAKSILISVGGKPKKLNIPGTDFAWTSDDIFELKDFPKKLLIVGGGYIACEFASIFKNLGTEVTQLIRGENLLNGFDKDLSECLEKSMTSLGINLKFKNQLKSIKKINDGLESTLESGSKLLTDNILVATGREPSLKRLNLDTLNLKMDGIYLEVNELNKTSISNIFAIGDIVKRPNLTPVAIEQGRVFADNYFAALKRKVNYENIPKAVFTIPEISTVGLSEEKANEIYSEVNVQVFKCNFTPMSNTFKKNKSKCMLKLVVNKKNDKVLGCHMFGEAASEIIQMVAVSLNTGITKKDFDTTMALHPTISEEFVTMYG

SEQ ID NO: 16228 - protein, 277 aa, Salmonella enterica
QLPSGSELSLYDIAPVTPGVAVDLSHIPTAVKIKGFSGEDATPALEGADVVLISAGVARKPGMDRSDLFNVNAGIVKNLVQQIAKTCPKACVGIITNPVNTTVAIAAEVLKKAGVYDKNKLFGVTTLDIIRSNTFVAELKGKLPTEVEVPVIGGHSGVTILPLLSQIPGVSFTEQVAAELTKRIQNAGTEVVEAKAGGGSATLSMGQAAARFGLSLVRALQGEKGVVECAYVEGDGQYARFFSQPLLLGKNGVEERKSIGTLSAFEQHSLDAMLDTL

SEQ ID NO: 16229 - protein, 492 aa, Triticum aestivum
  unsure (1)..(492): unsure at all Xaa locations
MDPYKHRPTSGANSGYWTTNSGAPVWNNNNALTVGQRGPILLEDYHLIEKLAQFDRERIPERVVHARGASAKGFFEVTHDVSQLTCADFLRAPGVQTPVIVRFSTVVHERGSPETLRDPRGFAVKFYTREGNFDLVGNNMPVFFIRDGMKFPDMVHAFKPSPKTNMQENWRIVDFFSHHPESLHMFTFLFDDVGIPLNYRHMDGFGVNTYTLISRDGKAHLVKFHWKPTCGVKCLLDDEAVTVGGTCHTHAXKDLTDAIAAGNYPEWKLFIQTIDADHEDKFDFDPLDVTKTWPEDIIPLQPVGRMVLNKNIDNFFAENEQLAFCPAVTVPGIHYSDDKLLQTRIFSYADTQRHRLGPNYLMLPVNAPKCAHHNNHHDGLMNFMHRDEEVNYFPSRFDPTRHAEQYPIPPRVLSGCREKCIIEKENNFKQAGERYRSFDPARQDRFLQRWVDALTDARVTHEIQGIWVSYWSQCDASLGQKLALRLKIKPSM

SEQ ID NO: 16230 - protein, 110 aa, Oryza sativa
  unsure (1)..(110): unsure at all Xaa locations
MAATIVCVKARQILDSRGNPTAEGYVGCSHRTFARSAVTREASTGVYEAMDXRDGGAEHLGQGVCKATNNANSSIAPNLTGKDPTXQAELDILMDEQLDSTKNERRSEQA

SEQ ID NO: 16231 - protein, 461 aa, Phaseolus vulgaris
MASSVLSAALNSLSPSYSLSSRQTHKGKPKIGGNALRFNKSFPNARSSGRVMAVAVNGSRFEGIPMAPPDPILGVSEAFKADTSDVKLNLGVGAYRTEELQPYVLNVVKKAENLMLERGDNKEYLSIEGLAAFNKATAELLLGADNPAIKQQRVATVQGLSGTGSLRLAAALIERYFAGAKVLISSPTWGNHKNIFNDARVPWSEYRYYDPKTVGLDFEGMIEDIKSAPEGSFVLLHGCAHNPTGIDPTPEQWEKIADLIQEKNHIPFFDVAYQGFASGSLDEDAASVRLFVARGMEVLVAQSYSKNLGLYAERIGAINVISSSPESAARVKSQLKRLARPMYSNPPVHGARIVADVVGNPVLFNEWRAEMEMMAGRIKNVRQQLYNSITSKDNSGKDWSFILKQIGMFSFTGLNKEQTDNMTNKWHVYMTKDGRISLAGLSLAKCEYLADAIIDSYHNVS

SEQ ID NO: 16232 - protein, 480 aa, Pseudomonas putida KT2440
MSHKTYNNYIDGQWCEGHATLGNYSPSDTGDLIGQYHQASAEQARQAIQAARAAQPLWAASGLESRQQVLMAIGDELIARKEELGELLSREEGKPLAEGIGEVNRSGQFFHYYAAEVLRQMGETAASVRPGVDIEVHREPVGVVGIITPWNFPMATAAWKIAPALAFGNAVVFKPANLVPASAWALTEIISRQGLPSGTFNLVMGSGADVGEALIQSAEIDALTFTGSLQTGRRVAVATAGNLVRCQLEMGSKNALVVMDDADLELAVECALNGAFFGTGQKCTASSRLIVCDGIHDRFVEALRLRMRQLKVGHALEAGVQIGPVADARQLEQNLAYLQLAQAEGATLIEGGERLQLACDGYYMRPALFINSRNDMRINREEVFGPIACVIRVRDFEEALATLNDTEYGLTAGIITQSLRHASHFKRRAQTGCVMVNLPTAGTDYHVPFGGRKASSFGPREQGQYARDFYTVVKTTYLRP

SEQ ID NO: 16233 - protein, 509 aa, Oryza sativa
MATCSWAATTAAAAPPRPPARCRSRVAALRRTAAASAAAASCVLAEAPKGLKVEQADAVEPAAAAAARRDVGPDTVASIILGGGAGTRLFPLTRTRAKPAVPVGGCYRLIDIPMSNCINSKINKIYVLTQFNSQSLNRHIARTYNIGEGVGFGDGFVEVLAATQTTGESGKRWFQGTADAVRQFLWLFEDARLKRIENILILSGDHLYRMDYMDFVQKHVDKGADISVACVPVDESRASDFGLMKTDKNGRITDFLEKPKDESLKSMQLDMGTFGLRPEVADTCKYMASMGIYVFRTDILLRLLRGHYPTANDFGSEVIPMAAKDYNVQAYLFDGYWEDIGTIKSFFEANLALTDQSPNFYFYDPVKPIFTSPRFLPPTKVENCKVLNSIVSHGCFLTECSVDRSVIGVRSRLEPGVQLKDTMMMGADYYQTEAERFSELSDGKVPVGVGENTIIRNCIIDKNARIGKNVMIMNSQNVQEAERPLEGFYIRSGITVVLKNAVIPDGTVI

SEQ ID NO: 16234 - protein, 289 aa, Streptococcus suis
MKGIILAGGSGTRLYPLTRAASKQLMPIYDKPMIYYPLSTLMLAGIKDILIISTPQDLPRFKDMLGDGSELGISLSYAEQPSPDGLAQAFIIGEEFIGDDNVALILGDNIYHGNGLTKMLQRAASKEKGATVFGYQVKDPERFGVVEFDADMNAISIEEKPEEPKSNFAVTGLYFYDNDVVEIAKNIKPSPRGELEITDVNKAYLERGDLSVELMGRGFAWLDTGTHEGLLEAAQYIETVQRLQNVQVANLEEIAYRMGYITKEQVYKLAQPLKKNEYGQYLLRLIGEA

SEQ ID NO: 16235 - protein, 593 aa, Zea mays
MASTASLQRFLPASPHASSRRRAGRARAAVSIPSSSPPATRDNEVPAERLEPRVEAREGGYWSLKERYRTGLNPHEKVKLEKEPMALFMDGGVRDLAKIPMDVIDAAKLTKDDVDVRLKWLGLFHRRKHQYGRFMMRLKLPNGVTTSEQTRYLASVIEAYGADGCADVTTRQNWQIRGVTLPDVPAILDGLRAVGLTSLQSGMDNVRNPVGNPLAGVDPHEIVDTRPYTNLLSSYITSNSQGNPAITNLPRKWNVCVIGSHDLYEHPHINDLAYMPAVKDGKFGFNLLVGGFISPKRWAEALPLDAWVAGDDVVPACKAILEAYRDLGFRGNRQKTRMMWLIDELGMEVFRSEVEKRMPNGVLERAAAEDLVDKKWERRDYLGVHPQKQEGLSYVGLHVPVGRLQAADMFELARLADEYGTGELRLTVEQNVVLPNVSNRRLDALLAEPLLQRQRLSPQPSLLLRGLVACTGNQFCGQAIIETKARALQVAREVEKRVAVPRPVRMHWTGCPNSCAQVQVADIGFMGCLTKDRDGKVVEAADIFVGGRVGSDSHLADVYRKSVPCKDLVPIVADLLVERFGAVPREREEEDEE

SEQ ID NO: 16236 - protein, 254 aa, Triticum aestivum
  unsure (1)..(254): unsure at all Xaa locations
MSRRYDSRTTIFSPEGXRLYHVEYAMEAXPGNAGSALGILAGGPASSSSARRQLTSKLLQSSRSAEKXYKIDSHLACAVAGIMSDANILINTARLHAQRXYALSYQEPIPVEQLVQSLCDTKQGYTQFGGLRPFGVSFLFAGWDKNHGFQLYMSDPSGNYGGWKAAAVGANSQAAQSMLKQDYKDGMTREEAVALALKVLSKTMDSTSLTADKLELAEVFVQPGTGEVQYQVCSPDAMGKLLAKAGLTQPAPEA

SEQ ID NO: 16237 - protein, 155 aa, Oryza sativa
MGRPPCCDKEGIKKGPWTPEEDIILVSYIQEHGPGNWRSVPINTGLMRCSKSCRLRWTNYLRPGIKRGNFTAHEEGIIVHLQSLLGNRWAAIASYLPQRTDNDIKNYWNTHLKKKLDREVAVRRGGGGAGRRPHGPLRRLLLRPNDVLKAHLIPS

SEQ ID NO: 16238 - protein, 861 aa, Sphingomonas elodea
MSDAVRTTCAYCGVGCGIRATVTGERAVRIEGDPDHPANHGRLCSKGTHLGETIGLEGRLLHPMIGDRRASWDKALDLVARRFREAIAEHGPDSVAFYVSGQLLTEDYYVANKLMKGFIGSANIDTNSRLCMSSAVAGHMRAFGEDVVSGSYADLDAADLIVLVGSNTAWCHPVVYQRIMAARAERGTKLVVIDPRRTETAEEADLHLAVRPGSDVALFNGLLAHCRAEGLADAANLDVPAGFWEALGEGHDLWSTAQTCDLVPADLQRFYQLFAAHPRTVTLFSQGINQSIRGTDQVNAILNLHLATGRIGTPGAAPFSITGQPNAMGGREVGGLASTLAAHRGFGAQDIADVGRFWAAERMATRPGLKAVDLFRAVGEGRIKALWIMATNPAVSMPDAGRVREALAACPFVVVSDVIAQTDTSVHAHVRLPAAAWGEKDGTVTNSERTISRQRAFLPLPGEAKPDWWIVSQVARRMGFRTAFPFDRPAEVWREHARLTAYRNGGARMLDLQAKAAIGNQAYDEMAPFSWHPQPFADGRYPTPSGRARLVPVAQRPLDAPLRDWPMTLNTGRYRDQWHTMTRTGLSPRLARHREEPLVEIHPDDAAALALADGALARVATPQGNSLFRVAHHAGQRRGELFTPIHWTDRQSRGGRTGLLARDLADPHSGQPGFKLSPARITPVAVDWRGFLIVRGEGAAPDCLWATRVTVPGGVLYELAGTGDAAPLDRALPAGERIEAIDPARGTRRVAVLRDGRLAAVLFVTRAGALPSRDWLIGQLDQPQGPQVLAGRAPGRAADRGPVVCACFDVGLHTITAAIRDQRLLDVAAIGTALGAGSNCGSCRPALARILTDMPKDAAHG

SEQ ID NO: 16239 - protein, 238 aa, Glycine max
QIIKAKYGQDACNVGDEGGFAPSVQDNREGFVLLVDAIEKAGYTGKIKIGMDVAASEFYTKDGKYDLNFMKQPNDGAHVHSTQSLGQLYKNYVKEFPIVSIKDPFDQDDWGSWASLLASVDIQLVDDLLVTNPKRIAEAIKKKACNGLLLKVNQIGTVTESIQAALDSKAAGWGVVVSHRSGETEDNFIADLSVGLASGQTKTGAPCRSERLAKYNQLLRIEEELGSVQYAGETFRSP

SEQ ID NO: 16240 - protein, 1016 aa, Salmonella typhimurium LT2
  unsure (1)..(1016): unsure at all Xaa locations
MQVSRRQFFKICAGGMAGTTAAALGFAPGVALAETRQYKLLRTRETRNTCTYCSVGCGLLMYSLGDGAKNAKASIFHIEGDPDHPVSRGALCPKGAGLVDFIHSESRLKFPQYRAPGSDKWQQISWEEAFDRIAKLMKEDRDANYQAQNAEGVTVNRWLTTGMLCASASSNETGYLTQKFSRALGMLAVDNQARVXHGPTVASLAPTFGRGAMTNHWVDIKNANLVVVMGGNAAEAHPVGFRWAMEAKIHNGAKLIVIDPRFTRTASVADFYAPIRSGTDIAFLSGVMLYLLTNEKYNREYTEAYTNASLIVREDFGFDDGLFTGYDADKRQYDKTSWHYELDENGFAKHDTTLQHPRCVWNLLKQHVSRYTPDMVENICGTPKADFLKVCEYIAETSAKDKTASFLYALGWTQHSIGAQNIRTMAMIQLLLGNMGMAGGGVNALRGHSNIQGLTDLGLLSQSLPGYLTLPSEKQTDLQTYLAANTPKPLLKDQVNYWGNYPKFFVSMMKAFFGDKATAENSWGFDWLPKWDKGYDVLQYFEMMKQGKVNGYICQGFNPVASFPNKNKVVASLSKLKYLVTIDPLNTETSTFWQNHGESNDVDPAKIQTEVFRLPSTCFAEENGSIVNSGRWLQWHWKGADAPGIAMTDGEILAGIFLRLRKMYSEQGGANPEQVLNMTWNYTKPYEPASEEVAMESNGKALADLIDPATGAVVVKKGQQLSSFAQLRDDGTTSSGCWIFAGSWTPEGNMMARRDNADPSGLGNTLGWAWAWPLNRRILYNRASADPQGNPWDPKRQLLKWEGGKWAGWDIPDYSAAAPGSDVGPFIMQPEGMGRLFAIDKMAEGPFPEHYEPFETPLGTNPLHPNVISNPAARIFKDDADALGKADKFPYVGTTYRLTEHFHYWTKHALLNAIAQPEQFVEIGEKLANKLGIAHGDTVKVSSNRGYIKAKAVVTKRIRTLKADGKDIDTIGIPIHWGYEGVAKKGFIANTLTPFVGDANTQTPEFKSFLVNVEKV

SEQ ID NO: 16241 - protein, 156 aa, Triticum aestivum
MAFPVSDELLGTFVPIAVYWLYSGLYIVLDALGTADRYRLHPKEDEETRNIPSKRTVLKGVLLQQAVQVAVSLIVFKITGDGSRDTREQPPAPVIALQFVVAMFAMDTWQYFVHRYLHTNKFLYKHVHAQHHTILVPYAFGALYSHPLEGLLMDTA

SEQ ID NO: 16242 - protein, 575 aa, Schizosaccharomyces pombe
MSISSKDFQNVTSAGFADDTFAADTFAADKKSPFESSVFENKTQVLPVDSVSRLSNGARSRSNSNISLSEPHALNDTVEDQPVSKWVWVLAFAAGIGGLLFGYDTGVISGALVVIGTSLGGHELTNGGKEFITSATSLGALLGGIIAGALADFFGRKPVIAIASIIIIVGSIVQVTAHHLWHMIVGRFVIGWGVGIASLIIPLYLSEIAPSKIRGRLVIIYVLLITAGQVIAYGIDTAFEHVHNGWRWMVGLAMVPAAFQLFILIWLPESPRLLVKKERSQEAYNTLARIYPTAHPYEIKTKLYLIQEGVRDPFSGSRWQKIVKTFKELYFNPSNFRALILACGLQAMQQLSGFNSLMYFSSTIFEVVGFNNPTATGLIIAATNFVFTIVAFGVIDFFGRRILLLLTVWGMIAALIVCAVAFHFLPKDENGNYTSGQSNAWAIVVLISMIVYVASYASGLGNLPWQQSELFPMSVRGLGTGMSTAVNWAGNLGIGASFLTLMSEITPTGTFALYGGLCFLGWLGALFCYPDLTDYTIEEIGELLKHGFGVRESMRHLKRVRQERAWSREDKEQNN

SEQ ID NO: 16243 - protein, 289 aa, Salmonella enterica
MKTRKGIILAGGSGTRLYPVTMAVSKQLLPIYDKPMIYYPLSTLMLAGIRDILIISTPQDTPRFQQLLGDGSQWGLNLQYKVQLSPDGLAQAFIIGEEFIGNDDCALVLGDNIFYGHDLPKLMDAAVNKEDGATVFAYHVNDPERYGVVEFDKNGTAVSLEEKPLQPKSNYAVTGLYFYDNSVVAMAKNLKPSARGELEITDINRIYMEQGRLSVAMMGRGYAWLDTGTHQSLIEASNFIATIEERQGLKVACLEEIAYRKNYISKEKIQNAILKFGKSAYGAYLKSLF

SEQ ID NO: 16244 - protein, 238 aa, Methanosarcina acetivorans C2A
MKGVILAGGTGSRLYPLTKVTNKHLLPVYDKPMIYYPIKTLIDAGIKEIMIVSGRGHAGHFLELLGSGADFGVKFTYEIQEEAGGIAQALSLAENFADEDDVTVILGDNIFQDNIKEDVENFNNGAKIFLKEVPDVHRFGVAELKGDKVIGIEEKPAVPKTNLAVTGLYIYDYDVFDAIKTLKPSGRGELEITDVNNYYVNKGVMEYRVLEGFWSDAGTFESLLRASMMVKGLLENKK

SEQ ID NO: 16245 - protein, 246 aa, Methylobacillus flagellatus KT
MSDNTKTHFGFQTVDEREKARKVGEVFHSVARKYDLMNDVMSAGLHRAWKRFTVEVSGVRPGDRVLDVAGGSGDLSRLFSNKVGQSGQVILTDINASMLAVGRDRLIDDGKAVPALQCDAEQLPFPDEHFDCVIVAFGLRNMTHKDKALTEMQRVLKPGGRLLVLEFSQVWKPLAPIYDAYSFKLLPLMGKLLANDADSYRYLAESIRMHPDQETLKQMMLDAGLSKVDYYNLAAGVVALHKGWKT

SEQ ID NO: 16246 - protein, 292 aa, Salmonella enterica
MKTRKGIILAGGSGTSLYPVTMAVSKQLLPIYDKPMIYYPLSTLMLAGIRDILIISTPQDTPRFQQLLGDGSQWGLNLQYKVQPSPDGLAQAFIIGEEFIGHDDCALVLGDNIFYGHDLPKLMEAAVNKESGATVFAYHVNDPERYGVVEFDQNGTAVSLEEKPLQPKSNYAVTGLYFYDNSVVEMAKNLKPSARGELEITDINRIYMEQGRLSVAMMGRGYAWLDTGTHQSLIEASNFIATIEERQGLKVSCPEEIAYRKGFIDAEQIKNLAKPLSKNAYGQYLLNMIKGY

SEQ ID NO: 16247 - protein, 104 aa, Triticum aestivum
  unsure (1)..(104): unsure at all Xaa locations
MEGQSREEYIGSLRRKSSGFXSRGXSKYRGVARHHHNGRWEARIGRVFGNKYLYLGTYATQEEAAMAYDMAAIEYRGLNAVTNFDLSRYIKWLRPGAADVAAGA

SEQ ID NO: 16248 - protein, 701 aa, Xanthomonas oryzae
MAKSSGKPASAVSVDRSASAPDARGTGDELHQKARGRHPQLTTNQGIPVGDNQNSLRATPRGPTLLEDFILREKITHFDHERIPERIVHARGSASHGYFKLTKSLSQYTTAKIFTEVGEKTPLFTRFSTVAGGAGSVDTPRDVRGFAVKFYTKEGNWDLVGNNIPVFFIQDAIKFPDLIHAVKMEPDRGFPQAASAHDTFWDFISLTPESMHMIMWAMSDRTIPRSLRMIEGFGIHSFRFLNDKGESTFVKFHWRPKLGLQSTIWDEAVKIAGADQDFPPRDLFEAIQNGDFPEWELGVQLFTEAEADAFPFDHLDSTKIIPEELVPLQIVGRMVLDRWPDNFFAETEQVAYCPANIVPGIDFSNDPLLQGRLFSYLDTQLSRLGGPNFHQIPINAPKCPFANNQRDGHMQMDVPKARVAYEPSLLQADAPREALRGFPSHSTPAEDGAKGRVRAERFADHYSQARLFFRSQTAPEQAHMASALVFELSKVETAHVREAIVGHLRHIDQKLAQRVADGMGMTTLPPAPPAAVAPIDMPLSPALQVIGKMKDTLKGRTVGILIHDGSDASTIKAVRKAAEAEGATVKIVAPKLGGAKLSDGKQLAADGQLAGTPSVVFDAVAVLLSSEAAKLLTRESAALDFVSCAWAHLKAIAFDEGAQLLLKAGNIGKDAGVVPAADTKAFISAAKTRQWAREPKVRMLA

SEQ ID NO: 16249 - protein, 489 aa, Oryza sativa
MAVSLKSSGSFCSTPPQWLHSTRDRILYGYSHSNAKECTCKKTKRPAPLCVKATSTKVELDFNDPSWKQKFQEDWDKRFNLPRITDIYDLKPRPTTFSLKKNRSPAGDENGTPMDKWNGYVNSDDRALLKVIKYSSPNSAGAECIDPDCSWVEQWVHRAGPRKEIYYEPEEVKAAIVTCGGLCPGLNDVIRQIVFTLETYGVKNIVGIPFGYRGFFEKGLKEMPLSRHLVENINLAGGSFLGVSRGGAKTSEIVDSIQARRIDMLFVLGGNGTHAGANAIHEECRKRKLKVSVVAVPKTIDNDILLMDKTFGFDTAVEEAQRAINSAYIEVPFTLDGEYGVLRHLEHLLKTKGFCVVCVAEAAGQIQLEARATDASGNVILSDIGVHMQQKIKMHFKDIGVPADVKYIDPTYMVRACRANASDAILCTVLGQNAVHGAFAGFSGITSCICNTHYVYLPITEVITVPKRVNPNSRMWHRCLTSTGQPDFH

SEQ ID NO: 16250 - protein, 183 aa, Zea mays
  unsure (1)..(183): unsure at all Xaa locations
ADAWADAWADAWALLPIVGGVALASLTEASFNWAGFWSAMASNVTFQSRNVLSKKLMVKKEESLDNINLFSIITVMSFFLXSQEPYLLQSASLSLKQVYSRSLIAAFCFHACQQVSYMILARXVSPVTHSVGNCVKRVVVIVTSVLFFRTPVSPINSLGTGIALAGVFLYSQLKRLKPKPKTA

SEQ ID NO: 16251 - protein, 295 aa, Mycobacterium tuberculosis CDC1551
MLFGMARIAIIGGGSIGEALLSGLLRAGRQVKDLVVAERMPDRANYLAQTYSVLVTSAADAVENATFVVVAVKPADVEPVIADLANATAAAENDSAEQVFVTVVAGITIAYFESKLPAGTPVVRAMPNAAALVGAGVTALAKGRFVTPQQLEEVSALFDAVGGVLTVPESQLDAVTAVSGSGPAYFFLLVEALVDAGVGVGLSRQVATDLAAQTMAGSAAMLLERMEQDQGGANGELMGLRVDLTASRLRAAVTSPGGTTAAALRELERGGFRMAVDAAVQAAKSRSEQLRITPE

SEQ ID NO: 16252 - protein, 641 aa, Oryza sativa
MSAAVGGAEFHGFRGGGGGAAQLQRSRMLGRPLRVATPHAAAPAGGGGSSSASIRAVSAPLKKDASEVKRSKVEIIKEKSNFLRYPLNEELVSEAPNINDSAVQLIKFHGSYQQTDRDVRGQKNYSFMLRTKNPCGKVPNQLYLAMDTLADEFGIGTLRLTTRQTFQLHGVLKKNLKTVISTVIKNMGSSLGACGDLNRNVLAPAAPYVRKDILFAQETAENIAALLTPQSGAYYDLWVDGEKIMSAEEPPEVTKARNDNTYGTNFPDSPEPIYGTQYLPRKFKIAVTVAGDNSVDILTNDIGVVVVSDSAGEPVGFNIYVGGGMGRTHRVETTFPRLADPLGYVPKEDILYAIKAIVVTQRENGRRDDRRYSRMKYLIDNWGIEKFRAEVEKYYGKKFEDSRPLPEWQFNSYLGWQEQGDGKVFYGVHVDNGRVAGQAKKTLREIIEKYNLEVSITPNQNLILCGIDQAWKDPITAALAQSGLLEPKDVDPLNITSMACPALPLCPLAQTEAERGILPILKRIRAVFDKVGIKDHESVVVRITGCPNGCARPYMAEVGFVGDGPNSYQIWLGGTPNQSTLAETFMNKVKLQDIEKVLEPLFSYWNSTRQEGESFGSFTRRTGFDKLKEVVNKWAESASAA

SEQ ID NO: 16253 - protein, 203 aa, Triticum aestivum
ERGEVRGSEGGQPAMSSAEASVARGGEEERCRYKGVRRRRWGKWVSEIRVPGTRERLWLGSYATPEAAAVAHDTAVYFLRGGSLSGNGAAGLNFPERAAAAYGVFSVAPLSPRSVQSVASDAGMAADAQLVAARDGVPRQHYAEARAGAGTAQGGANAELQHDGAYAYTYTGDGGDTTGGGGGTSREQLVSGELSVDDMEILM

SEQ ID NO: 16254 - protein, 493 aa, Oryza sativa
  unsure (1)..(493): unsure at all Xaa locations
MDPTAPNSGDANGGAAADATAPSNTTVTLPPLTLRDVPLLPSAAAATDTIPNPISRHPYFHPPATFYISPGDVSLRHAFFDLASASPSPLVAYRRAGPRAGVAVDPARARAAVVTCGGLCPGLNTVLRELVVGLRELYGVRDVFGVAAGYRGFYGPDADHARLDLAAVDDWHKKGGTVLKTTRGGFDLNKIVDGIVARGYTQCLTSNTFYHDYILLKVYAIGGDGTMRGAVAIFNEFKRRGLNISITGIPKTVDNDIGIIDRSFGFQTAVEIAQQAIDAAHVEAVSAVNGIGLVKLMGRSTGHIALHATLSSRDVDCCLIPEVDFYLEGKGGLFEFLYERIKQKGHAVVVVAEGAGQELIPRTDDQKREQDXESGNIVFLDVGPWLKSELGKWWKREPPSELFTVKYIDPTYMIRAVPANATDNLYCTLLAHSAIHGIMAGYTGFVPGPINGNYSYIPLEDVAVAKNPVDVNDHKWAWVRSVTNQPDFMKPKY

SEQ ID NO: 16255 - protein, 539 aa, Schizosaccharomyces pombe
MEGENDPLLGSYKPKRRRSSLVYGLSRPQFLDTAASEVSPIPQERPTTSLRKPTPRVQRPATDVSYGALEETEENESIASGLSVQEDFNSKAWWKELTLLIKFATPVVLTSLLQYGEVVTTVFSLGHLGKTELAAASLSNMTATITAFAIYQGIVSALDTVGTQSFGSGNYEMVGLHLQRILAILLLIQFPIFLIWWKIEGILLFLRQDPLTCMFAAKYMRVMMLASPAYALFEALKRFLQVQGIFHPVTYILAIVVPINIFLNYLFVWSPWVGFGFLGAPVAVALTLWSACAVLIIYIMKVNGRQAWGGFSREALKNWGPLCRLAVPGVIMICSEYWAFELVTFASGVLGTTELASMSVLSTTSTLSYNLAFGVAAAAATRVGNLIGAGNTKLAKLATHVSINLGAAIGVIIAVILFLTRNTWTYIFTSDKDVVALVATIIPLVALINIADNTQCVAGGLLRGQGRQRIGGVVNFIAYYLLGLPVAIILCFKLDWGLYGLWIGIGAAILIIAGVETWCSLHVNWDHLVELANRQFDEA

SEQ ID NO: 16256 - protein, 1135 aa, Zea mays
MSLPSNNRRTCSRSSSARSKHSARVVAQTPVDAQLHAEFEGSQRHFDYSSSVGAANRPSASTSTVSTYLQNMQRGRYIQPFGCLLAVHPDTFALLAYSENAPEMLDLTPHAVPTIDQRDALGIGVDVRTLFRSQSSIALHKAAAFGEVNLLNPILVHARTSGKPFYAILHRIDVGLVIDLEPVNPADVPVTAAGALKSYKLAAKAISRLQSLPSGNLSLLCDVLVREVSELTGYDRVMAYKFYEDEHGEVISECRRSDLEPYLGLHYPATDIPQASRFLFMKNKVRMICDCCATPVKVIQDDSLAQPLSLCGSTLRASHGCHAQYMANMGSVASLAMSVTINEDEEEDGDTGSDQQPKGRKLWGLVVCHHTSPRFVPFPLRYACEFLLQVFGIQLNKEVELAAQAKERHILRTQTLLCDMLLRDAPVGIFTRSPNVMDLVKCDGAALYYQNQLLVLGSTPSESEIKSIATWLQDNHDGSTGLSTDSLVEAGYPGAVALREVVCGMAAIKISSKDFIFWFRSHTTKEIKWGGAKHEPVDADDDGRRMHPRSSFKAFLEVVKWRSVPWEDVEMDAIHSLQLILRGSLPDEDANRNNVRSIVKAPSDDMKKIQGLLELRTVTNEMVRLIETATAPVLAVDIAGNINGWNNKAAELTGLPVMEAIGRPLIDLVVTDSIEVVKQILDSALQGIEEQNMEIKLKTFHEHECNGPVILKVNSCCSRDLSEKVIGVCFVAQDLTRQKMIMDKYTRIQGDYVAIVKNPTELIPPIFMINDLGSCLEWNKAMQKITGIKREDAINKLLIGEVFTLHDYGCRVKDHATLTKLSILMNAVISGQDPEKLFFGFFDTDGKYIESLLTVNKRTDAEGKITGALCFLHVASPELQHALQVQKMSEQAATNSFKELTYIRQELRNPLNGMQFTCNLLKPSELTEEQRQLLSSNVLCQDQLKKILHDTDLESIEQCYMEMNTVEFNLEQALNTVLMQGIPLGKEKQISIERNWPVEVSCMYLYGDNLRLQQILADYLACALQFTQTAEGPIVLQVMSKKENIGSGMQIAHLEFRIVHPAPGVPEALIQEMFQHNPGVSREGLGLYISQKLVKTMSGTVQYLREADTSSFIILMEFPVAQLSSKRSKPSTSKF

SEQ ID NO: 16257 - protein, 159 aa, Oryza sativa
MCGILAVLGAADWSQAKRAHVLSCSRRLKHRGPDWSGLYQCEGNFLAQQRLAIVSPLSGDQPLYNADRTIVVVANGEIYNHKKIRKQFASKHTFSTGSDCEVIIPLYEEYGEDFVDMLDGVFAFVLYDTRTKTYMAARDAIGVNPLYIGRGSDGAVWIS

SEQ ID NO: 16258 - protein, 939 aa, Oryza sativa
MSSSRPTQCSSSSSRTRQSSRARILAQTTLDAELNAEYEEYGDSFDYSKLVEAQRTTGPEQQARSEKVIAYLHHIQRAKLIQPFGCLLALDEKTFNVIALSENAPEMLTTVSHAVPSVDDPPKLRIGTNVWSLFTDPGATALQKALGFADVSLLNPILVQCKTSGKPFYAIVHRATGCLVVDFEPVKPTEFPATAAGALQSYKLAAKAISKIQSLPGGSMEVLCNTVVKELFDLTGYDRVMAYKFHEDDHGEVFAEITKPGLEPYLGLHYPATDIPQAARFLFMKNKVRMICDCRARSIKIIEDESLHLDISLCGSTLRAPHSCHLQYMENMNSIASLVMAVVVNENEDDDEVGADQPAQQQKRKKLWGLLVCHHESPRYVPFPLRYACEFLAQVFAVHVNKEFELERQVREKSILRMQTMLSDMLLRESSPLSIVSGTPNIMDLVKCDGAALLYGGKVWRLQNAPTESQIRDIAFWLSDVHRDSTGLSTDSLHDAGYPGAAALGDMICGMAVAKINSKDILFWFRSHTAAEIRWGGAKHDPSDKDDSRRMHPRLSFKAFLEVVKMKSLPWNDYEMDAIHSLQLILRGTLNDDIKPTRAASLDNQVGDLKLDGLAELQAVTSEMVRLMETATVPILAVDSNGLVNGWNQKVAELTGLRVDEAIGRHILTVVEESSVPVVQRMLYLALQGKEEKEVKFEVKTHGSKRDDGPVILVVNACASRDLHDHVVGVCFVAQDMTVHKLVMDKFTRVEGDYKAIIHNPSPLIPPIFGADEFGWCSEWNAAMTKLTGWHRDEVINKMLLGEVFDSTNASCLVKNKDAFVSLCILINSALAGDETEKAPFSFFDRNGKYIECLLSVNRKVNADGVITGVFCFIQVPSHELQHALHVQQASQQNALTKLKAYSYMRHAINNPLSGMLYSRKALKNTGLNEEQMKEVNVA

SEQ ID NO: 16259 - protein, 206 aa, Oryza sativa
  unsure (1)..(206): unsure at all Xaa locations
MAVAIEAPFHVLAVDDSLPDRKLIERLLKTSSFQVTTVDSGSKALEFLGLHDHEDSPISTQSDQQEVGVNLIITDYCMPGMTGYDLLKKIKESSYLRDIPVVIMSSDNIPSRINRCLEEGADEVFLKPVXRLSDMSKLKPHILKSRCTEHYQREQHLQSHSESYTSSYPTGENSSSSTSTNSHNRKAGEDSLSDRKLIERLLKTSS

SEQ ID NO: 16260 - protein, 372 aa, Hemerocallis hybrid cultivar
STEIFSPVRIRSLAAVRQEEVKLMITGILASTSTDNSVKVNMKVVFSELMFNVIMKIIAGKRYFGVNTDSEVEEGQKFRVVFDEMFSTLEVASPQDFLPFLKWFGFKRMENRLTKLAKELDQLFQKLIEERRSERGKVQSTVIDVLLSLQETDREQYSDKLIKGMILSLIAAGTHTTAGTMEWAMSLLLNHPEALLKVRDEIDKKVGQDRLIDHSDLQNLSYLNNAIKESLRLFPTAPLLLAHESSAECTVGGFTIPSNTILFANAYALHRDPKVWTDPVSFKPERFENNGQQGSRIYVPFGLGRRSCPGEGLATQVVGLALGTLIQCFEWDRNGEEKVDMTDGSGLAMHMEKPLEAMCKPRQSIVDVINRL

SEQ ID NO: 16261 - protein, 198 aa, Selaginella serpens
DEHGEVVAEIRRSDLEPYLGLHYPATDIPQAPRFLFMKNRVRMIADCSATAVRIVQDKDLRQPISLAGSTLRAPHGCHGHYMGNMGSIASLVMAVIINDSTMISSGTAAGRASSSAAPSTWRKLWGLVVCHHTSPRTVPFPLRSACEFLMQVFGLQLNTEVELASQLREKHILRTQTLLCDMLLRDAPIGIVSQSPNI

SEQ ID NO: 16262 - protein, 319 aa, Clostridium perfringens str. 13
MKKIAVLTSGGDAPGMNAALRAVTRMALHHGLEVMGVQRGYAGLINGELFKMDRKSVSEIINRGGTILRTARCLEFKQEEVREKAAQILKAYGVEALVVIGGDGSFMGAKLLSKLGVKTVGLPGTIDNDLSYTDYTIGFDTALNTVVDAINKLRDTSTSHERVSIVEVMGRNCGDLALYAGIAGGAEAIIVPEMPFDKDELIKTILEGRTNGKTHSIIVVAEGVGGSAELAKEIESVTGIETRATILGHIQRGGSPTADDIVLASRMGAKAVEVLLEGKTSKVIGIKENRIFDMDIDEALDIERSFDESLYEMANAINK

SEQ ID NO: 16263 - protein, 547 aa, Acidithiobacillus ferrooxidans
MTENAPTELAITGMTCDGCAAHVRKALEGVPGVREAQVSYPDATARVVLEGEVPMQRLIKAVVASGYGVHPRSDGASSTNDGQELHIAVIGSGGAAMACALKAVERGARVTLIERSTIGGTCVNIGCVPSKIMIRAAHIAHLRRESPFDGGIQAVAPTIQRTALLVQQQARVDELRHAKYEGILDGNPAITVLRGEARFKDSRSVVVHLNDGGERVVMFDRCLVATGASPAVPPIPGLKDTPYWTSTEGLVSESIPERLAVIGSSVVALELAQAFARLGSHVTILARGTLFLREDPAIGEAITAAFRAEGIEVLEHTQASQVAYADGEFVLATGHGELRADKLLVATGRAPNTRRLNLEAAGVAINAQGAIVIDQGMRTNSPNIYAAGDCTDQPQFVYVAAAAGTRAAINMMGGSAALDLTAMPAVVFTDPQVATVGYSGAEAHRDGIETDSRTLTLDNVPRALANFNTRGFIKLVAEVGSGRLIGVQVVAPEAGELIQTAALAIRNRMTVQELADQLFPYLTMVEGLKLAAQTFTRDVKQLSCCAG

SEQ ID NO: 16264 - protein, 258 aa, Chloroflexus aurantiacus
MPPEIVAACLDVLARWRIPTLDITGGAPELHPAFTEIVRQARALGCHVIDRCNLTIAQLPNYRYLPRFFTEHQVEIIASLPTTDPESTDGQRGEGVFAQSLVTLRELNALGYGIEGSGLLLNLIANPTGPYLPEAQETLEQRWRQELATRYGIVFNRLYTLTNMPISRYLAHLQANGELEAYMHLLVQAFNPATVNGLMCRTTLSVGWDGRLYDCDFNQMLDLALPQTIRDVTIADLAGREIRTAAHCYACTAAAGST

SEQ ID NO: 16265 - protein, 503 aa, Halobacterium sp. NRC-1
MTYQHYINGEWVDGDGTETFDSRNPANGETLGTFQRGTTTDVEAAIAAADDAEDEWQSLSRIDRAEYLWDIYHELKDRHQELGEVVTKECGKEISEGKADVTEAWQMVEWAAGDARHPKGDVVPSEIPEKDAYMRRQPRGVVGCITPWNFPVAIPFWHMAVALVEGNTVVWKPAEQTPWCGQIIAEMFADAGIPDGVFNMVQGFGDAGARIVDHDDIDTVLFTGSAEVGEEVARTVADDPGKLAACEMGGKNGIVVTEKADLDIAVHAAVMSSFKTTGQRCVSSERLIVHEDLYDEFKQRFVEIAESVAVDDPLDEETFMGPAIEPAHVEKIQTYNDIAREEAENVLVDRTELGDDEIPDGHEDGNWVGPFVYEVDYDPDLRSITEEVFGPHVALIEYSGDIERAVEIHNDTPYGLAGAVISEDYRQINYYRDNAEVGLAYGNLPCIGAEVQLPFGGMKKSGNGYPSAREVIEAVTERTAWTLNNSKDIEMAQGLSADINTDE

SEQ ID NO: 16266 - protein, 255 aa, Pseudomonas aeruginosa UCBPP-PA14
MIEPNLRGNGKVALVTGAARGIGLGISAWLIAEGWQVVLADNDRERGARVAEALGEHAWFVAMDVAQEGQVAMSVAEVLGQFGRLDGLVCNAAIANPRNTPLEALSLGEWTRTLAVNLTGPMLLAKYCTPYLRAHNGAIVNIASTRAHQSEPDSEAYAASKGGLLALTHALAASLGPEIRVNALSPGWIDTREAAEREAAPLTELDHDQHLVGRVGTVEDVASLVAWLLSEDAGFVTGQEFLVDGGMTRKMVYLD

SEQ ID NO: 16267 - protein, 387 aa, Glycine max
  unsure (1)..(387): unsure at all Xaa locations
MSIPIPHRQLFIDGDWKVPVLKNRIPIINPSTQHIIGDIPAATKEDVDLAVAAAKAALSRNKGADWASASGSVRARYLRAIAAKITEKKPELAKLEAIDCGKPLDEAAWDIDDVAGCFEFYADLAEKLDAQQKAHVSLPMDTFKSYVLKEPIGVVALITPWNYPLLMATWKVAPALAAGCAAILKPSELASVTCLELAEICKEVGLPPGVLNILTGLGPEAGAPLAAHPDVDKISFTGSSATGSRIMFGSASCWQPVSLELGGKSPIIVFEDVDLDKTAEWTIFGCFFTNGQICSATSRLIVHESIATEFVNRLVQWAKNIKISDPFEEGCRLGPIVSEGQYKKVLNCISTAKSEGATILIGGSRPEHLKRGTFVXPTIITDVTTSM

SEQ ID NO: 16268 - protein, 676 aa, Bacillus subtilis
MQLVEQTIVTRKKYTAIGIDNPTTQGRLCIKGMNAHQHALNSSRITRPLLKKNGEFMPVSWEEALNHIKDQVTMIQTEHGHDAMAVYGSASITNEEAYLLGKFARVGLQTKYIDYNGRLCMSAAATAANQTFGADRGLTNPLSDIPHTRVIILAGTNIAECQPTIMPYFEKAKENGAYFIAIDPRETATTKIADLHLKIKPGTDAALANGLVKIIIDEQLINEDFIQSRTNGFEELKQHTDSLDLNDIAEQTSVSLVDIRKAAVKFAKETSGMLFTARGIEQQTDGTAAVKGFLNMVLITGKIGKPYSGYGAITGQGNGQGAREHGQKADQLPGYRSIENEEHRAHIAKVWGIHQDDLPRKGVSAYEVMEKINDGDIKGLFLMCSNPAVSSPNANLVKKALRRLTFFVAIDLFISETAKYADVILPASSYLEDEGTMTNVEGRVTLREASRPCPGEAKHDWQIICDLASALGKGRYFSYTSAEDIFNELREASRGGIADYSGISYGRLRREGGIHWPCPESDHPGTGRLFTESFAHPDQKAALSVIPNEPPVPKEKPTADYPLYLTTGRVMSHYLTGVQTRKSAALAARHFESFMEIHPQTAATYNIEDRVLVKIESPRGSITVRSKLSEQIRKDTVFVPIHWADAQNVNDLIGEALDPACKMPGFKVCAVRIIPI

SEQ ID NO: 16269 - protein, 167 aa, Glycine max
  unsure (1)..(167): unsure at all Xaa locations
MDPYKNRPSSAFNSPFWTTNSGAPIWNNNSSLTVGSRYWELNWGMXGPILLEDYHLVEKLANFDRERIPERVVHARGASAKGFFEVTHDISHLTCADFLRAPGVQTPLIVRFSTVIHERGSPETLRDPRGFAVKFYTREGNFDLVGNNFPVFFVRDGLKXPDMGHAL

SEQ ID NO: 16270 - protein, 83 aa, Triticum aestivum
  unsure (1)..(83): unsure at all Xaa locations
MAPTGMGVSATFVAPFQGLKSTVGLPVSRRSNGASLGSVSNXGGRIRCMQVWPIEGIKKFETLSYLPPLSTEGFLKQVDYLIR

SEQ ID NO: 16271 - protein, 483 aa, Triticum aestivum
NILIEKNKRGFPYTAKQYCCDVSSCRDNSLIKFVEMEFNEPDRRNRGGQGCRAIMWDTTVISDGWSQRFRVDVDNISVDRSYSGLLPQLWNGETRELELKRLILYTPTLSVHDDNLLYVMAKMNSEDDKAWVITVDMKREAVEAIAPYSTRGRKLTSWHSPCTFPEYLDPATPGDHVAMHSRRICAADCVLQMLLTRDWFREIGERFEFERPTHVECLSLIQCCPVSSVLSDIQEVVKYAFSTGEGEAAPKAVDLCSRAFEDFDVLLRELLHDPASSTEGMSCKISVALRALDSILDIVPPTLRALADACHQKGGKTIFDLGEEPGDPKDLKLQCSPKANNLTWCKQPVVYSKNRSDELQQWGSNLINRFQIGGRTVFDLVEQARDTEDWKVESSCDANNLSGGKDKGGSYEVQQGRSKPINRRQRKRNQARGREAGRDERLVVPYCRQLEQYVLIFLCLLFIAYICAPITMKWLGHGPLVSY

SEQ ID NO: 16272 - protein, 427 aa, Pseudomonas aeruginosa
MSRSETLFNNAQKHIPGGVNSPVRAFKSVGGTPLFFKHAEGAYVLDEDDKRYVDYVGSWGPMILGHSHPDVLDAVRRQLDHGLSYGAPTALEVEMADLVCSMVPSMEMVRMVSSGTEATMSAIRLARGYTGRDSIIKFEGCYHGHSDSLLVKAGSGSLTFGVPNSPGVPAAFAKHTLTLPFNDIEAVRKTLGEVGKEVACIIVEPVAGNMNCVPPAPGFLEGLREACDEHGVVLIFDEVMTGFRVALGGAQAYYGVTPDLSTFGKIIGGGMPVGAFGGKREIMQQISPLGPVYQAGTLSGNPLAMAAGLTTLRLISRPGFHDELTAYTTRMLDGLQQRADAAGIPFVTTQAGGMFGLYFSGADAIVTFEDVMASDVERFKRFFHLMLDGGVYLAPSAFEAGFTSIAHGDKELEITLNAAEKAFAALK

SEQ ID NO: 16273 - protein, 475 aa, Arabidopsis thaliana
  unsure (1)..(475): unsure at all Xaa locations
MASQSSVAVISSAAARGESFPDSKKPIGSVRFQQPLRLSFSYCKSGNMSSRICAMAKPNDAETLSSSVDMSLSPRVQSLKPSKTMVITDLAATLVQSGVPVIRLAAGEPDFDTPKVVAEAGINAIREGFTRYTLNAGITELREAICRKLKEENGLSYAPDQILVSNGAKQSLLQAVLAVCSPGDEVIIPAPYWVSYTEQARLADATPVVIPTKISNNFLLDPKDLESKLTEKSRLLILCSPSNPTGSVYPKSLLEEIARIIAKHPRLLVLSDEIYEHIIYAPATHTSFASLPDMYERTLTVNGFSKAFAMTGWRLGYLAGPKHIVAACSKLQGQVSSGASSIAQKAGVAALGLGKAGGETVAEMVKAYRERRDFLVKSLGDIKGVKISEPQGAFYLFIDFSAYYGSEAEGFGLINDSSSLALYFLDKFQVAMVPGDAFGDXSCIRISYATSLDVLQAAVEKIRKALEPLRATVSV

SEQ ID NO: 16274 - protein, 259 aa, uncultured bacterium
QPNAMGGREAGGLANQLAIHRGFDHQSIELISEFWQTDRLARKPGLKAIEMFEAVERGDIQVIWIMATNPVVSIPDNRFVQQALKKCPLVIVSDVTAESDIAQYADLLLPAAGWGEKQGMVTNSERMLTRQRQFQKPKGLAKPDWQAIAMVASKVSARLAMQDGFKFLTEAEVFGEYAAMTGLNKNSSLLLDLSAYAQISEQEYAAWQPVQWGGAHPFANGQFSFDDGKARFIVPSHSQASDKMQWWLNTGRQRDQWHT

SEQ ID NO: 16275 - protein, 183 aa, Xanthomonas axonopodis pv. citri str. 306
MSQTLYDIPVTRIDGQPTTLADYRGKVLLVVNVASKCGLTPQYEGLEALYRDKRAQGLEVLAFPANDFNGQEPGSEAEIAQFCQLTYDVTFPMFAKIAVAGDQAHPLYGALTSTHPHTTGEGPMREKLAGYGIAPNPAPGVVWNFEKFLIGRDGKIIDRFAPDIPADDARLRAAIDAALATRS

SEQ ID NO: 16276 - protein, 420 aa, Staphylococcus epidermidis ATCC 12228
MAEVKVPELAESITEGTIAEWLKNVGDNVDKGEAILELETDKVNVEVVSEEAGVLSEQLAEEGDTVEVGQAVAVVGEGQVNTSNDSSNESSQKDEAKEKETPKQSNPNSSESENTQDNSQQRINATPSARRHARKNGVDLSEVSGKGNDVLRKDDVENSQKSSSQTAKSESKSQNSGSKQSNNNPSKPVIREKMSRRKKTAAKKLLEVSNQTAMLTTFNEVDMTNVMDLRKRKKEQFIKDHDGTKLGFMSFFTKAAVAALKKYPEVNAEIDGDDMITKQFYDIGIAVSTDDGLLVPFVRDCDKKNFAEIEQEIANLAVKARDKKLGLDDMVNGSFTITNGGIFGSMMSTPIINGNQAAILGMHSIITRPIAVDKDTIENRPMMYIALSYDHRIIDGKEAVGFLKTIKELIENPEDLLLES

SEQ ID NO: 16277 - protein, 396 aa, Dechloromonas sp. RCB
MNPHLAQLQPYPFEKLRALFAGVTPNPQYKEIKLSIGEPQHPTPAFIMDALANGLKGLANYPTTQGIPLLRQTIAKWCRHRYGLELNPETEILPVNGSREALFSFAQTVIDPSRGHVPLIVSPNPFYQIYEGAAYLSGAEPRFLNNLPDNDFAFDYASLSEEEWARVQLFYVCSPGNPTGKVLSLADWKTLFALSDKYGFIIASDECYSEIYFDEANPPIGGLQAAKLLGRTNERLVMFSSLSKRSNVPGMRSGFVAGDEKILKKFLLYRTYHGCAMAPPVQTASIAAWNDESHVLDNRNQYREKFAACTPLIGEVLGTGMPDASFYLWAKTPIADTEFARGLLEHYNVVVLPGSFLAREVRGVNPGANFVRIALVASLDECLEATQRIRQFAQQL

SEQ ID NO: 16278 - protein, 259 aa, uncultured bacterium
QPNAMGGREVGGLANQLAVHRGFDPDSIKLISEFWQTDNLATRPGLKAIELFEAVERGDIQVIWIMATNPVVSMPDNVFIQRALQKCPLVIVSDVTHDSDITQYADLLLPAAGWGEKQGMVTNSERMLTRQRKFLPSKGEAKPDWKIIAEGRKKLCERLDKPNAFDFKSESSVFREYAAMTGLNKDTPFLLDLSKYAEISDEEYKSWNPVQWGSSRPFADGKFSTENRKARFVVTTAPLIKGESSLWLNTGRQRDQWHT

SEQ ID NO: 16279 - protein, 268 aa, uncultured bacterium
QPNAMGGREVGGLSNMLAANMDIDNPEHHATVKAFWQAPHLITKPGLRAVDMFQAAADGKVKCLWIMATNPVASMPNRALVEAALKNCELVIVSDTAAQTDTLNYAHIALPATGWSEKNGTVTNSERRISRQRGLVEPMGEARHDWDILSMVGRAMGFEAAFAYQHPAEIFAEHCALTAANNNGSRALDLGPLANLTIAQYDNLRPQQWPLSDTHRIGTARLFADGSFYTPNGKANFVAITPRLPDQQTSADYPFVLNTGRVRDQWHT

SEQ ID NO: 16280 - protein, 266 aa, uncultured bacterium
QPNAMGGREVGGLANQLAAHMDFSDESIKLVSDFWNAPNIAEKPGLKAVELFSELEAGKIKALWIMATNPAVSMPQASRINQALANCDYLVVSDCITSNDTTRHANVLLPATTWGEKDGTVTNSERRLSRQRAFLPAPGQARPDWWIICQVAQKMGYTQSFTYQTPADIWREYASLSGYQNGGMRDFDVSALANISNQQYQNMQPQQRPVNSSQARVSSLFSDKRFYHADHKARFISVTANCTYPQTSEQFPLVLNSGRIRDQWHT

SEQ ID NO: 16281 - protein, 173 aa, Nostoc sp. PCC 7120
MLTTAEFLKYTQWSGIATVIFAVLAILAFLFKWGIRFRLVGTTGFMLVLTAGLFGLSIVPLSRTVIPGAVKYTLVYDNGSSQAVISLSPKISPPEVEATLLQAASNLNSFGRSGDRNDNKVTIRARTLIHPEPGLTVPLYLGEVKRSLASREDTQISVEIYPEKFAQLPPAKA

SEQ ID NO: 16282 - protein, 517 aa, Hemerocallis hybrid cultivar
MDRERLTAEMAFRDSSIVIKIRRKLPDFLQSVKLKYVKLGYRSTTKPPFYLLLPLLLIAASLIFRIHTTLTFPANFSIDFVTAFSSSSIALLLLGVYYTRRPRPVYLVDFACYKPEDEHKISNEGFLEMTESTTAFNDKSLDFQTKITVRSGLGDETYLPPGIQARPPKLSMAEARLEAETVMFGCLDALFESTGINPSRDIGILIVNCSLFNPTPSLSAMIVNHYKMREDVKSFNLGGMGCSAGLISIDLAKDMLQANPNSYALVLSTENITLNWYFGNDRSMLLSNCIFRMGGAAVLLSNKRKDAKRAKYRLLHTVRTHKGADDSCYNCVYQREDEGGKVGVSLAKELMAVAGDALKTNITTLGPLVLPLTEQGKFLATLITRKLLKLKGVRPYIPNFKRAFEHFCVHAGGRAVLDEVEKNLGLEKTDMEASRSVLHRFGNTSSSSLWYELAYNEAKGRVGKGDRVWQIGFGSGFKCNSAVWKAMKDVPAIDRTASGSSRMCNPWGDCIDRYPVK

SEQ ID NO: 16283 - protein, 426 aa, Streptomyces coelicolor A3(2) [sequence omitted]

SEQ ID NO: 16284 - protein, 403 aa, Nostoc sp. PCC 7120
MSFDWITPADRIQQLPPYVFARLDELKAKAREQGIDLIDLGMGNPDGATPQPVVDAAIQALQDPKNHGYPPFEGTASFRRAITNWYNRRYGVVLDPDSEALPLLGSKEGLSHLAIAYVNPGDVVLVPSPAYPAHFRGPVIAGGTVHSLILKPENDWLIDLTAIPEEVARKAKILYFNYPSNPTGATAPREFFEEIVAFARKYEILLVHDLCYAELAFDGYQPTSLLEIPGAKDIGVEFHTLSKTYNMAGWRVGFVVGNRHVIQGLRTLKTNLDYGIFAALQTAAETALQLPDIYLHEVQQRYRTRRDFLIQGLGELGWDVPKTKATMYLWVKCPVGMGSTDFALNLLQQTGVVVTPGNAFGVAGEGYVRISLIADCDRLGEALDRIKQAGIRYRPEALVSAPE

SEQ ID NO: 16285 - protein, 500 aa, Psychrobacter sp. 273-4
MTDSTDLKHMDNAEQTQTAYINGSYLAVDKALSTFDSINPVTGEVLSTIQQTTTEQINDAVIAAQKGQKVWAAMTAIERSRILLNAVAILRERNDELAVLETKDTGKAISETKYVDIVTGADVIEYYAGLAPMIEGRQIPLRDTSFVYTRQEPLGVIAGIGAWNYPIQIAMWKAAPALAAGNAMIFKPSEVTPLSALKLAEIFTEAGLPEGVFNVVQGNYEVGEALTQHPDIAKVSFTGGVPTGKKVMSSAATSSLKDVTLELGGKSPLIIFDDADIDTAADIAMMANFYSTGQVCTNGTRVFIPKALQAKFEQAIQTRVKRIKLGDPMDDSITMGPLVSFPHMDRVLGYIEQGKASGARLLCGGARVTTGSLADGAYVAATVFTDCTDDMSIVREEIFGPVMSILTYETEEEVIRRANDTEYGLAAGVVTADLNRAHRVIAQIEAGICWLNTWGESAAQMPVGGYKHSGIGRENGIQTLEHYTQTKSIQVELGAFESVF

SEQ ID NO: 16286 - protein, 130 aa, Ralstonia eutropha
KCIGCHTCSVTCKNVWTSRDGVEYAWFNNVETKPGIGYPKEWENQDKWQGGWKRNADGTLEPRQGGKLKILANLFANPNLPQIDEYYEPFTYDYEHLQKAPLVQTPPTARPVSVLTGRKMEKIEWGPNWE

SEQ ID NO: 16287 - protein, 328 aa, Shewanella sp. Bok-1-30-2
  unsure (1)..(328): unsure at all Xaa locations
CIGCHTCSITCKNVWTSREGVEYAWFNNVETKPGIGYPKEWENQDKYNGGWKRNKNGSLEPANGNRRRLLANIFANPDLPEIDDYYEPFDFDYQHLHNAPESKHQPVARPRSLITGQRMEKINWGPNWEEILGTEFSERKKDKNFDEVVQKEIYGQFEKTFMMYLPRLCEHCINPACVASCPSGAIYKREEDGIVLIDQDKCRGWRMCVSGCPYKKIYYNWKSGKSEKCIFCFPRIEAGQPTVCAETCVGRIRYLGVLLYDAERVDEVASVPNEHDLYPAQLSMFLDPSDPEVIAAAKAEGIPEHWLESARQSPVYKMAVDWTXALPL

SEQ ID NO: 16288 - protein, 321 aa, Shewanella sp. SK-3-30-1
CIGCHTCSITCKNVWTSREGVEYAWFNNVETKPGIGFPKEWENQNKWNGGWKRTDAGKLELKIGGKIRLLAKIFANPDLPEIDDYYEPFDFDYEYLHTAPDSQHQPVARPRSLITGQRMEKIEWGPNWEEILGTEFEKRKKDNNFDNVIQKDIYGQFEKTFMMYLPRLCEHCLNPACVASCPSGSIYKREEDGIVLIDQDKCRGWRMCVSACPYKKIYFNWKSGKSEKCTFCFPRIEAGQPTVCSETCVGRIRYLGVLLYDADQIEIAANTPNEKDLYQAQLDVFLDPNDPAVIEAARKEGISDNWITAAQRSPVYKMAID

SEQ ID NO: 16289 - protein, 335 aa, Xanthomonas axonopodis pv. citri str. 306
MKAIAYLQHGLPIDDARALVELELPLPTPGPRDLRVRIHAVSVNPVDTKVRSNAAVDAPRVLGWDASGVVDAVGEAVSLFRPGDAVYYAGALTRPGTNAEFHLVDERLVGRKPATLDDAAAAALPLTAITAWELLFDRLGVAEGGGEGQALLVVGAAGGVGSMLVQLARTLTKLTVIGTASRPETQDWVHALGAHHVIDHSQPLSEGLQRIGIAQVQHVASLTHTDQHFAQLVEVLAPQGQLALIDDPATLDALPLKRKSLSLHWELMFTRSLFETEDMIAQHHLLNRVAELVDTGVLRTTLGEHYGRITADNLRRAHAALESHRTRGKLVLEGF

SEQ ID NO: 16290 - protein, 546 aa, Psychrobacter sp. 273-4
MMADDKTKSTQAERLVQLRRDKGMTAEQLAQAMTAAGAKVSRGAISNWERGTNGIVSSKLPTLARILGCSEGYLLRGELESDSKSDVDLKNIASDNTNVYVESDEQAHSASQITHTTTIPSTPRKISPNNLMSGPFMNTIKKSDKLQNVCYDIRGPLLQTANKMEAEGKRILKLNIGNPAPFGLEAPHEILRDVAMNLPEATGYSDSQGIFSARKAVLQYYQSKGLLSAVDVRDVYLGNGVSELIVMTLQALMNDGDEVLIPMPDYPLWTAATNLAGGTAVHYRCNEEDNWHPDIEDIKSKITSKTKGIVVINPNNPTGALYSDEVLLQIIEVAKEHDLIIMADEIYDRILYDDMEHTPMSTLTDEVLVLSYNGLSKSHRIAGFRAGWMMISGRKEHAADFIEGLDMLASMRLCSNVQGQYAIQTAMGGYQSMKDLTSKKGRLYKQRELAVTRLNAIKGISCTMPQGAFYCFPKMDPEIYPIKDDMQFMMDLLLEENVLMVQGTGFNWDKHDHFRLVFLPNLHDLEDAMDRLDRFFAKKRKQFGTD

SEQ ID NO: 16291 - protein, 289 aa, Dechloromonas sp. RCB
MKKVRKAVFPVAGMGTRFLPATKASPKEMLPIVDKPLIQFAVEEAVAAGITDMVFVTGRSKRSIEDHFDKAYELESELQARGKDELLDFVRNMIPKNINCIYIRQAEALGLGHAVLCAKPVIGDEPFAVILADDLLDGKPAVMKQMTDTYDYYRCSVLGVQDVPRADTRSYGIVDARPVAERVEQVNAIVEKPKPEDAPSTLAVVGRYILTPRIFHHLENVKPGAGGEIQLTDGIASLLSEEQVLAYRYHGTRYDCGSKLGYLQATVVFGQRHPEVGPAFDAYLKTLGG

SEQ ID NO: 16292 - protein, 279 aa, uncultured bacterium
QPNAMGGREVGGLANQLAAHMDFSGPERERVKRFWQSPQLAEKPGLKAIELFQAAARGEIRFLWIMSTNPMVSMPDTSLVQRALEKVELVVVSDCMADTDTTAMAHVLLPAASWGEKNGTVTNSERCLSRQRGFLPSPGEAKPDWWILTQVAHRLGFRQQFPYQHAHDIFSEHARLSGFENKGSRDFDISALAQLSRQQYDALSPIQWPVNSDYPNGRQRFFEDGRFYTDNGKARFIATCCQLPQDIPATEFPTTELPTPDIPTMLNMNSGRIRDQWHT

SEQ ID NO: 16293 - protein, 170 aa, Azospirillum brasilense
VRKMNVLSVVMQSFAICCLVSILWFFAGYSIAFTEGTPYFGSLSKFMLAGITKDSLTGVIPETIFVVFQMTFAIITPALITGAFADRMKFSSMLVFTGLWSLIVYAPITHWVWGPGGYLAGDGVLDYAGGTVVHINAGVAGLVAAIVLGKRKGHPNENFAPHNLVLSLIG

SEQ ID NO: 16294 - protein, 612 aa, Oryza sativa
MADGHHWNIVKIPPIVQELAAGVHEPPSQYMVGEKDRPAIAGSDMPEPIPVVDLSRLSASNGEDSAGELAKLRSALEDWGLFLVNKRLFGTIMEGSILSEMINVTRGFYKLPLEEKQKYSNLVNGKDFRIEGYGNDMVVSEKQILNWCDRDVLHEYTMRCREITSLVLARLARLLGLREGYFVDMFDEDATTYARFNYYPRCLRPEDVLGLKPHSDGSVITVVSVDDTVSGLQVLRQGVWYDVPVVPNALLINMGDGMEIMSNGLLKSPVHRVVTNAERERVSVVMFYALDPEKELEPAPELVDDEKRPRQYAKMKIKDYLSGFYETFARGTRVIDTVKMEGKGKEQDVEMKEPSVATILTSFENSFDGFGSMSTPLYQTATFKQKIAEIAHYHGALVLVDNSIMSPVLSRPLELGADIVMHSATKFIAGHSDLMAGILAVKGESLAKEIAFLQNAEGSGLAPFDCWLCLRGIKTMALRVEKQQANAQKIAEFLASHPRVKKVNYAGLPDHPGRSLHYSQAKGAGSVLSFLTGSLALSKHVVETTKYFNVTVSFGSVKSLISLPCFMSHASIPSAVREERGLTDDLVRISVGIEDADDLIADLDHALRSGPA

SEQ ID NO: 16295 - protein, 452 aa, Bacillus subtilis subsp. subtilis str. 168
MKETQNAREKIKQLLHILIPIFITQAGLSLITFLDTVMSGKVSPADLAGVAIGSSLWTPVYTGLAGILMAVTPIVAQLLGAEKKQKIPFTVLQAVYVAALLSIAVLVIGYAAVDLILGRLNLDIHVHQIAKHFLGFLSLGIFPLFVYTVLRSFIDSLGKTRVTMMITLSSLPINFVLNYVFIFGKFGMPALGGVGAGLASALTYWCICIISFFIIHKNAPFSEYGIFLTMYKFSWKACKNLLKIGLPIGFAVFFETSIFAAVTLLMSHFHTVTIASHQAAMNFASLLYMLPLSVSMALTIVVGFEAGAARFKDARSYSLIGIMMAIGFSLFTAACILLFREQIAGMYTSDPDVLRLTQHFLIYALFFQLSDAVAAPIQGALRGYKDVNYTLAAAFVSYWVIGLPVGYMVGTFTSLGAFGYWIGLIAGLAAGAVGLFFRLAKLQKRYSQKQHI

SEQ ID NO: 16296 - protein, 266 aa, uncultured bacterium
QPNAMGGREVGGLANQLAAHMDFAAADRERVKRFWNAPGVAEKPGLKAIDLFKAAEKGDIKFLWIMSTNPVVSMPDADLIKRALKKVELVVVSDCMADTDTAAFAHVLLPAASWGEKNGTVTNSERRISRQRGFLPSPGEAKPDWWMLTQVAQRLGFSEQFDYQKPYDVFIEHARLSAFENEGKRDFDLSGLADINEAQFEALAPIQWPVNNTFPQGRARFYDDGYFYTPSGKARFVSNAAIMPERVDQPGLLSMNTGRIRDQWHT

SEQ ID NO: 16297 - protein, 258 aa, Agrobacterium tumefaciens str. C58
MTDARTTAEGGMETSYGFHKVDEGKKQGLVNEVFHKVAKRYDIMNDVMSAGLHRLWKDAMVSALSPRKDPSYKILDVAGGTGDVAFRIIEASNRLAHATVLDINGSMLAVGEERAAKKKLSDNLTFVEANAEELPFEANTFDAYTVAFGIRNVPRIDVALKEAYRVLKRGGRLLVLEFSEVDMPLLDRVYDAWSFNAIPQFGKMITGDAEPYQYLVESIRKFPNQEDFATMIRTAGFSRVTYTNYTGGIAALHSGWKL

SEQ ID NO: 16298 - protein, 118 aa, Oryza sativa
  unsure (1)..(118): unsure at all Xaa locations
RLLGWKIVNFFSHHPXSLHVGSFLFDDVXIPLNYKHIEGFCVNTYTLIRXDGKPYLVKFHXKPTCAVKCLLDDEAVTVCDTCHNHATNDLTHSIAAWNYPXWKLYIQTIDPYHEDKFD

SEQ ID NO: 16299 - protein, 189 aa, Zea mays
MCGGAIIFDYIPARRRVSTADFWPGSEADAEDIHASHSTDPQRAPRAKAKPGRRKNQYRGIRQRPWGKWAAEIRDPVKGVRVWLGTYPTAEAAARAYDRAARRIRGAKAKVNFPSDTSSSVTVPTAVSRSAAAAAQAPAVLPPPKVEAQTQVSDEVKELSEELMAYENYMNFLGIPYMEGGTTAASATT

SEQ ID NO: 16300 - protein, 275 aa, uncultured bacterium
QPNAMGGREVGGLSNQLAAHMDIDNEVHRGIVQRFWNSPGIADKQGLKAVDLFEAIHDGKIKAVWIMSTNPVVSLPGADRVKSALEKCEYVVVSDCMEKTDTTSLANVLLPAATWGEKNGTVTNSERCISRQRSFLSSPGEAKPDWWAVAEVARRMGFVDGFDYAAPHEIFREHAELSGFENQDSSEKRRDFDISALTDIDSDMYENFDPVQWPVYKNAQGAITGTPRMFADGKFFTPNQKARIITVEPRLPVNNTSTEFPLILNTGRCRDQWHT

SEQ ID NO: 16301 - protein, 108 aa, Triticum aestivum
  unsure (1)..(108): unsure at all Xaa locations
MAPTVMASSATSVAPFQGLKSTAGLPVSRRSNGASLGSVSNGGRIRCMQVWPIEGIKKFETLSYLPPLXSTEALLKQVDYLIRSKWVPCLEFNKVGFIFREXNASPGY

SEQ ID NO: 16302 - protein, 266 aa, uncultured bacterium
QPNAMGGREVGGLANMLAAHMELDNEAHRDIVQTFWQSPKIVNKPGLKAVDLFNAIDEGTIKAVWIMATNPAVSMPDADKVREALYKCEFVVVSDIMQSTDTTACAEVLLPALGWGEKDGTVTNSERRISRQRAFLSAPGEAKADWWVICQVAKRMGYAKAFEYKNSYEIFKEHARLSGYENQGTRDFDIASLADQTFQQYDEILPVQWPTQGHQGTARMFTTSRFYTPNKKARFIPVTPRLPVNLTSGAYPLILNTGRVRDQWHT

SEQ ID NO: 16303 - protein, 455 aa, Bacillus sphaericus
MKQVLTELQEKDLQHVWHPCSQMKDYEAFPPIVIKKGEGVWLYDEQNQRYLDAVSSWWVNLFGHANPRISQALSEQAFTLEHTIFANFSHEPAIKLAQKLVALTPQSLQKVFFADNGSSAIEVALKMSFQYHMQTGKTQKKRFLALTDAYHGETLGALSVGGVDLYNEVYQPLLLDTVRAQGPDCFRCPFKHHPDSCHAQCISFVEDQLRMHHKEITAVIIEPLIQAAAGMKMYPAIYLRRLRELCTQYDVHLIADEIAVGFGRTGTLFACEQANISPDFMCLSKGLTGGYLPLSVVMTTNDVYQAFYDDYATMKAFLHSHSYTGNTLACRVALEVLAIFEEEQYIDVVQDKGERMRKLALEAFSDLPFVGEYRQVGFVGAIELVANRDTKEPLPSEERIGYQIYKRALAKGLLIRPLGNVLYFMPPYIITDDEMQFMIQTTKDTIVQFFEEREG

SEQ ID NO: 16304 - protein, 267 aa, uncultured bacterium
QPNAMGGREVGGLANQLAAHMDFSEQDIETVKTYWNSPNIAKQPGLKAVDMFNAITSGQVKAVWIMATNPLVSMPEADKVRQALKQCELVIVSDCVKQTDTTELADVLLPALAWGEKDGTVTNSERRISRQRAFLPTPGEAKADWWIINEVAKRMGFNDAFNYQSPDEIWREHAALTAANNDGQRDFDLTGLKDLSKSDYSRLQPVQWPCRDNSSTDKNHMFEDRHFFHPDKKARFIPVKSCGDFPKASVEYPLILNSGRIRDQWHT

SEQ ID NO: 16305 - protein, 416 aa, Escherichia coli
MESKVVVPAQGKKITLQNGKLNVPENPIIPYIEGDGIGVDVTPAMLKVVDAAVEKAYKGERKISWMEIYTGEKSTQVYGQDVWLPAETLDLIREYRVAIKGPLTTPVGGGIRSLNVALRQELDLYICLRPVRYYQGTPSPVKHPELTDMVIFRENSEDIYAGIEWKADSADAEKVIKFLREEMGVKKIRFPEHCGIGIKPCSEEGTKRLVRAAIEYAIANDRDSVTLVHMGNIMKFTEGAFKDWGYQLAREEFGGELIDGGPWLKVKNPNTGKEIVIKDVIADAFLQQILLRPAEYDVIACMNLNGDYISDALAAQVGGIGIAPGANIGDECALFEATHGTAPKYAGQDKVNPGSIILSAEMMLRHMGWTEAADLIVKGMEGAINAKTVTYDFERLMDGAKLLKCSEFGDAIIENM

SEQ ID NO: 16306 - protein, 429 aa, Mycobacterium tuberculosis CDC1551
MPIIEQVRAREILDSRGNPTVEVEVALIDGTFARAAVPSGASTGEHEAVELRDGGDRYGGKGVQKAVQAVLDEIGPAVIGLNADDQRLVDQALVDLDGTPDKSRLGGNAILGVSLAVAKAAADSAELPLFRYVGGPNAHILPVPMMNILNGGAHADTAVDIQEFMVAPIGAPSFVEALRWGAEVYHALKSVLKKEGLSTGLGDEGGFAPDVAGTTAALDLISRAIESAGLRPGADVALALDAAATEFFTDGTGYVFEGTTRTADQMTEFYAGLLGAYPLVSIEDPLSEDDWDGWAALTASIGDRVQIVGDDIFVTNPERLEEGIERGVANALLVKVNQIGTLTETLDAVTLAHHGGYRTMISHRSGETEDTMIADLAVAIGSGQIKTGAPARSERVAKYNQLLRIEEALGDAARYAGDLAFPRFACETK

SEQ ID NO: 16307 - protein, 1411 aa, Mycobacterium avium subsp. paratuberculosis str. k10
MAPENAVNTMCAYCGVGCGMVLQITTDPQTGRRHVAKSVGNKEHPANFGRLCTKGATTADLLAAPGRMDSAHARAGRGEPLEPIDTDQAITRCAKQLRAIIDEHGPDAIAMYVSGQMSLEAQYLANKLTKGFIGTNQIESNSRLCMASAGSGYKLSLGADGPPGSYQDFEHADVFFVIGANMADCHPILFLRMMDRVKAGAKLIVVDPRRTATAEKADLFLQIAPGTDLALLNGLLHLIVENGHTDREFIAEFTEGWEVMPSFLEQYTPDRVSEITGIPEQDIRAAAQLIGEADNFMSCWTMGLNQSTHGTWNTNAICNLHLATGAICKPGSGPFSLTGQPNAMGGREMGYMGPGLPGQRSVASVADREFVEDVWGVPRGRLRTEVGTGTVDMFSRMADGQIKACWIICTNPVASVANRKTVLAGLERAELVIAQDAYLGTETSEYADVLLPAALWAETEGVMVNSERNITLSQPAVAAPGGAMPDWQIIARIACEMGFSEAFSYSCAEEVFEEIKRFWNPTTGYDLRGVSYERLRRQPLQWPCPPQSTADRNPIRYLNDGVSQTQLVREDGTVPRLAFPTPSGRAVFFARPHLQPEEMPDDDYPFLLNTGRLPHQWHTMTKTGKVAKLNKLNPGPFVEIHPDDAARLGIGEHDRVEIASRRGRAVLPAVVSDRVRPGNCFAPFHWNDAFGEYLSINAVTNDAVDPISNQPEFKACAVTLTKVAVSHPDSAIGTGPSAGHDTPESSPTEVREISVSQVDALGELLGVATSFKPEFNELGRSYLAGMLTGLRSDVGRRAGGVPTLPPSAPFDSRTRLWVDGLLAGLFSRADASQQAALPEPPQPAAQQPPAAPAGATPAPERAPVVVLWASQTGNAEELAADVAAQLAAAELPVALHSMDDFPAAELAATRELLLITSTTGDGDAPDNGSGLWRALTGDAAPRLGNTRYAVLALGDSNYDDFCGHGRKLDARLAELGATRIAERVDCEPDYEQAAAKWVADVIDALTRTPTAVGGDGGATVSARTSPVAAPSRPNTPAPHTYSKKHPLITDMVRNTTLNGPKSTKDVRHLVFNLPEDAVSYEAGDALGVWPRNSDELVDEWLAVTGLDGQTPVEVGEHGLMSLRSALTERIEIAHISRDLVRFVQERTGDAKLAELLKPENKRALADWTWGRQSIDLLAQLPVSASAHEWLRVLKRLQPRLYSISSSPKACPGEVHLTVSPVRYNFQGVPRRGVCSTYLAARSPGDRVAVYLQPSSNFRPPSDPDTPMIMIGPGTGIAPFRGFLQERRALGHRGPNWLFFGEQHAATDFYYRDELEQMREDGFLTELDLAFSRDQQHKVYVQHLMRNRGKQLWSWLQDGAQLYVCGTADPMAKDVDRALCDIAAEFGNLDPDAAKAYVQSLSADKRYHRDVY

SEQ ID NO: 16308 - protein, 468 aa, Saccharomyces cerevisiae
MGQILSNPIIDKEHHSGTDCLTAFGLCAMQGWRMSMEDAHIVEPNLLAESDEEHLAFYGIFDGHGGSSVAEFCGSKMISILKKQESFKSGMLEQCLIDTFLATDVELLKDEKLKDDHSGCTATVILVSQLKKLLICANSGDSRTVLSTGGNSKAMSFDHKPTLLSEKSRIVAADGFVEMDRVNGNLALSRAIGDFEFKSNTKLGPHEQVVTCVPDIICHNLNYDEDEFVILACDGIWDCLTSQECVDLVHYGISQGNMTLSDISSRIVDVCCSPTTEGSGIGCDNMSISIVALLKENESESQWFERMRSKNYNIQTSFVQRRKSIFDFHDFSDDDNEVFAITTKKLQDRLNRSKDNDDMEIDDLDTELGSSATPSKLSGEDRTGPIDLFSLEALLEAGIQIRQRPSSDSDGNTSYFHGASLSDMLASLSNAAAGETEPNDADDNDDNDGEENGKNENAKKGSKIEEIE

SEQ ID NO: 16309 - protein, 405 aa, Halobacterium sp. NRC-1
MDDTPAFETLAVSHGESPRETRHGDVVSPIHLASTYAVQELDTDLSLEGVDPDDGQFLYSRLNNPTRHALERRLAALEGGDHGFAFGSGTAAIATAAFAAVEPGDHVVAFDDLYAGTRRMLETLFEGNLGVAVSFVDATDPDAVADAIRPETAFVWMETPTNPRIKLCDIAAIADITDDAGVLFGVDNTFLSPYFQQPLALGADVVAHSTTKYLNGHSDAVGGALVTNNDALADSVEFLQQVGLGNMLAPFDAYLVLRGIKTLAPRMRDHEANALAIAEYLADHDRVTAVHYPGLDSHPQHDLADAQQSGYGGILSFELDGDLADAKRFLDALDEFNLAVSVGGVESLVELPAGMTHEPIPKPDREAMGITDSLIRVSVGIEAIEDLIADLDRGFEAVRSTTPTA

SEQ ID NO: 16310 - protein, 349 aa, Escherichia coli K12
MKIKAVGAYSAKQPLEPMDITRREPGPNDVKIEIAYCGVCHSDLHQVRSEWAGTVYPCVPGHEIVGRVVAVGDQVEKYAPGDLVGVGCIVDSCKHCEECEDGLENYCDHMTGTYNSPTPDEPGHTLGGYSQQIVVHERYVLRIRHPQEQLAAVAPLLCAGITTYSPLRHWQAGPGKKVGVVGIGGLGHMGIKLAHAMGAHVVAFTTSEAKREAAKALGADEVVNSRNADEMAAHLKSFDFILNTVAAPHNLDDFTTLLKRDGTMTLVGAPATPHKSPEVFNLIMKRRAIAGSMIGGIPETQEMLDFCAEHGIVADIEMIRADQINEAYERMLRGDVKYRFVIDNRTLTD

SEQ ID NO: 16311 - protein, 485 aa, Achromobacter xylosoxidans
MKEIKHFINGAFVGSASGKLFDNVSPANGQVIGRVHEAGRAEVDAAVKAARAALKGPWGKMTVAERAEILHRVADGITARFDEFLEAECLDTGKPKSLASHIDIPRGAANFKVFADLLKNVANETFEMATPDGAGALNYGVRRPKGVIGVISPWNLPLLLMTWKVGPALACGNCVVVKPSEETPLTATLLGEVMQAAGVPAGVYNVVHGFGGDSAGAFLTEHPDVDAYTFTGETGTGETIMRAAAKGVRQVSLELGGKNAGIVFADCDMDKAIEGTLRSAFANCGQVCLGTERVYVERPIFDAFVARLKAGAEALKIGEPNDPEANFGPLISHKHREKVLSYYQQAVDDGATVVTGGGVPEMPAHLAGGAWVQPTIWTGLADDSAVVTEEIFGPCCHIRPFDSEEEAIELANSLPYGLASAIWTENASRAHRVAGQIEAGIVWVNSWFLRDLRTAFGGSKQSGIGREGGVHSLEFYTELKNICVK

SEQ ID NO: 16312 - protein, 220 aa, Gossypium hirsutum
VYYWECKGYTPLFPRILGHEASGIVESVGEGVNDLKPGDHVLPIFTGECKECRHCLSEESNNMCELLRINCDRGVMLADGKTRFSINGKPIYHFVGTSTFSQYTVVHVGQVAKISPTAPLDKVCPISCGICTGFGATVNVAKPKKGQTVAVFGLGAVGLAAAEGARVCGASRIIAVDVNPRRFEEAKRFGITEFVNPKDYDKPVQEVIVEMTGGGVDRSV

SEQ ID NO: 16313 - protein, 444 aa, Arabidopsis thaliana
MAAETSIRKLPSLSGLRHRRNPLEDNPYFHPSNGFYITPSDVILAQVAYDHSAHSQSRVAYHRAGPRREIMYEPSAVKAAIVTCGGLCPGMNTVIRELVVGLWELYGVREIYGIPAGYRGFYSMKAVKLDPKAVHDWHKKGGTVLATSRGGFHLQKIVDAIHLNGYNQVYIIGGDGTMRGAVEIFKEISLRKLEVGITVIPKTVDNDVGIIDRSFGFQTAVEMAQEAISAAHVEAESAVNGIGLVKLMGRSTGHIALHATLSSRDVDCCLIPEMDFYLEGKGGLFEFLEKRLKERGHAVLVVAEGAGQEMIPRNESQKQERDESGNAVFLDVGVWFKSVLKAWWEREHPDELFTVKYIDPTYMIRAVPANATDNLYCTLLAHSAIHGVMAGYTGFVPGPINGNYAYIPLEEVAQTKNQVNTRDHKWAWVRSVTNQPDFETNVKG

SEQ ID NO: 16314 - protein, 306 aa, Serratia proteamaculans
  unsure (1)..(306): unsure at all Xaa locations
CIGCHTWSVTCKKVWTSREGMEYAWFNNVESKPGVGYPNAWEDQEKWKGGWIRKINGKLEPRMGAALGLLSKIFANPDVPALDDYYEPFDYDYQNLHTAPQDKHQPIARPRSLITGQRMKKIEWGPNWXEILGGEFSKRSKDKNFDNMQKEMYGQFENTFMMYLPRLCEHCLNPACVATCPSGAIYKRGEDGIVLIDQDKCRGWRMCLTGCPYKKIYFNWKSGKSEKCIFCYPRIESGQPTVCSETCVGRIRYLGVLLYDADRIETGGSAENDKDLYQSQLDIFLDPNDPAVIAQALKDCIPXSVI

SEQ ID NO: 16315 - protein, 190 aa, Zea mays
MGAKAEHRGGVLDLKAQFTFFRAQDRHPVNAWAHVLITCPILFTNLLILHFLTLTLPVSPALDLALAYADAYLAVDRRGGAAARLLFLAAWAASRALAARLGFALSWKHVLVTQLSCWTWQFLGHGLFEKKGPSVSDLPEVFLMEPILIFLQILNKLYGYEPYPGFCKNADRKIEADLRASESSSRGRTT

SEQ ID NO: 16316 - protein, 518 aa, Neurospora crassa
MGLGLKLPTIYNVHLVAIIATLGGALFGFDISSMSAIVVTDQYLTYFNNPHDIIQGAIGSALAAGSVVGSAIAGPLSDKIGRRDSIFFACFFWLIGTSVQVACKNYGQLIAGRVLNGFTVGITSSQVPVYLAEIAKAEKRGSLVIIQQLAIEFGILIMYFIGYGCASIEGPASFRTAWGIQFIPCFFLMVGLPFLPRSPRWLAKVGRDQEAIAVLANIQADGNVDDPRVVAEWEEIVTVMNAEREAGKGWRKFVKNGMWKRTMAGMTVQAWQQLAGANVIVYYLTYIAQMAGLTGNVAMVTSGIQYAVFIIFTGVMWLFIDKTGRRTLLVYGALGMAFCHFVVGGVMGAHHDNVPDGVGGNANIVISVHKGAPANTVILFSYLLIVVYALTLAPVCWIYAAEVWSLGTRATGMSMAAMSNWVFNFALGMFTPPAFVNITWKLFIIFGVLCVTAAVWFWLFYPETCGKTLEEIEILFGDQGPKPWKTKKGESRLTAEIEAVKARKTVEHEIEVHEHEKV

SEQ ID NO: 16317 - protein, 314 aa, Serratia sp. SK-3-20-2
  unsure (1)..(314): unsure at all Xaa locations
CIGCHTCSVTCKNVWTSREGMEYAWFNNVESKPGVGYPNAWEDQEKWKGGWIRKINGKLEPRMGAALGVLSKIFANPDVPALDDYYEPFDYDYQTLHTAPQGKHQPIARPRSLITGQRMKKIEKGPNWEEILGGEFEKRAKDKNFDNMQKAMYGQFENTFMMYLPRLCEHCLNLACVATCPSGAIYKRGEDGIVLIDQDKCRGWRMCLTGCPYKKIYFNWKSGKSEKCIFCYPRIESGQPTVCSETCVGRIRYLGVLLYDADRIEEVTSAENEKDLYQSQLDIFLDPHDPTVIAQALKDCVPXSVIEDAKQSTV

SEQ ID NO: 16318 - protein, 168 aa, Brassica rapa
FRCVQQGDDENGKTGVSLSKDITDVAGRTVKKHIATLGPLILPLSEKLLFFVTFMGKKLFKDKIKHYYVPDFKLAIDHFCIHAGGRAVIDVLEKNLALAPIDVEASRSTLHRFGNTSSSSIWYELAYIEAKGRMKKGNKVWQIALGSGFKCNSAVWVALNNVKASTNS

SEQ ID NO: 16319 - protein, 537 aa, Oryza sativa
MATGVSVENINPKVILGPSSIAECIVIRGEVAIHAQVSWFSPSMFWKSISIYSFSANARREINRYLTFFFQHLQQQLQTQPGSLPFDEIVYCNIGNPQSLGQKPITFFREVLALCNHPNLLEREEIKSLFSTDAIARAKKILSMIPGRATGAYSHSQGIKGLRDEIAAGIASRDGFPANADDIFLTNGASPGVHMMMQLLIRNNRDGIMCPIPQYSLYSASLALHGGALVPYYLDESSGWGLEVSKLKNQLEDARSKGITVRALVVINPGNPTGQILDEQQQYELVKFCKDEELVLLADEVYQENIYVTNKKINSFKKIARSMGYNGDDLQLVSLHSVSKGYYGECGKRGGYMEVTGFSTPVREQLYKIASVNLCSNITGQILASLIMDPPKAGDASYDLYEEEKDNILKSLSRRAKAMESAFNSIDGITCNKTEGAMYLFPRIYLPQKAIEAARAVNKAPDVFYALRLLDTTGIVVTPGSGFGQIIRCYLFTCNSEFLTTQVWSFVKGCRDMAREMHDPAAGGEDTFDDLPLQGIP

SEQ ID NO: 16320 - protein, 309 aa, Thermoanaerobacter tengcongensis
MKIAFIYPGQGAQYAGMGKEIYEKYEEAKEIFERADEALGFNISKLCFEGPEEELMKTENTQPAILTVSVALTRVLQKRGVKPDVTAGLSLGEYSSLVLAEALDFEDAVRLVKKRGKYMQEVVPEGVGTMAAILGLPNEEVEEICRIASEVGVVEPANYNCPGQLVVSGEVKAVERAVELAKERGAKKAVVLAVSAPFHCSMLKEAGELLAKELDKVEIKDLKVPVISNVTADYVQKDKVKELLIKQVSHPVLWEQSVRKMIEDGVDTFIEIGPGKTLSGFVKKIDRSRTVLNFEDEESLMKALSALGV

SEQ ID NO: 16321 - protein, 489 aa, Beta vulgaris subsp. vulgaris
ITVPSTSSKNLQNSLAFSSSSLSGDKIQTTSFLNRRYCRISSRAPIVVSPKAVSDSKNSQTCLDPEASRSVLGIILGGGAGTRLYPLTKKRAKPAVPLGANYRLIDIPVSNCLNSNISKIYVLTQFNSASLNRHLSRAYASNMGGYKNEGFVEVLAAQQSPENPNWFQGTADAVRQYLWLFEEHNVLEYLILAGDHLYRMDYERFVQAHRETDADITVAALPMDEKRATAFGLMKIDEEGRIIEFAEKPKGEQLKAMKVDTTILGLDDERAKEMPFIASMGIYVISKDVMLNLLREQFPGANDFGSEVIPGATSIGLRVQAYLYDGYWEDIGTIEAFYNANLGITKKPVPDFSFYDRSSPIYTQPRYLPPSKMLDADITDSVIGEGCVIKNCKIHHSVIGLRSCISEGAIIEDTLLMGADYYETDADRKFLAAKGSVPIGIGNARIGDDVKIINSDNVQEAARETDGYFIKSGIVTIIKDAMIPSGTVI

SEQ ID NO: 16322 - protein, 214 aa, Agrobacterium tumefaciens str. C58
MRKLDTRTIVVASHNKGKIAEIADLIGPFGFSAKSAAELNFSEPEETGTTFEENAAIKALASAKASGLPALSDDSGLVIDALDGAPGVYTANWAETADGTRDFAMAMQKVEDALAERGASKPEDRTARFVSVLCLAWPDGHVEYFRGEVEGTVVWPPRGTSGFGYDPIFKPDGYDTTFGEMSADEKHGWKHGDAFALSHRARAFKKFVETCLEA

SEQ ID NO: 16323 - protein, 160 aa, Thermobifida fusca
MKIYQSELRTLEGEPFRLPQTQLLLIVNVASKCGLTPQYSGLERLQEAYAYRGFSVIGVPCNQFGGQEPGDAQEIRLFCATTYGISFPILEKMEVNGPNRHPLYVELTKARDSQGLAGDVQWNFEKFLVAPGGRVLYRFRPQVEPEDPEIIRAIEENLPN

SEQ ID NO: 16324 - protein, 522 aa, Beta vulgaris subsp. vulgaris
MDASAAAINVNAHLTEVGKKRFLGERISQSLKGKDLRALFSRTESKGRNVNKPGVAFSVLTSDFNQSVKESLKYEPALFESPKADPKNVAAIVLGGGAGTRLFPLTSRRAKPAVPIGGCYRLIDVPMSNCINSGIRKIFILTQFNSFSLNRHLARTYNFGDGVNFGDGFVEVFAATQTPGESGKKWFQGTADAVRQFFWAFEDSKSKDVEHIVILSGDHLYRMDYMSFWQKHIDTNADITVSCIPMDDSRASDYGLMKIDHTGRIVHFAEKPKGSDLTAMQVDTTVLGLSDLEAMSNPYIASMGVYVFRTDVLMELLNRKYPSSNDFGSEIIPSAVGESNVQAYLFNDYWEDIGTIKSFFDSNLALTQQPPKFEFYDPKTPFYTSARFLPPTKVDRCKIVDSIVSHGCFLQESSIQHSIVGVRSRLESGVEFQDTMMMGADYYQTESEIASLLAEGKVPVGVGQNTKIKNCIIDKNAKIGKDVVIANTDGVEEADRPNEGFYIRSGITIILKNATIQDGLVI

SEQ ID NO: 16325 - protein, 267 aa, uncultured bacterium
QPNAMGGREVGGLANQLAAHMGFSEQDIETVKTYWNSPNIARQPGLKAVDMFNAITSGQVKAVWIMATNPLVSMPEADKVRQALKQCELVIVSDCVKQTDTTELADVLLPALAWGEKDGTVTNSERRISRQRAFLSTPGGAKADWWIINEVAKRMGFNDAFNYQSPDEIWREHAALTAANNDGQRDFDLTGLKDLSKSDYSRLQPVQWPCRDNSSTDKSHMFEDRHFFHPDKKARFIPVKSCGDFPKASVEYPLILNSGRIRDQWHT

SEQ ID NO: 16326 - protein, 405 aa, Shigella flexneri 2a str. 2457T
MSPIEKSSKLENVCYDIRGPVLKEAKRLEEEGNKVLKLNIGNPAPFGFDAPDEILVDVIRNLPTAQGYCDSKGLYSARKAIMQHYQARGMRDVTVEDIYIGNGVSELIVQAMQALLNSGDEMLVPAPDYPLWTAAVSLSSGKAVHYLCDESSDWFPDLDDIRAKITPRTRGIVIINPNNPTGAVYSKELLMEIVEIARQHNLIIFADEIYDKILYDDAEHHSIAPLAPDLLTITFNGLSKTYRVAGFRQGWMVLNGPKKHAKGYIEGLEMLASMRLCANVPAQHAIQTALGGYQSISEFITPGGRLYEQRNRAWELINDIPGVSCVKPRGALYMFPKIDAKRFNIHDDQKMVLDFLLQEKVLLVQGTAFNWPWPDHFRIVTLPRVDDIELSLSKFARFLSGYHQL

SEQ ID NO: 16327 - protein, 268 aa, uncultured bacterium
QPNAMGGREVGGLANQLAAHMSFNAEDLNVVREFWQAPNPAEKEGLKAVDLFDAIHSGKVKAVWIMGTNPVVSMPNANKIKEALNKCEMVVVSECNADTDTARLANVIFPSSTWGEKQGTVTNSERTISLQRGFLPIPGEAKNDWEIICEFAKTMGYGEAFNYASAAEIFAEHAALSGFKSEKFSSRAFNISKYANITAKEYNALKPVQWPLKDTQDTGTKRLFSDGKFFTDNQKAKFVVIEARLPKVSPKKNQFIMNTGRIRDQWHT

SEQ ID NO: 16328 - protein, 401 aa, Arabidopsis thaliana
MATKRSVGTLKEADLKGKSVFVRVDLNVPLDDNSNITDDTRIRAAVPTIKYLMGNGSRVVLCSHLGRPKGVTPKYSLKPLVPRLSELLGVEVVMANDSIGEEVQKLVAGLPEGGVLLLENVRFYAEEEKNDPEFAKKLAALADVYVNDAFGTAHRAHASTEGVAKYLKPSVAGFLMQKELDYLVGAVANPKKPFAAIVGGSKVSTKIGVIESLLNTVDILLLGGGMIFTFYKAQGLSVGSSLVEEDKLDLAKSLMEKAKAKGVSLLLPTDVVIADKFAPDANSKIVPATAIPDGWMGLDIGPDSIKTFSEALDTTKTIIWNGPMGVFEFDKFAAGTEAVAKQLAELSGKGVTTIIGGGDSVAAVEKVGLADKMSHISTGGGASLELIEGKPLPGVLALDEA

SEQ ID NO: 16329 - protein, 194 aa, Triticum aestivum
LKDKRVLIRVDFNVPMKDGAITNNNRIVQALPTVKYALDNGASAVILMSHLGRPNGEAVAKYSLKPVAAEVEKLLGKPVEFLNDCVGTDVEKTCQSAKDGKVILLENLRFHIEEEGSAKVDGQKVKADAEAVKKFRASLTTLADIYINDAFGTAHRAHSSMVGVNLSQRAARFLMQKELEYFAKALENPSRPFL

SEQ ID NO: 16330 - protein, 271 aa, uncultured bacterium
QPNAMGGREVGGLANTLAAHMDYDSPGARSRVADFWGTGAVADGPGYKAVDMFEAVHRGDIRVIWIMGTNPAVSLPDSARVREALARCPTVIVSDCVAHTDTTDLADILLPAAGWGEKDGTVTNSERRISRQRCFLPLPAEVKPDWWIMSSVAGKLGFGEAFNYKRPADIFREHAALSAHENNGERLFNLAGLANLSDAGYEALIPVQWPVMEGAGVEAEGSTRLFSDGRFVTDNQRARFVAINTRLPAQQTSDDYPMVVNTGRIRDQWHT

SEQ ID NO: 16331 - protein, 271 aa, uncultured bacterium
QPNAMGGREVGGLANTLDRSHGLRSPGARSRVADFWGTGAVADGPGYKAVNMFEAVHRGDIRVIWIMGTNPAVSLPDSARVREALARCPTVIVSDCVAHTDTTDLADILLPAAGWGEKDGTVTNSERRISRQRCFLPLPAEVKPDWWIMSSVAGKLGFGEAFNYKRPADIFREHAALSAHENNGERLFNLAGLANLSDAGYEALIPVQWPVMEGAGVEAEGSTRLFSDGRSVTDNQRARFVAINTRLPAQQTSDDYPMVVNTGRIRDQWHT

SEQ ID NO: 16332 - protein, 128 aa, Sinorhizobium meliloti 1021
MPVSQVPPAIKSVLVLEDNFLIALDMEEMLVALGVTSVDVATTKSKAMELIADHTYDFAILDINLGDDTSFAVADALMARGISFGFTSGYGELLALPSHLRDVPRIDKPFSEGTLGSLIATAAPSRDM

SEQ ID NO: 16333 - protein, 268 aa, uncultured bacterium
QPNAMGGREVGGLANTLTAHMTLENSDHRALVKEFWQCGDLPDKAGLKAVDLFNAVNEGKVKAIWVMGTNPVVSMPNANLVREALQKCDFVVCSDAVKRTDTLDLAHVKLPAAGWGEKSGTVTNSERRVSRQRAIFPLHGDAKPDWRIVSEVAKRMGFGAASDYQSPREVFVEFAALSGYQNKGERDFDISAYAELAEAEFEAMTPKQWPITAETLDGTPRMFVDGRYFTPNRKAKFIPTIARAPQEKVSDDYPLILNTGRIRDQWHT

SEQ ID NO: 16334 - protein, 370 aa, Bacillus cereus ATCC 10987
MSTIETKLAQIGNRSETTTGTVNPPVYFSTAYRHEGIGKSTGFDYSRTGNPTRGLLEQAIADLECGEQGYACSSGMAAVLLVLSLFRSGDELIVSEDLYGGTYRLFSEHEKKWNVRCRYVNTQSIKQIEQAITTKTKAIFIETPTNPLMQVTDIAAVATVAKRHGLLLIVDNTFYTPYIQQPLTEGADIVLHSATKYLGGHNDVLSGLVVAKGKELCEEIAHYHNASGAVLSPFDSWLLIRGMKTLALRMRQHEENAKAVVAYLNDEDGVTDVFYPGRGGMISFRLKDETWINPFLQSLSLITFAESLGGVESLMTYPATQTHADIPEEIRTANGVCNRLLRFSVGIENSNDLIQDLQQAVKLVKEGVRI

SEQ ID NO: 16335 - protein, 387 aa, Bacillus cereus ATCC 10987
MSYSIDTLLLHNQYKHDSQTGAVNVPIYNTSTFHQFDVDTFGKYDYSRSGNPTREALEDIIALLEGGTKGFAFASGIAAISTAFLLLSQGDHVLISEDVYGGTYRMITEVLSRYGVSHTFVDMTNLEEIKQNIKPNTKLFYVETPSNPLLKVTDIRAVSKLAKSIGALTFVDNTFLTPLFQKPIDLGADVVLHSATKFIAGHSDVTAGLAVVKDTDLAQKLGFLQNSFGAILGPQDCSLVLRGLKTLHVRLEYSAANANKIAHYLQEHAKVQNVYYPGLQTHLGFNIQQSQATSAGAVLSFTLQSEDALRQFLSKVKLPVFAVSLGAVESILSYPAKMSHAALSQEARDERGISNSLLRLSVGLENVDDLISDFENALSYVEEPVNA

SEQ ID NO: 16336 - protein, 170 aa, Oryza sativa (japonica cultivar-group)
MRKHHNTRIRFFHVMITLKSSDGEPVEVTEASARISKVIGDKIDAGRGGEAIPLPHVDKKTLKKVIEYCDEHANENSDTDEQKEELKNWDKAFIDELDEDDGSFLFLVLLASSYLKIDGLLDLTYQRVADNSKAKTTEEIRKTFSTIEIELSDKEEEEQQQEEEIRPENV

SEQ ID NO: 16337 - protein, 178 aa, Zea mays
SSSCLGKGKSRSKRFRWRWRARGRFLTTRSSPREAGGCRRAGRIFAQGAKLVDQALASGKIYDGDGFNYIKESFENGTLHLIGLLSDGGVHSRLDQLQLLLKGVSERGAKKIRVHILTDGRDVLDGSSVGFVETLENDLLELRGKGIDAQIASGGGRMYVTMDRYENDWDVVKRGWDA

SEQ ID NO: 16338 - protein, 563 aa, Xylella fastidiosa Ann-1
MCSIFGIFNLQPSDNLQILRHQALECSQRQRHRGPDWSGVYVDVGAILVHERLAIVDPAGGAQPLFSEDGTLALAVNGEIYNHAVLKGTLQQPYAFQTHSDCEVINALYREETPTSFLNRLNGIFAFALWDKTTGRGLIARDPMGVVPLYWGHDQDGRLRVASEMKALVEHCPDVAQFPPGHWYDTTTGTLVKYYERPWKNYSAVEGVQVSLQELREAFERAVHRQLMTDVPYGVLLSGGLDSSLVAAVAARYARHRIETNDQSEAWWPRLHSFAIGLKDSPDLSAANVAAEALNTVHHRFEYTFQEGLDVLPEVIRHIETYDVTTIRASTPMFLLARRIKAMGVKMVLSGEGSDEIFGGYLYFHKAPNAREFHEELVRKLNALYYYDCLRANKAMMAWGVEPRVPFLDREFLDVAMRMDAQHKMVDKTSNGPQRMEKGILRAAFDGYLPPSILWRQKEQFSDGVGYGWIDGLKAHAETQVSDHALATAETRFQVNPPQTKEAYYYRSIFERFFPSPAAAETVPGGKSIACSSPAAIAWDASFATMADPSGRAVSGVHQQALL

SEQ ID NO: 16339 - protein, 299 aa, Escherichia coli
MAYSAVWRNEMKGIILAGGSGTRLYPITKGISKQLMPVYDKPMIYYPLSVLMLAGIKDILIITTPEDLNNFQRLLGDGKRFGINLSFEVQLKPEGLAQAFIIGGKFIGNDAVCLALGDNIFYGQNFSPKLKEAAQLIDGATVFGYQVKDPERFGIVEFDANKKALSIEEKPAKPKSNYAVTGLYFYDNNVVNIAKTIKPSERGELEITSINEVYLRNGKLNVELLGRGFTWLDTGTHQSMLEASHFVETIEQHQGFKIACLEEIALYNGWLTKDEVFKIGNEYKKNGYGQYLLSLVKDK

SEQ ID NO: 16340 - protein, 392 aa, Methanosarcina acetivorans C2A
MKACIMCGGAGTRLRPLTFKHPKPSIPILNKPSVRHLIEHLSREGFNEIVMTLGYMGERIEEQLGDGHMFGVHIDYVYEKEKLGTAGGVKNAEKYLKNEPFIVLGGDHVLNLDLREMYRFHEANDALITIGLLSIDDPREFGIADMDINNRIHRFLEKPKSGQIFSNLASTGIYICDPEIFNWIPENKKYDFAKDLFPALLAADKKINGMLVRGKWTDVGSSAAYRQAQRWMLDALPGTTIEGNFTTRNARIRGPLSIGNNVSIGSNSSLVGPIVIGENTVIGDSVLIGPYSVIGANCTIENNAKILSSYLFDGVSIGKNSNISGAVVADETAVGEECNLENGTVIGHKVVIGDNSTIHSGIKIWPEVVIEKNSSIKETVVNPAYDTTYEGS

SEQ ID NO: 16341 - protein, 190 aa, Oryza sativa
MVGGEVMCEAAAPRYRGVRKRPWGRFAAEIRDPAKRARVWLGTYDSAEAAARAYDVAARNLRGPLARTNFPLVSSLPLPSPHYHLPGKAAAAAPPVAGPACSASSTVESSSGPRGPRPAATAAAVPRRRVPRPAPPAPDAGCHSDCASSASVVDDADDASTVRSRVAAFDLNLPPPLDRDHVDLCTDLRL

SEQ ID NO: 16342 - protein, 553 aa, Haemophilus ducreyi 35000HP
MTTIFTIAQHWLAQDPDLETQNELSHLIDNAKAGGKQALKELTARFGGRLQFGTAGLRGPLQAGPMGMNRVLVAQAAAGLALYLKTYDKQPSIVIGYDGRKNSDVFARDTAEIMAGVGIKAYLLPRKLPTPVLAYAIKHLDTTAGVMVTASHNPPEDNGYKVYLGKANGGGQIVSPADQQIAAFIDQVATGNIRELARSQDFNLLDDEVINAYIEKTARLSQENKMALNYVYTAMHGVGYEVLQKTLKQAGLSQPKLVSEQIEPDGNFPTVSFPNPEEKGALDLAIKLAQQENAEFIIANDPDADRLAVAIPDAQGIWKSLHGNVLGCLLGWHLAKKYHAQGQQGVLACSLVSSPALAEIAKKYGLKSEETLTGFKYIGKVDNLLFGFEEAIGYLVDPDKVRDKDGISAAVAFLDLVLYLKKQGKTILDYINEFNQQFGAYISGQISIRVSDLAEISKLMTALRNNPPTKIGGVKVTQLIDHTKTDRQSDILVFNLANGSRLITRPSGTEPKIKFYLDVKGNNGQQEAERALAHFDESVRQMLRQTQYGNQDC

SEQ ID NO: 16343 - protein, 630 aa, Escherichia coli
MCGLAGFLESNLNDNNSAKVLHSMGESIYRRGPDGTGIWFENIENKINVGFVHTRLAIIDLSDAGQQPMHSHCGRYVIAFNGEIYNHLELRYLLESNNHISWRGHSDTETLLACFGIWGIDKTLQACVGMFAIALWDKKEHRLTLARDRVGEKPLYWGWQDDALLFGSELKALKTHPAFSAEINRDALCLLLRHNYIPAPHTIYRGIQKLQPGHYLSVELSNDERKETLHQYWSYEKVVQEGLVNPFMGSPIQAVEHLESLIAQSINGQLISDVPLGAFLSGGIDSSLIVSIMQSLSSSPVKTFSIGFDDKKYDEAIFAVEVARHLGTDHTEMYVNDKDIQDVIPLLPEVYCEPFADSSQLPTFLVSKMAQQHVTVALSGDAGDELFGGYTPYSFTPKYWNYARNIPLQIRKFASRYIDKLPVNPKFKKLIECMAVQNPQLFYRNIISHWLNPEELVKNSSEPSTAFSSSTTFPVNGGYVDWMMSVDAQVYMTDDILVKVDRAAMYNSLETRVPLLDHRIIEFAWQLPVSLKINNGVGKWPLREILYKRVPKSMIERPKKGFSVPLSSWLRGPLRDWAEELIAYKRLADEGYFNVAAVRSCWNLHIQGQADYSRKLWSILMFQSWLENQK

SEQ ID NO: 16344 - protein, 1372 aa, Cercospora zeae-maydis
MPTSNGGRTSPASLRSHHVRYASDSNIALRSTIMEQPEGPPELETYDSSGTNSSGNDGDEYAGTQESHSDSDGISSRHFVPGSGQAYAQDEVTPLTNVSTYGWSQPGSSNVSRTTTRGSVGSALPGTPAYEGTGTAMTNGTRRPANTRKESSNIYAPNRGPGSSMRYALNTGTRPRNGFTHMRRRNPNDEYRAQEKAYVQRIRQDGPDNDFQTEPRTPSLDYSFGSEDDEESPTNANYADHDPAEVDTLLYYGQEDLEPSVEELNIPANRERLEWHAMLANVLTGDVVKQEKKRLIGGPEQQGENTLKTEVWIGVRAKTCGRSIAAQKRLVEDGRSKVKQTIESIVAFEIKGEAEVGQSPMQQVQDVVKKIEKIEGLYPPRQAFRAAHPPAASSAYEHTCDAVIAWNNTTELIGTELGILQSWVGNMELDFTTARVRPEGEQHNELFDDSSFIDRILKEDGLKSLQGDKNLLNGVNTVIHKAKATLIANAEAFSDRHLPPYIEELLTLINFPSRLIQEIIRMRLSYAKKMKDAAQQGVMTAEQMILQFQILLQLAVKIKEQYLLIGQPEPGWDLPPCIDDNFDSVVLDALKFYFKMLNWKLMANKNTFKEAEILEQEWDFSNELGRHLDGGDVEVAEQFSSLTSKSMGRLAAPFEKELQRPADEVAGTAEMDKRYKSILDSVRVRQRKIFRFSRILSQRFENATEYNINIDNELYEDFLLALRLSGHFLVETNAESSVPTPGENEKAGGKVYILASPVLKERPKDIQSMLGTCYHAEDSPEDPSNPYVLILRPELPLVWEGDRMDASHSGKETLKVPQTLDLKTGRLRLVADGSLQRLQNANMAFTTATGNFDLTILVEQRANLCRESTKNWQRFAKLHTSSPTHSWTRSPLFALRSKPREGKAKAKNSTHPELLCFCYGIWSAFCHSHGRTTAGGQSHKLTKLALDWVSFICDDCVASDRKTFRWAVVALEFAMVMTRGQNILSISDEEYALLRSKVAGCRSLLISHFDIMGARGTVAAQAEKQRMDAMVGKLRLDIGKLKDDDESSRIVRAQWLDELEKLDQARKDREAERQALGRVLEDSNDADRALTHLSASAGNVHLRWQQGQFVGGGTFGSVYAAINLDSGHLMAVKEIRLQDPKMIPTVVSQIRDEMGVLQVLDHPNVVQYYGIEPHRDKVYIFMEYCSGGSLAGLLEHGRIEDETVVQVYALQLLEGLGYLHEASVVHRDIKPDNILLDHNGVIKFVDFGAAKVIAKQGKTMVADGPTGNGRQRSVQGTPMYMSPEVIKGGKHTGRLGAADIWSLGCVISEMATGSRPWANMDNDFAIMYNIANGNSPQMPTRDQMSDVGLDFLQAMLRTRPCEACVRCGASAT

SEQ ID NO: 16345 - protein, 348 aa, Kluyvera ascorbata
VAQRPDTHGYSTSRGIPRLRRAISRWYHDRYDVEIDPESEAIVTIGSKEGLAHLMLATLDHGDTVLVPNPSYPIHIYGAVIAGAQVRSVPLVQGVDFFNELERAIRESYPKPKMMILGFPSNPTAQCVELEFFEKVVALAKRYDVLVVHDLAYADIVYDGWKAPSIMQVPGARDVAVEFFTLSKSYNMAGWRIGFMVGNKTLVNALARIKSYHDYGTFTPLQVAAIAALEGDQQCVRDIAEQYKRRRDVLVKGLHEAGWMVEMPKASMYVWAKIPDKYAAMGSLEFAKKLLQDAKVCVSPGIGFGDYGDTHVRFALIENRDRIRQAIRGIKAMFRADGLLPSEHKSAE

SEQ ID NO: 16346 - protein, 566 aa, Arabidopsis thaliana
MAPALAVTRDLTAVGSPENAPAKGRASVYSEVQSSRINNTLPLPSVLKGAFKIVEGPASSAAGNPDEIAKLFPGLYGQPSVAVVPDQDAPSSAPKLKIGVVLSGGQAPGGHNVISGLFDYLQERAKGSTFYGFKGGPAGIMKCKYVELNAEYIQPYRNQGGFDMICSGRDKIETPDQFKQAEETAKKLDLDGLVVIGGDDSNTNACLLAENFRSKNLKTRVIGCPKTIDGDLKCKEVPTSFGFDTACKIYSEMIGNVMIDARSTGKYYHFVRLMGRAASHITLECALQTHPNITIIGEEVSAQKQTLKNVTDYMVDVICKRAELGYNYGVILIPEGLIDFIPEVQELIAELNEILANEVVDENGLWKKKLTEQSLKLFDLLPEAIQEQLMLERDPHGNVQVAKIETEKMLIQMVETELEKRKQAGAYKGQFMGQSHFFGYEGRCGLPTNFDATYCYALGYGAGVLLNSGKTGLISSVGNLAAPVEEWTVGGTALTALMDVERRHGKFKPVIKKAMVELEGAPFKKFASLREEWALKNRYISPGPIQFTGPGSDSLSHTLLLELGAQ

SEQ ID NO: 16347 - protein, 458 aa, Halobacterium sp. NRC-1
MDRETAEPDVRSMPGEKAAEWVNFHHNHAAPSTYVYDFVWDITEDAIGPFCTDVDGNVLMDFTSHVAAAPFGYNNPKIMDRLESFDLVDPLKMAGQDFYAGGGTDPESPEIPTATQLLDRLTDITAHYDLDTVFLSNTGAEAVENAIKICYNNGGHRALTFDGAFHGRTLGALSLNRSKAIHRKGFPEIGGVVSVPYCTCEGECSCGWKTNGPGGNVAADKLHHDRGVIDPEEVAYLIMEPQQGEGGYRVPNDDFIADIADIQRTHDIPVISDEIQAGLGRTGELWGIDHTEIEPDVITSAKGLRVGATVANEDLFPSETGRLSSTWGAGDIVAAAQGVATIDAITSDGLLDHVVARGEQTTDRLHDADPDFVTDVRGRGLMLAVEFDTKKRREAVVNACVKRGLLVLGCGHKTVRLLPPLDVTEREIDIAVDILLEALDDPDVRHAGTSKVEGEPTA

SEQ ID NO: 16348 - protein, 308 aa, Heliobacillus mobilis
MTQIAFMFPGQCSQFVGMGADLAAQFPLAKAVFDEADEALGFSLSKLCFEGPEEELRLTANTQPALLATAVAVYRVLAANGFRPDWVAGHSLGEYSALVAAGSLTLVEGIRLVRQRGLFMQDAVPAGRGTMAAIMGLEAEAVEALCRDASTAGVVEPANFNGAGQVVIAGEVAAVEQAVALAKAAGAKRSVMLNVSAPFHCSLMKPAAERMTEVLQAANISDPTIPLVANVTAQPATSGEAVRKNLILQVDHPVRWEQSVKFLADAGVQRFIEVGPGKVLTGLARKIVKGSETAAIGDVDTIQKVLAS

SEQ ID NO: 16349 - protein, 238 aa, Leuconostoc mesenteroides subsp. mesenteroides ATCC 8293
MKKVGIPSNNLVHANAHFGTNYVDYIQKNYIDGISGANALPIVFPIGDTKLAKAYIDSVDALLLAGGQDVSPVYFGEDPHINLHETDDRRDAFEVALVIEALKQEKPILGICRGLQIINVALGGTLYQDLGSQYDGLSVKHNQYPTKWYVPTHHIVLQRQSWLSDIFDEKSLVNSFHHQAVKRLADGLKLDATSSDNVVEAFSDDSRRIYAVQWHPEMLLMDNPDAQELFDSFVAKIE

SEQ ID NO: 16350 - protein, 271 aa, uncultured bacterium
QPNAMGGREVGGLANTLAAHFEFGDPQSHQTVSDFWQTDNLATRAGLKAIDLFDAMNDGKIKAVWVMATNPVVSLPDSEKIKAAIEKCPFVVVSDCIADTETTRLADVVLPAQGWSEKSGTVTNSERRISRQRRVLPSPGEAKPDWWILKEVAQKMGFKDQFDYRHEGEIFKEYCEMTALGNETGKARDLCLIGLTKLDEKGYGELTPQQWPVLEYQPEIIEQRMFTNGEFFTESGKAQFIAVEHDKPIADTSVEFPLIMNTGRIRDQWHT

SEQ ID NO: 16351 - protein, 327 aa, Brucella melitensis 16M
MKAMVLEKPGQPLVLVERPDPLPGPGQIRLKVEACAVCRTDLHVVDGELERPKLPLVPGHEIVGVIDAVGTGVDPSRTGRRVGVPWLGHTCGACDYCRSGAENLCDAPLFTGYTRDGGFATHVVADADFAFDLDEAADPVALAPLFCAGLIGWRSLKKAGEGKRIGLYGFGAAAHIIAQVCRWQDREVYAFTKPGDTEAKDFARSLGAVWAGDSDILPPSPLDAAIIFAPAGELVPAALRAVRKGGRVVCGGIHMSDIPSMPYSILWEERALVSVANLTRNDAEEFFPLARAAGVRTHTTIYPLESANEALADLRSGRLSGAAVLVP

SEQ ID NO: 16352 - protein, 318 aa, Triticum aestivum
  unsure (1)..(318): unsure at all Xaa locations
MAATATKLSSGHEMPAVGLGVWRMDSAAVRGLIHSALPRLRLPATSTDPADYKNRXEAGRLSSRQALRTVGLVXRGEDLFITTKLWNSDHGHVVEALPHSLKKLRLDYLDLYLIHFPVATKHTGVGTTGSALGDDGVLDIDTTITLETTXWHAMEDLVSMGLVRSIGISNYDIFLTRDCLAYAKIKPAVNQIETHPYFQRDSLVKFCQKHGISVTAHTPLGGSTANTEWFGSVSCLDDPVIKSLAEKYGKTPAQLVLRWGLQRNTVVIPKTSKVERLEENFAVFDFDISLEDMEKIKALDRSYRTNQPGELWGTNLYA

SEQ ID NO: 16353 - protein, 271 aa, uncultured bacterium
QPNAMGGREVGGLANTLAAHFEFGDPQSHQTVSDFWQTDNLATRAGLKAIDLFDAMSDGKIKAVWVMATNPVVSLPDSEKIKAALEKCPFVVVSDCIADTETTRLADVVLPARGWSEKSGTVTNSERRISRQRRVPPSPGEAKPDWWILKEVAQKMGFKGQFDYRHEGEIFKEYCEMTALGNERGKARDLCLIGLTKLDEKGYGELTPQQWPALEYQPDIIEQRMFTNGEFFNESGKAQFVAVEHDKPIADTSVEFPLIMNTGRIRDQWHT

SEQ ID NO: 16354 - protein, 267 aa, uncultured bacterium
QPNAMGGREVGGLANQLAAHMDFAEQDIETVSTFWNAANIARQPGLKAVDMFDAILSGEIKAIWIMATNPLVSMPEVHKVRQSLENCELVIVSDCIQDTNTSQYADVLLPALAWGEKDGTVTNSERRISRQRAFLDAPEEARADWWIVNEVAKRMGFEDAFSYQTIDEIWREHAALSAFENNGQRDFDLSGLMDLPAEDYDQLQPLQWPFYRNASPDKSHMFEDRGFLSCRLKARFIPVQRCSELSLTSVEYPLILNTGRIRDQWHT

SEQ ID NO: 16355 - protein, 298 aa, Ustilago maydis
MDKYQRIEKVGEGTYGVVYKAKDLTPGANGRIVALKKIRLETEDEGVPSTAIREISLLKELRDDNIVRLFDIVHQESRLYLVFEFLDLDLRKYMDHVSRNRGGDGMGPEIVRKFTYQLIRGLYYCHAHRILHRDLKPQNLLIDREGNLKLADFGLARAFGIPLRTYTHEVVTLWYRAPEVLLGSRHYSTAIDMWSVGCIFAEMTLGHPLFPGDSEIDQIFKIFRALGTPTDDVWPGVQQLPDYKDSFPKWAGRPLRDAVPGLDEAGLDLLEGMLVYDPAGRTSAKRSLVHPYFRRLLT

SEQ ID NO: 16356 - protein, 262 aa, uncultured bacterium
QPNAMGGREVGGLANQLAVHLDIDNPEHHAAVPNFWQTDTLATENGLTAVDLFNAVESGQVKAVWIMPTNPVDSLPEADRVRHALMACDTVVVSDCVASGDTLACADIRLPALGWGEKSGMVTNSERCVSRQRPFVKAPGDARADWWIISEVARRMGYASAFPYQHEHQIFAEYSALTALAGRFGKRLDMTAAAELSADQYEQWQPQQWPLQGEPRCFGDGHFATPDGRVRFVACENPNVHRIGDAFPIILNSSRIRDQWHT

SEQ ID NO: 16357 - protein, 263 aa, uncultured bacterium
QPNAMGGREVGGLANMLANHLDIENAEHRDAVQTFWQSPTICTAPGLKAVDLYEACADGKIKALWVMSTNPAASMPDAAGVAEAIANVPFTVVSDIMERTDTCDLADVLLPAAGWGEKDGTVTNSERRISRQRAFLPVPGAARPDWQIICDVAREMGHGDAFDFDSPASVFREYAALSASLTRFGRDFDISGLTEISDRDYAAFAPTQWPIPKQKSAGGRFFEGGGFFHSDGRARMLPVSAPLAQVANGYQLNTGRIRDQWHT

SEQ ID NO: 16358 - protein, 784 aa, Bacillus cereus ATCC 10987
MKGVILAGGKGRRLRPLTCNTPKPMLPLLEKPVLEYNIELLRQHGIREIAITVQYMSTAIKQYFGDGSKWGVNLYYFEDSPPLGTAGSIKQAEKFLDEPFVVISGDALTDFQLSEGITFHEQKKRMVTMFVKEVENPLSFGLVVMNKEQEVTRYIEKPSWNEVVSNIVNTGIYIMEPEIFSYIPPREFFDFSQDVFPLLANKNALFAYLSEGYWLDIGTFDQYRQAQFDLLTKKLQVPIPYTEVLPMVWMGEGVTIGKGTKIHGPSFIGEGARIGAGSVIEPYSIIGKNSVVSSYSHLQKSIIFANAHIGKYCELLETTIGEHTMVEDDVTLFQKSIVADHCHIGKSTVIKQKGKLWPYKAIDSHSVVGSAGVQESEKSAGWLQKSRIVGRGNVEITPQFIVKVAMAYGSLFTKGESILIGSQEHIETTSYKNLFLHAIHGIGIHTMECKEMNESLFQYSIQDLQCAGGVFIQAEKEKEIVIKLYGKDGAQLTYKQQKAIEQVYMSESFYYVCEKEMGRNKLVHVSLHNYIEAVLERIDIEKIKKQKFHLLINKRNDMLQHLLMLFLQRLGCTVTWIYAGEQKDHVKALMKSSKANMALMFSEQGNYFELYDNHSNIYQGTDFEEIDIPDLLLESAGNIYPMSLKLGECYLLFYTQDEKKSFQARWKRDILYRIGKLFELIALQGKTFLSIVEQSPPLYLLCDEVVCSWNEKGKVMRKLLADIERKEEGIFEGVQFKYTEKEWSYIVSDTKQPKFLVYSHARNPVIARENMKNLIEKIRQYQKV

SEQ ID NO: 16359 - protein, 415 aa, Oryza sativa
  unsure (1)..(415): unsure at all Xaa locations
RRRRNHEDDDDEEEEESGEGRVLEAWERAYADDRSWEALQEDESGLLRPIDTKTLVHAQYRRRLLLRSAASAAARIQKGLIRYLYIVIDPPPAASRLEDRPSRMAVVAKYAEVFSRXEFFDQNPLSHVGIVTMKDGISHRLTEIGGSPESQIKALMGKLECSGEPSLQNALELVHGYLDQVPSYGHKEVLFLYSALNTCDPGDIMETIAKCKKSKIRCSVIGLAAEIFICKYLCEETGGSYTVALDESHFKELLLEHAPPPPAIAEYAAANLIFMGFPQRGAEDLISICSCHKKIKSGAEGYICPRCKVNVCELPTECRTCGLTLVSSPHLARSYHHLFPVQPFDEVSSVHPNRLGQKGGQKCYGCQQSFINPDSQSSLHVRCPKCNQHFCLDCDIYIHESLHNCPGCESQRSSS

SEQ ID NO: 16360 - protein, 430 aa, Xylella fastidiosa Ann-1
MTAIAKIYAREILDSRGNPTLEAEVTLENAVCGRAAVPSGASTGTKEAVELRDGDKTRYLGKGVRAAVDNVNGVIAAALVGFDGADQTGLDHRLINLDGTENKGRLGANALLGVSLATAHAVAAARKQPLWMYLSTLGESKLSLPVPMMNIINGGAHADNNVDFQEFMVLPVGFASFSEALRAGTEIFHALKSVLKGQGLSTAVGDEGGFAPDFRSNVEALDAILEAIGRAGYIAGEDVLLGLDVASSEFRDNGKYNLVGENKRLTSGQFVDFLDDLVAQYPIISIEDGLAEDDWLGWKQLTERIGHKVQLVGDDLFVTNPKVFQEGITSGIANAILIKLNQIGTLTETLESIAMAHRAQYAAIVSHRSGETEDTSIADIAVATTATQIKTGSLCRSDRVAKYNQLLRIEQALGVGARYAGRDAFVSLKS

SEQ ID NO: 16361 - protein, 281 aa, Salmonella typhimurium LT2
MSQTSTLKGQCIAEFLGTGLLIFFGVGCVAALKVAGATFGQWEISVIWGLGVAMAIYLTAGVSGAHLNPAVTIALWLFACFDKRKVVPFIISQVAGAFCAAALVYGLYYNLFVDFEQTHHIVRGSVESLDLAGIFSTYPNPHINFVQAFAVEMVITAILMGLILALTDDGNGVPRGPLAPLLIGLLIAVIGASMGPLTGFAMNPARDFGPKMFAGLAGWGEIAFTGGRDIPYFLVPLFGPIVGAILGAFAYRKFIGRHLPCDTCVVEEKDSTATTQQNASL

SEQ ID NO: 16362 - protein, 447 aa, Oryza sativa
  unsure (1)..(447): unsure at all Xaa locations
MAATIVSVKARQIFDSRGNPTVEVDVCCSDGTFARAAVPSGASTGVYEALELRDGGSDYLGKGVSKAVDNVNSVIAPALIGKDPTSQAELDNFMVQQLDGTKNEWGWCKQKLGANAILAVSLAICKAGAIIKKIPLYQHIANLAGNKQLVLPVPAFNVINGGSHAGNKLAMQEFMILPTGAASFKEAMKMGVEVYHNLKSVIKKKYGQDATNVGDEGGFAPNIQENKEGLELLKTAIEKAGYTGKVVIGMDVAASEFYNDKDKTYDLNFKEENNDGSQKISGDSLKNVYKSFVSEYPIVSIEDPFDQDDWEHYAKMTAEIGEQVQIVGDDLLVTNPTRVAKAIQEKSCNALLLKVNQIGSVTESIEAVKMSKRAGWGVMTSHRSXGETEDTFIAELAVGLATGQIKTGAPCRSERLAKYNQLLRIEEELGAAAVYAGAKFRAPVEPY

SEQ ID NO: 16363 - protein, 290 aa, Zea mays
  unsure (1)..(290): unsure at all Xaa locations
MRALLADGGMALAVSPEANESSGGAAVSLGPLSWASECHGVLYNLALMLPSLALCGXFLAWQARRSFRRLSYGRSHVVVVAYYALLWVVAVLNLLWCFLQAWQCMPDRAFSWNILSLFTKSGMLFLEVSLIAFLLQGNDASVAADVLLKTIYVFGFGVPLFIDTDQGTSGKWGLWILHKLVLTGVYGLIVFMHHSRWRDRXLPAKPAYYNYVCVMLLLNGISLFGCFLIASGAGFGLWLYNLTTVCYHSLYLPLLYVTFLADFFQEEDMLLENVYYSEMKDAGFFDADWD

SEQ ID NO: 16364 - protein, 89 aa, Glycine max
  unsure (1)..(89): unsure at all Xaa locations
ASSXISSPTVTTVXNRADAGXVATIXGXXSMAXFPTRKTNXDITSXASNGGRLQCMXXWPPVXGKXXFETXSYLPDLXDXQLAKEVEYL

SEQ ID NO: 16365 - protein, 681 aa, Nostoc sp. PCC 7120
MATFTVTTLNDVVNPNDGLLSLREAVTAAEALPGTDTIAINGIALLNSPVVIRQGNSINFQGNGTSFTGFNGQGRTSLFLIDNSTVTFNNLQINRGLAQGGNGSRGGGGGLGAGGGLFLNPGANVTADNVVFFDNRAVGGNSFTGRGDGGRGGNDSSAGSNGFPGGSGGLPSFFAIGGIVPTSGGNGGAAGRIVGSTGLGAGGGVSGSSGGFGVGGGSGGGGGGGAGGAGAFRNATGGGGGGFGGYGGGGGGGGGGGGGGANVLGGQARPGGAGGLGGAAGAFAGAGRDGANGGNGRSTFNGNSPGNGGVGGQGGGGAGLGGAVFVSNSATFNVRNSSFLFNSAVGGSGFQNGQGRGGAIFVQSGGLLRDMGGVRFIQNSASTANPDSNIYPVKVNRGDRTIEVEGFQGVGRGSNPSLEVRETFDELIFTGEGLVAKNLLLTQTGDDLVVSFEGVDDTQVILKDFALENLDNLPIPGGQHGQIGNIMFDGDETLQDSFDVFDADSTQNRIWNRNTVTFLNDLDNHVRGFDNSDDVINGQGGNDIIGGLSGDDILRGGEGNDILYAGTGTDILVGGLGNDTLYLGSDRHIDTVIYRQGDGSDVIHQFQRGAGGDLLQFEGIEAIDVVVHGRNTYFHLGDGVTGNTGFGSGELLAELRGVGGFTSDNIGLNLASGNTAQFLFA

SEQ ID NO: 16366 - protein, 477 aa, Sinorhizobium meliloti
MLDKRKFYIDGKWVEPATQNDLLVLNPATEKPIAVISLGTAVDVDRAVAAAKKAFASYSRTSVEERLALLEKLLAIYKRRYDEMADTITAELGAPRTMSHEQQADVGVGHLQGFIDALKRLKLREKLPNGDTLLREPIGVCGLITPWNWPVNQIALKVVPALATGCTCVLKPSEFTPLNAMLYAEMIEEAGFPAGVFNLVNGDGIHAGAALSKHKDIDMMSFTGSTRAGIAVSKDAADTVKRVTLELGGKSPNIVFADADIEERVTASILECFNNSGQSCDAPTRMLVERSAYDEVVEIARRVGMEARVGDPTKVGSHIGPLVSHIQFERVQALIEAGVAEGATLLAGGPGKPEGFETGYFVQPTIFADVDNSMRIAREEVFGPVLSIIPFDTEEEAIAIANDTNYGLAAYVQTRDRERAERVASRLRAGMVHINGGPHRYGSPFGGYKQSGNGREGGMFGLEDFLEVKTVHLPDAA

SEQ ID NO: 16367 - protein, 502 aa, Oryza sativa
MWSALFSHLREVHKRSGVKEEKLIMKSPPAAGEAGCHKPQATATNKMTVLQSPLGLRTILTSLVAFFIVVSSVSLLFDRGQDAQAQLAVEQHQHQEVLLKQKPASAAVGEQKSVVVDQSSLRSQEAQVQWTSELQDVATDSGDGGFDGEEDCNWSLGRWVYDNASRPLYSGLKCSFIFDEVACDKYGRNDTKYQHWRWQPHGCNLPRFNATKFLEKLRNKRLVFVGDSVNRNQWVSMVCMVEHFIPDGRKMRVYNGSLISFKAFEYNATIDFYWSPLLLESNSDNPIIHRVEYRIIRADRIEKHANVWKDADFIVFNSYLWWRKQRDGMMMKVMYGSFEDGDAKLDEVQMVDGYEIALKKLTEYLGANINKNKTRIFFAGSSPAHSWASNWGGDDNNKCLNETEPIQIEDYRSATTDYGMMDKAKEIFGTLEPKGIHVQILNITQLSEYRKDAHPTIFRRQYVPLTKEQIANPSIYADCTHWCLPGVPDVWNEFLYAYIMHK

SEQ ID NO: 16368 - protein, 336 aa, Streptomyces coelicolor A3(2)
MTTSSDVIPDAPQPAGDAAGPSATLGGEQKRSIEQITLLLFITLPFLALVAAVPLAWGWGVSWLDLGLLVFFYFLGCHGITIGFHRHFTHGSFKAKRPLKIALAIAGSMAVEGPLVRWVADHRKHHKFSDDEGDPHSPWRYGETVPALIKGLWWAHIAWMFDEEQTPQEKYAPDLIKDPALRAVSRQFILWTVVSLALPALIGGLVTMSWWGAFTGFFWGSLVRVALLHHVTWSINSICHAVGKRPFKSRDRSGNVWWLAILSCGESWHNLHHADPTSARHGVMRGQLDSSARLIRWFEQLGWAYDVRWPSRSRIDSRRNTDQDGARRRKETAKAA

SEQ ID NO: 16369 - protein, 429 aa, Prochlorococcus marinus subsp. pastoris str. CCMP1986
MNNFKNLRGTVDLLPDQLIKWQNVEKIIIQQLFRSSVKEIRTPILEMTELFMRGIGEGTDVVSKEMYTFLDRGERSCTLRPEGTASVARALIQHGISTRPSQKLWYMGPMFRYERPQAGRQRQFHQLGVEFIGYESVNSDIEIITLAWDILQKLGIKELNLEINTLGDHIDRSNFQKAFLKWLEVNKNSLDLDSQRRIDKNPLRILDTKNVQTKQILKGAPRLFDFLSEKSLERYLIIKEKLKLLKIPFIENFNLVRGLDYYTHTAFEITTGTLGSQATVCGGGRYDSLISQMGGAETPAIGFAIGLERLIILCGSELEETRETDIYIVNKGIHAEILAMELSRKLRNYDLVVELDLSGASFSKQFKKANKLKSKSIIVIGDDEAVKNEFVIRLFNNDNSVNKEETISIEDNMKLEKWIKSNLILDKNL

SEQ ID NO: 16370 - protein, 820 aa, Yersinia pestis biovar Medievalis str. 91001
MSCSFISARIMLMNNNKTPLTGSLSRREFIQTSAVVTGAAAIAGSIALPFSVHAAASEHAPTAAEESIKYSACLVNCGSRCPLKVHVKNGEIIKIANEAIYDDSTFGLHQIRPCLRGRSVRWKTYNPDRVKYPMLRVGKRGEGKFKRISWDEATTIVADNLKKTIVQYGNEAIYYQYGTGSTGANLQGRNACKRMLSLIGGYLDQHGTYSTAQINTVMPYVYGNLDETLLDEIKNSDLVVMFGHNLAETRMSGGGQYIETVQALGQSRAKVIIIDPRMTDSVTTLNAEWIPIFPGTDAALVAALGHVLIKENLTDERFLQQYCVGWDATTLPSSAPANGSYKDYILGLGADETEKTPEWASEITGISPTRIIQLARELGNARAAWISQGWGIQRTANGEQASRSIMMLPLMTGNIGRAGTNTGAWGGNVKYPVPGFSIPNPVKTAIPCFMWTDAIFRGTEMTAKNAHVKNKEKLDTNIKFLWNYASNVIANQHSDLNKTNTILQDESLCEFILVWENHMTNSAKYADLLLPDVTSVESNDLIDNSYASGAYHYVTRMQNTIEPLWECRPSYDVLAEIATKLGVGDAFTEGHTQQEWIEISYNKMRDNNPALPPFSDTHNKGIIDRIFADSSQYIALKDFRDDPLNNPLKTPSGKIEIYSEALATLAHEWQLTPGDRITAVAEYCPTPEGVSDQETLKSYPLQMTGFHVKGHTHSTYYNVAMLREAVPHQFWMNPIDAQARGIQQGERVEIFNSRGRIHIAVKITERVLPGVIAVPQGAWRNLNKDGIDVGGCINTLTTQRPSPLAKGNPQHTNLVEVKRA

SEQ ID NO: 16371 - protein, 205 aa, Yersinia pestis biovar Medievalis str. 91001
MKQYGFFVDSTKCTGCKTCQVSCKDEKNLDLGPKLRRVYEYGGGSWTQQDNIWVQNVFSYYLSIACNHCSSPTCVTGCPTGAMHKREEDGLVVVNQDLCVGCRYCEMRCPYGAPQFDAKKQLMTKCDGCYERVAQGDKPVCVDSCPQRALDFDEISVLRDKYGDENAIAPLPHAHLTQPNLVIRGHRDAKPSGDTSGRIQNPAEV

SEQ ID NO: 16372 - protein, 186 aa, Arabidopsis thaliana
MEKVDVYDELVNLKATELRLGLPGTEETVSCGKSNKRVLPEATEKEIESTGKTETASPPKAQIVGWPPVRSYRKNNVQTKKSESEGQGNYVKVSMDGAPYLRKIDLTMYKQYPELMKSLENMFKFSVGEYFEREGYKGSDFVPTYEDKDGDWMLVGDVPWEMFVSSCKRLRIMKGSEVKGLGCGGL

SEQ ID NO: 16373 - protein, 426 aa, Lactobacillus plantarum WCFS1
MRYQRPKGTADILPGDSEKWQYVEATARAVFKTYQFKEIRTPMFENFEVFSRSAGDTSDIVTKEMYDFHDKGDRHITLRPEGTAGVVRAFVENKLYGPQVLKPYKVYYMGPMFRYERPQSGRLREFHQLGVEAFGSESAALDVEVIAMGYNLLKTFGLTDLKLVINTLGDQQTRDDYRQALIDYLEPHFDELSDDSKERLHKNPLRVLDSKAPEDQQFVADAPSILDYLSPEAQAHFDQTKTYLDALAIPYEIDATMVRGLDYYNHTIFEIMTHSKALGKGYTTICAGGRYNGLVKELGGPEVSGVGFGLGVERLLVLMDAENIAVPTDDQLDVYVVGIGDTASATTLKLVQALRAAGYKAERDYLDRKPKAQFKSADRLNARYTMTVGETELADQVVNLKAMATGEETKVAMADIYQDAHQVLDK

SEQ ID NO: 16374 - protein, 288 aa, Lactobacillus plantarum WCFS1
MTKTPTITLNDGRAIPAIGFGTFQIPDDGSTYQAVKEALVIGYRHIDTAVAYFNEDEVGQAIKDSGIPRDQIWVTSKLWLQDYGFDAASRAIDRSLTKLRLDYIDLYLIHQPYGDVPGAWQAMEAAQKAGKLKSIGVSNMTPTLWQKFVPQFETIPAVNQVEFNPYFQQQPLRQLLAAQDVKLEAWAPLGQGNQALFKEPIIQQLAIKYHKDAGQIILRFEHQEGVIVFPKSVHSARIKSNRDIFDFELTSTEMAQLRALDTGKGHHDPDAPGVSEQLLHAFDVHADD

SEQ ID NO: 16375 - protein, 288 aa, Lactobacillus plantarum WCFS1
MMVPTTKLNNGVVMPQLGFGVFQVPDLNECEAAVTAALKAGYRLIDTATAYQNETAVGRAIQKSGLRRDELFVTSKLWVSEFTYERAKQGIDASLQRLGVDYLDLYLLHQPYGDVMGAWRALEEAYHAGKIRAIGVSNFYADQLKNLELTMSVQPAVNQIEVNPWYQQADEVRFNQDEHVRVEAWAPFAEGKHAIFSNPSIQTIAQAHGKTTGQVILRWLLQRGITVIPKSVHPERMAENIAVFDFELTAAEMSAMAELDQGVSQFFDHRDPVTIEQIFGASLRQLHE

SEQ ID NO: 16376 - protein, 392 aa, Corynebacterium efficiens YS-314
MKALTWQGKRKVSVETVPDPILKAENDAIIQVTSTGICGSDLHLYEVLAPFMDEGDIIGHEPMGRVVEAGPASNLKEGDRVVIPFNISCGHCWMCKRGLFSQCEVTQVREYGSGASLLGYSRLYGSVPGGQAEYLRVPHADFGPIKVGDELPDHRYLFLSDVLPTAWQAVKYADVGEGDTLAVYGLGPIGQMCARIGRHLGARVFGIEPVPERRAMAARHGIEVFDLGDDTHDHIRDLTDGRGPDAVVDAVGMEAHGSPVGKLAHNAMSLLPDAAARKMMEHGGLDRLGALHGSIDLVRRGGTVSLSGVYGGEASPMPMLTLFDKQIQMRMGQCNVKSWIDDLLPLVEDPADPLGVDDLTTHRVSLDEAPAHYEKFQKKEDGCIKVVLDPTL

SEQ ID NO: 16377 - protein, 336 aa, Aeromonas punctata
MKAVGYKVPGPIAEDASLVDIDLPRPVAEGGDILVEVKAVSVNPVDYKIRSSTPPADGDWKVLGWDAAGIVQEVGPDVTQFAVGDEVYYAGSLIRPGTNAEFHLVDARIVGRKPASLDWAEAAALPLTTLTAWEAMFDRLDVTKPVPGAAAILIIGGAGGVGSIAIQIARQRTDLIVISTASRPETQEWVKGLGAHHVIDHSRPLAPQIAELNIGAPAFVFSTTHTEQHASDIAELIAPQGRFGFIDDPKALDVMLFKRKAVSIHHELMFTRSLYGTPDMDEQGKILNSLAVLVDDGKIRTTLTEKLSPINAANLKTVHALIESGAARGKIVLEGF

SEQ ID NO: 16378 - protein, 292 aa, Zea mays
MVRMSSSSSASGVNLTEQIENVFDQLISKIEQADPDFDPRPFLKQLNVLGRYEPIKRNVYFTKRYIEDYGISCHCKPSPGSSVVCGRDCYCSMLFSCCSSQCECDIACTNKSFQHRPLTKTKLIKTEKCGHGLVAEDEIKKGEFVIEYVGEVIDDRTCENRLWTMKRLDDTDFYLCEVSSNMVIDATNKGNLSRFINHSCEPNTAMQKWTVDGETRVGIFALRDIKIGEELTYDYKFVQFGAAQVCHCGSSKCRKMLGTTKYSGSSQNHRTKKKKKKKKKKKKKKKKKKKKK

SEQ ID NO: 16379 - protein, 426 aa, Escherichia coli O157:H7 EDL933
  unsure (1)..(426): unsure at all Xaa locations
MSSXKELMXXRSXAIPRGVGQIHPIFADRAENCRVWDVEGREYLDFAGGIAVLNTGHLHPKVVAAVEAQLKKLSHTCFQVLAYEPYLELCEIMNQKVPGDFAKKTLLVTTGSEAVENAVKIARAATKRSGTIAFSGAYHGRTHYTLALTGKVNPYSAGMGLMPGHVYRALYPCPLHGISEDDAIASIHRIFKNDAAPEDIAAIVIEPVQGEGGFYAATPAFMQRLRALCDEHGIMLIADEVQXGAGRTGTLFAMEQMGVAPDLTTFAKSIAGGFPLAGVTGRAEVMDAVAPGGLGGTYAGNPIACVAALEVLKVFEQENLLQKANDLGQKLKDGLLAIAEKHPEIGDVRGLGAMIAIELFEDGDHNKPDAKLTAEIVARARDKGLILLSCGPYYNVLRILVPLTIEDAQIRQGLEIISQCFAEAKQ

SEQ ID NO: 16380 - protein, 272 aa, uncultured bacterium
QPNAMGGREVGGLANTLAAHMDYDSPGARSRVADFWGTGAVADGPGYKAVDMFEAVHRGDIRVIWIMGTNPAVSLPDSARVREALARCPTVIVSDLRRPHRYHGPRGHPPTRRWAGGKRMATVTNSERRISRQRCFLPLPAEVKPDWWIMSSVAGKPGFGEAFNYKRPADIFREHAALSAHENNGERLFNLAGLANLSDAGYEALIPVQWPVMEGAGVEAEGSTRLFSDGRFVTDNQRARFVAINTRLPAQQTSDDYPMVVNTGRIRDQWHT

SEQ ID NO: 16381 - protein, 342 aa, Thermoanaerobacter tengcongensis
MYNLKDMTLEEMEEFFVNLGESKFRAKQLYKWIYDKRVTDFDLMTDISKNLRAKLKEIAYISELKIIERRVSQIDDTVKYLFLLEDKNIIEGVAIKYKFGNTACVSTQVGCNMKCKFCASAIGGKVRDLKASEMVDQVMAIDSDYGKISNIVLMGSGEPFDNYDEVMKFIKIVNNPYGLKIGKRHITISTVGIVPKIYQFADEELQVNLSISLHAPNNELRNELMPINRAYPLEELMKACRYYIEKTNRRITFEYALIDGVNDKKEHAYQLVDLLKGMLCHVNLIPINYVKEIGFRKSNNEKVMMFKKIIENAGITCTVRRELGSDIEAACGQLRRKYLKEG

SEQ ID NO: 16382 - protein, 259 aa, uncultured bacterium
QPNAMGGREAGGLANQLAIHRGFDHQSIELISEFWQTDRLARKPGLKAIEMFEAVERGDIQVIWIMATNPVVSMPDNRFVQQALKKCPLVIVSDVTAESDIAQYADLLLPAAGWGEKQGMVTNSERMLTRQRQFQRPKGLAKPDWQAIAMVASKVSARLAMQDGFKFLTEAEVFGEYAAMTGLNKNSSLLLDLSAYAQISEQEYAAWQLVQWGGAHPFANGQFSFDDGKARFIVPSHSQASDKMQWWLNTGRQRDQWHT

SEQ ID NO: 16383 - protein, 304 aa, Zea mays
  unsure (1)..(304): unsure at all Xaa locations
TSARGASEPHDNEPLSTPLEPRTPKSRTRPLNPSTTPALCLPAPAIPRHGPPPRATTWVFDXCPLXDTFAVAADFAAAPAGGFFWAAPPSLQPQAPVQSVVAASAPNPCMEISSSVDCGQEKEQPTNKRPRSESTTESSTKASREKIRRDKLNERXFLELGAIXPGEHLLKLANPSLLGDAIRVVGXIPVEKQKSLRDPSGDFPREDKDLKPERXELRAENKXLKPEKETWEQQIKFXNAXPSFVPHXPVIPASAXPAPQGPAAXARHKLMMPVIGYPGFPMWQFMPPSDVDTSDDPRSCPPVA

SEQ ID NO: 16384 - protein, 375 aa, Kluyveromyces lactis
MFRLARAQTALANKASVSRSFLRLNSSFAIPETQKGVIFYENGGKLEYKDLPVPKPKANELLINVKYSGVCHTDLHAWKGDWPLPVKLPLVGGHEGAGIVVAKGENVKNFEIGDYAGIKWLNGSCMSCELCEQGYESNCLQADLSGYTHDGSFQQYATADAVQAAQIPKGTDLAEIAPILCAGVTVYKALKTADLKPGQWVAISGAAGGLGSLAVQYRKAMGLRVLGIDGGDGKEELFKQCGGEVFIDFRKSKDMVADIQEATNGGPHGVINVSVSEAAVSMSTEYLRPTGLVVLVGLPADAYVKSEVFSHVVKSISIKGSYVGNRADTREATDLFTRGLVKSPIKIIGLSELPEAYALMEQGKILGRFVVDTYK

SEQ ID NO: 16385 - protein, 268 aa, uncultured bacterium
QPNAMGGREVGGLANQMAAHMDFNNPEAVDLVSRFWNAENMAQKDGLKAVDLFQAVEEGKIKAIWVMGTNPAVSLPNTDQVVRALQACPLVVVSDCIADTETLRYADVCLPATGWSEKNGTVTNSERRISRQRSILAPSGEAQHDWWIISEVAKRMGFGEAFNYGHPYEIFAEHAALSGFENNGSRDFDISLFQDIDRETYDALQPIQWPVTANSPYGTARMFSDGKFFTPTGKARFIPATTQTARQQPTEELPYILNTGRIRDQWHT

SEQ ID NO: 16386 - protein, 425 aa, x Doritaenopsis sp.
MSKMFGKEVPLSKMAVSKAHGEGSPYFAGWKAYEENPYDVVGNPDGVIQMGLAENQLSFDLLEEYLELHPEAFSWASDSSSFRENALFQDYHGLQTLRQALASFMEKIRGGRSKFDANRIVLTAGATAANEILTFILADRGDALLVPTPYYPGSNGFQLTLSSLEKAYAEAKASNFNVRGLLMTNPCNPLGTSASLSLLQDIIHFISDKNIHLISDEIYSGSVFSSTNLFSISDLITDAISEQVHIVYSLSKDLGLPGFRVGALYSYNDRVVKTARRMSSFSLVSSQTQKLLSFMLSDEEFTVRYIEKNRERLRERYELVVNGLKEAGIECLKGEAGLFCWVNMEKLMEEETKEGEAELWKVIIDDLKLNISPGSSCCCAEPGWFRLCFANMSRETLEVALKRLKDFAQKKVAAKKKKMNNVYFC

SEQ ID NO: 16387 - protein, 266 aa, uncultured bacterium
QPNAMGGREVGGLANQLAAHMDYSSEEMIDRVGRFWNAPNMARSDGLKAVDLFEAVEAGKVKAIWIMGTNPVVSLPNADQVKRALEACPLVVVSECIANTDTLKVANVCLPATGWSEKNGTVTNSERRISRQRSLLPPSGESRHDWWIVSEVAKRMGYGDAFAYEHPAQIFAEHAALSGFENNGSRDFDISLLQNIDEKAYDNLAPVQPNDAAPYGTARMFADGKFFTPSGRARFIPIITRAPVQQPTAEQPLIMNTGRIRDQWHT

SEQ ID NO: 16388 - protein, 315 aa, Triticum aestivum
  unsure (1)..(315): unsure at all Xaa locations
MAATKLSSGHEMPAVGLGVWRMDSAAVRGLIHSALRAGYRHFDCAADYKNEAEVGDALAEAFQTGLVKREDLFITTKLWNSDHGHVVEACKDSLKKLRLDYLDLYLIHFPVATKHTGVGTTGSALGDDGMLDIDTTISLARTXHATVSXLRQGLIRSMRIFKCDIFLTRDFSAYANLRPAALPIQTHPYFPRDSIVKVXLHHGKLRHEDSPAVCWRRPPNRTTVGSGSVLKAVDDPVMKSLAEKYGKTPAQLVLRWGLQRNTVVIPKTSKVERLEENFAVSDFDISGEDMEKIKALDRRYRTNQPAKFWGIDLYA

SEQ ID NO: 16389 - protein, 437 aa, Escherichia coli
MSKIVKIIGREIIDSRGNPTVEAEVHLEGGFVGMAAAPSGASTGSREALELRDGDKSRFLGKGVTKAVAAVNGPIAQALIGKDAKDQAGIDKIMIDLDGTEKKSKFGANAILAVSLANAKAAAAAKGMPLYEHIAELNGTPGKYSMPVPMMNIINGGEHADNNVDIQEFMIQPVGAKTVKEAIRMGSEVFHHLAKVLKAKGMNTAVGDEGGYAPNLGSNDEALAVIAEAVKAAGYELGKDITLAMDCAASEFYKDGKYVLAGEGNKAFTSEEFTHFLEELTKQYPIVSIEDGLDESDWDGFAYQTKVLGDKIQLVGDDLFVTNTKILKEGIEKGIANSYLIKFNQIGSLTETLAAIKMAKDAGYTAVISHRSGETEDATIADLAVGTAAGQIKTGSMSRSDRVAKYNQLIRIEEALGEKARTTVVKRSKARHKTDFI

SEQ ID NO: 16390 - protein, 259 aa, uncultured bacterium
QPNAMGGREVGGMANTLAAHMDFDAQSIGRVERFWQAPALARKPGLKAVDMFDAVASGQIRAIWIMATSPVASLPDKDFVAQALVQCPLVVVSDCYKDTDTVGLADVRLPAQGWGEKDGTVTNSERCISRQRRLVTPRFDARPDWKIVCDVAKAMGFTHGFDYVSPGQIFAEHAALSVFENSGERLFALPDHVGLSEEAYDGLKPVSWPLEGRPFASRRFSTSDGRACFVATPPALTSAVSDRFPLLLNTGRLRDQWHT

SEQ ID NO: 16391 - protein, 463 aa, Sinorhizobium meliloti 1021
MSAFDYDLFVIGGGSGGVRSGRLAAALGKKVAIAEEFRYGGTCVIRGCVPKKLYVYASQFAEHFEDAAGFGWTVGESRFDWAKLVAAKEQEIARLEGLYRKGLANAGAEILDTRAELAGPNTVKLLASGKTVTAERIVIAVGGHPSPHDALPGHELCITSNEAFDLPALPESILIAGGGYIAVEFANIFHGLGVKTTLIYRGKEILSRFDQDMRRGLHAAMEEKGIRILCEDIIQSVSADADGRRVATTMKHGEIVADQVMLALGRMPNTNGLGLEAAGVRTNELGAIIVDAFSRTSTPGIYALGDVTDRVQLTPVAIHEAMCFIETEYKNNPTSPDHDLIATAVFSQPEIGTVGITEEEAARKFQEIEVYRAEFRPMKATLSGRKEKTIMKLVVNAADRKVVGAHILGHDAGEMAQLLGISLRAGCTKDDFDRTMAVHPTAAEELVTMYQPSYRVRNGERVG

SEQ ID NO: 16392 - protein, 510 aa, Oryza sativa (japonica cultivar-group)
MASAALPEAVAPKKKGNVRFAFACAILASMTSILLGYDIGVMSGASLYIKKDFNISDGKVEVLMGILNLYSLIGSFAAGRTSDWIGRRYTIVFAAVIFFAGAFLMGFAVNYAMLMFGRFVAGIGVGYALMIAPVYTAEVSPASARGFLTSFPEVFINFGILLGYVSNYAFSRLPLNLGWRIMLGIGAAPSVLLALMVLGMPESPRWLVMKGRLADAKVVLEKTSDTAEEAAERLADIKAAAGIPEELDGDVVTVPKRGSGNEKRVWKELILSPTPAMRRILLSGIGIHFFQQASGIDSVVLYSPRVFKSAGITDDKHLLGTTCAVGVTKTLFILVATFFLDRVGRRPLLLSSTGGMILSLIGLGAGLTVVGQHPDAKIPWAIGLSIASTLAYVAFFSIGLGPITWVYSSEIFPLQVRALGCSLGVAANRVTSGVISMTFLSLSKAITIGGSFFLYSGIAALAWVFFYTYLPETRGRTLEEMSKLFGDTAAASESDEPAKEKKKVEMAATN

SEQ ID NO: 16393 - protein, 97 aa, Zea mays
  unsure (1)..(97): unsure at all Xaa locations
MDPKMTEVTQMFARFKAAYARNDLNTCVTLLSQLKVHLTQFPSLPPLFQQTPNIVEELKLASKXPWAHHAVVLSMKXEDQDAFERNFCQLKPYYVDT

SEQ ID NO: 16394 - protein, 216 aa, Daucus carota
MAAPPARPRADYDYLIKLLLIGDSGVGKSCLLLRFSDGSFTTSFITTIGIDFKIRTIEMDGKRIKLQIWDTAGQERFRTITTAYYRGAMGILLVYDVTDESSFNNIRNWIRNIEQHASDNVNKILVGNKADMDESKRAVPTSKGQALADEYGIKFFEASAKTNMNVEEVFFSIAKDIKQRLAETDSKTEPQTIKINQQEQGAGTSAASQKSACCGS

SEQ ID NO: 16395 - protein, 386 aa, Salmonella typhimurium LT2
MTRKQATIAVRSGLNDDEQYGCVVPPIHLSSTYNFTGFNEPRAHDYSRRGNPTRDVVQRALAELEGGAGAVLTNTGMSAIHLVTTVFLKPGDLLVAPHDCYGGSYRLFDSLATRGCYRVRFVDQGDERALQAALEEKPKLVLVESPSNPLLRVVDIAKICRLAREAGAVSVVDNTFLSPALQNPLALGADLVLHSCTKYLNGHSDVVAGVVIAKDPEVVTELAWWANNIGVTGGAFDSYLLLRGLRTLVPRMELAQRNAQAIVKYLQTQPLVKKLYHPSLPENQGHEIAARQQKGFGAMLSFELDGDEETLRRFLGGLSLFTLAESLGGVESLISHAATMTHAGMSPQARASAGISETLLRISTGIEDGEDLIADLENGFRAANKG

SEQ ID NO: 16396 - protein, 168 aa, Avena clauda
VMASSATSVAPFQGLKSTAGLPVSRRSASSLGSVSNGGRIRCMQVWPTEGIKKFETLSYLPPLSEEALLKQIDFLIRSKWVPCLEFSKVGFIFREHGSTPGYYDGRYWTMWKLPMFGCTDASQVIKEVEEVKKEYPDAYVRIIGFDNIRQVQCVSFIAFKPPGCEESG

SEQ ID NO: 16397 - protein, 97 aa, Oryza sativa (japonica cultivar-group)
MGTFAPIALYWVYAGGYQLVLHRRPLERYRLHTRAEEEEKNLVALPAVVRGVLLQQLVQAIVAMILFMGWIPISRRRRSGLASSTTKTASCSCCKIS

SEQ ID NO: 16398 - protein, 168 aa, Avena clauda
VMASSATSVAPFQGLKSTAGLPVSRRSASSLGSVSNGGRIRCMQVWPIEGIKKFETLSYLPPLSEEALLKQIDFLIRSKWVPCLEFSKVGFIFREHGSTPGYYDGRYWTMWKLPMFGCTDASQVIKEVEEVKKEYPDAYVRIIGFDNIRQVQCVSFIAFKPPGCEESG

SEQ ID NO: 16399 - protein, 369 aa, Escherichia coli K12
MKSRAAVAFAPGKPLEIVEIDVAPPKKGEVLIKVTHTGVCHTDAFTLSGDDPEGVFPVVLGHEGAGVVVEVGEGVTSVKPGDHVIPLYTAECGECEFCRSGKTNLCVAVRETQGKGLMPDGTTRFSYNGQPLYHYMGCSTFSEYTVVAEVSLAKINPEANHEHVCLLGCGVTTGIGAVHNTAKVQPGDSVAVFGLGAIGLAVVQGARQAKAGRIIAIDTNPKKFDLARRFGATDCINPNDYDKPIKDVLLDINKWGIDHTFECIGNVNVMRAALESAHRGWGQSVIIGVAVAGQEISTRPFQLVTGRVWKGSAFGGVKGRSQLPGMVEDAMKGDIDLEPFVTHTMSLDEINDAFDLMHEGKSIRTVIRY

SEQ ID NO: 16400 - protein, 411 aa, Yersinia pestis biovar Medievalis str. 91001
MAELPAKRRFTRIDRLPPYVFNITSELKMAARRRGEDIIDFSMGNPDGPTPPHIVEKMCSVAQREDTHGYSTSRGIPRLRRAISRWYADRYQVDIDPENEAIVTIGSKEGLAHLMLATLDHGDTVLVPNPSYPIHIYGAVIAGAQVRSVPLTEGIDFFGELERAIRETIPKPKMMILGFPSNPTAQCVELDFFERVVALAKQYDVLVVHDLAYADIVYDGWKAPSIMQVPGAKDIAVEFFTLSKSYNMAGWRIGFMVGNPELVSALARIKSYHDYGTFTPLQVAAIAALEGDQQCVRDIAEQYRQRRNALVRGLHEAGWMVDNPKASMYVWAKIPEPYAHLGSLEFAKRLLAEAKVCVSPGIGFGDYGDTHVRFALIENQDRIRQAVRGIKSMFRADGLLKPGKSSPNEMA

SEQ ID NO: 16401 - protein, 561 aa, Delftia acidovorans
MTTLKITGMTCDSCAVHVKEALEKVPGVQSANVSYTKGSAKLAVETGTSPDALTAAVAGLGYRATLADALVPPVGGGLLVKMREWLGSGDKAGDDGGGLHIAVIGSGGAAMAAALKAVEQGAHVTLIERGTIGGTCVNIGCVPSKIMIRAAHIAHLRRESPFDGGMPPTPPTILRERLLAQQQARVDELRHAKYEGILDDNPAISVLHGEARFKDGHSLTVQLNGGGERVVTFDRCLIATGASPAVPPIPGLKDTPYWTSTEALVSDTIPERLAVIGSSVVALELAQAFARLGSQVTILARSTLFFREDPAIGEAITAAFRAEGIEVLEHTQASQVAHEGGEFVLTTAHGELRADKLLVATGRSPNTRSLALDAAGVALNLQGAIVIDVGMRTSTPDIYAAGDCTDQPQFVYVAAAAGTRAAINMTGGDAALNLAAMPAVVFTDPQVATVGYSEAEAQHDGIETDSRTLTLDNVPRALANFDTRGFIKLVIEEGSGRLIGVQAVAPEAGELIQTAVLAIRNRMTVQELADQLFPYLTMVEGLKLAAQTFNKDVKQLSCCAG

SEQ ID NO: 16402 - protein, 297 aa, Escherichia coli O157:H7 EDL933
MTNLKAVIPVAGLGMHMLPATKAIPKEMLPIVDKPMIQYIVDEIVAAGIKEILLVTHASKNAVENHFDTSYELESLLEQRVKRQLLAEVQSICPPGVTIMNVRQGEPLGLGHSILCARPAIGDNPFVVVLPDVVIDDASADPLRYNLAAMIARFNETGRSQVLAKRMPGDLSEYSVIQTKEPLDREGKVSRIVEFIEKPDQPQTLDSDIMAVGRYVLSADIWPELERTQPGAWGRIQLTDAIAELAKKQSVDAMLMTGDSYDCGKKMGYMQAFVKYGLRNLKEGAKFRKGIEKLLSE

SEQ ID NO: 16403 - protein, 168 aa, Avena maroccana
VMASSATSVAPFQGLKSTAGLPVSRRSNAGLGSVSNGGRIRCMQVWPIEGIKKFETLSYLPPLSEEALLKQIDFLIRSKWVPCLEFSKVGFIFREHGSTPGYYDGRYWTMWKLPMFGCTDASQVIKEVEEVKKEYPDAYVRIIGFDNIRQVQCVSFIAFKPPGCEESG

SEQ ID NO: 16404 - protein, 310 aa, Prochlorococcus marinus subsp. pastoris str. CCMP1986
MIDSFPLIKKEHIETLQINIGLKCNQACKHCHVNSSPLRSEKMSYEIISLIPKVIEKYKIKTLDITGGAPEMHPEFRNLITTLSDKNIDIIDRCNLTIFFEDGFEDLPQFLAKNNVIVTASLPCYEKDNVELQRGYGVFDKSINALKILNDLGYGKQKDGLQLNLVYNPVNPILPPSQVILKEDYKRILFEKYNISFNNLYTITNMPINRYADSLNSENKLDSYYKLLKENFNKNNLEKLMCKKTISVNWQGQIYDCDFNQQINLKGNKGPKTLSDLMSKSFKFDYGVAVKEHCFACTAGAGSSCGGTLT

SEQ ID NO: 16405 - protein, 513 aa, Pseudomonas aeruginosa PAO1
MNPSLNAFRPGRLLVAASLTASLLSLSVQAATLTRDNGAPVGDNQNSQTAGPNGSVLLQDVQLLQKLQRFDRERIPERVVHARGTGAHGEFVASADISDLSMAKVFRKGEKTPVFVRFSAVVHGNHSPETLRDPRGFATKFYTADGNWDLVGNNFPTFFIRDAIKFPDMVHAFKPDPRSNLDDDSRRFDFFSHVPEATRTLTLLYSNEGTPASYREMDGNSVHAYKLVNARGEVHYVKFHWKSLQGQKNLDPKQVAEVQGRDYSHMTNDLVSAIRKGDFPKWDLYIQVLKPEDLAKFDFDPLDATKIWPGIPERKIGQMVLNRNVDNFFQETEQVAMAPSNLVPGIEPSEDRLLQGRLFAYADTQMYRVGANGLGLPVNRPRSEVNTVNQDGALNAGHSTSGVNYQPSRLDPREEQASARYVRTPLSGTTQQAKIQREQNFKQTGELFRSYGKKDQADLIASLGGALAITDDESKYIMLSYFYKADSDYGTGLAKVAGADLQRVRQLAAKLQD

SEQ ID NO: 16406 - protein, 218 aa, Halobacterium sp. NRC-1
MVEVDGKPILTHCFEQLVELGADGLVVVVGYRKQDIIEHYGDEFEGVPITYAHQREQKGLAHALLNVEEHVDEDFMLMLGDNIFQANLEDVVRRQQEERADAAFLVEEVDWDDASRYGVCDTNQYGEVTDVVEKPDDPPSNLVMTGFYTFSPAIFHACHLVQPSNRGEYEISEAIDLLIQSGRTIDAIGLEGWRVDVGYPEDREEAEERLAEAEDAVA

SEQ ID NO: 16407 - protein, 444 aa, x Doritaenopsis sp.
MSKMFGKEVPLSKMAVSKAHGEGSPYFAGWKAYEENRYDAVGNPDGVIQMGLAENQLSFDLLEEYLELHPEAFSWASDSSSFRENALFQDYHGLQTLRQALASFMEKIRGGRSKFDANRIVLTAGATAANEILTFILADRGDALLVPTPYYPGFLRDLQWRTGVTIFPVHCYSSNGFQLTLSSLEKAYAEAKASNFNVRGLLMTNPCNPLGTSASLSLLQDIIHFISDKTIHLISDEIYSGSVFSSTNLFSISDLITDAISEQVHIVYSLSKDLGLPGFRVGALYSYNDRVVKTARRMSSFSLVSSQTQRLLSFMLSDEEFTVRYIEKNRERLRERYELVVNGLKEAGIECLKGEAGLFCWVNMEKLMEEETKEGEAEPWKVIIDDLKLNISPGSSCCCAEPGWFRLCFANMSRETLEGVKRLKDFAQKKVAAKKKKMNNVYFC

SEQ ID NO: 16408 - protein, 476 aa, Lycopersicon esculentum
FYNFSKKLQGMAKTNGFMGHDMLAPFTAAWMIDMGPLVIDKAEGSYVYDVNGKKYLDSLSGLWCSVLGGSEPRLIEAANKQLNKLAFYHSFWNRTTKPSLDLAKELINMFTANKMGKVFFTSSGSEANDTQVKLVWYYNNAIGRPNKKKIISRKNAYHGSTYMTAGLSGLPSLHLKFDLPPPYILHTDCPHYWNYHLPGETEEEYSTRLANNLENLILKEGPETVAAFIAEPVMGGAGVIIPPATYFEKIQAVLKKYDILFIADEVICGFGRLGTMFGCDKYNIKPDLVSIAKALSGGYIPIGAVLVSEEISKVIMSQSNQLGVFCHGFTYSGHPVACAVALEALKIYKEKNITEVVNKLSPKFQEGLKAFIDSPIIGEIRGTGLVLSTEFVDNKSPNDPFPPEWGVGTYFGSQCQKHGMLVSFSGDHVNMAPPFTLSLEELDEMISIYGKALKDTEKKKKKKKKKKKKKKKKKKK

SEQ ID NO: 16409 - protein, 123 aa, Oryza sativa
  unsure (1)..(123): unsure at all Xaa locations
PHHNNHYNSYMNFMHQNEEANYFISGYYPGKHAPRYNIPFGTLTNRHKKVESANENNFKQTGERFRSWDPARIDPVIKKRXIDTLCDPALTHEIRSIWLSYWSEAHRYLGQKLSSRLSSKPSM

SEQ ID NO: 16410 - protein, 271 aa, uncultured bacterium
QPNAMGGREVGGLANTLAAHMDYDSPGARSRVAGFWGTGAVADGPGYKAVDMFEAVHRGDIRVIWIMGTNPAVSLPDSARVREALARCPTVIVSDCVAHTDTTDLADILLPAAGWGKRMAPSPIRNAVFSRQRCFLPLPAEVKPDWWIMSSVAGKLGFGEAFNYKRPADIFREHAALSAHENNGERLFNLAGLANLSDAGYEALIPVQWPVMEGAGVEAEGSTRLFSDGRFVTDNQRARFVAINTRLPAQQTSDDYPMVVNTGRIRDQWHT

SEQ ID NO: 16411 - protein, 269 aa, uncultured bacterium
QPNAMGGRKWAGWPIPLPLTWINSPSPSRVADFWGTGAVADGPGYKAVDMFEAVHRGDIRVIWIMGTNPAVSLPDSARVREALARCPTVIVSDCVAHTDTTDLADILLPAAGWGEKDGTVTNSERRISRQRCFLPLPAEVKPDWWIMSSVAGKLGFGEAFNYKRPADIFREHAALSAHENNGERLFNLAGLANLSDAGYEALIPVQWPVMEGAGVEAEGSTRLFSDGRFVTDNQRARFVAINTRLPAQQTSDDYPMVVNTGRIRDQWHT

SEQ ID NO: 16412 - protein, 361 aa, Triticum aestivum
  unsure (1)..(361): unsure at all Xaa locations
MLSASPTASTLALLCPSSPSAATNLRAPFRSRFSSRVSVGPAGAGGSDPLFDDYXPIKAFLFPGXDAEAIGMGKDTLKARHAAALARVLNQVDWVKSLNLCMDVPNYXLNSIVYRPPAIXVTSPADVEVLRAREEGQSVINSVDVTCGLSLGEYTALAFAGAFSFEDGLKLVKLRGEAMQDASDAANSAMVSVIGLDSEKVQQLCDAANEDVDEKERVQIANFLCPGNYAVSGGVKGIEAVEAFAWSFKARMTVRLAGAGAFHTSFMQPTVSRLESALAATEIRSPRIPVISNVDAQPHSDPETIKKIMAQNXISPVQWETTVTTLLGRGLEKSYELGPGKVIAGIIKRINKGASIENIGA

SEQ ID NO: 16413 - protein, 273 aa, uncultured bacterium
QPNAMGGREVGGLANMLAAHMDLDNAQHRELVQEFWQSPTIADKPGLKAVDLFRDIEAGKVKAVWVMATNPVVSMPDRDFVARALEKCELVVVSDCVASNDTLKYAHVALPATGWSEKNGTVTNSERRTSRQRGLLAPAGEARHDWQIISDVAKKMGLSEGFDYRHSYEIFNEHSALSGYKNGRDKNESLRDFDISGLGQLSLRQYDNLRPVQWPLTNEKPQGSKRLFSDGKFFTASGKAQFIVIKPRLPEQSINRDFPFVLNSGRIRDQWHT

SEQ ID NO: 16414 - protein, 268 aa, uncultured bacterium
QPNAMGGREVGGLANMLTAHMTLKNSDHRALVKDFWQCGDLPDKAGLKAVDLFNAVNEGKVKAIWVMGTNPVVSMPNANLVREALQKCDFVVCSDAVKRTDTLDLAHVKLPAAGWGEKSGTVTNSERRVSRQRAIFPLHGDAKPDWWIVSEVAKRMGFGAAFDYQSPREVFVEFAALSGYQNEGERDFDISAYAELDEAEFEAMTPKQWPIKAEAPNGTPRMFVDGRYFTPNRKAKFIPTVARAPQEKVSDDYPLILNTGRIRDQWHT

SEQ ID NO: 16415 - protein, 256 aa, uncultured bacterium
QPNAMGGREVGGLATQLCAHMGFDPISRDKVSRFWQTNRLAHEPGYKAVDMFEQVASGKIKAIWIMATNPVVSLPRSSKIAEALSVCPLVIVSDCVANTDTSRYADVFLPAAGWGEKDGTVTNSERQISRQRSFLPARKEVRPDWTIICDVARKMGFQEAFDFHHPNEIFAEHAALSGFENEGERLFDISHLESITRDEYDALEPFQWPRHKPFSDQAYPNPTQRANFIPVGDPSLHRGDHEFLLNTGRIRDQWHT

SEQ ID NO: 16416 - protein, 552 aa, Burkholderia fungorum LB400
MNISSLAGKPLPPALLVNVPRLVASYYTGTPDPSLAAERVKFGTSGHRGSSLQRSFNEWHVLAITQAICRYRKLQGIDGPLFLGIDTHALSEPASASALEVLAANGVEVMIAPDGEYTPTPAISHAILTYNRGRSSGLADGIVITPSHNPPGDGGFKYNPPSGGPADETVTGWIEVAANSLLENRLDGVMRMPLANALRASTTHYHDFLRIYVADLDSVIDMSVLRGAPIRLGVDPLGGAGVHYWAAIAERYRLNLTVTDEDVDPTFRFMSADWDGQIRMDPSSPYAMQTLIGKADRFDTAFACDTDHDRHGIVTPTAGLLPPNHYLAVMIDYLCAHRPDWPAHAAIGKTMVSSRLIDHVAAKHGRALYEVPVGFKWFVGGLLDGSLGFAGEESAGATCLRLDGRAWTTDKDGMVPALLSAEIATRTGRDVAEHYRALTERLGEPRERRVQAAASASQRALLGRLSPAQFAHTELAGEKIDSVLDRAPANQAPLGGIKVSTKSGWFAARPSGTENIYKIYAESFLGDDHLARIVGEAQSMVDNALAASGGDA

SEQ ID NO: 16417 - protein, 512 aa, Escherichia coli CFT073
MKIRSQVGMVLNLDKCIGCHTCSVTCKNVWTSREGVEYAWFNNVETKPGQGFPTDWENQEKYKGGWIRKINGKLQPRMGNRAMLLGKIFANPHLPGIDDYYEPFDFDYQNLHTAPEGSKSQPIARPRSLITGERMAKIEKGPNWEDDLGGEFDKLAKDKNFDNIQKAMYSQFENTFMMYLPRLCEHCLNPACVATCPSGAIYKREEDGIVLIDQDKCRGWRMCITGCPYKKIYFNWKSGKSEKCIFCYPRIEAGQPTICSETCVGRIRYLGVLLYDADAIERAASTENEKDLYQRQLDVFLDPNDPKVIEQAIKDGIPLSVIEAAQQSPVYKMAMEWKLALPLHPEYRTLPMVWYVPPLSPIQSAADAGELGSNGILPDVESLRIPVQYLANLLTAGDTKPVLRALKRMLAMRHYKRAETVDGKVDTRALEEVGLTEAQAQEMYRYLAIANYEDRFVVPSSHRELAREAFPEKNGCGFTFGDGCHGSDTKFNLFNSRRIDAIDVTSKTEPHP

SEQ ID NO: 16418 - protein, 297 aa, Salmonella typhimurium
MMNLKAVIPVAGLGMHMLPATKAIPKEMLPIVDKPMIQYIVDEIVAAGIKEIVLVTHHSKNAVENHFDTSYELESLLEQRVKRQLLAEVQSICPPGVTIMNVRQAQPLGLGHSILCARPVVGDNPFIVVLPDIIIDDATADPLRYNLAAMVARFNETGRSQVLAKRMKGDLSEYSVIQTKEPLDNEGKVSRIVEFIEKPDQPQTLDSDLMAVGRYVLSADIWAELERTEPGAWGRIQLTDAIAELAKKQSVDAMLMTGDSYDCGKKMGYMQAFVKYGLRNLKEGAKFRKSIEQLLHE

SEQ ID NO: 16419 - protein, 152 aa, Oryza sativa (japonica cultivar-group)
MVRPPCCDKDGVKKGPWTPEEDLVLVSYVQEHGPGNWRAVPTRTGLMRCSKSCRLRWTNYLRPGIKRGNFTDQEEKLIVHLQALLGNRWAAIASYLPERTDNDIKNYWNTHLKRKLQGGDETQLSAIESWLFADADGIESGSLLDAAMDYTF

SEQ ID NO: 16420 - protein, 319 aa, ASPERGILLUS NIDULANS FGSC A4
MSPPTVKLNSGYDMPLVGFGLWKVNNDTCADQVYEAIKAGYRLFDGACDYGNEVEAGQGVARAIKEGIVKRSDLFIVSKLWNSFHDGERVEPIARKQLSDWGIDYFDLYIVHFPVSLKYVDPEVRYPPGWENAEGKVELGKATIQETWTAMESLVDKGLARSIGISNFSAQLLLDLLRYARIRPATLQIEHHPYLTQERLVTFAQREGIAVTAYSSFGPLSFLELSVKQAEGAPPLFEHPVIKDIAEKHGKTPAQVLLRWATQRGIAVIPKSNNPARLLQNLDVVGFDLEDGELKAISDLDKGLRFNDPPNYGLPITIF

SEQ ID NO: 16421 - protein, 385 aa, Ipomoea batatas
KIFVLTQFNSASLNRHISRTYFGNGVSFGDGFVEVLAATQTQGETGMKWFQGTADAVRQFTWVFEGAKNKDIDNIVILSGDQLYRMDYMDLVQNHIERNSDITLSCATVGDSRASDFGLVKIDRRGRVVQFCEKPKGTDLKAMQVDTTLLGLPPQDARLNPYIASMGVYVFKTDVLFRLLRWRYPTSNDFGSEILPAAVMEHNVQAYIFRDYWEDIGTIKSFYDANLALTEEFPKFEFYDPKIPFYTSPRFLPPTKIDNCKIKDAIISHGCFLRECTVEHSIIGERSRLDCGVELKDTLMMGADTYETESEIASLLADGKVPIGVGENTKIRNAIIDKNVRIGKDVVITNKDGVQESDRPDEGFYIRSGITIIMEKATIRYGTVI

SEQ ID NO: 16422 - protein, 402 aa, Pseudomonas putida KT2440
MENMHSAMDSLVHGSNTLFILMGAILVLAMHAGFAFLEVGTVRHKNQVNALSKILSDFAISALVYFFIGYWIAYGVNFFQPATTLAVDHGYALVKCFFLLTFAAAIPAIISGGIAERARFVPQLCATALIVAFVYPFFEGVVWNGNLGLQAWLQARFGAPFHDFAGSVVVHAMGGWLALAAVLLLGARRGRYRDGRLVAFAPSSIPFLALGSWILIIGWFGFNVMSAQTLQGVSGLVAINSLMAMVGGTLSALLAGRNDPGFLHNGPLAGLVAICAGSDLMHPVGALATGLVAGALFVWTFTAAQNRWKIDDVLGVWPLHGLCGVWGGIACGVFGQVALGGMGGVSLVSQLLGSLMGVLVALAGGFAVYGAIRALHGLRLSHEQEFQGADLSLHRIGATSQD

SEQ ID NO: 16423 - protein, 398 aa, Chloroflexus aurantiacus
MAIDQFTGPSTAAVHAGEPRQRAFDAITPPVVHSATYTFRDSAELIAFQSGDLEREEYGRYGNPTVRAVEARLAALESPTAPAAALLCASGMNALTTVMLALLPSGSHVILTDDGYRRTRQFVRTMLARLGVTHSVVAAADPAAIAAAIEPGRTRLIVTEAPTNPYLRVIDLAAVASIAREHRIKTLIDATFATPYNMRPLEYGIDLVVHSCSKYLAGHNDLLAGVIIGRPPIISALRETQGILGGICDPHTAYLLGRGLKTFALRMERHNHNGQAVAEFLARHPRVSRVHYPGLPEHPDHAVARAQMRGFGGVVSFEVVGDLQSAMAVVDRLRLPYIAPSFGGVESLVEQPALMSYYELSSEERLAVGIRDNLIRLSCGIEDVSDLIADLQQALADE

SEQ ID NO: 16424 - protein, 175 aa, Oryza sativa
MAPTVMASSATSVAPFQGLKSTAGLPVSRRSTNSGFGNVSNGGRIKFMQVWPIEGIKKFETLSYLPPLTVEDLLKQIEYLLRSKWVPCLEFSKVGFVYRENHRSPGYYDGRYWTMWKLPMFGCTDATQVLKELEEAKKAYPDAFVRIIGFDNVRQVQLISFIAYKPPGCEESGGN

SEQ ID NO: 16425 - protein, 488 aa, Arabidopsis thaliana
MSFRDDNTEEGRNDLRRPFLHTGSWYRMGSRQSSMLESSQVIRDSSISVLACVLIVALGPIQFGFTCGYSSPTQAAITKDLGLTVSEYSVFGSLSNVGAMVGAIASGQIAEYVGRKGSLMIAAIPNIIGWLSISFAKDTSFLYMGRLLEGFGVGIISYTVPVYIAEIAPQTMRGALGSVNQLSVTIGIMLAYLLGLFVPWRILAVLGVLPCTLLIPGLFFIPESPRWLAKMGLTDDFETSLQVLRGFETDITVEVNEIKRSVASSSKRSAVRFVDLKRRRYYFPLMVGIGLLALQQLGGINGVLFYSSTIFESAGVTSSNVATFGVGVVQVVATGIATWLVDKAGRRLLLMISSIGMTISLVIVAVAFYLKEFVSPDSNMYNILSMVSVVGVVAMVISCSLGMGPIPWLIMSEILPVNIKGLAGSIATLLNWFVSWLVTMTANMLLAWSSGGTFTLYALVCGFTVVFVSLWVPETKGKTLEEIQALFR

SEQ ID NO: 16426 - protein, 341 aa, Aeromonas punctata
MMTETVTNQAAWQKAPGQPLRIGVTALPHLAANEILIRNAAIAINPLDWILQDVALLPWLDYPAILGSDVSGEVAAVGGAVERFKVGDRVIGQAVGTTVNQPAQGAFQHHTIVLDHMAAPIPNNIAFADAAVLPLGLGTAASGLYGRTQLALAPPLHSPTARPEVVLVWGGSSSVGCNAIQLAVASGYRCVATASARNVGLLKELGASEVLDHSSPAIVEDVIEAMRGRSLAGTLHATGHMKDCFAVVARCEGSRRVAATLAPPDERSFGVEATHISGTSLKDDEVGPMIYREFLPQALAARTFVPAPPAKIVGQGLEMLQAALEALKAGVSAAKIVVTLP

SEQ ID NO: 16427 - protein, 392 aa, Oryza sativa
MIVTLMNLLRACWRPSSNQHARAGSDVAGRQDGLLWYKDTGQHVNGEFSMAVVQANNLLEDQCQIESGPLSFLDSGPYGTFVGVYDGHGGPETACYINDHLFHHLKRFASEQNSISADVLKKAYEATEDGFFSVVTKQWPVKPQIAAVGSCCLVGVICGGILYVANVGDSRVVLGRHVKATGEVLAVQLSAEHNVSIESVRKELQSMHPEDRHIVVLKHNVWRVKGLIQVCRSIGDAYLKRSEFNREPLYAKFRLREPFHKPILSSEPSISVQPLQPHDQFLIFASDGLWEHLTNQEAVDIVHSSPRNGSARRLIKAALQEAAKKREMRYSDLKKIDRGVRRHFHDDITVIVVFLDSSLVSRASTYRGPSVSLRGGGVNLRSNTLAPYASQM

SEQ ID NO: 16428 - protein, 241 aa, Zea mays
TACSETVKFGHVIFFWNGNRSGYFDQNLEKYEEIPSDAGIPFNVQPKMKALEIAQKARDAILSQKFDQVRVNIANGDMVGHTGDMEATIVGCKAADEAVKVHVHGLVRQALRCDHLSIFPRVFPSYRLIQSVSCRSSSTPLSKWAGVFVVTADHGNAEDMAKRDESGEPLRDKDGKVQTLTSHTLNPVPIALGGPGLAPGVRFRTDLASAGLANVAATVMNLHGFEAPDHYEPTLIQVVDE

SEQ ID NO: 16429 - protein, 950 aa, Xanthomonas axonopodis pv. citri str. 306
MQRHHGFGHPLPMGVRNGSESDKLSQVAAILRNTTGHDFHGYKRATFLRRVQRRMQVAQVETLEQYLEILRNRFDEPLQLFNDLLIGVTKFFRDRREFEFLEEQVIPRLFQGKHTGDSLRIWVLGCSTGEEAYSLAMLLREHAETLDTAPRIQIFASDIDGRALATARVGRYASSIVGEVAPERLRRWFVKEGDTYVVSKELRELCVFSQHSIVKDPPFSRLDMVSCRNLLIYLDAELQNRVIPIFHFAIRPGGYLFLGNAENVSRHAQLFTPVERSFRVFQRIDTDSNVHATFPTMQLAGAGRAPAPPIQQRSPSNALVRAGERIADRYAPAYAVLDEQFEVLHFSSQAGRFIRPGGGTPSLNLLNLIHRDLRLDLRSALSRAERDRSPVHVKGIQVHEDAATWAVNLFVEPTADSDVPRGYVVLFQEVEAREPVELPAPDDSVHDDGHVQVLENELRITRERLQSMIEELESTNEELKSSNEEVTTVNGELAHRVQELAHANSDLKNLLESTQIATVFLDNELRVTNFTPAVTDILPLVESDIQRPISHIKLHVDYDQLQDDARRVIRTLAVLDREIENPTTHARYMVRVLPYRTVDNFIGGAVLTFMDVTPLTRAERALRSSEQRLRTLMEGIPQLVWRSLDGGRWTWSSPQWSSYTGQDDAESLELGWLQAVHPDDREPTMNAWLGSASSGGLDIEHRLFNAAEQGYRWFHTRSAPVRDERGQVLEWLGTCTESDNLRRLQEEQRVLVAELQHRTRNLITVVQSVAKQTVQTTQSMPEFAVKFDDRLAALSRVQGLLSQSDNMPTTIGALLRMELEALGAEPDQKRIVAEGPNVALRKSTVQTLALALHELATNALKHGALAVDTGTLSIRWEVVSGSDTPARLKLLWIEEGASTQLRDDRDEVSGFGRRLIEKALPYSHGAQTRYELSDTRLECEIQLPLNPVNG

SEQ ID NO: 16430 - protein, 258 aa, uncultured bacterium
QPNAMGGREVGGLASMLAAHMGFSDPECDAGQSFWKSPTIARKPGRKAVDMFRDVHDGRIKAIWVMATNPAVSMPDADYVREALNRCDFVVVSDIIAETDTTAFADVKLPALAWGEKDGTVTNSEQVISRQRPLFAPPGKAKADWWIVREVARRMGFGDAFSFDGPAAVFREYAEQTGFRNDGQRKLDISEWAGTSDSEYDDWVPKAWGGASPFAEGKFTSADGKARLAAVAPSAPAPVDRAFPLRLNTGRYRDQWHT

SEQ ID NO: 16431 - protein, 268 aa, uncultured bacterium
QPNAMGGREVGGLANMLAAHMDYSVENTATVSEFWNTKNLSQTPGLNAVDLFEAVADGRIKAIWIMGTNPVVSMPNADRVRAALQSCDTVIVSDCMADTDTTATANILLPATGWGEKSGTVTNSERRISRQRVLIHPVGQAKSDWWIISQVGQAMGFNDAFDYHSPRDIFIEHAQLSAFKNTGNRLFNISTLSHLSEQQYNQLEPIQWPVTPLKPKGTARLFEDRLFFTPSKKANFVVISPQLPQLHTPNNDFPLTLNTGRIRDQWHT

SEQ ID NO: 16432 - protein, 1129 aa, Petroselinum crispum
MSSSRPANSSSNPGRANQNARVVLTTLDAKIHADFEESGNSFDYSSSVRVTSAVGENSSIQSNKLTTAYLHHIQKGKLIQPVGCLLAVDEKSFKIMAYSENAPEMLTMVSHAVPSVGEHPVLGIGTDVRTIFTAPSAAALQKAVGFTDINLLNPILVHCKTSGKPFYAIAHRVTGSLIIDFEPVKPYEVPMTAAGALQSYKLASKAVNRLQALPGGSMERLCDTMVQEVFELTGYDRVMAYKFHDDDHGEVTAEVTKPGLEPYFGLHYPATDVPQAARFLFLKNKVRMICDCRANSAPVLQDEKLPFELTLCGSTLRAPHSCHLQYMENMNSIASLVMAVVINDSDEVVESSDRNSVKSKKLWGLVVCHNTSPRFVPFPLRYACEFLAQVFAIHVSKELELENQIVEKNILRTQTLLCDLLMRDAPLGIVSQSPNMMDLVKCDGAALLYKNKVYRLGATPSDYQLRDIVSWLTEYHTDSTGLSTDSLYDAGYPGALALGDVVCGMAVVKITSHDMLFWFRSHAAGHIRWGGAKAEPDENHDGRKMHPRSSFKAFLEVVKTRSTTWKEFEMDAIHSLQLILRKALSVEKAVAAQGDEIRSNTDVIHTKLNDLKIEGIQELEAVTSEMVRLIETATVPIFAVDADEIVNGWNTKIAELTGLPVDQAMGKHLLTLVEDSSVGTVVFLLALALQGKEEQGIPFEFKTYGSREDSVPITVVVNACATRGLHDNVVGVCFVAQDVTSQKTIMDKFTRIQGDYKAIVQNPNPLIPPIFGTDEFGWCSEWNQAMTELSGWRREDVMNKMLLGEIFGIQTSCCHLKSKEAFVNLGVVLNNALTGQISEKICFSFFATDGKYVECLLCASKKLHGEGTVTGIFCFLQLASQELQQALHIQRLTEQTAMKRLKTLSYLRRQAKNPLCGINFVREKLEEIGMGEEQTKLFRTSVHCQRHVNKILDDTDLDSIIDGYLDLEMSEFRLHDVYVASRSQVSMRSNGKAIQVVDNFSEEMMSETLYGDSLRLQKVLADFMSVCVNLTPVGGHLGISVTLTEDNLGQSVQLVHLEFRITHTGAGVPEEAVSQMFGSDSETSEEGISLLISRKLVKLMNGDVHYLREAGKSTFIITVELAAASKRES

SEQ ID NO: 16433 - protein, 271 aa, uncultured bacterium
QPNAMGGREVGGLANTLAAHMDYDSPGARSRVADFWGTGAVADGPGYKAVDMFEAVHRGDIRVIWIMGTNPAVSLPDSARVREALARCPTVIVSDCVAHTDTTDLADILLPAAGWGEKDGTVTNSERRISRQRCFLPLPAEVKPDWWIMSSVAGKLGFGEAFNYKRPADIFREHAALSAHENNGERLFNLPGLANLSDASYEALIPVQWPVMEGAGVEAEGSTRLFSDGRFVTDNQRARFVAINTRLPAQQTSDDYPMVVNTGRIRDKWHT

SEQ ID NO: 16434 - protein, 241 aa, Staphylococcus epidermidis ATCC 12228
MAENQAKKEQVHTVFQNISQKYDRLNNIISFEQHKVWRKHVMSTMNVQKGSKALDVCCGTADWTIALSEAVGSKGQVTGLDFSENMLEVGKQKTASLENIQLVHGDAMNLPFDDNSFDYVTIGFGLRNVPDYLSALKEMHRVLKPGGMVVCLETSQPTLPLFKQIYSLYFKFVMPIFGKMFAKSKEEYEWLQQSTFNFPDKQTLKGLFFEAGFNDIIVRSFTGGVAAMHLGYKENSSSKGD

SEQ ID NO: 16435 - protein, 270 aa, uncultured bacterium
QPNAMGGRKWAGWPIPWPLTWNDSPGARSRVADFWGTGAVADGPGYKAVDMFEAVHRGDIRVIWIMGTNPAVSLPDSARVREALARCPTVIVSDCVAHTDTTDLADILLPAAGWGEKDGTVTNSERRISRQRCFLPLPAEVKPDWWIMSSVAGKLGFGEAFNYKRPADIFREHAALSAHENNGERLFNLAGLANLSDAGYEALIPVQWPVMEGAGVEAEGSTRLFSDGRFVTDNQRARFVAINTRLPAQQTSDDYPMVVNTGRIRDQWHT

SEQ ID NO: 16436 - protein, 206 aa, uncultured bacterium
  unsure (1)..(206): unsure at all Xaa locations
QPNAMGGREVGGLANQFAARLNIEDPVHRDRVQRFWNSGPLPERAGLSAVDMFDAIADGRIKAVWIMATNPVVSLPNVDKVKHALQNCELVVVSDCVAHSDTLDVAHVKLPALGWSEKDGTVTNSERFISRXRSLLPPSGEAKPDWWIISEVAKRMGYIDAFSYDHPYQIFAEHAALSGFENGGSRDFDISMFEDIDEKSYDALKP

SEQ ID NO: 16437 - protein, 160 aa, Pseudomonas fluorescens PfO-1
MSAFHDLKLTALDGQELPLAPFKGQVVLVVNVASKCGLTPQYAALENLYQQYKGKGFSVLGLPCNQFAGQEPGSEQEIQEFCSLNYGVSFPLSKKLEVNGHDRHQLYRLLAGEGAEFPGDITWNFEKFLLGKDGRVLARFSPRTAPDDPSVITAIEKALS

SEQ ID NO: 16438 - protein, 233 aa, Triticum aestivum
  unsure (1)..(233): unsure at all Xaa locations
GPRVCAFLVEPIQGEAGIIVPEAGYLMKAFNLCKKHNVLFIADEIQTGLCRTGKLLAVDYDGVKPDILILGKALSGGMYPVSAVLANKPVMECIQPGTHGSTYGGNPLGCAVAIAALKVLKEEKLAENAYNLGVKFRQALIDIKSPLITTVRGRGLLNAIVIDDTKMDKTAWHVCLMMKKYGLLAKPTHQNIIRLAPPLCITEEQXMDGVKIIDKVLKEIVSMNVKDIPGHEL

SEQ ID NO: 16439 - protein, 819 aa, Streptomyces coelicolor A3(2)
MQNTGTRTPATTPTHCPYCALQCGMNLTPVEGGTVEVSERTDFPVNRGALCGKGRTAAAVLAPGARLTSPLVRSGDGALVPAGWDEALDRIAGNLERTRARYGADALGVFGGGGLTNEKAYALGKFARVVLGTSQIDYNGRFCMSSAAAAGTRAFGLDRGLPFPLEDVPRTGCVILVGSNPAETMPPSLRYFTELRENGGTLIVVDPRRTKTAEQADLHLAPRPGTDLALALGMLHLVVAEGRVDEAYVEERTSGWEEARAAAMAHWPEYVERITGVSVPELREAVRLFCAPEAAMVLTARGPEQQAKGTDTVGAWINLCLATGRAGRPLSGYGCLTGQGNGQGGREHGQKADQLPGYRKLTDPAARRHVAEVWGVDPDALPGPGRSAYELLDALGTDVRSLLVMGSNPVVSAPRAAHVEGRLRSLDFLAVCDVVLSETAELADVVLPVTQWAEETGTTTSLEGRVLLRRRAITPPDGVRGDLEVLHGLAGRLGVQKGFPTDPEEVFEELRRASAGGPADYSGIDYRRLAEENGVFWPCPAQPAADDTHTADPGTGTDTRTRTGTGSGSGSGSGRDMSTETGTGSGMYTDTGTASGMSTDTGSGSTDAGIGRDPRAATGTGSGMSTDTGRVTRTATGTGSGMSTDTGSDSDSDSSDAGAGLRAAPHPGTPRLFLDRFATDDGRARFAPVTHRPSAEEPDDEYPVLLTTGRVVSQYQSGAQTRRVAELNAAAPGPFVELHPRLAARLGAADGDPLAVVSRRGRAVAPARITTGIRPDTVFMPFHWPGEGRANTLTNPALDPTSRMPEFKVCAVRVETVTS

SEQ ID NO: 16440 - protein, 213 aa, Zea mays
MGSSRPAGGCPYPPNWFAKHSSLVPMETTLPMVRGNGRLLPLSLLLLAAADFTTVHGQGQQPEGPYYSRSFNPSMAIVIVVLIAAFFFLGFFSVYVRHCYGDGSSGYSASPAPGGAAARSRRQQRGLDSAVLESFPTMAYADVKAHKAGKGALECAVCLSEFDDDETLRLLPKCSHVFHPDCIDTWLASHVTCPVCREASRLGIAVDAEERPD

SEQ ID NO: 16441 - protein, 341 aa, Sporothrix schenckii
MDNYQKLEKVGEGTYGVVYKARDLTAGGRIVALKKIRLEAEDEGVPSTAIREISLLKEMRDPNIVRLYNIVHAEGHKLYLVFEFLDLDLKKYMDSLPVSDGGRGKALPEGTGTRLHTLGLGDDIIKKFMSQLCAGIRYCHSHRILHRDLKPQNLLINKEGNLKLADFGLARAFGVPLRTYTHEVVTLWYRAPEILLGGHQYSTGVDMWSVGCIFAEMAMRKPLFPGDSEIDEIFKIFRLLGTPTEDVWPGVTTYPDFKASFPRWVQDTETPICPTLDPMGQELLELMLVYDPASRLSAKQACNHPYFDDLEKALPGTAAAAARQHTTTAAAGGAYNGSGYH

SEQ ID NO: 16442 - protein, 400 aa, Pseudomonas sp. ADP
MAKMRKVTTVRGYGAFVGANHLEVEETTGTGQEKTGTKKVIAFKRAIIAAGSQAVRLPFMPNDPRVVDSTGALALSGVPKRMLILGGGIIGLEMGTVYSTLGARLDVVEMMDGLMQGADRDLVKIWQKMNAKRFDNIMLKTKTVGAEATPEGIKVTFAPAEEGGTTPEPQVYDLVLQAVGRTPNGKKIAAEKAGVSVTDRGFINVDIQMRTNVPHIFAIGDIVGQPMLAHKAVHEAHVAAEVIAGELQGNKELASAAFNARVIPSVAYTDPEVAWVGLTEDQAKAQGIKVKKGLFPWTASGRAIANGRDEGFTKLLFDDSPEAGSGDGHAGRGHGKILGGGMVGTHAGDMIGEIALAIEMGADAVDIGKTIHPHPTLGESIGMAAEVAHGSCTDVPPARK

SEQ ID NO: 16443 - protein, 324 aa, Zea mays
MVRPPCCDKEGVKKGPWTPEEDLVLVSYIQDHGPGNWRAVPTRTGLMRCSKSCRLRWTNYLRPGIRRGNFTEQEEKLIVHLQALLGNRWAAIASYLPERTDNDVKNYWNTHLKRKLQAGGGDGDGDGAAKPPAHRPPPSNSKGQWERRLQTDINLARRALREALTPLGDLKPQPQPQRDGAGVGIVGGDSPAASSLSSQCSPPPAPAALGTYVLTADNVSRMLDGWAGLNGKRRGGAPGTPGGAETASTGSSSEVSYGGGTAVVAPAAGGPVFEYETKPPAAPFQLMMPLSAIESWLFDDDTHFHRPVQSASLLDAAPMDYYLL

SEQ ID NO: 16444 - protein, 319 aa, Glycine max
  unsure (1)..(319): unsure at all Xaa locations
MVPQSVITQVSDSSGVNAISNVSSGHGFYDWLFECHGFWHNATLNIPSFLFVFYLALQARHSLLKLSLARSYIIISYNLCLWLITLLNLAWCFLQAWECTSGRKLTWNLLSLFTTSGMLFLEVSLLAFLLQGNNAGGLDAMKRTFGISTLVVGLDILLKAIYLFXIGDNKIDHKHRIPLFVDSNEHTHGKWNYXWYVHKLLLXAVYGFIMFIYHSGWKETLPGELIDGIITRSKIAFYKYVAIMFIFNAIATLACGLAGTGAAFAFWLYRVTVVFYHAFYLPFLYTTFLADFFQEENFHLENVYYSEMKDAGFFDTDWE

SEQ ID NO: 16445 - protein, 183 aa, Vicia faba
CDASGTMGGACGYGNLYSQGYGTNTAALSTALFNNGLSCGSCYEMRCNDDPRWCKPGSIIVTATNFCPPNPAQANNDGGWCNPPLQHFDMAEPAFLQIAEYRAGIVPVSFRRVPCFKKGGVRFTINGHSYFDLVLVTNVGGAGDVHSISIKGSRTSWQPMSRNWGQNWQSNSYLNGQSLLCGW

SEQ ID NO: 16446 - protein, 289 aa, Vicia faba
HHSPLPQSPQHGYCCCRRSSLFSSSINTVKSSRSSNRMFASVVIPQSSVEPLCIGTTISSQKLWMPRFYVAVAQEEAVVAVDDEEKVVVEEEEKENEEGQGEKENGEEIVAEEDTRTKLYFGNLPYSVDSAKLAGLIEEYGSAELVEVLYDRDTGKSRGFAFATMTCVEDCKAVIENLDGKEFMGRTLRVNFSDKPKAKESLYPETEYKLFIGNLSWKVTSEILTEAFQEHGTVVGARVIYDGETGNSRGYGFVSYANKSEMEAALTIMNDVELEGRALRVSLAQGKRS

SEQ ID NO: 16447 - protein, 189 aa, Glycine max
  unsure (1)..(189): unsure at all Xaa locations
TRPPRFPLNPSALLLAKKQATNMSVGALKEGDLXGKRAFVRVDLNXPLADNLNIXDDTRLRAAVPTIXFLXTGHGATVILSSPLXRPKRGTPNYSEKPLVPMLAQLLQIEGTTANDSIAEETEKXVAQLPKRRAWLLENVRLYKEEEKIDPVFAKKEAALAELYVNDAFSTDHTAHALTEGVAKHLKPS

SEQ ID NO: 16448 - protein, 398 aa, Pyrococcus furiosus DSM 3638
MIRASKRALSVEYAIRDVVLPARELEKKGIKVIRLNIGDPVKFDFQPPEHMKEAYCKAIKEGHNYYGDSEGLPELRKAIVEREKRKNGVDITPDDVRVTAAVTEALQLIFGALLDPGDEILVPGPSYPPYTGLVKFYGGKPVEYRTIEEEDWQPDIDDIRKKITDRTKAIAVINPNNPTGALYDKKTLEEILNIAGEYEIPVISDEIYDLMTYEGEHISPGSLTKDVPVIVMNGLSKVYFATGWRLGYMYFVDPENKLSEVREAIDRLARIRLCPNTPAQFAAIAGLTGPMDYLKEYMKKLKERRDYIYKRLNEIPGISTTKPQGAFYIFPKIEVGPWKNDKEFVLDVLHNAHVLFVHGSGFGEYGAGHFRAVFLPPIEILEEAMDRFEKFMKERLKE

SEQ ID NO: 16449 - protein, 171 aa, Methanothermobacter thermautotrophicus str. Delta H
MTFKDDTMKRKYSLVAVGGTFDRFHKGHRRLLDEAFRVGETVMIGVTSDEFAAAKGEGIEPCSVRMKNLEEYLRDKDADYHVMRLDDPYGTTVTDEAFEAIVVSRETEPVAREINAIRRNRGFRELDIITIDMVNADDGIPISSTRIRRGEIDPMGHIIKRIRGALRRRRE

SEQ ID NO: 16450 - protein, 177 aa, Nostoc punctiforme PCC 73102
MAILDSKGRLFGKINLLDLGAALVILLVIFGIFVFPGTSGSVAQVGAKTIPIEVDLVVRGLNVRDPEQLFNNGLKKGGKTNVIIRNQPYGQIEIKSIQQLPRTVNVFQPDGSVKELPDPKTNNFSTDLLLTLDGKAQVTDNGPVLGNSKVKIGMPFELEGFNYNFNATVIDIRLKDK

SEQ ID NO: 16451 - protein, 215 aa, Heliobacillus mobilis
MRFFLDSANIDEIREANALGVISGVTTNPSLIAKEGRNFRQVVEEIVAIVDGPISAEVISTDAEGMVAEARELAQIHKNIVIKIPMCAEGLKATSRLSREKIRTNVTLIFSANQGLLAANAGATFVSPFVGRLDDVGHDGLDVIREMVEIFDIHGLATEIIAASVRHPLHVTAAARAGAPIATIPYKVLMQMVKHPLTDKGIEQFLKDWETVKNK

SEQ ID NO: 16452 - protein, 206 aa, uncultured bacterium
  unsure (1)..(206): unsure at all Xaa locations
QPNAMGGREVGGLANTLAAHMDYDSPSARDRVARFWETEAVADGPGMKAVDLFDAVERGDIKVLWIMATNPAVSLPETHRIRRALDQCPTVIVSDCVRNTDTASHADILLPAAGXGEKDGTVTNSERCISRQRRFLPLPGGARPDWWIVSAVARALGHQTGFDYECPADIFREHARLSGFENAGQRFFNTSGLADLTDEQYEAMEP

SEQ ID NO: 16453 - protein, 206 aa, uncultured bacterium
QPNAMGGREVGGLANQLAAHMDFASEESIDRAKRFWKARNMASKDGLKAVDLFEAIEDGKVKAVWIMGTNPAVSLPNADQVVRALKKCPLVVVSDCMAQTDTVTLADICLPATGWSEKNGTVTNSERRISRQRSLLPPSGEAKPDWWIISEVAKRMGYIDAFSYDHPYQIFAEHAALSGFENGGSRDFDISMFEDIDEKSYDALKP

SEQ ID NO: 16454 - protein, 1135 aa, Sorghum bicolor
MSSPLNNRGTCSRSSSARSRHSARVVAQTPVDAQLHAEFESSQRNFDYSSSVSAAIRPSVSTSTVSTYHQTMQRGLYIQPFGCLLAVHPDTFTLLAYSENAPEMLDLTPHAVPTIDQRDALAVGADVRTLFRSQSSVALHKAATFGEVNLLNPILVHARTSRKPFYAILHRIDVGLVIDLEPVNPVDVPATAAGALKSYKLAAKAISRLQSLPSGNLSLLCDVLVREVSELTGYDRVMAYKFHEDEHGEVISECRRSDLEPYLGLHYPATDIPQASRFLFMKNKVRMICDCSATLVKIIQDDSLAQPLSLCGSTLRASHGCHAQYMANMGSVASLVMSVTISNDEEEDVDTGSDQQPKGRKLWGLVVCHHTSPRFVPFPLRYACEFLLQVFGIQLNKEVELAAQAKERHILRTQTLLCDMLLRDAPVGIFTQSPNVMDLVKCDGAALYYQNQLLLLGSTPSESEIKSIATWLQENHDGSTGLSTDSLVEAGYPGAAALREVVCGMAAIKISSKDFIFWFRSHTTKEIKWGGAKHEPVDADDNGRKMHPRSSFKAFLEVVKWRSVPWEDVEMDAIHSLQLILRGSLQDEDANRNNVRSIVKAPPDDTKKIQGLLELRTVTNEMVRLIETATAPVLAVDIAGNINGWNNKAAELTGLPVMEAIGRPLIDLVVVDSIEVVKRILDSALQGIEEQNLEIKLKAFHEQECNGPIILMVNSCCSRDLSEKVIGVCFVGQDLTTQKMIMDKYTRIQGDYVAIVKNPSELIPPIFMINDLGSCLEWNKAMQKITGIQREDVIDKLLIGEVFTLHDYGCRVKDHATLTKLSILMNAVISGQDPEKLLFGFFDTDGKYIESLLTVNKRINAEGKITGAICFLHVASPELQHALQVQKMSEQAATNSFKELTYIHQELRNPLNGMQFTCNLLEPSELTEEQRKLLSSNILCQDQLKKILHDTDLESIEQCYMEMNTVEFNLEEALNTVLMQGIPLGKEKRISIERDWPVEISRMYLYGDNLRLQQVLADYLACALQFTQPAEGPIVLQVIPKKENIGSGMQIAHLEFRIVHPAPGVPEALIQEMFRHNPEVSREGLGLYICQKLVKTMSGTVQYLREADTSSFIILIEFPVAQLSSKRSKPSTSKF

SEQ ID NO: 16455 - protein, 205 aa, uncultured bacterium
QPNAMGGREVGGLANMLAAHMDIDNSDHRERVQRFWQSPTIAEKPGLKAVDLFQQIKQGKVKAVWVMATNPVVSMPDKDDVAEALQSCELVVVSDCVASNDTLAYADVCLPASGWSEKNGTVTNSERRISRQRGLLPPAGEARHDWQIICDVAKHIGYAGFDYQTSCEIFNEHIALSGFENQGRRDFDLSGLGHLSLSQYDNLTP

SEQ ID NO: 16456 - protein, 205 aa, uncultured bacterium
PNAMGGREVGALANLLAAHMGFSCSEDIDRVRRFWEAPKIATKPGLAAVQMFDALADGQLKAIWVMATNPAVSLPNSDHVRRALASAELSIVSDCYLDTDTVGLSQVHLPALPWGEKDGTVTNSERRISRQRAFLSPLGDARPDWWIICRVAKALGFEHGFDFSHQAEIFDEHARLSAFENDGRRHLDLGGLVGLGRTAYDDLGP

SEQ ID NO: 16457 - protein, 205 aa, uncultured bacterium
  unsure (1)..(205): unsure at all Xaa locations
QPNAMGGREVGGLANMLAAHMDIDNSDHRELVQRFWQSPTIAEKPGLKAVDLFQKIKQGKVKAVWIMATNPVVSMPDKDAVAEALQSCELVVVSDCVAXNDTLAYADVCLPASGWSEKNGTVTNSERRISRQRGLLPPAGEARHDWQIICDVAKHMGYAGFDYQTSCEIFNEHIALSGFENQGSRDFDLSGLGHLSLSQYDNLTP

SEQ ID NO: 16458 - protein, 200 aa, Oryza sativa
MSGAAAAAARALPKAVTFVTGNAKKLEEVRAILGSSIPFQSLKLDLFIILLNLAVPELQGEPEDISKEKARMAASQVNGPVLVEDTCLCFNALKGLPGLNNLLLAYEDKSAFAMCIFSLALGPGEEPMTFVGKTAGKIVPARGPADFGWDPVFQPDGFDQTYAEMPKSVKNQISHRGKALALVKEHFAAANYKVQNDGSA

SEQ ID NO: 16459 - protein, 341 aa, Ralstonia eutropha JMP134
MVGWSTDFTADAIVPFTVMDEPLAIYRKTDGSLAALEDRCCHRLAPLSVGRKEGDELRCMYHGLKFAADGRCTEVPGQDRISPRVCVRAYPIVEKHGAAWVWMGEAEKADEALVPPIIGPDNAEWAMQCSTFDMDVNAELISDNLLDLSHAPFVHEATFGASDPVALKMMKESETKRGVTQLERGVLADRWQLGRQSNPYFGARPCDDHVVSLFLVPGVFILTITSYEPGVLERSEGGDVTETPIFKRCTCQMITPISKNKSRFFFNFGPWAAAADLKQHCFGIADAAFQEDKRIIEAQQDMIHRSPGRKFVLLPMDQPVVRYNEIYARLLAVEKPVAEPA

SEQ ID NO: 16460 - protein, 429 aa, Oryza sativa
KLSLVHRRSTLGPLIVSEALGPNNLPLKIRLIDITVPAGIDHQIAQLGPELASTLVIVISKSGGTPETRNGLLEVQKAFRDAGLDFSKQGVAVTQENSLLDNTARIEGWLARFPMFDWVGGRTSEMSAVGLLPAALQGIDIKEMLVGAALMDEETRNTVVKENPAALLALCWYWASEGIGNKDMVVLPYKDSLLLLSRYLQQLVMESLGKEFDLDGNRVNLLPIVYGNKGSTDQHAYIQQLREGVHNFFVTFIEVLRDRPPGHDWELEPGVTCGDYLFGMLQGTRSALYSNDRESISVTVQEVTPRAVGALVALYERAVGIYASLVNINAYHQPGVEAGKKAAGEVLALQKRVLTVLNEASCKDPAEPLTLDQIAERCHCPEDIEMIYKIIQHMAANDRALIAEGSCGSPRSIKVYLGECNVDEDMLAA

SEQ ID NO: 16461 - protein, 416 aa, Oryza sativa (japonica cultivar-group)
MDEGLVSVDKFSGGSQAYFLTHLHQDHTRGLGAAGGWRHGPLYCSPVTARLLPTRFPGVDASLLRPLAPGASASLSLSSPSTGRAVSVVVTAIPALHCPGSLMYLFRGDLGCMLYTGDFRWELRCKRARAAKKALLDALAGDTVDVLYLDNTYCHPSLSFPPRPIVAEQIVNIIRAHPDHEIIIGVDTLGKEDLLLHISRALQTKVIWVWPQRLQTIHLLGIDDNQEIFTTQTSLTRIRAVPRYSLTIESLDALNTVCPTIGIMPSGIPWLWKNSKGKAKSGVKSPAKSIRCKGLDEGAIEMDYDPLSPPKLFEKDSYSLPYSEHACFAELENFMLIVRPSTVIGIVSTSFCYVNPRHHFSHLCADNVYSDKTPEKNKGKDISVLTPKKRQNGSKTPKDRKIRIVYGSRVTMKRKE

SEQ ID NO: 16462 - protein, 268 aa, Triticum aestivum
  unsure (1)..(268): unsure at all Xaa locations
MAATPLDSAWEWLITNFSEFQLATVVTFVLHDGVFFLSGFPSLLFXRFGLFAXYKIQEGRATLLNYQXNRCVMRLILHLVCVNFPLMIFSYPAFKFMGTXSSLPLPHXTVIVSQVLFYFILEDFIFYWGHRALHTKWLYKHVHSVHHEYATPFGLTSEYAHPAEILFLGFATVVGPALTGPHLFTLWLWMVLRVLETVEAHSGYHFPWSPSNFLPLYGGSDFHDYHHRVLYTKSGNYASTFVYMDWLFGTDKGYRKTKAIEGEEGKHL

SEQ ID NO: 16463 - protein, 214 aa, Caulobacter crescentus CB15
MTGGGPTMANWYERNILPKLLCCACGAPAIQAQRRRVAPRAEGEVLELGIGGGLNLAYYDPTKAKRVTGVDPSPELRAIAEQAPRPDGLVVDIQAGEAERLPFADASFDTVLCTFTLCSVRSPKAVLAEARRVLRPDGRFLFCEHGLSPDAEVSRWQRRLEPLWKRMAGGCHLTRPVASAVAAAGFALDEVEQRYMPKTPRPLGWCEWGVARLA

SEQ ID NO: 16464 - protein, 400 aa, Pseudomonas sp. ADP
MAKMRKVTTVRGYGAFVGANHLEVEETTGTGQEKTGTKKVIAFKRAIIAAGSQAVRLPFMPNDPRVVDSTGALALSGVPKRMLILGGGIIGLEMGTVYSTLGARLDVVEMMDGLMQGADRDLVKIWQKMNAKRFDNIMLKTKTVGAEATPEGIKVTFAPAEEGGTTPEPQVYDLVLQAVGRTPNGKKIAAEKAGVSVTDRGFINVDIQMRTNVPHIFAIGDIVGQPMLAHKAVHEAHVAAEVIAGELQGNKELASAAFNARVIPSVAYTDPEVAWVGLTEDQAKAQGIKVKKGLFPWTASGRAIANGRVEGFTKLLFDDSPEAGSGDGHAGRGHGKILGGGMVGTHAGDMIGEIALAIEMGADAVDIGKTIHPHPTLGESIGMAAEVAHGSCTDVPPARK

SEQ ID NO: 16465 - protein, 367 aa, ASPERGILLUS NIDULANS FGSC A4
MAADIPKTMKALLYDKPEVHKIAEIPVPTLRENDVLVGVKSRRSQYAWLTQLVIQIKVKACGVCGTDLHIHEGEFIAQFPLVPGHETVGVVAAVGPKVKGFEIGDRVVADNSELCGECFYCRRGDELFCENFQAHGVTMNGGFAEYCAYPAGRVFKIQNLSDVDATLLEPASCAAHGLDKIAPKMGSRVLLFGAGPTGLILAQLLRLNGGCHVVVCAPEGLKMELAKSLGAGDEYIGLSRQDPSAQFNKLKADNPYGFDIVVEATGNVKILEDSINYVRRGGKLVVYGVYANKDRVSWPPSKIFGDEIQIIGSFSEVYKFPAAIDYLDSGKVKVSGIVNKVYKIEQWEECLQSMRNKSAIKAAIVFE

SEQ ID NO: 16466 - protein, 88 aa, Glycine max
MRIEDDAVKKAMIVDAGTRHISHNVRSTEIESQHIEDCQAVMRILLRKFMGDEVQSGKCAKGICKKPAVEFGELVLCRSNFDIHTAAL

SEQ ID NO: 16467 - protein, 216 aa, Pseudomonas sp. ADP
MPSKNLHRNWVVIPHVTNHDDADITDLEAFRVQFNKENEKSGVKVTMLAFMIKAAVAALKKFPEFNSSLDGDQLVMKNYFHIGFAADTPNGLVVPVIKDADQKGIVQISKEMGELAAKAREGKLAPADMQGGCFSISSLGGIGGRYFTPIINAPEVAIMGVCKSSIEPKWDGKQFAPRLMLPLSLSWDHRVIDGAAAARFNVYFASLLADFRRIVM

SEQ ID NO: 16468 - protein, 616 aa, Pirellula sp. 1
MTSGSKPVSSPSMTVDEALAAIDQACQEKKLTAGAVENIRSWLTEDRYRDYRDQTIQHIADGMWQKLDDVFWTIIPFGTGGRRGRMYEIGSNAINDRTIGESAQGLADYVVQYHGGAKQLSCAIAYDTRHKSRHFTELCAGIMVAAGFKVYLLDDYRATPQLSFAVRHLNCDCGIMVTASHNPPSDNAVKVYWSTGGQVLPPHDKAIIDGVMSCQEIRATPFAEAMADGRIEVVTDQIDAAFIDAASQCAFEGSRDVKVLYSPLHGVGEEAVVPLMKRDGFTQLDVYEGHREKSGDFPNVPGHVSNPENAAVFEAPIETARAGGYDLVLATDPDCDRLGVAAPLTTDPSGEWGTFTGNQIAALLAAYVLEQTVKSGKLTERSYVIKTLVTTELVRRIAESHGARCVGDLLVGYKYIAEAMDREGPEDFVYGCEESHGYLVGTYARDKDGAVACMLMGELAAKLKAEGKSMHEYMAGLYSKHGLHRENLINVFMEGSEGMAAMQGLMKAFRAEPPKSLGGIAVSQVRDYGSATILNVAEGSTSPLEGPSGNLVIMDLEMDGNYVAVRPSGTEPKVKFYVFTRLEAAESQDASAADIKLSDRLRAIEEDVRDFARLHS

SEQ ID NO: 16469 - protein, 420 aa, Chloroflexus aurantiacus
MTHPTIRIGVLTSGGDAPGMNAAVRAVVRTGISRGCEVFAIYEGYQGLIEGGKLIRRMDWSSVGGIIQRGGTIIGTARSAAFRTREGRRRAAANLLAHGIDRLVVIGGDGSLTGADLFRREWPELLAELVAAGEFSSEQAAAHPNLLIAGIVGSIDNDFCGTDMTIGADTALHRITEAIDAISSTAASHQRTFVIEVMGRNCGYLALMGAIAGGADWAFIPEMPPQMDDWEQHMCDVLRIGREQGRRDSIVVVAEGACDRDGKPITASYVKKILEERLGEDTRVTILGHVQRGGAPSAFDRWMSSLLGATAVEELLEADPNAEPKLIGLRENRVVRLPLMTCVRDTHQVAEAIAQRDYERALAMRGNSLVEAYRTLGTLIQSQHSDPRPITARASLRKSCNSGGPAPENEYAVRAAGGSA

SEQ ID NO: 16470 - protein, 418 aa, Pseudomonas sp. ADP
MLALRTVTYCTENEETPPWPKCARSPPFAATVPLSAPTTSKWKKPPARARRRRAPRRSSPSSAPSSPLAARPCACRSCPTTQRVVDSTGALALSGVPKRMLILGGGIIGLEMGTVYSTLGARLDVVEMMDGLMQGADRDLVKIWQKMNAKRFDNIMLKTKTVGAEATPEGIKVTFAPAEEGGTTPEPQVYDLVLQAVGRTPNGKKIAAEKAGVSVTDRGFINVDIQMRTNVPHIFGIGDIVGQPMLAHKAVHEAHVAAEVIAGELQGNKELASAAFNARVIPSVAYTDPEVAWVGLTEDQAKAQGIKVKKGLFPWTASGRAIANGRDEGFTKLLFDDSPEAGSGDGHAGRGHGKILGGGMVGTHAGDMIGEIALAIEMGADAVDIGKTIHPHPTLGESIGMAAEVAHGSCTDVPPARK

SEQ ID NO: 16471 - protein, 384 aa, Arabidopsis thaliana
MVAEAEVVFQQSLPAVLEIELFDGVSSAVKSPVSSPKLGFTQSTASVSGSLTTSPVQADIFPEGDCDPSVLDYIPTIRSGSFADIGPKRNMEDEHIRIDDLSSQVGSLFELPKPSAFYAVFDGHGGPEAAAYVRENAIRFFFEDEQFPQTSEVSSVYVEEVETSLRNAFLQADLALAEDCSISDSCGTTALTALICGRLLMVANAGDCRAVLCRKGRAIDMSEDHKPINLLERRRVEESGGFITNDGYLNEVLAVTRALGDWDLKLPHGSQSPLISEPEIKQITLTEDDEFLVIGCDGIWDVLTSQEAVSIVRRGLNRHNDPTRCARELVMEALGRNSFDNLTAVVVCFMTMDRGDKPVVPLEKRRCFSLSPEAFCSLRNLLDG

SEQ ID NO: 16472 - protein, 1122 aa, Armoracia rusticana
MSGSRPSQSSEGSRRSRHSARIIAQTTVDAKLHADFEESGSSFDYSTSVRVTGPVVENQPPRSDKVTTTYLHHIQKGKLIQPFGCLLALDEKTFKVIAYSENAPELLTMASHAVPSVGEHPVLGIGTDIRSLFTAPSASALQKALGFGDVSLLNPILVHCKTSAKPFYAIVHRVTGSIIVDFEPVKPYEVPMTAAGALQSYKLAAKAITRLQSLPSGSMERLCDTMVQEVFELTGYDRVMAYKFHEDDHGEVVSEVTKPGMEPYLGLHYPATDIPQAARFLFMKNKVRMIVDCNAKHARVLQDEKLSFDLTLCGSTLRAPHSCHLQYMANMDSIASLVMAVVVNEEDGEGDAPDSTTQPQKRKRLWGLVVCHNTTPRFVPFPLRYACEFLAQVFAIHVNKEVELENQIVEKNILRTQTLLCDMLMRDAPLGIVSQSPNIMDLVKCDGAALLYKDKIWKLGTTPSEFHLQEIASWLYEYHTDSTGLSTDSLYDAGFPKALSLGDAVCGMAAVRISSKDMIFWFRSHTAGEVRWGGAKHDPDDRDDARRMHPRSSFKAFLEVVKTRSLPWKDYEMDAIHSLQLILRNAFKDGESTDVNTKFIHSKLNDLKIDGIQELEAVTSEMVRLIETATVPILAVDSDGLVNGWNTKIAELTGLPVDEAIGKHLLTLVEDSSVEIVKRMLENALEGTEEQNVQFEIKTHLSRADAGPISLVVNACASRDLHENVVGVCFVAHDLTGQKTVMDKFTRIEGDYKAIIQNPNPLIPPIFGTDEFGWCTEWNPAMSKLTGLKREEVIDKMLLGEVFGTQTACCRLKNQEAFVNLGIVLNSAVTSQESEKVSFAFFTRGGKYIECLLCVSKKLDREGVVTGVFCFLQLASHELQQALHVQRLAERTALKRLKTLAYIKRQIRNPLSGIMFTRKMMEGTELGPEQRQILQTSSLCQKQLSKVLDDSDLERIIEGCLDLEMKEFSLNEVLTASTSQVMMKSNGKSVRITNETGEEVMSDTLYGDSIRLQQVLADFMLMSVNFTPSGGQLTVTASLRKDQLGRSVHLAYLEIRLTHTGAGIPELLLNQMFGTEKDVSEEGLSLMVSRKLVKLMNGDVQYLRQAGKSSFIISAELAAANK

SEQ ID NO: 16473 - protein, 387 aa, Xanthomonas axonopodis pv. citri str. 306
MLALNYHGSRDVRVETVPGPLLVERDDLILRVTATAICGSDLHLYRGKIPDLRPGDILGHEFMGIVEEVGPDVTAVKPGDRVVIPFVVACGRCFHCVLQEFSACETTNTGKGAALNHKDMRPPAALFGFSHLYGGLSGGQAEYVRVPKANVGPLAVPDALHDEQVLFLSDILPTGYQAVVNAGVKQGSTVAIFGAGPVGLMAAACCRMLGAERVFMVDRHAYRLDFASRTYGVIPINFDEVDDPADVIVSQTNGRGVDASIEAVGFEAEGSAIETALTNLKLEGSSGVAIRQCIAATRRCGVVSVPGVYAGFIHAFMFGDAFDKGLTFKMGQTHVQKHMPHLLECIGNGQLKPSAIISHRMSLADAARGYDLFDKKQDDCRKVVLTP

SEQ ID NO: 16474 - protein, 396 aa, Haemophilus influenzae R2866
MFEHIKAAPADPILGLGEAFKSETRENKINLGIGVYKDAQGTTPIMRAVKEAEKRLFDKEKTKNYLTIDGIADYNEQTKALLFGKDSEVIKSNRARTVQSLGGTGALRIAAEFIKRQTKAQNVWISTPTWPNHNAIFNAVGMTIREYRYYDAERKALDWDHLLEDLSQASEGDVVLLHGCCHNPTGIDPTPEQWQELAALSAKNGWLPLFDFAYQGLANGLDEDAYGLRAFAANHKELLVASSFSKNFGLYNERVGAFTLVAENAEIASTTLTQVKSIIRTLYSNPASHGGATVATVLNDTQLRQEWENELTEMRERIKKMRHLFVQLLKEYGAEQDFSFIIEQNGMFSFSGLTGEQVDRLKEEFAIYAVRSGRINVAGITEDNIRYLCESIVKVL

SEQ ID NO: 16475 - protein, 474 aa, Pseudomonas aeruginosa
MQTKLLINGALVAGEGESHAVYNPSQGNVLVRITEASGAQVHAAVQSADAAFDAWSQTPPKDRAALLLKLAERIDAQAHVFARLEADNCGKPFNAVLLDELPAVSDVFRFFAGAVRCLQGSAAGEYVAGHTSMIRRDAVGVVASIAPWNYPLLMAAWKLGPALAGGNTVVLKPSEHTPLSTLKLGELLAEIFPAGVVNIVHGRGASVGEPLTSHAQVRMVSLTGSVRTGSRIIEGTAESVKRMHMELGGKAPVLIFDDADIDAAVEGIRAFGFYNAGQDCTAACRLYVQKGVYQEFVRKLGEAVSSIRCGLPDDPATEMGPLITKEHLERVEGFVNRARELPHIEVVTGGKRAEGAGFFFEPTVLAGATQEDEVMRREIFGPVVTVSSFEDEAQALAWANDSDYGLASSVWTADVGRAHRLAARLQYGCTWVNTHFMLVSEMPHGGVKLSGYGKDLSMYGLEDYTVVRHVMFKH

SEQ ID NO: 16476 - protein, 440 aa, Alnus glutinosa
MAEITHIKARQIFDSRGNPTVEAEVTTANGVVSRAAVPSGASTGVYEALELRDGGSDYLGKGVLKAVDNVNKIIGPALIGKDATEQTAIDIDFMFQQLDGTVNEWGWCKQKLGANAILAVSLAVCKAGASVKKIPLYKHIANLAGNPKLVLPVPAFNVINGGSHAGNKLAMQEFMILPVGASSFKEAMKMGVEVYHHLKAVIKKKYGQDATNVGDEGGFAPNIQENKEGLELLKTAIAKAGYVVIGMDVAASEFYEKDKDITNFKEENNDGSQKISADQLKDLYKSFVDEYPIVSIEDPFDQDDWEHYSKLTAEIGEKVQIVGDDLLVTNPKRVEKAIKEKACNALLLKVNQIGSVTESIEAVKMSKRAGWGVMAHRSGETEDTFIADLSVGLATGQIKTGAPCRSERLAKYNQLLRIEEELGSEAVYAGANFRTPVEPY

SEQ ID NO: 16477 - protein, 1122 aa, Armoracia rusticana
MSGSRPSQSSEGSRRSRHSARIIAQTTVDAKLHADFEESGSSFDYSTSVRVTGPVVENQPPRSDKVTTTYLHHIQKGKLIQPFGCLLALDEKTFKVIAYSENSPELLTMASHAVPSVGEHPVLGIGTDIRSLFTAPSASALQKALGFGDVSLLNPILVHCKTSAKPFYAIVHRVTGSIIVDFEPVKPYEVPMTAAGALQSYKLAAKAITRLQSLPSGSMERLCDTMVQEVFELTGYDRVMAYKFHEDDHGEVVSEVTKPGLEPYLGLHYPATDIPQAARFLFMKNKVRMIVDCNAKHARVLQDEKLSFDLTLCGSTLRAPHSCHLQYMANMDSIASHVMAVVVNEEDGEGDATDSTTQPQKRKRLWGLVVCHNTTPRFVPFPLRYACEFLAQVFAIHVNKEVELENQIVEKNILRTQTLLCDMLMRDAPLGIVSQSPNIMDLVKCDGAALLYKDKIWKLGTTPSELHLQEIASWLYEYHTDSTGLSTDSLHDAGFPKALSLGDAVCGMAAVRISLKDMIFWFRSHTAGEVRWGGAKHNPDDRDDARRMHPRSSFKAFLEVVKTRSLPWKDYEMDAIHSLQLILRNAFKDGESTDVNTNIIHSKLNDLKIDGIQELEAVTSEMVRLIETATVPILAVDSDGLVNGWNTKIAELTGLPVDEAIGKHLLTLVEDSSVEIVKRMLENALEGTEEQNVQFEIKTHQSRADAGTISLAVNACASRDLHENVVGVCFVAHDLTGQKTVMDKFTRIEGDYKAIIQNPNPLIPPIFGTDEFGWCTEWNPAMSKLTGLKREEVIDKMLLGEVFGTQKSCCRLKNQEAFVNLGIVLNGAVTSQESEKVSFAFFTRGGKYIECLLCVSKKLDREGVVTGVFCFLQLASHELQQALHVQRLAERTALKRLKAIAYIKRQIRNPLSGVMFTRKMMEGTELGPEQRQILHTSALCQEQLSKVLDDSDLESIIEGCLDLEMKEFSLNEVLTASTSQVMMKSNGKSVRITNETGEEVMSDTLYGDSIRLQQVLADFMLMSVNFTPSGGQLTVTASLRKDQLGRSVHLAYLEIRLTHTGAGIPEFLLNQMFGTEEDVSEEGLSLMVSRKLVKLMNGDVQYLRQAGKSSFIISAELAAANK

SEQ ID NO: 16478 - protein, 1122 aa, Armoracia rusticana
MSGSRPSQSSEGSRRSRHSARIIAQTTVDAKLHADFEESGSSFDYSTSVRVTGPVVENQPPRSDKVTTTYLHHIQKGKLIQPFGCLLALDEKTFKVIAYSENAPELLTMASHAVPSVGEHPVLGIGTDIRSLFTAPSASALQKALGFGDVSLLNPILVHCKTSAKPFYAIVHRVTGSIIVDFEPVKPYEVPMTAAGALQSYKLAAKAITRLQSLPSGSMERLCDTMVQEVFELTGYDRVMAYKFHEDDHGEVVSEVTKPGLEPYLGLHYPATDIPQAARFLFMKNKVRMIVDCNAKHARVLQDEKLSFDLTLCGSTLRAPHSCHLQYMANMDSIASLVMAVVVNEEDGEGDAPDSTTQPQKRKRLWGLVVCHNTTPRFVPFPLRYACEFLAQVFAIHVNKEVELENQIVEKNILRTQTLLCDMLMRDAPLGIVSQSPNIMDLVKCDGAALLYKDKIWKLGTTPSELHLQEIASWLYEYHTDSTGLSTDSLHDAGFPKALSLGDAVCGMAAVRISLKDMIFWFRSHTAGEVRWGGAKHNPDDRDDARRMHPRSSFKAFLEVVKTRSLPWKDYEMDAIHSLQLILRNAFKDGESTDVNTNIIHSKLNDLKIDGIQELEAVTSEMVRLIETATVPILAVDSDGLVNGWNTKIAELTGLPVDEAIGKHLLTLVEDSSVEIVKRMLENALEGTEEQNVQFEIKTHQSRADAGTISLAVNACASRDLHENVVGVCFVAHDLTGQKTVMDKFTRIEGDYKAIIQNPNPLIPPIFGTDEFGWCTEWNPAMSKLTGLKREEVIDKMLLGEVFGTQKSCCRLKNQEAFVNLGIVLNGAVTSQESEKVSFAFFTRGGKYIECLLCVSKKLDREGVVTGVFCFLQLASHELQQALHVQRLAERTALKRLKAIAYIKRQIRNPLSGVMFTREMIEGTELGPEQRQILHTSALCQEQLSKVLDDSDLESIIEGCLDLEMKEFSLNEVLTASTSQVMMKSNGKSVRITNETGEEVMSDTLYGDSIRLQQVLADFMLMSVNFTPSGGQLTVTASLRKDQPGRSVHLAYLEIRLTHTGAGIPEFLLNQMFGTEEDVSEEGLSLMVSRKLVKLMNGDVQYLRQAGKSSFIISAELAAANK

SEQ ID NO: 16479 - protein, 483 aa, Brucella melitensis 16M
MAPPLQNRNLSITLEAGISMTGFDYDLFVIGGGSGGVRAGRLAGAIGKKVGLAEEYRMGGTCVIRGCVPKKLFVYASQFPEHFEDSAGYGWSMGEAAFDWKKLIAAKDKEISRLEGLYRKGLENSHVDIFASRAELIDEHTIELKADGRRVTADKILIATGGRPNTHESLPGHEYCISSNEAFHLEELPKSIVIAGGGYIAVEFANIFHGLGVETTLVYRGKEILSRFDHDIRSLLHETMEAKGIRILCGAIFEKVEKKADGKLSVELSNGETLETDQAMLALGRIPNTDGLGLEKAGVKIDKSGAIEVDDYSRTNVENIWAVGDVTNRVQLTPVAIHEAMCFLETAFKDNPTKPDHELIATAVFSQPEIGTVGLSEDEAAKKYPELEIYRALFRPMKNTLSGRSEKTLMKLVVESKSRKVLGAHIMGPDAGEMAQLLGISLKAGATKDDFDRTMAVHPTATEELVTMYKPTYRVVNGKKIEG

SEQ ID NO: 16480 - protein, 1135 aa, Sorghum arundinaceum
MSSPLNNRGTCSRSSSARSRHSARVVAQTPVDAQLHAEFESSQRNFDYSSSVSAAIRPSVSTSTVSTYHQTMQRGLYIQPFGCLLAVHPDTFTLLAYSENAPEMLDLTPHAVPTIDQRDALAVGADVRTLFRSQSSVALHKAATFGEVNLLNPILVHARTSGKPFYAILHRIDVGLVIDLEPVNPVDVPVTAAGALKSYKLAAKAISRLQSLPSGNLSLLCDVLVREVSELTGYDRVMAYKFHEDEHGEVISECRRSDLEPYLGLHYPATDIPQASRFLFMKNKVRMICDCSATLVKIIQDDSLAQPLSLCGSTLRASHGCHAQYMANMGSVASLVMSVTISNDEEEDVDTGSDQQPKGRKLWGLVICHHTSPRFVPFPLRYACEFLLQVFGIQLNKEVELAAQAKERHILRTQTLLCDMLLRDAPVGIFTQSPNVTDLVKCDGAALYYQNQLLLLGSTPSESEIKSIATWLQENHDGSTGLSTDSLVEAGYPGAAALREVVCGMAAIKISSKDFIFWFRSHTTKEIKWGGAKHEPVDADDNGRKMHPRSSFKAFLEVVKWRSVPWEDVEMDAIHSLQLILRGSLQDEDANRNNVRSIVKAPPDDTKKIQGLLELRTVTNEMVRLIETATAPVLAVDIAGNINGWNNKAAELTGLPVMEAIGRPLIDLVVVDSIEVVKRILDSALQGIEEQNLEIKLKAFHEQECNGPIILMVNSCCSRDLSEKVIGVCFVGQDLTTQKMIMDKYTRIQGDYVAIVKNPSELIPPIFMINDLGSCLEWNKAMQKITGIQREDVIDKLLIGEVFTLHDYGCRVKDHATLTKLSILMNAVISGQDPEKLLFGFFDTDGKYIESLLTVNKRINAEGKITGAICFLHVASPELQHALQVQKMSEQAATNSFKELTYIHQELRNPLNGMQFTCNLLEPSELTEEQRKLLSSNILCQDQLKKILHDTDLESIEQCYMEMNTVEFNLEEALNTVLMQGIPLGKEKRISIERDWPVEISRMYLYGDNLRLQQVLADYLACALQFTQPAEGPIVLQVIPKKENIGSGMQIAHLEFRIVHPAPGVPEALIQEMFRHNPEVSREGLGLYICQKLVKTMSGTVQYLREADTSSFIILIEFPVAQLSSKRSKPSTSKF

SEQ ID NO: 16481 - protein, 307 aa, Moritella marina
MSKYAVVFPGQGSQTIGMLADLAAEHSVVEQTFAQASEMLGYDLWDLVQHGTVEELSQTHITQPALLATSVALWRIAAAKEDFKPALVAGHSLGEYSALVCAGVIKFEDAIALVELRGQLMQQAVPQGIGAMAAVIGLDNDAIIAACATAAEDEVVSAVNFNSPGQVVIAGNKAAVVRASELCVEAGARRVMPLPVSVPSHCSLMKPAADELKLALEKVTFNTPVIKLINNVDVAAPVDAESIKDALVRQLYMPVRWTEVIEAMAQQEITALYEFGPGKVLTGLVKRIDKTIKGSAVNNQATIADFV

SEQ ID NO: 16482 - protein, 220 aa, Pyrus communis
CDFEPVKPYEVPMTAAGALQSYKLAAKAIAAIARLQSLPSGSMERLCDTMVQEVSELTGYDRVMAYKFRDDDHGEVVSEITKPGLEPYLGLHYPSTDIPQASRFLFMKNKVRMIVDCCAKQVKVLQDEKVPFDLTLCGSTLRAPHSCHLQYMKNMDSIASLVMAVVVNEGDDEVASPDSVQPQKRKRLWGLVVCHNTSLRFVPFPLRYACEFLAQVFAIP

SEQ ID NO: 16483 - protein, 304 aa, Oryza sativa
LPMQFRPSSSFDTKTTTTNAGAPVWNDNEALTVGPRGPILLEDYHLIEKVAHFARERIPERVVHARGASAKGFFECTHDVTDITCADFLRSPGAQTPVIVRFSTVIHERGSPETIRDPRGFAVKFYTREGNWDLLGNNFPVFFIRDGIKFPDVIHAFKPNPRSHVQEYWRVFDFLSHHPESLHTFFFLFDDVGIPTDYRHMDGFGVNTYTFVTRDAKARYVKFHWKPTCGVSCLMDDEATLVGGKNHSHATQDLYDSIAAGNFPEWKLFVQVIDPEEEERFDFDPLDDTKTWPEDEVPLRPVGR

SEQ ID NO: 16484 - protein, 465 aa, Canavalia lineata
MASSVLSGANQSSPSSTVLNTHLKGKPRLGDNALRFSGNKGGSNAFSSRSRGRISMAVADNVSRFEGIPMAPPDPILGVSEAFRADNSDVKLNLGVGAYRTEELQPYVLNVVKKAENLMLERGQNKEYVPIEGLAAFNKATAELLLGADNPAIKQQRVATVQGLSGTGSLRLGAAVIERYFPGAKVLISSPTWGNHKNIFNDARVPWSEYRYYDPKTVGLDFEGMIEDIKSAPEGTFVLLHGCAHNPTGIDPTPEQWEKIADVIEEKNHRPFFDVAYQGFASGSLDEDAASVRLLVARGIELFIADSYPKDVGLYAQRIGAINVISSSPESAARDTSQLKRIARPMYSNPPVHGARIVADLVSKPQLFDEWKAEMEMMAGRIKNVRQLLYDPISSKDKSGKDWSFILKQIGMFSFTGLNKEQSDNMTNKWHVLMTKDGRISPAGLSLAKCEYLADAIIDSYHNVS

SEQ ID NO: 16485 - protein, 472 aa, Hordeum vulgare subsp. vulgare
MDVPLASKVPLPSPSKHEQCNVYSHKSSSKHADLNPHAIDSVLGIILGGGAGTRLYPLTKKRAKPAVPLGANYRLIDIPVSNCLNSNISKIYVLTQFNSASLNRHLSRAYGSNIGGYKNEGFVEVLAAQQSPDNPDWFQGTADAVRQYLWLFEEHNVMEYLILAGDHLYRMDYEKFIQAHRETDADITVAALPMDEERATAFGLMKIDEEGRIIEFAEKPKGEQLKAMMVDTTILGLEDARAKEMPYIASMGIYVISKHVMLQLLREQFPGANDFGSEVIPGATSTGMRVQAYLYDGYWEDIGTIEAFYNANLGITKKPIPDFSFYDRSAPIYTQPRHLPPSKVLDADVTDSVIGEGCVIKNCKIHHSVVGLRSCISEGAIIEDTLLMGADYYETEADKKLLAEKGGIPIGIGKNSHIKRAIIDKNARIGDNVMIINVDNVQEAARETDGYFIKSGIVTVIKDALLPSGTVI

SEQ ID NO: 16486 - protein, 1135 aa, Sorghum arundinaceum
MSSPLNNRGTCSRSSSARSRHSARVVAQTPVDAQLHAEFESSQRNFDYSSSVSAAIRPSVSTSTVSTYHQTMQRGLYIQPFGCLLAVHPDTFTLLAYSENAPEMLDLTPHAVPTIDQRDALAVGADVRTLFRSQSSVALHKAATFGEVNLLNPILVHARTSGKPFYAILHRIDVGLVIDLEPVNPVDVPVTAAGALKSYKLAAKAISRLQSLPSGNLSLLCDVLVREVSELTGYDRVMAYKFHEDEHGEVISECRRSDLEPYLGLHYPATDIPQASRFLFMKNKVRMICDCSATLVKIIQDDSLAQPLSLCGSTLRASHGCHAQYMANMGSVASLVMSVTISNDEEEDVDTGSDQQPKGRKLWGLVVCHHTSPRFVPFPLRYACEFLLQVFGIQLNKEVELAAQAKERHILRTQTLLCDMLLRDAPVGIFTQSPNVMDLVKCDGAALYYQNQLLLLGSTPSESEIKSIATWLQENHDGSTGLSTDSLVEAGYPGAAALREVVCGMAAIKISSKDFIFWFRSHTTKEIKWGGAKHEPVDADDNGRKMHPRSSFKAFLEVVKWRSVPWEDVEMDAIHSLQLILRGSLQDEDANRNNVRSIVKAPPDDTKKIQGLLELRTVTNEMVRLIETATAPVLAVDIAGNINGWNNKAAELTGLPVMEAIGRPLIDLVVVDSIEVVKRILDSALQGIEEQNLEIKLKAFHEQECNGPIILMVNSCCSRDLSEKVIGVCFVGQDLTTQKMIMDKYTRIQGDYVAIVKNPSELIPPIFMINDLGSCLEWNKAMQKITGIQREDVIDKLLIGEVFTLHDYGCRVKDHATLTKLSILMNAVISGQDPEKLLFGFFDTDGKYIESLLTVNKRINAEGKITGAICFLHVASPELQHALQVQKMSEQAATNSFKELTYIHQELRNPLNGMQFTCNLLEPSELTEEQRKLLSSNILCQDQLKKILHDTDLESIEQCYMEMNTVEFNLEEALNTVLMQGIPLGKEKRISIERDWPVEISRMYLYGDNLRLQQVLADYLACALQFTQPAEGPIVLQVIPKKENIGSGMQIAHLEFRIVHPAPGVPEALIQEMFRHNPEVSREGLGLYICQKLVKTMSGTVQYLREADTSSFIILIEFPVAQLSSKRSKPSSSKF

SEQ ID NO: 16487 - protein, 423 aa, Bacillus subtilis
  unsure (1)..(423): unsure at all Xaa locations
MAQGEKITVSNGVLNVPNNPIIPFIEGDGTGPDIWNAASKVLEAAVEKAYKGEKKITWKEVYAGEKAYNKTGEWLPAETLDVIREYFIAIKGPLTTPVGGGIRSLNVALRQELDLFVXLRPVRYFTGVPSPVKRPEDTDMVIFRENTEDIYAGIEYAKGSEEVQKLISFLQNELNVNKIRFPETSGIGIKPVSEEGTSRLVRAAIDYAIEHGRKSVTLVHKGNIMKFTEGAFKNWGYELAEKEYGDKVFTWAQYDRIAEEQGKDAANKAQSEAEAAGKIIIKDSIADIFLQQILTRPNEFDVVATMNLNGDYISDALAAQVGGIGIAPGANINYETGHAIFEATHGTAPKYAGLDKVNPSSVILSGVLLLEHLGWNEAADLVIKSMEKTIASKVVTYDFARLMDGATEVKCSEFGEELIKNMD

SEQ ID NO: 16488 - protein, 404 aa, Anabaena variabilis ATCC 29413
MQFSQRLQPLQSNVFADMDKAKALALAAGKELIDLSLGSSDLPAEAHVIEAIAKSLYDPSTHGYLLFNGTRDFRQAAANWYEQKFGVKVDPETEVLPLIGSQEGTAHLPLALLNPGDFALLLDPGYPSHAGGVYLASGQIYPMPLKAENDFLPVFTDIPTDVLARSRMMVLSYPHNPTAAIAPLSFFKEAVAFCQEHNIALVHDFPYVDMVFEDSSNWDQNLSQSPIPNHRSLVPSILQADPDKSVSIEFFTLSKSYNMGGFRIGYAIGNAQMIQALRQIKAAVDFNQYRGILNGAIAALTGPQAGVEAAVSTFRQRRDAFIHALHHIGWYVPTPKATMYIWAKLPSSWSQNSIEFCTQLVKQTGVAASPGAGFGKSGEGYVRFALVHEPSILRTAVERISNFL

SEQ ID NO: 16489 - protein, 513 aa, Hordeum vulgare subsp. vulgare
MAMAAAASPSKILIPPHRASAVTAAASTSCDSLRLLCAPRGRPGPRGLVARPVPRRPFFFSPRAVSDSKSSQTCLDPDASTSVLGIILGGGAGTRLYPLTKKRAKPAVPLGANYRLIDIPVSNCLNSNISKIYVLTQFNSASLNRHLSRAYGSNIGGYKNEGFVEVLAAQQSPDNPDWFQGTADAVRQYLWLFEEHNVMEYLILAGDHLYRMDYEKFIQAHRETDADITVAALPMDEERATAFGLMKIDEEGRIIEFAEKPKGEQLKAMMVDTTILGLEDARAKEMPYIASMGIYVISKHVMLQLLREQFPGANDFGSEVIPGATSTGMRVQAYLYDGYWEDIGTIEAFYNANLGITKKPIPDFSFYDRSAPIYTQPRHLPPSKVLDADVTDSVIGEGCVIKNCKIHHSVVGLRSCISEGAIIEDTLLMGADYYETEADKKLLAEKGGIPIGIGKNSHIKRAIIDKNARIGDNVMIINVDNVQEAARETDGYFIKSGIVTVIKDALLPSGTVI

SEQ ID NO: 16490 - protein, 272 aa, Salmonella typhimurium LT2
MKSLFKATLLATTMAVAMHAPITFAADAAKPAATADSKAAFKNDDQKAAYALGASLGRYMENSLKEQEKLGIKLDKDQLIAGVQDAFADKSKLSDQEIEQTLQTFEARVKSAAQAKMEKDAADNEAKGKTFRDAFAKEKGVKTSSTGLLYKVEKEGTGEAPKDSDTVVVNYKGTLIDGKEFDNSYTRGEPLSFRLDGVIPGWTEGLKNIKKGGKIKLVIPPELAYGKTGVPGIPANSTLVFDVELLDIKPAPKADAKPADAADAKAADAAKK

SEQ ID NO: 16491 - protein, 1135 aa, Sorghum arundinaceum
MSSPLNNRGTCSRSSSARSRHSARVVAQTPVDAQLHAEFESSQRNFDYSSSVSAAIRPSVSTSTVSTYHQTMQRGLYIQPFGCLLAVHPDTFTLLAYSENAPEMLDLTPHAVPTIDQRDALAVGADVRTLFRSQSSVALHKAATFGEVNLLNPILVHARTSGKPFYAILHRIDVGLVIDLEPVNPVDVPVTAAGALKSYKLAAKAISRLQSLPSGNLSLLCDVLVREVSELTGYDRVMAYKFHEDEHGEVISECRRSDLEPYLGLHYPATDIPQASRFLFMKNKVRMICDCSATLVKIIQDDSLAQPLSLCGSTLRASHGCHAQYMANMGSVASLVMSVTISNDEEEDVDTGSDQQPKGRKLWGLVVCHHTSPRFVPFPLRYACEFLLQVFGIQLNKEVELAAQAKERHILRTQTLLCDMLLRDAPVGIFTQSPNVMDLVKCDGAALYYQNQLLLLGSTPSESEIKSIATWLQENHDGSTGLSTDSLVEAGYPGAAALREVVCGMAAIKISSKDFIFWFRSHTTKEIKWGGAKHEPVDADDNGRKMHPRSSFKAFLEVVKWRSVPWEDVEIDAIHSLQLILRGSLQDEDANRNNVRSIVKAPPDDTKKIQGLLELRTVTNEMVRLIETATAPVLAVDIAGNINGWNNKAAELTGLPVMEAIGRPLIDLVVVDSIEVVKRILDSALQGIEEQNLEIKLKAFHEQECNGPIILMVNSCCSRDLSEKVIGVCFVGQDLTTQKMIMDKYTRIQGDYVAIVKNPSELIPPIFMINDLGSCLEWNKAMQKITGIQREDVIDKLLIGEVFTLHDYGCRVKDHATLTKLSILMNAVISGQDPEKLLFGFFDTDGKYIESLLTVNKRINAEGKITGAICFLHVASPELQHALQVQKMSEQAATNSFKELTYIHQELRNPLNGMQFTCNLLEPSELTEEQRKLLSSNILCQDQLKKILHDTDLESIEQCYMEMNTVEFNLEEALNTVLMQGIPLGKEKRISIERDWPVEISRMYLYGDNLRLQQVLADYLACALQFTQPAEGPIVLQVIPKKENIGSGMQIAHLEFRIVHPAPGVPEALIQEMFRHNPEVSREGLGLYICQKLVKTMSGTVQYLREADTSSFIILIEFPVAQLSSKRSKPSTSKF

SEQ ID NO: 16492 - protein, 814 aa, Escherichia coli CFT073
MKTKIPDAVLAAEVSRRGLVKTTAIGGLAMASSALTLPFSRIAHAVDSAIPTKSDEKVIWSACTVNCGSRCPLRMHVVDGEIKYVETDNTGDDNYDGLHQVRACLRGRSMRRRVYNPDRLKYPMKRVGARGEGKFERISWEEAYDIIATKMQRLIKEYGNESIYLNYGTGTLGGTMTRSWPPGNTLVARLMNCCGGYLNHYGDYSSAQIAEGLNYTYGGWADGNSPSDIENSKLVVLFGNNPGETRMSGGGVTYYLEQARQKSNARMIIIDPRYTDTGAGREDEWIPIRPGTDAALVNGLAYVMITENLVDQEFLDKYCVGYDEKTLPASAPKNGHYKAYILGEGPDGVAKTPEWASQITGVPADKIIKLAREIGSTKPAFISQGWGPQRHANGEIATRAISMLAILTGNVGINGGNSGAREGSYSLPFVRMPTLENPIQTSISMFMWTDAIERGPEMTALRDGVRGKDKLDVPIKMIWNYAGNCLINQHSEINRTHEILQDDKKCELIVVIDCHMTSSAKYADILLPDCTASEQMDFALDASCGNMSYVIFNDQVIKPRFECKTIYEMTSELAKRLGVEQQFTEGRTQEEWMRHLYAQSREAIPELPTFEEFRKQGIFKKRDPQGHHVAYKAFREDPQANPLTTPSGKIEIYSQALADIAATWELPEGDVIDPLPIYTPGFESYQDPLNKQYPLQLTGFHYKSRVHSTYGNVDVLKAACRQEMWINPLDAQKRGISNGDKVRIFNDRGEVHIEAKVTPRMMPGVVALGEGAWYDPDTKRVDKGGCINVLTTQRPSPLAKGNPSHTNLVQVEKV

SEQ ID NO: 16493 - protein, 283 aa, Oenococcus oeni PSU-1
MSILTDTYTLNNGTKIPKVAFGTWQTPDGDVAYQAVSSALKFGYRHIDTAKIYGNEKSVGRAIADSDVKREDLWVTTKLPSQDKTRDLVLADFESSLSRLGLDYVDLYLIHAPWPWGEAGSKHFDEENAEAWKTLEELQKSGRVKSIGISNFDVHDMENILKIAEIKPVVNQIQYYIGFTEPKISKFAAEHDIRIEAYSPLATGDILNSEAIRKIAGRYNVSVAQLALRFTLQNGTVTLPKAISERHIQENTQLDFTINDDDMRTLNSMPDAAPAHFHNSTQG

SEQ ID NO: 16494 - protein, 879 aa, Dechloromonas aromatica RCB
MEMPKVTRRTFLKVSAGSGAAAAAAPRLLSAMENDLGGKDFGPVSGAERKAIPVNCHVCNIQDGAIAYVENDRVVKLEGNPEHVSTRGRLCAKGNSGMWYSYDPDRILYPLKRVGARGEGKWKRITWDEALAELTEKLDAALKEDPNTIMLKYGRNRTGGSIDRFMKTLGSATVVNHTSVCESSKKVGMEPTWGPDIETPDFANAKYVLNFGSNVLEASYFHNPLSQRVTEGRVDNQMKIVTFDVRLSNTAGFSDEWIPVFPATDGAVALAIGHVILREDLQDSDFITNWTNVTVDELKAHYKQYTPEWASKISGVPVETIERIAREFATTKPATLFTYRGPAKHLYGSYNEKACMMLPIMTGNVEKKGGYCLPRGMGWPQPMPEPGKPTHDSVLAHPPEYPLAAHKVSHLVPFWIAEGRQKINVYFTYQDNPVYTNPGSMAVWGKLFKDEKLIPYLVSMSPFMGEETALADLILPDCPYLERWEPESMPNSLWPWLGIRQPVHKSLGESRENRVLLRDIIHKLDPDGKRGMKQFWDFKDGEDYMRHHFDNVPGLKEAGGLDFLKKHGVWPIYGKLDPKTGKISDKTGREIKADYGLYLKELSTADMTGATVDSKGIISKNGKAIGVRRNGKNCVGFPTGNRLINVRVDQWAEYGFNPMPTFKRIPWHEAMKDDDLILSTFKLNVHKQSRTAAVKWLAEIAHSNPAWMNPETAAKLGVKTGDLVRVESAVGHLVTKAYVTEGIHPKVVSIPTGFGHWEYGRLATLKLKDKKGEYSHGADDPDLNNVWWDDKGVHPNNIIPVVADPIGGSQGWYDTVVKVTKAGPNDKYGDSEGNWEKHVAAYKETMRYAYTGDLHRKMHPEMAAWAGPDSVKHKAGGGH

SEQ ID NO: 16495 - protein, 389 aa, Haemophilus somnus 2336
MSVIKMTDLDLAGKRVFIRADLNVPVKEGKVTSDARIKATIPTLKLALEKGAKVMVTSHLGRPTEGEFKPEDSLQPVVDYLKGAGFNVRLAQDYLNGVEVNEGEIVVLENVRVNKGEKKNDPELSKKYAALCDVFVMDAFGTAHRAQASTYGVAEFAPVACAGPLLAAELEALGKALKEPQRPMLAIVGGSKVSTKLTVLDSLSKIADQLIVGGGIANTFIAAEGHNVGKSLYEADLIPEAQRLSKVTNIPVPVDVRVGTEFSETALSTEKSVADVSGEESIFDIGDKSAEQLADIIRNAKTILWNGPVGVFEFPNFRKGTEIVSNAIAEATANGAFSIAGGGDTLAAIDLFGIKDKISYISTGGGAFLEFVEGKVLPAVEILEKRANG

SEQ ID NO: 16496 - protein, 358 aa, Glycine max
MGSLEAERTTVGLAARDPSGILSPYTYNLRNTGPDDVYIKVHYCGICHSDLHQIKNDLGMSNYPMVPGHEVVGEVLEVGSNVSRFRVGELVGVGLLVGCCKNCQPCQQDIENYCSKKIWSYNDVYVDGKPTQGGFAETMIVEQKFVVKIPEGLAPEQVAPLLCAGVTVYSPLVHFGLKESGLRGGILGLGGVGHMGVKIAKALGHHVTVISSSDKKKQEALEHLGADQYLVSSDATAMQEAADSLDYIIDTVPVGHPLEPYLSLLKLDGKLILMGVINTPLQFVSPMVMLGRKSITGSFIGSMKETEEMLEFWKEKGLSSMIEMVNMDYINKAFERLEKNDVRYRFVVDVKGSKLVDQ

SEQ ID NO: 16497 - protein, 197 aa, Zea mays
  unsure (1)..(197): unsure at all Xaa locations
MAATIQSVNARQIFDRRLYLTVQVIVFCSDGTFGWAAAPIGASIVVYQALEFRDGRSDYXRRVSTQMRNNVNSVIGPTLIGKDPTVQTEIDNFMDQHHYGTKNEWGXSKLKLGANAILTESLXTCKAGPNIKXIPLYHIIANLPXNKQLEMPVPALNVINGGYHAGNKIAMXEFMILATGAAXIXEAMNIGVETYHH

SEQ ID NO: 16498 - protein, 185 aa, Pseudomonas aeruginosa PAO1
MSVDLAHIRQVRAEADCLFNNDEVEAAIGRVAEAINRDLGETNPVVFCVMNGGLIFSGKLLPLLDFPLELSYLHATRYRNETSGGELFWKAKPEISFIDRDVLIIDDILDEGHTLSAIIDFCKHAGARAVHTAVLVDKEHERKARPDLKASFTGLYCADRYVFGYGMDYKGYWRNAAGIFAVKGL

SEQ ID NO: 16499 - protein, 123 aa, Narcissus pseudonarcissus
QPMSVFWLVPQFFLVGAGEAFCYIGQLDFFLRECPKGMKTMSTGMFLSTLSLGFFLSSALVTIVHKVTGESGQGAWLPDDLNRGKLYDFYWLLAVLSAVNLVAFLVSARWYVYKENRMATDDG

SEQ ID NO: 16500 - protein, 548 aa, Pseudomonas sp. ADP
MTEITVNGMTCTSCATHVKDALEKIPGVNAAVVSYPESRAQVMADTAVSHNQLLAAIAALGYQGSIRVGDFKDEPKIRDALEGAGLHIAIIGSGGAAMAAALKAVEQGATVTLIERGTIGGTCVNIGCVPSKIMIRAAHIAHLRRESPFDGGIAATVPAIDRSKLLAQQQARVDELRHAKYEGILDGNPAITVLHGEARFKDDQSLVVRLNEGGEREVTFDRCLVATGASPAVPPIPGLKESPYWTSTEALVSDTIPARLAVIGSSVVALELAQAFARLGSQVTILARSTLFFREDPAIGEAVTAAFRAEGIEVLEHTQASQVAHVNGEFVLTTGHGELRADKLLVATGRAPNTRSLALDAAGVTVNAQGAIVIDQGMRTSNPNIYAAGDCTDQPQFVYVAAAAGTRAAINMTGGDAALNLTAMPAVVFTDPQVATVGYSEAEAHHDGIETDSRTLTLDNVPRALANFDTRGFIKLVIEEGSGRLIGVQAVAPEAGELIQTAVLAIRNRMTVQELADQLFPYLTMVEGLKLAAQTFNKDVKQLSCCAG

SEQ ID NO: 16501 - protein, 355 aa, Methylococcus capsulatus str. Bath
MPTAKAYAAFSADSALAPFVLQRRDPLPQDIRIGILYCGVCHSDLHQARNEWNATTYPCVPGHEIVGKVLEVGRSVTKFKPGDTVAVGCMVDSCRTCPNCVDALEQHCEHGPVFTYNSPDPHGGGMTFGGYAESIVVDEAFVLRIPDGLDLAAAAPLLCAGITTYSPLRHWKVGAGQRVGVVGLGGLGHMALKFAHTFGAETVLFTTTPDKAEDARRLGADEVVVSRDPEAMARQAGRFDFILDTVSAPHDIDAYLNLLRRDGTLTLVGVPPQGVQVMPFSLIGGRRRLAGSLIGGIRETQEMLDFCGEHGIVCDIELIPIQGINDAFERMLKSDVKYRFVIDMATLNGESSGGR

SEQ ID NO: 16502 - protein, 129 aa, Glycine max
FFKIACVRIASILEFFFIFVFFFFFFFLFFLFFVCLFEGVNFKESEFQVVGKKRESLLSSQFRDIGTFGMHKTYNPETQGPYTISMIERLMGEIHFVVDPHSTSKKQVLELIQELQKHFPIKRCPLRIR

SEQ ID NO: 16503 - protein, 449 aa, Rhodospirillum rubrum
MGATLSLAWPLILTNLAQAALTTTDLLLIGSLGSRSLAAAAMAAGLFQALMLFGLGLVSATLPLLATALGRNRHSVRDVRRTVRQGLWSAGLISLPLWLILWHTEAVLIAFGQEPALAAEAAGFMHTLQWGLLPFLGYIVLRAFLSALERPMWPLLVAGLAIGFNALAAWALIFGHLGLPALGLPGAGVSSSLSSLFMVAGLALVITRQRRLKRYRLFGRFWRPDWPRLVTLWRLGLPMAISFAFEVSIFQASMMMMGILGADALAAHTIALQIATLTFMVPLGLGQAATVRVGRALGAGTIPALRRAGWVAYGAGVAFMGGAALMMLSVPRLLIGAFLDADLAENAPVIDLAVVLMALAALFQIADGAQAVCNGMLRGLHDTKVPMLLAALGYWGLGLPLGALLAFPLGVGAPGVWIGLAGGLSVVAVLMTRRWIRLVAALERASVTA

SEQ ID NO: 16504 - protein, 214 aa, Prunus dulcis
TGVRPYEVPMTAAGALQSYKLAVKAIARLQSLPSGSMERLCDTMVQEVFELTGYDRVMAYKFHDDDHGEVVSEITKPGLEPYLGLHYPSTDIPQASRFLFMKNKVRMIVDCCAKQVKVLQDEKLPFDLTLCGSTLRAPHSYHLQYMKNMESIASLVMAVVVNEGDDEVASPDSVQPQKRKRLWGLVVCHNTSPRFVPFPLRYACEFLAQVFPYT

SEQ ID NO: 16505 - protein, 398 aa, Bacillus subtilis subsp. subtilis str. 168
MKFEQSHVLKELPKQFFASLVQKVNRKLAEGHDVINLGQGNPDQPTPEHIVEEMKRAVADPENHKYSSFRGSYRLKSAAAAFYKREYGIDLDPETEVAVLFGGKAGLVELPQCLLNPGDTILVPDPGYPDYWSGVTLAKAKMEMMPLVKDRAFLPDYSSITAEIREQAKLMYLNYPNNPTGAVATSEFFEDTVRFAAENGICVVHDFAYGAVGFDGCKPLSFLQTEGAKDIGIEIYTLSKTYNMAGWRVGFAVGNASVIEAINLYQDHMFVSLFRATQEAAAEALLADQTCVAEQNARYESRRNAWITACREIGWDVTAPAGSFFAWLPVPEGYTSEQFSDLLLEKANVAVAAGNGFGEYGEGYVRVGLLTSEERLKEAAYRIGKLNLFTQKSIDKTL

SEQ ID NO: 16506 - protein, 156 aa, Haemophilus influenzae
NRTNTPVLVDGKDVMPEVNAVLAKMKDFCQRIISGEWKGYTGKAITDVVNIGIGGSDLGPYMVTEALRSYKNHLNMHFVSNVDGTHIAETLKKVNPETTLFLVASKTFTTQETMTNAQSARDWLLKAAKDESAVAKHFAALSTNAKDVEKFGIDTN

SEQ ID NO: 16507 - protein, 1135 aa, Sorghum arundinaceum
MSSPLNNRGTCSRSSSARSRHSARVVAQTPVDAQLHAEFESSQRNFDYSSSVSAAIRPSVSTSTVSTYHQTMQRGLYIQPFGCLLAVHPDTFTLLAYSENAPEMLDLTPHAVPTIDQRDALAVGADVRTLFRSQSSVALHKAATFGEVNLLNPILVHARTSGKPFYAILHRIDVGLVIDLEPVNPVDVPVTAAGALKSYKLAAKAISRLQSLPSGNLSLLCDVLVREVSELTGYDRVMAYKFHEDEHGEVISECRRSDLEPYLGLHYPATDIPQASRFLFMKNKVRMICDCSATLVKIIQDDSLAQPLSLCGSTLRASHGCHAQYMANMGSVASLVMSVTISNDEEEDVDTGSDQQPKGRKLWGLVVCHHTSPRFVPFPLRYACEFLLQVFGIQLNKEVELAAQAKERHILRTQTLLCDMLLRDAPVGIFTQSPNVTDLVKCDGAALYYQNQLLLLGSTPSESEIKSIATWLQENHDGSTGLSTDSLVEAGYPGAAALREVVCGMAAIKISSKDFIFWFRSHTTKEIKWGGAKHEPVDADDNGRKMHPRSSFKAFLEVVKWRSVPWEDVEMDAIHSLQLILRGSLQDEDANRNNVRSIVKAPPDDTKKIQGLLELRTVTNEMVRLIETATAPVLAVDIAGNINGWNNKAAELTGLPVMEAIGRPLIDLVVVDSIEVVKRILDSALQGIEEQNLEIKLKAFHEQECNGPIILMVNSCCSRDLSEKVIGVCFVGQDLTTQKMIMDKYTRIQGDYVAIVKNPSELIPPIFMINDLGSCLEWNKAMQKITGIQREDVIDKLLIGEVFTLHDYGCRVKDHATLTKLSILMNAVISGQDPEKLLFGFFDTDGKYIESLLTVNKRINAEGKITGAICFLHVASPELQHALQVQKMSEQAATNSFKELTYIHQELRNPLNGMQFTCNLLEPSELTEEQRKLLSSNILCQDQLKKILHDTDLESIEQCYMEMNTVEFNLEEALNTVLMQGIPLGKEKRISIERDWPVEISRMYLYGDNLRLQQVLADYLACALQFTQPAEGPIVLQVIPKKENIGSGMQIAHLEFRIVHPAPGVPEALIQEMFRHNPEVSREGLGLYICQKLVKTMSGTVQYLREADTSSFIILIEFPVAQLSSKRSKPSTSKF

SEQ ID NO: 16508 - protein, 412 aa, Shigella flexneri 2a str. 2457T
MADTRPERRFTRIDRLPPYVFNITAELKMAARRRGEDIIDFSMGNPDGATPPHIVEKLCTVAQRPDTHGYSTSRGIPRLRRAISRWYQDRYDVEIDPESEAIVTIGSKEGLAHLMLATLDHGDTVLVPNPSYPIHIYGAVIAGAQVRSVPLVEGVDFFNELERAIRESYPKPKMMILGFPSNPTAQCVELEFFEKVVALAKCYDVLVVHDLAYADIVYDGWKAPSIMQVPGARDVAVEFFTLSKSYNMAGWRIGFMVGNKTLVSALARIKSYHDYGTFTPLQVAAIAALEGDQQCVRDIAEQYKRRRDVLVKGLHEAGWMVEMPKASMYVWAKIPEPYAAMGSLEFAKKLLNEAKVCVSPGIGFGDYGDTHVRFALIENHDRIRQAIRGIKAMFRADGLLPVSSKHIHENAE

SEQ ID NO: 16509 - protein, 1135 aa, Sorghum x drummondii
MSSPLNNRGTCSRSSSARSRHSARVVAQTPVDAQLHAEFESSQRNFDYSSSVSAAIRPSVSTSTVSTYHQTMQRGLYIQPFGCLLAVHPDTFTLLAYSENAPEMLDLTPHAVPTIDQRDALAVGADVRTLFRSQSSVALHKAATFGEVNLLNPILVHARTSGKPFYAILHRIDVGLVIDLEPVNPVDVPVTAAGALKSYKLAAKAISRLQSLPSGNLSLLCDVLVREVSELTGYDRVMAYKFHEDEHGEVISECRRSDLEPYLGLHYPATDIPQASRFLFMKNKVRMICDCSATLVKIIQDDSLAQPLSLCGSTLRASHGCHAQYMANMGSVASLVMSVTISNDEEEDVDTGSDQQPKGRKLWGLVVCHHTSPRFVPFPLRYACEFLLQVFGIQLNKEVELAAQAKERHILRTQTLLCDMLLRDAPVGIFTQSPNVMDLVKCDGAALYYQNQLLLLGSTPSESEIKSIATWLQENHDGSTGLSTDSLVEAGYPGAAALREVVCGMAAIKISSKDFIFWFRSHTTKEIKWGGAKHEPVDADDNGRKMHPRSSFKAFLEVVKWRSVPWEDVEMDAIHSLQLILRGSLQDEDANRNNVRSIVKAPPDDTKKIQGLLELRTVTNEMVRLIETATAPVLAVDIAGNINGWNNKAAELTGLPVMEAIGRPLIDLVVVDSIEVVKRILDSALQGIEEQNLEIKLKAFHEQECNGPIILMVNSCCSRDLSEKVIGVCFVGQDLTTQKMIMDKYTRIQGDYVAIVKNPSELIPPIFMINDLGSCLEWNKAMQKITGIQREDVIDKLLIGEVFTLHDYGCRVKDHATLTKLSILMNAVISGQDPEKLLFGFFDTDGKYIESLLTVNKRINAEGKITGAICFLHVASPELQHALQVQKMSEQAATNSFKELTYIHQELRNPLNGMQFTCNLLEPSELTEEQRKLLSSNILCQDQLKKILHDTDLESIEQCYMEMNTVEFNLEEALNTVLMQGIPLGKEKRISIERDWPVEISRMYLYGDNLRLQQVLADYLACALQFTQPAEGPIVLQVIPKKENIGSGMQIAHLEFRIVHPAPGVPEALIQEMFRHNPEVSREGLGLYICQKLVKTMSGTVQYLREADTSSFIILIEFPVAQLSSKRSKPSTSKF

SEQ ID NO: 16510 - protein, 1135 aa, Sorghum propinquum
MSSPLNNRGTCSRSSSARSRHSARVVAQTPVDAQLHAEFESSQRNFDYSSSVSAAIRPSVSTSTVSTYHQTMQRGLYIQPFGCLLAVHPDTFTLLAYSENAPEMLDLTPHAVPTIDQRDALAVGADVRTLFRSQSSVALHKAATFGEVNLLNPILVHARTSGKPFYAILHRIDVGLVIDLEPVNPVDVPVTAAGALKSYKLAAKAISRLQSLPSGNLSLLCDVLVREVSELTGYDRVMAYKFHEDEHGEVISECRRSDLEPYLGLHYPATDIPQASRFLFMKNKVRMICDCSATLVKIIQDDSLAQPLSLCGSTLRASHGCHAQYMANMGSVASLVMSVTISNDEEEDGDPGSDQQPKGRKLWGLVVCHHTSPRFVPFPLRYACEFLLQVFGIQLNKEVELVAQAKERHILRTQTLLCDMLLRDAPVGIFTQSPNVMDLVKCDGAALYYQNQLLLLGSTPSESEIKSIATWLQENHDGSTGLSTDSLVEAGYPGAAALREVVCGMAAIKISSKDFIFWFRSHTTKEIKWGGAKHEPVDADDNGRKMHPRSSFKAFLEVVKWRSVPWEDVEMDAIHSLQLILRGSLQDEDANRNNVRSIVKAPLDDTKKIQGLLELRTVTNEMVRLIETATAPVLAVDIAGNINGWNNKAAELTGLPVMEAIGRPLVDLVVVDSIEVVKRILDSALQGIEEQNLEIKLKAFHEQECNGPIILMVNSCCSRDLSEKVIGVCFVGQDLTTQKMIMDKYTRIQGDYVAIVKNPSELIPPIFMISDLGSCLEWNKAMQKITGIQREDVIDKLLIGEVFTLHDYGCRVKDHATLTKLSILMNAVISGQDPEKLLFGFFDTDGKYIESLLTVNKRINAEGKITGAICFLHVASPELQHALQVQKMSEQAATNSFKELTYIHQELRNPLNGMQFTCNLLEPSELTEEQRKLLSSNILCQDQLKKILHDTDLESIEQCYMEMNTVEFNLEEALNTVLMQGIPLGKEKRISIERDWPVEISRMYLYGDNLRLQQVLADYLACALQFTQPAEGPIVLQVIPKKENIGSGMQIAHLEFRIVHPAPGVPEALIQEMFRHNPEVSREGLGLYICQKLVKTMSGTVQYLREADTSSFIILIEFPVAQLSSKRSKPSTSKF

SEQ ID NO: 16511 - protein, 426 aa, Clostridium thermocellum ATCC 27405
MHKKEIIALLLAGGQGSRLGVLTKNIAKPAVLYGGKYRIIDFSLSNCVNSDIDTVGVLTQYQPLELNAHIGIGKPWDMDRINGGVTILSPYLKAEIGEWYKGTANAVFQNIHYVDKYSPKYVIILSGDHVYKMNYSQMLDFHKENNADATISVINVPWEEASRYGIMNTYENGKIYEFEEKPQNPKSNLASMGVYIFNWEVLKEYLIRDDQNEESAHDFGKNIIPMMLKEGRSMWAYKFNGYWRDVGTIQAYWESNMDLISRVPEFNLFDPAWKIYTPNPVKPAHYIGPTGSVKKSIVAEGCMIYGSVRNSVLFPGVYVSEGAEIVDSIVMSDSVIGENTQIYKCIIGEEVKVGKNVRMGIGENIPNELKPHLYDSGITVVGEKAVVPDGCQIGKNVVIDPYITAEEFPSLNIESAKSVLKGGETE

SEQ ID NO: 16512 - protein, 373 aa, Clostridium thermocellum ATCC 27405
MKSTMGIILTGGKNDRLKELAEMRSSTAVPIGGKYRVIDFVLSNMVNSGIKNIGVLTQYSFRSLMDHLGSGKEWDLDRRNEGLFIFPPYLAGEHSGWYQGSADAMYHNITFLKRSYEEYVLVAQGNCVYKMLFDDMLDYHIKKNADITIAYRDMSDFPREELSFMGVMTMDENRRVVDFKEKHKNPESTICSMGIYILKRELLIALLEECNSHGKYDFVKDVIINKLPTLNIYGYKFEGYWRNLNSINAYYRINMEMLNPEIRYQLFEQHGKVYTKVKDEPPAKYNEEAEVRNSIIADGCIIEGTVINSVLFRGVTIKRNAVVKDCIIMQDSVIEEDVDIESLIIDKNVYLSKGIRLKGMVNFPITIGKNAVI

SEQ ID NO: 16513 - protein, 448 aa, Oenococcus oeni PSU-1
MTEIFKMPDIGEGMAEGEISDWLVKVGDQVKTDDSVAEVQNDKLLQEILSPYSGKVTKLFVEPGTTVKVGEPLIEFDGDGSGSAADDGQKGKTEAKEIEEPAESEKKTAVSSQASPAAPTSDSSNSSGAATASNGNILAMPSVRHYAHEHGIDLSQVTASGHHGHITMSDVENFSTSSAAPEKEPENQPSEAETTTKQTASESAPTKKAAAPDPLKEGRVSMTPVRKAIAKAMSLQNSTIPTVTNFDQTEVSKLVAHRKQFKPIAADQNIHLTYLAYAAKALAATAKKFPEINASLDMDKQEIVYHDDINLGIAVNAPSGLYVPVIAHADQKSIMAIAQEIEDLAAAVRDGSIKPDQMRGGTITISNIGSARGTWFTPIINAKEVAILGLGSIVKEPIISDDGTIVAGQMMKLSLSYDHRLIDGMLGQTSMNYLKSLLADPAYMLMEV

SEQ ID NO: 16514 - protein, 473 aa, Oenococcus oeni PSU-1
MATGGVVGAQATDIDTVVIGSGPGGYVAAIRAAELGQKVTIIESTFIGGVCLNVGCIPSKALINVGHHYHDAVSEQPFGLKSSGTELDWKTTQEWKQKKVVNQLTGGVEMLLKKHRVDIIHGVASFVDNKQINVVKGDDHELFQFNNCILATGSRPIEIPGFAFGKRIVDSTAALSLPEIPKHLIVIGGGVIGFELGSVYQNLGSKVTVIEGLDHVLSGFDKEMIQPVLDDFKAQGGEIFTSAKAKSASQTEKDVTVTFEADGKEQTVDGDYLLVSVGRRPNTDNIGLNNTNVKLTDRGLVEIDDTMKTNVSHIYAIGDITVGPALAHKASFQGKIAAAAISGDQNAHDLHYSLPAVAYTNYELATTGETPESVKEKKLDAKAYKFPFAANGRALSINEGKGFIRLISDNQTKALIGSQIVGPGASDLISELSLAIENGLTTEDISLTIHPHPTLGEAIMDASELADGLPIHI

SEQ ID NO: 16515 - protein, 250 aa, Sinorhizobium meliloti
MRRTGKTIIGSLLGLAYVVATPFASLASFDDGLRQSTALAGPHGDVLVVADAGSAPGGSQETGSGGGQDTGSSGGQDSGSGGGEGSGGGQDTGSGGGQDTGSGGGQDTGSGGGQDSGSGGGEGSGGGQDSGSGGGQDTGSGGGQDTGSGGGQDSGSGGGEGSGGGQDSGSGGGQDTGSGGGQDSGSGGGQDSGSGGGEGSGGGQDTGSGGGQDSGSGGGEGSGGGQDSGSGGGQDTGSGGGETPASTSSD

SEQ ID NO: 16516 - protein, 391 aa, Nostoc punctiforme PCC 73102
MAMKAVCWNGANDVRVETVPDPKIINPRDAVIKITTTAICGSDLHLYNGYVPTMEKGDILGHEMMGEVVEIGSAVKNLNIGDRVVVPFPIACGNCWYCQHDFWSLCDNSNPNAWLAEKFMGYSPSGIFGYSHMLGGYAGGQAQYARVPFADTGLFKIPDGLTDEQVVFLTDIFPTGYMAADNCNIQPGDIVAVWGCGPVAQFTIKSAYLLGAERVIAIDRIPERLQMAKDQGKAEILNYEEVDVGEALKEMTGGRGPDACIDAVGLEAHGTGLEGVYDEVKQAVRLETDRPHVLRQVMIDCRKGGHVSIPGVYVGVVDKIPMGAAMNKALVFKMGQTHVHKYLNTLLDHIQNGRIDPSFVITHRLPLDEAPRGYEIFRDKKENCIKVVLKP

SEQ ID NO: 16517 - protein, 522 aa, Oryza sativa
ISTMQFSSVFPLEGKACVSPIRRGGEGSASDRLKIGDSSSIKHDRAVRRMCLGYRGTKNGAQCVLTSDAGPDTLHVRTSFRRNFADPNEVAAVILGGGTGTQLFPLTSTRATPAVPIGGCYRLIDIPMSNCFNSGINKIFIMTQFNSASLNRHIHRTYLGGGINFTDGSVEVLAATQMPGEAAGWFQGTADAVRKFIWVLEDYYKHKAIEHILILSGDQLYRMDYMELVQKHVDDNADITLSCAPVGESRASDYGLVKFDSSGRVIQFSEKPKGTDLEAMKVDTSFLNFAIDDPTKFPYIASMGVYVFKRDVLLNLLKSRYAELHDFGSEILPRALHEHNVQAYVFADYWEDIGTIRSFFDANMALCEQPPKFEFYDPKTPFFTSPRYLPPTKSDKCRIKDAIISHGCLLRECTIGHSIVGVRSRLNSACELKNTMMMGADLYETEDEISRLLSEGKVPIGVGENTKINNCIIDMNARVGRNVVITNSEGVQESDRPEEGYYIRSGIVVILKNATIKDGKVI

SEQ ID NO: 16518 - protein, 475 aa, Oryza sativa (japonica cultivar-group)
MATTPAPVSLSAAASTVPARLLVGRGAAAAPVARRRARMVVVRAKIREIFMPALSSTMTEGKIVSWSAAEGDRVAKGDAVVVVESDKADMDVETFHDGIVAAVLVPAGESAPVGAPIALLAESEDDLQAALAKAQELSKAHPQQAPPPSDAAAPPPPPPPPAAAPAAPAPVAAGTKGIATPQAKKLAKQHRVDLAKVAGTGPFGRITPADVEAAAGIEPKPKVVPAASAAPVPLSAPAIGAVPQAAELPPVPGATVVPFTGMQAAVSKNMVESLAVPAFRVGYPIVTDKLDELYEKVKSKGVTMTVLLAKAAAMALAQHPVVNASCRDGKSFTYNTNINIAVAVAIDGGLITPVLEDADKLDIYLLSQKWKELVKKARAKQLQPNEYSSGTFTLSNLGMFGVDRFDAILPPGQGGIMAVGASKPTVVADKDGFFSVKSKMLVNVTADHRIVYGADLAAFLQTFAKIIEDPESLTL

SEQ ID NO: 16519 - protein, 264 aa, Pseudomonas sp. ADP
MSDNKICNTPRKPVVLMSMGAQERKGHDYQVMTHKYIQPLVEFSGCVPVLVPTCCGTDDLEQYLDMADGVYLTGAGSNIDPALYDQENETPNKGQDRDRDLFDLPLIRAAIARGLPIFGICRGMQEINVALGGDIYQKVYAEPGFNDHRENPDDPVEVQYAPSHSVRPVAGSWFAELMGKGEIQVNSLHGQAIRNLGKGLEVLATAEDGLIEAIHAPSLSPFLFAVQWHPEWQAALNPDSVKIFQAFGDACHRRVASRNSRQAA

SEQ ID NO: 16520 - protein, 360 aa, Oenococcus oeni PSU-1
MTMVKAAVIYGPKDIRFEKRNIPDPAPDEVQIEVAFNGICGSDIHEYLEGMDLATMPHPLTHMQAPLIPGHEFSGTISKIGKQVSKLRIGDKVAVEPMIACGKCPECLSGHYNWCEHAIGSDQSAGFLGFSANGGLAEKCNVKSTFAHLLPTDFPLDLGALVEPVSVAAQAVMASRVSPGDDVLIQGAGPIGLFTALIAQISGAHHVIINDMSEERLDLANELGVQYPIRADSQKSLAHAISTITENQGVDVAFDCAGVQPTLTGAIQALKNGGKVTVIALFQHPPVVDVRALLKKGGSLLTSYGYANIFDRVIKIIDTYRSLFKRVITKKIELNELVSEGIESLEKDKKQAKILVRLHS

SEQ ID NO: 16521 - protein, 394 aa, Triticum aestivum
EPARTEDPALSIAGAVQSQKLAVRAISRLQALPGGDVKLLCDTVVEHVRELTGYDRVMVYKFHDDEHGEVLAESRRGDLEPYLGLHYPATDIPQASRFLFRQNRVRMIADCHAAAVRVIQDPAMPQPLCLVGSTLRSPHGCHAQYMANMGSIASLVMAVIISSGGEDEHNMTRGVIPSAMKLWGLVVCHHTSPRCIPFPLRYACEFLMQAFGLQLNMELQLAHQLSEKHILRTQTLLCDMLLRDSPTGIVTQSPSIMDLVKCDGAALFYHGKYYPLGVTPTEAQIKDIIEWLTVCHGDSTGLSTDSLADAGYPGATALGDAVCGMAVAYITPSDYLFWFRSHTAKEIKWGGAKHHPEDKDDGQRMHPRSSFKAFLEVVKSRSLPWENAEMDAIH

SEQ ID NO: 16522 - protein, 549 aa, Magnaporthe grisea 70-15
MTLLALKEDRPTPKAVYNWRVYLCASIASFASCTIGYDSAFIGTTLALPSFTDEFQFASYSASDLALLKANIVSLYQAGAFFGSLFAYVSSYFLGRKKSLMMFSLIFMVGASLMLGATRERGLGLILGGRVLAGLGIGGMSNMTPIYISELSPPAVRGRLVGIYELGWQIGGLVGFWINYGVNSTLPPSHSQWLIPFAVQLIPGGMLLLGAIYIPESPRWLFEKGQREKAIKVLSWMRNLEPDHQYIVEEISYIDEGLEQQRREIGAGFWKPFAALKARRVQWRFILGGLLFMWQNGSGINAINYYSPTVFQSLGITGTNTGFLTTGLFGVVKTVLTVIWLMWMIDHWGRRPLLIMGGIGGGACMWFIGAYIKIAQPEKNPNSGGLPPGGIAAIFFFYLWTAFYTPSWNGTPWVINSEMFDQNTRSLGQANAAANNWFWNFIISRFTPTMFEEWGYGVYFFFASLMFVSVVFIFFLVPETKSIPLEKMDRLFEIRPVHRANATVMSELGHHSDGSAPVLGGEPEKGEAGIVEDGQVTPPPTYARKDGVA

SEQ ID NO: 16523 - protein, 532 aa, Neurospora crassa
MADSIRNESTPTTPSPDQMYCHACHHQWQRQGETLQCPACNNATTEIVSNQTSSTTLDTRTTLLTQDHQITPENDPRHFHRRPLPATVEDAPAEDELQPDYSAAATVTESQQPTEVPTSNTETQNANESNGHNDARPQTEANGTSTTSGNTQTSDETNTRGTQEQTSNASNTEAPRSGSRSTNTQHFDIRFIFPPMTFFTTVISEPLTPRSQQQPAGSQPNGQAQSTEQSNEQPNNQQSNASNTSTNVPTPNGSTASGPSPITFFGLHFFTPRPPHAHTAPASNAASNTTQTEGTAQQQSQSNDEQAQASQQQQPQQGPQPATQGQSSPFGSGPVPAGLMNAILSAMFSPLSPLVLGNLNFVNDGVYSQEAFDRIITQLREQHAAQNPGGAPPASQAAIEKLRVKDIDEQMLQGCQDNKAKCVICVDEMTLGDKATLLPCNHFFHGECVTPWLKVHNTCPVCRRSVEVEEAPESKKRKNVAEHEPTGRDGHGIDEAEDEDEQQSAEVAAAIPERQRRPYGPERLRGEGTDCA

SEQ ID NO: 16524 - protein, 399 aa, Bordetella parapertussis 12822
MRFADRMARIAPSPSSMAGQRMRELRAAGRNVIGLTAGEPDFATPDNIQQAALRAMRNGQTKYTDVGGVPELKAAVAEKFRRENSLAYRQDQIIVSSGAKQVIFNALLCLVQRGDEVVIPAPYWVSYPDMVRFAGGTPVAVACAQQHRFKLQPDELERAITPRTRCLILNSPNNPSGAAYDETELKALAQVLLRHPDICVITDDIYEHLLYDGRRFATIAAVEPALADRVLTVNGVSKSYAMTGWRIGYAGGPAALIANMVKLQSQSTSCPSAVSQAAAIEALTGPQDIIASSRKLFQARRDLLVRRINAIPGLHCDTPDGAFYVFASCAGLAGKRTPQGRTIDNDTDLALHLLDAEGVVVIQGDAYGMPGFFRLSIAASETLIEEAQRRIAAACAALH

SEQ ID NO: 16525 - protein, 171 aa, Triticum aestivum
  unsure (1)..(171): unsure at all Xaa locations
MAPAVMASSATTVAPFQGLKSTAGLPVSRRSSGSLGSVSNGGRIRCMQVWPIEGIKKFEXTLSYLPPLSTEALLKQVDYLIRSXKWVPCLEFSKVGFVFREQNSSXPGYYDGRYWXQCWKLPMFGXCTDATQVLKQGGGVKKEYLTLCRVSVHNCASACVTPLSTGKIREG

SEQ ID NO: 16526 - protein, 504 aa, Triticum aestivum
  unsure (1)..(504): unsure at all Xaa locations
MAGGVFLLNGADAPDYGGALTVPVVVTCLMAASGGLIFGYDIGISGGVSEMESFLKKFFPGLLKTTRHASKDVYCMYNDQALTAFTSSLYAFGMVGTLVASRVTRRVGRKAIMVIGGSMFLVGLLVNAGGGNLAMLIVGRMMLGLGLGFSGQATPVYLAEMSPPRWRGGFISAFPLFISVGYLVANLINYGTSRIPEWGWRLSLGLAAVPAAVMVLGAVLITDTPSSLVLRGKHDHARAALQRVRGKGVDVDAEFSDILAAVEHDRRNQEGAFRRILRREYRPYLVMAVAFPVFLNLTGVTVSAFFSPILFRTIGFGSDAALMGAIILGLMNIGGIIASGVAMDRYGRKLLFAICGALMFTCQVAMASIAGTHLGHGSKMPKGYAVAVLVLTCVFSASFSWSWGALYWTIPGEIYPVEVRSAGQGTAVALNLGLNFVQAQCFLAMLCSLKYGVFLFYAFWLVVMTAFAMALVPETKGVPLDSMGPLFXARHWXYWGRFVKDTIE

SEQ ID NO: 16527 - protein, 542 aa, Zea mays
MSAAQLLRHSRKLRSLQNAVGCENFSFVRHFSSGSGSFIARENGIGKRTRGTRFSQHNQPAKQLETFSAGVNGSCTWRIASNSLTPSAASWLSGSFSCGQVVSARPFSSSADLPPHQEIGMPSLSPTMTEGNIAKWLKKEGDKVSPGEVLCEVETDKATVEMECMEEGYLAKIIHGDGAKEIKVGEVIAITVEEEGDIEKFKDYKPSSSAEPVAPAEPKAEPEPSQPKVEEKKLTQAPEVKAPKIEEASQSGDRIFASPLARKLAEDNNVPLSSVKGTGPDGRILKADIEDYLASVAKGGLREAFADPGLGYVDIPNAQIRKVTANRLLASKQTIPHYYLTVDARVDKLVKLRGELNPLQDASGGKKISINDLVIKAAALALRKVPQCNSSWMNDFIRQYHNVNINVAVQTEHGLFVPVIRDADKKGLGAIAEEVKQLAQKARDNSLKPADYEGGTFTVSNLGGPFGIKQFCAIINPPQSAILAIGSAEKRVIPGSADGQFEFGSFMSATLSCDHRVIDGAIGAEFLKAFKGYIENPTSMLL

SEQ ID NO: 16528 - protein, 445 aa, Halobacterium sp. NRC-1
MTSVGIDAIEIHTGKLKLDLAETFAPEMGDDPEKYTKGLGLHASSFPDAYEDIVTMGANAAHRLLERKGLEPADVGRIDVATESAFDNSKPVSTYIAGCLEQVYDGDFHHANKGERKFACIAGTQSLDDAVNWILAGRNRGRGALVIATDTALYARDSSGEATQGAGAVAMWITEDPDIVELSTEQGYGSADETDFLKPNQQFPSVDGKRSMQVYLARMRESLQDFERATGASHPDDYAFIPFHTPFPGMVRKAAVLGYRHMIRGTDIEEELAADIGRQPRRERFDSDDAFEDAISEYVDGLTDTDAYREWYDAAIQPTLSISSQVGNWYTGSVHLARFSALKHAAENGIDLAGKRLLVASYGSGAQAEIHSETVQDGFTEAVAASTIDEQIEQRYDISFAEYEQVHDRHNHEKSVELEPFTQPDAEFVFDGWGPMNERKYTYVE

SEQ ID NO: 16529 - protein, 509 aa, Zea mays
MIANGLRKSSAASSQVSKLVKYIASAGSLQGGHSLSEPSARHYSSEPSLQATEENGFKGHSMLAPFTAGWQSTDVHPLVIERSEGSYVYDSNGKKYIDALAGLWCTALGGNEPRLVKAATEQLNKLPFYHSFWNRTTKPSLDLANDILSMFTAREMGKVFFTNSGSESNDSQVKLVWYYNNALGRPDKKKFIARSKSYHGSTLIAASLSGLPALHQKFDLPAPFVLHTDCPHYWRFRLPDETEEEFSTRLANNLENLVLKEGPETIAAFIAEPVMGAGGVILPPKTYFEKIQAVLKKYDILLIADEVITAFGRLGTMFGCDMYNIKPDLVSIAKALSSAYMPIGAILVSPEITDVIYSQSNKLGSFAHGFTYSGHPVSCAVAVETLKIYKERNIVEHVNKIAPRFQEGIKAFSGSPIVGEIRGLGLILGTEFVDNKSPNDPFPAEWGVGSIFGAECEKRGMLIRVAGDSIMLSPPLIMTPNEVEEIISKFGDALKATEERIGELKSRKN

SEQ ID NO: 16530 - protein, 667 aa, Pyrococcus furiosus DSM 3638
MSIGVRMSVKVVCPYCGFGCNLLVDTITKKVRPYRGEPNRGKLCPKGLFALEHVYSKDRLRYPLKREGSDFKRISWERAISEIAEKIREIIENYGPSSIAFIASSKITNEENYLLQKIARLLGTNNIDNCARLCHESSVHALKLTLGAGIQTNPYSDLEKFKALMIWGYNPAETHPVVMQYIMNAKKNGAKIIVVDVRETTTMKFGDYKVIIRPGTDITLANAIMNVIIENRWYNKDFIEKRTVGFSEIRMGVKKYTPEYAEKITGVPARLIKEIAEAFAKAGSGAILWGMGVTQQIAGVENVLALINIALLLGYFGEKGGLYPMRGQNNVQGAAYMGTLSEFLPGYVPLSDSEFRKKVAKLWGVEDLPTERGLYLTEYWDAILNGDLKVLYIVGENPAISDANVLKVRKALTKLELLVVQDIFLTRTARYAHYVLPAAAFCEKEGSYMNSERRIQWSHKACEPLGESKPDWEILTMLANALGLRGFNYKRVEEITEEYFKLFPELENRSVEELKNSEGIVIPSPRLYTDRFLTPGGRARFISVEQIMPWEEPNGEYPLILTTVRLITHYNTGEMTMRSPSLTKMIGEPFVLISREDAQEYGIKEGDYVVVETRRGNLTLKAKISNIQRGVIAIPFHFEANVLTNDALNKAGTPELKFSAARIRKVS

SEQ ID NO: 16531 - protein, 464 aa, Pseudomonas putida KT2440
MAVYNYDVVVLGSGPAGEGAAMNAAKAGRKVAMVDDRRQVGGNCTHLGTIPSKALRHSVRQIMQFNTNPMFRAIGEPRWFSFPDVLKSAEKVIAKQVASRTGYYARNRVDVFVGTGSFADEQTVEVVCPNGVVEKLNAKHIIIATGSRPYRPADIDFHHPRVYDSDTILSLSHTPRKLIVYGAGVIGCEYASIFSGLGVLVELVDNRGQLLSFLDSEISQALSYHFSNNNITVRHNEEYERVEGLDNGVILHLKSGKKIKADALLWCNGRTGNTDKLGLENIGIKVNSRGQIEVDEAYRTTVPNIYGAGDVIGWPSLASAAHDQGRSAAGSIVDNGSWRFVNDVPTGIYTIPEISSIGKNEQELTQAKVPYEVGKAFFKSMARAQIAGEPQGMLKILFHRETLEILGVHCFGYQASEIVHIGQAIMNQPGEQNNLKYFVNTTFNYPTMAEAYRVAAYDGLNRLF

SEQ ID NO: 16532 - protein, 189 aa, Vibrio cholerae
EGELTQAIEDRANAYISQQLAGVKRMPIALAKQSELLKQVDLVKPYVDDLVNVVDMAAIQKAKLKIGVDPLGGSGIDYWRQIGNAYQLDLTLVSEAIDPSFQFMSLDKDGVIRMDCSSPYAMAGLLALKDEYDLAFGNDPDYDRHGIVTPKGLMNPNHFLAVCIDYLYRHRQGWAGHVAVGKTLVSSAM

SEQ ID NO: 16533 - protein, 274 aa, Heliobacillus mobilis
MNVSLLENRRIGFIGGGAMAEALLSGLVRLVPPQAITVSDPNPSRLAYLQSEMAVQTTSDNSVVCEQSDIVVLAVKPQVLPAVLTPLKTAICSKHLVISIAAGITLAQLESWLSPEVPLIRVMPNTPALIGKGASALAGGRAVSEQDVQTAKALLEAVGIAEVLPETYLNAVTGFSGSGPAYVYLFIEALIDAGVKEGLTRDLARKLAIQTVIGSAQLLIETGNHPAIERDKVTSPGGTTIAGVQALEDGGFRSAVFAAVHAGTKRARELSGSQ

SEQ ID NO: 16534 - protein, 554 aa, Haemophilus influenzae R2866
MKGNTMKNINPTHTQAWKFLEAHKAELSNTTIQDLFKQEKNRFDDYSLTFNNQILVDFSKNNINQTTLSLLRQLAQECSLDSAKEAMFTGEKINRTENRAVLHTALRNRANTPVLVDGKDVMPEVNAVLAKMKDFCQRIISGEWKGYTGKAITDVVNIGIGGSDLGPYMVTEALRPYKNHLNMHFVSNVDGTHIAETLKKVNPETTLFLVASKTFTTQETMTNAQSARDWLLKAAKDESAVAKHFAALSTNAKDVEKFGIDTNNMFEFWDWVGGRYSLWSAIGLSIALSIGFENFEALLNGAHEMDKHFRSTPIEKNIPTTLALVGLWNTNFLGAQTEAILPYDQYLHRFAAYFQQGNMESNGKYVDRDGNVINNYQTGPIIWGEPGTNGQHAFYQLIHQGTTLIPCDFIAPAQSHNPLADHHNKLLSNFFAQTEALAFGKTKEEVEAEFVKAGKSLDDVKNIVPFKVFTGNKPTNSILVQKITPFTLGALIAMYEHKIFVQGVIFNIFSFDQWGVELGKQLANRILPELTDSEKVASHDSSTNGLINQFKAWR

SEQ ID NO: 16535 - protein, 635 aa, Zea mays
MSGAIGGAEVHGFRGAAAQLPRSRVLGRPIRVAPPAAARPGGASAGSIRAVSAPAKKDASEVKRSKVEIIKEKSNFLRYPLNEELVSEAPNINESAVQLIKFHGSYQQTDRDVRGQKNYSFMLRTKNPCGKVPNQLYLAMDTLADEFGIGTLRLTTRQTFQLHGVLKKNLKTVLSTVIKNMGSTLGACGDLNRNVLAPAAPYVKKDILFAQQTAENIAALLTPQSGAYYDLWVDGEKIMSAEEPPEVTKARNDNSHGTNFPDSPEPIYGTQYLPRKFKVAVTAAGDNSVDILTNDIGVVVVSDDAGEPIGFNIYVGGGMGRTHRVETTFPRLADPLGYVPKEDILYAIKAIVVTQRENGRRDDRKYSRMKYLIDRWGIDRFRAEVEKYYGKKFESFRPLPEWQFNSYLGWQEQGDGKLFYGVHVDNGRVGGQAKKTLREIIEKYNLDVSITPNQNLILCGIDQAWREPITTALAQAGLLEPKDVDPLNLTAMACPALPLCPLAQTEAERGILPILKRIRAVFNKVGIKDSESVVVRITGCPNGCARPYMAELGFVGDGPKSYQIWLGGTPNQSTLAESFMDKVKLDDIEKVLEPLFTYWNGTRQEGESFGSFTNRTGFDKLKEVVNKWAESPSAA

SEQ ID NO: 16536 - protein, 1118 aa, Adiantum capillus-veneris
MSSTRHSYSSGGSGKSKHGRRIAQTSADAKLYAAYEESSESGSFDYSQSVSAGKEGISSQLVTAYLQRMQRGGLVQQFGCLIAVEEETFRVLAYGANAPEMLDVATQAVPTMGQYSRLCIGADVRTLLSPASASALDRVIGVVDVSMFNPITVQSRSSGKPFYAILHRNDVGLVIDLEPIRPDDASITGGALQSHKLAAKAIARLQSLPGGDIGLLCDSVVEEVHELTGFDRVMAYKFHEDEHGEVVAEIRRTDLEPYIGLHYPATDIPQAARFLFMKNRVRMICDCRLPPVKLIQDKTLSQPMSLTGSKLRAPHGCHTQYMANMNSISSLVMAVIVNDSDDDSPGHSSQGIKLWGLVVCHHTSPRYVPFPVRSACEFLMQVFSLQLNMEVGMAAQVREKHILRTQTLLCDMLLRDAPIGIVSQSPNIMDLVTCDGAALYYGKKCWLLGTTPTEAQIVDIAAWLLDCHKDSTGLSTDSLAKTGYPEASCLGDAVCGLAAAKITATDFLFWFRSHTAKEVRWGGARHDPEERDDGRRMHPRSSFKAFLEVVKQQSLPWEDVEMDAIHSLQLILRGSFQDIDDSNTKTMIHARLNDLKLQGLDELSTVASEMVRLIETATAPILAVDGQGLINGWNGKVAELTGLSFETAMGKSLAKELVHEESKTIVERVLHLALEGEEEQDIEIHLRTYDQHKQKGVVILIVNTCCSRDVSNNVVGVCFVGQDVTGQKLVLDRFIRIQGDYKAIVQSLNPLIPPIFGADEYGFCSEWNAAMEKLSNWRREEVLGKMLVGEIFGLQMVCCRLQGQDVVTKLMIVLNDAVNGQESEKFPLVFYDRNGRRVEALLIASKRTDADGRITGVFCFLHTASPELLQALIIKRAKEKVDKELSYVKEELKKPLEGLAFTRTVLEGTNLTIEQRQLIKTNAWCERQLRKILEDDLNNIEEGYMDLEMSEFFMGSVIDAVISQGMAASRGKGVQILTEIPNDVKLMCLFGDQARLQQVLADLLFCAINHATTTNEDEKDWVTIKVSRTKTRLDDGVHLMHFEFRISHSGQGISEALVEEMTNKSQKWTPEGLAISISCTLIRLMNGDVKYTTDAGNKCFLVTIQFPLAHRDDATSVR

SEQ ID NO: 16537 - protein, 110 aa, Lolium perenne
MGRSPCCEKMGLKRGPWTAEEDKILVAHITSFGHGNWRALPKQAGLLRCGKSCRLRWINYLRPDIKRGNFSDEEEQSIIQLHQLLGNRWSAIAARLPGRTDNEIKNYWNT

SEQ ID NO: 16538 - protein, 262 aa, Hordeum vulgare subsp. spontaneum
SAESNMCDLLRINTDRGVMIGDGKSRFSIGGKPIYHFVGTSTFSEYTVMHVGCVAKINPEAPLDKVCVLSCGISTGLGASINVAKPPKGSTVAIFGLGAVGLAAAEGARIAGASRIIGVDLNASRFEEARKFGCTEFVNPKDHTKPVQQVLADMTNGGVDRSVECTGNVNAMIQAFECVHDGWGVAVLVGVPHKDAEFKTHPMNFLNERTLKRTFFGNFKPRTDLPNVVEMYMKKELEVEKFITHSVPFSEINKAFDLMAKG

SEQ ID NO: 16539 - protein, 175 aa, Clostridium histolyticum
MEDKKRNILIGKEEIASKIQEIGAIISKDYEGKNLYVLSLLRGSFIFTADLVRELQVKTKIGFMTTSSYGNSENSSGTVKVVNDVPDNIEGFDVLIVDDIMDTGITMEFVVKHLKELGANSVNTCVLLDKPERRVAKIKPDYTCFEIPDLFVVGYGLNYGDYYRNIPYIFNWENN

SEQ ID NO: 16540 - protein, 262 aa, Hordeum vulgare subsp. spontaneum
SAESNMCDLLRINTDRGVMIGDGKSRFSIGGKPIYHFVGTSTFSEYTVMHVGCVAKINPEAPLDKVCVLSCGISTGLGASINVAKPPKGSTVAIFGLGAVGLAAAEGARIAGASRIIGVDLNASRFEEARKFGCTEFVNPKDHTKPVQQVLADMTNGGVDRSVECTGNVNAMIQAFECVHDGWGVAVLVGVPHKDAEFKTHPMNFLNERTLKGTFFGNFKPRTDLPNVVEMYMKKELEVEKFITHSVPFSEINKASDLMAKG

SEQ ID NO: 16541 - protein, 77 aa, Glycine max
MGFWTLLEGFLLFANASAILNEDRFLARRGWTLAEMTGPQRNSLKGQVIGLIYACQFLRLPLILFNVITIIVKLFSG

SEQ ID NO: 16542 - protein, 847 aa, Pseudomonas putida KT2440
MTYNPQVNLTNCDREPIQIPGSIQPHGCLLACDASATVVLRHSVNAPQMLGVANDINGQKLHAVLGDEVTHTLRNALARTRDASRPALSFGVTLPNGAAVDIAAHLYKGTAILEFEPAGASIAEPIELARTLIAQLREIDQTHKLFRDAARFVRAVLGYDRVMIYQLGADGAGKVVAESKRSDLESFMGQYFPASDIPQQARALYLRNPIRVISDAQFNTVAINPVLDPSGEPLDLSYAHLRSVSPIHCEYLCNMGVGASMSISVIVNGELWGMIACHHYAPRTLAMGQRVAAEMFGEFFSLHIETLRSRQKLEAAVRIHKALDSLLRDANQAADIDGFFHARLPRLMSLIPCDGIGMSLLGRWSCAGLAPPQTAVPDLLRLADMVSEGRIWASNRLSTVLPSAQAYFNDVSGVLIIPMSQHPRDYLIFFRKEVVETLDWAGDPNKTYDSGALGDRLTPRKSFAIWKETVHQQSLPWTEQDRQFGDAIRTAIVEVVLHNSELLASERAKADVRQRMLNEELNHRVKNILSLIGALVAHPTPESQTLQDYVATLKGRIQALSLAHDQVVRGDGGGRLAKLLEAELSPYRTAADVIELQGPNVILDARAYSVMALVLHELATNAAKYGALSRAGGKLSVSWAIDASNACAISWREMGGPTVRPPSRSGFGTVLIDRSIPFDLGGTSAVEYHPEGLQGFFRIPAKHLSVAEAAETALPATPLARANGAFAARSGLCVLILEDQLVIAVGLEQILNDAQIKDVITASSEDQAMQLLGSHKPDAAILDVNLGTGTSISVADELVRRQVPFLFATGYGDGISIPEHLQHVPVARKPYDANAILASLQSLLELG

SEQ ID NO: 16543 - protein, 100 aa, Glycine max
  unsure (1)..(100): unsure at all Xaa locations
MASSTISDPAVTXVNHAQADIVTTFTDLKSKTALPTRNTNNDITSIGSNTGRVHFMQAYPAHNKNNTDTVSYLAHLYDAQXSKDEEYLIMNGWMNCLQFK

SEQ ID NO: 16544 - protein, 316 aa, Escherichia coli
TDKLTSLRQYTTVVADTGDIAAMKLYQPQDATTNPSLILNAAQIPEYRKLIDDAVAWAKQQSNDRAQQIVDATDKLAVNIGLEILKLVPGRISTEVDARLSYDTEASIAKAKRLIKLYNDAGISNDRILIKLASTWQGIRAAEQLEKEGINCNLTLLFSFAQARACAEAGVFLISPFVGRILDWYKANTDKKEYAPAEDPGVVSVSEIYQYYKEHGYETVVMGASFRNIGEILELAGCDRLTIAPALLKELAESEGAIERKLSYTGEVKARPARITESEFLWQHNQDPMAVDKLAEGIRKFAIDQEKLEKMIGDLL

SEQ ID NO: 16545 - protein, 140 aa, Glycine max
  unsure (1)..(140): unsure at all Xaa locations
LSTATRAGMVAPFTGLKTMAGFPTSKTNNDITPRASNGGRVSFFXERTPDGKNEVDTLRHLPDDDDAQLAKEPATVLXKGWIPWLEFEKEDGFVYREHKRAPGYYXGRYWTMSDTETFGRTDRSPVLKRLSXGNTGYPQA

SEQ ID NO: 16546 - protein, 424 aa, Xylella fastidiosa Ann-1
MSNSPQTPLVTRQRLSEVRYEIRGELARRARELEAEGRKLIKLNIGNPGAFGFRAPEHLQRAIADDMGRTDPYTHQQGLPIAREAIAAAYARRHYPDVDADRVFVGNGVSELIDLSLRALLNPGDEVLVPSPDYPLWSAATILNDGRPVYYRCAPENGFQPDAVEIETLVSSRTRAIVLINPNNPSGANYSQELLERIVAIAVKHHLLLLVDEIYDQILYDGAVFVPVAPLAGTHPCITFSGLSKVHRACGWRVGWALLSGSSIQVDNLRNAMDLLGALRLCANVPGQYAIDAAVNGPDTITPLCSPGGPLYETRRAVIDACAASEHLSLVVPAGALYAFPSVVGPAARHFDDYAFALELMNEEGVLVVPGSSFNVPYRDHFRVTLLPDAGLIREVFSRIDRALSRRAEVADKVVPLKSRSAAA

SEQ ID NO: 16547 - protein, 378 aa, Microscilla sp. PRE1
MKIKTRIMSLKSKAAIATGDGAFIIDTTEVSSPQPDEVLVRIRAAGLCHTDHDSLRWGKSIVMGHEGAGVVEQVGNQVDALAPGDKVILNWATPCMQCYQCQEGNQHICENHSPVAAGANGHTPGHAHLEGTQWQGKPIERSFNIGTLSEYTLVKASACVKMDGDIPMSSASIISCGVMTGYGSVVNSARLTAGSSSVVLGTGGVGLNVIQGCRISGASKIIAIDINPQRLEMAKVFGATHTILADKNDLGLMQASEEVKKLTSGRGADYAFECTAISALGAAPLAMIRNAGTAVQVSGIEEEITIDMRLFEWDKLYINPLYGKCRPQLDFPKLESLYHKGELKLDEMITRTYQLEDLQQAFDDMLSGKNAKGVIVFD

SEQ ID NO: 16548 - protein, 210 aa, Lycopersicon esculentum
ILHRIDVGIVIDLEPARTEDPALSIAGAVQSQKLAVRAISLLQSLPGGDIDLLCDTVVKSVRELTGYDRVMVYKFHDDEHGEVVAESRRSDLEPYIGLHYPATDIPQASRFLFKQNRVRMIVDCTAIPVRVIQDESLMQPLCLVGSTLRAPHGCHPQYMVNMGNVASLTLAVVINGNDDEVVGGRNAMRLWGLVVGHHSSARFIPFPLRY

SEQ ID NO: 16549 - protein, 317 aa, Oryza sativa
SLTIDFFPLPRVDEQVAIQEAAAAGLRGMEHLILQLSQTEQQQQVDCREITDMTVSKFKKVISMLNRTGHARFRRGPVVAQSSGPAASEPAPVRSSPSAVSRPMTLDFTKAASGYGKDAGFSVSGISAASSSFLSSVTGDGSVSNGRGGGSSSLMLPPPPATSCGKPPLSSAAAAMSAGAGHKRKCHDHAHSENVAGGKYGSTGGRCHCSKRRKHRVKRTIRVPAISSKVADIPADDFSWRKYGQKPIKGSPFPRGYYKCSTLRGCPARKHVERDPTDPSMLIVTYEGEHRHSPSAAGQDHPPSDRKKKPQSLSREV

SEQ ID NO: 16550 - protein, 133 aa, Glycine max
MKLSVFHHQHHPMILNCPLTLTRTHKRLYNNGSYRWLPCHCSHSSTSKTAAEPVTVSLSIEGRRALLSCLLTTVAGVYACDVAGAVSTSRRALRGAKIPESDYTTLPNGLKYYDLKVGNGAEAKMGSRVAVRL

SEQ ID NO: 16551 - protein, 495 aa, Caulobacter crescentus CB15
MTTDSEQPNTDFRPEARAPRGFADKRARDLRAERAILEAVSAVYERYGFEALDTGAFEYADALGKFLPDSDRPNEGVFALQDDDDQWMALRYDLTAPLARFAAQNWETLPKPFRRYAFGPVWRNEKPGPGRFRQFIQCDADTVGSARPEADAEIIAMAVEGLEAAGLPRGTAVLKINNRKLLNGLLTAAGADSAGQKLAVLRAVDKLDRLGVDGVRLLLGEGRLDESGDFTKGAGLKGKAVDQVLDFVQAGSTGGRAATLDNIARVVAGSAEGDEGLLELSRIDAALSSLGIADDQAFIDPSIVRGLEYYTGAVFEAELLLSTTDEKGNKVSFGSIGGGGRYDDLVARFTGNVTPATGFSFGVSRLAAALRAAGREPGGAARGPVVVITFDQAHMGEYFSVVGQLRAAGIAAEVYLGTSGMKPQMKYADRRGAPAVVMLGGDEIAAGTVTIKDLDAGRMAAEGLTDNAAWKAERPGQQTIPRDQLVDAVRKIIGG

SEQ ID NO: 16552 - protein, 499 aa, Pseudomonas sp. ADP
MAKMRKVTTVRGYGAFVGANHLEVEETTGTGQEKTGTKKVIAFKRAIIAAGSQAVRLPFMPNDPRVVDSTGALALSGVPKRMLILGGGIIGLEMGTVYSTLGARLDVVEMMDGLMQGADRDLVKIWQKMNAKRFDNIMLKTKTVGAEATPEGIKVTFAPAEEGGTTPEPQVYDLVLQAVGRTPNGKKIAAEKAGVAVTDRGFINVDIQMRTNVPHIFAIGDIVGQPMLAHKAVHEAHVAAEVIAGELQGNKELASAAFNARVIPSVAYTDPEVAWVGLTEDQAKAQGIKVKKGLFPWTASGRAIANGRDEGFTKLLFDDSPEAATPRISSPGVIFHAATGIDAATVAPVQTTLQKRILRAMGGGRSGHRQDHPPASDAGREHRHGGGSGAWQLHGCAACAQVSPQPSYPDKARTGDGSGLVLCVPKQSPQNTVHLYSIHVSHFQAQALQPTPPRTHAAVPNGSRALRDLARVGQRGSVRRPGRPPHPQALRAQSVCQVS

SEQ ID NO: 16553 - protein, 303 aa, Physcomitrella patens
MDQYEKVEKIGEGTYGVVYKARDRLTNETIALKKIRLEQEDEGVPSTAIREISLLKEMHHGNIVRLQDVVHSEKRLYLVFEYLDLDLKKHMDTCPDLAKDPRLIKTFLYQILRGIAYCHAHRVLHRDLKPQNLLIDRRTNALKLADFGLARAFGIPVRTFTHEVVTLWYRAPEILLGSRHYSTPVDVWSVGCIFAEMVNQRPLFPGDSEIDELFKIFRTLGTPNEEVWPGVTSLPDFKTAFPKWPPKPLSSVVPSLEPAGIDLLEVCDLSTPASEFCVVLFFFIISTFSLIVRLKQCMQSYAS

SEQ ID NO: 16554 - protein, 459 aa, Rhodospirillum rubrum
MADYDYDLLTIGAGSGGVRASRLAGGFGARVAVVEGSRIGGTCVMRGCVPKKLLVYGAQYANDLEDMIGYGWSMGGVAFDWPSLITAKNRELDRLEGVYRTMLRNGNVALLEGRARFLDAHSVDIDGKTVTADKILIAVGGWPQMPVIPGIEHAITSNEALDLMVMPERLTIVGGGFIAVEFASIFNALGVDVSVVIRKDKILRGFDADIRDTLTEELVRRGITIVPGTVINRIDKRPGGGYRLIRTPGEAIDTDLVMYATGRAPNTAGLGLEAAGVKVAASGAVIVDEWNRTTVDTIYAIGDVTDRIALTPVAINEAIAFAHTVFNDTPRVMDYENVASAVFSQPPVGTVGLTEEQARARGPVRIFRTRFRAMKHVLAGRDEKTMMKLVVDARTDRVLGCHMVGADAPEIIQGLAVALKCGATKAQFDATIGIHPTAAEEFVTMRDPVPEPVFAQPAD

SEQ ID NO: 16555 - protein, 389 aa, Lactobacillus plantarum WCFS1
MKVGIDKLHFATSHLYVDMAELATARQAEPDKYLIGIGQSKMAVIPPSQDAVTLAANAAAPMLTATDIAAIDLLVVGTESGIDNSKASAIYVAKLLGLSQRVRTIEMKEACYAATAGVQLAQDHVRVHPDKKALVIGSDVARYGLNTPGEPTQGGGAVAMLISADPKVLALGTESSLLSEDVMDFWRPLYHTEALVDGKYSSNIYIDYFQDVFKNYLQTTQTSPDTLTALVFHLPYTKMGLKALRSVLPLVDAEKQAQWLTHFEHARQLNRQVGNLYTGSLYLSLLSQLLTDPQLQPGNRLGLFSYGSGAEGEFYTGVIQPDYQAGLDHGLPQRLARRRRVSVAEYEALFSHQLQWRADDQSVSYADDPHRFVLTGQKDEQRQYLDQQV

SEQ ID NO: 16556 - protein, 261 aa, Oryza sativa (japonica cultivar-group)
MTSTVPAAATATASRLILVHGAGHGGWCWYRVATMLRAAGHRVHAPDLAASGADARRLRDAPTFADYSRPLLDAVRALPGGERAVLVGHSLGGMSVALAAEELPERVAAAVFVAAFMPDCASPRPSVIDKLPWLDWMDSVRDEEHAPPSVKLGPELMRRKFYQLSPEEDFTLAQSLVRMGSSYVDDMRRRPPFSEARYGAARKVYVVCGEDLAIVEAYQRRMIADCPVEEVREIAGADHMAMFSAPAALAGHLADVANTYA

SEQ ID NO: 16557 - protein, 314 aa, Arabidopsis thaliana
MDPKNLNRHQVPNFLNPPPPPRNQGLVDDDAASAVVSDENRKPTTEIKDFQIVVSASDKEPNKKSQNQNQLGPKRSSNKDRHTKVEGRGRRIRMPALCAARIFQLTRELGHKSDGETIQWLLQQAEPSIIAATGSGTIPASALASSAATSNHHQGGSLTAGLMISHDLDGGSSSSGRPLNWGIGGGEGVSRSSLPTGLWPNVAGFGSGVPTTGLMSEGAGYRIGFPGFDFPGVGHMSFASILGGNHNQMPGLELGLSQEGNVGVLNPQSFTQIYQQMGQAQAQAQGRVLHHMHHNHEEHQQESGEKDDSQGSGR

SEQ ID NO: 16558 - protein, 884 aa, Rhodospirillum centenum
MPDRTTDDFGPFTEQIRGTIDGMGTAEFDALPVGAIQVDGSGVIHRYNRTESRLSGRIPERVIGRNFFTEVAPCTNIPAFSGRFMDGVTSGTLDARFDFVFDFQMAPVRVQIRMQNAGVPDRYWIFVRKLEDLRPPGPAPEAPAAHTASVTGEVVDFSVCEQEDIRRVGAIQPWGAVLAVDPRDWTVCAASDNAQALLDCARPPLGRPLGEVLDAGPLAALRDWLPDRTSRSWRGEMARGRRIDIRAHRSGGCVVLDLEPLTARPGEAPVCSLLAAVEADVAVIRQASSLTGLAQACARSVRVLTGFERAIVYRFDADWHGEVIAEDKVEDWPQSFAGLHFPASDIPRQARELYSQSLSRHVPDRDYVPVPVHRIEGTEPLDLSFSRHRSLSPVHLQYLRNMGVTASMSFSILVEGRLWGMVAAHHRQPHHVAIPRRSAAMTVVEAVALSIAAVERAEAMRGRQVDHAVLTALMVQMASSDAVEPALTQQATRLTDLFGATGAALSIDGHLLTVGDWPPPAEVAALRAWLEPRWGSAGLFRTSSLSSVFPDATAYRQKASGCLALRLSGGDFVMWTRPEEPRQITWGGDPAKALGAAGQRPMPRISFDRWVEERRGHAAPWPTWADEIATSLRHAISDMMLRHLRHVKELSDQLAASNEAKSRFLANMSHELRTPLNAIIGFSDLMMSGMAGTLPPRIQDYVQSIHASGEHLLRMVVNDVLDLSRIEAGRMELSPESLDAGILAAECVGMLLPRAVRGEVLLEVQAESPLPLTADALRLRQILLNIIGNAVKFTPPGGRVDVRARALAGGGAVFTVRDTGPGMTPEEVLTAMEPFRQVAQTRAAVEGTGLGLPIAKSLVDLHAGNLAIETAPGLGTTVTIEIGA

SEQ ID NO: 16559 - protein, 156 aa, Haemophilus influenzae
NRTNTPVLVDGKDVMPEVNAVLAKMKDFCQRIISGEWKGYTGKAITDVVNIGIGGSDLGPYMVTEALRPYKNHLNIHFVSNVDGTHIAETLKKVNPETTLFLVASKTFTTQETMTNAQSARDWLLKTAKDESAVAKHFAALSTNAKDVEKFGIDTN

SEQ ID NO: 16560 - protein, 520 aa, Candida albicans SC5314
MLRVNSRLLTTRKSQFMFTSNSLRFLATFKPADPLTTHDINPQTVEAKYAVRGKIPIIADELNELIQKQPQSHGLPFSKIINANIGNPQQLEQRPLTWYRQVLSLLQYPDLLKNGDPETVKSLYPEDVIERAQSILKHIGSIGAYSHSQGASYFRQSIAEFITNRDGGYVSHANNIFLTSGASTAVSYLLQILSVNENSGFLIPIPQYPLYTATIALNNAKPIGYYLDESNHWSTNPQEIRELIETNQSQGINIKALVVINPGNPTGAILSSQDIIELIDIAAEYGIVLIADEVYQENIFKGKFVSFKKILSELIEQDPQTYKHVQLASLHSTSKGVSGECGQRGGYMELVGFKPEVKDVVFKLASINLCSVVSGQALMELMINPPQEGDPSYPLYKSETESIHNDLESRAESLYQAFLQMEDIKCNKPMGAMYIFPTLDFDPARYHKLYSRAKNSNLQIDDIYCIELLEGTGICCVPGNGFGQKPDTYHLRTTFLPPGKEWIDKWINFHKSFIKKYKDE

SEQ ID NO: 16561 - protein, 262 aa, Hordeum vulgare subsp. spontaneum
SAESNMCDLLRINTDRGVMIGDGKSRFSIGGKPIYHFVGTSTFSEYTVMHVGCVAKINPEAPLDKVCVLSCGISTGLGASINVAKPPKGSTVAIFGLGAVGLAAAEGARIAGASRIIGVDLNASRFEEARKFGCTEFVNPKDHTKPVQQVLADMTNGGVDRSVECTGNVNAMIQAFECVHDGWGVAVLVGVPHKDAEFKTHPMNFLNERTLKGTFFGNFKPRTDLPNVVEMYMKKELEVEKFITHSVPFSEINKAFDLMEKG

SEQ ID NO: 16562 - protein, 446 aa, Pseudomonas syringae pv. tomato str. DC3000
MANVSMEAKGLLILGFPIAATMIAQTLMSLTDLMLVSRLGEKQVAGVSLGIAVYSFGMLFGLGVITAVTPMIAKAYGRKDFNAVSNYTRQGLWVAALVAMPGVIALILTRSILLFLNVEAETANIASDYCVGALMGLPAFLIYVNLRCFLSAIGRPKTTTWIMFLAVPVNYIIGHVLIFGVMDAEGLGITGAGLASSVTRLAILSTVIATLKYGADFKCFSLFENVMNVKPVVVKKIVLLGLPVGVRILLAEGMLPIIALLISTLGTIDLVAHMVAVRLSGVSAVIALGFSSAASTRVAWQVAANNQNGVRVTGYVASALAFGVSALLAMLLIFFPTELVMLLFDIDDAEVLALTSHLLKVVAAYQILNAIQTAVVGSLLGVSDTKIPTCLVLIGNWLVGLASAYGLVVLFEATVTAVWGGLVLGQVFVVVTCLCRFHMKTKALHE

SEQ ID NO: 16563 - protein, 434 aa, Heliobacillus mobilis
MEGFCVSVIAEVYAREILDSRGNPTVEVEVVLEDGTVGRAAVPSGASTGAYEAVELRDGDKERYLGKGVLNAVDNVNTEIAPEIIGWDVTRQMEIDSALIELDGTPNKGRLGANAILGVSMACAKAAAQYQGLPLFQYLGGVFARELPVPMMNILNGGKHADNNVDIQEFMVMPVGAQSFSEGLRMGVEVFHSLKKVLQSKGLNTAVGDEGGFAPNLKSNEEALKVILEAVQAAGYKAGEDILLAVDAAASEMYKDGKYHLEGEGKVMTSAEMVDFWEDLVNRYPIISIEDGLNEDDWDGWKLLTDRLGKRAQLVGDDLFVTNTEKLSKGIETGVGNSILIKVNQIGTITETLAAIEMARRAGYTAVISHRSGETEDATIADLAVAVNAGQIKTGAPSRTDRVAKYNQLLRIEEELDEQATYRGKKTFFNLERR

SEQ ID NO: 16564 - protein, 262 aa, Hordeum vulgare subsp. spontaneum
SAESNMCDLLRINTDRGVMIGDGKSRFSIGGKPIYHFVGTSTFSEYTVMHVGCVAKINPEAPLDKVCVLSCGISTGLGASINVAKPPKGSTVAIFGLGAVGLAAAEGARIAGASRIIGVDLNASRFEEARKFGCTEFVNPKDHTKPVQQVLADMTNGGVDRSVECTGNVNAMIQAFECVHDGWGVAVLVGVPHKDAEFKTHPMNFLNERNLKGTFFGNFKPRTDLPNVVEMYMKKELEVEKFITHSVPFSEINKAFDLMAKG

SEQ ID NO: 16565 - protein, 236 aa, Arabidopsis thaliana
MSSNDRDHRRFNSDHHSFWPNPSTYDLNSKIMLAAVASLSGVILIVFALHLYARFVLRRRREAFRGLPVIFRHPFEMPKRGLNPTVIASLPTFTVGATDGVAASATECAVCLSVLKEQDKARELPNCKHIFHVDCVDTWLTTCSTCPVCRTEVEPRPRLEPEPREGPVGTAPQLLVETRLNLTVEAASSSSSDNKTVVSPASRLNSFRKILTRERSSNRINHSCPDQDRVADLERH

SEQ ID NO: 16566 - protein, 308 aa, Streptococcus agalactiae 2603V/R
MNKVSFLFAGQGAQKLGMARDLYETFPIVKETFDKASHVLGYDLRELIDKDLDKLNQTKYTQPAILTTSTAIYRLILKEIELRPDMVAGLSLGEYSALVASGAIRFEDAVVLVARRGQLMEAAAPAGSGKMVAVLNADRQIIEDACKKASQFGIVSPANYNTPKQIVIGGESIAVNAAVEELKQQGVKRLIPLNVSGPFHTALLKPASQKLSDVLDKVHFSVSEIPVIGNTEAQIMKKDDIKSLLARQVMEPVRFDESIETMKKMGMTQVVEIGPGKVLSGFLKKIDSSLSVHSVEDKIGFNNLKELN

SEQ ID NO: 16567 - protein, 448 aa, Xylella fastidiosa Ann-1
MREHPDTLPLVPIVRGEGVWLVGHDGRRYLDAVSSWWTNLFGHADPRISAAIAAQARTLEHVMLAGFSHEPAVRLAEALLRLAPRQDGREPLSKVFYADNGSAGVEVALKMAFHYFRNRGEEQRTRFIALHNGYHGETIGALAVGDIPLYRRVYAPLLTEVLFAPSPDAYLAEPGQSAAEYALQAAEALEALFKRYSGQICALILEPLLQCAGGMRMHHPVYLHRVRELCDAHGALLICDEIATGFGRTGTLFACEQACSAISTDTDDKQLGIMPDLLCLSKGLTGGVLPLAAVLTTQQLYEEFLDDSRERAFLHSHSYTGNPLACIAALTTLDIFENDCIIERNQVTAARMTQLAASLSGHPHVADVRQTGMVVAFELTRDGNKRTPFPPQARLGLHVYRAALARGVILRPLGDVVYWMPPYCVDEEQLHLLAETTRVAIDEAIACV

SEQ ID NO: 16568 - protein, 254 aa, Ralstonia eutropha JMP134
MATNLFDLTGKIALVTGASRGIGEEIARLLAEQGAYVIVSSRKLDDCQAVADEIVKAGGQAEALACHVGRMEDVAAVFEHIRSKHDRLDILVNNAAANPYFGHILDTDLGAYEKTVEVNVRGYFFMSVEAGRMMKAQGGGAIVNTASVNALQPGEKQGIYSITKAAVVNMTKAFAKECGPLGIRVNALLPGLTRTKFSGALFEDPAIYERWLAEIPLRRHAEPREMAGTVLYLVSDASSYTNGECIVVDGGLTI

SEQ ID NO: 16569 - protein, 396 aa, Escherichia coli CFT073
MFENITAAPADPILGLADLFRADERPGKINLGIGVYKDETGKTPVLTSVKKAEQYLLENETTKNYLGIDGLPEFGRCTQELLFGKGSALINDKRARTAQTPGGTGALRVAADFLAKNTSVKRVWVSNPSWPNHKSVFNSAGLEVREYAYYDAENHTLDFDALINSLNEAQAGDVVLFHGCCHNPTGIDPTLEQWQTLAQLSVEKGWLPLFDFAYQGFARGLEEDAEGLRAFAALHKELIVASSYSKNFGLYNERVGACTLVAADSETVERAFSQMKAAIRANYSNPPAHGASVVATILSNDALRAIWEQELTDMRQRIQRMRQLFVNTLQEKGANRDFSFIIKQNGMFSFSGLTKEQVLRLRQEFGVYAVASGRVNVAGMTPDNMAPLCEAIVAVL

SEQ ID NO: 16570 - protein, 308 aa, Pseudomonas putida KT2440
MTSKLEQLKQFTTVVADTGDLDAITRLKPVDATTNPSLLLKAAAIPGYADLLKQVKADAKGNVDLACDKFAVAVGSGILKVIPGRISTEVDARLSFDEPALLNKARQLIALYEAAGVAKERVLIKLASTWEGIRAAEQLEKEGIQTNLTLLFSFAQAQACADAGVFLISPFVGRIYDWYKKSTGQEYVGAEDPGVQSVTRIYNYYKANGYNTVVMGASFRNIGQIEQLAGCDRLTISPELLQQLSDDQGELPQVLKPGNAGEAKQHLNESQFRWAMNEDAMGTEKLAEGIRQFARDQEKLEKLIAEKA

SEQ ID NO: 16571 - protein, 466 aa, Vibrio parahaemolyticus RIMD 2210633
MAHVNHYDVIVIGSGPGGEGAAMGLTKAGLNVAIVEKESSVGGGCTHWGTIPSKALRHAVSRIIEFNSNPLFCRNNTSLHATFSDILGHAKTVIDKQTRLRQGFYDRNDCTLLFGTARFIDTHSIAVMQNDGTEETYSADKFVIATGSRPYRPSDVDFLHERIYDSDSILSLKHDPRHIIIYGAGVIGCEYASIFRGLGVKTDLINTRDRLLEFLDNEVSDALSYHFWNSGVVIRNDETYEKIEGTEDGVIIHLQSGKKMRADCLLYANGRTGNTDKLSLDVVGLESDSRGQLKVNRNYQTAVEHIYAVGDVIGYPSLASAAYDQGRFVAQAITKGQAENYLIEDIPTGIYTIPEISSVGKTEQELTAAKVPYEVGRSSFKHLARAQIAGKDVGSLKILFHRETKEILGIHCFGERAAEIIHIGQAIMEQKGQANTIEYFVNTTFNYPTMAEAYRVAALNGLNRLF

SEQ ID NO: 16572 - protein, 138 aa, Zea mays
  unsure (1)..(138): unsure at all Xaa locations
THSSAWGRGGXRSHTLHGSGNGSKSRCYRSSRLAKLVDYLHSLNENTDELDVHLILLSLDKQITPSLQQPHLCCRPTLSVKHLCEYVAHQTPLLVEEVEILAIKGSCSTVCDKSFDETSFSDELTTLGIDPSQDELET

SEQ ID NO: 16573 - protein, 251 aa, Candida albicans SC5314
MSRRYDSRTTIFSPEGRLYQVEYAQEAISNAGTAIGILSPEGVVLACEKKVTSKLLDDDGSAEKLYIINDQMICAVAGMTADASILVNNARIQAQQYLKLYDEEIPCEMLINRVCDVKQGYTQHGGLRPFGVSFLYAGYDDRYQFQLFTSNPSGNYSGWKATSIGANNSAAQTLLKKDYKDDLTLKDACELAIKVLSKTMDASNINSEKLEFATLSLGKDNKVLHKIWNDKDIDILIKASGVLNEKNSDDE

SEQ ID NO: 16574 - protein, 463 aa, Arabidopsis thaliana
MRSDHYFSLRSPTEDFVGGYPSDEEWHGYINNNDRVLLKVISYSSPTSAGAECLDHDCSWVEQWIHRAGPREKIYFRPEEVKAAIITCGGLCPGLNDVIRHIVITLEIYGVKNIVGIPFGYRGFSDKDLTEMPLSRKVVQNIHLSGGSLLGVSRGGPSVSEIVDSMEERGINMLFVLGGNGTHAGANAIHNECRKRKIKVAVVGVPKTIDNDILHMDKTFGFDTAVEEAQRAINSAYIEAHSAYHGIGVVKLMGRNSGFIAMQASLASGQVDICLIPEVLLCYYFKFQNMIDELALRDPMHLKVPFNLHGPNGVLKHLKYLIETKGSAVICVAEGAGQNFLEKTNAKDASGNAVLGDFGVYIQQETKKYFKEISTPIDVKYIDPTYMIRAVRANASDGILCTVLGQNAVHGAFAGYSGITVGIINTHYAYLPITEVIAYPKSVDPNSRMWHRCLTSTGQPDFI

SEQ ID NO: 16575 - protein, 156 aa, Haemophilus influenzae
NRANTPVLVDGKDVMPEINAVLAKMKDFCQRIISGEWKGYTGKSISDVVNIGIGGSDLGPYMVTEALRPYKNHLNMHFVSNVDGTHIAETLKKVNPETTLFLVASKTFTTQETMTNAQSARDWLLKAAKDESAVAKHFAALSTNAKDVEKFGIDTN

SEQ ID NO: 16576 - protein, 159 aa, Bacillus subtilis
EFPQMNSMWAGDKIIQKKDINISIAVATEDSLFVPVIKNPDEKTIKGIAKDITGLAKKVRDGKLTADDMQGGTFTVNNTGSFGSIQSMGIINYPQAAILEVESIDKRPVVMDNGMIAVRDMVNLCLSLDHRVLDGLVCGRFLGRVKQILESIDEKTSVY

SEQ ID NO: 16577 - protein, 406 aa, Zea mays
MFGGSLEAGRVAVSLTPRGPRPIGRTALWCTGVSRPSSLTPSPATPSSILPDGAPGSRNKMSNRATHWCYACRRPIRLRGQDIVCPNCNDGFIQEISEMGGILNTYGLIEPDFEERRARRFGMMDAMSSLMRQRMAEMGRDGLFDIRGRQGTGTEYGRRSTAIPTLVFGGIPSPAVGSSDVNVVIRGGRRAGAARPNFSSLVVGPSLEALFEQLLLQNNRQGPPPAPQSAIDSMPVVKINRRHLDEDPQCAVCKDKFEVGAEAREMPCKHLYHTDCIIPWLVQHNSCPVCRHPLPSQRSGSSTSSARVPSAYYNETACPPAVARADFDPVPSAYYNETATDPPAVTRADFDPAPGNYGSESQESHVPFSFLWPFGPSSSYQYEENVDEPAVYDPNQIAYSAWHYDH

SEQ ID NO: 16578 - protein, 262 aa, Hordeum vulgare subsp. spontaneum
SAESNMCDLLRINTDRGVMIGDGKSRFSIGGKPIYHFVGTSTFSEYTVMHVGCVAKINPEAPLDKVCVLSCGISTGLGASINVAKPPKGSTVAIFGLGAVGLAAAEGARIAGASRIIGVDLNASRFEEARKFGCTEFVNPKDHTKPVQQVLADMTNGGVDRSVECTGNVNAMIQAFECVHDGWGVAVLVGVPHKDAEFKTHPMNFLNERTLKGTFFGNFKPRTDLPNVVEMYMKKELEVEKFITHSVPFLEINKAFDLMAKG

SEQ ID NO: 16579 - protein, 480 aa, Burkholderia fungorum LB400
MSQFANYIDGQWVDGASVSRNVNPSNLDDVIGEFAQADAEQTQRAIRAARNAFAQWSLSTPQQRFDLLDQAGSTILARKAELGRLLAREEGKTLPEAIGEVGRAGQIFKFFAGEALRIGGEIVPSVRPGMTVEVTREPLGVIGLITPWNFPIAIPAWKIAPALAYGNTVVVKPADLVPASTWELVRIIAEAGAPAGVINLVMGQGAVVGEALVSSPQVDAVSFTGSVATGRAIGAKCFASGKKFQLEMGGKNPMVVLDDADLDVAVEACINGGFYSTGQRCTASSRFIVTEGIHDRFIDAMKARMQALKVGDALADGTHIGPVVDDKQLQQDERYIAIAREEGGTIFGGERIERDTRGYFLAPALITDTTPDMRINREEVFGPVASVIKVKDYNEALAVANDTEFGLSAGICTTSLKYSSHFRRHVQAGMVMVNTATAGVDYHVPFGGRKGSSYGPREQGSYAREFYTTVKTAYVSPGAV

SEQ ID NO: 16580 - protein, 396 aa, Staphylococcus epidermidis ATCC 12228
MAKKIVSDLDLKGKVVLERADFNVPIKDGEITNDNRIVQALPTIEYIIEQGGKLVLFSHLGKVKEESDKEGLSLKPVAENLSKKLGKEVIFVPETRGEKLETAIENLNEGDVLLVENTRFEDLDGKKESKNDPELGKYWASLGDVFVNDAFGTAHREHASNVGISTHLETAAGYLMEKEIKFIGGVVNDPQKPVVAILGGAKVSDKINVIKNLVNIADKILIGGGMAYTFIKAQGKEIGLSLLEEDKIDFAKDLLENNGDQIVLPVDCKIAKEFSNDAKITEVSINEIPSDQEAMDIGPKTVELFNKELQGAHTVVWNGPMGVFEFSNFAKGTIGVCESIAKLEDATTIIGGGDSAAAAISLGFEDDFTHISTGGGASLEYLEGKELPGIKAINDK

SEQ ID NO: 16581 - protein, 366 aa, Burkholderia fungorum LB400
MTAMMKAAVFIEPGRIELADKPVPDVGANDALVRITTTTICGTDVHILKGEYPVAKGLTVGHEPVGVIEKLGSAVLGYQEGQRVVAGAICPNFNSYAAQDGVPSQDGSYLIARGLCGCHGYKATAGWRFGNMIDGTQAEYVLVPDAQANLAPVPDGLTDEQVLMCPDIMSTGFKGAENANIRIGDTVAVFAQGPIGLCATAGARLLGASTIIAVDGNDHRLEIARKMGADVTLNFKNCDVVDEILKLTGGRGVDSSIEALGTQSTFESALRILKPGGTLSSLGVYSSDLTIPLGAFAAGLGDHKINTALCPGGKERMRRLLNVVESGRVDLGALVTHHYKLDDIVAAYDLFANQRDGVLKVAIKPH

SEQ ID NO: 16582 - protein, 505 aa, Staphylococcus epidermidis ATCC 12228
MAKQPTALIILDGFANRESEHGNAVKQAHKPNFDRYYEKYPTTQIEASGLDVGLPEGQMGNSEVGHMNIGAGRIVYQSLTRINKSIEDGEFFDNTVLNNAVKHVKDNGSALHVFGLLSDGGVHSHYKHLFAILELAKKQGIDKVYVHAFLDGRDVDQKSALKYIEETEDKFKELGVGQFASVSGRYYAMDRDKRWDREERAYNAIRNFEGPTFTSAKAGVEANYKNDVTDEFVEPFIVEGQNDGVNDGDAVIFYNFRPDRAAQLSEIFTNKAFDGFKVEQVDNLFYATFTKYNDNVDAEIVFEKVDLNNTIGEVAQDNGLKQLRIAETEKYPHVTYFMSGGRNEEFEGERRRLIDSPKVATYDLKPEMSAYEVKDALLEELDKGDLDLILLNFANPDMVGHSGMLEPTIKAIEAVDECLGEVVDKIIDMGGHAIITADHGNSDQVLTDDDQPMTTHTTNPVPVIVTKEGVTLRETGRLGDLAPTLLDLLNVKQPSEMTGESLIKH

SEQ ID NO: 16583 - protein, 279 aa, Zea mays
MAARLRRSPISSPIPPPSLCISLYPPPHSSVETTYPACSTYLRSPAMTVLDAESRFHVLAVDDSIIDRKLIEMLLKSSSYQVTTVESGNKALELLGLRDNGAEDASPPSSSSSSSSSSSPDHQEIDVSLIITDYCMPGMTGYDLLKRVKGSSSLKDIPVVIMSSENVPARISRCLQDGAEEFFLKPVKPADMKKLKSHLLKRKQPNQKNKPQAQAVESPEQQLDPHPQPVHEPEEAAADRNGVNKRKAAAMEEGLTVVVTAPESTKPRRLSTSSLTVET

SEQ ID NO: 16584 - protein, 262 aa, Hordeum vulgare subsp. spontaneum
SAESNMCDLLRINTDRGVMIGDGKSRFSIGGKPIYHFVGTSTFSEYTVMHVGCVAKINPEAPLDKVCVLSCGISTGLGASINVAKPPQGSTVAIFGLGAVGLAAAEGARIAGASRIIGVDLNASRFEEARKFGCTEFVNPKDHTKPVQQVLADMTNGGVDRSVECTGNVNAMIQAFECVHDGWGVAVLVGVPHKDAEFKTHPMNFLNERTLKGTFFGNFKPRTDLPNVVEMYMKKELEVEKFITHSVPFSEINKAFDLMAKG

SEQ ID NO: 16585 - protein, 434 aa, Staphylococcus epidermidis ATCC 12228
MPIITDVYAREVLDSRGNPTVEVEVLTESGAFGRALVPSGASTGEHEAVELRDGDKSRYLGKGVTKAVENVNEMIAPEIVEGEFSVLDQVSIDKMMIQLDGTHNKGKLGANAILGVSIAVARAAADLLGQPLYKYLGGFNGKQLPVPMMNIVNGGSHSDAPIAFQEFMILPVGAESFKESLRWGAEIFHNLKSILSERGLETAVGDEGGFAPRFEGTEDAVETIIKAIEKAGYKPGEDVFLGFDCASSEFYENGVYDYTKFEGEHGAKRSAAEQVDYLEELIGKYPIITIEDGMDENDWEGWKQLTDRIGDKVQLVGDDLFVTNTEILSKGIEQGIGNSILIKVNQIGTLTETFDAIEMAQKAGYTAVVSHRSGETEDTTIADIAVATNAGQIKTGSLSRTDRIAKYNQLLRIEDELYETAKFEGIKSFYNLDK

SEQ ID NO: 16586 - protein, 262 aa, Hordeum vulgare subsp. spontaneum
SAESNMCDLLRINTDRGVMIGDGKSRFSIGGKPIYHFVGTSTFSEYTVMHVGCVAKINPEAPLDKVCVLSCGISTGLGASINVAKPPKGSTVAIFGLGAVGLAAAEGARIAGASRIIGVDLNASRFEEARKFGCTEFVNPKDHTKPVQQVLADMTNGGVDRSVECTGNVNAMIQAFECVHDGWGVAVLVGVPHKDAEFKTHPMNFLNERTLKGTFFGNFKPRTDLPNVVEMYMKKELEVEKFITHSVPFSEINKAFDLMAKG

SEQ ID NO: 16587 - protein, 816 aa, Clostridium thermocellum ATCC 27405
MKAIIMAGGEGSRLRPLTCDLPKPMVPIMNIPIMEHIINLLKKHGITEIGVTLMYLPQKIKDYFGNGSNFGVNITYFTEDTPLGTAGSVKNAEDFLDETFIVISGDSLTNMNITKAIEFHRMKNSKATLVLTRVDVPLEYGVVITDKSGAITGFLEKPSWGEVFSDTVNTGAYILEPEILKYLEKGKKVDFSQDLFPYLLLKKEPMYGYVMDDYWCDIGDLQAYLQAHYDVLEGKIQLDINGTEIQKGVWVGSGAIIEPGAILNPPCVIGDNCRIESGAVIDSLSVIGNNNVIERDSSVKRSVIWDGNYIEYGSKIRGAILCSKTNLKRYVHIFENAIVGDNCLINERVVIKPNIKIWPQKTVEPFAIVDRNIIWGSKHSKSIFGENGLSGIINVDISPEFATRLGAAYGSIFKKGSKVVVSSTTANSARMFKHAFISGILSVGVEVFNLSSLLTPLARHAINFLSVEGGIHIKLSEDNPNKLKVDFMDSKGASISRVTERKIENSFAREDFKRCSGDEVSRLNNITDFKNYYVRSILNEVNVEAIKNNPPKLCIVSPSDFVISIVVPMLTDLGCKVASFSSTNVSEVDTIVDEIKDNNASFAAFIDSNGETLVLIDKNGNVVKDDLFLCLTSLITFKSVPNSKVVVPITAPSIIETLAERYNGKVVRTKTSPQAVMEQMLNHNLFKNRENMYQFLLNFDAIAGLVKIIEFLCLQNTTLTETIKEIPDFYVSKKKIFCPWELKGRVMRTLITEKDQEKVELLDGVKFILENGWALVLPDADMPLCRVYSEGVTPEVAETISDKYIDKIKAIINDKK

SEQ ID NO: 16588 - protein, 352 aa, Rhodopseudomonas palustris CGA009
MTQMRRQSLVKFDAPLCETIIDAPKPQGREVLVKIERCGLCHSDLHIQDGYADLGGGKKLDTTRGMTLPFTLGHEIAGVVAEVGPDAPQDLIGTKKAVFPWIGCGKCRDCLAGDENLCAKNRFLGVSIDGGFATHVLVPDAKYLLDYDPLPTNVAATLMCSGITAYGALKRLVDRPRQRNLLLIGLGGVGMMGLSLAQAMFKQPIAVADLSPAAREAALKNGAAVAYDPSEPDVAKRIFKETDGGFDGVVDFAGNDKSMNFAVSTVARGGKIVVSGLMGGQFSLPMVQWIYKRMTVEGFMVGTLEETKELLALARAGKVKPTPMKEEPMQDAQKWIDQLRAGKVVGRIMLAN

SEQ ID NO: 16589 - protein, 486 aa, Microscilla sp. PRE1
MIMSTVKNYKLYIDGEWIDATTGESQEILSPTDETVVGTVQMGVEADAQIALEAAERAQKQWKKVPARKRADLLRTFAAEIKANKNQLAELLVREQGKLLAVAKMEVEVTASFIEYACDGARSIEGDIIPSDNPAEHIMIHKIPRGVVVAITAWNFPLALAGRKLGPALVAGNSVVLKPTQETPIATLELGNIANKVGLPKGLINILTGQGSVLGNALVANPITKMVSMTGSTPAGQQIFRTAAENLIHVQLELGGKAPCIVFDDADLEQAVEGAFHSRFDNCGQVCTSNERLYVHESIYNEFMERFMEKVKGLKLGNPMDAATTIGPKVNAKEVAHMEHLVTKSVEEGATVAIGGKKPQGKAFEKGHWFEPTILTDVKQNMTIVHEESFGPILPVIKFSEFNEVIGYANDCEYGLAAMVFTNDMNKIMRLNDELEFGEIYINRGHGEQHQGFHNGYKLSGTGGEDSKYGFEQYMEKKTFYIKYKA

SEQ ID NO: 16590 - protein, 319 aa, Rhodopseudomonas palustris CGA009
MTAAFTFPGQGSQAVGMGKALAEAFPAARAVFDEVDAALGEKLTSIIWEGPAETLQLTENAQPALMAVSLATMRVLETEAGVSVGKDAAFVAGHSLGEYSALAAAGSLSVSDTARLLRIRGQAMQKAVPVGVGAMAALLGLDYDTAVAVAAEAAQGQVCQAANDNGGGQVVVSGHKDAVERAVEIAKGKGAKRAMLLPVSAPFHCSLMQPAAEAMAEALAGVTIKAPAAPLVANVLASPITDPHEIRRRLVEQVTGTVRWRESVAFMASQGVNQFLEIGAGKVLSGLVKRIADGAIGISVGGPNDIVSAKDALAAGRSA

SEQ ID NO: 16591 - protein, 349 aa, Bacillus cereus
MKALLWHNQRDVRVEEVPEPTVKPGAVKIKVKWCGICGTDLHEYLAGPIFIPTEEHPLTHVKAPVILGHEFSGEVVEIGEGVTSHKVGDRVVVEPIYSCGKCEACKHGHYNVCEQLVFHGLGGEGGGFSEYTVVPEDMVHHIPDEMTYEQGALVEPAAVAVHAVRQSKLKEGEAVAVFGCGPIGLLVIQAAKAAGATPVIAVELSKERQELAKLAGADYVLNPATQDVLAEIRNLTNGLGVNVSFEVTGVEVVLRQAIESTSFEGQTVIVSVWEKDATITPNNLVLKEKEVVGILGYRHIFPAVIKLISSGQIQAEKLITKKITVDQVVEEGFEALVKDKTQVKISCFT

SEQ ID NO: 16592 - protein, 119 aa, Xanthomonas axonopodis pv. citri str. 306
MTMRVLLVEDESLVAMLLEDCLAELGYEVAATVADVDAALQAVQAGNLDLALLDINLGGTLSFPIAEELDARGVPYIFVTGYAQGGIPERYRHRHGLQKPFHFRDLKHALSLLQHRSAE

SEQ ID NO: 16593 - protein, 335 aa, Xanthomonas axonopodis pv. citri str. 306
MAEHQEDAAKSRIYEALLQATPDLLYVFDIQHRFVYANQALLTMWGMRWEDACGKTCLELGYEPWHAAMHDEEIEQVIATGQPVRGEVPFPHTTKGLRIYDYIFTPVFGPDGKVEAIAGATRDITEHKQHEQHLQLLINELNHRVKNSLVMVQSLARQSFTNAGSLGDAQEKLDARLLALSRAHDTLTRENWVSADILELTRDAAALYESHDGQRFTLQGDSCRLDPRRALALSMALHELCTNALKHGALSLPAGNVLVSWERSTRGEQELLELIWREAGGPPVQPPTRKGFGTRLLERGLKHDLEGEVELSFDPAGVCFRVSIPLPREHIESRP

SEQ ID NO: 16594 - protein, 277 aa, Pisum sativum
LQAFSIHTKMAESSSTKTGLRLAGKVAIVTGGASGIGKETAHLFANQAARMVVIADIQDELGIQVAESIGTDRCTFIHCDIRIEDDVKNLVQSTVDTYGQIDIIHCNAGIISPSDQTLLELDVSQANGVFATNAIGTALCVKHAARAMVDGKVRGSIVCTASISASYGVTTGTDYSMSKHAVLGLMRSASVQLAKYGIRVNSVSPNGLATPLTEKLLDADAKTVEEIFSKFSMLKGVVLRTNHVADAVLFLASNDSDFVTGLDLRVDGNYITSDAVI

SEQ ID NO: 16595 - protein, 231 aa, Streptomyces avermitilis MA-4680
MTRASLDKQPHEVASMFDDVAERYDLTNDLLSLGQDRVWRREVAKAVDARPAQKILDLAAGTATSSLPFARAGAYVVPCDFSLGMLRVGKKNHPWLPLTAGDATKLPFKDDTFDAVTISFGLRNVQDTDTALSELYRVTKPGGRVVICEFSHPTWAPFRTVYTEYLMRALPPVARAVSSNPDAYVYLAESIRAWPTQPELAERLRKAGWSKVAWRNLTGGVVALHRGFKAV

SEQ ID NO: 16596 - protein, 510 aa, Neurospora crassa
MSYSWFGAPTPFNGTTPNGGDSASENLNQWYQSGDQAFILVASCMVLIMIPGIAFLYSGLARRKSALSLIWVCMMSSSVVMFQWYFWGYSLALSSTATNGFIGNLRHFGLMNTLGAPSPGSNLIPELLYAFYQMQFVGVTAALVVGATAERGRVVPAMVFIFIWATLVYCPLCCWAWNVNGWAFKYGVMDYAGGGPVEIGSGVSALAYSWVLGRRNEKMMLNFRPHNISLITIGTVFLWFGWLGFNGGSAFGANLRAAMACWNSCLTAMFAAMTWTLLDYRLAKKWSLVGWCSGTISGLVAATPASGYIPPWASIILGVVTGIVCNFGTKIKFMIGIDDALDIFAEHALGGVVGLIFNGFFAADYIIGLDGVNQEIPGGFLNHNYKQLYIQIAYVCATMGYSFVMSAILAKGVDMIPGLHLRASEEAELLGMDDDQHGEFAYDYVEVRRDYLAWTPAEKEQRQDGDIIVPQHGIEGHQELLSSSRHGPTMSELPHHEEEDPREKRGSTSE

SEQ ID NO: 16597 - protein, 156 aa, Haemophilus influenzae
NRANTPVLVDGKDVMPEVNAVLAKMKDFCQRIISGEWKGYTGKAISDVVNIGIGGSDLGPYMVTEALRPYKNHLNMHFVSNVDGTHIAETLKKVNPETTLFLVASKTFTTQETMTNAQSARDWLLKAAKNESAVAKHFAALSTNAKDVEKFGIDTN

SEQ ID NO: 16598 - protein, 262 aa, Hordeum vulgare subsp. spontaneum
SAESNMCDLLRINTDRGVMIGDGKSRFSIGGKPIYHFVGTSTFSEYTVMHVGCVAKINPEAPLDKVCVLSCGISTGLGASINVAKPPKGSTVAIFGLGAVGLAAAEGARIAGASRIIGVDLNASRFEEARKFGCTEFVNPKDHTKPVQQVLADMTNGGVDRSVECTGNVNAMIQAFECVHDGWGVAVLVGVPHKDSEFKTHPMNFLNERTLKGTFFGNFKPRTDLPNVVEMYMKKELEVEKFITHSVPFSEINKAFDLMAKG

SEQ ID NO: 16599 - protein, 200 aa, Aspergillus fumigatus
MAEIRRKLVIVGDGACGKTCLLIVFSKGTFPEVYVPTVFENYVADVEVDGKHVELALWDTAGQEDYDRLRPLSYPDSHVILICFAIDSPDSLDNVQEKWISEVLHFCQGLPIILVGCKKDLRHDPKTIEELHKTSQKPVTPEQIIDIFVQGEEVRKKIGAYKYLECSARTNEGVREVFEAATRAALLTKTHKKKGKCTIL

SEQ ID NO: 16600 - protein, 197 aa, Aspergillus fumigatus
MELCGRQKVVQRKMVLLGDGACGKTSALNVFTRGFFPTVYEPTVFENYVHDIFVDNVHMELSLWDTAGQEEFDRLRALSYEDTHVIMLCFSVDSPDSFENVATKWIDEIRENCPGVKLVLTALKCDLRKDDELNDNPNAITFEQGLAKAKEIGAVKYLECSAVQNRGIRETFYEAAKVALDVKPAGSSGSKGQCIIL

SEQ ID NO: 16601 - protein, 357 aa, Bacillus subtilis
MTSYLSDYVQQIKPSGIRKFFDLAATMEGVISLGVGEPDFVTAWNVREASILSLEQGYTSYTANAGLYSLREEISRYLSNRFDLSYSPDNELIVTVGASQALDIAIRAIVNPGEEVIIPEPCFVAYDALVSLAGGIPVHVHTTADKGFKATAADFEAAVTEKTKAILICSPSNPTGSVYSKEELNEIAEFAKKHDVIVLADEIYAELTYDEEFTSIAALPGMKERTVVISGFSKAFAMTGWRLGFAAAPSLLRDAMLKIHQYAMMCAPAMAQFAALEGLKNGMEDVEKMKKSYRRRRNLFVESLNEIGLSCHHPGGRFLCFSIYQKHGNEFKNSLPEELLTQEKVAVVSWKCVWSER

SEQ ID NO: 16602 - protein, 415 aa, Fusobacterium nucleatum subsp. vincentii ATCC 49256
MLAKRYTGKKLVDNIFATSKKAKQAIKEFGKENVINATIGSLYNEDEKLAVYDVVESVYRNLPPEDLYAYATNVIGEDDYLEEVIKVVFYDDYKEALKGLHIASIATTGGTGAISNTVKNYMDTGDKVLLPNWMWGTYKNIVIENGGKIETYQLFDKNGDFNFEDFKNKVLELAKFQKNVVLIINEPSHNPTGFRMTFEEWVNLMDFFKSIRDTNLIVIRDVAYFEYDDRGEEETKKIRKLLVGLPKNVLFMYAFSLSKSLSIYGMRIGAQIAVSSDEGVIQEFEDAIPFSCRTTWSNIPKGGMRLFATIMKNPELKANFLNEKQGYMNLLNERANIFLTEAKEENLEILPYRSGFFVTVPVGETVDKVIEDLESKNIFVIKFDTGIRIGLCSVPKKKIKGLAKKIKESISKFKK

SEQ ID NO: 16603 - protein, 198 aa, Aspergillus fumigatus
MASGPATQSLKCVVTGDGAVGKTCLLISYTTNAFPGEYIPTVFDNYTASVMVDGRPISLGLWDTAGQEDYDRLRPLSYPQTDVFLICFSIVSPPSFDNVKAKWYPEIEHHAPNVPIILVGTKLDLRDDPATAESLRQKKMDLSRTRHWPSPKEIRAHKYLECSALRQRNFKSVFDEAIRAVLNPGPAAKPKSKKCTIL

SEQ ID NO: 16604 - protein, 565 aa, Glycine max
MQSSISLSSSYAPTISGPRHSFPLSGRTLAPSNLRFCGLRRQAFTSTPLNHHFRLRRRRLPHSAAVSAALSANGTSPKSFDYDLLIIGAGVGGHGAALHAVEKGLKTAIVEGDVVGGTCVNRGCVPSKALLAVSGRMRELRNDHHLKSFGLQVSAAGYDRQGVADHANNLASKIRNNLTNSMKALGVDILTGFGTILGPQKVKVGSSDKIVTAKDIIIATGSVPFVPKGIEIDGKTVITSDHALKLESVPDWIAIVGSGYIGLEFSDVYTALGSEVTFIEALDQLMPGFDPEISKLAQRVLINPRNIDYHTGVFATKITPARDGKPVLIELIDAKTKEPKDTLEVDAALIATGRAPFTQGLGLENIDVVTQRGFVPVDEHMRVIDANGKLVPHLYCIGDANGKMMLYEKTTEGGISVVEQVTGRDLVLNHLSIPAACFTHPEISMVGLTEPQAREKGEKEGFEVSVAKTSFKANTKALAENEGEGLAKLIYRPDTGEILGVHIFGLHAADLIHEASNAIALGTRIQDIKFAVHAHPTLSEVLDELFKSAKVKAEASEPIKEAVAV

SEQ ID NO: 16605 - protein, 340 aa, Bacillus cereus ATCC 14579
MTKIFILASTLSLSFFSGLNIGNTTTENFQPLTNAIVQNSDHFAEGNSKDNNIPPGNNGSQDDTGSGDNGSGGNGSGGNGSGGSGSGGNGSGGNGSGDNGSGGNGSGDNGSGGNGSGDNGSGGNGSGDNGSGGNGSGDNGSGGNGSGDNGSGGNGSGGSGSDGSGSGGNGSGGNGSGGNGSGDNGSGGNGSGGNGSGGNGSGGNDSGGNGSSGNGSGGNGSGGNGSGGNGSGGNGSGGNGSGGNGSGGNGSGGNGSQGGNRVKGDSSSQGGNGSQGGNRVKGDSNSQEGTGSQGGNVKDNTKKQGDKLPNTATHYPISILMGLSTFLIGMLLFIRRKNVK

SEQ ID NO: 16606 - protein, 343 aa, Mycobacterium avium subsp. paratuberculosis str. k10
MMSSPVTTTAMRAWRVRRPGPMDTHPLEEVTTEVPRPGPSDLLVAVRACGVCRTDLHVTEGDLPVHRDRVTPGHEVAGEVIEVGAEAGDEFGVGDRVGIAWLRHTCGVCKYCRRGDENLCPESRYTGWDADGGYAEFATVPAAFAHPLPGGYSDSELAPLLCAGIIGYRALLRAQLPPGGRLGLYGFGGSAHITAQVALAQGAEVHVMTRGDRARELAIELGAASAQGAADPPPVPLDAAILFAPVGDLVLPALAALDRGGTLAIAGIHLSDIPSLNYQRHLFQERQVRSVTSNTRADARAFLDFAGTHHISVTTPEYPLGQADRALADLSAGRIAGAAVLLV

SEQ ID NO: 16607 - protein, 581 aa, Neurospora crassa
MCGIFACHNHPDVAKFKPTALKLSKAIRHRGPDWSGSVTCHNTILCHERLSIVGVESGAQPLTNADESIAVAANGEIYNHRLIRKHLKNPYHFKTTSDCEVIIPLYLEHGVDAPKHLDGMFSFVLYDKKQDRTIAARDPIGITTLYKGYNSQEPGTVYFASELKSLHPVCDKIEAFPPGHVFDSLTGETTRYFEPSWWDEKKCPQTPLDLKLLRETLEKSVRKRLMAEVPYGVLLSGGLDSSLVAAIAQRESLRLRKLAEEQAALNQEVDPEAQDKGEGLVGIDDENKLSTVTFLPQLNSFSIGLPGSPDNKAALEVAKFLGTKHHVMTFTIEDGLNALSDVIYHLETYDVTTIRASTPMYLLSRKIKAMGIKMVLSGEGSDEIFGGYLYFHGAPNKEEFHEECVRRVKNLHLADCLRANKSTSAWGLEARVPFLDKEFLEVALNIDPQEKMITKEKLEKYILRKAFDTKDQPEGAYLPDNILYRQKEQFSDGVGYGWIDALKDQAELQVTDEMMKNPKPEWGDDIPDTKEAYWYRCMFDEHFPPSCASTVMRWTPKWVKQTDPSGRAISIHQAKYDHVDE

SEQ ID NO: 16608 - protein, 316 aa, Antirrhinum majus
MGRPPCCDKIGVKKGPWTPEEDIILVSYIQEHGPGNWRAIPSNTGLLRCSKSCRLRWTNYLRPGIKRGDFTEHEEKMIIHLQALLGNRWAAIASYLPHRTDNDIKNYWNTHLKKKLEKLQSPENGKCQDGNSSVDSDKSVSKGQWERRLQTDIHMAKQALCDALSLDKTSSSTDDPKLSTVQTTQPRPFQASTYSSAENIARLLENWKKKSPVNASSTSQAGSSESTTTSFNYPSVCLSTSSPSEGAISTNFISFNSSNSDILEDHDQAKFEAATNGVNFQDESKPILDNQMPLSLLEKWLLDDSAAVAQGQDVDF

SEQ ID NO: 16609 - protein, 207 aa, Pirellula sp. 1
MEALLALAETDPSLHLVWRRLGDPPSWRRPAGFETLARIVLEQQVSLRSAESTLHKLQQLLEGPLTPRGIVRLSAQQTRACGVSRQKHRYLNQLAADIVDGRFVLDRLPGMSDQEARDQLTARLGIGRWSAEVYLMSALNRPDILPFGDLGLLKGVEELDGGQYDDFDAIIQRADRWRPYRSMATRLVWALYLDNRGLLNLNDGSNV

SEQ ID NO: 16610 - protein, 593 aa, Zea mays
  unsure (1)..(593): unsure at all Xaa locations
MCGILAVLGCSDWSQAKRARILACSRRLKHRGPDWSGLYQHEGNFLAQQRLAVVSPLSGDQPLFNEDRTVVVVANGEIYNHKNVRKQFTGTHNFSTGSDCEVIIPLYEKYGENFVDMLDGVFAFVLYDTRDRTYVAARDAXIGVNPLYIGWGSDGSVWIASEMKALNEDCVRFEIFPPGHLYSSRXGGFPGGWYTPHWVPGAGAPGRPYQPLVXLERAFEKAVIKRLMTDVPVRGPPSPGGLDSSLVASVTKRHLVETEAAEKFGTELHSFVVGLEGSPDLKAAREVADYLGTIHHEFHFTVQDGIDAIEEVIYHDETYDVTTIRASTPMFLMARKIKSLGVKMVLSGEGSDELLGGYLYFHFAPNKEEFHRETCRKVKALHQYDCLRANKATSAWGLEVRVPFLDKEFINVAMGMDPEWKMYDKNLGRIEKWVMRKAFDDDEHPYLPKHILYRQKEQFSDGVGYNWIDGLKSFTEQQVTDEMMNNAAQMFPYNTPVNKEAYYYRMIFERLFPQDSARETVPWGPSIACSTPAAIEWVEQWKASNDPSGRFISSHDSAATDHTXAVSRRWPTAAATXANGTVNGKDVAVAIAV

SEQ ID NO: 16611 - protein, 498 aa, Pirellula sp. 1
MSSISAFTTQELSGGPTGFRFAWLTMVLLVGMMGIGGSLASVASAQDEPAAATDTAEVADAGDADSEEPAADAGVGYAFDNGFLFLCAVLVLFMQAGFAMVEVGLNSSKNTVNILSKNLMDLSVGALLFFFVGFGLMYPGSYGDVTNGYFAFGGTGIYDSSPDQTFSPQVDWFFQAVFAATAATIVSGAVAGRMKFNAYLIYSAILTGLIYPISGFWKWGGGWLMQFGEQAADGSFAMGFQDFAGSAVVHAVGGFAGLAGAIFLGPRLGRYTAEGKSVPLPGHNVAFAALGVFILWVGWYGFNPGSQLAFQSSADIDATVFIAVNTTLAAAAGVIVATAVSWGLFGKPDLTMGLNGALGGLVGITACCDAMSNSMSIVVGAVAGALVVLSIVVLDKVKIDDPVGAFPVHGVCGVWGCMALGILPNAHLESESTNFMIQLIGTASICAWAFISMSVVFGVLKAVGMLRVSPQEEQAGLDISEHGMHAYPSDAVAGGSVI

SEQ ID NO: 16612 - protein, 567 aa, Solanum demissum
MESSVRGVDEAAIMKSSTRRKNGGWITFPFIIVSATMAGLSLASGGWTSNLIVYLIDEFNMKSIKTAKVYNVINGCTTLFPIVGGILADSYLGSFSVIWFSSLISALGILLLLFTSAIDVLRPPPCDDGSSLCTSPSTHQYAVLYVALALASLGVAGTRFIIAPMGANQFDKPKHQAIFFNWYIFAFYMSFAISTTVIVYVEDNVSWSWGYGISMAFNILGLAMFLIGKRFYCDVKEQGGSPFVNLARVIVVAIQKWRVPLSEQTQHYYHDPSDTTTTLTITQIPTKSFKFLNCAAFITEGDTKPDGSISNPWRLCTVQQVEDLKSLIKLFPLWASGFLISTQLVIQASLLILQALKMDRHMGPHFEIPAGSMLVFILLFTCIAIFIIDRFLYPFLAKYTTFSLTPLQRIGIGHVITIISMAVSALVESRRLRIVRTHKLQGQNNDIVPMSVFWLVPQLALNGIGEGFHFPGHIAFYYQEFPTSLKSTSTAMVALFIGIAHYLGNTLIDLVQRLSGWLPDNINKGRTDNVFWLCCILGSANFMYYVVCASLYKYKNVDNKSNIAPSK

SEQ ID NO: 16613 - protein, 509 aa, Methanococcoides burtonii DSM 6242
MTILDGWGYSPEVEGNAIHAANTPNLDDLLETYPNTLLSASGEDVGLPEGQMGNSEVGHLNIGAGRVVYQDLTRINRDIGNGDFFKNPVLKQAIENAKAQGSALHLMGLFSYGGVHSHMKHLRALIEFAKDEGITEIFIHAFLDGRDVSPRAALEDMKEHVEYCNNLSVGKIATVSGRYYAMDRDNRWDRTEDAYNAITRGDGVYYSKGPVDAISEGYGRGENDEFIKPTVIVDENGRPIGRMNENDTVIFFNFRPDRARQLTYAFVNDEFDNFERKSHPKVHFVCMTEYDEKLEVPIAFPSEELKNTLGEVLSKEGIKQLRIAETEKYAHVTFFFNGGVEKQNEGEERCLIPSPKVATYDLKPEMSAYEVTEELIERIGSGKYDVIVLNLANMDMVGHSGIMEAAVKAVEVVDDCVGKIITAIKEVGGEAMVMADHGNAEKMVEFCNNTERQCYTAHTSNPVRCIYVTQEKRVELQKGRLSDVAPTILKIMGIEKPPEMTGVPLIKNT

SEQ ID NO: 16614 - protein, 182 aa, Triticum aestivum
MHDCTLHRAHQHPAMSPFAPPYNTNVLLAAVTALSAAIAFVAALHLYARCFLQRRATTAAALSNPHALALALQRPPDGYELEVITVDAACAPEPAGLGAKELGALPVLVWESSSAKVAAAAAAEHCAVCLGEVEDGELGRLLPACSHAFHVGCIDAWLRLSSTCPVCRSAVRMQEDGAAPVA

SEQ ID NO: 16615 - protein, 329 aa, Oryza sativa
MCGILAVLGAADWSQAKRAHVLSCSRRLKHRGPDWSGLYQCEGNFLAQQRLAIVSPLSGDQPLYNADRTIVVVANGEIYNHKKIRKQFASKHTFSTGSDCEVIIPLYEEYGEDFVDMLDGVFAFVLYDTRTKTYMAARDAIGVNPLYIGRGSDGAVWISSEMKALNEDCVEFEIFPPGHLYSSAAGGLRRWYKPQWFAENVPATPYQPLLLREAFEKAVIKRLMTDVPFGVLLSGGLDSSLVAAVTKRHLIKTEAAEKFGAELHSFVVGLEGSPDLIAAREVADHLGTIHHEFHFTVQDGIDAIEEVIYHDETYDVTTIRASTPMFLMA

SEQ ID NO: 16616 - protein, 309 aa, Pisum sativum
WGIDKFRNVVEEYYGKKFEPFRSLPEWEFKSYLGWHQQGDGGLFCGLHVDNGRIAGKMKTALREVIEKYHLNVRLTPNQNLILTDIRAAWKRPITTILSQAGLLLPRYVDPLNITAMACPAFPLCPLAITEAERGIPSILKRIRDMFEKVGLKYNESVVVRITGCPNGCARPYMAELGLVGDGPNSYQIWLGGSSNQTSIARSFMDKVKLQDLEKVLEPLFYHWKQKRQSKESFGDFTVRLGFEKLKEFIEKWEGPAVPPTRHNLKLFTDKDTYEAMDGLAKLQNKNAHQLAMEVVRNYIASNLNGKGE

SEQ ID NO: 16617 - protein, 335 aa, Brucella melitensis 16M
MTAPKPFLQEAEPDAARLRALLRAVRNSNVCVLYQNPDLRYAWAENLPLYWQEKWKAGGQDSDFIFSTALSRLDTAKQTTLESGIAQNVELLINDGSKTRWIEFHIDCDRDAQGNVIGLVTTAIEITELKRREQVLKTLLREVSHRSKNLLAIVQSIATQTARFTDSIDDFLVKFRGRIQSLSYSQDLVTDSNWRGALFLDLVRSQVEKYIDIDDERLTIEGDNPYLFPGAALHIGLALHELVVNATSFGGLSIPYGRVVIRAHVLPGADGADKLMFCWYETNPAMPDVFEHDPRFGSAVLQRIVPAAVNGHAEYRIDGTGAIYSLTIPTEQFDS

SEQ ID NO: 16618 - protein, 156 aa, Haemophilus influenzae
NRSNTPVLVDGKDVMPEVNAVLAKMKDFCLRIISGEWKGYTGKAITDVVNIGIGGSDLGPYMVTEALRPYKNHLNMHFVSNVDGTHIAETLKKVNPETTLFLVASKTFTTQETMTNAQSARDWLLKAAKDENEVAKHFAALSTNAKDVEKFGIDTN

SEQ ID NO: 16619 - protein, 523 aa, Arabidopsis thaliana
MDSSYSFALGTSSSILPKLSFRNVENRFYGEKNNNNGLCKRFGSDLGSKKFRNQKFKHGVVYAVATSDNPKKAMTVKTSMFERRKVDPQNVAAIILGGGNGAKLFPLTMRAATPAVPVGGCYRLIDIPMSNCINSCINKIFVLTQFNSASLNRHLARTYFGNGINFGGGFVEVLAATQTPGEAGKKWFQGTADAVRKFLWVFEDAKNRNIENILILSGDHLYRMNYMDFVQSHVDSNADITLSCAPVSESRASNFGLVKIDRGGRVIHFSEKPTGVDLKSMQTDTTMLGLSHQEATDSPYIASMGVYCFKTEALLNLLTRQYPSSNDFGSEVIPAAIRDHDVQGYIFRDYWEDIGTIKTFYEANLALVEERPKFEFYDPETPFYTSPRFLPPTKAEKCRMVDSIISHGCFLRECSVQRSIIGERSRLDYGVELQDTLMLGADYYQTESEIASLLAEGKVPIGIGKDTKIRKCIIDKNAKIGKNVIIMNKGDVQEADRPEEGFYIRSGITVIVEKATIQDGTVI

SEQ ID NO: 16620 - protein, 400 aa, Bacillus subtilis
MNNLAFLFPGQGSQFVGMGKQFWDDFVLAKRLFEEASDAISLDVKKLCFNGDMNELTKTMNAQPAILTVSVIAFQVYMQEIGVKPRFLAGHSLGEYSALVCAGALSFQDAVTLVRERGILMQNADPQQQGAMAAVTHLSLQTLQEICSKVSTEDFPAGVACMNSEQQHVISGHRQAVERVIKMAEEKGAAYTYLNVSAPFHSSMIRSASEQFQTVLHQYSFRDAAWPIISNVTARPYSSGNSISEHLKQHMTMPVRWTESMHYLLLHGVTEVIEMGPNNVLAGLLRKTTNHIVPYPLGQTSDVPPLSNSAERKKHIVHLRKKQLNKLMIQSVIARNYNKDSAAYSNMTTPLFTQIQELKERMKRHEDVLSEQELEHSIHLCKLICEAKQLPAWEELRILK

SEQ ID NO: 16621 - protein, 161 aa, Zea mays
MAEEHRCETPEGHRLCVNNCGFFGSSATMNLCSNCYGDLCLKQQQQASMKSTVESSLSPVIAPVLENYAAELEIPTTKKTEEKKPIQIPTEQPSPPQRPNRCTVCRKRVGLTGFMCRCGTTFCGSHRYPEVHGCTFDFKSAGREEIAKANPLVIAAKLQKI

SEQ ID NO: 16622 - protein, 440 aa, Cochliobolus lunatus
MAITKIHARSVYDSRGNPTVEVDIVTETGLHRAIVPSGASTGSHEACELRDGDKTKWGGKGVTKAVANVNDIIAPALIKEKLDVKDQSAVDAFLNKLDGTENKTKLGANAILGVSMAIAKAAAAEKGVPLYAHISDLAGTKKPYVFRFLSKNVLNGGSHAGGFLLFQEFMIAPAKTFAEALRIRQGAEVYQKLKALTKKTYGQSAGNYGDEGGVAPDIQTAEEALDLIVDAIEAAGHTGQIKIAMDVASSEFFKDDEKKYDLDFKNPDSDKSKWLTYPQLAEMYKSLAEKYPIVSIEDPFAEDDWEAWSHFYKDGDFQIVGDDLTVTNPEFIKTAIELKSCNALLLKVNQIGTISEAINAAKDAFGAGWGVMVSHRSGETEDVTIADIVVGLRSGQIKTNAPARSERLAKYNQILRIEEELGDKRLFAGNKFHTAINLYL

SEQ ID NO: 16623 - protein, 406 aa, Geobacter sulfurreducens PCA
MDSLSMVTGLRNSADVLFLMLGAVMVFAMHAGFAFLEVGTVRKKNQVNAFVKILTDWSVSTVAYFLVGFPISYGISFLVPAGDLLGTTQGYDLVRYFFLLCFAACIPAIISGGIAERAKFWPQVLAGAIFAGVSYPLFESLIWGQNASLLQGFFKSVGGAEFHDFAGSVVVHSVGGWLALPAVLVLGPRMGRYVRGKSHPIPISNIPFLALGSWILAVGWFGFNVMSAGHVEKISGLVAVNSLLAMVGGVLAAIVAGRNDPGFVHNGALAGLIAICAGSDIMHPLAAFATGAVASVIFVYGFQYEQERLKIDDVLGVWPLHGVIGTWGGIAAGIFGQPLFGGMGGVSFVSQFLGSLAAVVFALVNGFLVYGILSRTVGIRLTDEQEFAGADLSIHQIGAYPEDHVR

SEQ ID NO: 16624 - protein, 311 aa, Buchnera aphidicola str. Bp (Baizongia pistaciae)
MFKYTLLFPGQNDINRKKILSPFFSKNKIVQSIFRESSEYIGYDIWKLIQDDPKKKLKNNKYSQLVTLVSSIAIYELWKNKQCTHPNLVIGHSLGEYTALVCSQSLKLSDAIQLIITRYKFMMEAMSKKIGLMTAIIGLNERTIRKLLKKYDYSHEVSIACINTDNQIVLSGERNSVKHINLHCKKAGAKNIINLYIHPPSHCTLMKKASKKLLYVLKHTTFKIPIYPVISSTSLKFQNSEQAIRISLAKQIYSTVRWNSIIKYIKKDIFIFLEVSTKSILTNLNKNIIKKSLSISLNCQANFLKALKIIL

SEQ ID NO: 16625 - protein, 295 aa, Xylella fastidiosa Ann-1
MLSEFAVLYPEIVDTFAEASEGAGVDLWTLSQRGPEEMLNRTEYTQPALLAASVALWRLWQARGGRAPDLLAGHSLGEYSALVVAGALSLKDGAYLVRLRGQLMQDAVAVGVGAMAAVLGAEDALVAEVCAQVAGSEIVVPANFNSPGQVVIGGHATAVDRVLVLLAERGVSKTVKLAVSVPSHTPLMRDVAHRLAEAMLGLVWKVPQIPVVQNVDGRVHDGVEAIREALVKQLYLPVQWTDCVRELATCGVVHIAECGPGKVLMGLIRRIDKTLDVRSLATPTGFSDVLDEWGF

SEQ ID NO: 16626 - protein, 567 aa, Triticum aestivum
  unsure (1)..(567): unsure at all Xaa locations
MASPALISDTDQWKALQAHVGAIHKTHLRDLMTDADRCKAMTAEFEGVFLDYSRQQATTETVDKLFKLAEAAKLKEKIDKMFKGEKINTTENRSVLHVALRAPRDAVINSDGVNVVPEVWAVKDKIKQFSETFRSGSWVGATGKPLTNVVSVGIGGSFLGPLFVHTALQTDPEAAESAKGRQLRFLANVDPVDVARSIKDLDPATTLVVVVSKTFTTAETMLNARTIKEWIVSSLGPQAVSKHMIAVSTNLKLVKEFGIDPNNAFAFWDWVGGRYSVCSAVGVLPLSLQYGFPIVQKFLEGASSIDNHVHTSSFEKNIPVLLGLLSVWNVSFLGYPARAILPYCQALEKLAPHIQQLSMESNGKGVSIDGVRLPFEAGEIDFGEPGTNGQHSFYQLIHQGRVIPCDFIGVIKSQQPVYLKGEXVSNHDELMSNFFAQPDALAYGKTPEQLHSEKVPENLIPHKTFQGNRPSLSFLLSSLSAYEIGQLLSIYEHRIAVQGFIWGINSFDQWGVELGKSLASTVRKQLHASRMEGKPVEGFNPSSASLLTRFLAVKPSTPYDTTVLPKV

SEQ ID NO: 16627 - protein, 543 aa, Solanum demissum
MESSVRDVDESAIMKSSTRRKNGGWITFPFIIDEFNMKSIKAAKVYNVINGCTTLFPIVGGILADSYLGSFSVIWFSSLISALGILLLLLTSAIDVLRPPPCDDGSSLCTSPSTHQYAVLYVALALASLGVAGTRFTIAPMGANQFDKPKHQAIFFDWYIFAFYTSFAISTTAIVYVEDNVSWSWGYGISMAFNILGLAMFLIGKRFYRDVKEQGGSPFVNLARVIVIAIQKWRVPLSEQTQHYYHDPSDTTTTLTKTQIPTKSFKFLNCAAFITEGDTKPDGSISNPWRLCTVQQVEDLKSLIKLFPLWASGFLISTQLVIQTSLLILQALKMDRHMGPHFEIPAGSMSVFILLFTCIAIFIIDRFLYPFLAKHTTFSLTPLQRIGIGHVITIISMAVSALVESRRLRIVRTHKLQGQNNDIVPMSVFWLVPQLALNGIGEGFHFPGHIAFYYQEFPTSLKSTSTAMVALFIGIAYYLGNTLIDLVQRLSGWLPDNINKGRTDNVFWLCCILGSANFMYYVVCASLYKYKNVDNKSNIAPSK

SEQ ID NO: 16628 - protein, 375 aa, Solanum demissum
MAGLSLAAGGWTSNLIVFLINEFNMKSIAAAKVFNVVNGLTTIFPIVGGIIADSYLGCFSVIWISSLISALGILLLLLTVVIDALRPLACGDGSSLCTSPSTNQYVFLYVSLALASIGVGGTRFTVAPMGAYQFDKPKHQTMFFDWYIFIFYLCWALSTAFIVYVEDNISWAWGFGISMACNILGLAIFLAAISIIDRILNPFLAKYTTFSLTPLQRVGIGHALTISCMAVSALVESRRLRVARSHHLQGQKDAIVPMSVFWLLPQLALNGIGEGFHFPGHIAFYYQEFPTSLKNTSTAMVSLFIGIAFYLGNVLIDVVQRETGWLPDNINDGRMDNVFWLCCTLGSVNFIYFLLVASFYKYKNMESKPNNVPSK

SEQ ID NO: 16629 - protein, 434 aa, Nostoc punctiforme PCC 73102
MSEQYRFETLQVHAGQEPAPGNNARAVPIYQTTSYVFDDTEHGARLFALQEFGNIYTRIMNPTTDVFEKRIAALEGGVAALATASGQAAQFLAISTIAQAGDNIVSTSFLYGGTYNQFKVSLPRLGINVKFVEGDDPESFRQAIDARTKALYVETIGNPQYNIPDFAALAHIAHENGIPLIVDNTFGAGGYLARPIEHGADIVVESATKWIGGHGTSIGGVIVDSGKFDWGNGKFPLFTEPAPGYHGLNFQEVFGPSGSFGNIAFIIRARVEGLRDFGPSLSPFNAFLLLQGLETLSLRVDRHVSNALELARWLEQQEQVLWVNYPGLPNHSYHERAKKYLRHGFGGVLNFGIKGGLEAGKAFINHVKLASHLANVGDAKTLVIHPASTTHQQLSDEEQLSAGVTPDLVRVSVGIEHIDDIKEDFQQAFGQVKI

SEQ ID NO: 16630 - protein, 144 aa, Glycine max
MVTNLRSLAPETMSLSMEDQALSPAGSDLKCDGYGIFLVISSLLFVLYLTVHAKKNLNGVCRRGSYVVVSYYALLWLVTLFNLAWSFLQPWQCSPAKEVAWNLLSLFTASGMLCLEISLMAFLLKDNYMSGLEALAHSSMHQEL

SEQ ID NO: 16631 - protein, 444 aa, Brassica rapa
MATITAVKARQIFDSRGNPTVEVDVHTSSGVKVTAAVPSGASTGIYEALELRDGGSDYLGKGVSKAVGNVNSIIGPASIGKDPTQQTAIDNFMVHELDGTQNEWGWCKQKLGANAILAVSLAVCKAGAVVSGIPLYKHIANLAGNPKIVLPVPAFNVINGGSHAGNKLAMQEFMILPVGASSFKEAMKMGVEVYHNLKSVIKKKYGQDATNVGDEGGFAPNIQENKEGLELLKTAIEKAGYTGKVVIGMDVAASEFYSSDKTYDLNFKEENNNGSQKISGDALKDLYKSFVAEYPIVSIEDPFDQDDWEHYAKMTAECGDNVQIVGDDLLVTNPKGVAKAIAEKSCNALLLKVNQIGSVTESIEAVKMSKRAGWGVMASHRSGETEDTFIADLSVGLSTGQIKTGAPCRSERLAKYNQLLRIEEELGSEAVYAGANFRKPVEPY

SEQ ID NO: 16632 - protein, 292 aa, Methylococcus capsulatus str. Bath
MAKVIRKAVFPVAGLGTRFLPATKASPKEMLPVVDKPLIQYAVEEAVAAGIDEMVFITGRSKNAIMDHFDKAYELETELAARGKDDILNIVRNIIPPHVTCIYIRQAEALGLGHAVNCAKAVIGNQPFAVLLADDLIDGNNHGGCLSQMVRVFDKWQCSVLGIERIDPGDTHSYGIVKTSPIEAGLDKVEAIVEKPRPENAPSNQAVVGRYILTPAIFDKLANVSRGAGGEIQLTDAIAMLLNEQTVLAYEFNGKRYDCGSKLGYLIATVEQGLQHPDLRAGFEAYLRSLQL

SEQ ID NO: 16633 - protein, 393 aa, Methylococcus capsulatus str. Bath
MSIRLSDRVQSIKPSPTLAVTARAAAMRAAGKDIVGLGAGEPDFDTPDHIKQAAIQAIEKGFTKYTAVDGTPGLKQAIQAKFKRENGLDYALDQILVSCGGKQSFYNLAQALLNPGDEVVIPAPYWVSYPDMVLLAGAVPVIVEAGQQQAFKITPAQLEAALTARTRLFVINSPSNPTGMAYTAEELAGLGEVLRRFPEVVIATDDMYEHILWEGGFSNVLNVCPDLYERTVVLNGVSKAYSMTGWRIGYAAGPERLIEAMTNIQSQSTSNPTSISQVAAEAALNGEQGFIAGMVEAFKQRHDFVVGRLNAIPGVDCLKTHGTFYVLPNVEAAMARLHLADDVALSEYLIEQGGVAVVPGSAFGAPGHVRLSIATSMANLEKAMERLATTLSK

SEQ ID NO: 16634 - protein, 368 aa, Gerbera hybrid cv. 'Terra Regina'
MGRAPCCEKVGLKRGRWTAEEDDILTNYIKTHGEGSWRSLPKNAGLLRCGKSCRLRWINYLRSDIKRGNISKEDEDVITKLHASLGNRWSLIAAHLPGRTDNEIKNYWNSHLSRKIIPSRRLLNTPATPVPAKLSSHPLNKRKGRTSRSAMKINKTHKSSSRDIGANNREVDGAIDTTPLAPSIEKESNVYMEPCAASHEYSDDGQKRERHDNEAEVVDDVGMFCFNEIMDGGALTDPHGVLSLAEKETEKDLALMNVVTSEEERQNVSEPISIIGGEEVNKTGSCATSTSTDSCNVGDHDNILSGPWDWKWNFDVEEGMLGLGVEDEDNILSWPWESTTTTDSGNGDTDFVGEDLEKQNAMVAWLLS

SEQ ID NO: 16635 - protein, 444 aa, Brassica napus
MATITVVKARQIFDSRGNPTVEVDVHTSSGVKVTAAVPSGASTGIYEALGLRDGGSDYLGKGASKAVGNVNNIIGPALIGKDPTQQTAIDNFMVHELDGTQNEWGWCKQKLGANAILAVSLAVCKAGAVVSGIPLYKHIANLAGNPKIVLPVPAFNVINGGLHAGNKLAMQEFMILPVGASSFKEAMKMGVEVYHNLKSVIKKKYGQDATNVGDEGGFAPNIQENKEGLELLKTAIEKAGYTGKVVIGMDVAASEFYSSDKTYDLNSKEENNNGSQKISGDALKGLYKSFVSEYPIVSIEDPFDQDDWEHYAKMTAECGDNVQIVGDDLLVTNPKRVAKAIAEKSCNALLLKVNQIGSVTESIEAVKMSKRAGWGVMASHRSGETEDTFIADLSVGLSTGQIKTGAPCRSERLAKYNQLLRIEEELGSEAVYAGANFRKPVEPY

SEQ ID NO: 16636 - protein, 321 aa, Triticum aestivum
FLDSGPYGTFVGVYDGHGGPETACYINDNLFNHLKRFASEQNSMSADVLKKAYEATEDGFFSIVTKQWPVKPQIAAVGSCCLVGVICGGMLYVANVGDSRAVLGKHVKATGEVLAVQLSAEHNVSIEPVRKELQSMHPEDRHVVVLKHNVWRVKGLIQVCRSIGDAYLKKQEFNREPLYAKFRLREPFNRPILSSEPSICVQPIQPHDEFIIFASDGLWEHLTNQEAVDIVQSSPRSGSARRLIKSALLEAAKKREMRYSDLKKIDRGVRRHFHDDITVIILYLDSSLVSRASTHRGPAVSLRGAGVSLRSSTLAPYGSQM

SEQ ID NO: 16637 - protein, 390 aa, Desulfovibrio vulgaris subsp. vulgaris str. Hildenborough
MNISDRLTRIKPSATLAVNAKALELKARGVKVVSLAVGEPDFGTPAHICEAAKRAIDEGFTRYTPVPGIIELREAVAGYFGRCYGVEAPAEATIVTNGGKQALYNLFQALLNPGDEVLVPAPYWVSYPALVQLAEGVPVFVPSPAERGFKITPAELDAHRTPRTRVLLLNSPSNPTGACYTREEMDALMQWAVDHDIFVIADEIYDRLVYGDMQPVSVSGWWQRFPDRVAVVNGLAKTFAMTGWRVGYVLAHPDLVKAVAKIQGQSTSNICSIAQKAALAALTGPYDAVEEMRCAFVRRRDLAYDIISGWKDVVCPRPDGAFYLFADIHRHYNASMPDSAAVCTRLLEEAQVALVPGSAFGDDKCIRFSYAVADDVLEDALSRVAKVLFG

SEQ ID NO: 16638 - protein, 266 aa, Gerbera hybrid cv. 'Terra Regina'
MGRTPCCSKVGLHRGAWAIEEDKLLTDYIQTHGEGQWRALPSNAGLLRCGKSCRLRWMNYLRPGIKRGTFTSDENDVIIRLQSLHGNRWSLIAAELPGRTDNEIKNHWNSHLRRKSAENADTHHGKVSKNNKKAKKKRKSDDRRAETTTPEKSKKVKLPDSSVSSSSSCVSLSKNDSSDNGIMSSTGASSSCTIDLEDADFDFSWSDWTPLLEVEGTTSINGEQDKGFLMDGCDLLMSKEDESLRLEKLYYEYLDLLDHEDGDGNN

SEQ ID NO: 16639 - protein, 246 aa, Helicobacter pylori J99
MKKENRLKQEKIINMFDDIASSYDQANRLMSFGLDVKWRQRACEHAFLFLENKKALRLVDVACGTGDMLVAWQKSALNCGIEFKECLGIDPSNNMLELAIKKCEELENKASFIQAQAKDLKGVENNSVDILSIAYGLRNIVERQEALKEFFRVLKTRGVLVILEFLKKDNPTWLDKISGFYTNKVLPLVGGAISKNYGAYSYLPQSIEGFLSLEGLKNELKNAGFEILRTEDSIAQISTTMLVKKS

SEQ ID NO: 16640 - protein, 362 aa, GIBBERELLA ZEAE PH-1
MANHPPPPQKMKALRLLEYNKGYKLCDDAPVPIPKPDEVLVRVATAGFCHSDLMVHHGLTQVPLPFIGSHEPAGTIVNRGSDVPEGWHVGDRVGVTNFMDPCDNCKGCKWATQTIGSLDPRFCDNRTMCGILRRDGAFAEYMTSWHGALVHLPDSMSFEQAAPLMCAGATVWHAINQADVQAGQTVAIVGIGGLGVLGIQFAKARGYRVAAIDNHETGLRLATEVPSHLKPDLILKYDDPETIRKISDFTDEIGLKAAVICNSDDDANDWAAHQLQPRGVLVAAGFPDNGLRFDPMNLVLREIVVKGIVHCSMEETREMMKFVTDHGIRSRLSLLTMEEAEDIIAKTQAHTLIGRPVVMIEG

SEQ ID NO: 16641 - protein, 224 aa, Brucella melitensis 16M
MCAGRMKGQAMRRIDTLSDIEAGLEALVLADRRLADIRNRSHAVPLRRSEPGFESLASIVVAQQVSTASAAAIWARLKQVINPLTPEAYIAGGEEAWRLAGLSRPKQRTLLALSEALAGGALDLHGLCDLPAGEAIATLTAIKGIGPWTAEVYLLFAAGHPDVFPAGDVALQTAVGHAFAHETRPDAAALRQLAENWAPWRGVAARLFWAYYAAIKGREAAPLL

SEQ ID NO: 16642 - protein, 274 aa, Methylococcus capsulatus str. Bath
MKHKTLGFIGAGNMASSLVGGLVADGYPARTIWVSDVDEAKLDALSLKFGVNVSGDNRQVARLAEILILAVKPQILREVAEGLADIVAETRPLVLSVAAGVAESSLDRWLGGDQALVRCMPNTPALVKSSATALHANGKTTSAQRSEAESILRAVGVTVWVEREEALDAVTAISGSGPAYFFLLMEAMENAAASLGLDPETARLLVQQTALGAARIAIESEEGPAQLRQRVTSPKGTTERAIGVFEERGLHEIVRDAVAAAHARAVELARELGA

SEQ ID NO: 16643 - protein, 283 aa, Oenococcus oeni PSU-1
MSILDETFQLNNGNQIPKVAFGTWRLKDGDEAYQAVAAALKIGYRHIDTAFHYFNEPSVGQAIKDSGIKREDIFLTTKLPAEIKNHDDILKNFQESLDRLQTDYVDLYLIHAPWPWADINLDYRYDGANREAWQAMEEIYKSGRAKAIGVSNFDVHDLKNIQQIWSVKPAVNQIEFYVGWTQPKIAAYTKSLDIQLEAYSPLATGGLATQPDIQKIAEKYQVSVPRVALKYVLQKNVLPLPRATKAEHVKSNAELDFEISAADMEVLDKLPDTGQARHNVTMG

SEQ ID NO: 16644 - protein, 344 aa, Glycine max
  unsure (1)..(344): unsure at all Xaa locations
MISSSPIFSIITPREHRLQLVRRIDLAMNFNCTANKEQKKTVDQSILLCCKFFVSESRNNATLNAIERAARSNPETVIVNMFHDRAYNRARYDLVSYVLHDCTDFTGNPIXAPLHQTVIAMAEATFNAINLGFHERAXPSLGXVFHPLGHASLDEAAWLAKAVAADIGNRFSVPVFLYAAAHPTGKELDAIRRELGYYRPNSRGSQWAGWAMPETLPLSPDEGPNVVSRAKGITMIGARPWVTLYNVPILCTDVSVARRIARKVSARGGGLPTVQTIALVHEDSTEIACMLLDSKQVGADRVQNRVEMLAAQEGLDIEQGYFTDISPEMIVEKYMKLINSANKS

SEQ ID NO: 16645 - protein, 471 aa, Rhizobium etli
  unsure (1)..(471): unsure at all Xaa locations
MRVRDEEMGKVTGFLEIDRQVAKYQPASDRIRHFREFTIPMSDPEVQKQAARCMDCGIPYCHGPTGCPVHNQIPDWNDLVYNNNWEAAIQNLHSTNNFPEFTGRVCPAPCEEACTLNLEDAPVAIKTVEQAIADKAYELGFIRPQPATVHTGKKVAVIGSGPAGMAAAQHSAAPATKCMSMNVRQPGGCCLRLPIQMEKLLIPXGEMKGRGVHLPLGRSISVLKSRLSSCLPIMTPSFTAAVPRRRVRPAFRVLTLPACMMPCPIWSSRTAASGARTLTASAGRRIQFLLAPNMSSLSAAAIRRRTVSARRSARVPSKSPSSTSGRSRRRRKTSSPSGPSGRRRCARPPRRPRVPSASSRWRRSNSSAKTACYRRQVLRGRRAPAAGRRHGHSRRSRLHRHRFPRPVHNKRAEGIEGKLTLNTDKRGSTNVVANDRDYETSVDKLWTAGDVRXGSHWWSGRSEKPTGGARH

SEQ ID NO: 16646 - protein, 504 aa, Bifidobacterium adolescentis
  unsure (1)..(504): unsure at all Xaa locations
MKNKVQLITYADRLGDGTIKSMTDILRTRFDGVYDGVHILPFFTPFDGADAGFDPIDHTKVDERLGSWDDVAELSKTHNIMVDAIVNHMSWESKQFQDVLAKGEESEYYPMFLTMSSVFPNGATEEDLAGIYRPRPGLPFTHYKFAGKTRLVWVSFTPQQVDIDTDSDKGWEYLMSIFDQMAASHVSYIRLDAVGYGAKEAGTSCFMTPKTFKLISRLREEGVKRGLEILIEVHSYYKKQVEIASKVDRVYDFALPPLLLHALSTGHVEPVAHWTDIRPNNAVTVLDTHDGIGVIDIGSDQLDRSLKGLVPDEDVDNLVNTIHANTHGESQAATGAAASNLDLYQVNSTYYSALGXNDQHYIAARAVQFFLPGVPQVYYVGALAGKNDMELLRKTNNGRDINRHYYSTAEIDENLKRPVVKALNALAKFRNELDAFDGTFSYTTDDDTSISFTWRGETSQATLTFEPKRGLGVDNTTPVAMLEWEDSAGDHRSDDLIANPPVVA

SEQ ID NO: 16647 - protein, 448 aa, Oenococcus oeni PSU-1
MSLIASIYAREVLDSRGNPTVEAEVYSEDGFFGRGIVPSGASTGEHEAVELRDGDKSRYLGKGVTKAVANVNGAIAEALIGKFDVADQRGIDLAMIALDGTPNKGKLGANAILSVSIATARAAAEEAGLPLYQYLGGPNSYVLPTPMMNVINGGVHSDNKVDFQEFMIMPVGAKTVKEAIRMGSETFHNLKKLLEADGKNTSVGDEGGFAPDFANNEEPLQYLVKAIQAAGYKPGKDIALATDVAASELYDADTKKYKLKWSTGEEFTAPEFEKYIEGLVAKYPIVSVEDPLDENEWDDWVEVTKELGKKVQIVGDDFFVTNTDYLKRGIEMGAANAILIKLNQIGTLTETFEAIEMAKEAGYTAIVSHRSGETEDTTIADLVVATNAGQIKTGSMSRTDRIAKYNQLMRIEDELNQGEPEGVSIYKGINSFYNLNADAKKEIQSHQG

SEQ ID NO: 16648 - protein, 341 aa, Securigera parviflora
RNKEYLPIVGLADFNKLSAKLIFGADSPAIQENRVVTVQCLSGTGSLRVGGEFLGKHYHQRIIYLPQPTWGNHPKIFNLAGLSVKTYRYYAPATRGLDFQGLLEDLGSAPSGSIVLLHACAHNPTGVDPTLEQWEQIRKLIRSKPLLPFFDSAYQGFASGSLDADAQSVRSFVADGGELLMAQSYAKNMGLYGERVGALSIVCKSADVASLAESQLKLVIRPMYSNPPLHGASIVATILKDRNLYNEWTIELKAMADRIISMRQQLFDALRAKGTPGDWSHIIKQIGMFTFTGLNPEQVSFMTKEYHIYLTSDGRISMAGLSSKTVSHLADAIHAAVTRGH

SEQ ID NO: 16649 - protein, 429 aa, Ralstonia eutropha JMP134
MALESTHQDLAAARAQHVARGVVTAHPIFVDHAQGSRVWDVNGRSYLDFVGGIGVLNVGHNHPRVVAAVKQQLERVSHAAFQVAGYDVYIELAARLNRLVGGSEAYKTVFLTTGAEAVENAVKIARAYRNAPGIIAFRGGFHGRTLLGMTLTGMSTPYKQNFGPFAGDVYHTPYPDPYRGFSGDDALRALDDLFATQIAPDRVAAIILELVQGDGGFLAAGSDFLKKLRALTTKHGIVLIADEIQTGFGRTGELFAFQEAGIQPDLVTVAKSLAGGLPLSGVVGRAEIMDAPLPGGLGGTYAGNPLACAAALAVLDLFEDEKLTERARELGTTLRGGLLALADKYQEIGTIRGVGPMLALEFVKHGDPHQPDADFAQRVVDACRDEGLLVIKCGVHRNNVRLLAPVNTELDDAHEAIAILGRAIAKVRG

SEQ ID NO: 16650 - protein, 295 aa, Streptomyces antibioticus
MRGIILAGGNGTRLAPMTSVVSKQLLPVYGKPMIYYPLSVLLSVGITDILVIARPQDLPLFERLLGDGSRFGACFDYAEQETPRGLADALIVGREHVGDDDVALILGDNIFHGHDFGSIVADAIKNNVGATLFAYEVSDPERYGVVRVDRFGTLLDVVEKPSNPPSNLAITGFYLFDNDALDVAAGLSPSPRGELEITDVIKHFVDRGLARAVPLTDGFVWLDAGTPDSYVDACNYVQAIETRQGRMIACPEEVAFVKGLTGEDQLLAAAAEFGSSEYGRYLTRLAGRFIERSAA

SEQ ID NO: 16651 - protein, 612 aa, Caulobacter crescentus CB15
MDDAPRASDDRLEAERLEAVRGLGVVDGIVNGPGLSRLIRLAARLFDAPKAAVVLVDEARIWRAAYVGYAGPEAPREGDLAHRVVVANAPVGLAVPIRDCAGRVLGALVVEGPGMGGPAAEEDLQALGDLADLATEVLFGPCAKVPTLESERLDLAIAAASLGEFEWCVATNTFRISPRLAKLSGIPEGELDSQGGNALYAYIHPDDREAVRANIDRQLAQSGRFTAEYRRTPLEHGGETWNSVAGVMLMDADGQPSRLIGVVQDITPRKLQEAQRESLVAELDHRIKNLLAVVQSVAAQSARKSASLDVFLKTFAARLKSMSSAHDLLSAARWRGATLARIAAAELGGLAPTQTRWDGPELFLTPRAAAALSLALHELAVNAVRYGSLSTENGKVEVVWRRTPEGGFALEWLETGGPPAVAPATKGFGATLIEDVAGRELGGAAKISYRPGGVTAMIQGAPDALADAPPIEPVSAAPERIVETVVAADETVRPGAIAGLKVLIVEDSLLLALELEAGLEDAGVEVVGCAAELGEALSMVELDFDVAVLDADLNGQSVAPVAEILRSIGRPFVFATGYADKAAPMGFDAPIVRKPYNVHQIARAVAGVTGRA

SEQ ID NO: 16652 - protein, 375 aa, Triticum aestivum
MMKSGEEVSQGQQMNDFSEEKAAGESGDGRKIETSPSINLNSLPAIAPATTEIGVLHGALESEANDASTHNGDESSGTDLLILLPVAVPVEAEVPPRAARKTASALPRHCASHAGEKDALVTVAENEGCADGGDNHKGVHVLSIVKKDESEEIVDSINPVTVAEYREEKGTAGSTSAITAVRAPGSRSSCFHGVTRHRWSGKYEAHLWDSTCRVEGRRRKGKQVYLGSYDTEQKAARAYDVAALKFFGLNTKLNFSISEYEKELADIQDMSPEECVTYLRRRSSCFSRGASIYRGVTRRQKDGRWQARIGLIAGTRDIYLGTFKTEEEAAEAYDIAAIEIRGKNAVTNFDRSNYMDRGMHCIEGAGLKLLATKPE

SEQ ID NO: 16653 - protein, 497 aa, symbiont bacterium of Paederus fuscipes
MTTPTRADWEIRAKDLNIEGRAFVNGEYRNAASGETFDCLSPVDGRFLAKVASCDQADAEQAVKAARAAFDSGVWSRLAPAKRKRTMIRFADLLLKNAEELALLETLDMGKPISDSLHIDVSSAANSIYWNAEAIDKIYDEVAATPHEELGLVTREPVGVVTAIVPWNFPLLMACWKLGPALATGNSVILKPSEKSPLTAIRIACLATDAGIPTGVFNVLPGYGHTVGKALALHMDVDTLVFTGSTRIAKQLMIYAGESNMKRIWLEAGGKSPNIVFADAPDLKAAAEAAASAIAFNQGEVCTAGSRLLVERSIKDRFLPLVVEALKGWKPSNPLDPDTNVGALVDTQQLHTVLSYIEAGHKDGARLMVGGKRILEETGGVYVEPTLFDGVDNAMKIAREEIFGPVLSVITFENAEEAVRIANNTQYGLAAAVWTSDLSKAHLTAKALRAGSVWINQYDGGDMTAPFGGFKQSGNGRDKSLHAFDKYTELKATWIKL

SEQ ID NO: 16654 - protein, 85 aa, Glycine max
MDPKLKEVSQLFDRFKASFIRNDFDTCSNLLSQLKVLLTGFRSLPPLFADTPNAVHELTIARDIYEHTQCTWMRITQIRSAVPSL

SEQ ID NO: 16655 - protein, 315 aa, Corynebacterium glutamicum ATCC 13032
MSLPIDEHVNAVKTVVVPAAGLGTRFLPATKTVPKELLPVVDTPGIELIAAEAAELGATRLAIITAPNKAGVLAHFERSSELEETLMERGKTDQVEIIRRAADLIKAVPVTQDKPLGLGHAVGLAESVLDDDEDVVAVMLPDDLVLPTGVMERMAQVRAEFGGSVLCAVEVSEADVSKYGIFEIEADTKDSDVKKVKGMVEKPAIEDAPSRLAATGRYLLDRKIFDALRRITPGAGGELQLTDAIDLLIDEGHPVHIVIHQGKRHDLGNPGGYIPACVDFGLSHPVYGAQLKDAIKQILAEHEAAERIADDSQVK

SEQ ID NO: 16656 - protein, 164 aa, Arabidopsis thaliana
LKDPSKPPAKAQVVGWPPVRNYRKNVMANQKSGEAEEAMSSGGGTVAFVKVSMDGAPYLRKVDLKMYTSYKDLSDALAKMFSSFTMGSYGAQGMIDFMNESKVMDLLNSFEYVPSYEDKDGDWMLVGDVPWPMFVESCKRLRIMKGSEAIGLAPRAMEKFKNRS

SEQ ID NO: 16657 - protein, 285 aa, Pseudomonas syringae pv. syringae B728a
MSIALKQPTLTGQCVAEFLGTALMIFFGTGCVAALKVAGATFGLWEISIIWGIAVSMGIYLSAGISGAHLNPAVSIALSLFAGFEKRKLPFYISAQIAGAFCGAGLVYLLYISLFFDFEHAHHIIRGSEQSLELASVFSTYPNPAISVGQAFLVEVVITTILMGVIMALGDDSNGLPRGPLAPLLIGLLVAVIGSSMGPLTGFAMNPARDFGPKLMTFFAGWGEMAFTGGRDIPYFLVPIFAPILGACLGAAGYRALIARHLPSAAPVENEKEAPVVRGKVQASS

SEQ ID NO: 16658 - protein, 103 aa, Oryza sativa
MDPCKFRPSSSFDTKTTPITPRPVVGRRQKATIHKQNDFKQPGERYRSWAPDRQERFIRRFAGELAHPKVSPELRAIWVNYLSQCDESLGVKIANRLNVKPSM

SEQ ID NO: 16659 - protein, 204 aa, Pichia pastoris
MASRGTSRQQYDLTMKLLLVGDSGVGKSCLLLRFVDDSFNPSFITTIGIDFKIRTVEINGKKVKLQIWDTAGQERFRTITTAYYRGAMGIILVYDVTDERSFNSVHNWYQTLNQHANEDAQLFLVGNKCDDEESRQVTKEQGEQLASELGVPFLEASAKSNKNVDAIFLELAKRFEEKMRNTQQGPGSAGIDVNSSNDTKSSCC

SEQ ID NO: 16660 - protein, 472 aa, Klebsiella oxytoca
MTTLSHDSTTMPRTQRDTRRMNQFVSIAAAVAGLLFGLDIGVIAGALPFITDHFVLSSRLQEWVVSSMMLGAAIGALFNGWLSFRLGRKYSLMVGAVLFVAGSVGSAFATSVEMLLVARIVLGVAVGIASYTAPLYLSEMASENVRGKMISMYQLMVTLGIVMAFLSDTAFSYSGNWRAMLGVLALPAVVLIILVIFLPNSPRWLAEKGRHVEAEEVLRMLRDTSEKARDELNEIRESLKLKQGGWALFKVNRNVRRAVFLGMLLQAMQQFTGMNIIMYYAPRIFKMAGFTTTEQQMVATLVVGLTFMFATFIAVFTVDKAGRKPALKIGFSVMAIGTLVLGYCLMQFDNGTASSGLSWLSVGMTMMCIAGYAMSAAPVVWILCSEIQPLKCRDFGITCSTTTNWVSNMIIGATFLTLLDAIGAAGTFWLYTALNVAFIGVTFWLIPETKNVTLEHIERRLMSGEKLRNIGN

SEQ ID NO: 16661 - protein, 527 aa, Hordeum vulgare
MSSMQFSSVLPLEGKACVSPVRREGSACERLKIGDSSSIRHERASRRMCNGGAGAPPPPVRSACSPPTPARPTPLFSGRPSGGITPIRTRSRPSVAAVILGGGTGTQLFPLTSTRATPAVPIGGCYRLIDIPMSNCFNSGINKIFVMTQFNSASLNRHIHRTYLGGGINFTDGSVEVLAATQMPGEAAGWFRGTADAVRKFIWVLEDYYKHKSIEHILILSGDQLYRMDYMELVQKHVDDNADITLSCAPVGESRASEYGLVKFDSSGRVIQFSEKPKGDDLEAMKVDTSFLNFAIDDPAKYPYIASMGVYVFKRDVLLNLLKSRYAELHDFGSEILPRALHDHNVQAYVFTDYWEDIGTIRSFFDANMALCEQPPKFEFYDPKTPFFTSPRYLPPTKSDKCRIKEAIISHGCFLRECKIEHSIIGVRSRLNSGSELKNAMMMGADSYETEDEISRLMSEGKVPIGVGENTKISNCIIDMNARIGRDVVISNKEGVQEADRPEEGYYIRSGIVVIQKNATIKDGTVV

SEQ ID NO: 16662 - protein, 454 aa, Bacillus subtilis
MTSLIKIHAHGRRFEIFRSRGNPTVEVDLYTAKDLFRAAGARRCVHCHLRGPRTPRCCCLDPASYEMGLKGCYAHQYNYKTCSGSQETGCCEAGEDCPADDADGRHSSQLYDLIKKHPASVPGCLQGCCRGEGGALYRHIADFAGNPEVTLPVPAFIVINGGSHPANKFAQEFILLPVGASSFRTAGPAEVYHNLKNVIKEKYGKDATNVGDEGGFAPNILENKEALELLKSAIAKAGYTDQVVIGDVAASEFYRAGKYDLDFKSPDDASRYITPDQLADQLKSFTTCISSLLLTLPDASLQSRFGYYPDGDQPQAHRAGSGGEGLQLPPLEVTESLQACKLAQSNACGVIVSIDLRRLRTLFIADLFFGRVRADQDFSPCPICACQVECSFESRGLGRANKAKFAGRSFGPPLAKFPNLTAGHACTKYTPEQVSSRRGGGKTTTPNNPPSFCC

SEQ ID NO: 16663 - protein, 491 aa, Pseudomonas sp.
MKQYRNFVDGKWVESSKTFQDVTPIDGSVVAVVHEADRDLVDAAVKAGHRALEGEWGRTTAAQRVDWLRRIANEMERRQQDFLDAEMADTGKPLSMAATIDIPRGIANFRNFADILATAPVDSHRLDLPDGAYALNYAARKPLGVVGVISPWNLPLLLLTWKVAPALACGNAVVVKPSEDTPGTATLLAEVMEAVGIPPGVFNLVHGFGPNSAGEFISQHPDISAITFTGESKTGSTIMRAAAEGVKPVSFELGGKNAAVIFADCDFEKMLDGMMRALFLNSGQVCLCSERVYVERPIFDRFCVALAERIKALKVDWPHETDTQMGPLISSKHRDKVLSYFELARQEGATFLAGGGVPRFGDERDNGAWVEPTVIAGLSDDARVVREEIFGPICHVTPFDSESEVIRRANDTRYGLAATIWTTNLSRAHRVSELMRVGISWVNTWFLRDLRTPFGGAGLSGIGREGGMHSLNFYSELTNVCVRIDKESPDV

SEQ ID NO: 16664 - protein, 382 aa, Xylella fastidiosa Ann-1
MQVTSKLPQVGTTIFSVMSQLEDVYGAVNLGQGFPDFPVPLRLQEALEGAVREGHNQYPPMIGVAVLRQGIAVKVLRCYGAQVDADVEITVTSGATEAIFNAIHAVVGAGDEVIVLDPAYDCYEPGIVLAGARAVHVPLDAVSFKVDWERVGAAITSRTRLLIVNSPHNPSGALFSADDMRALATLLDGTDILLISDEVYEHIVFDGCGHESVLRWPQLRARAFVISSFGKTYHCTGWKIGYAIAPPALSAEFRKVHQYNTFTSFGPAQYAFAAMLHEEPGYVDQVGLFYQARRDCFREQLLTTKLVPLPVSGGYFQLVDYGAVSDLSDVEFSRWLAVEKGVASIPLSPFYETAPAGQRLVRLCFAKNDMTLGAAIERLQRL

SEQ ID NO: 16665 - protein, 616 aa, Glycine max
  unsure (1)..(616): unsure at all Xaa locations
MASLSGICSSSPTLKKFPNQSPSLTDPLRKDHVSFPARLADRTLSLAPLRAVAREVSDGALAAAVKKGLEKDPRALWRRYVGWLYQHKELGIYLDVSRVGFSDEFVKEMEPRFQAAFRAMEELEKGAIANPDESRMVGHYWLRDPKRAPNSFLKTQIENTLDAVCKFANDVVSGKIKPPSSPEGRFTQILSVGIGGSALGPQFVAEALAPDNPPLKIRFVDNTDPAGIDHQIAQLGPELASTLVIVISKSGGTPETRNGLLEVQKAFREAGLDFPKQGVAITQENSLLDNTARIEGWLARFPMFDWVGGRTSEMSAVGLLPAALQGIDIREMLAGASLMDEANRSTVLRNNPAALLALCWYWATDGVGSKDMVILPYKDSLLLFSRYLQQLVMESLGKEFDLDGNRVNQGISVYGNKGSTDQHAYIQQLREGVHNFFVTFIEVLRDRPPGHDWELEPGVTCGDYLFGMLQGTRSALYANNRESITVTVQEVTPRTVGALIALYERAVGIYASLVNINAYHQPGVEAGKKXAAGEVLALQKRVLAVLNEASCKEPVEPLTLEEVADRCHAPEDIEMIYKIIAHMAANDRALIVEGSCGSPRSIKVFLGECNIDGLYA

SEQ ID NO: 16666 - protein, 287 aa, Bacillus cereus ATCC 14579
MWSEHVTLEYPYHFEEVLKRLSFDPLNVIQLDEKVIYIPLCIDEEQVVVRLQGIGTVQNPQFWISSQTGDPEKVMKRMRAIFHWNEPFQDIQNHFLNTSLRPLFETYAYTPIILEFDYFACLLRCIIHQQINLKFATVLTEQFVKRYGTEKNGVFFFPTPEIVANISIEELREQKFSQRKAEYIVGLGRSIVSGTLNLASIENGTEEDISAQLLPIRGIGAWTVQNFLMFGLGRKNMFPKADIGIQRAVQGIFQLDDKPDDAFLEKVKQECEPYCSYAALYLWKSIE

SEQ ID NO: 16667 - protein, 548 aa, Pseudomonas syringae pv. tomato str. DC3000
MSLSPFAGKLAPAQLLVDIPRLVTAYYTGQPDASVPTQRVAFGTSGHRGTSFELGFNEWHVLAISQAICLYRKANGIDGPLFLGADTHALSTPAAATALEVLAANGVQVMISEGDEYTPTPAVSHAIICYNRGRTSGLADGIVITPSHNPPQSGGFKYNPPNGGPADSDITKWIENKANELLADKVVGVSRISHEKALRADTTHRHDYVNSYVADLKNVIDLDAIRDSGLRLGVDPLGGAGVNYWSAIGEHYGLNLDVVNKFVDPTFRFMTVDWDGQIRMDPSSSHAMQSLIGLKDRYQVAFACDPDHDRHGIVTPTGGLMTPNSYLAVSIDYLFQNRPDWRADAAVGKTVVSSGMIDRVAARLGRRLYEVPVGFKYFAQGLFEGSLGFGGEESAGASFLRRDGSVWTTDKDGLIPALLAAEMTARTGRDPSQIYKTMIDELGEPFSTRVDAKANPQQKALLSKLSPEQVTSTELAGEPIQQVLSNAPGNDQAFGGVKVMTENGWFAARPSGTEDIYKIYAESFVSEDHLKRLVAEAQVLVDGAISPK

SEQ ID NO: 16668 - protein, 565 aa, Shewanella oneidensis MR-1
MSEQKLALNEYLKTDSDYLRGTIKEGLDSSVTGSFSDGDQQLIKFHGFYQQDDRDLRNERKEQKLEPLYSFMLRARVPGGVCTPKQWLGVDEIASTLTSSNSIRLTTRQTFQYHGIPKRNLKTIIQGLDREALDSIAACGDVNRNVMCNPNPVESKLHAQAYEVAKKLSDHLLPHTRAYAEIWLDEEKLLTTEDETVEPVYGKTYLPRKFKMAVAVPPDNDVDVYTNDLGFIAVAENGELVGFNLTAGGGMGSTHGEVETFPRLADDFGFIKTEDVMKFAEAVMTVQRDWGNRTNRKRSRLKYTIVDHGYEKFKAEVEVRAGVKFEPKRDVVIGDRGDRYGWVEGVDGKWHLTLFIESGRIKDMPGKSLQTGMREIAKIHKGDFRMTSNQNMIIAGVAPEDKATIEGLARKRGLLGQVLTQTRGHSIACVALPTCPLAMAEAERYFPEFIDHIDALQAKNGISDQAIVVRMTGCPNGCARPFAAEIGLVGKAPGRYNLYLGANFEGTRLNKMYRENIQEAEILAELDALFARYAIERNAGETFGNFTVRVGVVKAVIDAAKDFHG

SEQ ID NO: 16669 - protein, 435 aa, Neurospora crassa
MPLRGPLRRPALALPPFTCNNVTTKIPLRISPLPRSVAVRQRRGHATHLPVPDTRPKTAIFFPGQGVQRVGMLTPWLEAFPSTTSEIIDEIDSIVGHKLSDVIQNGPGKDLNLSPNAQPAIMATSILIIRILEKHFNFRVQDNAHFTLGHSLGEFAALVAGGYIHFEDSLRMVQKRAEAMSNATRQAEEMYGGEYGMVALVSSKAEHLPPLIAAIHEFVGYDSAGSKVESADEWCPIDQVLIANVNSKTQIVLSGSIERIKTLVEHVRQFLGHDPRAVRLKSDSPFHSPIMKPAVGVLQQMMAGNSMVKGREKEDIITFPGKVTCISNVTARPFESREQLKDLLARQAVETVQWWDSIKYLDQSMKVRRWVGIGPGYVGRNLVGKEVGMRGKDVIKGAGVWAITDPKEIEEVLRGLEETDFYEDDEWQDAWDRWD

SEQ ID NO: 16670 - protein, 349 aa, Xylella fastidiosa Ann-1
MGFAALSATGPLERFAFGRRAPRPDDVVIDILYCGVCHTDLHLARNHSGFTTYPIVPGHEIIGCVREIGKTVTRFKRGDLVGVGCMVDSCQHCQPCLKGWEQDCIEGSIFTYNSTDRRDGSITYGGYSDVIVVRDKFVLSLPDGLDPAGAAPLLCAGITTWSPLRRWNVGKDSKVAVVGLGGLGHMALKLAKALGADVTLFTRSSGKEGDAFRLGADRVVLSSDLEQMKAVYSRFDVIIDTVPYDHDVNPYMPTLVLEGVLVLVGYLGPLSMPVNAGGVVRGRRAISGSFIGGAHETQQMLDFCGQHGIVSDVEIIPIQKINEAYERMLKSDVKYRFVIDMTSLTSSGA

SEQ ID NO: 16671 - protein, 399 aa, Geobacter sulfurreducens PCA
MKLADRVNKIQPSPTLSIDAKAKALKAQGIDVVGFGAGEPDFDTPANIKEAGKKAIDAGFTKYMPVGGADDLKDAIIAKMKRDHGLEYTRDEISVACGAKHTLYNISQALIQEGDEVIIPGPYWVSYPDQIVLAGGTPVFIMTDESTGFKITAEQLEKAITPRTVYVILNSPCNPTGSTYTKDELKALAAVLLKHPHVYVVSDDIYEKLLYDGLEFCNIPMACPELKDRTIIVNGVSKAYSMTGWRIGYACGPKALMAAMTKMQSQSTSNATSIAQKASVEALNGPQEPVAEMVKEFEKRRTYIVDRLNAIPGVTCFKSTGAFYAFPNFSGVYGKTTPAGKKIENSSDFAAYLLEDAKVALVPGIAFGDDRYARLSYATSLETIKKGLDRIEEAIGNLK

SEQ ID NO: 16672 - protein, 540 aa, Candida albicans SC5314
MSSTNSTENHAVEEKYEDPQQQQQQKDALAKKPMSAYIGISIMCVLIAFGGFVFGFDTGTISGFINMSDFLERFGGTRADGTLYFSNVRTGLLIGLFNVGCAIGALFLSKMGDMYGRRVGIMGAMVIYIVGIIVQIASQHAWYQVMIGRIITGLAVGMLSVLCPLFISEVSPKHLRGTLVCCFQLMITLGIFLGYCTTYGTKTYSDSRQWRIPLGLCFAWALCLLGGMVRMPESPRYLVGNDRIEDAKISLAKTNKVSPEDPALYRELQLIQAGVERERLAGSASWKSLITGKPRILERVFVGAMLQSLQQLTGDNYFFYYSTTIFKSVGLNDSFQTSIIIGVINFASTFVGIYAIEKLGRRHCLLIGSVAMSICFLIYSLIGTQHLYIDKPGGASRKPDGDAMIFITALYVFFFASTWAGGVYSIMSELYPLKVRSKAMGIASASNWLWGFLISFFTSFITDAIHFYYGFVFMGCLVFSIFFVYFMVYETKGLTLEEIDELYSTKVVPWKSAGWVPPSEEEMATSTGYAGDAKPTEEHV

SEQ ID NO: 16673 - protein, 349 aa, symbiont bacterium of Paederus fuscipes
MGEQLFDRFPNIIEAANDILGYSIKTLCLEDPQRQLRLTQYTQVALYVVNALTYRQHLQQGGGLPDFVAGHSLGEYNALESAGVFSFEDGLRLVQKRGDLMSQAPRGAMAAILGISADSVAGILAEQGLTRIDIANYNAPTQTIISGLEADIRDAQAVFESCQAMYVPLNTSGAFHSRYMQSARDEFAQFLEAFEFRDPQIPVVANVTAKPYVGTEVVRTLADQLTGSVRWLDSMRFLLDQGVTEFRELGPGDVLSKLVESIRSSAMSKPVSEFAAENSQQLVDEWNRTCPIGSRVRVKGYDDILVTKSRAVLLFGHRAAIYMENYQGYFALSEVEPLIEQQPLVEKVW

SEQ ID NO: 16674 - protein, 452 aa, Fusobacterium nucleatum subsp. nucleatum ATCC 25586
MRGVCIMINNLSELQKKDLKYVFHPCAQMKDFEENPPLVIKKGDGLYLIDENGNKYMDCISSWWVNLFGHCNKRINRIITEQVNNLEHVIFANFTHEPAAELCEELTKVLPKGINKFLFSDNGSSCIEMALKLSFQYHLQTGNPQKTKFISLENAYHGETIGALGVGDVDIFTETYRPLIKEGRKVKVPYIDSKLSNDEFVKLEDECIKELEDLIIKNHNEIACMIVEPMVQGAAGIKIYSAKFLKAARDLTKKYNIHLIDDEIAMGFGRTGKMFACEHAGIEPDMMCIAKGLSSGYYPIAMLCITTDIFNAFYADYKEGKSFLHSHTYSGNPLGCRIALEVLRIFKEENILKTINEKGTYLRNKMKEIFEDKSYIKDIRNIGLIGAIELKDNLLPNVRIGKEIYNFALKKGAFLRPIGNSVYFMPPYVITYEEIDKMLHVCKESIEELLKI

SEQ ID NO: 16675 - protein, 409 aa, Oryza sativa
MAGGGGSLAVGGGLNGWRGVSGSVGAAGLEEGSGPAWWRGHLTANGSRMKKGGGSRRHAIPTGEAGSGAVSRVAVAVAVYVDSSIEQEQLEEVVPWWGLMGRPPCCVKAEVKKGPWTPEEDLMLVAYVQEHGPGNWRAVPTNTGLMRCSKSCRLRWTNYLRPGIKRGNFTDQEEKLIVHLQALLGNRWAAIASYLPERTDNDIKNYWNTHLKKKLKKMSATGGGGDDGEGGGAGEVKTRAAAPKGQWERRLQTDIHTARQALRDALSLDPSPPAKPLDSSSGATAPPSSQAATSYASSAENIARLLEGWMRPGGGGGKTTTTPSSGSRSSAASVLSGEASHSGGATAPTPDGSTVTSKTKDEETAGAPPPPPPPAFSMLESWLLDDGMGHGEVGLMDVVVPLGDPSEFF

SEQ ID NO: 16676 - protein, 546 aa, Arabidopsis thaliana
MGHRHFLGSSQFFDDEHDQGWNHTHPEHPYSSQATSGTSENRSHVYPAENMLNEGMPVSSHWNSSPGPNAYTDSGHSVERPHYNPGVSGPSHDPSVNSTVPTFSAPHENYVTFASSSSYNSQTWSNASYVDHQSMESVRGAQKRKRPCPSSIYEMGSSSQYHGDRTPADTHFPSELHLGKSITHDHDPHYMPWLMNPTYRSNNLSIRGESSSRNVRSRPTLDSETSLGRNNLPRSLSLDSHSTHHHSVDHYGSGQFPGQTSHGNKDWNCARLSPVLRDINGFSPETNNFLPARSVVNSLSVNTSGYHHHELTGNRNPTVSHGVPGTSTLSTSSSRFSHRSTSTYRSSSHGSRSGHVASSSGDRSHLVTETYPSRHLRPPPHISWRSGDRPGRRRSSYERFQPPFDEVALHERFSSEEFMVEDRQPQYYGSRNMLDHHRDMRLDIDNMSYEELLDLGERIGSVNTGLSDSAISSCLLATMYYPSYQTEEQRKCAICLEEYKEKEELGEVKGCGHDYHGRCIKKWLSMKNSCPICKSPALPDASKNSS

SEQ ID NO: 16677 - protein, 394 aa, Burkholderia fungorum LB400
MLDFLAHGLLHFSWWQLVLYTAIVTHITIIGVTVYLHRCQAHRALELHPVVSHFFRFWLWMTTGMLTGQWAAIHRKHHAKCETEEDPHSPQTRGIWKVLLEGAELYRTEAKNEETMRKFSHGTPNDWMERNVYTKYPILGVSLMMVLNVALFGVVGLTIWAVQMVWIPFWAAGVVNGLAHFWGYRNFNSADASTNIFPWGIIIGGEELHNNHHTYATSAKLSNKWYEFDIGWMYIRIMSAFRLAKVKKVAPTPRLTTGKLVLDQDTLQAVLANRYEVMARYGKALKRAYRQELAHLKEVGAREKYQLMRGARSWFHKEEAGLDEPQKRQLPQIFASSQKLKTYIDMRNELAAMWERSNASRDQLLVQLQDWCHRAEQSGIKTLQDFAMRLRRYA

SEQ ID NO: 16678 - protein, 332 aa, Zea mays
  unsure (1)..(332): unsure at all Xaa locations
MEPHHANKPKPRPKLSAKHSKFISCKLYISESRNATAVDAVERASKSDPQVVVVSQFGDHHYNRFRYTLVSYIVVDDDGVDGGGGSSAAGEAIVVHSPIRKVLLAMMEAAFSSIDLESQSGAHPRMGVVDDLSFHPVGQATVEDAASLARQVASDIACIAAVPVFLYAAAHPAGKSVGAXRRELGYYRPNCRGNQWSGSVLPNVLPVKPDVGPAHVVSHKRGATTVGVTPWIENYNVPVLCKDVATVRRITRGVTGRSGGLPTVQALALFHGDDCTEIACLLDPDHASAYQVQTVVEQIAGDQGLEVEQGYYTDITKDEALDKYLKIACADD

SEQ ID NO: 16679 - protein, 904 aa, Pseudomonas fluorescens PfO-1
MNRQTTASTCCYCGVGCGVLIEHDGERILGVSGDPAHPANFGKLCSKGSTLHLTGDLAARALYPELRLGKGLARSRCDWDTALDHATNVFADTIAEHGPDSVAFYISGQLLTEDYYAFNKLARALVGTNNIDSNSRLCMSSAVVGYKRSLGADAPPCSYEDLELSDCVVIVGSNMAYAHPVLFRRLEEAKSRRPQMKVVVIDPRRTDTCDLADLHLAILPGTDVALFHGILHLLLWEDWIDRDFIKAHTDGLAELKSLVRDYTPAMVSQLCGISVEQLQQCAEWIGTAPSFLSLWCMGLNQSTAGSAKNSALINLHLATGQIGRPGAGPFSLTGQPNAMGGRETGSLSNLLPGHREVANPEHRAEVAAYWGVDKLPENTGLSAIELFEQVRGGKIKALWIACTNPAQSMPDQTAVRAALETCPFVVLQEAFRTTETAAFADLLLPAASWGEKEGSVTNSERRISHVRQAIAAPGEARPDWAITVDFAQRLEKRLRPQQPGLFAFEQPAQLFDEYKQLTRGRDLDLSGISHGLIDELGPQQWPFPAGARQGTARLYGDGIFPTANGRARFVADPYRAAKEQRDARFPLTLITGRLRDQWHGMSRTGTAAQLFGHVSEAVLSLHPDELRRHRLQPGDLVNLKSRRGAVIVAVASDDSVRPGQAFLPMHWGDRFLKGGVNSLTLPAFDPLSKQPELKHSGVRLEPVDLPWQLFALIEGDVQRHFEALRPLCEAFSYASLSLVGRERPALLIRAASAVAPEPRLLREIDQCLALIDGPVLAYDDPRRAIGKRVRIENGRITAIRLAGETLAQHWLQGLWLEGRADEQLRRWLLAPMSAPPGNAGAQVVADKTLCNCKNVSHSAVCAGIREGLDLQGLKNKLGCGTQCGSCVPEIKRLLAAEVRPVAVI

SEQ ID NO: 16680 - protein, 306 aa, Hordeum vulgare subsp. spontaneum
MATAGEVIKCKAAVAWEAGKPLSMEEVEVAPPQAMEVRDKILYTALCHTDVYFWEANGQTPVFPRILGHEAGGIVESVGKGVTELVPGDHVLPVFTGECKECAHCMSEESNLCDLLRINVDRGVMIDDGQSRFTIDGKPIFHFLGTSTFSEYTVIHVGCVAKIDPEAPLDKVCLLSCGISTGLGATLNVTKPKKGMTVAIFGLGAVGLAAMEGARMSGASRIIGVDLNPAKHEQAKKFGCTDFVNPKDHTKPVQEVIVEMTDGGVNRAVECTSNADAMISAFECVHDGWGVAHKEAVFKTHPMNFL

SEQ ID NO: 16681 - protein, 306 aa, Hordeum vulgare subsp. spontaneum
MATAGKVIKCKAAVAWEAGKPLSMEEVEVAPPQAMEVRDKILYTALCHTDVYFWEAKGQTPVFPRILGHEAGGIVESVGEGVTELVPGDHVLPVFTGECKECAHCMSEESNLCDLLRINVDRGVMIDDGQSRFTIDGKPIFHFLGTSTFSEYTVIHVGCVAKIDPEAPLDKVCLLSCGISTGLGATLNVTKPKKGMTVAIFGLGAVGLAAMEGARMSGASRIIGVDLNPAKHEQAKKFGCTDFVNPKDHTKPVQEVIVEMTDGGVNRAVECTGNADAMISAFECVHDGWGVAHKEAVFKTHPMNFL

SEQ ID NO: 16682 - protein, 306 aa, Hordeum vulgare subsp. spontaneum
MATAGKVIKCKAAVAWEAGKPLSMEEVEVAPPQAMEVRDKILYTALCHTDVYFWEANGQTPVFPRILGHEAGGIVESVGEGVTELVPGDHVLPVFTGECKECAHCMSEESNLCDLLRINVDRGVMIDDGQSRFTIDGKPIFHFLGTSTFSEYTVIHVGCVAKIDPEAPLDKVCLLSCGISTGLGATLNVTKPKKGMTVAIFGLGAVGLAAMEGARMSGASRIIGVDLNPAKHEQAKKFGCTDFVNPKDHTKPVQEVIVEMTDGGVNRAVECTGNADAMISAFECVHDGWGVAHKEAVFKTHPMNFL

SEQ ID NO: 16683 - protein, 481 aa, Arabidopsis thaliana
MSLKALDYESLNENVKNCQYAVRGELYLRASELQKEGKKIIFTNVGNPHALGQKPLTFPRQVVSLCQAPFLLDDPNVGMIFPADAIARAKHYLSLTSGGLGAYSDSRGLPGVRKEVAEFIERRDGYPSDPELIFLTDGASKGVMQILNCVIRGQKDGILVPVPQYPLYSATISLLGGTLVPYYLEESENWGLDVNNLRQSVAQARSQGITVRAMVIINPGNPTGQCLSEANIREILRFCCDERLVLLGDEVYQQNIYQDERPFISSKKVLMDMGAPISKEVQLISFHTVSKGYWGECGQRGGYFEMTNIPPRTVEEIYKVASIALSPNVSAQIFMGLMVSPPKPGDISYDQFVRESKGILESLRRRARMMTDGFNSCKNVVCNFTEGAMYSFPQIKLPSKAIQAAKQAGKVPDVFYCLKLLEATGISTVPGSGFGQKEGVFHLRTTILPAEEEMPEIMDSFKKFNDEFMSQYADNFGYSRM

SEQ ID NO: 16684 - protein, 151 aa, Zea mays
  unsure (1)..(151): unsure at all Xaa locations
KSLMEKAKAKGVSLLLPADVVIADKFAPDANSKIVPATAILDGWMGLDIGPDSIKTFSEALDTTKAIIWNGPMGVFEFDKFAAGTEAVAKQLAELIGKGVTPIIGGGDSVAAVEKVGLADKMSHISTGGGASLEIXNKGKPLPGVLAFDEA

SEQ ID NO: 16685 - protein, 306 aa, Hordeum vulgare subsp. spontaneum
MATAGKVIKCKAAVAWEAGKPLSMEEVEVAPPQAMEVRDKILYTALCHTDVYFWEANGQTPVFPRILGHEAGGIVESVGEGVTELVPGDHVLPVFTGECKECAHCMSEESNLCDLLRINVDRGVMIDDGQSRFTIDGKPIFHFLGTSTFSEYTVIHVGCVTKIDPEAPLDKVCLLSCGISTGLGATLNVTKPKKGMTVAIFGLGAVGLAAMEGARMSGASRIIGVDLNPAKHEQAKKFGCTDFVNPKDHTKPVQEVIVEMTDGGVNRAVECTGNADAMISAFECVHDGWGVAHKEAVFKTHPMNFL

SEQ ID NO: 16686 - protein, 309 aa, Magnaporthe grisea 70-15
MEAFKNATIAAGATALNSSHGYFDVFEEVSKYHVQLSVLERLWAAWYLWWQNDTLATGIMSFAMHEIVYFGRSLPWIIIDAIPYFRQWKIQNQKIPTAKEQWDCTMLVLLGHFTVELPQIWVFHPLATYFGLDHGVPFPPAWKIAMQIAIFFVIEDLWHYLFHRALHYGPLYKNIHKLHHTYSAPFGLAAEYASPIEVMLLGFGVVGTPIVWTSITGDLHLFTMYLWIVLRLFQAIDAHSGYDFPWSLRKFLPFWGGADFHDLHHERFIGNYASSFRWWDWVFDTEAGDEPARKRREKKLAALKAKKAQ

SEQ ID NO: 16687 - protein, 225 aa, Stellaria longipes
KPFYAIVHRVTRSLVIDFEPVKPYEVPMTAAGALQSYKLAAKAITRLQSLPSGNMDRLVDTMVQEVFELTGYDRVMAYKFHDDDHGEVVSEVTKPNLDSYLGLHYPATDIPQAARFLFMKNKVRLICDCRAKNVRVVQDEKLSVDLTLCGSTLRAPHGCHAQYMENMNSIGSLVMAVVVNDEDDEDGGSAPAQPHKRKRLWGLVVCHHTSPRFVPFPLRYACEFL

SEQ ID NO: 16688 - protein, 219 aa, Stellaria longipes
KPFYAILHRIDVGIVIDLEPARTEDPALSIAGAVQSQKLAVRAISQLQSLPGGDVKLLCDTVVESVRQLAAYDRVMVYKFHEDEHGEVVAESKRADLEPYLGLHYPATDIPQASRFLFKQNRVRMIVDCHADSVSVVQDERLRQPLCLVGSTLRAPHGCHSQYMANMGSIASLVMAVIINGNDDEGSTRNAMRLWGLVVCHHTSPRSIPFPLRYACEFL

SEQ ID NO: 16689 - protein, 220 aa, Stellaria longipes
KPFYAILHRIKVGLVLDLETVNLAETLVGVSGALMSYKLAAKAISKLQSLPSQNIPLLCDVLVKEVRELTGYDRVMVYKFHDDQHGEVIGESHSPSLDSYLGLHYPATDIPQASRFLFLKNKVRMICDCRSPSVKVIQDEALTQPLSLGGSTLRAPHGCHAQYMANMGSIASLVMAVTINNEEDEVSDRHRTRKLWGLVVCHHTSSRFVPYPLRYACEFL

SEQ ID NO: 16690 - protein, 416 aa, Saccharomyces cerevisiae
MSLSSKLSVQDLDLKDKRVFIRVDFNVPLDGKKITSNQRIVAALPTIKYVLEHHPRYVVLASHLGRPNGERNEKYSLAPVAKELQSLLGKDVTFLNDCVGPEVEAAVKASAPGSVILLENLRYHIEEEGSRKVDGQKVKASKEDVQKFRHELSSLADVYINDAFGTAHRAHSSMVGFDLPQRAAGFLLEKELKYFGKALENPTRPFLAILGGAKVADKIQLIDNLLDKVDSIIIGGGMAFTFKKVLENTEIGDSIFDKAGAEIVPKLMEKAKAKGVEVVLPVDFIIADAFSADANTKTVTDKEGIPAGWQGLDNGPESRKLFAATVAKAKTIVWNGPPGVFEFEKFAAGTKALLDEVVKSSAAGNTVIIGGGDTATVAKKYGVTDKISHVSTGGGASLELLEGKELPGVAFLSEKK

SEQ ID NO: 16691 - protein, 345 aa, Oryza sativa
NRDPRARNRHEDLFLPPPTSLPYPPHPGCAAHYALLHHHLPNPLHPRHLSSSSSPSPPPPLHLHLHLHRHRLALSTARFFRLAERRASAGPLVFETEEERSGWSGAEAAESNYDDEEDEEEEQGWAGGNAAGWRGESHEDDQEEGSGSGEGRRPRRSRPRELFVCNLPRRCDVDDLYELFKPYGTVLSVEISRDPETGLSRGCGFVTMRSLPEARTAMNALDGFDLDGREMLVKLSSDVVSKRRNINMTHTPPVKDHIFESPHKIYVGNIAWSVEPQELREYFSQCGTVVSTRLLTDRKGGRGRVYGFLSFASAEELEAALKLDNTHFHGRNILVRQAHEERQAH

SEQ ID NO: 16692 - protein, 507 aa, Arabidopsis thaliana
MAMASLARRKAYFLTRNISNSPTDAFRFSFSLTRGFASSGSDDNDVVIIGGGPGGYVAAIKAAQLGLKTTCIEKRGALGGTCLNVGCIPSKALLHSSHMYHEAKHVFANHGVKVSSVEVDLPAMLAQKDTAVKNLTRGVEGLFKKNKVNYVKGYGKFLSPSEVSVDTIDGENVVVKGKHIIVATGSDVKSLPGITIDEKKIVSSTGALSLTEIPKKLIVIGAGYIGLEMGSVWGRLGSEVTVVEFAADIVPAMDGEIRKQFQRSLEKQKMKFMLKTKVVGVDSSGDGVKLIVEPAEGGEQTTLEADVVLVSAGRTPFTSGLDLEKIGVETDKGGRILVNERFSTNVSGVYAIGDVIPGPMLAHKAEEDGVACVEFIAGKHGHVDYDKVPGVVYTYPEVASVGKTEEQLKKEGVSYNVGKFPFMANSRAKAIDTAEGMVKILADKETDKILGVHIMSPNAGELIHEAVLAINYDASSEDIARVCHAHPTMSEAIKEAAMATYDKPIHM

SEQ ID NO: 16693 - protein, 585 aa, Xanthomonas campestris pv. campestris str. ATCC 33913
MAEIKEALVPDIGDYSDVPVIEVLVSVGDTVSKDQSLVTLESDKATMEVPSSVAGVVKEIKVKVGDSLSQGALVALIEVADADAGAETAAAPAPAAAPAKAAPAAAPAPAAKAAPAAASDGGQVEARVPDIGDYSGVPVIEVLVAVGDTVAKDQSLVTLESDKATMEVPSSVAGVIKELKVKVGDSLSQGDLVAIIAASDGGAGAAQSPAKPTTDTAETAGKVEPVAVPAEPDKLAQREIAQVQSARSTAASQPAQAAPGTPSSPPVTFDADSVLPSKVPYASPVVRVFARELGVDLNQIKGSEKGGRITREDVQRFVKAALSGGAPAAAGAAPAGGGNGLNLLAWPKVDFSKFGETETQPLSRIKKISGANLARNWAMIPHVTQFESADITDLEALRVALNKENEKAGIKLTMLAFLIKASAAALKKFPEFNASLDAAGENLTLKKYINIGFAADTPNGLVVPVIRDVDKKGVLQIAQESGELAKKARDGKLGPADMSGGCFSISSLGGIGGTAFTPIINAPEVAILGVSKSAMQPVWNGKDFAPKLMLPLSLSYDHRVIDGALAARFTTYLSQVLADMRRVLL

SEQ ID NO: 16694 - protein, 506 aa, Yersinia pseudotuberculosis
MRYAHPGTPEALVSFKATYGNYIGGEFVEPLGGQYFMNTSPVNGSDIAQFPRSDARDIDAALDAAHRAADAWGKTSVQHRSNLLLQMADRIEANLEYLAVAESWDNGKPIRETLNADLPLAVDHFRYFAGCLRAQEGGVAEIDEKTVAYHFHEPLGVVGQIIPWNFPLLMAAWKLAPALAAGNCVVLKPAEQTPLGITLLLELVGDLFPAGVLNVVQGYGREAGEALASSKRIAKIAFTGSTPVGRHIMACAAENIIPCTVELGGKSPNIYFADVMEAEPEFIEKAIEGLVLGFFNQGEVCTCPSRALIHESIYAPFMARVMAKVANIRRGDPLDTETMIGAQASRQQFDKILSYIDIARKEGGEILTGGARATMTPALDAGFYIQPTLIKGDNLMRCFQEEIFGPVIGVTTFKDEAEALAIANQTQFGLGAGIWTRDTHLAYRMGRGIKAGRVWTNCYHVYPAHAAFGGYKQSGVGRETHKMALNQYQQTKNLLVSYDTAPLGLF

SEQ ID NO: 16695 - protein, 615 aa, Xanthomonas campestris pv. campestris str. ATCC 33913
MAVIEIKVPDIGDYSDVPVIEVLVAVGDSVVKDQGLVTLESDKATLEVPSSAAGVVKELKVKIGDNLSEGAVVLLLETEGEAAAAPAAPKAETKAETKAAAPAAAPAAAAPGSKPPVTPSHRAPAEPAASKPALASGKAADIECKMVVLGAGPGGYTAAFRAADLGLDTVLIERYASLGGVCLNVGCIPSKALLHAAAVIDEVAHAGDFGVDFGQPKITLDKLREYKEKVVGKLTGGLASMAKQRKVRTVTGVASFVSPNELEIVGDDGKTQLLRFEHCIIAAGSQAVKLPNFPWDDKRVMDSTDALELHDIPKTLLVVGGGIIGLEMATVYSALGSKVTVVEFMDQLMPGADKDLVKPLADRLKKQGVEVHLKTKATDVSADAKGITVSFEAATEGEKPGLQATAFDRVLVAVGRSPNGKKIGADKAGVTVTERGFIPVDRQMRTNVPHIFAIGDIVGNPMLAHKATHEGKLAAEVAAGEKKEWVARVIPSVAYTNPEIAWVGVTETEAKAKGLKVGVAKFPWAASGRAIGIGRTEGFTKLIFDEETHRIIGGAIVGVHAGDLLAEIGLAIEMGAEAEDIGHTIHAHPTLSESVGMAAEVYDGTITDLYIPKKK

SEQ ID NO: 16696 - protein, 497 aa, Arabidopsis thaliana
MLDLGNMSMSASVALTCCPSFLPAASGPELAKSINSPENLAGECNGKHLPMIPPEEEVKDIKIANGVTAFTRKQNPSDRVKKGFVLDDHVKDWVKRRVASGVSESTCFLPFLVGAKKMVDCLVCHKPVYPGEDLSCSVRGCQGAYHSLCAKESLGFSKSSKFKCPQHECFVCKQRTQWRCVKCPMAAHDKHSPWSKEILHLKDQPGRAVCWRHPTDWRLDTKHAVAQSEIEEVFCQLPLPYVEEEFKIDLAWKDSVVKEDPPSYVHIRRNIYLVKKKRDNANDGVGCTNCGPNCDRSCVCRVQCISCSKGCSCPESCGNRPFRKEKKIKIVKTEHCGWGVEAAESINKEDFIVEYIGEVISDAQCEQRLWDMKHKGMKDFYMCEIQKDFTIDATFKGNASRFLNHSCNPNCVLEKWQVEGETRVGVFAARQIEAGEPLTYDYRFVQFGPEVKCNCGSENCQGYLGTKRKEPNCLVVSWGAKRRRLFHRPIARKPQQD

SEQ ID NO: 16697 - protein, 427 aa, Ralstonia eutropha JMP134
MFAAADAAVFASADIAVKPIQKSNKLNNVCYDIRGPVLEKAKQMEEEGHKIIKLNIGNLAVFGFDAPEEIQQDMMRNLPNSAGYSDSKGIFAARKAIMHYTQQKNIQGVGLEDIYVGNGASELIVMAVNALLNSGDEVLVPAPDYPLWTAAVSLSGGTPVHYICDESNEWMPDPADIRARITPHTKAIVIINPNNPTGALYSDELLLEIVAIAREHGLIIFADEIYDKVLYDGNVHTSIASLSTDVLTVTFNGLSKNYRSCGYRAGWMVVSGDKRPALDYIEGLNMLSSMRLCANVPGQWAIQTALGGYQSINDLVAEGGRLRRQRDLAYELITAIPGVSCVKPKAALYLFPKLDLSMYPVQDDQEFIYELLQESKVLLVQGSGFNWDKPDHFRIVFLPHEEDLREAINRIARFLEAYRKRHGKVAA

SEQ ID NO: 16698 - protein, 306 aa, Hordeum vulgare subsp. spontaneum
MATAGKVIKCKAAVAWEAGKPLSMEEVEVAPPQAMEVRDKILYTALCHTDVYFWEANGQTPVFPRILGHEAGGIVESVGEGVTELVPGDHVLPVFTGECKECAHCMSEESNLYDLLRINVDRGVMIDDGQSRFTIDGKPIFHFLGTSTFSEYTVIHVGCVAKIDPEAPLDKVCLLSCGISTGLGATLNVTKPKKGMTVAIFGLGAVGLAAMEGARMSGASRIIGVDLNPAKHEQAKKFGCTDFVNPKDHTKPVQEVIVEMTDGGVNRAVECTGNADAMISAFECVHDGWGVAHKEAVFKTHPMNFL

SEQ ID NO: 16699 - protein, 160 aa, Dechloromonas sp. RCB
MSQTLYDFSAQRLNGEPQDFEAYRGKVLLIVNTASECGFTPQYTGLEELYWMFKDRGFVVLGFPCNQFGGQEPGDAEAIGQFCQTRFDVTFPLFAKVDVNGDSAHPLYTWLKHEAAGVLGTEAIKWNFTKFLIDREGKVVHRYAPATRPDELVEAVEAQL

SEQ ID NO: 16700 - protein, 304 aa, Hordeum vulgare subsp. spontaneum
MATAGKVIKCKAAVAWEAGKPLSMEEVEVAPPQAMEVRDKILYTALCHTDVYFWEANGQTPVFPRILGHEAGGIVESVGEGVTELVPGDHVLPVFTGECKECAHCMSEESNLCDLLGINVDRGVMIDDGQSRFTIDGKPIFHFLGTSTFSEYTVIHVGCVAKIDPEAPLDKVCLLSCGISTGLGATLNVTKPKKGMTVAIFGLGAVGLAAMEGARMSGASRIIGVDLNPAKHEQAKKFGCTDFVNPKDHTKPVQEVIVEMTDGGVNRAVECTGNADAMISAFECVHDGWGVAWRTRSRCSRPTP

SEQ ID NO: 16701 - protein, 312 aa, Hordeum vulgare subsp. spontaneum
MATAGKVIKCKAAVAWEAGKPLSMEEVEVAPPQAMEVRVKILYTALCHTDVYFWEAKGQTPVFPRILGHEAGGIVESVGEGVTELVPGDHVLPVFTGECKECAHCMSEESNLCDLLRINVDRGVMISDGQPRFTIDGKPIFHFLGTSTFSEYTVIHVGCVAKIDPEAPLDKVCLLSCGISTGLGATLNVAKPKKGMAVAIFGLGAVGLAAMEGARMSGASRIIGVDLNPAKHEQAKKFGCTDFVNPKDHTKPVQEVIVEMTDGGVDRAVECTGNADAMISAFECVHDGWGVAVLVGVAHKEPVFKTHPMNFL

SEQ ID NO: 16702 - protein, 86 aa, Glycine max
  unsure (1)..(86): unsure at all Xaa locations
VGKAYGAYNMYXGGGYHGNRLNKLYRSSIKEEEILAILKPMLKQYALERNEGERFGDFVIRKGIIVATNGGQDFHENTAELEEDDE

SEQ ID NO: 16703 - protein, 721 aa, Emericella nidulans
MRALGLVGLVGVANAVCPYMTGELGRRDTNPDATEATEEFLSEYYLDDTDSYLTTDVGGPIEDQQSLKAGARGSTLLEDFIFRQKIQRFDHERVPERAVHARGAGAHGVFTSYGDFSNITAASFLSAEGKETPVFVRFSTVAGSRGSSDLARDVHGFATRFYTDEGNFDIVGNNIPVFFIQDAIQFPDLIHAVKPKGDREIPQAATAHDAAWDFFSQQPSTLHTLLWAMAGHGIPRSFRHVDGFGVHTFRLVTEDGSTKLVKFHWKTLQGLASMVWEEAQQISGKNPDYMRQDLFESIEAGRYPEWELNVQIMDEEDQLRFGFDLFDPTKIVPEEYVPLTPLGKMTLNRNPRNYFAETEQVMFQPGHVVRGVDFTEDPLLQGRLFSYLDTQLNRNGGPNFEQLPINQPRVAIHNNNRDGAGQMFIPLNPDAYSPNTLKGSTLKQANQTAGRGFFTAPDRTANGNLVRAKSSTFDDAWSQPRLFWNSLLPAEKQFVVNAIRFENANVKSDVVKNNVIVQLNRISNDLATRVAKAIGVDAPEPDNTYYHDNTTSNIGAFGHRLQSLAGLKIAVLASVDAEESFSAATALKAELSNDNLDVIVVAERFSNGVNQTYSASDAIQFDAVVVAPGAEKLFGAKSAANSSSTLYPAGRPLEILVDAFRFGKPVAALGSGSTAFDNAGINTAVEGVYVADAVDESFANNLEEGLTVFKFLDRFALDSDE

SEQ ID NO: 16704 - protein, 503 aa, Arabidopsis thaliana
MAITVPRRQLFIGGQWTEPVLRKTLPVVNPATEDIIGYIPAATSEDVELAVEAARKAFTRNNGKDWARATGAVRAKYLRAIAAKVIERKSELANLEAIDCGKPLDEAAWDMDDVAGCFEYYADLAEGLDAKQKTPLSLPMDTFKGYILKEPIGVVGMITPWNYPLLMAVWKVAPSLAAGCTAILKPSELASLTCLELADICREVGLPPGVLNILTGLGTEAGAPLASHPHVDKIVFTGSTTTGSSIMTSAAKLVKPVSLELGGKSPIIVFDDVDIDKAVEWTMFGCFWTNGQICSATSRLLVHERIADEFLDKLVKWTKNIKISDPFEEGCRLGPVVSKGQYERVLKFVSNARNEGATVLCGGVRPEHLKKGYFVEPAIVSNVTTSMEIWREEVFGPALCVKTFSTEDEAIQLANDSQYGLAGAVLSNDLERCDRVSKAFQAGIVWVNCSQPCFCQAPWGGTKRSGFGRELGEWGLENYLSVKQVTQYISDEPWGWYKPPSKL

SEQ ID NO: 16705 - protein, 312 aa, Hordeum vulgare subsp. spontaneum
MATAGKVIKCKAAVAWEAGKPLSMEEVEVAPPQAMEVRVKILYTALCHTDVYFWEAKGQTPVFPRILGHEAGGIVESVGEGVTELVPGDHVLPVFTGECKECAHCMSEESNLCDLLRINVDRGVMISDGQPRFTIDGKPIFHFLGTSTFSEYTVIHVGCVAKIDPEAPLDKVCLLSCGISTGLGATLNVAKPKKGMVVAIFGLGAVGLAAMEGARMSGASRIIGVDLNPAKHEQAKKFGCTDFVNPKDHTKPVQEVIVEMTDGGVDRAVECTGNADAMISAFECVHDGWGVAVLVGVAHKEPVFKTHPMNFL

SEQ ID NO: 16706 - protein, 312 aa, Hordeum vulgare subsp. spontaneum
MATAGKVIKCKAAVAWEAGKPLSMEEVEVAPPQAMEVRVKILYTALCHTDVYFWEAKGQTPVFPRILGHEAGGIVESVGEGVTELVPGDHVLPVFTGECKECAHCMSEESNLCDLLRINVDRGVMISDGQPRFTIDGKPIFHFLGTSTFSEYTVIHVGCVAKIDPEAPLDKVCLLSCGISTGLGATLNVAKPKKGMVVAIFGLGAVGLAAMEGARMSGASRIIGVDLNPAKHEQAKKFGCTDFVNPKDHTKPVQEVIVEMTDGGVDRAVECTGNADAMISAFECVHDGWGVAVLVGVAHKEAVFKTHPMNFL

SEQ ID NO: 16707 - protein, 170 aa, Glycine max
MGNYISCTLAPPLMKNTRAARVIFPTGEVKQYKEQVINVAELMMECPTHFLANSNSLHIGRRFSPLGADEELECGNVYIFFPMRRLNSVVTAADVAVLFMAANMTAKRITNDKDLMSCDHLAEGVGTNDDVPRLSLEGVEVESGFRNRFSYCRSRKPALETINEEPIWLR

SEQ ID NO: 16708 - protein, 588 aa, Glycine max
MSSSFSVRFLAPPSSCFPSSRPKTWLCAATTPTVAPATASSEVEASRLEPRVEERDGFWVLKEEYRGGISPQEKVKLEKDPMKLFMEGGIEDLAKMSLEEIESSKHTKDDIDVRLKWLGLFHRRKQHYGRFMMRLKLPNGVTTSAQTRYLASVIRKYGKDGCADVTTRQNWQIRGVVLPDVPEILKGLDEVGLTSLQSGMDNVRNPVGNPLAGIDPDEIVDTRPYNNLLSQFITANSRGNPAMSNLPRKWNVCVVGSHDLFEHPHINDLAYMPANKDGRFGFNLLVGGFFSAKRCAEAIPLDAWVSADDVIPLCKAVLEAYRDLGFRGNRQKTRMMWLIDELGIEVFRSEVEKRMPGKQLERASEEELVKKKWERRDYLGVHPQKQDGLSYVGIHIPVGRVQADDMDELARLVDKYGTGELRLTVEQNIIIPNVDSNKIDALLNEPLLKGRFSPEPSLLMKTLVACTGNQFCGQAIIETKERALKVTEEVERQVAVTRPVRMHWTGCPNTCGQVQVADIGFMGCMARDENGKATEGVDIFLGGRIGSDSHLAEVYKKGVPCKNLVPIVVDILVKHFGAVQRNREEGED

SEQ ID NO: 16709 - protein, 462 aa, Ustilago maydis 521
MAPTATASVGAAVASIPTTLKTVAHAVSATASTSASTLSTSEVIHKEAEYGAHNYHPLPVVFDRAQGAHVWDPEGNQYLDFLSAYSAVNQGHCHPAIVGALVAQAQKLTLSSRAFYNSAFAPFAEKVTKTFGYEMVLPMNTGAEAVETALKLARKWGYMKKRIPEGKARLLSVSGNFHGRTLGVISMSTDPESRTGFGPFLDRVGPGVDDMTIRYDNADDLEKVLDKYGHEVAAFLVEPIQGEAGIVVPSDGYLKRVQELCRKHNVLFICDEIQTGLGRTGKMLCHQHDNVRPDIVTLGKALSGGVYPVSAVLADKEVMLCIKPGEHGSTYGGNPLGCAVASAAIDVLVNENLCDRAEQLGARFRAQLRDIQHPLLASVRGRGLLNAIVIDEQKSTKRRSAWQLCLLLKSKGLLAKPTHVNIIRLAPPLVITEADLDRGVEIIKQALDELDSLDSIPGDDQH

SEQ ID NO: 16710 - protein, 505 aa, Pseudomonas syringae pv. tomato str. DC3000
MHDLLTADEYAAIAQSISFPSNAFINGAYKPAISGATFSTINPATGEFLSDLAACRAEDVDDAVSKAKKAFDDGRWRLLAPGERKSVLLKFARLLEDNRHELAVLESLDSGKPVRECQLVDVPDTIHTLRWHAELIDKLYDHTAPVGNDALTLVVREPIGVVGCVLPWNFPLLMLAWKIGPALAAGCSVIVKPAEQTSLTTLRVAELAFEAGVPAGVLNIITGTGKDVGEPIGLHKDIDMVSFTGSTVTGRRFLHYSADSNLKRVVLECGGKNPAVVMEDAEDLDLVAEQVVNGAFWNMGENCSATSRLLVHASVKDELLERMGAYIREWKMGDPLDPQTRVGALVSSDHFAKVKSYLDYANADKLDIVYGGDTQEGAFVQLTVVDGVERDSRLFQEEIFGPILSVTTFNSISEAIALANDTVYGLAASVYTGSLRKAIKLSREIRAGIVTVNCFGEGDASTPFGGFKESGFGGRDKSVFAHDQYTEIKTIWIDVSDRSVDETVK

SEQ ID NO: 16711 - protein, 324 aa, Ajellomyces capsulatus
MENYQKIEKIGEGTYGVVYKARDLTHPNRIVALKKIRLEAEDEGVPSTAIREISLLKEMHDPNIVRLLNIVHADGHKLYLVFEFLDLDLKKYMEALPVSEGGRGKALPDGSTLDMNRLGLGEAMVKKFMAQLVEGIRYCHSHRVLHRDLKPQNLLIDREGNLKLADFGLARAFGVPLRTYTHEVVTLWYRAPEILLGGRQYSTGVDMWSVGAIFAEMCTRKPLFPGDSEIDEIFKIFKLLGTPDENTWPGVTSFPDFKASFPKWKREDTRKLVPGLERNGLDLLDAMLEYDPARRISAKQACMHPYFQAGSSAYSGRERLQPYP

SEQ ID NO: 16712 - protein, 602 aa, Saccharomyces cerevisiae
MLGTLLLGVFAEDTVSQIGINDSLWYPYDEALVLKPLPNNDLLLSFAFQLQSEPFDPAVSSMSYDAYEHYTTFPRAIPPLLESTATRQFHLRFTRGFWDALSWGQLPHAGKEAGASGVELWSQVQAMDQEQAFHNWKKLSNSLSGLFCSSLNFIDESRTTFPRRSYASDIGAPLFNSTEKLYLMRASLPNEPICTENLTPFIKLLPTRGKSGLTSLLDGHKLFDSLWNSISLDIATICSEDEDALCHYEMDARIEMVTHVPSALARGERPIPKPLDGNTLRCDTDKPFDSYQCFPLPEPSQTHFKLSQLFARPINNGNLFANRPTRICAEVDRSTWTAFLSVDDTIFSTHDNCFDLSNDQNEGGSGYDFILESTDTTKVTPIVPVPIHVSRSLTGNGQDRGGMRIVFHNDNDTPVKLIYFESLPWFMRVYLSSLQITSTTSPQLQENDIILDKYYLQAADRKRPGHLEFTMLIPANTDIVMTYQFDKALLQFAEYPPDANHGFEIDAAVITVLSLESSSSLYEMRTSTLLLSLSTPDFSMPYNVIILTSTIMGLIFGMLYNLMVKRMVTVEEADKITLQSGLKYKLLKLKEKFLGKKKTKTD

SEQ ID NO: 16713 - protein, 418 aa, Burkholderia fungorum LB400
MPYQHIKVPTGGDKITVNPDFSLNVSDQPIIPYIEGDGTGIDITPVMIKVVDAAVEKAYAGKRKIHWMEIYAGEKSTKVYGPDVWLPEETLQVLKEYVVSIKGPLTTPVGGGIRSLNVALRQELDLYVCLRPVQYFKGVPSPVREPEKTNMVIFRENSEDIYAGIEWPAESEQAKKIIRFLREEMGVKKIRFPETSGIGIKPVSREGTERLVRKAIQYAIDHDRRSVTLVHKGNIMKFTEGAFRDYGYALAQKEFAAELIDGGPWMKIKNPKTGGDVVLKDVIADAFLQQILLRPAEYDVIATLNLNGDYVSDALAAQVGGIGIAPGANMSDSVAMFEATHGTAPKYAGKDYVNPGSEILSAEMMLRHLGWTEAADLIIKSMEKSILQKRVTYDFARLMEGATQVSCSGFGQVLIENL

SEQ ID NO: 16714 - protein, 287 aa, Bacillus subtilis subsp. subtilis str. 168
MWKEKVSVTPPYHFDRVLDRLSLDPLNAVDREAREVRVPIRNQAGDVCIVKVQALGHAGEPEFLVSGETDQGEMMKEIKRIFQWENHLQHVLDHFSKTSLSAIFEEHAGTPLVLDYSVYNCMMKCIIHQQLNLSFAYTLTERFVHAFGEQKDGVWCYPKPETIAELDYQDLRDLQFSMRKAEYTIDTSRMIAEGTLSLSELPHMADEDIMKKLIKIRGIGPWTVQNVLMFGLGRPNLFPLADIGLQNAIKRHFQLDDKPAKDVMLAMSKEWEPYLSYASLYLWRSIE

SEQ ID NO: 16715 - protein, 207 aa, Zea mays
  unsure (1)..(207): unsure at all Xaa locations
MGNFASCTLARTAGAGRASGSTVVLPDGRVRQVALPATAAELMLDAPGHFLADARALRPGRRIEALAADEGLVRGALYAVLPMKRLGAPVAPADVARLAAXVVANGEKARAARGRTRPVSSPAATAKVAAVFVAPPETLEAAAAALELQEMDAPKPRAPRLEEMAVDDAAAAAEIEELKQRLSGGGRRSRRPTLETIQEESYVPARC

SEQ ID NO: 16716 - protein, 547 aa, Glycine max
MASHLLNHSSKMRNASKLLHHERALLVRWFSGDAHSSLNRNRDVWKTQFHESSATSSVFEPASCFNKRSFGMQKRNIFMATIKRGSIIGSEFNGEISRSSQVLSRRCYASASDLPPHQEIGMPSLSPTMTEGNIARWLKKEGDKISPGEVLCEVETDKATVEMECMEEGYLAKIIRGDGAKEIKVGEVIAVTVEDEGDIAKFKDYQPSASEPSAAPAKEISAPPTPKKEEEVEEPGREPEPKVSKPSAPPSSGDRTFASPLARKLGEEKNVPLSSIKGTGPEGLIVKADIDDYLASGAKEVSASSKAKVATDAALDYTDIPVSQIRKVTASRLLLSKQTIPHYYLTVDTCVDKLTSLRTQLNSLQEASGGSRISVNDLVIKAAALALRKVPQCNSSWANDYIRQYNNVNINVAVQTDNGLFVPVIRDADKKGLSTIGEEVKQLAKKAKENSLKPQDYEGGTFTVSNLGGPFGVRQFCAIINPPQAGILAVGSSERRVVPGSGAEEFKFASFMSVTLSCDHRVIDGAIGAEWLKAFKGYIENPETMLL

SEQ ID NO: 16717 - protein, 404 aa, Oenococcus oeni PSU-1
MTKLTVKDLDLKGKKVLMRVDFNVPIKDGVIGNDNRVVAALPTIKYVLEQGGKAILFSHLGRIKKAEDKPGLSLAPVAKHLSDLLNQEVVFPGKTEGKELEDAIDKLKDGQVLMVENTRYEDVDANGEYVKRESGNDPELGKYWADLGDDLFVNDAFGTAHRSHASNVGIASNVSKTAAGFLMEKEIKYLDEAVNNPKRPFVAVLGGAKVSDKIEVIKNLLSKADKVIVGGGMSYTFSNAKGVKIGNSLFEADKVSLAKEIMKEAGDKLVLPEDSVAAESFANDVPTKVFENGIPDGWMGLDIGPKTIEKFKNTLKGAKTVVWNGPMGVFEMSNFANGTLELGKFIGSLTSEGAATIVGGGDSTAAVSQLGIADQFTHISTGGGASLEYLEGKTLPGIAAISDK

SEQ ID NO: 16718 - protein, 346 aa, Bdellovibrio bacteriovorus HD100
MYSGFLKNVWYVGIPSAELAVNKATARKILGEPIVFYRDSKGKVSAMRDICPHRGIPLSYGRVVNDQIECPYHGWKFDGTGMCTEIPSLCPDQELNPNKIKVRSYPVHEAQGLIWVFVGDKDYDVSKAPAIPVMKAFPADVKPNLTYVVNFPCHVDHAVIGLMDPAHGPYVHKSWFWRSEKTMLEKKKKFAPVNYGFQMVRHQPSKNSKAYKILGGTPTTEITFTLPCVRVEHIEVGPRNFYSYTALTPVDENNTRVTQLAYWDIPWLTLLKPAIHQFSKKFLGQDMDAVTKQQDGLRYDPSLMLIKDADTQAKWYYALKTEYHDHLEGKREFNHPVKETELRWRS

SEQ ID NO: 16719 - protein, 363 aa, Ustilago maydis 521
MFLPSKMKALVTTKDKKTEIQEVPLPTLDKDEVLIRTLAVTINPTDWKHVALISGPGKQVGCDFVGIVEELGPQVKNSSLSKGDRVAGFVHGGLDPDRGSFAEFLKTNSEIVATIPDNVDDLTAASLGISGETAVQALFHRLAIPVPDLSNAPIKVTDDSPEILIWSGSTSVGQWAIQIAHISGYKVITTASPRNHEMLKELGADDLYDYRDETTPQKIAAKYPNLSKALDCISENGTQQLCVKSLGAEDGDIVVLLKPDKEAINLRKGQINIIHTLVYTALGRPFSYGRAVYDQDRVTADSELMKEWLNGNQGHFYHLFKQGLLRGNRIKEMPGGLEGIPEGLKYVQEGKASAEKLVHRISS

SEQ ID NO: 16720 - protein, 431 aa, Buchnera aphidicola str. Bp (Baizongia pistaciae) [sequence omitted]

SEQ ID NO: 16721 - protein, 431 aa, Oryza sativa (japonica cultivar-group)
MAMASPTNGGGGGGNKVISLRLQYYCVLAAVVVAVMVLSLAFVSPSAMGAAVRQNLGSVVAATAAAGEGADASAAAAGAGVAATTAAEEEREQAAAAGVVLFNFGDSNSDTGGVAAAGGIRIMPPEGRTYFHHPTGRLSDGRVIIDFICESLNTRELNPYLKSIGSDYSNGVNFAMAGSTVSHGVSPYSLNVQVDQFVYFKHRSLELFERGQKGPVSKEGFENALYMMDIGHNDVAGVMHTPSDNWDKKFSKIVSEIKDAIRILYDNGARKFWIHGTGALGCLPALVVQEKGEHDAHGCLANYNKAARQFNKKLSHLCDEMRLQLKNATVVYTDMFAIKYDFVANHTKYGIKWPLMVCCGNGGPPYNFKPGKFGCDDLCEPGSKVLSWDGVHFTDFGSGLAAKLAMSGEYSKPKVKLASLVNAGSNKSSDS

SEQ ID NO: 16722 - protein, 312 aa, Hordeum vulgare subsp. spontaneum
MATAGKVIKCKAAVAWEAGKPLSMEEVEVAPPQAMEVRVKILYTALCHTDVYFWEAKGQTPVFPRILGHEAGGIVESVGEGVTELVPGDHVLPVFTGECKECAHCMSEESNLCDLLRINVDRGVMISDGQPRFTIDGKPIFHFLGTSTFSEYTVIHVGCVAKIDPEAPLDKVCLLSCGISTGLGATLNVAKPKKGMAVAIFGLGAVGLAAMEGARLSGASRIIGVDLNPAKHEQAKKFGCTDFVNPKDHTKPVQEVIVEMTDGGVDRAVECTGNADAMISAFECVHDGWGVAVLVGVAHKEAVFKTHPMNFL

SEQ ID NO: 16723 - protein, 142 aa, Brassica oleracea
MAMSLSGSAVLSGIGSSFSSGAAKQSGVGAVGFGRKTEFVVVAQRKKSLIYADKGDGNILDDLNEATKRASDYATEKTNEALKHGEEAKDYVVDKNVEAKDTAVDEAQKALDYVKAKGNEAGNKVAEFVEGKAGEAKDATKA

SEQ ID NO: 16724 - protein, 593 aa, Pinus sylvestris
MCGILAVFGCLDASQAKRVRVLELSRRLRHRGPDWSGLYQSGHSFLAHQRLAIVDPASGDQPLYNEDRQIVVTVNGEIYNHEKLREQLKSHKFRTGSDCEIVAHLYEDYGEEFVNMLDGMFSFVLLDTRDQSFIAARDAFGITPLYIGWGFDGSVWFASEMKALHDDCESFESFPPGHIYSSKQGGLRRWYNPPWYSENVIPSSPYDPLVLRRAFEKAVIKRLMTDVPFGVLLSGGLDSSLVAAVASRYLAATKAGKQWGDKLHSFCVGLKGSPDLKAAKEVAEYLGTVHHEFHFTVQDGIDAIEDVIYHVETYDVTTIRASTPMFLMSRKIKSLGVKMVLSGEGSDEIFGGYLYFHKAPNKEEFHQETCRKIKALHMYDCLRANKSTSAWGVEARVPFLDKEFVNVAMDIDPERKMVKPDIGRIEKWVLRRAFDDEQNPYLPKHILYRQKGQFSDGVGYSWIDGLKSHAAEHVTDTMLRNAKYIFPHNTPTTKEAYYYRMIFERFYPQNAARLTVPGGPSVACSTAKAVEWDAAWAHNLDPSGRAALGVHASAYQECNAGANDGTGNGNVNTFSKMPGREASVDAREVLIKG

SEQ ID NO: 16725 - protein, 312 aa, Hordeum vulgare subsp. spontaneum
MATAGKVIKCKAAVAWEAGKPLSMEEVEVAPPQAMEVRVKILYTALCHTDVYFWEAKGQTPVFPRILGHEAGGIVESVGEGVTELVPGDHVLPVFTGECKECAHCMSEESNLCDLLRINVDRGVMISDGQPRFTIDGKPIFHFLGTSTFSEYTVIHVGCVAKIDPEAPLDKVCLLSCGISTGLGATLNVAKPKKGMAVAIFGLGAVGLAVMEGARLSGASRIIGVDLNPAKHEQAKKFGCTDFVNPKDHTKPVQEVIVEMTDGGVDRAVECTGNADAMISAFECVHDGWGVAVLVGVAHKEPVFKTHPMNFL

SEQ ID NO: 16726 - protein, 550 aa, Schizosaccharomyces pombe
MSFSLASTLPAWQAVQTHYESVGKHLVLKELFAKDSSRFEKFSFTFNGLKEEDGPILFDFSKNLITEETVELLVKLAKEANVEGLRDALFAGEHINFTEDRAVFHPALRNVSEKPMKVNGQDVMPGVRKVLRHMKEFSDAVRSGAWKGYTGKPIKSIVNVGIGGSDLGPVMVTEALKPYGQENLELHFVSNIDGTHLAEALKKCDPETTLFLIASKTFTTAETCTNAKSAKDWFLASAKDPSHVAKHFVALSTNEKEVTAFGISAQNMFEFSDWVGGRYSVWSAIGLSVALYIGYENFEAFLSGAHAMDEYFCSTPLEKNIPALAALISIWYSDFFGAQTHLVAPYDQYLHRFPAYLQQLSMESNGKAITRSGDMVNYTTGKILWGEPGTNSQHSFFQLIHQGTKLIPADFLIPIESHNPIDNNKHHRMLFSNFAAQTEALMLGKTPAEVKAEGTPDEIVPHKTFVGNRPSNSIIAKKITPASLGALIAFYEWVTFTEGAVWNINSFDQFGVELGKKLAKNVLAQLETKGDVENHDSSTNGLINLFKNGF

SEQ ID NO: 16727 - protein, 484 aa, Dechloromonas aromatica RCB
MNLQNTELLRSTNLIGGIWARADDGAQLAVINPATGEKLADVPLCGATETRRAIDAANAAWPAWRALTARRRSQLLQAWFSLIIKNADDLAQLVTAECGKPLQEAKGEVIYGASFVEWFAEEGKRTYGESIPSPAANTRLLVIKQPIGVCAAITPWNFPLAMITRKVAPALAAGCPVVVKPAEATPLTALALAVLAEQAGFPAGVFNVVTGKPAEIGGELCANPIVRKLSFTGSTGVGRLLMAQCAPTIKKLSLELGGNAPFIVFDDADVNAAVDGAIAAKYRNTGQTCVCANRFLIQAGIYDEFAAKFAEKASALKVGAGIEADVAQGPLINAAGLSKVEAHVADAVGKGARVLCGGARHERGGNFFQPTVLADVTTAMMVAREETFGPVAPLFRFETEEQAIAMANDTEFGLAAYFFTRNVGRCWRVGEALEYGMVGINTGMISNEVSPFGGIKQSGLGREGSKYGIEDYLEIKYLCFDVNT

SEQ ID NO: 16728 - protein, 367 aa, Glycine max
  unsure (1)..(367): unsure at all Xaa locations
QDTPHSPSRFVLQQLFTSIPTASTTELDAVSAFSEIVPDTVVFDDFEKFPPTAATVSSSLLLGICGLPDTIFRNAVEMALADSECYGLENPNARLSCFVNKAFANIGSDMAKLVPGRVSTEVDARLAYDTHAIIRKVHDLLKLYNDSNVPPKRLLFKIPSTWQGIEAARLLESEGIQTHLTFVYSFAQAAAAAQAGASVIQIFVGRIRDWARNHSGDTEIESAQLRGEDPGLALXNRDIHFSDPTYNYIHKYGHKSKLMAAAVRNKQDLFSLLGVDYIIAPLKVLQSLKESIASPDEKYSFVRRLSAQSAAKYTFSDEELVKWDEDSLTKAMGPAAVQLLAAGLDGHADQAKRVEELFEKIWPPPNV

SEQ ID NO: 16729 - protein, 480 aa, Euphorbia esula
MEQLPPSPPPHAKSWSIHTRPEIIAKYEIQERVGSGAYSDVYKARRLSDNLIVALKEIHDYQSAFREIEALHIVQNCPNIVVLHEYFWREDEDAVLVLEFLRTDLASLIKEGKKNGGIGVNAGEIKRWMMQILSGLDACHRNMVVHRDLKPSNLLISDDGVLKLADFGQARILMEPGFVATATDETMHPDEQNLAVNEQKVVTSPENIPQVNPVPIEVQSNQEQVIVKGYESFRETGESKPYDYLDETSIRDGDTSCLATGTASDMGDDFMRSTYNYETDEVDNERYGSLTSCVGTRWFRAPELLYGSTDYGLEIDLWSLGCIFAELLTLEPLFPGTSDIDQLSRIINVLGNLTEQVWPGCLKLPDYGTISFNKVENPTGIESYLTNHSPEEIALVKKLVCYDPAARATAMELLRDEYFSKEPFPVPKFELGGPLLNSGQDEDFPGRYDDYFERDFDSDFDNFAPVKIRSTRTGFSKQFS

SEQ ID NO: 16730 - protein, 264 aa, Capsicum annuum
MCGGAILADIIPRRDRRLSSTDLWSICSDDFWPNSSFSKPFSTQNVSPAKPKRTQPSAGNEQIQKAKKRQRKNLYRGIRQRPWGKWAAEIRDPRKGVRVWLGTFNTAEEAARAYDKEARKIRGEKAKVNFPNEDDHYSYPEPPPLAAYNNTTFYNNCYAFENNEPVIEYAIANNNDQNGLIKEVENMNGRVVEEEEKTEIQVQKLSEELMAYESLMKFYEIPYVDGQSVAAMANPAAEAVLGGGLMELWSFDDVSRQQPSYNVV

SEQ ID NO: 16731 - protein, 449 aa, Enterococcus faecalis V583
MKTYDYIVIGGGSGGIASANRAGMHGANVLLIEGNEIGGTCVNVGCVPKKVMWQASSMMEMMERDTAGYGFDVEIKNFSFKQLVENREKYIDFLHGAYNRGLDSNNIERIHGYATFTGEQTIEVNGTEYTAPHILIATGGRPKKLGIPGEEYALDSNGFFALEEMPKRVVFVGAGYIAAELAGTLHGLGAETHWAFRHERPLRSFDDMLSEKVVERYQEMGMQIHPNATPAKIEKTAQNEYVITFENGESITTDAVIFGTGRQPNTDQLGLENTKVALDEKGYVKVDKFQNTTQNGIYAVGDVIGKIDLTPVAIAAGRRLSERLFNGQTDLYLDYNLVPTVVFTHPPVATIGLTEKAALEEYGEDQVKIYRSSFTPMYFALGEYRQKCDMKLICVGKEEKIVGLHGIGIGVDEMLQGFAVAIKMGATKADFDNTVAIHPTGSEEFVTMR

SEQ ID NO: 16732 - protein, 398 aa, Bacillus subtilis subsp. subtilis str. 168
MAVKVVMPKLGMAMKQGEVSIWNKKVGDPVEKGESIASIQSEKIEMEIEAPEKGTLIDIKVKEGEEVPPGTAICYIGDANESVQEEAGAPVAEDNMPQAVQPVKQENKPAASKKDRMKISPVARKIAEKAGLDLKQLKGTGPGGRIVKDDVTKALAEQKKDQAKPVSEQKAQEIPVTGMRKVIAARMQESLANSAQLTITMKADITKLATLQKQLSPTAEERYGTKLTITHFVSRAAVLALQAHPVLNSFYQNERIITHPHVHLGMAVALENGLVVPVIRHAEKLSLIELAQSISENAKKAREGRAGSEELQGSTFSITNLGAFGVEHFTPILNPPETGILGIGASYDTPVYQGEEIVRSTILPLSLTFDHRACDGAPAAAFLKAMKTYLEEPAALIL

SEQ ID NO: 16733 - protein, 480 aa, Avena sativa
MVSSEIPSVTTTHTHGPKLFRGMILLPKGPPDVILPENVEFDFNDVFGPVAVHTPTEASIVTPDSPAPLAESGEEVYNDPVVITKRSHSLVGPTLLVSQSLPLSKLTLHESESSSDLLECLSKEKQSNQEALSDEELSNTKENEAVGLDNFEVLKLVGQGAFGKVYQVRMKGTSEIYAMKVMRKDKILEKNHAEYMKAERDILTKVDHPFVVQLRYSFQTKYRLYLVLDFVNGGHLFFQLYQQGLFREELARIYTAEIVSAVAHLHANGIMHRDLKPENILLDARGHAMLTDFGLAKEFDENTRSNSMCGTVEYMAPEIVQGRGHDKAADWWSVGILLFEMLTGKPPFFGGNRDKIQQKIVREKMKLPSYLSSEVHSLLKGLLHKEAGKRLGSGLGGSDEIKNHKWFKAVNWKRLEARQIQPSFCPNVAGQTCIANFDECWTSMPVLDSPVASPVAADSNFVGFSYVRPAPFFQKPSPLG

SEQ ID NO: 16734 - protein, 146 aa, GIBBERELLA ZEAE PH-1
MSPAEDKSEPVGDVDFGDNIDMATFEQILEMDEPGDTEFSSSIVFGFFEQAEETFDQIKEALENEELETLSSLGHFLKGSSATLGLIKIRDGCEAIQRYGKNENLDGSSLPDDEKCLKLIGDYFKAVKEDYATVEALLRQYYEQKE

SEQ ID NO: 16735 - protein, 458 aa, Bacillus subtilis subsp. subtilis str. 168
MTLAIIGGGPAGYAAAVSAAQQGRNVLLIDKGKLGGTCLNEGCIPTKSLLESANVLDKIKHADSFGIELPAGAISVDWSKMQSRKQQVVSQLVQGVQYLMKKNQIQVVKGTASFLSERKLLIEGENGKEIREADQVLIASGSEPIELPFAPFDGEWILDSKDALSLSEIPSSLVIVGGGVIGCEYAGLFARLGSQVTIIETADRLIPAEDEDIARLFQEKLEEDGVEVHTSSRLGRVDQTAKTAIWKSGQREFKTKADYVLVAIGRKPRLDGLQLEQAGVDFSPKGIPVNGHMQTNVPHIYACGDAIGGIQLAHAAFHEGIIAASHASGRDVKINEKHVPRCIYTSPEIACIGMTERQARSIYGDVKIGEFSFSANGKALIKQQAEGKVKIMAEPEFGEIVGVSMIGPDVTELIGQAAAIMNGEMTADMAEHFIAAHPTLSETLHEALLSTIGLAVHA

SEQ ID NO: 16736 - protein, 365 aa, Helicobacter pylori J99
MHNACNCNSQRVPFKGFAIDGKDGKFHEWEHSRHAMGEYDVVIDTHFSGICHTDIHFAHSDWLPGIYPMVPGHEIAGVVSAVGSKVTKFKVGDHAGVGCMVNSCGECHTCKHEHQEQWCENNKTIYTYSWEDSFHNNEPTYGGYSNNIVVSENFVISIPKEAPLDKAAPLLCAGITVYSPLKFSKVTKGSKVGIAGFGGLGHMALKYAVAMGAQVSVFARNDKKKQMAQKLGATNFYTSVGECKEKFDLIVSSIPTQYDLLAYTKLLKYGGEVAIVGIPPKDPQRNLDFGDLVLFSGNHKVYGSWIGGVKETQEMMDFSVKHGIYPEIELVTGQEIDATWDKLLNGQGNFRYVIDMKKSMENFKK

SEQ ID NO: 16737 - protein, 648 aa, Listeria monocytogenes EGD-e
MDDTEKRVHKYIEKHDLIRSDDKLLVAVSGGPDSLALLHFLWNSNLVPKEAISVAHLNHQLRENAAKEQRVVETFCERQGIPFYIEEVDIKSRAQSLQKGLEETARIVRYDFFEKVMAEKNINKLVLAHHADDQIETILMRLVRGSASIGWSGIQPKRELKGGQAIRPFLPITKAEIIDYAQKHELAYEIDESNTSQEYTRNRYRAQLLPFLKQENPAVYSHFERFSEETSEDFQFLEALASDLLKKNLIKNGKQTTLLLSSFKNEANPLQRRAIHLLLRYLYNEDASFITVNHIYQIIQMIQSDNPSSSIDLPNKLIANRAYDKLHFQFGEREAPSEFYHQLELNDRIELDNKASIRLKLKSSVVQTNGLNGMLLDAEEITLPLIVRNRVNGDRMTMKGQAGSKKLKDIFIDAKIPRQERDKLPVITDYTGKILWVPGVKKSAYDREFSRSKKQYIIRYTRNIGGNESMHNDIQKVLISEDELQEKIRELGRELTTEYEGRNPLVVGVLKGATPFMTDLLKRVDTYLEMDFMDVSSYGNGTVSSGEVKIIKDLNASVEGRDVLVIEDIIDSGRTLSYLVDLIKYRKAKSVKLVTLLDKPAGRNVEIEADYVGFVVPNEFVVGYGLDYAERYRNLPYIGILKPEIYSE

SEQ ID NO: 16738 - protein, 483 aa, Bacillus subtilis
MSSNKLTTSWGAPVGDNQNSMTAGSRGPTLIQDVHLLEKLAHFNRERVPERVVHAKGAGAHGYFEVTNDVTKYTKAAFLSEVGKRTPLFIRFSTVAGELGSADTVRDPRGFAVKFYTEEGNYDIVGNNTPVFFIRDAIKFPDFIHTQKRDPKTHLKNPTAVWDFWSLSPESLHQVTILMSDRGIPATLRHMHGFGSHTFKWTNAEGEGVWIKYHFKTEQGVKNLDVNTAAKIAGENPDYHTEDLFNAIENGDYPAWKLYVQIMPLEDAKTYRFDPFDVTKVWSQKDYPLIEVGRMVLDRNPENYFAEVEQATFSPGTLVPGIDVSPDKMLQGRLFAYHDAHRYRVGANHQALPINRARNKVNNYQRDGQMRFDDNGGGSVYYEPNSFGGPKESPEDKQAAYPVQGIADSVSYDHNDHYTQAGDLYRLMSEDERTRLVENIVNAMKPVEKEEIKLRQIEHFYKADPEYGKRVAEGLGLPIKKDS

SEQ ID NO: 16739 - protein, 182 aa, Burkholderia pseudomallei
MQYQHIKVPEGGDKITVNKDFSLYVSDQPIIPYIEGDGTGFDITPVMIKVVDAAVEKAYGGKKKIHWMEIYAGEKATKVYGPDVWGPEETLQVLKEYVVSIKGPLTTPVGGGIRSLNVALRQELDLYVCLRPIQYFKGVPSPVREPEKTNMVIFRENSEDIYAGIEWAAESEQAKKVIKFLQ

SEQ ID NO: 16740 - protein, 307 aa, Zea mays
  unsure (1)..(307): unsure at all Xaa locations
MAKSTCKLCSRRFASPRALAGHMRAHSMASAKSQISSASSASTSITASGIDADKKRGPVRGHALRENPKRRGRLDDSDRESETTDYYSPSPDAKRSHAGSGDAEXVSSVSDAATPEEDVALSLMMLSRDSWPAPPPYSYRLDSDDDDESDARPAVVAATAQKRTRYECPACKKVFRSYQALGGHRASNVRGGRGGCCAPPLSTPPPAPLQPLPECEGSEEDSKAQPHECPYCFRVFPSGQALGGHKRSHLCSAAAAAAAAAPVTSGADPSITMRSLGFIDLNLPAPFDDVEVSAMSDPFLSSKPAGS

SEQ ID NO: 16741 - protein, 196 aa, Zea mays
MELDADNLSATELRLGLPGTSSSSRDDWQKKPSPSVGAKRVLDDGTKSEASGTSTAAGDLDFDHDTAAPPKAQVVGWPPVRAYRKNTFQAAAAKKVEQKQQQGGLYVKVSMDGAPYLRKVDLRMYKGYRELREALDALFTNSFSAAAAEGGGDHQHAIAYEDKDGDLMLAGDVPWDMFISSCKKLRIMKGSASEAR

SEQ ID NO: 16742 - protein, 312 aa, Hordeum vulgare subsp. spontaneum
MATAGKVIKCKAAVAWEAGKPLSMEEVEVAPPQAMEVRVKILYTALCHTDVYFWEAKGQTPVFPRILGHEAGGIVESVGEGVTELVPGDHVLPVFTGECKECAHCMSEESNLCDLLRINVDRGVMISDGQPRFTIDGKPIFHFLGTSTFSEYTVIHVGCVAKIDPEAPLDKVCLLSCGISTGLGATLNVAKPKKGMAVAIFGLGAVGLAAMEGARLSGASRIIGVDLNPAKHEQAKKFGCTDFVNPKDHTKPVQEVIVEMTDGGVDRAVECTGNADAMISAFECVHDGWGVAVLVGVAHKEPVFKTHPMNFL

SEQ ID NO: 16743 - protein, 312 aa, Hordeum vulgare subsp. spontaneum
MATAGKVIKCKAAVAWEAGKPLSMEEVEVAPPQAMEVRVKILYTALCHTDVYFWEAKGQTPVFPRILGHEAGGIVESVGEGVTELVPGDHVLPVFTGECKECAHCMSEESNLCDLLRINVDRGVMISDGQPRFTIDGKPIFHFLGTSTFSEYTVIHVGCVAKIDPEAPLDKVCLLSCGISTGLGATLNVAKPKKGMAVAIFGLGAVGLAAMEGARLSGASRIIGVDLNPAKHEQAKKFGCTDFVNPKDHTKPVQEVIVEMTDGGVDRAVECTGNADAMISAFECVHDGWGVAVLVGVAQKEAVFKTHPMNFL

SEQ ID NO: 16744 - protein, 515 aa, Glycine max
MASMAAIGSLNVPRSASSRSSFVGRKSVPRSLSFSASQLCGDKIPTDSVLLAPKIGRSPVIVTPKAVSDSQNSQTCLDPDASRSVLGIILGGGAGTRLYPLTKKRAKPAVPLGANYRLIDIPVSNCLNSNVSKIYVLTQFNSASLNRHLSRAYASNMGGYKNEGFVEVLAAQQSPENPNWFQGTADAVRQYLWLFEEHNVLEFLVLAGDHLYRMDYEKFIQAHRETDADITVAALPMDEARATAFGLMKIDEEGRIIEFAEKPKGEQLKAMKVDTTILGLDDERAKEMPYIASMGIYVVSKNVMLDLLREKFPGANDFGSEVIPGATSIGMRVQAYLYDGYWEDIGTIEAFYNANLGITKKPVPDFSFYDRSSPIYTQPRYLPPSKMLDADVTDSVIGEGCVIKNCKIHHSVVGLRSCISEGAIIEDTLLMGADYYETEADKRFLAAKGSVPIGIGRNSHIKRAIIDKNARIGENVKIINSDNVQEAARETDGYFIKSGIVTVIKDALIPSGTVI

SEQ ID NO: 16745 - protein, 349 aa, Candida albicans SC5314
MTKLTYKRYGFKNGGSPLEIITDSFDFPTDAQGNFIIPKNKILIKIYYASLNPVDYKLKKITYFPPFSLHGIGKDYSGEIVGLGSNVKNFKVGEFVQGFHPGVITDDGTFSQYLLIDTKGLFKTEIATVPQNISLEQAAAWPLVLGTAIKVISDLPIKGKKILVFGGATSVGRYLVQLLQAEKAGEIVVSCSPRSQELVTELGATKIINYRENVLNQVLENVKDKPFDYIFDTWGGNELFPHLKQILVKNGTYHTIVGDDPHSFFTGTSKSFFRTFLSWLHLLDYSYQYVLLGAGGTGWINKAREYVANDDVQIFIDKIYKFEDLNDAIEYNKTGTAQGKLIINVKDFK

SEQ ID NO: 16746 - protein, 545 aa, Schizosaccharomyces pombe
MKKNGCLLLFAYSLLSFSLTAATIDETYDESLFIKSFSSRYSYVSFAFEIGASTDSTHSSVFSESSFSLFPLSIARVMDECQVSELHIRATRGRWDYENWKESPDNGFYSGGLGFEVWAFMANDPSMKYWLKLTNQLSGLLCASLNYIDSSNTYQPQLSYPGSFSFSNNTQYFASLPQEDVCTENLSPLFKLLPCKRKAGIASLLDSHLFFDTDWHSFSIDVYPSENQSLASVKMGIIIQAVVDVERNGRRKGKTTFQPPSEYCHDEDMDSLHCLMSGYSTEHHTVDDLFHKVPKERCLLSSTFSDVFVSNGDKIDTFSLDEAANIQIPIQSTSDNHTVTVDRSLSNDGNHWGSLSSTIYNPSSSPRTIVYFEKFPWFVRVYLHTLTITLNGTRINTKDFIEKLYYQPLRDRKAGTMMEIQFSIPPHTNLIVHFNVEKTPLRLDEYPPDANRGYNLPPAIISVFDENNTKLCSLRTAALLMFIPTPDFSMPYNVIIFTSTVIALTFGGIFNLLTRRFVPQQSKFQNRQPSMLQRLKEKIFHKKRG

SEQ ID NO: 16747 - protein, 188 aa, Arabidopsis thaliana
MALEKHIEKVLFSDEVIAHRVNQLGIDITSDFSGDSEETPIFVGVATGACLFLADLVRRIDLPIAIDFIRAESYGSGTVSSGVPRVSFDLKLDITNKHVVLVEDIVDTGNTLSCLIEHMKAKKASSVSVCTLLDKPSRRKVHYKLVGKGKFYSGFECPDEFVVGYGMDFAEQYRNLSYIGVLKPEYYM

SEQ ID NO: 16748 - protein, 671 aa, Zea mays
  unsure (1)..(671): unsure at all Xaa locations
MSSSRPAHSSSSSSRTRQSSRARILAQTTLDAELNAEYEESGDSFDYSKLVEAQRSTPPEQQGRSGKVIAYLQHIQRGKLIQPFGCLLALDEKSFRVIAFSENAPEMLTTVSHAVPNVDDPPKLGIGTNVRSLFTDPGATALQKALGFADVSLLNPILVQCKTSGKPFYAIVHRATGCLVVDFEPVKPTEFPATAAGALQSYKLAAKAISKIQSLPGGSMEALCNTVVKEVFDLTGYDRVMAYKFHEDEHGEVFAEITKPGIEPYIGLHYPATDIPQAARFLFMKNKVRMICDCRARSVKIIEDEALSIDISLCGSTLRAPHSCHLKYMENMNSIASLVMAVVVNENEEDDEPEPEQPPQQQKKKRLWGLIVCHHESPRYVPFPLRYACEFLAQVFAVHVNKEFELEKQIREKSILRMQTMLSDMLFKESSPLSIVSGSPNIMDLVKCDGAALLYGDKVWRLQTAPTESQIRDIAFWLSEVHGDSTGLSTDSLQDAGYPGAASLGDMICGMAVAKITSNDILFWFRSHTAAGIKWGGAKHDPSDKDDNRRMHPRLSFKAFXLEVVKTKSLPWXSDYEMDAIHSLQLIXLRGYTGMMASKPAQASGLDKPESVDLKLXMGLAEFASSGKVEMVPPWMENSKLXPNLGAVDGQWXMGQWDGNQKVAELSGLRV

SEQ ID NO: 16749 - protein, 89 aa, Glycine max
  unsure (1)..(89): unsure at all Xaa locations
TMIAAPAVTTVHHAGAGMAAPFTGQKSMVGFPTRKTNNGISCIGYNCLRLQCLQVWTPVVKSEVETLSYLPHLVDAQMAKEVXYLIRNG

SEQ ID NO: 16750 - protein, 350 aa, GIBBERELLA ZEAE PH-1
MAAAASESFIHLARPLAPNTVGLQTNLAPLTVNIQPQAVLSILDHAVRRDIRDTQSTRVIGALVGTRSEDGTEVEVRSCFAIPHTEEEDQVEVDVEPTGGESLLGWDATSHELNSFSALIQNFFGSPDTGTFPHPAIHMTISTEPGEDIQSRCYISAPVAVNAERAADSCLFIQVPHKILYGDADRSALEAIASAKDSESRTAPLVSDIEGLGRSIEQTIGLLDRASEWINGVLDEDEEPNNIVGQYLLNALSLAPKVDPSQIEHDFNNHIQDVLMVSYLANTIRTQIDLSQRLATANLAGNEKEGEGKSEEKGGRQGGKRGGRGGGRGGGQQREPREPREPREPREPTE

SEQ ID NO: 16751 - protein, 283 aa, Candida magnoliae
MAKNFSNVEYPAPPPAHTKNESLQVLDLFKLNGKVASITGSSSGIGYALAEAFAQVGADVAIWYNSHDATGKAEALAKKYGVKVKAYKANVSSSDAVKQTIEQQIKDFGHLDIVVANAGIPWTKGAYIDQDDDKHFDQVVDVDLKGVGYVAKHAGRHFRERFEKEGKKGALVFTASMSGHIVNVPQFQATYNAAKAGVRHFAKSLAVEFAPFARVNSVSPGYINTEISDFVPQETQNKWWSLVPLGRGGETAELVGAYLFLASDAGSYATGTDIIVDGGYTLP

SEQ ID NO: 16752 - protein, 80 aa, Glycine max
MSTDLSGILPRVLIVSRRTVRKNKFVDFVGEYHLDLIVGYGAVPVIVPRVSGVHTLLNSFGPIHGEDIEACWYDHNDDHD

SEQ ID NO: 16753 - protein, 346 aa, Oceanobacillus iheyensis HTE831
MYTAKARAVDGPHQPFHATEIKRRNLDSHDVLIEIKYSGICHSDIHTAHGEWGEVNYPLVPGHEIAGVVSDVGPEVTKYKVGDRVGVGCMVDSCGECENCRRGEEQYCHQGNVQTYGGVDKYGEPTQGGYSTHIVVTEDFVLRIPDNIELDVAAPLLCAGITTYSPLNHWNAGPGKKVAVVGMGGLGHMAVKIAHAMGAEVTVLSRTLNKKEDGLEFGAENYYATSEKETFETLAGSFDLIINTVSAKLDMDAYFSLLNLDGSLVNVGAPAEPLSVNVFSLIGHRRSFAGSLIGGIRETQEMLDFCAEHNIVPKIEVISADQIDEAYTRVLDSDVKYRFVIDVSTI

SEQ ID NO: 16754 - protein, 474 aa, Ralstonia eutropha JMP134
MSKQFDVLVIGAGPGGYIAAIRAGQLGLNVACCEGNAYDDPKNEPRLGGTCLNVGCIPSKALLASSEEFENAQHHLADHGITVGDVKVDVSKMLKRKDDIVGKMTKGIEFLFRKNKVTLLKGYGKFVGKTAEGFQVEVAGEVVTAKQVIIATGSKARHLPGITVDNDLVSDNEGALKFPAVPKKLGVIGAGVIGLELGSVWRRLGAEVTVLEALPAFLGAADEGVAKEAQKQLTKQGLKFSLGVKVDEVTTGKSGVTVKYTDKDGAAQTLEVDRLIVSVGRVPNTDNLGLEAVGLAADQRGFIEVDDHCATKVPGLWAIGDVVRGPMLAHKAEDEGVAVAERIAGQKPHIDYNCIPWVIYTFPEIAWVGKTEAQLKAEGREFKAGQFPFMANGRALGMGHPEGFVKMLADAKTDEILGVHIVAANASDLIAEAVVAMEFKAASEDIGRVCHPHPSMSEVMREAALAVDKRQLNM

SEQ ID NO: 16755 - protein, 419 aa, Ralstonia eutropha JMP134
MAIVDVKVPQLSESVAEATMLNWKKKPGEAVAQDEILIEIETDKVVLEVPAPSAGVLSQIIKNDGDTVVADELIAKIDTEATAGAAAPAAAAPAPAAAAPAAAAAAAPAAAGAVAMPSAAKLMAEAGLSAGQVAGTGKDGRITKGDVLGASAAPAPAPAAKAAPAPAAAKPALPQVAANVDFAALGDRPEERVPMSRLRARIAERLVQSQSTNAILTTFNEVNMKPVMDLRNKYKDRFEKEHGVKLGFMSFFVKAAVHALKKYPVINASVDGNDIVYHGYFDIGIAVGSPRGLVVPILRNADQMSLADIEKKIAEFGAKARDGKLSLEELTGGTFSISNGGTFGSMLSTPIINPPQSAILGVHATKDRAVVEDGQIVIRPMNYLAMSYDHRIIDGREAVLGLVAMKEALEDPARLLLDL

SEQ ID NO: 16756 - protein, 393 aa, Buchnera aphidicola str. Bp (Baizongia pistaciae)
MSIIKITDLNLLNKKVLIRSDLNVPIKNNKISSYARIHASLPTIKFALKNLAKVIVTSHLGRPTEGIYKKKFSLFPVFKYFKKILPETNIYFSQNLTECSSIKSGELIILENVRFNQGEKENSKILSKKYATLCDIFVMDAFGAIHRNEASTNGIIKYAKLACSGLLLESELKTLNSALTNPVRPMVAIVGGAKVSTKFKTLTTLAKISDTLIVGGGIANTFISIDHNIGKSLHDPKFIEQAKILKEKYNIFIPTDSRVSTTFTYDSIATIKSTSDIHANEEIMDFGDISIKNMINIIKKAKTILWNGPIGVFEFKNFSKGTEQLSKAIASSDAFSIAGGGDTLSVVEMFKVQNNISYLSTGGGSFLKFLEGNKFRIIELLEKHFNKFKNNNF

SEQ ID NO: 16757 - protein, 112 aa, Triticum aestivum
MATKRSVGTLREADLKGKKVFVRADLNGPVDDAEKITDDTRIRASIHTIKYLLEKGAKVILASHLDRPKGVTRKFILKPIVARLYELLGLEVVMAADCIGKEVEKLACALPD

SEQ ID NO: 16758 - protein, 900 aa, Zea mays
IRHEGYDRVMAYKFHEDEHGEVFAEITKPGIEPYIGLHYPATDIPQAARFLFMKNKVRMICDCRARSVKIIEDEALSIDISLCGSTLRAPHSCHLKYMENMNSIASLVMAVVVNENEEDDEPEPEQPPQQQKKKRLWGLIVCHHESPRYVPFPLRYACEFLAQVFAVHVNKEFELEKQIREKSILRMQTMLSDMLFKESSPLSIVSGSPNIMDLVKCDGAALLYGDKVWRLQTAPTESQIRDIAFWLSEVHGDSTGLSTDSLQDAGYPGAASLGDMICGMAVAKITSKDILFWFRSHTAAEIKWGGAKHDPSDEDDSRRMHPRLSFKAFLEVVKMKSLPWSDYEMDAIHSLQLILRGTLNDALKPAQSSGLDNQIGDLKLDGLAELQAVTSEMVRLMETATVPILAVDGNGLVNGWNQKVADLSGLRVDEAIGRHILTLVEDSSVPIVQRMLYLALQGREEKEVRFELKTHGSKRDDGPVILVVNACASRDMHDHVVGVCFVAQDMTVHKLVMDKFTRVEGDYRAIIHNPNPLIPPIFGADQFGWCSEWNAAMTKLTGWHRDEVIDRMLLGEVFDSSNASCLLKSKDAFVRLCIIINSALAGEEAEKAPIGFFDRDGKYIECLLSVNRKVNADGVVTGVFCFIHVPSDDLQHALHVQQASEQTALRRLKAFSYMRHAIDKPLSGMLYSRETLKGTGLDEEQMRQVRVADNCHRQLNKILADLDQDNITDKSSCLDLDMAEFVLQDVVVSAVSQVLIGCQGKGIRVACNLPERSMKQKVYGDGIRLQQILSDFLFVSVKFSPAGGSVDISSKLTKNSIGENLHLIDFELRIKHQGAGVPAEILSQMYGEDNREQSEEGLSLLVSRNLLRLMNGDIRHLREAGMSTFILTAELAAAPSAAGH

SEQ ID NO: 16759 - protein, 610 aa, Candida albicans SC5314
MVLFPTINRLANPNNAGGLTGSRRRRLFVPPSTQYPLFIYGDGDDQRSFLSNIEVGSQIYSPEDDHSDVASVSTSRSLPSTLSSVQTADDQESFHDWLHEEHQRRISAASSPAGSSDEDDLELGRRRSGTMPTVISPQEDFLNLKTDYNLESKSLFKNSLPLILTFILEHIFSIVCLVVVGKLGTKQLGAVSLATMTSTITFAIFEGTATALDTLCPQAYGAGNYELMSIFVQRCNIFSMILFLPCALFWWFSGSILKYVIDDPEVVHLTQEFLRCLILGAPGYILFENSKRFLQAQGIFEAGTGILFVSAPINIGLSWFLVWNETYGIGYIGAPIATGINFWLMMILLVLYVRYIDGGKCWFGLASMEELFSNWNQIIHLAIPGIVMMESEYMAYEIMTLFASYFGTVQLAAQSAVSSIASLTYMVPFSVGIAATTRIANFIGGQNMVGAILATRVAMVAAVIVSTINCLALFSFRYEIARIFSDDPEVISLIVDLLNPLVSVLQIFDGIASVNSGILRAQGSQKIGGYINFIAYYAFALPLAMVLSKIVGLQVFGLWIGVGSGMAVIALSETAVIMFSNWDDILMKAGIMNEFGFDDSDDDGEDDDIF

SEQ ID NO: 16760 - protein, 1496 aa, Ustilago maydis 521
MHRQNALKLETPGTSNDSELASRQFHFPYAEAYSIQLDLMRKVFSTIEDGKVGLFESPTGTGKSLSLICAAFTWLRQNAQRHTIGTSTNDGETHGSNHGPATQQEPDWVVKHKNELRRKQHEAYELDLKDRIAAARAKQAALKKSLQDGQVLLDAQARVAKRQRRSANDDDDKDSDDDLLIDEKEGAKSARTLQMATYSKTALSETSVEIDSSLSPAVRALMQQYEQASSRGREDEDEPETLPRVIYASRTHSQLSQFVAELKKTSFGQVDIIHAETLPIRTIPLGSRKQMCINEDVQRIGRNKGSEAMNERCIELIKGKTGKTKCSSLPPFDQTGRSRILEFRDAAMAEVGDIEDLVQLGKQTNTCPYFAARSSAKQAELITLPYNLLLQKDARNALGISLEGCIVLVDEAHNLIDTILSTHSVTIDSQQIAQASEQIDTYLDKFALRLKGSNEQNLRKVRKVLSSMSAFFSKKAAEGKTNAELVLSAADLVRSLTGNLDQINLVTLETWLKETQIARKISGYADKHSKMAVQQAAASVNQHNGTRTNKSRHPPKLLLENASPDSIRSASQSAISSMHAIETFILSLANRSEDGRVVLSSATNSAGENVVRAKYQLLNPSHVFRSLVDEARSVILAGGTMEPMSDFRQQLLPFVPPDRLVTFSCGHIIPASNLMVSVLSASPKGLPFEFKFDSRDNVELIDELGRTLVNVCNIVPAGLVVFVPSYAFLDKLMARWKDAASGGLLQRLGSKKKIFIEPKTTMEVDKVLGEYTAAIRAKDVKTGVSSGGAIMFAVVGAKLSEGINFSDNLARGVVMVGMPFANMHSPELAERMKYVRELAIKHESTACVTASQKPSDPQRVLTKYMSNTLLPPLQGHELYINLCMKAVNQSIGRAVRHQNDFAALILLDRSTAQYSVCGTTVNDTAVLSNAVGDPTLCTALRVATPRSTFHLHPHHHHPAISMLGRLNVPVESAYTSMLASTALRRSLKLASAAAPTVRLSQQLSKRRYVQQPSSTASIPIVIGSSSTSLRSFATTPRRLAVEVKPYLLADVGEGITECEIIKWFVQPGAVVQEFDPICEVQSDKASVEITSRYAGKIKRLMHKEGDVAKVGHPLCEIEMESDGENEASDAGEQRAEQAEVTSSSTESESRAVNMEGFMSAEQKHSNGGGHAASDRSVLATPAVRRVSREHNVDLAQVHGTGRDGRITKEDVLKHVSSAASNSSSSSASSTSGSGSAPSSLAAGTTEIVDLTPVQRAMFKAMTATLSTPHFAYSDEIDVTDLDQVRVLLSKSIPERYTQAGDASFTKLTLLPLLVKAMSLALHEHPMFRSTLNSDQKLVRRSSHDVSIALTSKVGLLTPCITDVQAKSIYDVSAFITRLQTVAGSSKGLAPADLKPTGTITLSNVGAVGGGTYTHPLLPPTGQLAIGALGRSRVLPRFASEIPSLGVSDPDKIVRRLIMSVSFTGDHRVVEGADLARLVNRWKQLVENPSLWLGLLA

SEQ ID NO: 16761 - protein, 515 aa, Oryza sativa
MLAVVNRRRGRHLQQYFPDPRKLFPTSKIHSLNGSSEGRRAVPAVMVRECGRINQPVSVEVEHVHAIHGSNDHDLELDHIQEKERGMKKGPMRIPRFGGSRDEGDVASATIIFLFFSLFSQASSSSIAHAFLPAPTRQSGLVLASDIFPNGCRLSPSTDVPILVLASVVFPKGCRAESPKAACLAEFCPHNKRWSRVISTSPEKKTMMTSTTMARPTTLLACCKLYISESRNDAALRAIEQAARGGGGGAVVVNRFTDDAYNRVGYTLVAPLTPSPAPPPLRHAVLGMVRAALEAIDFGAHAGTHPRLGAVDHICFHPLAHASLRHVADLAGAVAADIGDELQVPTFLYGAAHREGRTLASIRRQLGYFKPNSSGDQWRGAPETDALPVAPDAGPERPPRSKGVVVVGATSWVDNYNVPVHTGDVEAARRIARAVSERGGGLPSVQAMGLAHGGGVVEVACNLLDPARVGAEQVQGMVERLAAGEGLSVGKGYFTDFSQDKIVDLYFRSAANTEG

SEQ ID NO: 16762 - protein, 516 aa, Corynebacterium glutamicum ATCC 13032
MSEKSAADQIVDRGMRPKLSGNTTRHNGAPVPSENISATAGPQGPNVLNDIHLIEKLAHFNRENVPERIPHAKGHGAFGELHITEDVSEYTKADLFQPGKVTPLAVRFSTVAGEQGSPDTWRDVHGFALRFYTEEGNYDIVGNNTPTFFLRDGMKFPDFIHSQKRLNKNGLRDADMQWDFWTRAPESAHQVTYLMGDRGTPKTSRHQDGFGSHTFQWINAEGKPVWVKYHFKTRQGWDCFTDAEAAKVAGENADYQREDLYNAIENGDFPIWDVKVQIMPFEDAENYRWNPFDLTKTWSQKDYPLIPVGYFILNRNPRNFFAQIEQLALDPGNIVPGVGLSPDRMLQARIFAYADQQRYRIGANYRDLPVNRPINEVNTYSREGSMQYIFDAEGEPSYSPNRYDKGAGYLDNGTDSSSNHTSYGQADDIYVNPDPHGTDLVRAAYVKHQDDDDFIQPGILYREVLDEGEKERLADNISNAMQGISEATEPRVYDYWNNVDENLGARVKELYLQKKA

SEQ ID NO: 16763 - protein, 444 aa, Mesembryanthemum crystallinum
MVTIKCVKARQIYDSRGNPTVEADIHLDDGTYARAAVPSGASTGVYEALELRDGGKDYMGKGVYKAVKNVNEIIGPALVGKDPTQQTAIDNFMVQQLDGTVNEWGWCKQKLGANAILAVSLAVCKAGAQVKKIPLYQHIAEIAGNKNMVLPVPAFNVINGGSHAGNKLAMQEFMILPTGASSFKEAMKMGSEVYHNLKSVIKKKYGQDATNVGDEGGFAPNIQENKEGLELLKTAIEKAGYTGKVVIGMDVAASEFYKEDKSYDLNFKEENNDGSQRISGEALKDLYKSFVAEYPIVSIEDPFDQDDWEHYAKMTAECGEKVQIVGDDLLVTNPKRVKKAIDENPCNALLLKVNQIGSVTESIEAVKMSKKAGWGVMASHRSGETEDTFIADLSVGLSTGQIKTGAPCRSERLAKYNQLLRIEEELGDKAVYAGANFRRPVEPY

SEQ ID NO: 16764 - protein, 1478 aa, Saccharomyces cerevisiae
MPFLRKIAGTAHTHSRSDSNSSVKFGHQPTSSVASTKSSSKSPRATSRKSIYDDIRSQFPNLTPNSTSSQFYESTPVIEQSFNWTTDDHISAGTLENPTSFTNSSYKNDNGPSSLSDSRKSSGGNSVNSLSFDKLILSWDPTDPDEWTMHRVTSWFKFHDFPESWILFFKKHQLFGHRFIKLLAYDNFAVYEKYLPQTKTASYTRFQQLLKKTMTKNVTNSHIRQKSASKLKSSRSSSESIKSKLKNSKSQEDISNSRSTSESALSPTKSGPSKTDEKNFLHSTSTHQKTKSASSLYRRSFISLRGSSSSNASSAKSPSNIKLSIPARPHSIIESNSTLTKSASPPASPSYPSIFRRHHKSSSSESSLLNSLFGSGIGEEAPTKPNPQGHSLSSENLAKGKSKHYETNVSSPLKQSSLPTSDDKGNLWNKFKRKSQIGVPSPNTVAYVTSQETPSLKSNSSTATLTVQTADVNIPSPSSSPPPIPKTANRSLEVISTEDTPKISSTTASFKETYPDCINPDKTVPVPVNNQKYSVKNFLLDQKFYPLKKTGLNDSENKYILVTKDNVSFVPLNLKSVAKLSSFKESALTKLGINHKNVTFHMTDFDCDIGAAIPDDTLEFLKKSLFLNTSGKIYIKDQMKLQQKPKPAPLTSENNVPLKSVKSKSSMRSGTSSLIASTDDVSIVTSSSDITSFDEHASGSGRRYPQTPSYYYDRVSNTNPTEELNYWNIKEVLSHEENAPKMVFKTSPKLELNLPDKGSKLNIPTPITENESKSSFQVLRKDEGTEIDFNHRRESPYTKPELAPKREAPKPPANTSPQRTLSTSKQNKPIRLVRASTKISRSKRSKPLPPQLLSSPIEASSSSPDSLTSSYTPASTHVLIPQPYKGANDVMRRLKTDQDSTSTSPSLKMKQKVNRSNSTVSTSNSIFYSPSPLLKRGNSKRVVSSTSAADIFEENDITFADAPPMFDSDDSDDDSSSSDDIIWSKKKTAPETNNENKKDEKSDNSSTHSDEIFYDSQTQDKMERKMTFRPSPEVVYQNLEKFFPRANLDKPITEGIASPTSPKSLDSLLSPKNVASSRTEPSTPSRPVPPDSSYEFIQDGLNGKNKPLNQAKTPKRTKTIRTIAHEASLARKNSVKLKRQNTKMWGTRMVEVTENHMVSINKAKNSKGEYKEFAWMKGEMIGKGSFGAVYLCLNVTTGEMMAVKQVEVPKYSSQNEAILSTVEALRSEVSTLKDLDHLNIVQYLGFENKNNIYSLFLEYVAGGSVGSLIRMYGRFDEPLIKHLTTQVLKGLAYLHSKGILHRDMKADNLLLDQDGICKISDFGISRKSKDIYSNSDMTMRGTVFWMAPEMVDTKQGYSAKVDIWSLGCIVLEMFAGKRPWSNLEVVAAMFKIGKSKSAPPIPEDTLPLISQIGRNFLDACFEINPEKRPTANELLSHPFSEVNETFNFKSTRLAKFIKSNDKLNSSKLRITSQENKTE

SEQ ID NO: 16765 - protein, 139 aa, GIBBERELLA ZEAE PH-1
MSDFDEGDVAGAGGDDAMYEDEEINDYYDPEPADDGENQQENQDDNIINSGDPSAIANAVKGGDRLLKDKKIPESERTTTPYMTKYERARILGTRALQISMNAPVLVDLEGETDPLQIAIKEMREKKIPLIVRRYMPDG

SEQ ID NO: 16766 - protein, 482 aa, Bacillus subtilis subsp. subtilis str. 168
MSTKKKEAVIGKESLAHKGLLRTITLVSTFGGLLFGYDTGVINGALPFMATAGQLNLTPVTEGLVASSLLLGAAFGAMFGGRLSDRHGRRKTILYLALLFIAATLGCTFSPNASVMIAFRFLLGLAVGCASVTVPTFLAEISPAERRGRIVTQNELMIVIGQLLAYTFNAIIGSTMGESANVWRYMLVIATLPAVVLWFGMLIVPESPRWLAAKGRMGDALRVLRQIREDSQAQQEIKEIKHAIEGTAKKAGFHDFQEPWIRRILFIGIGIAIVQQITGVNSIMYYGTEILREAGFQTEAALIGNIANGVISVIAVIFGIWLLGKVRRRPMLIIGQIGTMTALLLIGILSIVLEGTPALPYVVLSLTILFLAFQQTAISTVTWLMLSEIFPMHVRGLGMGISTFCLWTANFLIGFTFPILLNHIGMSATFFIFVAMNILAILFVKKYVPETKGRSLEQLEHSFRQYGRRADQEIQNQTTHLS

SEQ ID NO: 16767 - protein, 428 aa, Chlamydophila pneumoniae TW-183
MFEAVIADIQAREILDSRGYPTLHVKVTTSTGSVGEARVPSGASTGKKEALEFRDTDSPRYQGKGVLQAVKNVKEILFPLVKGCSVYEQSLIDSLMMDSDGSPNKETLGANAILGVSLATAHAAAATLRRPLYRYLGGCFACSLPCPMMNLINGGMHADNGLEFQEFMIRPIGASSIKEAVNMGADVFHTLKKLLHERGLSTGVGDEGGFAPNLASNEEALELLLLAIEKAGFTPGKDISLALDCAASSFYNVKTGTYDGRHYEEQIAILSNLCDRYPIDSIEDGLAEEDYDGWALLTEVLGEKVQIVGDDLFVTNPELILEGISNGLANSVLIKPNQIGTLTETVYAIKLAQMAGYTTIISHRSGETTDTTIADLAVAFNAGQIKTGSLSRSERVAKYNRLMEIEEELGSEAIFTDSNVFAYEDSEE

SEQ ID NO: 16768 - protein, 673 aa, Methanocaldococcus jannaschii
MEFKIVNTICPYCGVGCGLGLVVKDGRVIGIHPNKRHPINEGKLCAKGNYCYQFIHSKDRLTKPLIKKESGFVETTWNKALEVIAENLKTYKDEIGFFSSARCTNEDNYILQKFARVALKTNNIDHCARLCHSATVTGMSACFGSGAMTNSIEDIELADCILIIGSNTFEQHPLIARRIMRAKDKGAKIIVIDPRRTITAKNSDIYLQIIPGTNVALINAMINVIIKENLIDKEFIKNRTEGFEKLKEIIKKYTPEYASKICGVDKELIIESAKIYGNAERASIIYCMGVTQFTHGVDAVKALCNLAMITGNIGKEGTGVNPLRGQNNVQGACDMGALPNVFPGYQKVEDGYKLFEEYWKTDLNPNSGLTIPEMIDESGKNIKFLYIMGENPIVSDPDVKHVEKALKSLDFLVVQDIFLTETAKLADVVLPAACWAEKDGTFTNTERRVQLIRKAVNPPGEALEDWIIIKKLAEKLGYGDKFNYNKVEDIFNEIRKVTPQYRGITYKRLKIDGIHWPCLDENHSGTKILHKDKFLTDNGRGKIFPVEYREVAELPDKDYPFILTTGRIIFHYHTGTMTRRCKNLVEEINEPFIEINPDDAKSLKIENGDLVKVISRRGEITAKARITEDIKKGVVFMPFHFVEANPNVLTNTALDELCKIPELKVCAVKIERI

SEQ ID NO: 16769 - protein, 426 aa, Dechloromonas sp. RCB
MREQTDMRFISHLTRNTFAIILAGGRGTRLKQLTDFRSKPAVPFAGKFRILDFTLSNCVNSGIRKIGVATQYKAHSLIRHIQRGWSFLDGRFDEFIQLLPAQQQIDETQWYQGTADAVYQNLHFLRRYQPDHILVVAGDHIYKMDYGRMLAHHVKHHADMTVACIDVPLDEAREFGVMGVDEQDRVIDFVEKPQNPPAIPGQPDRALASMGIYIFNTKFLFEQLERDAMTKGSNRDFGKDIIPYIVPRYRVFAHRFADSCVGSDNHRPYWRDVGTIDAYWEANMEMTKVTPELNVYDRDWPIWTYQEQIPPAKFVFDDEDRRGTAVDSLIAGGCIISGASVKRSLLFSSVNVHSWASVEDSVVLPDVDIGRHAVLKRCVIDKHCRIPEGMVIGVDPEEDRKRFHVSPKGITLVTAEMLGQGAAEGR

SEQ ID NO: 16770 - protein, 850 aa, Brassica oleracea
MRIFRKTLVSFPLFIFLFLYESSTAQDTIRRGGFLRDGSTHKPLVSPQKTFELGFFSPGSSPGRYLGIWYGNIEDKAVVWVANRENPISDRSGVLTISNDGNLVLLNGQNITVWSSNITSTNNDNNRVGSILDTGNFELIEVSSERVIWESFNHPTDTFLPHMRVRVNPQTGDNLAFVSWRSENDPSPGNFSLGVDPSGAPEIVLWGRNNTRRWRSGQWNSAIFTGIPNMALLTNYLYGFKLSSPPDETGSVYFTYVPSDPSVLLRFKVLHNGTEEELRWNETSKRWTKFQAAPESECDKYNRCGSFGICDMRGDNGICSCVKGYEPVSLGNWSRGCRRRTPLRCERNVSNVGEDEFLTLKSVKLPDFETPEHSLADPEDCKDRCLKNCSCTAFTFVNGIGCMIWNQDLVDLQQFEAGGSSLHVRLADSEIGESKKTKIVVIVAVLVGVLLLGIFALLLWRFKRKKDVSGTYCGHDADTSVVVVDMTKAKDTTTAFTGSVDIMIEGKAVNTSELPVFCLKVIVKATNDFSRENELGRGGFGPVYKGVLEDGQEIAVKRLSGKSGQGVDEFKNEIILIAKLQHRNLVRLLGCCFEGEEKMLVYEYMPNKSLDFFIFDEMKQELVDWKLRFAIIEGIARGLLYLHRDSRLRIIHRDLKVSNVLLDGEMNPKISDFGMARIFGGNQNEANTVRVVGTYGYMSPEYAMEGLFSVKSDVYSFGVLLLEIISGKRNTSLRASEHGSLIGYAWFLYTHGRSEELVDPKIRATCNKREALRCIHVAMLCVQDSAAERPNMAAVLLMLESDTATLPVPRQPTFTTSTRRNSMDVNFALDSSQQYIVSSNEITSTVVLGR

SEQ ID NO: 16771 - protein, 526 aa, Dechloromonas aromatica RCB
MNPIDSPAWRALAAHAEAIRPLHLRDLFATDPQRFELFSLHHDGLLLDYSKQRVSVETMALLRAYAETADVTGWRRRMLDGESINHTEGRAVRHMSLRAGDQAPAEVRAALARQQAFCESIHNGVWRGFSGERITDVVNIGIGGSDLGPRMAALALSARQQPDIAVHFIANVDSADIAPLLASLNPRTTLFIVASKTFTTLETLTNARTARDWLLATAGQESAIARHFVAISTNLELTKQFGIADDNVFEFWDWVGGRFSIWSAIGLSLALAIGWKNFEQLQAGARAMDRHFIDTPADENLPLTLALLSLWNTNFLGASTEAMLPYSQSLHLFPAYLQQLEMESNGKQIDRDGKPLNIATSPVIWGESGTNGQHSFYQLFHQGGHLIPADFVALREADFPLPGHHASLLANCLAQSAALAFGQTAEEVRAAGIPEALIPYKVFPGNQPSNTLLLPSLDPYTLGQLLALFEHKVFCLGVLWNLNAFDQWGVELGKQLAGQLTPLIEGNGDLSAFDSSTRGLITALKG

SEQ ID NO: 16772 - protein, 279 aa, ASPERGILLUS NIDULANS FGSC A4
MATPRGRLQGKNAIITGAAGGIGLETSILFAREGANVLMADISASALEKALAKVRELVPDAPRVETIKCDVSKESEVQAMVESQDSWGGTDVIFNNAGIMHADDADAIDTPEKIWDLTQNINVKGVWFGCKHAVLSMRRHKKSKGSIINTASVVALVGSATPQLAYTASKGAVLALTRELAIVHAREGIRFNALCPAPLNTPLLQDWLGDDQAKRHRREVHFPMGRFGEAIEQAHAVVFLASDESSFVNGADFVVDGGMSKAYVTPEGPAPPAPKNQAQ

SEQ ID NO: 16773 - protein, 176 aa, Shewanella oneidensis MR-1
MKHTTEVMISAEEISKKLDQMAEQINAHYANSERLLMVGLLKGSVVFMADLCRRIKGHVEIDFMSVSSYGNAMTSSRDVKVLKDVQSDIADRDVLIVEDLIDSGNTLNKVREMLLLREPKSLALCTLLDKPERREVDVKVDFIGFTIPDEFIVGYGIDYAEQYRNLPYIAKVVPLE

SEQ ID NO: 16774 - protein, 181 aa, Solanum tuberosum
MASSVISSAAVATRTNVTQAGSMIAPFTGLKSAATFPVSRKQNLDITSIASNGGRVRCMQVWPPINMKKYETLSYLPDLTDEQLLKEVEYLLKNGWVPCLEFETEHGFVYRENHKSPGYYDGRYWTMWKLPMFGCTDATQVLAEVQECKKSYPQAWIRIIGFDNVRQVQCISFIAYKPEGY

SEQ ID NO: 16775 - protein, 202 aa, Hypocrea jecorina
MNPEYDYLFKLLLIGDSGVGKSCLLLRFADDTYTESYISTIGVDFKIRTIELDGKTVKLQIWDTAGQERFRTITSSYYRGAHGICVVYDVTDMDSFNNVKQWLQEIDRYATEGVNKLLVGNKSDMSDKKVVEYTVAKEFADSLGIPFLETSAKNASNVEQAFLTMARQIKERMGTTTANNTKPSVHVGQGQGVGNSSSSSCC

SEQ ID NO: 16776 - protein, 512 aa, Zea mays
MTIDMSIPGSSGLLNAAGKRDMKFFSNPYVLALTGAAGIGGFLFGYDTGVISGALLYIRDDFPAVKDNYFLQETIVSMALVGAMIGAAGGGWINDAYGRKKSTLLADLMFALGSLVMCAAAGPYILIIGRLLVGLGVGVASVTAPVYIAEAAPSEIRGGLVSTNVLMITGGQFFSYLINLGFTEVPGTWRWMLGVAAVPAIIQFFVLMLFLPESPRWLYWKDEKAKAIAVLERIYESDRLEEEVELLATSSMHEFQSNNTGSYLDVFKSKELRLAFFAGAGLQAFQQFTGINTVMYYSPTIVQMAGFSSNRLALLLSLIVAAMNAAGTIVGIYLIDRCGRRRLALTSLAGVVVSLAILATAFILQSSSGLCMSAASGTGTCQGALGWFAVAGLALYIAFFSPGMGPVPWAVNSEIYPEAYRGMCGGMSATVNWVSNLVVAQTFLSIVGLVGTGPTFLIVAGIAVLAFVFVATYVPETKGLTFEQVEQMWRERAWGNSGGNCESLLAGTASAP

SEQ ID NO: 16777 - protein, 180 aa, Solanum tuberosum
MASSVMSSAAVATRGNGAQASMVAPFTGLKSAASFPVSRKQNLDITSIASNGGRVRCMQVWPPINMKKYETLSYLPDLSDEQLLKEVEYLLKNGWVPCLEFETEHGFVYRENNKSPGYYDGRYWTMWKLPMFGCTDATQVLAEVEEAKKAYPQAWIRIIGFDNVRQVQCISFIAYKPEGY

SEQ ID NO: 16778 - protein, 275 aa, Candida albicans SC5314
MKELDHENIVTLYDVIHTENKLTLVFEYMDKDLKKYMEVHGQQSALDLKVVKSFMFQLLKGIMFCHDNRVLHRDLKPQNLLINNKGELKLGDFGLARAFGIPFNTFSNEVVTLWYRAPDVLLGSRAYTTSIDIWSAGCIFAEMCTGKPLFPGTANEDQLIKIFRLMGTPNERTWPGISQYTNYKNNWQIFVPQDLRLIVPNLDSMGLNLLQSLLQMRPESRITARQALQHPWFHEITMPNAVPQHLSDPYQQQQQQQQQQQQQQHPHQPIIDQQY

SEQ ID NO: 16779 - protein, 180 aa, Solanum tuberosum
MASSIVSSAAVATRANGAQASMVGPFTGLKSTASFPVSRKQNLDITSIASNGGRVRCMQVWPPINMKKYETLSYLPDLSDEQLLKEVEYLLKNGWVPCLEFETEHGFVYRENNKSPGYYDGRYWTMWKLPMFGCTDATQVLAEVEEAKKAYPQAWIRIIGFDNVRQVQCISFIAYKPEGY

SEQ ID NO: 16780 - protein, 305 aa, Saccharomyces cerevisiae
MVEENSRVLIVLPYTPPSATLQRIIGQTIPFLRECQSQLDIVIVPEFKTSFQLDSALGKMYSITRDVLLGYGMINSGINIIFNNIHFVESNLQWKVVLLPQESTFETWKLELGQGQYHSIEHYALHDNIMEEIEGPKDANKFHVTALGGTFDHIHDGHKILLSVSTFITSQRLICGITCDELLQNKKYKELIEPYDTRCRHVHQFIKLLKPDLSVELVPLRDVCGPTGKVPEIECLVVSRETVSGAETVNKTRIEKGMSPLAVHVVNVLGGREEDGWSEKLSSTEIRRLLKSSASPTCTPQNPCV

SEQ ID NO: 16781 - protein, 180 aa, Solanum tuberosum
MASSVMSSAAVATRGNGAQASMVAPFTGLKSTASFPVSRKQNLDITSIASNGGRVRCMQVWPPINMKKYETLSYLPDLSDEQLLKEVEYLLKNGWVPCLEFETEHGFVYRENNKSPGYYDGRYWTMWKLPMFGCTDATQVLAEVEEAKKAYPQAWIRIIGFDNVRQVQCISFIAYKPEGY

SEQ ID NO: 16782 - protein, 473 aa, Methylococcus capsulatus str. Bath
MAEPKTIHADVLVLGGGPGGYTAAFRAADLGRQVVLVERYPTLGGVCLNVGCIPSKALLHVAQIIHEAREAGEFGLRFGAPEIDLDQIRGFKDKVVKTLTGGLETLARQRKVTVVQGTGRFTGEHGMQVETTDGPVTVGFDHAIIAAGSRAVKIPDFPHDDPRLMDSTDALALQEVPKRLLIVGGGIIGLEMATVYHALGAGITVVELMDQLIPGCDADLVRPLHQHIKKQYENIYLKTRVSRIEPEAAGLKVFFEGEGAPESDLFDRVLVAVGRAPNGALIGAENAGVHVDAKGFIPVDEHQRTNVPHIYAIGDIVGNPMLAHKATHEAKVAAEVIAGKPSAFQALTIPSVAYTDPEVAWMGVTEAQAKAQGIEYEKAVFPWAASGRALGIGRKEGATKLLCDKTTKRVIGAGIVGPHAGELIAEAVLAMEMGADAEDIGLTVHAHPTLSETFAFAAEMIEGTITDLYIRKR

SEQ ID NO: 16783 - protein, 400 aa, Dechloromonas aromatica RCB
METYQSSSNVLFVLLGAIMVLAMHAGFAFLEVGTVRKKNQVNALVKILSDFGVSTVAYFFVGYTIAYGVNFFSGVETLLQKSGFELTKFFFLLTFAAAIPAIISGGIAERAKFHPQLIATFLLVGFVYPFFEGIAWNQAFGIQAWLKASFGEEFHDFAGSVVVHAMGGWIALPAVLLLGARYGRYNKDGRISAHPPSSIPFLALGAWILIVGWFGFNVMSAQTLDKISGLVALNSLMAMVGGTLVALVAGKNDPGFLHNGPLAGLVAVCAGSDLMHPIGALVVGGVAGGLFVVMFTLVQNRWKIDDVLGVWPLHGMCGAWGGIAAGIFGSKAFGGAGGIAFMPQLIMTLMAIAVALVGGTLVYGALKATLGLRLDKEEEYEGADLSIHRITATPEREPNW

SEQ ID NO: 16784 - protein, 358 aa, GIBBERELLA ZEAE PH-1
MAVTRSSSRISTTSETKAEPVAKARSNTNTRKRKATKDETQAPSTPPRKRVQGKTAPAAPPPVTPTPAAARAFAESTSSTKKPRSAAVTRLANPKLTNATLLSPETSRLVASRDLETVSPSKAPQAKTTTDNLLKEACDYLIKVDARMKPLIENHHCRAFSPEGLAEEIDPFESLSSSIIGQQVSGAAAKSIKGKFLTLFELQPGSRFPHPSQVAIKSIEELRTAGLSQRKAEYIKGLAEKFDSGELSTQMLHDASDEEVMEKLIAVRGLGKWSVEMFACFALKRMDVFSLGDLGVQRGMAAFVGRDVAKLKAKGGGKWKYMSEQDMIELSNKFSPYRSLFMWYMWRVEETDMCIMEQ

SEQ ID NO: 16785 - protein, 436 aa, Methylococcus capsulatus str. Bath
MAQEQTVVVPDIGDFKDVEIIEVLVKPGDKVAANDSLITLESDKAAMEIPSPYSGTVTELHVRVGSKVSMGTPILQLREDEGTDASGAASAPVEPAPAEPVSPPPAAAAPAAGDTQAVPASAPTPPAPMPVAEEGSGPAHASPAVRRFARELGVDVAKVRGTGPKGRILKTDVQSFVKQAVATAERTGGGGFAVPAMPEIDFAQFGPIERQPLSRIQKLSSANLHRTWLTVPHVTQHDEADITELEAFRNALKAESAKRGVKLTLLPFIIKAAVAALKDFPRFNASVAPNGEELILKRYYHVGFAVDTPDGLVVPVIRDADTKGIWDIAAELAAIGDKARGKKLRTADLQGGTFTVSSLGGIGGIAFTPIINAPEVAILGVSKAQLRPVFQDGQFVPRLMLPLSLSYDHRVIDGADGVRFVTHVSSLLADMRRVLL

SEQ ID NO: 16786 - protein, 465 aa, Oryza sativa
EEETEKEEEDEVSTSSSSLPRRPSASHGDVVVPLGGRDPGARGSGRCARARRHATRAMASLFGHVEPASKDPILGVTEAFLADPSPDKVNVGVGAYRDDNGKPVVLECVREAERRIAGNLNMEYLPMGGSIKMIEESLKLAYGEDSDFIKDKRIAAVQALSGTGACRLFADFQRRFLPNSQIYIPTPTWSNVCNFSSHHNIWRDAQVPQRTFTYYHPESRGLDFAGLMDDIKNAPNGSFFLLHACAHNPTGVDPTEEQWREISYQFKIKNHFPFFDMAYQGFASGDPERDAKAIRIFLEDGHQIGCAQSYAKNMGLYGQRAGCLSILCEDEMQAVSVKSQLQQIARPMYSNPPVHGALVVSIILNDPELKSLWLKEVKGMADRIIGMRKALRENLEGLGSPLSWDHITNQIGMFCYSGMTPEQVDRLTNEYHIYMTRNGRISMAGVTTGNVAYLANAIHEVTKTK

SEQ ID NO: 16787 - protein, 318 aa, Methanosarcina acetivorans C2A
MKSISTQCKNKFLRNFSFYGELTVTIKKALIPAAGLGTRFLPATKSMPKEMLPIIDTPVIQYVVEEAIASGIEDIIIITGRGKRAIEDYFDDSPELEMHLAKKNQTDMLKLVRDISSLVDIHYIRQKEPNGLGDAVLRAENHIGNEPFAVLLGDDIIVNDKPCTAQLIENFEKYGRSTIAVEEVPYEKLNSYGIIKGRPLDDSLYVLEDIVEKPSPEEAPSNIGAIGRYVFTPEIFDCIKKAGTGVGSEIQLTDGIRLLSRSQMIYACRFKGKRFDTGDRLGYIKSIIDFALQNESLRDNVLEYLREILAVEKVTAEK

SEQ ID NO: 16788 - protein, 404 aa, Arabidopsis thaliana
MTTVSTQNESTQKPVQVAKRLEKFKTTIFTQMSILAVKHGAINLGQGFPNFDGPDFVKEAAIQAIKDGKNQYARGYGIPQLNSAIAARFREDTGLVVDPEKEVTVTSGCTEAIAAAMLGLINPGDEVILFAPFYDSYEATLSMAGAKVKGITLRPPDFSIPLEELKAAVTNKTRAILMNTPHNPTGKMFTREELETIASLCIENDVLVFSDEVYDKLAFEMDHISIASLPGMYERTVTMNSLGKTFSLTGWKIGWAIAPPHLTWGVRQAHSYLTFATSTPAQWAAVAALKAPESYFKELKRDYNAKKETLVKGLKEVGFTVFPSSGTYFVVADHTPFGMENDVAFCEYLIEEVGVVAIPTSVFYLNPEEGKNLVRFAFCKDEETLRGAIERMKQKLKRKVLSLN

SEQ ID NO: 16789 - protein, 446 aa, Triticum aestivum
MAATIQSVKARQIFDSRGNPTVEVDVCCSDGTFARAAVPSGASTGVYEALELRDGGSDYLGKGVSKAVNNVNSIIAPALVGKDPTAQTELDNFMVQQLDGTKNEWGWCKQKLGANAILAVSLAVCKAGASVKKIPLYQHIANLAGNKQLVLPVPAFNVINGGSHAGNKLAMQEFMILPTGAASFKEAMKMGVEVYHNLKSVIKKKYGQDATNVGDEGGFAPNIQENKEGLELLKTAIEKAGYTGKVVIGMDVAASEFYNDKDKTYDLNFKEENNDGSQKISGDSLKNVYKSFVSEYPIVSIEDPFDQDDWVHYAKMTEECGVEVQIVGDDLLVTNPTRVAKAIQEKSCNALLLKVNQIGSVTESIEAVKMSKHAGWGVMTSHRSGETEDTFIADLAVGLSTGQIKTGAPCRSERLAKYNQLLRIEEELGDAAVYAGLKFRAPVEPY

SEQ ID NO: 16790 - protein, 404 aa, Candida albicans SC5314
MSPKKSYSLETELVLNKSGDQYNASVPPLYQSATFKQPSLSNMGEYDYTRSGNPTRTHLQNHIAKIMKAEHAFAVSSGMGCLDVITRLLKPGDEVIAGDDLYGGTHRLLTYLSKKGDIVAHHYDTTNTELIKSKINNKTKMIFLESPTNPLIKVVDVKSIADHAHKANRDIVVVFDNTMMSPVLMTPLDLGVDIQYESATKYLNGHHDIMAGVIATRSSSLAEQLYYIINSTGCGLSPFDCWLLSRGLKTLAIRVEKQQQNCIRIAKFLENIGFKVRYPGLKSHPQYELHSSMCSGYGAVLSFETGSVRLSEKIVENTDIFGIAVSFGCVNSLISMPCKMSHASIDAKTREEREFPEDLIRLCIGIENCDDLIDDLTKALLRSGAVKVNDRDELYNAVGIQPKL

SEQ ID NO: 16791 - protein, 481 aa, Pseudomonas syringae pv. syringae B728a
MSQKTLTTASGAPVADNQNSRSAGPRGPLLLDDFHLIEKLAHFNRENIPERRVHAKGSGAHGTFTVTRDISQYTSARLFDTVGKQTPIFLRFSTVGGERGSADTERDPRGFAIKFYTEEGNWDIVGNNTPVFFIRDPLKFPDFIHTQKRLPQTNLKSPQMMWDFWSHSPEALHQVTILFSDRGIPDGYRHMHGFGSHTYSLISAAGERHWVKWHYKTRQGIKNLTPAEAARIAGTDPDYAQRDLFTAIEKGDFPKWQVCIQLMTEAQAANHHENPFDVTKTWSQKEYPLIEVGELELNRNPLNYFAEVEQAAFGPSNMVPGVGLSPDRMLQGRVFAYADAHRYRVGTNHQQLPINAPKSPVHSYQRDGAMAFGTNGGATPNYEPNSYSDAPKENPRYAEPALSLNGAADRHDHRVDGDYYSQAGKLFNLMSADQQALLIGNIAGAMAGVSSDVVQRQLQHFYKADPAYGEGIARALDVKLG

SEQ ID NO: 16792 - protein, 379 aa, Ralstonia eutropha JMP134
MSGVRAPRIVKHPQRSKETDAMTTTGYKIETRPLEARYARGWHCLGLADDYRDGKPHTLNIFGKRLAAFADSTGAIRIVDSYCPHMGADLSTGTVQGDNLVCPFHGWQWGGDGGCKSIPYCKRVPPKARIGSWETSEQNRLLFVWHDPEGRPAPREVAIPRIDACFAADWSDWAMDKMLIGTNCRELVDNISDMAHFGTVHGAPVDYFANLFEHHKATQLMIGRSARLSGDSRLTAHSTYFGPAYHITEMTGKMGDQEIHSILLNCHVPIDLNSFELRYGVLVKKIPGLSDEQNRAVAQAYVEQAREAFYEDVAIWDSKIRIDNPLLCEGDGPIYQMRDWYQQFYTDVEQVRPASVARRVFELNPGGIEPPTLGHVFEA

SEQ ID NO: 16793 - protein, 338 aa, Oryza sativa
MAEDDYNDMDMGYEDEPPEPEIEVQSCCFVIYFWTLLYQEELCGLFTFSELEGAEEEPENNNEDAVDDVVGAEDDREQEKTARPWKTSKYMTKYERARILSTRALQISMNAPVMVELEGGTYPLEVEALERVYTDCPKPTSARRQQLLCECPILANIEPKQIKVAAHHNGHGTSHENHTQESESSVEQHDPESQDDISIKATPADESPPEETSAAPTKEQSLREIHGRGAREVLHAATTAQGGGLNRSMAAINREMTRRGARFDGGRNDWRSNRWVGHFGRVARTFRRQEHVALVRSAWRWSQEGEVAGIAKSLVYGEPGGGLSGQLGVSGEMINSSP

SEQ ID NO: 16794 - protein, 63 aa, Erysimum cheiri
WMPELRRFAPNVPIVLVGTKLDLRDDKGYLADHTNVITSNQGEELRKQIGAAAYIECSSKTQQ

SEQ ID NO: 16795 - protein, 113 aa, Glycine max
MGETQHQEPSREADSPGGQGDAIKPSDYDVSLPLEPSGRFETQTKICLSISNHHPEHWQPSWSVRTALVALIAFMPTNPNGALGSLNYKKEDRCALATKSQEAPPKFGTPERQ

SEQ ID NO: 16796 - protein, 107 aa, Erysimum cheiri
LGLWDTAGQEDYSRLRPLSYRGADIFVLAFSLISKASYENVLKKWMPELRRFAPNVPIVLVGTKLDLRDDKGYLADHTNVITSNQGEELRKQIGAAAYIECSSKTQQ

SEQ ID NO: 16797 - protein, 89 aa, Zea mays
MAGTIQSVMARQIFDSRGNPTVDVDEYCSDGTFARAAAPTGALTGVYEALELRDGGSDYQGKGLYNAVNNVNGDIGPVLIDKDPTAHTE

SEQ ID NO: 16798 - protein, 189 aa, Streptomyces griseus
MRGTPVHHRGSSEGAGMSTMGDGTRAVRAGLPEPEQFGPTLPGPVFAAHFHLSGEPVGPYTYGRETNPTWTHLERAIGELEAPGEEVGTTVFASGMAAITAVLLSQVRSGDAVVLPDDGYQALPLVREQLEAYGVEVRTAPTGGDAQQALLTGAKLLWIESPSNPGLDVCDIRRLAGAAHAAGALVAVD

SEQ ID NO: 16799 - protein, 554 aa, Spirochaeta thermophila
MTRISPLQKARYGYVPKLPPVLQDEIARIQAELGQPTEAVADREDLKRLFANTYGKPIATLTRGSNPEAGRRRTVGVILSGGPAPGGHNVICGLFDALKKANRESTLIGFKGGPSGILDDEWIEFTDSLINQYRNTGGFDIIGSGRTKIETPEQFAKALENAKKHGLDALVIIGGDDSNTNAALLAEYFVQQGAPIQVIGIPKTIDGDLKNEYIEASFGFDTATKVYAELIGNIARDAISSRKYWHFIRLMGRSASHIALECALQTHPNVCIVSEEVREKNMTLSQIVDQIVDAVVKRAAKGENFGVVLVPEGLIEFIPEVGALIDELNTLLAKEAEVFNRIDDPRERISWVKGKLSGNNQHVFSSLPETIQAQLLMDRDPHGNVQVSRIETEKLLIEMVSSRLKALKEEGAYKGKFSALNHFFGYEARCAFPSNFDADYCYALGFTAFVLIANGLTGYIAAIKNLARPAVEWKPMGIPLTMMMNMEKRHGKMKPVIRKALVDLEGAPFKRFATQRDAWATESAYVFPGAIQYYGPDDVCNQPTMTLKLEQGLE

SEQ ID NO: 16800 - protein, 148 aa, Oryza sativa
MSKSAGAAAGPTAAAAAAAVQKQKTLLQKADADVSSLVDNFAAFINIARVNDPPVRNTQEAFQMDMRGSRLIHSADSLLKLVSELKRTAIFSGLASLTENVDRRIEILSQQAEGTERMLERIGQEAAGSLKELEAHYYSSVVRTPPDE

SEQ ID NO: 16801 - protein, 181 aa, Solanum tuberosum
MASSIVSSAAVATRSNVAQASMVAPFTGLKSAASFPVTKKNNNVDITSLASNGGRVRCMQVWPPINMKKYETLSYLPDLSDEQLLKEVEYLLKNGWVPCLEFETEHGFVYRENHKSPGYYDGRYWTMWKLPMFGCTDATQVLAEVQEAKKAYPQAWIRIIGFDNVRQVQCISFIAYKPEGY

SEQ ID NO: 16802 - protein, 452 aa, Pseudomonas syringae pv. tomato str. DC3000
MAFDFDLFVIGAGSGGVRAARFAAGFGARVAVAESRYLGGTCVNVGCVPKKLLVYGAHFSEDFDHAKGFGWSLGEASFDWSTLIANKDREINRLNDIYRKLLVDSGVTLLEGHAKIVGPQQVEINGQTHSAERILIATGGWPQVPDVPGREHAITSNEAFYLKALPKRVVVVGGGYIAVEFASIFNGLGADTTLVYRGELFLRGFDGSVRSHLHEELLKRHMTIRFNSDIERIDKQSDGSLLLSMKGGGTLETDCVFYATGRRPMLDNLGLDSVDVKLDEHGYIKVDEHYQTSEPSILALGDVIGGVQLTPVALAEGMAVARRLFKPEQYRPVDYNHIPTAVFSLPNIGTVGLTEEDAIKAGHDVQVFESRFRSMKLTLTDDQERTLMKLVVDAKTDRVLGCHMVGPDAGEIVQSLAIAIKAGATKQVFDDTIGVHPTAAEEFVTMRTPAKR

SEQ ID NO: 16803 - protein, 279 aa, Pseudomonas syringae pv. tomato str. DC3000
MIKKCLFPAAGYGTRFLPATKAMPKEMLPVVNKPLIQYGVEEALAAGLTEISIVTGRGKRSLEDHFDISYELEHQIKGTDKEKYLVGIRKLIDECSFSYTRQTEMKGLGHAILSGRPLIGNEAFAVVLADDLCVNLEGDGVLAQMVKLHKHYGCSIIAIQEVDPSETNKYGVIAGEEIKPGLFRVTDMVEKPKPEDAPSNLAIIGRYILTPDIFEKIEQTEPGKGGEIQITDALMKQAAEGNVLAYKFKGTRFDCGGAEGYIEATNFCFEHFYKAGKAH

SEQ ID NO: 16804 - protein, 545 aa, Candida albicans SC5314
MSSKIERIFSGPALKINTYLDKLPKIYNVFFIASISTIAGMMFGFDISSMSAFIGAEHYMRYFNSPGSDIQGFITSSMALGSFFGSIASSFVSEPFGRRLSLLTCAFFWMVGAAIQSSVQNRAQLIIGRIISGIGVGFGSAVAPVYGAELAPRKIRGLIGGMFQFFVTLGIMIMFYLSFGLGHINGVASFRIAWGLQIVPGLCLFLGCFFIPESPRWLAKQGQWEAAEEIVAKIQAHGDRENPDVLIEISEIKDQLLLEESSKQIGYATLFTKKYIQRTFTAIFAQIWQQLTGMNVMMYYIVYIFQMAGYSGNSNLVASSIQYVINTCVTVPALYFIDKVGRRPLLIGGATMMMAFQFGLAGILGQYSIPWPDSGNDSVNIRIPEDNKSASKGAIACCYLFVASFAFTWGVGIWVYCAEIWGDNRVAQRGNAISTSANWILNFAIAMYTPSGFKNISWKTYIIYGVFCFAMATHVYFGFPETKGKRLEEIGQMWEERVPAWRSRSWQPTVPIASDAELARKMEVEHEEDKLMNEDSNSESRENQA

SEQ ID NO: 16805 - protein, 125 aa, Bradyrhizobium japonicum USDA 110
MADGLSVFLVEDEALIRMMMADMVEELGHHVVAEADNVRDASAFAMTAQYDLAILDINLMGLYVDPVADLIERRGKPFLFATGYGPELLPSLLRRRPILRKPISIDQLKAMIDSMFPETTAKAPH

SEQ ID NO: 16806 - protein, 467 aa, Magnaporthe grisea 70-15
MPPPPLKLAAKNDPTNKRKSPADGSPGSINQEEPTTPKKRRTAAPAASPLPPPVTPTPSAVGLISGLGRPSTTPKYKAVARLADAHVANAQLLSPETSRVVVAASHLPAQTTSSSPSKAGIPIKGPTTTATLLEEACAHLIRVDPRMKPLIEAHHCHIFSPEGLAEKIDPFESLCSGIISQQVSGAAARSIKAKFVALFADEKPGELFPSPSSVAAATIEKLRTAGLSQRKAEYVKGLAEKFASGELSAQLFADLPYEQVLQKLIAVRGLGRWSVEMFACFGLKFMDVFSLGDLGVQRGMAAFSGRDVAKMKNSKAGKWKYMNEKDMTELSDRFKPYRSLFMCHGLDRHTAISCVAFSVGIESIDMAYYLFHPMFGGGASRIRLIVIRVALLEPRAWCSVFLNARFNVGGRLLVDIVAGMSCRAARSPVPGKSDKADEVLVYRYMTIYVGIIRQDATTACMFCARWS

SEQ ID NO: 16807 - protein, 1011 aa, Mycobacterium tuberculosis CDC1551
MSFLLVEPDLVTAAAANLAGIRSALSEAAAAASTPTTALASAGADEVSAAVSRLFGAYGQQFQALNARAATFHAEFVSLLNGGAAAYTGAEAASVSSMQALLDAVNAPTQTLLGRPLIGNGADGVAGTGSNAGGNGGPGGILYGNGGNGGAGGNGGAAGLIGNGGAGGAGGAGGAGGAGGAGGTGGLLYGNGGAGGNGGSAAAAGGAGGNALLFGNGGNGGSGASGGAAGHAGTIFGNGGNAGAGSGLAGADGGLFGNGGDGGSSTSKAGGAGGNALFGNGGDGGSSTVAAGGAGGNTLVGNGGAGGAGGTSGLTGSGVAGGAGGSVGLWGSGGAGGDGGAATSLLGVGMNAGAGGAGGNAGLLYGNGGAGGAGGNGGDTTVPLFDSGVGGAGGAGGNASLFGNGGTGGVGGKGGTSSDLASATSGAGGAGGAGGVGGLLYGNGGNGGAGGIGGAAINILANAGAGGAGGAAGSSFIGNGGNGGAGGAGGAAALFSSGVGGAGGSGGTALLLGSGGAGGNGGTGGANSGSLFASPGGTGGAGGHGGAGGLIWGNGGAGGNGGNGGTTADGALEGGTGGIGGTGGSAIAFGNGGQGGAGGTGGDHSGGNGIGGKGGASGNGGNAGQVLGDGGTGGTGGAGGAGSGTKAGGTGSDGGHGGNATLIGNGGDGGAGGAGGAGSPAGAPGNGGTGGTGGVLFGQSGSSGPPGAAALAFPSLSSSVPILGPYEDLIANTVANLASIGNTWLADPAPFLQQYLANQFGYGQLTLTALTDATRDFAIGLAGIPPSLQSALQALAAGDVSGAVTDVLGAVVKVFVSGVDASDLSNILLLGPVGDLFPILSIPGAMSQNFTNVVMTVTDTTIAFSIDTTNLTGVMTFGLPLAMTLNAVGSPITTAIAFAESTTAFVSAVQAGNLQAAAAALVGAPANVANGFLNGEARLPLALPTSATGGIPVTVEVPVGGILAPLQPFQATAVIPVIGPVTVTLEGTPAGGIVPALVNYAPTQLAQAIAP

SEQ ID NO: 16808 - protein, 242 aa, Crocosphaera watsonii WH 8501
MFQPFLQHLEKELFSRFDLTSRPIAPELEFQISQRGKNPAMIESWCYECPQLRKIRYTYINAGETAQIFNSVIYPNHQYDLPLLGIDFLAFGKKKILVVLDFQPLFRDSDYLKKYIEPMAPIRAKYNELAQDLEMRFYDANQYFSPYLLFARTNPQTVIEQLFPAYQEYIQLYWQLVEQAEPKTESTELERIIKAQKDYDQYSAERDPASGLFNSYFGHEWSEKFLHKFLFEDAVAVAAKKS

SEQ ID NO: 16809 - protein, 399 aa, Xanthomonas campestris pv. campestris str. ATCC 33913
MSNRTANSHDGERALSLATLAIHGGQSPDPSTGAVMPPIYATSTYAQSSPGEHQGFEYSRTHNPTRFAYERCVAVLEGGTRGFAFASGMAATSTVMELLDAGSHVVATDDLYGGSFRLFERVRRRTAGLDFSFVDLTDPAAFEAAIRPTTKMVWIETPTNPMLKLVDIAAIAAIARRHGLLVVVDNTFASPMLQRPLELGADLVVHSATKYLNGHSDMVGGIAVVGDNAELAEQMAFLQNSIGGVQGPFDSFLALRGLKTLPLRMRAHCENALALAQWLETHQAIEKVIYPGLASHPQHALAKQQMSGFGGIVSIVLKGGFEAAKRFCEKTELFTLAESLGGVESLVNHPAVMTHASIPVARREQLGISDALVRLSVGVEDVGDLRGDLERALEASQSP

SEQ ID NO: 16810 - protein, 478 aa, Methylococcus capsulatus str. Bath
MQCRDHSTHLVSLPNSQGPAVPFTMRRPVRPPSVPMSRYRTAPLATTELPPGIPFIIGNELAERFSYYGMRAILVVFMTRYLVDAAGNPAPMQEGEAKGYFHLFVSLTYFTPFLGALLADGVLGKYRTIIALSLVYCLGHFALALDDTRTGLLLGQSLIALGAGGIKPCVSAHVGDQFGQSNRHLLSQIYGWFYLAINLGAFVSMLLIPWLLERHGASVAFAVPGLLMLIATLVFWAGRHRFVHIPPGGMRFIREAWSSEGRRGVGRLIGVFLFITMFWALFDQTGSSWVLQSQRMDRVLFGHAILPSQIQAANPLLIVLLTPFFHHLLYPALARLIPMTALNKIALGLSFTVLAFALAAWIQMRIDTGLKPSIGWQLLAYLLLTSAEVMVSITSLEFAYTQAPLTMKSFVMALYLGAVALGNLFTALVNFWIERSKTPWLDGAGYFWFFTGLMLATALGFFAYSRNYREELHLQTER

SEQ ID NO: 16811 - protein, 179 aa, Glycine max
  unsure (1)..(179): unsure at all Xaa locations
MASSMISSPAVTTVNRAGAGMVAPFTGLKSMAGFPTRKTNNDITSIASNGGRVQCMQAXWHPVGKKKFETLSYLPDLDDAQLAKEVEYLLRKGWIPCLEFELEHGFVYREHNRSPGYYDGRYWTMWKLPMFGCTDASQVLKELQEAKTAYPNGFIRIIGFDNVRQVQCISFIAYKPPGF

SEQ ID NO: 16812 - protein, 505 aa, Helicobacter pylori J99
MVNKDVKQTTAFGAPVWDDNNVITAGPRGPVLLQSTWFLEKLAAFDRERIPERVVHAKGSGAYGTFTVTKDITKYTKAKIFSKVGKKTECFFRFSTVAGEKGSADAVRDPRGFAMKYYTEEGNWDLVGNNTPVFFIRDAIKFPDFIHTQKRDPQTNLPNPDMVWDFWSNVPESLYQVTWVMSDRGIPKSFRHMDGFGSHTFSLINAKGERFWVKFHFETMQGVKHLTNEEAAEVRKYDPDSNQRDLFDAIAGGDFPKWKMSIQVMPEEDAKKYRFHPFDVTKIWYLQDYPLMEVGIVELNKNPENYFAEVEQAAFTPANVVPGIGYSPDRMLQGRLFSYGDTHRYRLGVNYPQIPVNRPRCPFHSSSRDGYMQNGYYGSLQNYTPSSLPGYKEDKSARDPKFNLAHIEKEFEVWNWDYRAEDSDYYTQPGDYYRSLPADEKERLYDTIGGSLAHVTHKEIVDKQLEHFKKADPKYAEGVKKALEKHQKMMKDMHAKDMHHMKKKK

SEQ ID NO: 16813 - protein, 448 aa, Glycine max
  unsure (1)..(448): unsure at all Xaa locations
VSSMAAPMVAVTVSQYLLQVVSLMMVGHFGILVCVGGVAIATSFAEVTGFSVLLGMSGALETLCGQTYGAEEYRKFGNYTWCAIVTLTLVCLPISLVWIFTDKILLLFSQDPEISHAAREYCIYLIPALFGHAVLQALTRYFQTQSMIFPMVFSSITALCLHVPICWGLVFKLGLGHVGAALAIGVSYWLNVVWLAIYMIYSPACQKTKIVFSSNALLSIPEFLKLAIPSGLMFWFVWWSVGVLTLLPAPAPFPXLAPAGLMFCLNTTTLHYFIPYAVGASASTRVSNELGAGNPKTAKGAVRVVVILGVAEAAIVSTVFISCRHVLGYAYSNDKEVIDYVAEMAPLLCVSVTADSLIGALSGIARGGGFQEIGAYVNLGAYYLVGIPMGLLLGFHLQLRAKGLWMGTLSGSLTQVIILAIVTALIDWQKEATKARERVVENSIKAHI

SEQ ID NO: 16814 - protein, 136 aa, Zea mays
EGRCMADLCGALHCDLMMQFKKPKSKCNAAAATRNRHLCESLADSCFPINQGLAASRLHEFFLRQFCDAHTCSKGTKPFPKGGRKQTNRLYLALSILTLILLPLFYLIVFLHQREMRKGTQDLKRFSKIGQKKKPS

SEQ ID NO: 16815 - protein, 445 aa, Arabidopsis thaliana
MASNGVTNCNANANVWRFKGNGATSDAAAVTLRKLAFGMFKNCTMNSGKTILFPTPGEPSAHSNFRTCPEAEEAVAAAARSGMANSYAPSPGVFKARRAVAEYLNGELPTKLKAEDVYITGGCNQAIEIVIDSLAGNPSANILLPRPGYPHYDARAVYSGLEIRKYDLLPESDWEINLDGLEAAADENTVAMVIINPNNPCGNVYTYDHLNKVAEMARKLGIMIISDEVYDHVVYGDKPFIPMGKFASIAPVITLGSISKGWVNPGWRVGWIAMNDPNGIFVSTGVVQAIEDFLDLTPQPSFILQEALPDILEKTPKEFFEKKIKAMRRNVELSCERLKDIPCLFCPKKPESCSYLWLKLDTSMLNNIKNDFDFCTKLVSEESLILIPGVALGAENWVRISIGTDESVVQEIFDRLKGFYDRHAISKEAIKLSGHAINQIVVSVN

SEQ ID NO: 16816 - protein, 254 aa, Ralstonia eutropha JMP134
MATNLFDLTGKIALVTGASRGIGEEIAKLLAEQGAYVIVSSRKLDDCQAVADYIVEAGGKAEALACHVGRMDDIGATFRHIRGKHGRLDILVNNAAANPYFGHILDTDLGAYEKTVEVNVRGYFFMSVEAGRMMKSQGGGVIVNTASVNALQPGDKQGIYSVTKAAVVNMTKAFAKECGPLGIRVNALLPGLTKTKFAGALFEDSAMYERWLAEIPLRRHAEPREMAGTVLYLVSDASSYTNGECIVVDGGLTI

SEQ ID NO: 16817 - protein, 233 aa, Oryza sativa (japonica cultivar-group)
MAGLGFDETELRLGLPGAGELAARSSGKRGFAETIDLKLKLQPAAPAAVSGEEGAQEDKEDADAAAAAADEKMSMKRSASQSSVVTAEPDPDKPRAPKAQVVGWPPVRSFRKNVLAEKCKAAALVKVSMDGAPYLRKIDVAMYKSYPELSMAFQNMFTSFTIGKCGSHQQLKESNKLRDDLEYVPTYEDKDGDWMLVGDVPWEMFVESCKRLRIMKGSEAIGLAPRAVEKCKS

SEQ ID NO: 16818 - protein, 429 aa, Corynebacterium efficiens YS-314
MTDKNTRTEKIQPFSAPKGVPDYAPPRSAAFVAVRDAFITQAHLAGFEHIELPIFEETGLFARGVGESTDVVSKEMYTFADRGERSVTLRPEGTAGVMRAVIEHSLDRGQLPVKLNYAGPFFRYERPQAGRYRQLQQVGVEAIGVDDPALDAEIIALADRSYRSLGLTGFRLELTSLGDSNCRPAYRQKLQDFLLNLPLDEETRRRAEINPLRVLDDKRAEVREMTADAPLMLDHLDDGCRTHFETVTGLLDDMGVPYEINPRMVRGLDYYTKTTFEFIHDGLGAQSGIGGGGRYDGLMAQLGGQDLSGIGYGLGVDRTILALEAEGVTVGQERRVDVYGVPLGQAAKKAMAGIINDLRAAGISADMSYGDRGLKGAMKGADRSGSLYTLVLGENELDNGTVAVKDMRAHDQQDIALSEVVSALRAKLA

SEQ ID NO: 16819 - protein, 180 aa, Lycopersicon esculentum
MASSVISSAAVATRSNVTQASMVAPFTGLKSSATFPVTKKQNLDITSIASNGGRVSCMQVWPPINMKKYETLSYLPDLSDEQLLSEIEYLLKNGWVPCLEFETEHGFVYRENNKSPGYYDGRYWTMWKLPMFGCTDATQVLAEVQEAKKAYPQAWVRIIGFDNVRQVQCISFIAYKPEGY

SEQ ID NO: 16820 - protein, 757 aa, Escherichia coli
MKLSRRSFMKANAVAAAAAAAGLSVPGVARAVVGQQEAIKWDKAPCRFCGTGCGVLVGTQQGRVVACQGDPDAPVNRGLNCIKGYFLPKIMYGKDRLTQPLLRMKNGKYDKEGEFTPITWDQAFDVMEEKFKTALKEKGPESIGMFGSGQWTIWEGYAASKLFKAGFRSNNIDPNARHCMASAVVGFMRTFGMDEPMGCYDDIEQADAFVLWGANMAEMHPILWSRITNRRLSNQNVTVAVLSTYQHRSFELADNGIIFTPQSDLVILNYIANYIIQNNAINQDFFSKHVNLRKGATDIGYGLRPTHPLEKAAKNPGSDASEPMSFEDYKAFVAEYTLEKTAEMTGVPKDQLEQLAQLYADPNKKVISYWTMGFNQHTRGVWANNLVYNLHLLTGKISQPGCGPFSLTGQPSACGTAREVGTFAHRLPADMVVTNEKHRDICEKKWNIPSGTIPAKIGLHAVAQDRALKDGKLNVYWTMCTNNMQAGPNINEERMPGWRDPRNFIIVSDPYPTVSALAADLILPTAMWVEKEGAYGNAERRTQFWRQQVQAPGEAKSDLWQLVQFSRRFKTEEVWPEDLLAKKPELRGKTLYEVLYATPEVSKFPVSELAEDQLNDESRELGFYLQKGLFEEYAWFGRGHGHDLAPFDDYHKARGLRWPVVNGKETQWRYSEGNDPYVKAGEGYKFYGKPDGKAVIFALPFEPAAEAPDEEYDLWLSTGRVLEHWHTGSMTRRVPELHRAFPEAVLFIHPLDAKARD

SEQ ID NO: 16821 - protein, 506 aa, Zea mays
MAPPQTIPRRGLFIGGAWREPCLGRRLPVVNPATEATIGDIPAGTAEDVEIAVAAARDAFSRDGGRHWSRAPGAVRANFLRAIAAKIKDRKSELALLETLDSGKPLDEASGDMDDVAACFEYYADLAEALDGKQQSPISLPMENFKSYVLKEPIGVVGLITPWNYPLLMATWKVAPALAAGCTTILKPSELASVSCLELGAICMEIGLPPGVLNIITGLGPEAGAPLSSHSHVDKVAFTGSTETGKRIMISAAQMVKPVSLELGGKSPLIVFDDIGDIDKAVEWTMFGIFANAGQVCSATSRLLLHEKIAKKFLDRLVAWAKNIKVSDPLEEGCRLGSVISEGQYEKIKKFISTARSEGATILYGGGRPQHLRRGFFLEPTIITDVSTSMQIWQEEVFGPVICVKEFRTESEAVELANDTHYGLAGAVISNDQERCERISKALHSGIIWINCSQPCFVQAPWGGNKRSGFGRELGEWGLDNYLTVKQVTKYCSDEPWGWYQPPSKL

SEQ ID NO: 16822 - protein, 558 aa, Zea mays
  unsure (1)..(558): unsure at all Xaa locations
MASSWTLPDHPKLPKGKPVAVVVLDGWGEANPDQYNCIHVAQTPVMDSLKNGAPEKWRLVKAHGTAVGLPSDDDMGNSEVGHNALGAGRIFAQGAKLVDQALASGKIYDGDGFNYIKESFENGTLHLIGLLSDGGVHSRLDQLQLLLKGVSERGAKKIRVHILTDGRDVLDGSSVGFVETLENDLLELRGKGIDAQIASGGGRMYVTMDRYENDWDVVKRGWXDAQVLGEAXPYKFKSALEAVKTLRAQPKANDQYLPPFVIVDDSGKAVGPVLDGDAVVTINFRADRMVMLAKALEYADFNNFDRVRVPKIRYAGMLQYDGELKLPSRYLVSPPEIDRTSGEYLVKNGIRTFACSEAVKFGHVTFFWNGNRSGYFDETKEEYVEVPSDSGITFNVAPKMKALQIAEKARDALLSGKFDQVRVNLPNGDMVGHTGDIEATVVACKAADEAVKIILDAVEQVGGIYLVTADHGNAEDMVKRNKSGKPLLDKNGGIQILTSHTLQPVPVAIGGPGLHPGVKFRNDIQIPGLANVAATVMNLHGFEAPADYEQTLIEVADN

SEQ ID NO: 16823 - protein, 329 aa, Fusobacterium nucleatum subsp. nucleatum ATCC 25586
MRVKIKKMEKKLAILTSGGDAPGMNAAIRATAKIAEYYGFEVYGIRRGYLGMLNDEIFPMTGRFVSGIIDKGGTVLLTARSEEFKEARFREIAANNLKKKGINYLVVIGGDGSYRGANLLYKEHGIKVVGIPGTIDNDICGTDFTLGFDTCLNTILDAMSKIRDTATSHERTILIQVMGRRAGDLALHACIAGGGDGIMIPEMDNPIEMLALQLKERRKNGKLHDIVLVAEGVGNVLDIEEKLKGHINSEIRSVVLGHIQRGGTPSGFDRVLASRMAAKAVEVLNKGEAGVMVGIEKNEMVTHPLEEACSVDKRKSIEKDYELALLLSK

SEQ ID NO: 16824 - protein, 422 aa, Staphylococcus aureus subsp. aureus MW2
MPEVKVPELAESITEGTIAEWLKNVGDSVEKGEAILELETDKVNVEVVSEEAGVLSEQLASEGDTVEVGQAIAIIGEGSGNASKENSNDNTPQQNEETNNKKEETTNNSVDKAEVNQANDDNQQRINATPSARRYARENGVNLAEVSPKTNDVVRKEDIDKKQQAPASTQTTQQASAKEEKKYNQYPTKPVIREKMSRRKKTAAKKLLEVSNNTAMLTTFNEVDMTNVMELRKRKKEQFMKDHDGTKLGFMSFFTKASVAALKKYPEVNAEIDGDDMITKQYYDIGVAVSTDDGLLVPFVRDCDKKNFAEIEAEIANLAVKAREKKLGLDDMVNGSFTITNGGIFGSMMSTPIINGNQAAILGMHSIITRPIAIDQDTIENRPMMYIALSYDHRIIDGKEAVGFLKTIKELIENPEDLLLES

SEQ ID NO: 16825 - protein, 277 aa, Salmonella enterica
QLPSGSELSLYDIAPVTPGVAVDLSHIPTAVKIKGFSGEDATPALEGADVVLISAGVARKPGMDRSDLFNVNAGIVKNLVQQIAKTCPKACVGIITNPVNTTVAIAAEVLKKAGVYDKNKLFGVTTLDIIRSNTFVAELKGKLPTEVEVPVIGGHSGVTILPLLSQIPGVSFTEQEAAELTKRIQNAGTEVVEAKAGGGSATLSMGQAAARFGLSLVRALQGEKGVVECAYVEGDGQYARFFSQPLLLGKNGVEERKSIGTLSAFEQHSLDAMLYTL

SEQ ID NO: 16826 - protein, 374 aa, Psychrobacter sp. 273-4
MTDHVNNNASQAAHTSTSNLSNNITTTNGHLQDKLVQDSITNNQNITAQVKALQNTTTSANNNDFTHVEDLPIGTPQGQQTTMPNANTENRTQNSHANSAAQTSTATKQTLFNQRDDINNPHTSDTDGHEETHFGYKTVNKAEKQARVADVFTSVAKKYDIMNDLMSFGIHRLWKRYAISLSGVRAGQHVLDIAGGTGDLAKVFSREVGRNGHVVLSDINAAMLEVGRERLINAGCNNVDFVLANAETLAPFDDNSFDLVTISFGLRNVTDKDAALKSMYRVLKPGGRLLVLEFSKPVFEPLSKAYDLYSFTALPIMGKLIANDAESYQYLAESIRMHPDQQTLKQMMQQAGFENCDYYNLTAGIVAVHRGFKA

SEQ ID NO: 16827 - protein, 425 aa, Corynebacterium glutamicum ATCC 13032
MAEIMHVFAREILDSRGNPTVEAEVFLDDGSHGVAGVPSGASTGVHEAHELRDGGDRYLGKGVLKAVENVNEEIGDELAGLEADDQRLIDEAMIKLDGTANKSRLGANAILGVSMAVAKAAADSAGLPLFRYIGGPNAHVLPVPMMNIINGGAHADSGVDVQEFMIAPIGAETFSEALRNGAEVYHALKSVIKEKGLSTGLGDEGGFAPSVGSTREALDLIVEAIEKAGFTPGKDIALALDVASSEFFKDGTYHFEGGQHSAAEMANVYAELVDAYPIVSIEDPLQEDDWEGYTNLTATIGDKVQIVGDDFFVTNPERLKEGIAKKAANSILVKVNQIGTLTETFDAVDMAHRAGYTSMMSHRSGETEDTTIADLAVALNCGQIKTGAPARSDRVAKYNQLLRIEQLLGDAGVYAGRSAFPRFQG

SEQ ID NO: 16828 - protein, 437 aa, Azotobacter vinelandii
MSKPSTSIQHVAAREILDSRGNPTVEAVVTLAGGATGVASVPSGASTGSREALELRDGALRYKGKGVMKAVDNVNGAIRERVVGLDALDQRAVDQAMLELDGTDNKAILGANAILAVSLATARAAAAARGLPLYAHLAELYGSPGEYSLPVPMMNILNGGEHADNNVDLQEFMIQPVGAASFKEALRIGAEVFHTLKQVLAERGLSTAVGDEGGFAPSLSSNEEALVVIQAAVERAGYVLGQDITLALDCAASEFYHDGEYRLAGEGKTFDSRGFADYLAGLCERYPIVSIEDGLDESDWVGWAYLTEKLGQKVQLVGDDLFVTNPKILREGIERGIGNSILIKFNQIGSLSETLEAIRLAQQAGYTAVISHRSGETEDTTIADLAVATRAGQIKTGSLCRSDRVGKYNQLLRIEEALQGKAPYDATALLKRRCCSR

SEQ ID NO: 16829 - protein, 485 aa, Azotobacter vinelandii
MNDKTVAPQQHDISYVLRICAVAALGGLLFGYDTAVISGAVEALQQYFSLSPAETGWAVSNVVVGCIVGALGAGWVAGRLGRKKALVLSAILFTVSAIGAAVVDSFVWFVIYRIVGGLAVGIASTVSPMYMSEVSPKDIRGRALGMQSFAIVGGQVVVFYVNYLIAKGAADTWLVEYGWRWMLGSEVVPCILFCLFVFSIPESPRWQAMVGQDERALRTLRRISNDAHAHHLLNEIKHSLHQDSQGRTQKPNLREAGLALILFVGCMLAMLQQVTGVNVMMYYAPMVLKGVTGSTESALFQTIWIGVMQLVGTIIGTWLIDRVGRLPLMRVGTVGIVASLLLTSYALYAQESGYLALIGMLLFMVLFAISWGVGTWVLISEIFPNHMRSMGMSMAVCSMWIANFLVTQSFPMLNEHPVLIERFHGAFPMWVFAGCCVFCYWFVARFVPETRGVSLERMEEVMLAKLKRQPLADEEESAALRSSRA

SEQ ID NO: 16830 - protein, 104 aa, Glycine max
RANRLEARRRQKGNQIGSVTESIEAIRMSKKAGWGVMASHRSGETEDTFIADLSVGLATGQIKTGAPCRSERLAKYNQLLRIEEELGAEAVYAGANFRTPVEPY

SEQ ID NO: 16831 - protein, 132 aa, Escherichia coli
MSQHNEKNPHQHQSPLHDSSEAKPGMDSLAPEDGSHRPAAEPTPPGAQPTAPGSLKAPDTRNEKLNSLEDVRKGSENYALTTNQGVRIADDQNSLRAGSRGPTLLEDFILREKITHFDHERIPERIVHARGS

SEQ ID NO: 16832 - protein, 333 aa, Craterostigma plantagineum
MNQQQVKVSKNNKQVNNCEDDDDSSDLRRGPWTVDEDFTLINYIAHHGEGRWNSLARFAGLKRTGKSCRLRWLNYLRPDVRRGNITLEEQLLILELHSRWGNRWSKIAQHLPGRTDNEIKNYWRTRVQKHAKQLKCDVNSKQFKDTMRYLWMPRLVERIQASATTDDGAPPAVVSSPSSAMNTACYTTAMAAGDHRRQFMLMPQYYATTTTTHNNSMIAQENSSTVASSESFGSLSSELTAEANYANYHRVINGADHQQIDSSTTSYGWQNCAVGNNGNSDQLGMGFADDRRSNEQWMMMTDDVVDNGGSSDQDNNLWNVDDVWFLQQFSSCF

SEQ ID NO: 16833 - protein, 500 aa, Schizosaccharomyces pombe
MTIDLNVIQSDIISARRAPENSLFIDGKFVSPIEPAAKPIPLINPATEEIIGTCANASAKDVDSAVENAYNTFRSGIWAKWPGKQRGLVLRKIAKMMREKRELLAGIDTINCGKPTPYALFDIDSCADMFEYYAEVAETDNPTVKVPLPNNPGFCAFEKRFPRGVIGVITPWNFPLKMALWKLVPAIASGNCVVLKPSELAPWSCLEFALICKEAGLPDGVLNVIIGSGKESGAALSCHPKIAYLAFTGSLATGKKIMHAAAENIVPLTLELGGKSPLIICEDADLSLAIPSAAFAIFFNQGEACTAASRLIVHESVADEVLGGLVSEANKLIIGNGLDPQVTLGPVVSKTQFEKIVSYIQSAINEGCKCVVGGLPRSEQKGYFIPPTVFTNVQTHNKIWREEIFGPVLAVKTFHTNEEALELANDSEYGLGSGVFSTNPKTLEFFSNNIEAGMCSLNNYHVVTHELPWIGWKHSGLGVGLSKHGYNEYMRLKQITQYVG

SEQ ID NO: 16834 - protein, 622 aa, Mycobacterium tuberculosis CDC1551
MSNLLVTPELVAAAAADLAGIGSAIGAANAAAGAPTMALLAAGADEVSAAVAAVFSSYAQQYQALSAAAAAFHDQFVRALAAGAGAYAGAEAANVEQQLLNAINAPTLALLGRPLIGNGADGAAGTGQAGGAGGLLYGNGGNGGSGAAGQAGGAGGAAGLIGHGGTGGVGGTGAAGGAGGTGGWLFGNGGAGGTGGAVTGVSTTGGPGGHGGDAGLYGFGGAGGAGGFGQSGAAGGAGGAGGWLYGDGGDGGAGGNGGNESGTGVSGVGGVGGAGGAGGLLFGNGGDGGVGGDGGDGSSTQDSGGDGGAGGAGGAGGWLLGNGGAGGAGGAASIKVATGGLGGDGGDAGLFGFGGDGGWGGRGVDARFGAAGGAAGAGGAGGWLYGDGGAGGVGGVGGAVFSLSSGDVGAGGAGGGGGWLFGNGGDGGAGGGGGGRFGSGSGAGGDGAVGGAGGAGAWFGNGGAGGVGGGGGRGTTAIGGDGGAGGAGGAGGWLYGDGGAGGAGGGGGRGGTGNDGGDGGDGGRGGDAQLLGNGGDGGAGGAGGPAGLALPPGPARPAGAAVPAVRCSAAPARPARTADPWLAPIFARSTLRHSHHLGGIAQTGAVADQQGQIAGLGRAGRQ

SEQ ID NO: 16835 - protein, 356 aa, Candida albicans SC5314
MKAAVVSNPVEPTKLTEVKEIPKPKIQDNEILIKAKAYAINPTDWKHIVFKMSKPGDVAGSDASGIVEEVGSQVTNFKKGDNVSSLVIGNVSPDNGAFAEYFVAKPQATIKYDHDLVSSSESKSSTIDSFEGAASVTVGLVTVGISFAHSLNIAKNKEKGDSILIWGGATATGILAIQVAKLVYNLNVIVTASPKNHEYLKDLGADHTLDYNDADVVSKLQSLGHIKFGLDTISNKDTFQKLYDATAGTPEVFLDSLLLLDGKSIKTDPARNVHWGYTLGYLVVQKEKVLGTQKLVQTPELVNDFNAWWENVLPTIINKVKHANLKILDEGLASANEGLQLSRDNKVSGQKIVFRA

SEQ ID NO: 16836 - protein, 495 aa, Glycine max
  unsure (1)..(495): unsure at all Xaa locations
MDPYKLRPSSAFNSPFWTTNSGAPVWNNNSSLTVGARGPILLEDYHLVEKLANFDRERIPERVVHARGASAXKGFFEVTHDISHLTCADFLRAPGVQTPVIVRFSTVIHERGSPETLRDPRGFAVKFYTREGNFDLVGNNLPVFFVRDGMKFPDMVHALKPNPKNHIQENWRILDFFSHFPESLHMFTFLFDDLGVPQDYRHMDGFGVNTYTLINKAGKAVYVKFHWKTTSGIKCLLEEEAIKVGGANHSHATQDLHDSIAAGNYPEWKLFVQTIDPEHEDKFDFDPLDVTKTWPEDIIPLQPVGRLVLNKNIDNFFAENEQLAFCPAIVVPGVYYSDDKMLQTRIFSYADSQRHRLGPNYLQLPANAPKCAHHNNHHEGFMNFIHRDEEVNYFPSRYDPVRHAETFPIPPGYLXSGRREKCGIEKENNFKQPGERYRSWAXPDRQDRFNRRWVDALSDPRVTHEIRSVXISYWSQADRSLGQKIASRLSMRPNI

SEQ ID NO: 16837 - protein, 625 aa, Bradyrhizobium japonicum USDA 110
MQSRLLSQPSASRVAQFSVDTTPVAAGASLLTMKLETVSVDFTDEQKRYLEGFTTGLQISRVGRGLGGGSGKANAEPTGPDAVHIKAQDKVIASGKKLADQEKFKRDEHPFDAYPRLRQQALDNAPPSPADNFRWRYYGIFYVAPTQDSYMCRLRIPNGIMKHWQLSGLADLADDLCGPYSHVTTRANLQLREIPPKHAVKLIEGIQDLGLCSRGSGADNIRNVTGTPTAGIDPQEIIDTRPFAREWHYHILNDRSLYGLPRKFNVAFDGAGRIAVLEETNDIAFTAFEVKDGFGVEPGVWFRLGLGGITGHKDFAKYSGIIVKPEQATAVADAIVRVFIDHGDRTNRNKARLKYVLDAMGHDGFLKLVEERLKTPFTRVPEEAFAPRPAADRMAHIGVHKQKQDGLNWIGVSLTLGKLTCDQMRSLAKVARDLGDGEIRLTVWQNLLIPGVRDENVELAIAAIKQIGLAVEASHIRAGLIACTGNAGCRFAASNTKRHAAEIGDWCEPRVEMDKPVNIHVTGCHHSCAQHYISDIGLIGARVPVNEDDTVEGYHLFTGGGFGPDADVGQEVYHDLKAEDAPKTVEALLKAYIAHRASPDETFLSFARRHDGETLRKLADAQVSA

SEQ ID NO: 16838 - protein, 294 aa, Zea mays
MLCLSLVAPPPMAPAGRRRRRRHPTSVTRRGQTLAALPCHCGRRHVIGASSAAALLPFLAPPSLAAPPVDPDVVLQRVHPSRPDWYEEFYASAMDQGMKSYEAEIAGYKVKLFSHLSPAGKNILELGVGTGPNFKYYASEDGVNVIGVDPNKHMEKYARAAVVSAGLASSSFTFRRGVAEALPAEDNSMDVVVGTLVLCSVNNIDMALREIKRVLKPGGLYVFIEHVAAPDGTLLRLVQGALDPLQQFVADGCHLTRRTGQSIRDAGFSSLSLDGVRLSNAYIISPHVYGVACK

SEQ ID NO: 16839 - protein, 277 aa, Salmonella enterica
QLPSGSELSLYDIASVTPGVAVDLSHIPTAVKIKGFSGEDATPALEGADVVLISAGVARKPGMDRSDLFNVNAGIVKNLVQQIAKTCPKACVGIITNPVNTTVAIAAEVLKKAGVYDKNKLFGVTTLDIIRSNTFVAELKGKLPTEVEVPVIGGHSGVTILPLLSQIPGVSFTEQEAAELTKRIQNAGTEVVEAKAGGGSATLSMGQAAARFGLSLVRALQGEKGVVECAYVEGDGQYARFFSQPLLLGKNGVEERKSIGTLSAFEQHSLDAMLDTL

SEQ ID NO: 16840 - protein, 225 aa, Glycine max
MKGATCTISNIGSAGGQWFTPVINHPEVAILGIGRIAQKPIVKDGEIVAAPVLALSLSFDHRQIDGAGPGGYVAAIRAAQLGQKVTIVEKGNLGGVCLNVGCIPSKALLHASHRFVEAQNSENLGVIAESVSLNYQKVQEFKTSVVNKLTGGVEGLLKGNKVEIVRGEAYFVDNNSLRVMDEKSAQTYNFKHAIIATGSRPIEIPNFEFGKRVIDDELLYHLIRS

SEQ ID NO: 16841 - protein, 296 aa, Xanthomonas campestris pv. campestris str. ATCC 33913
MMTQRKGIILAGGSGTRLYPITKGVSKQLLPVYDKPMIYYPLSVLMLAGIRDILIINTPHEQALFQSLLGDGAQWGVNIQYAVQPSPDGLAQAYLIGRDFVGGKPSCLVLGDNIFHGHGLTDTLRRADAREQGATVFGYWVNDPERYGVAEFDQHGKVIDIAEKPEKPRSNYAVTGLYFYDGKASDYAAALKPSPRGELEITDLNRCYLDAGDLHLEPLGRGYAWLDTGTHQSLHEAANFIETIQMRQGLQVCCPEEIAFGQGWIDAEQLERLAAPLLKNDYGKYLTALAKRGAVH

SEQ ID NO: 16842 - protein, 483 aa, Proteus mirabilis
  unsure (1)..(483): unsure at all Xaa locations
EKKKLTTAAGAPVVDNNNVITAGPRGPMLLQDVWFLEKLAHFDREVIPERRXHAKGSGAFGTFTVTHDITKYTRAKIFSEVGKKTEMFARFSTVAGERGAADAERDIRGFALKFYTEEGNWDMVGNNTPVFYLRDPLKFPDLNHIVKRDPRTNMRNMAYKWDFFSHLPESLHQLTIDMSDRGLPLSYRFVHGFGSHTYSFINKDNERFWVKFHYRCQQGIKNLMDDEAEALVGKDRESSQRDLFEAIERGDYPRWKLQIQIMPEKEASTVPYNPFDLTKVWPHADYPLMDVGYFELNRNPDNYFSDVEQAAFSPANIVPGISFSPDKMLQGRLFSYGDAHRYRLGVNHHQIPVNAPKCPFHNYHRDGAMRVDGNSGNGITYEPNSGGVFQEQPDFKEPPLSIEGAADHWNHREDEDYFSQPRALYELLSDDEHQRMFARIAGELSQASKETQQRQIDLFTKVHPEYGAGVEKAIKVLEGKDAK

SEQ ID NO: 16843 - protein, 529 aa, Oryza sativa
MAMASLARRRAAEAALLRRAPAAAWASAWRGYAAAAAGEESDVVVIGGGPGGYVAAIKAAQLGLKTTCIEKRGTLGGTCLNVGCIPSKEVMNHFDPFYLAVPSIYYELRSTMGALLHSSHMYHEAKASFAHHGIKFSNLEIDLPAMMSQKDKAVAGLTKGIEGLFKKNKVEYVKGFGKFVSPSEVSVDLLDGGSTTVKGKNIIIATGSDVKSLPGVTIDEKKIVSSTGALALSEIPKKLVVIGAGYIGLEMGSVWNRLGSEVTVVEFASDIVPSMDGEIRKQFQRMLEKQKMKFMLKTKVVGVDTSGSGVKLTVEPAAGGEQSVLECDIVLVSAGRVPYTSGLGLNALGVETDKGGRILVDKRFMTNVKGVYAIGDAIPGPMLAHKAEEDGVACVEFIAGKEGHVDYDTVPGVVYTHPEVASVGKTEEQVKASGVAYQVGKFPLLANSRAKAIDDAEGLVKVVAEKETDRILGVHIMAPNAGEIIHEAVLALQYGASSEDIARTCHAHPTVSEALKEACLQTYLKAIHI

SEQ ID NO: 16844 - protein, 197 aa, Brassica napus
MSASRFAKCVTVGDGAVGKTCLLISYTSNTFPTDYVPTVFDNFSANVVVNGATVNLGLWDTAGQEDYNRLRPLSYRGADVFILAFSLISKASYENVSKKWIPELKHYAPGVPIILVGSKLDLRDDKQFFVDHPGAVPITTAQGEELRKLIDAPTYIECSSKSQENVKAVFDAAIRVVLQPPKQKKKKSKTQKACSIQ

SEQ ID NO: 16845 - protein, 404 aa, Arabidopsis thaliana
MNPKGRTNLNRSIIGGHDHGSILQLLLFLLLLSSHGGFKFVAGQATHGGSDVSGDSSRFDPTMAILMIVLVSVFFFLGFFSVYIRRCLERVMGMDYGNPNDAGNWLATNRQQARGLDASIIETFPTFQYSTVKTLRIGKEALECSVCLNEFEDDETLRLIPKCCHVFHPGCIDAWLRSHTTCPLCRADLIPVPGESIVSIQIPGLVNDPPGSDPNGDRIRSLGSPDARLIESVALTCNQSMPRRSMSTGWNLAGMFTNSDRTGQHSENLDRFTLRLPQDIHNKLVNPNLSKVHVALPQVMSSTRGYRTGSLGSERNYFYYERFGQDGRLDRRPFSITPPYRTSSINHMSPGGSGGDKVRASSPKSLLLAMRSPFDRLFLGKNNNVGENSSDHLRSCDATPSNTV

SEQ ID NO: 16846 - protein, 394 aa, Alvinella pompejana epibiont 7G3
MNLEELDKQFVLQTYARDYTNFVRGENATLFSEDGRDFIDFASGIGVSSVGHGNRRLSDAVCEQVRNIIHISNLQVIEPQVKLAQKICELSGYDGAIFFANSGAEANEGAIKVARKYGEVNFDKKRYKVITLEHSFHGRTISTLKATGQKSFHTPSFSPYPDGFLYVKSIEDIYGSIDDETVAVLIELVQGEGGVEPFSIGEVQNLAKFLRENGILLIVDEVQTGVFRTGEMLASNIYQIEPDIITLAKGLGGGVPIGAILTKHRDILKAGEHGSTFGGNYLSTRAGLEVLSILNGLYESGELKETISYFEERLKGIRERFSNLFSQDVGVGLMRGLRAEEADIPSKVVKSSMDSGLIVLKAGRNTVRFLPPLTISKSEIDKGFERFEKAISSI

SEQ ID NO: 16847 - protein, 146 aa, Triticum aestivum
  unsure (1)..(146): unsure at all Xaa locations
MAPTVMASSATSVAPFQGLKSTAGLPVSRRSNGASLGSVSNGGRIRCMQVWPIEGIKKFETLSYLPPLXTEALLKQVDYLIRSKWVPCLEFSKXGFIFREHNASPGYYHGRYWTMWKLPMFRCTHPTQVINEVEEVXKEYPDPYCH

SEQ ID NO: 16848 - protein, 142 aa, Ustilago maydis 521
MSYFLPHLPTGWHVDQAILSEEDRVVILRFGHDTDPVCMEMDETLYKISTAVQNFAVIYLVDITQVPDFNKMYELYDACSTMFFYRNKHIMIDLGTGNNNKINWAITDRQELIDIVEVVYRGASKGRGLVISPKDYSTRQQY

SEQ ID NO: 16849 - protein, 214 aa, Oryza sativa (indica cultivar-group)
ENKMNRQVTFAKRRNGLLKKAYELSVLCDAEVALIIFSTRGRLFEFSTSSCMYKTLERYRSCNYNLNSCEASAALETELSNYQEYLKLKTRVEFLQTTQRNLLGEDLVPLSLKELEQLENQIEISLMNIRSSKNQQLLDQVFELKRKEQQLQDANKDLKRKIQETSGENMLHIFCQDVGPSGHASEANQEFLHHAICDPSLHIGYQAYMDHLNQ

SEQ ID NO: 16850 - protein, 91 aa, Triticum aestivum
  unsure (1)..(91): unsure at all Xaa locations
MAPTVMASXATSVAPFQGLKSTAGLPVSRRSNGASLXXVSNGGRIRCMQVWPIEGIKKFETLPYLPPLSTXAXLKQVDYLIRSKWXPCLXF

SEQ ID NO: 16851 - protein, 392 aa, Janusia mediterranea
DLEPVNPADVPVTAAGALKSYKLAAKAISRLQSLPSGNISLLCDVLVKEVRDLTGYDRVMVYKFHEDEHGEVVSECRRSDLESYLGLHYPATDIPQASRFLFMKNKVRMICDCLAPSVKVIQDERLPQPLSLCGSTLRSPHGCHAQYMTNMGTIASLVMSVTVNEDDDTMDGDQQQMARKLWGLVVCHHTSPQFVPFPLRYACEFLIQVFGVQITKKVELAAQVREKHILQIQTMLCDMLLRDAPVAIITQSPNVMDLVKCDGAALYFKSKTWFLGVTPTEEQIRDIAEWLLKYHSGNTGLSTDSLMEAGYPGASGLGDAVCGMAAVSITSRDFLFWFRSHTAKEIKWGGAKHDPDDKDDLRKMHPRSSFKAFLEVVKWRSMPWEDMEMDAI

SEQ ID NO: 16852 - protein, 119 aa, Triticum aestivum
MAPTVMASSATSVAPFQGLKSTAGLPVSRRSNGASLGSVINGGRIRCMQVGGVEGLTKFETLSYLPPLSTEALLKQVDYLIRSRWVPCLLFSTVGFIFRVLSASPGFYDGRCWSMWKLP

SEQ ID NO: 16853 - protein, 166 aa, Bordetella bronchiseptica RB50
MNTMYDFSAPTITGAERALADFRGQVALVVNVASRCGFTPQYSGLEELYRSYRNEGFVVLGFPCNQFGRQEPDDEAAIAQFCETQYAISFPLFAKIDVNGAHAHPLYRWLKARKPGLLGTRAIKWNFTKFLVGRDGLPLRRYAPAHTPESLRHDIARACAAPGPTP

SEQ ID NO: 16854 - protein, 392 aa, Janusia linearis
DLEPVNPADVPVTAAGALKSYKLAAKAISRLQSLPSGNISLLCDVLVKEVRDLTGYDRVMVYKFHEDEHGEVVSECRRSDLESHLGLHYPATDIPQASRFLFMKNKVRMICDCLAPPVKVIQDERLPQPLSLCGSTLRSPHGCHAQYMTNMGTIASLVMSVTVNEDDDTMDGDQQQMTRKLWGLVVCHHTSPQFVPFPLRYACEFLIQVFGVQINKEVELAAQVREKHILQIQTMLCDMLLRDAPVAIITQSPNVMDLVKCDGAALYFKNKTWLLGVTPTEEQIRGIAEWLLKYHSGNTGLSTDSLMEAGYPGASGLGDAVCGMAAVSITSRDFLFWFRSHTAKEIKWGGAKHDPDDKDDLRKMHPRSSFKAFLEVVKWRSMPWEDMEMDAI

SEQ ID NO: 16855 - protein, 492 aa, Zea mays
MDPYKHRPSSGSNSSFWTTNSGAPVWNNNSALTVGQRGPILLEDYHLIEKLAQFDRERIPERVVHARGASAKGFFEVTHDVSHLTCADFLRAPGVQTPVIVRFSTVVHERGSPETLRDPRGFAVKFYTREGNFDLVGNNMPVFFIRDGMKFPDMVHAFKPNPKTNLQENWRIVDFFSHHPESLHMFTFLFDDVGIPLNYRHMEGFGVNTYSLINRDGKPHLVKFHWKPTCGVKCLLDNEAVTVGGTCHSHATKDLYDSIAAGNYPEWKLYIQTIDLDHEDKFDFDPLDVTKTWPEDIIPLQPVGRMVLNKNVDNFFAENEQIAFCPAISVPAIHYSDDKLLQTRIFSYADTQRHRLGPNYLMLPVNAPKCAHHNNHHDGFMNFMHRDEEVNYFPSRFDPARHAEKVPIPPRVLTRCREKCIIQKENNFKQAGERYRSFDPARQDRFIQRWVDALTHPRVTHEHRTIWISYWSQCDAALGQKLPSRLNLKPSM

SEQ ID NO: 16856 - protein, 392 aa, Janusia californica
DLEPVNPADVPVTAAGALKSYKLASKAISRLQSLPSGNISLLCDVLVKEVRDLTGYDRVMVYKFHEDEHGEVVSECRRSDLESYLGLHYPATDIPQASRFLFMKNKVRMICDCLAPPVKVIQDERLPQPLSLCGSTLRSPHGCHAQYMTNMGTIASLVMSVTVNEDDDTMDGDQQQMTRKLWGLVVCHHTSPQSVPFPLRYACEFLIQVFGVQINKEVELAAQVREKHILQIQTMLCDMLLRDAPVAIITQSPNVMDLVKCDGAALYFKNKTWLLGVTPTEEQIRGIAEWLLKYHSGNTGLSTDSLMEAGYPGASGLGDAVCGMAAVSITSRDFLFWFRSHTAKEIKWGGAKHDPDDKDDLRKMHPRSSFKAFLEVVKWRSMPWEDIEMDAI

SEQ ID NO: 16857 - protein, 251 aa, Yersinia pestis biovar Medievalis str. 91001
MVDQEKETTHFGFRTVAKEQKEGMVAEVFHSVAAKYDLMNDLMSFGVHRIWKRFTVDCSGVRRGQRVLDLAGGTGDLTAKFSRLVGEQGEVILADINESMLRMGREKLRDKGIVGNVSYVQANAEALPFPDNYFDCITISFGLRNVTEKEKALRSMFRVLKPGGRLLVLEFSKPLLEPLSKAYDAYSFHILPKIGELVAQDAESYRYLAESIRMHPDQETLKGMMADAGFENVTYSNLTGGIVALHRGFKF

SEQ ID NO: 16858 - protein, 420 aa, Lupinus angustifolius
MASVNQSVSVSPTASSDSVFAHLLPAPEDPILGVTVAYNKDPSPVKLNLGVGAYRTEEGKPLVLNVVRRVEQQLVNEASRNKEYLPIVGVADFNKLSARLIFGADSPAIQENRVTTVQCLSGTGSLRVGGEFLARHYHQRTIYIPQPTWGNHPKIFTLAGLSVKTYRYYAPATRGLDFEGLLEDLGSAPSGSIVLLHACAHNPTGVDPTTEQWEQIRKLLRSKALLPFFDSAYQGFASGSLDIDAQAVRLFVADGGELLLAQSYAKNMGLYGERVGALSIVSKSADVASRVESQVKLVVRPMYSNPPIHGASIVAAILRDRDLYNEWTIELKAMADRIIKMRQQLFDALQSRGTPGDWSHIIKQIGMFTFTGLNAEQVSFLTKEYHIYLTSDGRISMAGLSSKTVPHLADAIHAAVTRVV

SEQ ID NO: 16859 - protein, 392 aa, Gaudichaudia mcvaughii
DLEPVNPADVPVTAAGALKSYKLAAKAISRLQSLPSGNISLLCDVLVKEVRDLTGYDRVMMYKFHEDEHGEVVSECCRSDLESYLGLNYPATDIPQASRFLFMKNKVRITCDCLAPSVEVIQDERLTQPLSLCGSTLRSPHGCHAQYMTNMGAIASLVMSVTVNEDDDTMDGDQQHMTRKLWGLVVCHHTSPRFVPFPLRYACEFLIQVFGVQVNKEVELAAQVRERHSLQIQTMLCDMLLREAPVAIITQSPNVMDLVKCDGAALYFKNKTWFLGVTPTEEQIRGIAEWPLKYHSGNTGLSTDGLMEAGYPGASGLGDAVCGMAAVSITSRDFLFWFRSHTAKEIKWGGAKHDPDDKDDLRKMHPRSSFKAFLEVVKWRSTPWEDIEMDAI

SEQ ID NO: 16860 - protein, 398 aa, Bradyrhizobium japonicum USDA 110
MTTATHPYDALMDITARPKAVFVRGAGSYLWDDSRKRYLDFVQGWAVNCLGHSPSAIADALAAQAKRLLTPSPAFYNEPSLKLAQALVANSAFDQVFFANSGAEANEGAIKLARKYGSLHKGGAFEIISFEGGFHGRTLATMSASGKKAFEPLFEPKVAGFKKAKLNDIASVEKLINDNTVAVMLEPIQGESGVWPATDQFLQELRALTKAHGLLLILDEIQTGMGRTGKLFHYEHTGIAPDIMTLGKGIGGGVPLAALLATERAACFEHGDQGGTFNGNPIMCAAGLAVLDEVGKPDFLKSVTETGLLLESELQKVSARHGLGGVRGRGLLLALDLKLPIAPGIVAQAFEAGVLLNAPQVDTLRFMPALNVTRAEIAEMIDCLDAILTKAGAARRVA

SEQ ID NO: 16861 - protein, 257 aa, Synechococcus sp.
MTNQRFKSTDPVNIEGWSWQPFLEDAIKRLEGLNVEPYPVPDRFLQREDQTGSKSKSIPVTTATWACKTEKFRQVRAACVSAGSAASVLNFVINPKSTYGLPFFGGDLVTFPAGHLLALDLQPAIKTDEVHTTHVWDRLIPIFERWRDQLPYGGPIPEEAQPFFSPGFLWTRLPLGEEGDELIQSIVRPAFNDYLDLYLELAASAERVTDERSEVLLQGQRKYTDYRAEKDPARGMLTRFHGSEWTEAYIHTVLFDL

SEQ ID NO: 16862 - protein, 193 aa, Triticum aestivum
  unsure (1)..(193): unsure at all Xaa locations
AGLAAIVLLYSLAFALCPAVLLIRLMGFPAVYSEMPRLLLNLLFLLGHLRRLSSWLLRLVGAGVDDDLCFDYSDASDFADHHQEQYQHQHRDHGLEELEEHSPAVRFDALSAASDGDDGTALLPEGCAVCLGDFHGAARVRRPRGCRHVFHRGCLDRWASHXHHTCPLCRAPLLPPAPASLGPVLLPMPLPAS

SEQ ID NO: 16863 - protein, 251 aa, Brassica oleracea var. italica
MGRGRVEMKRIENKINRQVTFSKRRAGLLKKAHEISILCDAEVSLIVFSHKGKLFEYSSESCMEKVLEHYERYSYAEKQLKVPDSHVNAQTNWSVEYSRLKAKIELLERNQRHYLGEDLESISIKELQNLEQQLDTSLKHIRSRKNQLMHESLNHLQRKEKEILEENSMLAKQIRERESILRTHQNQSEQQNRSHHVAPQPQPQLNPYMASSPFLNMGGMYQGEYPTAVRRNRLDLTLEPIYNCNLGYFAA

SEQ ID NO: 16864 - protein, 392 aa, Aspicarpa hirtella
DLEPVNPADVPVTAAGALKSYKLAAKAISRLQSLPSGNISLLCDVLVKEVRDLTGYDRVMVYKFHEDEHGEVVLECRRSDLESYLGLHYPATDIPQASRFLFMKNKVRMICDCLAPPVKVIQDKRLPHPLSLCGSTLRSPHGCHAQYMTNMGTIASLVMTVTVNEDDDMMDGDQQHMTKKLWGLVVCHHTSLRFVPFPLRYACEFFIQVFGVQINKEVELAAQVREKHILQIQTMLCDLLLRDAPVTIITQSPNVMDLVKCDGAALYFKNTTWLLGVTPTEEQIRGIAEWLLKYHSGNTGLSTDSLMEAGYPGASGLGDAVCGMAAVSITSRDFLFWFRSHTAKEIKWGGAKHNPDDKDDLRKMHPRSSFKAFLEVVKWRSMPWEDIEMDAI

SEQ ID NO: 16865 - protein, 469 aa, Streptomyces coelicolor A3(2)
MTDSSVREFKMPDVGEGLTEAEILKWYVQPGDTVTDGQVVCEVETAKAAVELPIPYDGVVRELHFPEGTTVDVGTSIIAVAVGDGAAAAAEPVQEAVAEEPKPEGRQPVLVGYGVSTSSTKRRPRKGAEAPAAAQTPAAAIQAELNGHGQAAPAAPATPAAPVTGDRPLAKPPVRKLAKDLGVDLATVVPSGPDGIITREDVHAAVSAPEPAQAAAPRSEQAAPAPSPSAPSSYDTTRETRVPVKGVRKATAAAMVGSAFTAPHVTEFVTVDVTRTMKLVEELKQDKEYTGLRVNPLLLIAKALLVAIRRNPDVNASWDEAAQEIVVKHYVNLGIAAATPRGLIVPNIKDAHAQTLPQLAGSLGELVSTAREGKTSPAAMQGGTVTITNVGVFGVDTGTPILNPGESAILAVGAIKLQPWVHKGKVKPRQVTTLALSFDHRLVDGELGSKVLADVAAVLEQPKRLISWA

SEQ ID NO: 16866 - protein, 110 aa, Triticum aestivum
  unsure (1)..(110): unsure at all Xaa locations
MATKRSVGTLGEADLKGKKVFVRADLNVPLDDAQKITDDTRIRASIPTIKYLLEKGAKVILASHLGRPKGVTPKFSLKPLVPRLSELLGLEVVMXPDCIGEEVEKLAAAL

SEQ ID NO: 16867 - protein, 255 aa, Triticum aestivum
MVSPDAIRTVIGVIGNGTALVLFLSPVPTFISIWKKKTVEQYSAVPYLATLLNCMMWVLYGLPLVHPHSMLVITINGTGMLIELTYIALFLTFSVGAARRRVLLLLVAEVAFVAGVAALVLSLAHTHDRRSMVVGILCVLFGTGMYAAPLSVMKMVIQTKSVEYMPLFLSVASLVNGICWTAYALIKFDLYITIPNGLGVMFAVGQIILYAIYYKSTQQILEARKRKADQVPMTEVVVDGKSGSATNSGAANGHY

SEQ ID NO: 16868 - protein, 393 aa, Zea mays
MAPSCYDAAASMLLCAEEHSSILWYDEEEEELEAVGRRRGRSPGYGDDFGADLFPPQSEECVAGLVERERDHMPGPCYGDRLRGGGGCLCVRREAVDWIWKAYTHHRFRPLTAYLAVNYLDRFLSLSEVPDGKDWMTQLLAVACVSLAAKMEETAVPQCLDLQEVGDARYVFEAKTVQRMELLVLTTLNWRMHAVTPFSYVDYFLNKLSNGGSTAPRSCWLLQSAELILRAARGTGCVGFRPSEIAAAVAAAVAGDVDDADGVENACCAHVDKERVLRCQEAIGSMASSAAIDGDATVPPKSARRRSSPVPVPVPVPQSPVGVLDAAPCLSYRSEEAATATATATSAASHGPPGSSSSSSTSPVTSKRRKLASRCDGSCSDRSKRAPAQWTKE

SEQ ID NO: 16869 - protein, 197 aa, Brassica napus
MSASRFVKCVTVGDGAVGKTCLLISYTSNTFPTDYVPTVFDNFSANVVVNGATVNLGLWDTAGQEDYNRLRPLSYRGADVFILAFSLISKASYENVSKKWIPELKHYAPGVPIILVGSKLDLRDDKQFFVDHPGAVAITTAQGEELRKLIDAPTYIECSSKSQENVKAVFDAAIRVVLQPPKQKKKKSKAQKACSIQ

SEQ ID NO: 16870 - protein, 417 aa, Aspergillus oryzae
MSLSNKLAITDVDLKDKRVLIRVDFNVPLDADKKITNNQRIVGALPTIKYAIENGAKAVVLMSHLGRPDGKANPKYSLKPVATELEKLLSKSVIFAENCVGKETEEIVNKATGGQIILLENLRFHAEEEGSSKDAEGKKVKADKEKVEEFRKGLTALGDVYINDAFGTAHRAHSSMVGVDLPQKASGFLVKKELEYFAKALESPQRPFLAILGGAKVSDKIQLIDNLLPKVNSLIITGAMAFTFKKTLENVKIGNSLFDEAGSKIVGDIVEKAKKNNVKIVLPVDYVTADKFAADAKTGYATDADGIPDGYMGLDVGEKSVELYKKTIAEAKTILWNGPPGVFELEPFANATKKTLDAAVAAAQSGSIVIIGGGDTATVAAKYGAEAKLSHVSTGGGASLELLEGKVLPGVDALSSK

SEQ ID NO: 16871 - protein, 162 aa, Marchantia polymorpha
MDIQSEKLLKDTVRRILEHADLNIMNRLKVLLLAAEDSGLHSNLPGYENVVMTVIDDFFRKNGQVPPWSDMPTCVTKEDAGTSQEAETLTCSICLDVVLVQGGDRSITKLVCEHWFHFYCIVSAFIAKGTKQCPNCLACREGALVWCQRIVVRMTIHMLEYL

SEQ ID NO: 16872 - protein, 519 aa, Brassica napus
MSGAITCSAADLATLLGPNATAAADYICGQLGTVNNKFTDAAFAIDNTYLLFSAYLVFAMQLGFAMLCAGSVRAKNTMNIMLTNVLDAAAGGFFYYLFGYAFAFGGSSEGFIGRHNFALRDFPTPTADYSFFLYQWAFAIAAAGITSGSIAERTQFVAYLIYSSFLTGFVYPVVSHWFWSPDGWASPFRSADDRLFSTGAIDFAGSGVVHMVGGIAGLWGALIEGPRRGRFEKGGRAIALRGHSASLVVLGTFLLWFGWYGFNPGSFTKILVPYNSGSNYGQWSGIGRTAVNTTLSGCTAALTTLFGKRLLSGHWNVTDVCNGLLGGFAAITAGCSVVEPWAAIVCGFMTSLVLIGCNKLAELVQYGDPLEAAQLHGGCGAWGLIFVGLFAKEKYLNEVYGATPGRPYGLFMGGGGKLLGAQLVQILVIVGWVSATMGTLFFILKRLNLLRISEQHEMQGMDMTRHGGFAYIYHDNDDESHRVDPGSPFPRSALPLAFNFQLFGNLLPFKYCLGFGFEI

SEQ ID NO: 16873 - protein, 168 aa, Zea mays
ESEALFSRKAGEEITQQLYNFEDRGGRRVVLRPEITPSLARLVIKQGKSVSLPLRWLTIGQCWRYERMTRGRRREHYQWSMDIFGVPKVRAEAELLHAIVLLFQRLGITSSDVGIRVSSRKVLQAVLSMYSIPEHLFTQVCVIVDKLGKMTREEIDDIVFPLDEELEG

SEQ ID NO: 16874 - protein, 430 aa, Chlamydophila pneumoniae AR39
MTVTLPKGVFDIFPYLADAKQLWRHTSLWHSVEKAIHTVCMLYGFCEIRTPIFEKSEVFLHVGEESDVVKKEVYSFLDRKGRSMTLRPEGTAAVVRSFLEHGASHRSDNKFYYILPMFRYERQQAGRYRQHHQFGVEAIGVRHPLRDAEVLALLWDFYSRVGLQHMQIQLNFLGGSETRFRYDKVLRAYLKESMGELSALSQQRFSTNVLRILDSKEPEDQEIIRQAPPILDYVSDEDLKYFNEILDALRVLEIPYAINPRLVRGLDYYSDLVFEATTTFQEVSYALGGGGRYDGLISAFGGASLPACGFGVGLERAIQTLLAQKRIEPQFPHKLRLIPMEPDADQFCLEWSQHLRRLGIPTEVDWSHKKVKGALKAASTEQVSFVCLIGERELISQQLVIKNMSLRKEFFGTKEEVEQRLLYEIQNTPL

SEQ ID NO: 16875 - protein, 643 aa, Shewanella oneidensis MR-1
MCGFAGFFNTSNLTDHARILECMGLELFNRGPDSFGIWFNSDDRIGLVHRRLAIVDLSAAGHQPMTSDSGRYIISYNGEIYNHQELRDELESIRQYNWRGHSDTETLLAAIEQWGLKITLQKATGMFGIALWDTLNKELYLARDRFGEKPVYYGLHKDAFIFASQLNAFRAYPDFKPEINRDSITLLLRHNYIPAPYSIYSDIHKLLPATILKLDSNNNISLETYWSAKDIMSNASSTETDLPVGKQVEALENTLKKAVALQMSADVPLGAFLSGGVDSSLIVSLMQAQSNKPVKTFSIGFDDPRFNEAVFAKEVAKHLGTEHTELYLTAEDALEVIPKLAEIYDEPFSDSSQIPTFLVSKIARQYVTVSLSGDAGDELFCGYNRYLMTSKVWKRLSVLPVFLRSFLANVFTFVPVNVWNLFGKLLPSRLQLSNLGDKLHKAAAVLACRDVEQLYLGLVSHWQNPEQVVLGSKEPLTVLTDPKRKANFSDPILQMMAQDTLSYLTDDILVKVDRAAMAVSLETRVPFLDHSVLEHAWRLSLDLKLRDGKTKWCLREILYKYVPKDLIERPKMGFAVPLDAWLRGPLKVWADNLLAAERLRQEGFFDAELIDRMWQEHKSGKRNWQYQLWDILMFQSWYEKYHK

SEQ ID NO: 16876 - protein, 392 aa, Gaudichaudia albida
DLEPVNPADVPVTAAGALKSYKLAAKAISRLQSLPSGNISLLCDVLVKEVRDLTGYDRVMVYKFHEDEHGEVVSECRRSDLESYLGLHYPATDIPQASRFLFMKNKVRMIYDCLAPPVKVIQDKRLPQPLSLCGSTLRSPHGCHAQYMTNMGTIASLVMSVTVNEDDDTMDGDQQHMTKKLWGLVVCHHTSPRFVPFPLRYACEFLIQVFGVQINKEVELAAQVREKHILQIQTMLCDMLLRDAPVTIITQSPNVMDLVNCDGAALYFKNKTWLLGVTPTEEQIRGIAEWLLKYHSGNTGLSTDSLMEAGYPGASGLGDAVCGMAAVSITSRDFLFWFRSHTAKEIKWGGAKHDPDDKDDLRKMHPRSSFKAFLEVVKWRSMPWEDIEMDAI

SEQ ID NO: 16877 - protein, 171 aa, Pinus thunbergii
MATGAGAGAATVVSAFTGLKSTAQFPSSFKMSNAAAEWEQKTTSNGGRVRCMQVWPPFGNPKFETLSYLPTLTEEQLVKEVEYLLRNKWVPCLEFDLEGSISRKYNRSPGYYDGRYWVMWKLPMFGCTEASQVINEVRECAKAYPKAFIRVIGFDNVRQVQCISFIVHKPE

SEQ ID NO: 16878 - protein, 392 aa, Gallardoa fischeri
DLEPVNPADVPVTAAGALKSYKLAAKAISRLQSLPSGNISLLCDVLVKEVRDLTGYDRVMVYKFHEDEHGEVVSECRRSDLESYLGLHYPATDIPQASRFLFMKNKVRMICDCLAPPVKVIQDEQLPQPLSLCGSTLRSPHGCHAQYMTNMGTIASLGMSVTVNEDDDMMDGDQHQMTRKLWGLVVCHHTSPRFVPFPLRYACEFLIQVCGVQINKEVELAAQVRKKHILQIQTMLCDMLLRDAPVAIITQSPNVMDLVKCDGAALYFKNKIWLLGVTPTEEQIRDIAEWLLKYHSGNTGLSTDSLMEAGYPGASALGDAVCGMAAVSITSRDLLFWFRSHTAKEIKWGGAKHDPDDKDDLRKMHPRSSFKAFLEVVKWRSKPWKDVEMDAI

SEQ ID NO: 16879 - protein, 392 aa, Peixotoa glabra
DLEPVNPADVPVTAAGALKSYKLAAKAISRLQSLPSGNISLLCDVLVKEVRDLTGYDRVMVYKFHEDEHGEVVSECRRSDLESYLGLHYPATDIPQASRFLFMKNKVRMICDCLAPPVQVIQDERLPQPLSLCGSTLRSPHGCHAQYMTNMGTIASLVMSVTVNEDDDTMDGDQQQMTRKLWGLVVCHHTSPRFVPFPLRYACEFLIQVFGVQITKEVELAAQVRKNHTLQIQTMLCDMLLRDAPVAIITQSPNVMDLVKCDGAALYFKNKTWLLGVTPTEEQIRDIAEWLLKYHSGNTGLSTDSLMEAGYPGASTLGDAVCGMAAVSITSRDFLFWFRSHTAKEIKWGGAKHDPDDKDDLRKMHPRSSFKAFLEVVKWRSMPWEDVEMDAI

SEQ ID NO: 16880 - protein, 392 aa, Ryssopterys timorensis
DLEPVNPADVPVTAAGALKSYKLAAKAISRLQSLPSGNISLLCDVLVKEVRDLTGYDRVMVYKFHEDEHGEVVSECRRSDLESYLGLHYPATDIPQASRFLFMKNKVRMICDCLAPPVKVLQDERLPQPLSLCGSTLRSPHGCHAQYMTNMGTIASLVMSVTINEDDDMMDGDQQQMTRKLWGLVVCHHNSPQFVPFPLRYACEFLIQVFGVQINKEVELAAQVREKHILQIQTMLCDMLLRDAPVAIITQSPNVMDLVKCDGAALYFKNKTWLLGVTPTEEQIRDIAQWLLEYHSGNTGLSTGSLMEAGYSGASALGDAVCGMAAVSITLRDFLFWFRSHTAKEVKWGGAKHDPDDKDDLRKMHPRSSFKAFLEVVKWRSMPWEDIEMDAI

SEQ ID NO: 16881 - protein, 148 aa, Glycine max
MKNGIMECRVCHSKLVSPSAKTISRAYDRHKSRISSKQRALNVFLVVGDCVLVGFQPILVYMSKVDGKFNFSPISVNFLTEITKVFFAIVMLLLQARHQKVGEKPLLSISTFVQAARNNVLLAVPALLYAINNYLKFIMQLYFNPATV

SEQ ID NO: 16882 - protein, 392 aa, Sphedamnocarpus sp. Davis 3-01
DLEPVNPADVPVTAAGALKSYKLAAKAISRLQSLPSGNISVLCDVLVKEVRDLTGYDRVMVYKFHEDEHGEVVSECRRSDLESYLGLHYPATDIPQASRFLFIKNKVRMICDCLAPPVKVIQDERLPQPLSLCGSTLRSPHGCHSQYMTNMGTIASLVMPVTINEDDDTMDGDQQQMTRKLWGLVVCHHTSPRFVPFPLRYACEFLIQVFGVQINKEVELAAQVREKHILQIQTMLCDMLLRDAPVAIITQSPNEMDLAKSDGTDLYYKNKTWLLGVTPTEEQIRDIAEWLLQYHSGNTGLSTDSLMEAGYPGASALGDSVCGMAAVSITSRDFLFWFRSHTAKEIKWGGAKHDPDDKDDLRKMHPRSSFKAFLEVVKWRSMPWEDVEMDAI

SEQ ID NO: 16883 - protein, 368 aa, Corynebacterium glutamicum ATCC 13032
MSTVVPGIVALSKGAPVEKVNVVVPDPGANDVIVKIQACGVCHTDLAYRDGDISDEFPYLLGHEAAGIVEEVGESVTHVEVGDFVILNWRAVCGECRACKKGEPKYCFNTHNASKKMTLEDGTELSPALGIGAFLEKTLVHEGQCTKVNPEEDPAAAGLLGCGIMAGLGAAVNTGDIKRGESVAVFGLGGVGMAAIAGAKIAGASKIIAVDIDEKKLEWAKEFGATHTINSSGLGGEGDASEVVAKVRELTDGFGTDVSIDAVGIMPTWQQAFYSRDHAGRMVMVGVPNLTSRVDVPAIDFYGRGGSVRPAWYGDCLPERDFPTYVDLHLQGRFPLDKFVSERIGLDDVEEAFNTMKAGDVLRSVVEI

SEQ ID NO: 16884 - protein, 203 aa, Glycine max
  unsure (1)..(203): unsure at all Xaa locations
GVLLLENPRFYKEEEKNDPEPAKKLASLADLFVNDAFGTAHRAHALTEGVTKYLKPSVAGFFLQKELDYLVGAVSSPKRPFXAIVGGSKVLFKIGVIESLLEKSDILLFGGGMIXTFYNAHGFXVGSFLVEEDKLVLATSLTXKAKEKGVSLLLPSDVVIADKFAPXANSKXVPXSTXPXGXXXPXXXXXLKXFQEXLXXXPH

SEQ ID NO: 16885 - protein, 491 aa, Streptomyces coelicolor A3(2)
MAHASDGHVLEFKLPDLGEGLTEAEIVRWLVEVGDVVAVDQPVVEVETAKAMVEVPCPYGGVVTARFGEEGTELPVGAPLVTVTVGGGGAAADGPARDSGTDAGAAGTPVAGTPAAAAAETSPAAETKAEGSGNVLVGYGTSEAPARRRRVRPGRQAATGASGRANGRVRGAGAVDGPVRTAEPADGPVPVISPLVRRLARQHDLDLRELTGSGPDGLILRADVEYALRAAAAQGGRTADPEAGTGRVPDAAPAAVSSAPRSDGTRVPLKGVRGAVADKLSRSRREIPDATCWVDADATELMRARTAMNASGGPKISLVALLARICTAALARFPELNSTVDTDAREVVRLDRVHLGFAAQTDRGLVVPVVRDAHTRDAEALTAEFARLTEAARAGRLTPGELTGGTFTLNNYGVFGVDGSTPIINHPEAAMLGVGRIVPKPWVHEGELAVRQVVQLSLTFDHRVCDGGTAGGFLRYVADCVEQPAVLLRTL

SEQ ID NO: 16886 - protein, 491 aa, Fusobacterium nucleatum subsp. nucleatum ATCC 25586
MENILKKSYKMFINGEWIDSSNGVMVKSYAPYNNELLSEFPDASESDIDFAIKSAKEAFKTWRKTTVKERARILNKIADIIDENKDLLATVETMDNGKPIRETKLVDIPLAATHFRYFAGCILADEGQATVLDEKFLSLILREPIGVVGQIIPWNFPFLMAAWKLAPALAAGDTVVLKPSSTTTLSLLVLMELIQDVIPKGVVNLVTGKGSTAGEFLKNHPDLDKLAFTGSTAVGRDIALAAAEKLIPATLELGGKSANIILDDADIEKALEGAQLGILFNQGQVCCAGSRIFVQEGIYDEFISKLVKKFENIKIGNPLDPTTIMGSQIDARQVKTILDYVEIAKQEGGVILTGGVKYTENGCDKGNFVRPTLITNVNNGCRVSQEEIFGPVAVVIKFKTDDEVIAQANDSEYGLGGAVFTKNINRALKLAREIQTGRVWINTYNQIPEHAPFGGYKKSGIGRETHKVILEHYTQMKNILIDLEEGTSGLY

SEQ ID NO: 16887 - protein, 355 aa, Spirulina platensis
MTQNYRITLLSGDGIGPEIMAVAVDVLKAVGKQLDLNFEFKEALMGGVAIDATGEPLPEESLQACRDSDAVLLAAIGGYKWDNLPRPERPETGLLALRAGLGLFANRARLLFCPHVLDASSLKREVVEGVDIMVVRELTGGIYFGQPKGIFETETGKNEGSNTMAYGESEIDRIGRVGFETAKKRQGRLCSVDKANVLDVSQLWRDRIMALAADYPEVELSHLYVDNAAMQLVRWPKQFDTIVTGNLFGDILSDAAAMLTGSIGMLPSASLGASPGGVFEPVHGSAPDIAGQDKANPLAQVLSAAMMLRYGLDEPAASDPVEKAVLKVLDWGYPTGDIMSEGMKAVGCRKWGICY

SEQ ID NO: 16888 - protein, 178 aa, Triticum aestivum
  unsure (1)..(178): unsure at all Xaa locations
MAPTVMASSATSVAPFQGLKSTAGLPVSRRSNGASLGSVSNGGRIRCMQVWPIEGIKKFETLSYLPPLSTEALLKQVDYLIXRSKWXVPCLEFNKVGFIFPWSTTHPLGYYDGRLLGQCWKLPMFGVQPDATQVITSGGVKKDYXDAYFRIIGSTTSPSAMLTHASTAQDRKANSIHI

SEQ ID NO: 16889 - protein, 219 aa, Mycobacterium tuberculosis CDC1551
MFDGVARKYDLTNTVLSLGQDRYWRRATRSALRIGPGQKVLDLAAGTAVSTVELTKSGAWCVAADFSVGMLAAGAARKVPKVAGDATRLPFGDDVFDAVTISFGLRNVANQQAALREMARVTRPGGRLLVCEFSTPTNALFATAYKEYLMRALPRVARAVSSNPEAYEYLAESIRAWPDQAVLAHQISRAGWSGVRWRNLTGGIVALHAGYKPGKQTPQ

SEQ ID NO: 16890 - protein, 250 aa, Spinacia oleracea
MSRRYDSRTTIFSPEGRLYQVEYAMEAIGNAGSAIGILAKDGVVLIGEKKVTSKLLQTSTSTEKMYKIDDHVACAVAGIMSDANILINTARVQAQRYTFSYQEPMPVEQLVQSLCDTKQGYTQFGGLRPFGVSFLFAGWDKNYGFQLYMSDPSGNYGGWKATAIGANNQAAQSMLKQDYKDDVTREDAVKLALKALSKTMDSTSLTSEKLELAEVYLLPSGKVKYQVHSPESLNRLLTESGLTQPAAETS

SEQ ID NO: 16891 - protein, 495 aa, Chromobacterium violaceum ATCC 12472
MARSHAEWKQLAAELKIEGRAFINGEYRDAAEGKRFDCVNPANGAKLAEIAHCGEAEVEAAVKAARRAFESGVWSELAPLKRAAVLKRFAALIREHADELSLLETLDVGKPIGDTTAVDVPASAYCVEWFAEAIDKVGGEVVPVDPKLVGLVTREPIGVVAAVVPWNFPILMASWKFGPALAAGNAVIVKPSEKSPLTAIRIAALAKQAGIPDGIFQVLPGAGDVGRLLALHMDVDCVAFTGSTNVGKLIAGYAAQSNLKRAWLELGGKSPNIILPDCPDLARAARAAASGIFYNMGEVCTAGSRVLVHKDIKERFLEEFKKAAAGFFPGDPLDPATSMGAIVDDIQYRKVLNYIDKGLSEGANLLLGGKAVHTDKGLFIEPTAFDCPSDDLTICREEIFGPVLSVITFSELDDAIRIANDTSYGLAAAVWTSNVSTAHQVSRRLRAGTVWVNCYDEGGDMNFPFGGYKQSGNGRDKSLHALEKYTELKSTLIKL

SEQ ID NO: 16892 - protein, 392 aa, Streptomyces coelicolor
MSDSATTDSAGTGGERSASAPGDGTRAVRAGLPEPVKHEPTLPGPVFAAHFHLPGDPTGPYTYGRDENPTWTRLESAIGELEAPGEAGVETLVFASGMAAISSVLFSQLRAGDTAVLRDDGYQALPLVRAQLEAYGIEVRTAPTGRDAQLDVLDGAKLLWIETPSNPGLDVCDVRRLVEAAHAGGALVAVDNTLATPLGQRPLELGADFSVASGTKQLTGHGDVLLGYVAGRDAGAMAAVRRWRKIVGAIPGPMEAWLAHRSIATLQLRVDRQDSTALKVAEALRTRPEITGLRYPGLPDDPSHKVASQQMLRYGCVVSFTLPSRARADRFLDALRLVEGATSFGGVRSTAERRGRWGGDAVPEGFIRLSVGAEDPDDLVADLVRALDETTE

SEQ ID NO: 16893 - protein, 369 aa, Nostoc sp. PCC 7120
MEVKAAIAYGAGKPLTIETVQLEGPKAGEVLVEVKASGVCHTDAYTLSGNDPEGLFPAILGHEGAGVVVDVGAGVTSVKPGDHVIPLYTPECRQCAYCLSFKTNLCQAIRGTQGRGVMPDGTSRFSINGQMIHHYMGTSTFANYTVLPEIAVAKIREDAPFDKVCYIGCGVTTGIGAVIYTAKVEAGANVVVFGLGGIGLNVIQGARMVGANMIVGVDINPSKRALAEKFGMTHFVNPQEVEGDLVAYLVDLTKGGADYSFECIGNVNVMRQALECCHKGWGVSVIIGVAGAGQEISTRPFQLVTGRVWKGSAFGGARGRTDVPKIVDWYMDGKINIDDLITHVMPIEKINDAMDLMHRGESIRSVVTF

SEQ ID NO: 16894 - protein, 304 aa, Shewanella oneidensis MR-1
MELNTQHSTLKTHNTKGIILAGGSGTRLYPITKGVSKQLLPVYDKPMIYYPISVLMLAGIRDILIITTPEDQSSFQRLLGDGSDFGISLQYAVQVTPDGLAQAFIIGEEFIGNDNVCLALGDNIFWGQGFSPILKKAAARPTGASVFGYQVKDPERFGVVEFDQDLKAISIEEKPLKPKSNFAVTGLYFYDNRVVNIAKNVKPSERGELEITSINQAYLEMGKLNVELLGRGFAWLDTGTYESLLEAASFVETIEKRQGYKIACLEEIAWRNHWLSNEQILKVANEMSKNSYGQYLLGLVEIKK

SEQ ID NO: 16895 - protein, 392 aa, Tristellateia madagascariensis
DLEPVNPADVPVTAAGALKSYKLAAKAISRLQSLPSGNISLLCDVLVKEVRDLTGYDRVMVYKFHEDEHGEVVSECRRSDLESYLGLHYPATDIPQASRFLFMKNKVRMICDCLAPPVKVIQDERLPQPLSLCGSTLRSPHGCHAQYMANMGTIASLVMSVTINEDDDTMDGDQQQMARKLWGLVVCHHTSPRFVPFPLRYACEFLIQVFGVQINKELELAAQVREKHILRIQTMLCDMLLRDAPVGIITQSPNVMDLVKCDGAALFYKNKFWLLGITPTEAQIRDIAEWLLEYHSGNTGLSTDSLMEAGYPGASVLGDAVCGMASVSITSRDFLFWFRSHTAKEIKWGGAKHDPDDKDDGRKMHPRSSFKAFLEVVKWRSLPWEDVEMDAI

SEQ ID NO: 16896 - protein, 392 aa, Tristellateia africana
DLEPVNPADVPVTAAGALKSYKLAAKAISRLQSLPSGNISLLCDVLVKEVRDLTGYDRVMVYKFHEDEHGEVVSECRRSDLESYLGLHYPATDIPQASRFLFMKNKVRMICDCLAPQVKVIQDERLPQPLSLCGSTLRSPHGCHAQYMANMGTIASLVMSVTINEDDDTMDGDQQQMARKLWGLVVCHHTSPQFVPFPLRYACEFLIQVFGVQINKEIELAAQVREKHILRIQTMLCDMLLRDAPVGIITQSPNVMDLVKCDGAALFYKNKFWLLGITPTEAQIRDIAEWLLEYHSGNTGLSTDSLMEAGYPGASVLGDTVCGMASVSITSRDFLFWFRSHTAKEIKWGGAKHDPDDKDDGRKMHPRSSFKVFLEVVKWRSLPWEDMEMDAI

SEQ ID NO: 16897 - protein, 376 aa, Bacillus cereus ATCC 10987
MAQKQKCVAMLLAGGKGSRLSALTKNLAKPAVPFGGKYRIIDFTLSNCANSGIETVGILTQYQPLELHNYIGIGNAWDLDRVSGGVTVLPPYAESSGVKWYTGTASAIYQNLNYLSQYEPEYVLILSGDHIYKMDYSKMLDYHIEKEADVSISVIEVPWDEASRFGIMNTNEEMEIVEFEEKPQFPRSNLASMGIYIFNWAILKEYLEMDARNPESSNDFGKDVLPLLLDEGKKLMAYPFEGYWKDVGTVKSLWEANMDLLRDETSLNLNDRNWRIYSVNPNEPPQYIAEKAKVEESLINEGCVIEGDVKHSVLFQGVTVEEGSMVIDSVVMPGAKIGKNVVIERAIVGSEMVIEDGTIIRPEKNVDDVVLIAEGK

SEQ ID NO: 16898 - protein, 455 aa, GIBBERELLA ZEAE PH-1
MDDLHLAPEPHLMHRSLLTRPEAVSSASGVYLNLSSGRKILDGCAGAAVAIIGHGSTEVQDAVVAQASQVSYVHTLTYTTSSAEELADHLLENEPFGLTRAYLVCSGSEAMDSAMKLARQYHVENGQPERTRFVSRRQAYHGNTVGAMSVGSHLARRAPYEGAILLDNVSHVSAAYEYRTKKDGETEEEYSKRLVDELEAEFLSVGPEKIMAFIAETVGGATAGCITPPAGYFSGVSKVCKKYGILLILDEIMCGVGRCGTFFAFEQDGDVQPDMVTIGKGLGGGYMPIAATLVHKGIIETLKKGTASFNHGHTYQAHPVSCAAALAIQKIIRRDNLVSRCATLGERLHKSLVETFKDAEFVGNIRGRGLFWGIEFVQDKKTKMPFDSKIRFGVKVQERAFELGLAVYPGMGTADGLVGDHVIVSPPLTITEEEMDVLVGLLKRAYDDVASKYGV

SEQ ID NO: 16899 - protein, 392 aa, Heladena multiflora
DLEPVNPFDVPVTAAGALKSYKLAAKAISRLQSLPSGNISLLCDVLVKEVRDLTGYDRVMVYKFHEDEHGEVVSECRRSDLESYLGLHYPATDIPQASRFLFMKNKVRMICDCLAPPVKVIQDERLPQPLSLCGSTLRSPHGCHAQYMANMGTIASLVMSVTINEDDDTMDGDQQQMARKLWGLVVCHHTSTQFVPFPLRYACEFLIQVFGVQINKEVELAAQAREKHILQIQTTLCDMLLRDAPVAIITQSPNVMDLVKCDGAALYYKNKFRLLGVTPTEAQIRDIAEWLLEYHSGNTGLSTDSLMEAGYPGASVLGDAVCGMAAVSITSRDFLFWFRSHTAKEIKWGGAKHDPDDKDDGRKMHPRSSFKAFLEVVKWRSLPWEDMEMDAI

SEQ ID NO: 16900 - protein, 384 aa, Bunchosia armeniaca
DVPVTAAGALKSYKLAAKAISRLQSLPSGNISLQCDVLVKEVRDLIGYDRVMVYKFHDDEHGEVVSECCRSDLESYLGLHYPATDIPQASRFLFMKNKVRMICDCLAPPVKVIQDERLPQPLSLCGSTLRSPHGCHAQYMENMGTIASLVMSVTINEDDDMMDGDQQQMARTLWGLVVCHHTSPRFVPFPLRYACEFLIQVFGVQINKEVELAAQVREKQILRIQTMLCDMLLRDAPVAIITQSPNVMDLVKCDGAALYYKNKFWLLGVTPTEAQIRDIAEWLLEYHSGNTGLSTDSLMEAGYPGASVLGDAVCGMAAVSITSRDFLFWFRSHTAKEIKWGGAKHDPDDKDDGRKMHPRSSFKAFLEVVKWRSLPWEDIEMDAI

SEQ ID NO: 16901 - protein, 499 aa, Oryza sativa
  unsure (1)..(499): unsure at all Xaa locations
MEQPNDVGILAMDIYFPPACVHQEALEAHDGASKGKYTIGLGQDCMAYCSEVEDVISMSLTVVASLLKKYNIDPKQIGRLEVGSETVIDKSKSIKTWLMHIFEESGNTDIEGVDSSNACYGGTAALLNCVNWVESKSWDGRYGLVVCTDSAVYAEGPARPTGGAAAIAMLIGPNAPISFESKYRASHMAHVYDFYKPDLASEYPVVDGKLSQTCYLMALDSCYRQYCTKYEKIVGEQFSISDAEYCVFHSPYNKLVQKSFARLYFNDFMRNCSTVDNDAKEKLQPFANLTSEESYQSRDLEKASQQVAKHLYDIKVQPSTLLPKQIGNMYTASLYAALASVIYNKHDSLDDQRILMFSXGSGLTSTMFSLRLQNGQKPFRLINIASVLNATTKLESRHVTLPEKFVETLKLMEHRYGAKDLETCKDTSLLPPGTFYLTRVDSMYRRFYEKKADEGKAKATNGFANGHFRSGTHGSRMIGHLAAEFDKFIIRVFSLEFLK

SEQ ID NO: 16902 - protein, 391 aa, Streptococcus thermophilus
MAERILMTNGKLKVTDNPIIPFIEGDGVGRDIWKNAQAIFDKAVEAAYEGQRRIEWQEFLAGKKAFDKTGEWLPQETLEAIRESLVAIKGPLETPVGGGIRSLNVALRQELDLYACVRPVRYFEGVASPLKEPEKTDITIFRENTEDIYAGIEWEAGTVDVERVIAFFQTEMNVDKIRFPKSSSIGIKPISIEGSKRLIRSAIDYALKNNLKKVTLVHKGNIQKFTEGGFRKWGYEVAEEEYKEEMLAGRLEVNDIIADNFLQQILLNPEKFDVVALTNLNGDYASDALAAQVGGIGISPGANINYQTGHAIFEATHGTAPDIADQDRANPCSILLSGCMLLEYIGWSEAAELIISAIEKNFKSGIFTVDLAFGKRAYSTSGFSNQILSII

SEQ ID NO: 16903 - protein, 392 aa, Thryallis longifolia
DLEPVNPADVPVTAAGALKSYKLAAKAISRLQSLPSGNISLLCDVIVKEVRDLTGYDRVMVYKFHEDEHGEVVSECRRSDLESYLGLHYPATDIPQASRFLFMKNKVRMICDCLAPPVKVIQDERLPQPLSLCGSTLRSPHGCHAQYMANMGTIASLVMSVTINEDDDMMDGDQQQMARKLWGLVVCHHTSPRFVPFPLRYACEFLIQVFGVQINKEVEFAAQVSEKHILRIQTMLCDMLLRDAPVAIITQSPSVMDLVKCDGAALYYKNRFWLLGVTPTEAQIRDIAEWLLEYHSGNTGLSTDSLLEAGYPGASVLGDAVCGMAAVSITSRDFLFWFRSHTAKEIKWGGAKHDPDDKDDGRKMHPRSSFKAFLEVVKWRSLPWEDVEMDAI

SEQ ID NO: 16904 - protein, 310 aa, Malus x domestica
MSTVTLSSGYEMPVIGLGLWRLEKDELKEVILNAIKIGYRHFDCAAHYKSEADVGEALAEAFKTGLVKREELFITTKIWNSDHGHVVEACKNSLEKLQIDYLDLYLVHYPMPTKHNAIGKTASLLGEDKVLDIDVTISLQQTWEGMEKTVSLGLVRSIGLSNYELFLTRDCLAYSKIKPAVSQFETHPYFQRDSLVKFCMKHGVLPTAHTPLGGAAANKDMFGSVSPLDDPVLNDVAKKYGKSVAQICLRWGIQRKTAVIPKSSKIQRLKENLEVLEFQLSDEDMQLIYSIDRKYRTSLPSKTWGLDVYA

SEQ ID NO: 16905 - protein, 462 aa, Arabidopsis thaliana
MSEEQPHANLAVPAFKTEKEPITQTRNGQSSVWRFGGSDKAAKASTVTLRGVIYMLFDNCGKDVNKTILPLGHGDPSVYPCFRTCIEAEDAVVDVLRSGKGNSYGPGAGILPARRAVADYMNRDLPHKLTPEDIFLTAGCNQGIEIVFESLARPNANILLPRPGFPHYDARAAYSGLEVRKFDLLPEKEWEIDLEGIEAIADENTVAMVVINPNNPCGNVYSHDHLKKVAETARKLGIMVISDEVYDRTIFGDNPFVSMGKFASIVPVLTLAGISKGWVVPGWKIGWIALNDPEGVFETTKVLQSIKQNLDVTPDPATIIQAALPAILEKADKNFFAKKNKILKHNVDLVCDRLKDIPCVVCPKKPESCTYLLTKLELSLMDNIKDDIDFCVKLAREENLVFLPGDALGLKNWVRITIGVEAHMLEDALERLKGFCTRHAKKTETETESLQALKLSDNNLEM

SEQ ID NO: 16906 - protein, 277 aa, Salmonella enterica
QLPSGSELSLYDIAPVTPGVAVDLSHIPTAVKIKGFSGEDATPALEGADVVLISAGVARKPGMDRSDLFNVNAGIVKNLVQQIAKTCPKACVGIITNPVNTTVAIAAEVLKKAGVYDKNKLFGVTTLDIIRSNTFVAELKGKRPTEVEVPVIGGHSGVTILPLLSQIPGVSFTEQEAAELTKRIQNAGTEVVEAKAGGGSATLSMGQAAARFGLSLVRALQGEKGVVECAYVEGDGQYARFFSQPLLLGKNGVEERKSIGTLSAFEQHSLDAMLDTL

SEQ ID NO: 16907 - protein, 224 aa, Oryza sativa
  unsure (1)..(224): unsure at all Xaa locations
MTQVSKVTGSHVPNVMVTKSPILLEDYHLIEKLAQFDRERIPERVVHARGASAKGFFEVTHDISHLTCADFLRAPGVQTPVIVRFSTVVHERGSPETLRDPRGLLSSFTLERHMEGFGVNTYTLINKDGKPHLVKFHWKPTCGVKCLLDDEAVTVGGTCHSHATKDLTDSIAAGNYPEWKLYIQTIDPDHEDRFDFDPLDVTKTWPEDIIPLQPVGRXVLNKNI

SEQ ID NO: 16908 - protein, 554 aa, Azotobacter vinelandii
MSYYQQAFDVTSLPSWRALQEHRLAMQNFHMREAFLSDPGRFDEFSTSSCGLFLDYSKNLITPETRDLLVNLAREAGVEQAARAMFDGEPVNASERRPALHTALRRPVGDSLLIDGHNIMRDVHAALAQMTDIVGRIHNKLWRGYSDRAITDVVNIGIGGSYLGPELVSEALLPYTQHGVRCHYLANIDGSEFHELTARLNAETTLFIISSKTFGTLETLKNAQAARTWYLASGGSEERLYRHFIAVTSNIPAAIEFGIREKNIFPMWDWVGGRYSLWSAIGLPTALAIGMANFKDLLSGAYAMDCHFRREPFENNMPVLLAMLGVWYGNFWGAQSHAILPYDHYLRNFVKHLQQMDMESNGKSVRQDGSPVSCETGPVIWGGVGCNGQHAYHQLLHQGTLLIPADFIVPVVSHNPVADHHQWLYANCLSQSQALMLGKSREEAEAELRARGLPEAEVKRLAPHKVIPGNRPSNTLVMETLNPSRLGALIALYEHKVFVQGVIWGINSFDQWGVELGKELGKNVYGRLTSYEAPPAEDSSTQGLIDYFRGRHRG

SEQ ID NO: 16909 - protein, 251 aa, Chromobacterium violaceum ATCC 12472
MSQAMIGIPCDLKMIGLLPFHAVGDKYIAAAAGGAGGLPVLIPSLGDEQLLRATLATLDGVLLPGSPSNVEPRHYGGPNSRAGTLHDPRRDATTLPLIRLALEEGVPLLGICRGFQEINVALGGELHQHVQEEPGLRDHREAEGDDIAAMYAPAHRVGFVEGGLLAEWSGAREAMVNSLHQQGIKRLAPSLIAEAHAEDGLVEAYRVRNSKGFAFAVQWHPEWLYWDNPLSMAIFHAFGEACRARRESRKG

SEQ ID NO: 16910 - protein, 541 aa, Glycine max
  unsure (1)..(541): unsure at all Xaa locations
MDISVSFSKTRPPPFSPSLCRQLSLRPNAPQLLRFSRNNGTFRRKPPPTISRPNKLAVTAIQISNLSENEDDFVLEDVPHLTDFLPNLPSYPNPLQKSQGYSIVKKTFVSPEDVVAENVVIQKGSPRGVHFRRTGPREKVYFKPEEVRACIVTCGGLCPGINTVIREIVCGLNNMYNVEDILGIEGGYKGFYSKNTMMLTPKVVNHIHKCGGTFLRTSRGGHDTHKIVDNIEDRGINQVYIIGGDGTHKGAALIYEEVKKRGLQVAVAGIPKTIDNDIAVIDKSFGFDTAVEEAQRAINAAHVEVESVENGVGIVKLMGRYSGFIAMYATLASRDVDCCLIPESPFYLEGRGGLFEFIEQRLKENGHLVIVVAEGARQEYIAAEVHAADKKDASGNKLLLDIGPWLSDKIKDHFSMSRKMAVNMKYIDPTYMIRAIPSNASDNIYCTLLAHGAVHGAMAGYTGFTVGPVNSKHAYIPIARVTEKQNKVKLTDRMWARLLASTNQPSFVASDQERVEKEXNEYINNMNIASLSRFKCLMGID

SEQ ID NO: 16911 - protein, 1045 aa, Oryza sativa (japonica cultivar-group)
MLPTNKRAAGTDDDRPTDPKRPKVAQNGSTNGVVVPEIDEDLHSRQLAVYGRETMRRLFASHVLVSGLNGLGAEIAKNLALAGVKSVTLHDVKNVEMWDLSANFFLSENDIGKNRAAACVSKLQELNNAVLVSALTEELTTDHLSKFQAVVFTDIGLDKAYEFDDYCHSHCPPISFIKAEVCGLFGTVFCDFGPEFTVLDVDGEDPHTGIIASISNDNPALVSCVDDERLEFQDGDFVVFSEVHGMAELNDGKPRKVKNARPFSFCIEEDTTKYDMYIKGGIVTQIKEPKILRFKSLRDAMRDPGDFLLSDFSKFERSPVLHLAFQALDKFKKEYGRYPAPGCEQDAQSFLKCAADINEALTDHKLDTIDEKLFRHFASGSRAVLNPMAAMFGGIVGQEVVKACSGKFHPLYQFFYFDSVESLPTYPLDSEDIKPSNSRYDAQISVFGSKLQKKLEEANTFVVGSGALGCEFLKNLALMGVSCSPKGKLTITDDDVIEKSNLSRQFLFRDWNIRQAKSTVAAAAASAINPNLCIDALQNRACPDTENVFHDTFWEGLDVVINALDNVNARMYMDMRCLYFQKALLESGTLGAKCNTQMVIPHLTENYGASRDPPEKQAPMCTVHSFPHNIDHCLTWARSEFEGLLEKTPGEVNSFLSNPAQYAAAMRKAGDAQARELLERVSECLGKERCSLFEDCIRWARLKFEDYFSNRVKQLTFTFPEDAATSTGAPFWSAPKRFPRPLQFSVSDPSHIHFIMSASILRAESFGIAIPDWAKNTSKLADAVSEVAVPQFEPKKGVSIVTDEKATSLSSASVDDVSVIDDLLAKLEECAKRLPPGFQMKPIQFEKDDDTNFHMDLISGFANMRARNYSIPEVDKLKAKFIAGRIIPAIATSTAMATGLVCLELYKVIAGEHPIEDYRNTFANLALPLFSMAEPVPPKVMKHQDMSWTVWDRWSIKGNLTVAELLQWFSDKGLTAYSISCGTSLLYNNMFARHKERLNKKVVDVAREVAKVDVPEYRKHLDLVAACEDDDGNDIDIPLVSVYFR

SEQ ID NO: 16912 - protein, 429 aa, Shigella flexneri 2a str. 2457T
MKALNREVIEYFKEHVNPGFLEYRKSVTAGGDYGAVEWQAGGLNTLVDTQGQEFIDCLGGFGIFNVGHRNPVVVSAVQNQLAKQPLHSQELLDPLRAMLAKTLAALTPGKLKYSFFCNSGTESVEAALKLAKAYQSPRGKFTFIATSGVFHGKSLGALSATAKSTFRKPFMPLLPGFRHVPFGNIEAMRTALNECKKTGDDVAAVILEPIQGEGGVILPPPGYLTAVRKLCDEFGALMILDEVQTGMGRTGKMFACEHENVQPDILCLAKALGGGVMPIGATIATEEVFSVLFDNPFLHTTTFGGNPLACAAALATINVLLEQNLPAQAEQKGDMLLDGFRQLAREYPDLVQEARGKGMLMAIEFVDNEIGYNFASEMFRQRVLVAGTLNNAKTIRIEPPLTLTIEQCELVIKAARKALAAMRVSVEEA

SEQ ID NO: 16913 - protein, 667 aa, Mycobacterium tuberculosis CDC1551
MSFVLVSPSQLMAAAADVAGIGSAISAANAAALAPTSVLAAAGADEVSAAVAALFSAHAGQYQQLGARAALFHEQFVQALTGAASAYASAEATNVEQQVLGLINAPTQALWGRPLIGNGADGTAANPNGGAGGLLYGNGGNGFSQTTAGLTGGTGGSAGLIGNGGNGGAGGAGANGGAGGNGGWLYGSGGNGGAGGAGPAGAIGAPGVAGGAGGAGGTAGLFGNGGVGGVGGDGGQGGNGAGAGASGTKGGDAGAGGAGGAGGWIHGHGGAGGDGGAGGAGGQASPGAPGPPSQPGGAGGAGGAGGRGGDGGSAGWLSGNGGDAGNGGGGGTAGGAGNGGQFGGDGGTGGTGGTAGAGGNGGRGAVLFGHGGNAGHGGAGGNGAAAGAGGEHVVATAGKGGTGGVGGDGGGGGAGGGGGLLYGNGGAGGAGNSGGDGGTGLNAALGGNGGGGGVGGNAGAGGTGGSAGWLSGNGGAGGSGGSAGAGGAGGKGGDTPNGLAINPGIGGNGGDTGNAGNGGNGGSAARLFGGGGAGGAGGTGSTAGSGGSGGTNPPTGLQAAGGNGGSGHAGGHGGNGGGAGLLGGGGTGGNGGGGGQGGLGAAAGGVDGNGGNGGNGGKGGDAQLVGDGGNGGNGGKGGAGLIAGLDGAGGAGGTRGLIFGNAGTPGQ

SEQ ID NO: 16914 - protein, 533 aa, Mycobacterium tuberculosis CDC1551
MREMREMSYMIAVPDMLSSAAGDLASIGSSINASTRAAAAATTRLLPAAADEVSAHIAALFSGHGEGYQAIARQMAAFHDQFTLALTSSAGAYASAEATNVEQQVLGLINAPTQALLGRPLIGNGADGTAANPNGGAGGLLYGNGGNGFSQTTAGLTGGTGGSAGLIGNGGNGGAGGAGANGGAGGNGGWLYGSGGNGGAGGAGPAGAIGAPGVAGGAGGAGGSAGLFGNGGAGGAGGAGGQGGAGIGGADGTKGGDAGAGGAGGAGGWIHGHGGVGGDGGTGGQGGDGVQGEPGDTGAAGGAGGAGGRGGDGGSAGWLSGNGGDAGTGGGGGNAGNGGNGGSAGWLSGNGGTGGGGGTAGAGGQGGNGNSGIDPGNGGQGADTGNAGNGGHGGSAAKLFGDGGAGGAGGMGSTGGTGGGGGFGGGTGGNGGNGHAGGAGGSGGTAGLLGSGGSGGTGGDGGNGGLGAGSGAKGNGGNGGDGGKGGDAQLIGNGGNGGNGGKGGTGLMPGINGTGGAGGSRGQISGNPGTPGQ

SEQ ID NO: 16915 - protein, 390 aa, Echinopterys eglandulosa
DLEPVNPADVPVTAAGSLKSYKLAAKAISRLQSLPSGNISLLCDVLVKEVRELTGYDRVMVYKFLEDEHGDVVSECRRSDLESYLGLHYPATDIPQASRFLFMKNKVRMICDCLAPPVKVIQDERLPQPLSLCGSALRSPHGCHAQYMMGTIASLVMSVTINEDDDTMDGDQQQMARKLWGLVVCHHTSPRFVPFPLRYACEFLIQVFGVQINKEVGLAGQVREKHILRIQTMLCDMLLRDAPVAIITQSPNVMDLVMCDGAALYYKNKFWLLGVTPTEAQIRDIAEWLLKYHSQNTGLSTDSLMEAGYPGASVLGDAVCGMAAVSLTSKDFLFWFRSHTAEGIKWGGATHDPDDKDDGRKMHPRLSFKAFLEVVKWRSLPWEDVEMDAI

SEQ ID NO: 16916 - protein, 353 aa, Corynebacterium glutamicum ATCC 13032
MSISVKALQKSGPEAPFEVKIIERRDPRADDVVIDIKAAGICHSDIHTIRNEWGEAHFPLTVGHEIAGVVSAVGSDVTKWKVGDRVGVGCLVNSCGECEQCVAGFENNCLRGNVGTYNSNDVDGTITQGGYAEKVVVNERFLCSIPEELNFDVAAPLLCAGITTYSPIARWNVKEGDKVAVMGLGGLGHMGVQIAAAKGAEVTVLSRSLRKAELAKELGAARTLATSDEDFFTEHAGEFDFILNTISASIPVDKYLSLLKPHGVMAVVGLPPEKQPLSFGALIGGGKVLTGSNIGGIPETQEMLDFCAKHGLGAMIETVGVNDVDAAYDRVVAGDVQFRVVIDTASFAEVEAV

SEQ ID NO: 16917 - protein, 285 aa, Corynebacterium glutamicum ATCC 13032
MKGIILAGGSGTRLYPITKGISKQLMPIYDKPMVYYPLTTLIQAGIKDILIITTPEDSASFERLLGDGSSWGINLTYAVQPSPDGLAQAFIIGEEFIGDDDVALVLGDNIFDGAQLGHALKQCSNPDGGIVFAYEVSDPERYGVVEFDAANKAVSIEEKPTAPKSNFAVVGLYFYDNRVVDIAKSIKPSSRGELEITSVNDAYLQQGALTVQRLDRGDVWLDTGTIDSMSEASSYVEVLQKRTGNIIGSPEVAAYREGFITAEELTVLGEELKKSGYGNYLLRAL

SEQ ID NO: 16918 - protein, 509 aa, Anabaena variabilis ATCC 29413
MSNSELDRVIVRPVDEYNQKLVAYVHPPNWVNPQPADSYDLVVIGAGTAGLVVAAGAAGLGLGLKVALIEKHLMGGDCLNVGCVPSKTIIRSSRVVGEIWNGKNLGINIPSQIDIDFPAVMARMRRIRADISHHDSAERFASLGVDVFLGSGKFASSDIVEVAGKTLKFKKAVIATGARATKPAIIGIEQAGYLTNETVFSLIQRPEKLAVIGGGPIGCELAQAFRRLGSEVVLIHSGSHLLNKEDNDAAQVVQQTLIKEGIRLVLNAKVEEVVTVTEGKRLYFSTNGYRDSVTVDEILVGAGRSPNVEGLNLEAVGVKYDKRRGVEVNDYLQTTNPKIYAAGDICMDWKFTHAADAAARIVIKNTLFSPFGLGRSKLSSLVMPWVTYTDPEIAHVGLYESQDVETIKIPFSSVDRAIADAQEDGFLKIHHKKGSDEIVGATIVATHAGEMISEITTAIVNKIGLNKLSNVIHPYPTQAEAIKKAADTYRRTLLTPRTKKLLGFLTKFS

SEQ ID NO: 16919 - protein, 392 aa, Dicella nucifera
DLEPVNPADVPVTAAGALKSYNLASKAISRLQSLPSGNISLLCDVLVKEVRDLTGYDRVMVYKFHEDEHGDVVSECRRSDLESYLGLHYPATDIPQASRFLFMKNKVRMICDCLAPPVKVIQDERLPQPLSLCGSTLRSPHGCHAQYMTNMGTIASLVMSVTINEEDETMDGDQQQMTRKLWGLVVCHHTSPRFVPFPLRYACEFLIQVFGVQINKEVELAAQVRENHILQIQTMLCDMLLRDAPVAIITQSPNVMDLVKCDGAALYFKNKTWLLGVTPTEKQIRDIAEWLLEYHSGNTGLSTDSLMEAGYPGASVLGDAVCGMAAVSITSRDFLFWFRSHTAKEIKWGGAKHDPDDKDDGRKMHPRSSFKAFLEVVKWRSIPWEDIEMDAI

SEQ ID NO: 16920 - protein, 422 aa, Methylococcus capsulatus str. Bath
MSEKIQAIRGMHDILPDMTPRWQQVEHQIRSVMANYGYREIRLPIVEKTELFKRSIGEVTDIVEKEMYVFEDRNGDSLTLRPEGTAGCLRACLEHGLLHNQTHRLWYAGPMFRHERPQKGRYRQFHQVGVEVFGMPGPDIDAELIFLSRRLWQRLGVAHKLRLELNSLGTPDERLAYRQILVDYLRENYDALDADSARRLETNPLRILDSKNPAMKDLLAGAPVLADHLGGASRAHFEGLTELLDAAEIPYVINPRLVRGLDYYCNTVFEWVTDELGTQGTVCAGGRYDGLVAQLGGRDSSAIGFALGMERLIELTGETFAENAPHIYFITVGTAAERRGAVLAEMLRDAFPSLRLVVNCGGGSFKNQFKRADKSAAAFALVLGEDEMRDDSISLKPLRSDDAQQTVAQADLVRLIQSCVPI

SEQ ID NO: 16921 - protein, 392 aa, Heteropterys thyrsoidea
DLEPVNPADVPVTAAGALKSYKLASKAISRLQSLPSGNISLLCDVLVKEVRDLTGYDRVMVYKFHEDEHGEVVSECRRSDLESYLGLHYPATDIPQASRFLFMKNKVRMICDCLAPPVKVIQDERLPQPLSLCGSTLRSPHGCHAQYMTNMGTIASLVMSVTINEDDDMMDGDQQQMTRKLWGLVVCHHTSPRFVPFPLRYACEFLIQVFGVQINKEVELAAQVREKHILQIQTMLCDMLLRDAPVAIITQSPNVMDLVECDGAALYFKNKTWLLGVTPTEEQIRDIAEWLLEYHSGNTGLSTDSLMEAGYPGASVLGDAVCGMAAVSITSRDFLFWFRSHTAKEIKWGGAKHDPDDKDDLRKMHPRSSFKAFLEVVKWRSMPWEDVEMDAI

SEQ ID NO: 16922 - protein, 476 aa, Yersinia pestis biovar Medievalis str. 91001
MVRFESTDSLMLARQLPNKTVALILAGGRGSRLKDLTATRAKPAVHFGGKFRIIDFALSNCLNSGVRRIGVITQYQSHTLVQHIQRGWSFLNEEMNEFVDLLPAQQRLSTEQWYKGTADAVCQNLDIIRRYDAEYIVILAGDHIYKMDYSRMLLDHVEKGAECTVACIPVPISEGSEFGIMEVTADYQITAFYEKPANPPPIPGDPSNALASMGIYIFNADYLFKLLEEDNNTPGSSHDFGKDIIPQLTARKVVWAHPFDLSCVTSNAELPPYWRDVGTLDAYWRANLDLASVTPELDMYDRAWPIRTHMEPLPPAKFVQDRSGSHGMTMNSLVSGGCIVSGSVVVHSVLFPRVRVNSFCTIDSSLLLPDVHVGRSCRLRRCIIDRACHIPEGMVIGENADEDSARFYRSEGGGGVSDSGYAGKVRGKIEPLGFLFVRLDLLIRLSLLIRLNLFIRMNLLIILTLFFKLASIQASH

SEQ ID NO: 16923 - protein, 396 aa, Bacillus cereus ATCC 10987
MKQFELSRAAESLQPSGIRKFFDLAANMKGVISLGVGEPDFVTPWNVRQACIRSLEQGYTSYTANAGLLELRQEIAKYLKKQFAVSYDPNDEIIVTVGASQALDVAMRAIINPDDEVLIIEPSFVSYAPLVTLAGGVPVPVATTLENEFKVQPEQIEAAITAKTKAILLCSPNNPTGAMLNKSELEEIAVIVEKYNLIVLSDEIYAELVYDEAYTSFASIKNMREHTILISGFSKGFAMTGWRLGMIAAPVHFSELMLKIHQYSMMCAPTMSQFAALEALRAGNDEVIRMRDSYKKRRNFMTTSFNDMGLTCHVPGGAFYVFPSIASTGLSSAEFAEQLLLEEKVAVVPGSVFGESGEGFIRCSYATSLEQLMEAMKRMERFIENKKRTKHNTFCP

SEQ ID NO: 16924 - protein, 381 aa, Heteropterys leona
ETPAGALKSYKLASKAISRLQSLPSGNISLLCDVLVKEVRDLTGYDRVMVYKFHEDEHGEVVSECRRSDLESYLGLHYPATDIPQASRFLFMKNKVRMICDCLAPPVKVIQDETLPQPLSLCGSTLRSPHGCHAQYMTNMGTIASLVMSVTINEDDDMMDGDQQQMTRKLWGLVVCHHASPRFVPFPLRYACEFLIQVFGVQITKEVELAAQVREKHILQIQTMLCDMLLRDAPVAIITQSPNVMDLVKCDGAALYFKNKTWLLGVTPTEEQIRDIAEWLLEYHGGNTGVSTDSLMEAGYPGASILGDAVCGMAAVSITSRDFLFWFRCHTAKEIKWGGAKHDPDDKDDLRKMHPRSSFKAFLEVVKWRSMPWEDIEMDAI

SEQ ID NO: 16925 - protein, 277 aa, Salmonella enterica
QLPSGSELSLYDIAPVTPGVAVDLSHIPTAVKIKGFSGEDATPALEGADVVLISAGVARKPGMDRSDLFNVNAGIVKNLVQQIAKTCPKACVGIITNPVNTTVAIAAEVLKKAGVYDKNKLFGVTTLDIIRSNTFVAELKGKLPTEVEVPVIGGHSGVTILPLLSQIPGVSFTEQEAAELTKRIQNAGTEVVEAKAGGGSATLSMGQAAARFGLSLVRALQGEKGVVECAYVEGDGQYARFFSQPLLLGKNGVEERKSIGTLSTFEQHSLDAMLDTL

SEQ ID NO: 16926 - protein, 392 aa, Tetrapterys microphylla
DLEPVNPADVPVTAAGALKSYKLAAKAISRLQSLPSGNISLLCDVLVKEVRDLTGYDRVMVYKFHEDEHGEVVSECRRSDLESYLGLHYPATDIPQASRFLFMKNKVRMICDCLAPPVKVIQGERLPQPLSLCGSTLRSPHGCHAQYMTNMGTIASLVMSVTINEDDDMMDGDQQQMTRKLWGLVVCHHTSPRFVPFPLRYACEFLIQVFGVQINKEVELAAQVREKHILQIQTMLCDMLLRDAPVAIITQSPNVMDLVKCDGAALYFKNKTWLLGVTPTEEQIRDIAEWLLEYHSGNTGLSTDSLMEAGYPGASVLGDVVCGMAAVSITSRDFLFWFRSHTANEIKWGGAKHDPDDKDDGRKMHPRSSFKAFLEVVKWRSMPWEDVEMDAI

SEQ ID NO: 16927 - protein, 277 aa, Salmonella enterica
QLPSGSELSLYDIAPVTPGVAVDLSHIPTAVKIKGFSGEDATPALEGADVVLISAGVARKPGMDRSDLFNVNAGIVKNLVQQIAKTCPKACVGIITNPVNTTVAIAAEVLKKAGVYDKNKLFGVTTLDIIRSNTFVAELKGKLPTDVEVPVIGGHSGVTILPLLSQIPGVSFTEQEAAELTKRIQNAGTEVVEAKAGGGSATLSMGQAAARFGLSLVRALQGEKGVVECAYVEGDGQYARFFSQPLLLGKNGVEERKSIGTLSAFEQHSLDAMLDTL

SEQ ID NO: 16928 - protein, 185 aa, Azotobacter vinelandii
MSVDLAHIRQVMAEADCLFNHAEVEAAIDRVAVAINAELAEHNPVVFCVMNGGLVFAGKLLPLLGFPLELSYLHATRYRNETRGGDLFWKAKPEIAFIDRDVLIVDDILDEGHTLAAIIDFCRHEGARAVHTAVLVDKRHQRKASPGLKADYVGLSCEDRYIFGYGMDYKGYWRNAAGIYAVKGL

SEQ ID NO: 16929 - protein, 292 aa, Escherichia coli
MKVAVLGAAGGIGQALALLLKTQLPSGSELSLYDIAPVTPGVAVDLSHIPSAVKIKGFSGEDATPALEGADVVLISAGVARKPGMDRSDLFNVNAGIVKNLVQQVAKTCPKACIGIITNPVNTTVAIAAEVLKKAGVYDKNKLFGVTTLDIIRSNTFVAELKGKQPGDVEVPVIGGHSGVTILPLLSQVPGVSFTEQEVADLTKRIQNAGTEVVEAKAGGGSATLSMGQAAARFGLSLVRALQGEKGVVECAYVEGDGQYARFFSQPLLLGKNGVEERKSIGTLSAFEQNAL

SEQ ID NO: 16930 - protein, 241 aa, Staphylococcus aureus subsp. aureus MW2
MADNKANKEQVHRVFQNISKKYDRLNNIISFEQHKVWRKRVMKDMGVRKGTKALDVCCGTGDWTIALSKAVGPTGEVTGIDFSENMLEVGKEKTASMENVKLVHGDAMELPFEDNSFDYVTIGFGLRNVPDYLVALKEMNRVLKPGGMVVCLETSQPTLPVFKQMYALYFKFVMPIFGKLFAKSKEEYEWLQQSTFNFPGKEELKRMFEEAGFINVRVRSFTGGVAAMHLGYKEKDNTKGD

SEQ ID NO: 16931 - protein, 531 aa, Zea mays
MEAVGVTPAPVAAPEKKKLLDLKDPFPAAANGGAKASPAAKWAMKKKLVGGDAGYVLEDVPHLTDYMPQLPTYPNPLQDNPAYSVVKQYFVNPDDTVTQKIVVHKTSARGTHFRRAGPRQRVYFQSDEVNAAIVTCGGLCPGLNTVIRELVCGLYDMYGVSSVVGIEGGYKGFYSKNTVALTPKSVNDIHKRGGTVLGTSRGGHDTAKIVDCLQDRGINQVYIIGGDGTQKGASVIYEEVRRRGLKCSVVGVPKTIDNDIAVIDKSFGFDTAVEEAQRAINAAHVEAESAENGIGVVKLMGRNSGFIAMYATLASRDVDCCLIPESPFYLEGKGGLLEFVERRLKDNGHMVIVVAEGAGQDLIARSMNFVDTQDASGNKLLLDVGLWLSQKIKDHFKKKPSFPITLKYIDPTYMIRAVRSNASDNVYCTLLAHSALHGAMAGYTGFTVAPVNGRHAYIPFYRITEKQNKVVITDRMWARVLCSTNQPCFLSHEDVENMKHDDDEHHHMHNTQLLEGGSSPVSKCNGSAAAV

SEQ ID NO: 16932 - protein, 117 aa, Triticum aestivum
  unsure (1)..(117): unsure at all Xaa locations
MAPTVMASSATSVAPFQGLKSTAGLPVSRRSNGASLGSVSNGGRIRCMQVWPIEGIKXFETLSYLPPLNTEASSSSRLLXVQWVPCLXFNKVGFIFRXEHNASPGXYNGXXWXXWXC

SEQ ID NO: 16933 - protein, 459 aa, Triticum aestivum
MLGARRSFSRLAAAVRTPVDVPRMPAFDHVPLPYDGPSAVEIARKRAEFLSPSLFHFYSKPLNIVEGKKQYLYDEHGRRYLDAFAGIATVCCGHTHPDIIDAITAQANRLQHSTVLYLNHAIADFAEALAAKMPGDLKVVFFTNSGTEANELAIMMARLYTGSHDIISLRNSYHGNASGTMGATAQKNWKFNVVQSGVHHAVNPDPYRGAFGPDGEKYARDVKEIIDFGTTGHVAGFISEAIQGVGGIVEVAPGYLPLAYDAVRKAGGLCIADEVQVGFARVGSHFWGFETHGVIPDIVTMAKGIGNGIPLGAVVTTPEIAQVLTRRSYFNTFGGNPLCTAGGLAVLKVLDRERLQENAFIVGAYLKDRLRGLQEKHQIIGDVRGTGFMLGVELVTDRQLKTPAKDEICQAMEHMKDMGVLVGKGGFYGNVFRITPPLCFTKEDADFFVDVMDIALSKL

SEQ ID NO: 16934 - protein, 825 aa, Psychrobacter sp. 273-4
MLLLSAYCLFCRHHLLFFAYRHLSIRSVMRKIPVYTHPAAGWPALIASTRKLMDYSAFLRGSLSVLSSNQPKGGFDCPGCAWPDHKSHKALDVCETGIKVIASEAMSTRADAQFFAKHTVKELQGWSGYELEHIGRLSEPLYYDAAQDHYIPISWQDAYARIAKQLQKLDSPDEALFYTSGRITNEPAFMFQLFVRCFGTNNLPDCSNMCHEPTSVMLGKQLGIGKATVVLEDFEQAKLIIMFGQNPATNHPRMLEMLAHAHKQGCRILSVNPMREQGLKAFRNPQKPSHMVAGKSDAVVDDVIQIQIGGDAALLTGMAKWLTKNNKMNTDFIEQHTSGLEALDTWLRQQSWADVERGCGISKEEIINLARLVADSPATICTWGMGITQHVQGDDNVAMITNLLLLMGMIGIDGAGASPVRGHSNVQGDRTMGIHERPKQSLLDSLERVFERPMPQEDGLDVIAGAKAMIDGKIKAFVSMGGNYAVAAPDSSAIQQALTNNQLNIFVATKLNETMLYPGVDNLILPCVGRTERLITAKGEQFATIEDSMCQIVATQGRLDPISNTLKSEAQIIADIATQLFGAESSIPWQAMAEDFNVTRDYIAQAIEGFEDFNQRIRAADRGFHLYHPARHRQWNTESGKAQFEVPKYPITYVASQMTERTAKFAADSKQKIDINSDINNAQNNSTSNSQNNTQASEQAVWQLTSVRSHDQFNTMIFGFQDRYRQTDRRDVLFMHPDEMSRLGWQKGDTVMVSRQDSKDQQRTLGPLILTEMDIAANAVATYYPECNDLIDLDTHAPDSKIPAYKSLTVVLQRVSADTRLADSA

SEQ ID NO: 16935 - protein, 464 aa, Chromobacterium violaceum ATCC 12472
MKTIHIDVAVIGAGTAGLAAYRAAKAGGASALIIEGGPYGTTCARVGCMPSKLLIAAAEAAHHAGHTDMFGVHVDGGVRIDGREVMARVRSERDRFVGFVVRSVDGIPAEDKLPGYARFVDNTTLQVDDHTIVQAKRVVIATGSSPAVPAPFKAFGDRLIVNDDVFEWDALPQSVAVFGPGVIGLELGQALSRLGVRVRVFGLGGGVGPLSDPAVRGYARQALSEQFYLDPDAKVLEMANDGDAARIRYVNLDGEEVEERFDYVLAATGRTPNVRSLGLENTSVRLDARGVPLFDPETLLCVGAPVFIAGDANNILPLLHEAADEGKTAGANAAAYPAVSAGLRRSPIAVVFSDPQMMMVGRRFADLPEGDFAVGEVSFEDQGRSRVMGVNKGLLHVYADKATGRFLGAEMIGPRAENLAHLLAWSHQQGLTVEQMLDMPFYHPVIEEGLRTALRDAAAKLARD

SEQ ID NO: 16936 - protein, 1306 aa, Mycobacterium tuberculosis CDC1551
MSFVIATPEMLTTAATDLAKIGSTITAANTAAAAVAKVLPASADEVSVAVAALFGTHAQEYQTVSAQVATFHDRFVQTLSAAASSYVAAEAVNVEQSLLAAVNAPTQALFGRPLIGNGADGSPGTGQAGGPGGILYGNGGNGGSGAPGQRGGAGGAAGLIGNGGNGGAGGVGTTGGAGGHGGAGGWLYGNGGAGGFGGAGAVGGNGGAGGTAGLFGVGGAGGAGGNGIAGVTGTSASTPGGSGTAGGAGGIGGNGGAGGAGGVLMGNGGNGGAGGEGGPGGAGGAGASGAHATNLGADGQAGGNGGNGGAGGTGGVGGPGGGHGLLGLGGSHGAGGAGGSGGDGGAPGDGGNGATGTWGHNLRAGGTGGNGGNPGAGGAGGAGGASVGGSAHGANGAPGTTSTSGGNGGDGGKGADAISSGQTGANGGRGGDGGQVGNGGAGGAGGRGGAGGLGFGSEAPGRPGGAGGTGGAGGNGGTQAGDGGTGGAGGAGGDGGSGGAGSIGFNASAPGAAGSPGGNGGNGGPGGAGGEGGAGGLALAASGQNGSQGAGGDGGAGGNGGTPGNGGHGAAGALGVNGGVGGAGGHGGDPGVGGAGGQGGSGSTPGANGAPGNTPTSGGNGGNGGRGADATGFGQTGASGGRGGDGGLVGNGGAGGAGGNGSKGLPGLGRLGNPGLDGGTGGNGGAGGSGGAWAGNGGTGGAGGTGGVGGTGGSGSDGVNGSSAGADGHPGGTGGVGGTGGKGGDGGDGGAAPNGVAGSQGPGGAGGDGGTGGVGGNGGRGIDGADGATAGARGQDGGAGGAGGKGGRGGTGGPGGAGPAGTTGSQGAGGNGGSGGTGGDPGDGGNGANGSVFTNNGIGGNGGNGGNAGPSGAGGSGGAGSTFGATGSSSSIHVNGGNGGNGGNGDHALSGNGAAGGNGGNGGNGSLRGSGGAGGHGGNGGNASRGMGGDGGTGGAGGNAGQIGNGGAGGNGGDGGTGSDGNPGAITGSGGRGGDGGVGGQGGSVAGDGADGGRGGAGGTGGTGLRGTTGATGATGTFDAGADGHGGNGGTGGVGGTGGAGGGGGNGGAGGKALSPTGNNGSQGAGGDGGAGGAGGTGGTGGDGGRGAHGTLFSSLAGTGGTGGNGGTGGTGGTGGAGGAGGTGSTLGATGATGAAGRAGNGGVGGSGGLGSAFGPGGTGGMGGAGGTSTVSAGGDGGRGGFGGDGLDASSGGNGGDGGHGGDGFRTAGAGGRGGDGGKGADPGGLFPIPGAGGKGGTGGTGGTAHLGPLAIIGQSGQPGQFGSPGADGRGGAGGAGGGGGAGGSF

SEQ ID NO: 16937 - protein, 418 aa, Neurospora crassa
MSLSNKLSIEDVDLKGKRVLIRVDFNVPLDAEKKVTNPQRIAGAIPTIKYALDHGAKAVVLMSHLGRPDRKPNPKYSLKPVVPELEKLLGKKVTFAPDCVGPEVEEIVNKADNGEVILLENLRFHIEEEGKGTDAEGNKVKADKAKVEEFRKNLTKLGDVYINDAFGTAHRAHSSMVGIDLPVKAAGFLMKKELQYFAKVLESPQRPFLSILGGAKVSDKIQLIDNLLDKVNTLIVCGGMAFTFKKTLQNMPIGNSLFDEAGAKIVPDLVKKAEKNNVKLVLPVDFTIADKFDKDANTGYATDKDGIPDGWMGLDCGEESVKLFTQAINESQTILWNPGAGVFEFDKFAKGTKATLDACVKAAEEGRTVIIGGGDTATVAAKYGVEDKLSHVSTGGGASLELLEGKALPGVVALSERQ

SEQ ID NO: 16938 - protein, 359 aa, Schizosaccharomyces pombe
RMRVAIIHVGAPAGGMNSATRAAVRYCLNRGHTPLAIDNGFSGFLRHDSIHELSWIDVDEWCIRGGSEIGTNRDTPDLDMGFTAFKFQQHKIDALIIIGGFEAFTALSQLESARVNYPSFRIPMAIIPATISNNVPGTEFSLGCDTCLNAVMEYCDTIKQSASASRRRVFVCEVQGGRSGYIATVGGLITGASAIYTPEDGISLDMLRKDIDHLKATFALEAGRNRAGQLILRNECASKVYNTKVIGNIISEEVISASPLVPLFPSRPTRCNPTPMDRARAARLAMRAIRFFETCRANDLGNDPSSAVVIGIRGTGVSFSSVADVENNETEIEMRRPKNAWWRDMHNLVNILAGKTFAD

SEQ ID NO: 16939 - protein, 392 aa, Mascagnia anisopetala
DLEPVNPADVPVTAAGALKSYKLAAKAISRLQSLPSGNISLLCDVLVKEVRDLTGYDRVMVYKFHEDEHGEVVSECRRSDLESYLGLHYPATDIPQASRFLFMKNKVRMICDCLAPPVKVIQDERLPQPLSLCGSTLRSPHGCHAQYMTNMGTIASLVMSVTINEDDDMMDGDQQQMTRKLWGLVVCHHTSPRFVPFPLRYACEFLIQVFGVQINKEVELAAQVREKHILQIQTMLCDMLLRDAPVAIITQSPNVMDLVKCDGAALYFKNKTWLLGVTPTEEQIRDIAEWLLDYHSGNTGLSTDSLMEAGYPGASVLGDAVCGMAAVSISSRDFLFWFRSHTAKEIKWGGAKHDPDVKDDGRKMHPRSSFKAFLEVVKWRSMPWEDIEMDAI

SEQ ID NO: 16940 - protein, 392 aa, Mascagnia chasei
DLEPVNPADVPVTAAGALKSYKLASKAISRLQSLPSGNISLLCDVLVKEVRDLTGYDRVMVYKFHEDEHGEVVSECRRSDLESYLGLHYPATDIPQASRFLFMKNKVRMICDCLAPPVEVIQDERLAQPLSLCGSTLRSPHGCHAHYMTNMGTIASLVMAVTINEDDDMMDGDQQQMTRKLWGLVVCHHTSPRFVPFPLRYACEFLIQVFGVQIHKEVELAAQVREKHILQIQTMLCDMLLRDAPVAIIMQSPNVMDLVKCDGAALYFKKKTWLLGVTPTEEQIRDIAEWLLEYHSGNTGLSTDSLMEAGYPGSSALGDAVCGMAAVSITSRDFLFWFRSHTAKEIKWGGAKHDPDVKDDGRKMHPRSSFKAFLEVVKWRSMPWEDIEMDAI

SEQ ID NO: 16941 - protein, 388 aa, Mycobacterium tuberculosis CDC1551
MSEDRTGHQGISGPATRAIHAGYRPDPATGAVNVPIYASSTFAQDGVGGLRGGFEYARTGNPTRAALEASLAAVEEGAFARAFSSGMAATDCALRAMLRPGDHVVIPDDAYGGTFRLIDKVFTRWDVQYTPVRLADLDAVGAAITPRTRLIWVETPTNPLLSIADITAIAELGTDRSAKVLVDNTFASPALQQPLRLGADVVLHSTTKYIGGHSDVVGGALVTNDEELDEEFAFLQNGAGAVPGPFDAYLTMRGLKTLVLRMQRHSENACAVAEFLADHPSVSSVLYPGLPSHPGHEIAARQMRGFGGMVSVRMRAGRRAAQDLCAKTRVFILAESLGGVESLIEHPSAMTHASTAGSQLEVPDDLVRLSVGIEDIADLLGDLEQALG

SEQ ID NO: 16942 - protein, 392 aa, Mascagnia bracteosa
DLEPVNPADVPVTAAGALKSYKLAAKAISRLQSLPSGNISLLCDVLVKEVRDLTRYDRVMVYKFHEDEHGEVVSECRRSDLESYHGLHYPATDIPQASRFLFMKNKVRMICDCLAPPVKVIQDKRLPQPLSLCGSTLRSPHGCHAQYMTNMGTIASLVMSVTVNEEDDMMDGDQQQMTRKLWGLVVCHHTSPRFVPFPLRYACEFLIQVFGVQINKEVELAAQVREKHILQIQTMLCDMLLRDAPVAIITQSPNVMDLVKCDGAALYFKNKTWLLGVTPTEEQIRDIAEWLLEYHSGNTGLSTDSLMEAGYPGASVLGDAVCGMAAVSITSRDFLFWFRSHTAKEIKWGGAKHDPDDKDDGRKMHPRSSFKAFLEVVKWRSMPWDDVEMDAI

SEQ ID NO: 16943 - protein, 166 aa, Zea mays
LQNFKHRAGFWSAMASNVTFQSRNVLSKKLMVKKEESLDNINLFSIITVMSFFLLAPVTLLTEGVKVSPAVLQSAGLNLKQIYTRSLIAACCFHAYQQVSYMILARVSPVTHSVGNCVKRVVVIVTSVLFFRTPVSPINSLGTGIALAGVFLYSQLKRLKPKPKAA

SEQ ID NO: 16944 - protein, 393 aa, Mascagnia stannea
VIEPVNPADVPVTAAGALKSYKLAAKAISRLQSLPSGNISLLCDVLVKEVRDLTGYDRVMVYKFHEDEHGEVVSECRRSDLESYLGLHYPATDIPQASRFLFMKNKVRMICDCLAPPVEVIQDERLPQPLSLCGSTLRSPHGCHAQYMTNMGTIASLVMSVTINEDDDMMDGDQQQQMTRKLWGLVVCHHTSPRFVPFPLRYACEFLIQVFGVQINKEVELAAQVREKHILQIQTMLCDMLLRDAPVAIITQSPNVMDLVKCDGAALYFKNKTWLLGVTPTEEQIRDIAEWLLEYHSGNTGLSTDSLMEAGYPGASVLGDGVCGMAAVSITSRDFLFWFRSHTAKEIKWGGAKHDPGDKDDGRKMHPRSSFKAFLEVVKWRSMPWEDVEMDAI

SEQ ID NO: 16945 - protein, 361 aa, GIBBERELLA ZEAE PH-1
MSVQIPSQQRAAVRQGSGPDARAPIKTVPVPSPGPGQILVKVNWTGLCGSDKSLLHDEWSDFGICMKDVTNGIAGHEGAGSVVAVGQGMEQRWKIGDRAGVKWIASVCGECDFCMVGSDEVHCPEQTNSGFSVPGTFQEYVVADGKYSSKLPDGVTDEEAGPIMCGGVTAYTACKRSGVTPGQWLVIPGAGGGLGHFAIQYAKAMGMRVIAIDGGDEKRDLCLKLGAEVFIDFKTTKDIATQVLKVTTHGAHGVIVTAATRAAYESAPNYLRPNGTVVAVGLPQDPTVLAGAPPMLVALRRLKIVGSVTGSMKDVEEALEFTARGLVHPILSKGKLEDLDDWVHKLATGQVAGRCVLKVAA

SEQ ID NO: 16946 - protein, 392 aa, Hiptage benghalensis
DLEPVNPADVPVTAAGALKSYKLASKAISRLQSLPSGNISLLCDVLVKEVRDLTGYDRVMVYKFHEDEHGEVVSECRRSDLGSYLGLHYPATDIPQASRFLFMKNKVRMICDCLAPPVKVIQDERLPQPLSLCGSTLRSPHGCHAQYMTDMGTIASLVMSVTINEDDDMMDGDQQQMARKLWGLVVCHHTSPRFVPFPLRYACEFLIQVFGVQINKEVELAAQVREKHILQIQTMLCDMLLRDAPVAIITQSPNVMDLVKRDGAALYFKNKTWLLGVTPTEEQIRDIAEWLLEYHSGNTGLSTDSLMEAGYPGASVLGDAVCGMAAVSITSRDFLFWFRSHTAKEIKWGGAKHDPDDKDDGRKMHPRSSFKAFLEVVKWRSMPWEDVEMDAI

SEQ ID NO: 16947 - protein, 129 aa, Glycine max
MSTKKIVLKSSDNESFEVDEAVARESQTLAHMVEDDCTDNGIPLPNVTGKILAKVIEYCKKHVDAAAAKTEAAADGGASSDDDLKAWDAEFMKIDQATLFELILAANYLNIKNLLDLTCQTVADMIKGK

SEQ ID NO: 16948 - protein, 277 aa, Salmonella enterica
QLPSGSELSLYDIAPVTPGVAVDLSHIPTAVKIKGFSGEDATPALEGADVVLISAGVARKPGMDRSDLFNVNAGIVKNLVQQIAKTCPKACVGIITNPVNTTVAIAAEVLKKAGVYDKNKLFEVTTLDIIRSNTFVAELKGKLPTEVEVPVIGGHSGVTILPLLSQIPGVSFTEQEAAELTKRIQNAGTEVVEAKAGGGSATLSMGQAAARFGLSLVRALQGEKGVVECAYVEGDGQYARFFSQPLLLGKNGVEERKSIGTLSAFEQHSLDAMLDTL

SEQ ID NO: 16949 - protein, 399 aa, Azotobacter vinelandii
MAIDIKAPTFPESIADGTVATWHKKPGEAVKRDELIVDIETDKVVMEVLAEADGVIAEIVKNEGDTVLSGELLGKLTEGGAATAAPAAAPAPAAAAPAAAEAPILSPAARKIAEENAIAADSITGTGKGGRVTKEDAVAAAEAKKSAPAGQPAPAATAAPLFAAGDRVEKRVPMTRLRAKVAERLVEAQSSMAMLTTFNEVNMKPVMELRAKYKDLFEKTHNGVRLGFMSFFVKAAVEALKRQPGVNASIDGNDIVYHGYQDIGVAVSSDRGLVVPVLRNAEFMSLAEIEGGINEFGKKAKAGKLTIEEMTGGTFTISNGGVFGSLLSTPIVNPPQTAILGMHKIQERPMAVNGQVVILPMMYLALSYDHRLIDGKEAVTFLVTMKDLLEDPARLLLDV

SEQ ID NO: 16950 - protein, 278 aa, uncultured bacterium
QPNAMGGREVGGLANQLAAHLYFEDDKEIDLVKRFWQAPNMATQQGLKAVDMFNAVDEGKIKAIWIIATSPVVSMPNANLIKRALKKCPMVVLNECYEGSDTIKYADVILPATTWGEKHGSVTNSDRTISIQRGMVTAPGEARNDWQIVCEVAKKMGFKNAFDYKHSVEIFREHAAISGFENSHPTTVNRSDNDIYRVFDISALAQISNEAYDNFTPTKWPININNPYGTQRLYSDNVFTHKSTKANFIAITPRLPFYAPTEHQVIMNTGRIRDQWHT

SEQ ID NO: 16951 - protein, 164 aa, Glycine max
  unsure (1)..(164): unsure at all Xaa locations
FSRPARRYDTRATIFSPEGRLYQVEYAMEAIGQAGTCLGIRAPDGIFIAAQKLTANKLLDDRIMSEKIYKVSANIFCTAAGITSDANVLVDKLREMAVMNTLDFGENIPVEQLVIRLCNTKQHYTQVGGKRPYGVSLLYAGWDTHHGFEIYQSDPXGNYXGWKA

SEQ ID NO: 16952 - protein, 268 aa, uncultured bacterium
QPNAMGGREVGGLANMLAAHMDYNEENTSTVSEFWDTKNLTKTPGLKAVDLFEAVADGRIKAIWIMGTNPVVSMPDADRVRAALQACDTVIVSDCVADTDTTATANILLPASGWGGKSGTVANSERRISRQRALVKPVDQAKSDWWIISQVGQAMGFNNAFDYHSPRDIFIEHAKLSGFKNTGNRLFNISTLSHLSEQQYNQLEPIQWPVTPLKPKGAARLFEDKLFFTPSKKANFVVINPQLPQCHTPSDDFPLTLNTGRIRDQWHT

SEQ ID NO: 16953 - protein, 463 aa, Arabidopsis thaliana
MSKASDAVREPLVDKNMAGSKPDQPWMVYLSTFVAVCGPFAFGSCAGYSSPAQAAIRNDLSLTIAEFSLFGSLLTFGAMIGAITSGPIADLVGRKGAMRVSSAFCVVGWLAIIFAKGVVALDLGRLATGYGMGAFSYVVPIFIAEIAPKTFRGALTTLNQILICTGVSVSFIIGTLVTWRVLALIGIIPCAASFLGLFFIPESPRWLAKVGRDTEFEAALRKLRGKKADISEEAAEIQDYIETLERLPKAKMLDLFQRRYIRSVLIAFGLMVFQQFGGINGICFYTSSIFEQAGFPTRLGMIIYAVLQVVITALNAPIVDRAGRKPLLLVSATGLVIGCLIAAVSFYLKVHDMAHEAVPVLAVVGIMVYIGSFSAGMGAMPWVVMSEIFPINIKGVAGGMATLVNWFGAWAVSYTFNFLMSWSSYGTFLIYAAINALAIVFVIAIVPETKGKTLEQIQAVVNP

SEQ ID NO: 16954 - protein, 268 aa, uncultured bacterium
QPNAMGGREVGGLANMLAAHMDYNEENTSTVSEFWDTKNLTKTPGLKAVDLFEAVADGRIKAIWIMGTNPVVSMPDADRVRAALQACDTVIVSDCVADTDTTATANILLPASGWGEKSGTVTNSERRISRQRALVKPVDQAKSDWWIISQVGQAMGFNNAFDYHSPRDIFIEHAKLSGFKNTGNRLFNISTLSHLSEQQYNQLEPIQWPVTPLKPKGTARLFEDKLFFTPSKKANFVVINPQLPQCHTPSDDFPLTLNTGRIRDQWHT

SEQ ID NO: 16955 - protein, 268 aa, uncultured bacterium
QPNAMGGREVGGLANMLAANMDYNEENTSTVSEFWDTKNLTKTPGLKAADLFEAVADGRIKAIWIMGTNPVGSMPDADRVRAALQACDTVIVSDCVADTDTTATANILLPASGWGEKSGTVTNSERHISRQRALVKPVGQAKSDWWIISQVGQAMGFNNAFDYHSPRDIFIEHAKLSGFKNTGNRLFNISTLSHLSEQQYNQLEPIQWPVTPLKPKGTARLFEDKLFFTPSKKANFVVINPQLPQCQTPSDDFPLTLDTGRIRDQWHT

SEQ ID NO: 16956 - protein, 584 aa, Zea mays
  unsure (1)..(584): unsure at all Xaa locations
MGLFTVTKKATTPFDGQKPGTSGLRKKVTVFQQPHYLQNFVQSTFNALPVDQVRGATIVVSGDGRYFSKDAVQIITKMAAANGVRRVWVGQNSLMSTPAVSAVIRERVGADGSKATGAFILTASHNPGGPKEDFGIKYNMGNGGPAPESVTDKIFSNTTTISEYLISEDLPDVDISVVGVTSFSGPEGPFDVDVFDSSVDYIKLMKTIFDFEAIKKLLTSPKFTFCYDALHGVAGAYAKHIFVXELGADESSLLNCVPKEDFGGGHPDPNLTYAKELVERMGLGKSSSNVEPPEFGAAADGDADRNMILGKRFFVTPSDSVAIIAANXAVQSIPYFASGLKGVARSMPTSAALDVVAKNLNLKFFEVPTGWKFFGNLMDAGMCSICGEESFGTGSDHIREKDGIWAVLAWLSIIAFKNKDNLGGDKLVTVEDIVRQHWATYGRHYYTRYDYENVDAGAAKELMANLVSMQSSLSDVNKLVKEIRSDVSEVVAADEFEYKDPVDGSVSKHQGIRYLFGDGSRLVFRLSGTGSVGATIRVYIEQYERDSSKTGRDSQDALAPLVDVALKLSKMQEYTGRSAPTVIT

SEQ ID NO: 16957 - protein, 268 aa, uncultured bacterium
QPNAMGGREVGGLANMLAAHMDYSVENTATVREFWNTKNLSQTPGLNAVDLFEAVADGRIKAIWIMGTNPVGSMPNADRVRAALQSCDTVIVSDCMADTDTTATANILLPATGWGEKSGTVTNSERRISRQRALIHPVGQARSDWWIISQVGQAMGFNDAFDYHSPQRYFYRTCPTKCVKNTGNRLFNISTLSHLSEQQYNQLEPIQWPVTPLKPKGTARLFEDRLFFTPSKKANFVVISPQLPQLHTPNNDFPLTLNTGRIRDQWHT

SEQ ID NO: 16958 - protein, 181 aa, Glycine max
  unsure (1)..(181): unsure at all Xaa locations
GCYISSAKGFLHIVEYPLDINQGFDIPSAIISFPDFHAGLQFSDKSQSKSPLLSKLQERSPVLSYTEVLLXVPLTTPDFSMPYNVITITCTVFALYFGSLLNVLQRRVGEEERLLKDKVANKAVFLRRVLSKLSAKLRGRSLELTPPAPSWSSSSSFVTPKLILRVLVVAGIAFAWQYYSQ

SEQ ID NO: 16959 - protein, 392 aa, Callaeum septentrionale
DLEPVNPADVPVTAAGALKSYKLAAKAISRLQSLPSGNISLLCDVLVKEVRDLTGYDRVMVYKFHEDEHGEVVSECRRSDLESYLGLHYPATDIPQASRFLFMKNKVRMICDCLAPPVKVIQDERLPQPLSLCGSTLRSPHGCHAQYMTNMGTIASLVMSVTINEDDDMMDGDQQQMTRKLWGLVVCHHTSPRFVPFPLRYACEFLIQVFGVQINKEVELAAQVREKHILQIQTMLCDMLLRDAPVAIITQSPNVMDLVKCDGTALYFKNKTWLLGVTPTEEQIRDIAEWLLEYHSGNTGLSTDSLMEAGYPGASVLGDAVCGMAAVSITSRDFLFWFRSHTAKEIKWGGAKHDPDEKDDGRKMHPRSSFKAFLEVVKWRSMPWEDIEMDAI

SEQ ID NO: 16960 - protein, 392 aa, Mascagnia hippocrateoides
DLEPVNPADVPVTAAGALKSYKLAAKAISRLQSLPSGNISLLCDVLVKEVRDLTGYDRVMVYKFHEDEHGEVVSECRRSDLESYLGLHYPATDIPQASRFLFMKNKVRMICDCLAPPVKVIQDERLPQPLSLCGSTLRSPHGCHAQYMTNMGTIASLVMSVTINEDDDMMDGDQQQMTRKLWGLVVCHHASPRFVPFPLRYACEFLIQVFGVQINKEVELAAQVREKHILQIQTMLCDMLLRDAPVAIITQSPNVMDLVKCDGAALYFKNKIWLLGVTPTEEQIRDIAEWLLEYHSGNTGLSTDSLMEAGYPGASVLGDAVCGMAAVSITSRDFLFWFRSHTAKEVKWGGAKHDPHDKDDGRKMHPRSSFKAFLEVVKWRSMPWEDIEMDAI

SEQ ID NO: 16961 - protein, 401 aa, Chlamydomonas reinhardtii
MASLLGRKACIPATCVQKSLTPPAPLRLGLACSALQRHQVQTAIASRVARQQEENGRAAAIVPRQRTVCQAAAVPADGESDKGKDMSGMMVLGLMFVAWYGTNIFFNIYNKQLFKVFPFPLTTTNIQFFIGSCLSMVFWVTGIVKLPKIDMALVKSIYPLAIINVLGNVLTNVSLGHVAVSFTHTVKAMEPFFSVIFSAIFLGDVPPVPVLLTLVPIVGGVVIASLTEATFNWTGFLSAIFSNMTFQSRNVLSKKLMIKKGAVDNMNLFQIITIMSFLMLLPVSTMVEGGAALLTPESLANLGLNEAAREQMFMRLLSAGICFHSYQQLSYMILSRVAPVTHSIGNCVKRVVVIVASLIAFQNPISMQNAIGTGIALFGVFLYSQAKRKYKGKGDVKPEAA

SEQ ID NO: 16962 - protein, 392 aa, Hiraea fagifolia
DLEPVDPADVPVTAAGALKSYKLAAKAISRLQSLPSGNISLLCDVLVKEVRDLTGYDRVMVYKFHEDEHGEVVSECRRPDLESYLGLHYPATDIPQASRFLFMKNKVRMICDCLAPPVKVIQDKRLPQPLSLCGSTLRSPHGCHAQYMTNMRTIASLVMSVTINEDDDTMDGDQQQMTGKLWGLVVCHHTSPRFVPFPLRYACEFLIQVFGVQINKEVELAAQVREKHILQIQTMLCDMLLRDAPVAIITQSPNVMDLVKCDGAALYFKNKIWLLGVTPKEEQIRDIAEWLLEYHSGNTGLSTDSLMEAGYPGASVLGDAVCGMAAVSITSRDFLFWFRSHTAKEIKWGGAKHDPGDKDDGRKMHPRSSFKAFLEVVKWRSMPWEDVEMDAI

SEQ ID NO: 16963 - protein, 201 aa, Triticum aestivum
MECKDVGILAMDMYFPPTCVQQEALEVHDGASKGKYTIGLGQDCMAFCSEVEDVISMSLTVVKSLLEKYHIDPKLIGRLEVGSETVIDKSKSIKTWLMQIFEESGNTDIEGVDSSNACYGGTAALLNCVNWVESRCWDGRYGLVVCTDSAVYAEGPARPTGGAAAIAMLIGPNAPISFESKYRASHMAHVYDFYKPDLASE

SEQ ID NO: 16964 - protein, 392 aa, Ectopopterys soejartoi
DLEPVNPADVPVTAAGALKSYKLAAKAISRLQSLPSGNISLLCDVLVKEVRDLTGYDRVMVYKFHEDEHGEVVSECRRSDLESYLGLHYPATDIPQASRFLFMKNKVRMICDCMAPPVEVIQDERLPQPLSLCGSTLRSPHGCHAQYMTNMGTTASLVMSVTINEDDHMMDGDQQQMTKKLWGLVVCHHTNPRFVPFPLRDACEFLIQVFGVQINKEVELAAQVREKHILQIQTMLCDMLLRDAPVAIITQSPNVMDLVKCDGAALYFKNKTWLLGVTPTEEQIRDIAEWLLEYHSGNTGLSTDSLMEAGYPGASALGDAVCGMAAVSITSRDFLFWFRSHTAKEIKWGGAKHDPDDKDDGRKMHPRSSFKAFLEVVKWRSMPWEDVEMDAI

SEQ ID NO: 16965 - protein, 393 aa, Prochlorococcus marinus subsp. pastoris str. CCMP1378
MSEVNLSKRALSIEPSLTLQISAKANQLAKEGKDICNLSAGEPDFDAPNEILKATSEAIFDGYTKYGPASGDLELRKAIAEKLQTQNNLNVEYENVMVTNGAKQSIYNLFQVLLNDGDEVIIPAPYWLSYPQMVRLAGGKPVFLNSSAEDGFKINIQDLKSKISPKTKFIIINSPNNPTGRVMPKEELLQIAELVRENKNINILSDEIYELILKKEFKHLSLASLATDLKERIFIINGFAKGWAMTGWRVGYLVGQKDVIKASSALQSQSTSNVCSFVQRGALEALKINREFFLEINSHYDLRREVLYKGLKNIEGLFISPPNGAFYAFPRLPNNSMTSVEFCKRILNDYGLVVVPGKPFGDDQCIRISCASSKEKILDGLTRLEKGILNYYF

SEQ ID NO: 16966 - protein, 303 aa, Streptomyces coelicolor A3(2)
MTQSHPRISKAVIPAAGLGTRFLPATKATPKEMLPVVDKPAIQYVVEEAVTAGLGDVLMVTGRNKRPLEDHFDRNYELESALQKKGDASRLAKVQESSDLAMMHYVRQGDPKGLGHAVLCAAPHVGHEPFAVLLGDDLIDPRDPLLQRMIDVQEQYGGSVIALMEVAPEQIHLYGCAAVESTADSDVVKVGGLVEKPDPADAPSNYAIIGRYVLDPHVFDILRKTEPGRGGEIQLTDALQQLAEDESVGGPVHGVVFKGRRYDTGDRGDYLRAIVRLACEREDLGPDFRTWLRSYVAEEMQGR

SEQ ID NO: 16967 - protein, 392 aa, Stigmaphyllon paralias
DLEPVNPADVPVTAAGALKSYKLAAKAISRLQSLPSGNISLLCDVLVKEVRDLTGYDRVMVYKFHEDEHGEVVSECRRSDLESYLGLHYPATDIPQASRFLFMKNKVRMICDCLAPPVKVIQDERLPQPLSLCGSTLRSPHGCHAQYMTNMGTIASLVMSVTINEDDDTMDGDQQQMTRKLWGLVVCHHTSPRFVPFPLRYACEFLIQVFGVQINKEVELAAQIREKHILQIQTMLCDMLLRDAPVAIITQSPNVMDLVKCDGAALYFKNKTWLLGVTPTEEQIRDIAQWLLEYHSGNTGLSTDSLMEAGYPGASALRDAVCGMAAVSITSRDFLFWFRSHTAKEVKWGGAKHEPDDKDDLRKMHPRSSFKAFLEVVKWRSMPWEDVEMDAI

SEQ ID NO: 16968 - protein, 1118 aa, Cyrtosia septentrionalis
  unsure (1)..(1118): unsure at all Xaa locations
MSFSRPSQSSSASSRSRQSARIIAQTTVDAKLDAEFDAMGTCFDYSQSIRAPPDEQRSEKVTAYLQHIQRGKLIQPFGCLLALDEKTFKVLAFSENAPEMLTMVSFTVPSVGDHPTIVIGTDVRNLFTSPSTAALQKALGFAEVSLLNPILVHCKSSGRPFYAIVHRVTGCLIVDFEPVKPNDVPMTAAGALQSYKLAAKAISKLQSLPSGSMEKLCNTVIEEVFELTGYDRVMVYKFHEDDHGEVFAEITKPGLESYFGLHYPATDIPQAARFLFMKNKVRMICDCHAKHVKVYQDKKLPFDISFCGSTLRAPHSCHLQYMENMNSIASLVMAVVVNEGEEDGGNEAEENSPPHRRKRLWGLVVCHNESPRFVPFPLRYACEFLMQVFAIHVNKEFELENLVKEKKIMRTQTMLCDMLLREFVPLGIITQTPNIMDLVKCDGAAFLYQDKIWRLGVTPSEPQIYDIVHWLSACHMDSTGLSTDNLHEAGYPGISSLGDVVCGMAVARITSKDMLFWFRSPAAASIRWGGAKHDAADKDDGRRMHPRSSFKAFLEVAKVRSLPWGDHEMNAIHSLQLILRDTLNGIENKAIIDPQLNELKLEGMVEVVTNEMVRLIETATVPILAVDADGLINGWNMKIAQLTGLSDDEARGKHLLTIVEDSSIDVVKRMLLLALQGIEEQNVQFQVKTSGVRRDDGPLILVVNACVSRDIHSNVVGACFVAQDVTGQKFILDKFTKIEGDYKAIVQNPCPLIPPIFGTDEFGWCSEWNLAMTKLSGWKRDEVMDKMLLGEVFGINTSCCRMKSQDALVNFSILISNAFSGQETEKSPFSFMNRSGKHVDCLLSVSRKVDVEGNLTGIFCFVLATGHELQQSQPLVQQETVKRMKALAYIRNEIRNPLSGIMYTRKMLVGTNLDEEQSLLLSTGAKCHNQLNRILEDLNLEDIMNSCLELEMNEFNLKDVVLTAVSQVMLPSEGKGVNVVYDLPDGLLSEYVYGDSLRLQQIXADFLLVCVKYSPDGAQVEITANLKKNTLGKSLQLIHVEIRITHAGNGVAEELLSEMFGSKEETSEEGMSLMVCRKLLRLMNGDVCYLREANKSVFILSAELACASKQPKDVKAAV

SEQ ID NO: 16969 - protein, 488 aa, Corynebacterium efficiens YS-314
MTIRAAVSHPVGPSGRNPGTGQMRDAMQCGHGAGCGSRPPRCPRRPSIRGAVTHPRLTPWPPQKKYLFTGFKREQVFRFMVECVKGRPNVLAIVLAGGEGKRLFPLTEDRAKPAVPFGGTYRLIDFVLSNLVNAGYLKIAVLTQYKSHSLDRHISVSWNVSGPTGQYIASVPAQQRLGKRWFTGSADAILQSLNLISDEKPDYVIVFGADHVYRMDPSQMVDEHIKSGKSVSVAGIRVPRHEATAFGCIQSDDEGNITEFLEKPADPPGTPDDPDVTFASMGNYVFTTEALVRALKDDSENEDSEHDMGGDIIPYFVDRGDAHVYDFSRNIVPGATERDKGYWRDVGTIDAFYECHMDLISVHPIFNLYNKEWPIHTTVEGNLPPAKFVQGGIAQSSMVAPGSIISAGTVRNSVLSTDVIVEEGATVEGAVLMPGVRIGKGAVVRHAILDKNVVVRDGELIGVDHDRDSQRFKVSAGGVVTVGKNQVV

SEQ ID NO: 16970 - protein, 346 aa, Lactobacillus plantarum WCFS1
MKAATFIEPGKVEVKEYDKPTIQKPTDAIIRVLRACVCGSDLWWFRGISQRQAGSTVGHEAIGIVESVGSAVKDVQAGDFVIAPFTHGCGHCAACLAGFDGDCLNQEAGGNGGYQGEYLRFTNANWALVKIPGQPEDYSDDMLNNFLALADVMATGFHAATSAEVKKDDTVVVMGDGAVGLSGVLSAKLLGAKRIIAMSRHEDRQKLAKAFGATDIIAERGDEAVAKVMALTETGADAVLECVGTEQSVDTAVKVGRPGAVVGRVGVPQKAEMNTNNLFWKNIGLRGGIAAVTTDDKQVLLDAVLTGKIQPGQVFTKRFMLDDIQAAYEAMDQRNAIKSLVIVSDK

SEQ ID NO: 16971 - protein, 268 aa, uncultured bacterium
QPNAMGGREVGGLANMLAAHMVYSVENTATVREFWNTKNLSQTPGLNAVDLFEAVADARIKAIWIMGTNPVVSMPNADRVRAALQSCDTVIVSDCMADTDTTATANILLPATGWGEKSGTVTNSERRISRQRALIHPVGQAKSDWWIISQVGQAMGFNDAFDYHSPRDIFIEHAQLSAFKNTGNRLFNISTLSHLSEQQYNQLEPIQWPVTPLKLKGTARLFEDRLFFTPSKKANFVVISPQLPQLHTPNNDFPLTLNTGRIRDQWHT

SEQ ID NO: 16972 - protein, 358 aa, Chromobacterium violaceum ATCC 12472
MSSMKATVFVGPGRIELREKPIPAVGPGDALVKITTTTICGTDVHILKGEYPVASGLTIGHEPVGVIEKLGADVKGYREGQRVIAGAICPSFTSYGCQDGHPAQDGGCECHGYKPMGGWRFGNTIDGTQAEYVLVPDAQANLAPIPDGLSDEQVLMCPDIMSTGFAGAEAANIRIGDVVVVFAQGPIGLCAVAGARLRGASCIIAVDGLDERLGISRRLGADVTLNFKQVDVIAEIMKLTGGRGVDASIEALGTQGTFESALRVLKPGGTLSSLGVYSSDLRIPLDAFNAGLGDKRIVSSLCPGGKERMRRLMNVLESDRLDLSPLVTHRYKLDQIVEAYDLFSHQRDGVLKVAIQPF

SEQ ID NO: 16973 - protein, 175 aa, Triticum aestivum
  unsure (1)..(175): unsure at all Xaa locations
MAPAVMASSATTVAPFQGLKSTASLPVSRRSSGSLGRVSNGXGRIRCMQVWPIEGIKKFETLSYLPPLSTEALLKQVDYLIRSKWVPCLEFSKVGFVFREHNSSPGYYDGRYWTMWKLPMFGCTDATQVLNEVEEVKKEYPDAYVRVIGFDNLRQVQCVSFIAFRPPGCEESGKA

SEQ ID NO: 16974 - protein, 268 aa, uncultured bacterium
QPNAMGGREVGGLANMLAAHMDYSVENTATVSEFWNTKNLSQTPGLNAVDLFEAVADGRIKAIWIMGTNPVVSMPNADRVRAALQSCDTVIVSDCMADTDTTATANILLPATGWGEKSGTVTNSERRISRQRALIHPVGQAKSDWWIISQVGQAMGFNDAFDYHSPRDIFIEHAQLSAFKNTGNRLFNISTLSHLSEQQYNQLEPIQWPVTPLKPKGTARLFEDRLFFTPSKKANFVVISPQLPQLHTPNNDFPLTLNTGRIRDQWHT

SEQ ID NO: 16975 - protein, 479 aa, Schizosaccharomyces pombe
MTAPSATAFSSATTQPTTEGNASMRKRTIPVVPSVPERKWDPKAPKHIQEQPWTMQNWWRHLNWLHCMLIFGLPMIAIYGVFTTPLQTKTLIFAIIYYAYSGLGITAGYHRLWSHRAYKAKKPLEYFLAAGGAAAFEGSIRWWSRDHRAHHRYTDTDKDPYNVKKGFWYAHVGWMIILQNPRRIGRSDVSDLNSDPFVMFNHRHFLPIASFMAFIFPSLFCGLLWGDYRGGYFYAGVCRLVFVHHATFCVNSLAHLIGSQPFDDTNSARNHFITALVTLGEGNHNYHHAFPNDYRNGLRWYEYDPTKIFIYIASLFGLAYNLNTFPDNEIQKGIVQQKQKVLDRWRAKLNWGIPLEQLPVMEFEDFLEQSKTRPLVLINGVVHDMTGFEHPGGQGLLRSAFGKDATAAFNGGVYDHTNGAHNLLSTYRVAVVRGGMEVEVWKSGAGAQLPMKDTQGQKIVRVGEQITRIQPPIEAAAAN

SEQ ID NO: 16976 - protein, 271 aa, Staphylococcus epidermidis ATCC 12228
MKLVFYGAGNMAQAIFTGIINSNNLNANDIYLTNKSNEQALKSFAEKLGVNYSYDDEALLKDADYVFLGTKPHDFENLANRIREHITNDNRFISIMAGLSIDYIRQQLNTNNPLARIMPNTNAQVGHSVTGISFSNNFDPKSKNEVDELINAFGSVIEVSEEHLHQVTAITGSGPAFLYHVFEQYVKAGTELGLERNQVEESIRNLIIGTSKMIERSDLSMSQLRKNITSKGGTTQAGLDALSQYDIVSMFEDCLGAAVNRSMELSHKEDE

SEQ ID NO: 16977 - protein, 511 aa, Triticum aestivum
  unsure (1)..(511): unsure at all Xaa locations
MIARGLLRSNSSTQASKLVKYLTSAGSLQGHAESLSDASVRHFSSASSPQTNSTEENGFKGHGMLAPFTAGWQSNDVHPLVIDRSEGSYVYDINGNKYLDSLAGLWCTALGGSEPRLVKAATDQLNKLPFYHSFWNRTTKPTLDLAXTFLSMFTASKMGKAFFTNSGSEANDSHVKLVWYYNNALGRPNKKKFXARSKAYHGSTLISASLTGLPALHQKFDLPAPFVLHTDCPHYWRFHLPGETEEEFATRLAKNLEDLILKEGPETIAAFIAEPVMGAGGVIPPPKTYFDKVQAVVKKYDILFIVDEVITAFGRLGTMFGSDMYNIKPDLVTLAKALSSAYVPIGAXLVSPEIAAVVDSQSNKLGSFAHGFTYSGHPVACAVAIEALKIYRERNIPDHVKQIAPRFQEGTKAFAGSPIVGEIRGVGLILGTEFANNKSRDDPFPAEWGVGAIFGQECQKRGMLVRVAGDSIMMSPPLTMTPGEVDELVSIYGEAMKATEERVAELKSKKN

SEQ ID NO: 16978 - protein, 532 aa, Prunus persica
GYWVLKEKFRGGINVQEKVKIQKEPMKLFMENGIEELAKTSFEELEKSKDSKDDIDVRLKWLGLFHRRKNHYGRFMMRLKLPNGVTTSAQTKYLASVIRKYGEDGCADVTTRQNWQIRGVVLPDVPEILKGLAEVGLTSLQSGMDNVRNPVGNPLAGIDPEEIVDTRPYTNLLSQYITANSLGNPTVTNLPRKWNVCVVGSHDLFEHPHINDLAYMPATKDGRLGFNLLVGGFFSPKRCAEAVPLDAWVSADDVIPLCKAVLEAYRDLGTRGNRQKTRMMWLIDELGIEGFRAEVAKRMPFQELERASSEDLVQKQWERRDYVGVHPQKQEGLSYVGLHIPVGRLQADDMDELAHVADKYGTGELRLTVEQNIIIPNVENSKLEALLKEPLLKNRFSPEPSILMRGLVACTGNQFCGQAIIETKARALKVTEEVERHVAVTRPVRMHWTGCPNTCAQVQVADIGFMGCMARDENGKPCEGADVFLGGRIGSDSHLGDVYKKSVPCKDLVPLVVDILVKHFGAVPREREEGED

SEQ ID NO: 16979 - protein, 260 aa, uncultured bacterium
QPNAMGGREVGGMANLLAVHKDLHNEEHRREVAQFWGVDKISPKPGLTATEMFDALESGKLKAVWIACTNPLVSMPNSHQIEKAMANSKFVVVQEISHKSDTLQYADLVLPAAAWLEKEGTMTNSERRISYLPKEIEAPGEARPDVEIFCDFAQRMGFRGFNYNSTSEIYDEYASMTKGTNIDVSFLNYDRLKTEGTFQWPVNEYRHKGTPRLFEDKKFYTASQKAIFNIPSTIENTSVKTNDEFPLILTTGRVRDQWHT

SEQ ID NO: 16980 - protein, 201 aa, Glycine max
  unsure (1)..(201): unsure at all Xaa locations
MSNEYDYLFKLLLIGDSSVGKSCLLLRFADDSYVDSYISTIGVDFKIRTVELEGKTVKLQIWDTAGQERFRTITSSYYRGAHGIIIVYDVTEMESFNNVKQWLNEIDRYANDTVCKLLVGNKSDLVDNKVVDSLTAKAFADELGIPFLETSAKDSINVEQAFLTMTAEIKKKMGSQTTAGKSARTVQMXGQPIPQKSNCCG

SEQ ID NO: 16981 - protein, 260 aa, uncultured bacterium
QPNAMGGREVGGMANLLAVHKDLHNEEHRREVAQFWGVDKISPKPGLTATEMFDALESGKLKAVWIACTNPLVSMPNSHQIEKAMANSKSVVVQEISHKSDTLQYADLVLPAAAWLEKEGTMTNLERRISYLPKEIEAPGEARPDVEIFCDFAQKMGFRGFNYNSASEIYDEYASMTKGTNIDVSFLNYDRLKTEGTFQWPVNEYRHKGTPRLFEDKKFYTASQKAIFNIPSTIENTSIKTNDEFPLILTTGRVRDQWHT

SEQ ID NO: 16982 - protein, 190 aa, Zea mays
MAKPRSGGGGGLLDLEGHYAFYGAYHSNPVNVGIHELFVWPIFLTALMLLHLTAPSTHAAGISAAVYAAYYFLLDRRAGALAALLCYLCWAASGALSARLGFSVGWKVVLVAQLFCWIMQFIGHGVFEKRAPALLDNLVQAFLMAPFFVLLEILHTFGGYEPYPGFPAKVSKLIEEARKEWEAKKSKKSS

SEQ ID NO: 16983 - protein, 219 aa, Ustilago maydis 521
MSATANPFNLKKQLAFYGSYHTDSVNVAIHIVGVPSIIFATSTLLAKQGSIFPLIQDHSPLAAAYLSRLGSILASILPAQIFEYAQLNYAAAFMGIYWLYYSILDATAALMLAPLWYALWYGSTFLARTHPEATKIALGIKALGWISQFYGHGVHEGRAPALLDNLLGAVVLAPFFVFLEVIFHFGYRPHLQKELKNEVGKLVTKHRMDKAKAKRAKAN

SEQ ID NO: 16984 - protein, 343 aa, Vibrio cholerae O1 biovar eltor str. N16961
MKIKALSKLKPEQGIWMNEVDMPELGHNDLLIKIKKTAICGTDVHIYNWDEWSQKTIPVPMVVGHEYVGEVVGIGQEVRGFQIGDRVSGEGHITCGHCRNCRGGRTHLCRNTIGVGVNRTGCFSEYLVIPAFNAFKIPDGISDDLASIFDPFGNAVHTALSFDLVGEDVLITGAGPIGIMAAAVAKHVGARHVVITDVNEYRLDLARKMGVTRAVNVAEQNLEDVMKELGMTEGFDVGLEMSGVPSAFSAMLKTMNHGGRIALLGIPPSSMAIDWNQVIFKGLVIKGIYGREMFETWYKMASLIQSGLDISPIITHHFKVDDFQKGFDIMRSGASGKVILDWQ

SEQ ID NO: 16985 - protein, 267 aa, uncultured bacterium
QPNAMGGREVGGLAGLLAAHMDYSLENIATVAEFWGTDSVSCEPGLKAIDLFDAVADGRIKAIWIMGTNPVVSMPNADTVMAALENCDTVIVSDCIAETDTTATANILLPATGWGEKEGTVTNSERRISRQRSLLPPLGEARHDWWIMCQVAQAMGYQKGLSYSSPRDIFIEHAALSTFKNKGNRLFNIGALSALSEAGYDQLDPIQWPVTAQNSIGTKRLFMDDKFLTPSGKAQFIGSTAELPRQSLSDRFPLALNSGRIRDQWHT

SEQ ID NO: 16986 - protein, 635 aa, Mycobacterium tuberculosis CDC1551
MSFVIAAPEALVAVASDLAGIGSALAEANAAALAPTTALLAAGADEVSAAIAALFGAHGQAYQTVSAQASAFHAQFVQALTGGGGAYAAAEAANVSAAQSTDQRLLDLINGPTQALLGRPLIGDGANGGPGQDGGPGGLLYGNGGNGGTSTTAGVAGGNGGAAGLIGNGGAGGGGGAGAAGGNGGAGGWLYGNGGAGGAGGTSVIPGVAGGNGGAGGSAGLWGTGGAGGDGGNGRSGPVNVAGSAGGNGGAGGAAGLFGDAGAGGNGGKGGAGGAAFSINFTAGDGGAGGAGGSGGHALLWGAGGAGGNGGSGGTGGAGGSTAGAGGNGGAGGGGGTGGLLFGNGGAGGQGATAGAGGAGANGVSSTNGGGTGGNGGIGGTGGSGGAGGNAGLLGVGGAGGHGASGGAGDRGGAGGTGFISSDGGAGGDGGDGGNGGAGGTGGLLFGAGGNGGPGGSGGAADIGGNGGAGNGGGTDGNGGNGGSGGGAGSGGDGGGAGGNGAWLFGNGGAGGGGGKGGNGAGGGLGGGSFGLPGLNGSGGDGGDGGNGAPGGVLYGNGGAGGQGSSGGIGGPGATGGAGGKGGDGGDAQLIGDGGNGGNGGAGGTGGTPGPGGPGGSGGLGGLLFGQTGTAGVSP

SEQ ID NO: 16987 - protein, 231 aa, Zea mays
KKNTMGNLFTNMSLGKVAVSFTHTIKAMEPFFSVLLSAIFLGELPTPWVVLSLLPIVGGVALASLTEASFNWAGFWSAMASNVTFQSRNVLSKKLMVKKEESLDNINLFSIITVMSFFLLAPVTLLTEGVKVSPAVLQSAGLNLKQVYTRSLIAAFCFYAYQQVSYMILARVSPVTHSVGNCVKRVVVIVTSVLFFRTPVSPINSLGTGIAPAGVFPYSQLKRLKPKPKTA

SEQ ID NO: 16988 - protein, 392 aa, Lasiocarpus sp. Anderson 13834
DLEPVNPADVPVTAAGALKSYKLAAKAISRLQSLPGGNISLLCDVLVKEVRDLTGYDRVMVYKFHEDEHGEVVSECRRSDLESYLGLHYPAIDIPQASRFLFMKNKVRMICDCLAPPVKVIQDKRLSQPLSLCGSTLRSPHGCHAQYMANMGTIASLVMSVTVNEDDDMIDGDQQQMARKLRGLVVCHHTSPRFVPFPLRYACEFLIQVFGVQINKEVELAAQVREKHILRIQTMLCDMLLRDAPVAIITQSPNVMDLVKCDGAALYYKNKFWLLGVTPTEAQIRDIAEWLLEYHSGNTGLSTDSLMEAGYPGASVLGDAVCGMAAVSITSRDFLFWFRSHTAKEIKWGGAKHDPEDKDDGRKMHPRSSFKAFLEVVKWRSLPWEDVEMDAI

SEQ ID NO: 16989 - protein, 275 aa, Bacillus cereus ATCC 10987
MNIGIIGTGNMGNILIDAFLETRAVKPSCLTIINRTPAKAYHIKEKYPSVHIAKTIDEAIERSHLIFICVKPIDIYPILQKYAEHFSDEKCLVSITSPISPSQLETLVPCHVARIIPSITNRALSGASLFTFGSNCSEEWQQKLFRLFKNISTPLVIEEDITRVSSDIASCGPAFFSYLLQCFINAAVDKTNITHEEATTLVSEMVVGMGKLLEKGIFTLPTLQEKVCVKGGVTGEGIRVLEEHVGDMFHKLIERTHEKFDEDLKCVDQQFNKHT

SEQ ID NO: 16990 - protein, 392 aa, Ptilochaeta nudipes
DLEPVNPVDVPVTAAGALKSYKLAAKAISRLQSLPGGNISLLCDVLVKEVRDLTGYDRVMVYKFHEDEHGEVVSECRRSDLESYLGLHYPATDIPQASRFLFMKNKVRMICDCLAPPVKVIQDERLSQPLSLCGSTLRSPHGCHAQYMANMGTIASLVMSVTVNEDDDMMDGDQQQMARKLWGLVVCHHTRPRFVPFPLRYACEFLIQVFGVQINKEVELAAQVREKHILRIQTMLCDMLLRDAPVAIITQSPNVMDLVKCDGAALYYKNKFWLLGVTPTEAQIREVAEWLLEYHSGNTGLSTDSLMEAGYPGASVLGDAVCGMAAASITSRDFLLWFRSHTAKEIKWGGAKHDPEDKDDGRKMHPRSSFKAFLEVVKWRSLPWEDVEMDAI

SEQ ID NO: 16991 - protein, 392 aa, Ptilochaeta bahiensis
DLEPVNPADVPVTAAGALKSYKLAAKAISRLQSLPGGNISLLCDVLVKEVRDLTGYDRVMVYKFHEDEHGEVVSECRGSDLESYLGLHYPATDIPQASRFLFMKNKVRMICDCLAPPVKVIQDKRLSQPLSLCGSTLRSPHGCHAQYMANMGTIASLVMSVTVNEDDDMMDGDQQQMARKLWGLVVCHHTSPRFVPFPLRYACEFLIQVFGVQINKKVDLAAQVREKHILRIQTMLCDMLFRNAPVAIITQSPNVMDLVKCDGAALYYKNKFWLLGVTPTEAQIREIAEWLLEYHSGNTGLSTDSLMEAGYPGASVLGDAVCGMAAVSITSRDFLFWFRSHTAKEIKWGGAKHDPEDKDDGRKMHPRSSFKAFLEVVKWRSLPWEDVEMDAI

SEQ ID NO: 16992 - protein, 392 aa, Dinemandra ericoides
DLEPVNPADVPVTAAGALKSYKLAAKAISRLQSLPSGNIPLLCDVLVKEVRDLTGYDRVMVYKFHEDEHGEVVSECRRSDMESYLGLHYPATDIPQASRFLFMKNKVRMICDCLSPPVEVIQDERLPQPLSLCGSTLRSPHGCHAQYMANMGTIASLVMSVTVNEDDDMMDGDQQRMARKLWGLVVCHHTSPRFVPFPLRYACEFLIQVFGVQINKEVDLAAQVREKHILRIQTMLCDMLLRDAPVAIITQSPNVMDLVKCDGAALYYKNKFWLLGVTPTEAQIRDIAEWLLEYHRGNTGLSTDSLMEAGYPGASVLGDAVCRMAAVSITSRDFLFWFRSHTAKEIKWGGAKHDPGDKDDGRKMHPRSSFKAFLEVVKWRSLPWEDMEMDAI

SEQ ID NO: 16993 - protein, 223 aa, Zea mays
LGTSRPAGISSPKQKNVNEAVEGLRAKGITAVGAVCHVSDAQQRKSLIETAVKSFGHIDILVSNAAANPSVDTILEMKESVLDKLWDINVKASILLIQDAAPHLRKGSSVIIISSIAGYNPEQGLTMYGVTKTALFGLTKALAGEMGPDTRVNCVAPGFVPTRFASFLTENETIRKELNERTKLKRLGTVEDMAAAAAFLASDDASYITAETIVVAGGVQSRL

SEQ ID NO: 16994 - protein, 392 aa, Mcvaughia bahiana
DLEPVNPADVPVTAAGALKPYKLAAKAISRLQSLPSGNISLLCDVLVKEVRDLTGYDRVMVYKFHEDEHGEVVTECRRSDLESYLDLHYPATDIPQASRFLFMKNKVRMICDCLAPPVKVIQDKRLSQPLSLCGSTLRSPHGCHAQYMANMGAVASLVMSVTINEDDDTVDGDQQQMARKLWGLVVCHHTSPRFVPFPLRYACEFLIQVFGVQITKEVELAAQVREKHILRIQTLLCDMLLRDAPVAIITQSPNVMDLVKCDGAALYYRKKFWLLGVTPTEAQIRDIAEWLLEYHSGNTGLSTDSLLEVGYPGASALGEVVCGMAAVSITSRDFLFWFRSHTAKEIKWGGAKHDPDDKDDSRKMHPRSSFKAFLEVVEWRSLPWEDVEMDAI

SEQ ID NO: 16995 - protein, 352 aa, Rhodococcus sp. Phi2
MRVFAVQPEDTTIHDLQVPTPSPEGREVLLRVVRAGVCHTDTHLRAGGYDLGSRGMMSMKERGIEYPMVLGHEVVGVVEKVGDGVESVQVGDIRLIYPWIGCGECRQCRAGHDNRCAAGKNLGVARHGGYAENILVPDEKYLVDIDGLDPSWAATLACSGLTAYSAVDKALPLEPDEPVVVFGAGGLGLTAIAILRSRGHRNICAVDVAERNLALARDMGASSTVLSGTGSGADDIRGAAGGPAGAVIDFVNNGATATTAFEVLAKAGIMIQVGLFGGEVTLPTALLALRMIRIEGSFVGTLVQMQDLVRLAQRGELPHIPVVERSLSAAAVSQALDDLTAGGVAGRIVLTA

SEQ ID NO: 16996 - protein, 460 aa, Yersinia pestis biovar Medievalis str. 91001
MTGYLMETTLMTKHYDYLAIGGGSGGIASINRAAMYGKKCALIEAKQLGGTCVNVGCVPKKVMWHAAQIAEAIHLYGPDYGFDTTVNHFDWKKLIANRTAYIDRIHQSYERGLGNNKVDVIQGFARFVDAHTVEVNGETITADHILIATGGRPSHPDIPGAEYGIDSDGFFELDEMPKRVAVVGAGYIAVEIAGVLNGLGTETHLFVRKHAPLRTFDPLIVETLLEVMNTEGPKLHTESVPKAVIKNADGSLTLQLENGTEVTVDHLIWAIGREPATDNLNLSVTGVKTNDKGYIEVDKFQNTNVKGIYAVGDNTGVVELTPVAVAAGRRLSERLFNNKPDEHLDYSNIPTVVFSHPPIGTIGLTEPQAREKFGDDQVKVYTSSFTAMYSAVTQHRQPCRMKLVCVGAEEKIVGIHGIGFGMDEILQGFAVAMKMGATKKDFDNTVAIHPTAAEEFVTMR

SEQ ID NO: 16997 - protein, 309 aa, Escherichia coli K12 [sequence omitted]

SEQ ID NO: 16998 - protein, 442 aa, Glycine max
  unsure (1)..(442): unsure at all Xaa locations
MANALHNAAISRVMFGDQYSISRCVVPSLSTLPLRAMHKGKHVELNRTVMVVKAKTNSDFDDSDVDISLSHRVNAVKLSKTLSICDHATALLQAGVPVIRLFFGESDFDTPGAIAEAGMNAIREGYTRYTPNAGTLELRQAICHKLKEENGITYSPDQIVVSNGAKQSIVQAVLAVCSPGDEVIIPAPFYVSYPEMARLAHATPVILPSHISRSVYSKKLLEEIAQIVAKHPRLLVLSDENYEHIIYAPATHTSFASLPGMWDRTLIVNGLSKTFAMTGWRLGYIAGPKHFVAACEKIQSQFTSGASSISQKAGVAALGLGYAGGEAVSTMVKAFRERRDFLVESFREMDGVKICEPQGGFYVFLDFSSYYGREAEGFGVIENSDSLCRYLLDKGLVALVPGXAFGDDTCIRISFAESLTTLKTAVERIKKALIPLSSSALV

SEQ ID NO: 16999 - protein, 170 aa, Bradyrhizobium japonicum USDA 110
MHFVTSDADVPGPGAAYNCGLTSAQRAPDGWFKQGLRQDMTQASIFLVEDEALIRMMLVDMVEELGHRVIAEAGSIEEGRSLAEIEGYDLAILDINLQGINVHPVAEVVRSRGLPLFFLSGYGSAGVPDGFEGMPVLIKPCSLDALKRIIDAVLPNGEPEKPQDKPAGAS

SEQ ID NO: 17000 - protein, 205 aa, Pinus taeda
MSKQKLLIFAAMAGLLFACAAVESRIARSDLGLDLGGGLGLGVGVGAGLGLGGGSASGSGSGSGSGSGSGSGAGSAAGSGSGSGAGSGAGSYAGSGAANGGGQGRGSGSGYGSGSGYGAGNGNGNGYGAGSGYGAGNANGNAYGAGSGSGSGSGSGSGRGYGSGSGTGSGYGSGSGSGYGNGSGSGSGYGAGDDDSNEGASGGGY

SEQ ID NO: 17001 - protein, 1234 aa, Corynebacterium efficiens YS-314
MSSASTFGQNAWLVDEMFQQFKKDPQSVDKEWRELFESQGGPQAEKATPATPEAKKAASSQSSTSGQSTAKAAPAAKTAPASAPAKAAPVKQNQASKPAKKAKESPLSKPAAMPEPGTTPLRGIFKSIAKNMDLSLEVPTATSVRDMPARLMFENRAMVNDQLKRTRGGKISFTHIIGYAMVKAVMAHPDMNNSYDIVDGKPSLVVPEHINLGLAIDLPQKDGSRALVVAAIKETEKMTFSQFLEAYEDVVARSRVGKLTMDDYQGVTISLTNPGGIGTRHSIPRLTKGQGTIIGVGSMDYPAEFQGASEDRLAELGVGKLVTITSTYDHRVIQGAESGEFLRTMSQLLVDDAFWDHIFEEMNVPYTPMRWAQDLPNTGVDKNTRVMQLIEAYRSRGHLIADTNPLPWVQPGMPVPDHRDLDIETHGLTLWDLDRTFHVGGFGGKETMTLREVLSRLRAAYTLKVGSEYTHILDRDERTWLQDRLEAGMPKPTAAEQKYILQKLNAAEAFENFLQTKYVGQKRFSLEGAESLIPLMDSAIDTAAGQGLDEVVIGMPHRGRLNVLFNIVGKPLASIFNEFEGQMEQGQIGGSGDVKYHLGSEGTHLQMFGDGEIKVSLTANPSHLEAVNPVVEGIVRAKQDILDKGPDGYTVVPLLLHGDAAFAGLGIVPETINLAALRGYDVGGTIHIVVNNQIGFTTTPDSSRSMHYATDCAKAFGCPVFHVNGDDPEAVVWVGQLATEYRRRFGKDVFIDLICYRLRGHNEADDPSMTQPKMYELITGRDSVRATYTEDLLGRGDLSPEDAEAVVRDFHDQMESVFNEVKEAGKKQPDEQTGITGSQELTRGLDTNITREELVELGQAFVNTPEGFTYHPRVAPVAKKRAESVTEGGIDWAWGELIAFGSLATSGRLVRLAGEDSRRGTFTQRHAVAIDPNTAEEFNPLHELAQAKGGGKFLVYNSALTEYAGMGFEYGYSVGNPDAVVSWEAQFGDFANGAQTIIDEYISSGEAKWGQTSSVILLLPHGYEGQGPDHSSARIERFLQLCAEGSMTIAQPTTPANYFHLLRRHALGKMKRPLVVFTPKSMLRNKAATSAPEEFTEVTRFKSVIDDPNVADASKVKKIMLCSGKIYYELAKRKEKDNRDDIAIVRIEMLHPIPFNRLRDAFDGYPNAEEILFVQDEPANQGAWPFYQEHLPNLIEGMLPMRRISRRSQSSTATGIAKVHTIEQQKLLDDAFNA

SEQ ID NO: 17002 - protein, 542 aa, Escherichia coli K12
MIAVVKLLPTGEDFASHVYPCYTSHRKETIMTNNPPSAQIKPGEYGFPLKLKARYDNFIGGEWVAPADGEYYQNLTPVTGQLLCEVASSGKRDIDLALDAAHKVKDKWAHTSVQDRAAILFKIADRMEQNLELLATAETWDNGKPIRETSAADVPLAIDHFRYFASCIRAQEGGISEVDSETVAYHFHEPLGVVGQIIPWNFPLLMASWKMAPALAAGNCVVLKPARLTPLSVLLLMEIVGDLLPPGVVNVVNGAGGVIGEYLATSKRIAKVAFTGSTEVGQQIMQYATQNIIPVTLELGGKSPNIFFADVMDEEDAFFDKALEGFALFAFNQGEVCTCPSRALVQESIYERFMERAIRRVESIRSGNPLDSVTQMGAQVSHGQLETILNYIDIGKKEGADVLTGGRRKLLEGELKDGYYLEPTILFGQNNMRVFQEEIFGPVLAVTTFKTMEEALELANDTQYGLGAGVWSRNGNLAYKMGRGIQAGRVWTNCYHAYPAHAAFGGYKQSGIGRETHKMMLEHYQQTKCLLVSYSDKPLGLF

SEQ ID NO: 17003 - protein, 258 aa, Vibrio sp. 'Belize Reef cb2216s4'
QPNAMGGPEGGGLANQLAVHRGFDDESIAKVEQFWQAPNMATEPGLKAVELFDAVSRGDIKVLWIMATNPVVSMPNSIEVRKALKACDFVIVSDISADSDVAEYADLLLPAAGWGEKQGMVTNSERVISRQRQFRPIPGEAKPDWWAINQVGQKWCAQNHWQNGFGFQTPAEIFREYAALTGINRKSRFQLDLSMFQTLSDSDYQNWQPTQWGGERPFTDHQFSTPLGKAQLVVTKPLKRDVSGLWLNTGRLRDQWHT

SEQ ID NO: 17004 - protein, 274 aa, Halomonas sp. 'Belize Reef cbno3r1'
QPNAMGGREVGGLANQLAAHMEYHTPGARELVSPFWTTQHLTPVLPDAPGYKAVELFDAIERGEISALWVMATKSAVSMPDGRKCAARWQKCPLVIVSECVANTDLLPFADIVLPASGWSEKDGTVTNSERRISRQRGLLPAPGEAKHDWWILCEVAKRLGWGEAFDYTQPWEIFDEHARLSGYENSGDTQRLFDISGLAGLGQSAYDALAPIQWPVTQQAPRGTARLFEDGRFATPNGRAKLLPITPRPPAQALSDDYPLRLNTGRIRDQWHT

SEQ ID NO: 17005 - protein, 95 aa, Narcissus pseudonarcissus
KQKIKEITLKLVQHGQLSETNVYNWFQNRRARSKRKQATVLPNNNEPEAEAEFDSPPSERIVKSNDNNIELSSDSKSPISPDQMSLYENMLCSPS

SEQ ID NO: 17006 - protein, 439 aa, Staphylococcus epidermidis ATCC 12228
MDIKMPKLGESVHEGTIEQWLVSVGDHVDEYEPLCEVITDKVTAEVPSTISGTITELVVEEGQTVNINTVICKIDSENGQNQTESANEFKEEQNQHSQSNVNVSQFENNPKTHESEVHTTSSRANNNGRFSPVVFKLASEHDIDLTQVKGTGFEGRVTKKDIQNIINNPNDQEKEKEFKQTDKKDHSMNHGDFLHQSSTKNEDSPLSNERVVPVKGIRKAIAQNMVTSVSEIPHGWMMVEADATNLVQTRNYHKAQFKKNEGYNLTFFAFFVKAVAEALKANPLLNSTWQGDEIVIHKDINISIAVADDDKLYVPVIKNADEKSIKGIAREINDLATKARLGKLAQSDMQNGTFTVNNTGSFGSVSSMGIINHPQAAILQVESVVKKPVVIDDMIAIRNMVNLCISIDHRILDGVQTGKFMNLVKKKIEQYSIENTSIY

SEQ ID NO: 17007 - protein, 268 aa, Marinomonas sp. 'Barents Sea 8'
QPNAMGGREVGGLANQLAAHMDFATPGAQDLVQRFWQAPNMATKDGLKAVDLFQAMEEGKVKVVWIMSTNPMVSLPDTAQVRRALEKCELVIVSDCKAHTDTTVMADVLFPATGWSEKDGTVTNSERRISRQRGLFPAPGEAKHDWWVICEVAKSLGFQSAFPYQNVHEIFAEHAALSAFENNGKRDFDMGHFSQITKADYDALTPVQWPVPKSRPEGTKRMFEDGRFFTSDGRAKFVAISPSLPKHQASQEWPFTLNTGRVRDQWHT

SEQ ID NO: 17008 - protein, 473 aa, Staphylococcus epidermidis ATCC 12228
MSEKQYDLVVLGGGTAGYVAAIRASQLGKKVAIVEKSLLGGTCLHKGCIPTKALLKSAEVNHTIKNAHTFGIDVNHFKINFPKILERKDAIVKQLHEGVNQLMKHHHIDIYNGIGRIMGTSIFSPQSGTISVEYEDGESDILPNKNVLIATGSSPQSLPFIKFDHKQILSSDDILRLNTLPQRLAIIGGGVIGLEFASLMNDLGADVVVIEANDRVLPTESTQVASLLKEELTNRGVTFYENIQLTKDHFNQTDKGVTINISDEPVQFDKVLVAIGRKPNTNDIGLNNTQIKTSDAGHIITNAYQQTEDKHIYAAGDCIGQLQLAHVGSKEAIVAVEHMFDCSPIPINYDLIPKCVYTNPEIASIGKNLEQAKKAGIKAKSIKVPFKAIGKAIIEDVTQSKGFCEMVVNKDDDEIIGLNMIGPHVTELINEISLLQFMNGSSLELGLTTHAHPSLSEVVMELGLKANGQAIHV

SEQ ID NO: 17009 - protein, 270 aa, Marinobacter sp. 'Sargasso Sea s450ao'
QPNAMGGREVGGLANTLAAHMDYDSPGARSRVADFWGTGVVADGPGYKAVDMFEAVHRGDIRVIWIMGTNPAVSLPDSARVREALARCPTVIVSDCVAHTDTTDLADILLPAAGWGEKDGTVTNSERRISRQRCFLPLPAEVKPDWWIMSSVAGKLGFGEAFNYKRPADIFREHAALSAHENNGERLFNLAGLVNLSDPGYDTLQPVQWPILGSTGPGVVDSARLFADGRLSPTISAPDLLHRNRLAAQQTSDDYPMVVNTGRIRDQWHT

SEQ ID NO: 17010 - protein, 314 aa, Oryza sativa (japonica cultivar-group)
MAERVTKALMRPLLCYIIVVAVAPAGCAAFNPRMLFLVKPDPIVLKDHHGVVLSGNVTVNVLYYGRFTPAQRAVVAGFVRSASAAQHPRVPSVAAWWSTTSLYRGGGARLRLGMQVMDERMSLGRSLSLDNVTALTRAAGHHRGAVTAVLTAPDVLVAPFCMSRCGVHGHGGGVGAHGRARYAYLWAGNPAQQCPGQCAWPFHQPVYGPQAPPLVPPNGDVGVDGMVISLAALLAGTVTNPFGDGYYQGDAGAGMEAATACAGVFGSGAFPGYPGKLLKDPVTGASYNAVGLAGRKYLLPALWDPTTSQCKTLV

SEQ ID NO: 17011 - protein, 392 aa, Burdachia sphaerocarpa
DLEPVNPADVPVTAAGALKSYKLAAKAISRLQSLPSGNISLLCDVLVKEVRDLTGYDRVMVYKFHDDEHGEVVSECRRSDMESYLGLHYPATDIPQASRFLFMKNKVRMICDCLAPPVKVIQDERLPQPLSLCGSTLRSPHGCHAQYMVNMGAIASLIMSVTINEDDDTIDGDEQQMARKLWGLVVCHHTSPRFVPFPLRYACEFLIQVFGVQITKEVELAAQVREKHILRIQTLLCDMLLRDAPVAIITQSPNVMDLVKCDGAALYYKKKFWLLGVTPTEAQIRDIAEWPVEYHSGNTGLSTDSLMEAGYSGASSLGDAVCGMAAVSITSRDFLFWFRSHTAKEIKWGGAKHDPADKDDGRKLHPRSSFKAFLEVVKWRSLPWEDMEMDAI

SEQ ID NO: 17012 - protein, 392 aa, Glandonia macrocarpa
DLEPVNPADVPVTAAGALKSYKLAAKAISRLQSLPSGNISLLCDVLVKEVRDLTGYDRVMVYKFHEDEHGEVVSECHRSDLESYLGLHYPATDIPQASRFLFMKNKVRMICDCLAPPVKVIQDERLPQPLSLCGSTLRSPHGCHAQYMANMGAIASLVMSVTINEDDDMIDGDEQQMARKLWGLVVCHHTSPRFVPFPLRYACEFLIQVFGVQITKEVELAAQVREKHIFRIQTLLCDMLLRDAPVAIITQSPNVLDLVKCDGAALYYKKKFWLLGITPTEAQIRDIAEWLLEYHSGNTGLSTDSLMEAGYPGASSLGDAVCGMAAVSITSRDFLFWFRSHTAKEIRWGGAKHDPDDKDDGRKMHPRSSFKAFLEVVKWRSLPWEDVEMDAI

SEQ ID NO: 17013 - protein, 452 aa, Pseudomonas fluorescens PfO-1
MAYDFDLYVIGAGSGGVRAARFAAGFGAKVAVAESRYLGGTCVNVGCVPKKLLVYGAHFAEDFEQSSGFGWNLGEADFDWATLIANKDREINRLNGIYRNLLVNSGVTLHEAHAKIVGPHEVEVNGERYTAKNILIATGGWPQIPEIPGHEHAISSNQAFFLKELPKRVLVVGGGYIAVEFAGIFHGLGANTTLLYRGDLFLRGFDGSVRNHLKEELTKRGMDLQFNADIARIDKQSDGSLKATLKDGRVLEADCVFYATGRRPMLDNLGLENIDVQLDDKGFIKVDEQYQTTEPSILALGDVIGRVQLTPVALAEGMAVARRLFKPEQYRPVDYKMIPTAVFSLPNIGTVGLTEEEAREAGHDVVIYESRFRPMKLTLTDCQERTLMKLVVDGKSDKVLGCHMVGPDAGEIVQGLAIALKAGATKRDFDDTIGVHPTAAEEFVTMRTPVGA

SEQ ID NO: 17014 - protein, 351 aa, Zea mays
MASEAKDVGILAMDIYFPPSCVLQEELETHDGVSKGKYTIGLGQENMAFCTEVEDVISMSLTVVKSLLKNYNIDPKCIGRLEVGSETVIDKSKSIKTWLMQIFEESGNTDIEGVDSSNACYGGTAALFNCVNWVESNSWDGRYGLVVCTDSAVYAEGPARPTGGAAAIAMLIGPNAPISFESKYRGSHMAHVYDFYKPDLASEYPVVDGKLSQTCYLMALDSCYNVFCKKYEKHEGKQFSIFDADYVVFHSPYNKLVQKSFARLYYNDFLRNCSTVDEEAREKLAPYAGLSSEESYQSRDLEKASQQFSKNLYESKVQPTTLIPKQVGNMYTASLYAALASVIHNRHETLV

SEQ ID NO: 17015 - protein, 392 aa, Barnebya dispar
DLEPVNPADVPVTAAGALKSYKFAAKAISRLQSLPSGNIFLLCDVLVKEVRDLTGYDRVMVYKFHEDEHGEVVSECRRSDLESYLGLHYPATDIPQVSRFLFMKNKLRMICDCLAPPVKVIQDENLPQPLSLCGSTLRSPHGCHAQYMTNMGTIASLVMSVTINEDDDMKDCEQPQMPRKLWGLVVCHHTSPRFIPFPLRYACEFLIQVFGVQINKEVELAAQVREKHILRIQTLLCDMLLRDAPVAIITQSPNVMDLVRCDGAALYYKNEFWLLGVTPTEAQIRDIAEWLLECHSGNTGLSTDSLMEAGYPGASVLGDAVCGMAAISITSRDFLFWFRSHTAKEIKWGGAKHDPDDKDDGRKMHPRSSFKAFLEVVKWRSLPWEDIEMDAI

SEQ ID NO: 17016 - protein, 396 aa, Staphylococcus aureus subsp. aureus MW2
MAKKIVSDLDLKGKTVLVRADFNVPLKDGEITNDNRIVQALPTIQYIIEQGGKIVLFSHLGKVKEESDKAKLTLRPVAEDLSKKLDKEVVFVPETRGEKLEAAIKDLKEGDVLLVENTRYEDLDGKKESKNDPELGKYWASLGDVFVNDAFGTAHREHASNVGISTHLETAAGFLMDKEIKFIGGVVNDPHKPVVAILGGAKVSDKINVIKNLVNIADKIIIGGGMAYTFLKAQGKEIGISLLEEDKIDFAKDLLEKHGDKIVLPVDTKVAKEFSNDAKITVVPSDSIPADQEGMDIGPNTVKLFADELEGAHTVVWNGPMGVFEFSNFAQGTIGVCKAIANLKDAITIIGGGDSAAAAISLGFENDFTHISTGGGASLEYLEGKELPGIKAINNK

SEQ ID NO: 17017 - protein, 316 aa, Oryza sativa (japonica cultivar-group)
MGNLLDMKVVAMVAALVVMSLAGVSMAARRVPALLKSHVGDGISYHGGAVLGGDIPVTLVWYGKFKPAQKAIVVDFLLSLTATPPNATTPSAAQWWGAIAAGYLSSNATNVTTAARVVLANQTSDEEYSLGKSLTLVEVFQLAAGVVPDRGDLVVVLTDRDVAVEGFCSARCGVHGSDAGAGYAYAWAGDAERQCPGQCAWPFAKPPYGPKGEAALVPPNGDVGADGVVATLAGVLAGAVTNPFGDGYYLGDKDAALEACSACAGAYGSDSYPGYAGKVLVDETTGGSYNAVGAHGRKYLLPAVYDPATSRCTTLV

SEQ ID NO: 17018 - protein, 392 aa, Spachea correae
DLEPVNPADVPVSAAGALKSYKLAARAISRLQSLPSGNISLLCDVLVKEVRDLTGYDRVMVYKFHEDEHGEVVSECRRPDLEAYLGLHYPATDIPQASRFLFMKNKVRMICDCLAPPVKVIQDEKLPQSLSLCGSTLRSPHGCHAQYMANMGSIASLVMSVTVNEDDDMVDGDQQRMARKLWGLVVCHHTSPRFVPFPLRYACEFLIQVFGVQINKEVELAAQGREKHIMQTQTLLCDMLLRDAPVAIVTQSPNVMDLVKCDGAALYYRKKFWLLGVTPTEAQIRDIAEWLLEYHSGNTGLSTDSLMEAGYPGTSVLGNAVCGMAAVKITSRDFLFWFRSHTAKEIKWGGAKHDPDDKDDIRKMHPRSSFKAFLEVVKWRSLPWEDMEMDAI

SEQ ID NO: 17019 - protein, 830 aa, Yersinia pestis biovar Medievalis str. 91001
MKLSRRDFMKANAAVAAAAAAGMTIPTVAKAVGETTNAIKWDKAPCRFCGTGCGVLVGTQNGRIVASQGDPDSPVNRGLNCIKGYFLPKIMYGKDRLTQPLLRMKDGQYDKEGDFTPISWEKAFDIMELKFKNALKEKGPTAVGMFGSGQWTVWEGYAALKLLKGGFRSNNLDPNARHCMASSVVGFMRTFGMDEPMGCYDDIEEADAFVLWGSNMAEMHPVLWSRMTSRRLTNAHVRIAVLSTYEHRSFELADNPIVFTPQTDLVIMNYIANYIIQNNAVDKDFLAQHVNFRRGATDIGYGLRPTHPLEKAAKNPGSDASEPMSFEDFKTFVAEYTLEKTAKMSGVPEDQLESLAQLYADPKVKLVSYWTMGFNQHTRGVWANNMCYNLHLLTGKISTPGSGPFSLTGQPSACGTAREVGTFSHRLPADMVVTNEKHRQIAETTWQLPAGTIPEKVGLHAVAQDRALKDGTLNAYWVMCNNNMQAGPNINEERMPGWRDPRNFIVVSDPYPTISALSADLILPTSMWVEKEGAYGNAERRTQFWRQQVPSPGEAKSDLWQIVEFAKRFNVEEVWPAELVNQKPEYRGKNLYEVLFANDVVSKYPLSEIPDDQLNDEARDFGFYIQKGLFEEYASFGRGHAHDLAPFDVYHQVRGLRWPVVDGKETLWRYREGFDPFVPKGEEVRFYGKPDGKAVIFALPYEPAAESPDQEYDLWLSTGRVLEHWHTGSMTRRVPELHRAFPEAVLFIHPLDAKARGLHRGDKVKVISRRGEVISLVETRGRNRPPRGLVYMPFFDAAQLVNNLTLDATDPLSKETDFKKCAVKLERVVA

SEQ ID NO: 17020 - protein, 505 aa, Staphylococcus aureus subsp. aureus MW2
MAKKPTALIILDGFANRESEHGNAVKLANKPNFDRYYNKYPTTQIEASGLDVGLPEGQMGNSEVGHMNIGAGRIVYQSLTRINKSIEDGDFFENDVLNNAIAHVNSHDSALHIFGLLSDGGVHSHYKHLFALLELAKKQGVEKVYVHAFLDGRDVDQKSALKYIEETEAKFNELGIGQFASVSGRYYAMDRDKRWEREEKAYNAIRNFDAPTYATAKEGVEASYNEGLTDEFVVPFIVENQNDGVNDGDAVIFYNFRPDRAAQLSEIFANRAFEGFKVEQVKDLFYATFTKYNDNIDAAIVFEKVDLNNTIGEIAQNNNLTQLRIAETEKYPHVTYFMSGGRNEEFKGERRRLIDSPKVATYDLKPEMSAYEVKDALLEELNKGDLDLIILNFANPDMVGHSGMLEPTIKAIEAVDECLGEVVDKILDMDGYAIITADHGNSDQVLTDDDQPMTTHTTNPVPVIVTKEGVTLRETGRLGDLAPTLLDLLNVEQPEDMTGESLIKH

SEQ ID NO: 17021 - protein, 519 aa, Zea mays
  unsure (1)..(519): unsure at all Xaa locations
MQFSSVLPLEGKACMSPVRRGSGGYGSERMRINCCSIRRNKALRRMCFSARGAVSSTQCVLTSDAGPDTLVVRTSFRRNYADPNEVAAVILGGGTGTQLFPLTSTRATPAVPIGGCYRLIDIPMSNCFNSGINKIFVMTQFNSASLNRHIHRTYLGGGINFTDGSVEVLAATQMPGEAAGWFQGTADAVRKFIWVLEDYYKHKAIEHILILSGDQLYRMDYMELVQKHVDDNADITLSCAPVGESRASDYGLVKFDSSGRVIQFSEKPKGAALEEMKVDTSFLNFAIDSPAEYPYIASMGVYVFKRDVLLDLLKSRYAELHDFGSEILPKALHEHNVQAYVFTDYWEDIGTIRSFFDANMALCEQPPKFEFYDPKTPFFTSPRYLPPTKSDKCRIKDAIISHGCFLRECAIEHSIVGVRSRLNSGCELKNTMMMGADLYETEDEISRLLAEGKVPIGVGENTKISNCIIDMXCQGWKERLHNKQRGRPRSRPAGRRILXIRSGIVVVLKNATIKDGTVI

SEQ ID NO: 17022 - protein, 392 aa, Tricomaria usillo
DLEPVNPADVPVTAAGALKSYKLASKAISRLQSLPSGNMSLLCDVLVKEVRDLTGYDRVMVYKFHEDEHGEVVSECRRSDLESYLGLHYPATDVPQASRFLFMKNKVRMICDCLAPPVKVIQDERLPQPLSLGGSTLRSPHGCHSQYMTNMGTIASLVMSVTINEEDERMDGDQQQMTTKLWGLVVCHHTSPRFVPFPLRYACEFLIQVFGVQIDKEVELVAQVREKHILQIQTMLCGMLLRDAPVAIVTQSPNVMDLVKCDGAALYFKSKTWLRGVTPTEEQIKDIAEWLLKYHSGNTGLSTDSLMEAGYPGASVLGDAVCGMAAVGITSRDFLFWFRSHTAKEINWGGAKHDPDDKDDGRKMHPRSSFKAFLEVVKWRSMPWEDMEMDAI

SEQ ID NO: 17023 - protein, 434 aa, Staphylococcus aureus subsp. aureus MW2 [sequence omitted]

SEQ ID NO: 17024 - protein, 157 aa, Vibrio cholerae
GVKRMPIALAKQSELLKQVDLVKPYVDDLVNVVDMAAIQKAKLKIGVDPLGGSGIDYWRQIGNAYQLDLTLVSEAIDPSFQFMSLDKDGVIRMDCSSPYAMAGLLALKDEYDLAFGNDPDYDRHGIVTPKGLMNPNHFLAVCIDYLYRHRQGWAGHV

SEQ ID NO: 17025 - protein, 194 aa, Vibrio cholerae
RANAYISQQLAGVKRMPIALAKQSELLKQVDLVKPYVDDLVNVVDMAAIQKAKLKIGVDPLGGSGIDYWRQIGNAYQLDLTLVSEAIDPSFQFMSLDKDGVIRMDCSSPYAMAGLLALKDEYDLAFGNDPDYDRHGIVTPKGLMNPNHFLAVCIDYLYRHRQGWAGHVAVGKTLVSSAMIDKVVADLGRELCEV

SEQ ID NO: 17026 - protein, 328 aa, Glycine max
MNLMQAVRYDAYGGGPAGLKHVEVAVPSPKANEVLIKLEAVSINPIDWKIQKGLLRPLFLPRTFPHIPCTDVAGEIVEIGTQVKDFKVGDQVLAKLTHQYGGGFAEFAVASESLTAARPSEVSAAEAAALPIAGLTARDALTQIAGVKLDGTGQLKNILVTAASGGVGHYAVQLAKLGNTHVTATCGARNIDFVKGLGADEVLDYRTPEGAALKSPSGRKYDAVINCTTGISWSTFDPNLTEKAVVVDLTPNASSLWTAAMKKITFSKKQLVPFFVNVQREGLEYLLQLVKDGKLKSVIDSKFPLSKAEDAWAKSIDGHATGKIIVEP

SEQ ID NO: 17027 - protein, 500 aa, Agaricus bisporus
MPSIFTHQWDTPVYKGSTSINTGLFINGEFVDGVKNTTIDVVNPANGKLITKISEATEADIDIAVEAAHKAFETTWGLNCSGSKRGDMLYKLAQLMEKNIDDLSAIEALDNGKTFLWAKSVDLSLSISTIKHYAGWADKNFGQVIETDEKKLTYSRHEPIGVVGQIIPWNFPLLMLAWKIGPALATGNCIVLKPSEFTPLSALRMCALIQEAGFPPGVVNVVTGYGSTTGQAISSHMKIDKVAFTGSTLVGRKVMEAAAKSNLKNVTLELGGKSPVVIFDDADLEQSVNWTAHGLFWNHGQACCAGTRIFVQEGIYDKFLQKFTDKIKEIKLGDPFGLGIDQGPQVSQIQYDRIMSYIESGRAEGATVHVGGERHGNEGYFIQPTIFTDTTPDMKIVKEEIFGPVGAVIKFKDGKEVIKQANDSNYGLAAAVFSQDINKAIETAHAFKAGTAWVNCANTIDAGVPFGGYKQSGIGRELGEYALHNYTNVKAVHVNLNWKM

SEQ ID NO: 17028 - protein, 177 aa, Vibrio cholerae
RANAYISQQLAGVKRMPIALAKQSELLKQVDLVKPYVDDLVNVVDMAAIQKAKLKIGVDPLGGSGIDYWRQIGNAYQLDLTLVSEAIDPSFQFMSLDKDGVIRMDCSSPYAMAGLLALKDEYDLAFGNDPDYDRHGIVTPKGLMNPNHFLAVCIDYLYRHRQGWAGHVAVGKTLVSS

SEQ ID NO: 17029 - protein, 446 aa, Zea mays
MAVTITWVKARQIFDSRGNPTVEVDVGLSDGSYARGAVPSGASTGIYEALELRDGGSDYLGKGVLKAVSNVNNIIGPAIVGKDPTEQVEIDNFMVQQLDGTSNEWGWCKQKLGANAILAVSLAVCKAGAMVKKIPLYQHIANLAGNKTLVLPVPAFNVINGGSHAGNKLAMQEFMILPTGASSFKEAMKMGVEVYHNLKSIIKKKYGQDATNVGDEGGFAPNIQENKEGLELLKAAIEKAGYTGKVVIGMDVAASEFFGEKDKTYDLNFKEENNDGSNKISGDSLKDLYKSFVSEYPIESIEDPFDQDDWSTYAKLTDEIGQKVQIVGDDLLVTNPTRVAKAINEKTCNALLLKVNQIGSVTESIEAVRMSKRAGWGVMASHRSGETEDTFIADLSVGLSTGQIKTGAPCRSERLAKYNQLLRIEEELGDAAVYAGAKFRAPVEPY

SEQ ID NO: 17030 - protein, 190 aa, Vibrio cholerae
TQAMKDRANAYISQQLAGVKRMPIALAKQSELLKQVDLVKPYVDDLVNVVDMAAIQKAKLKIGVDPLGGSGIDYWRQIGNAYQLDLTLVSEAIDPSFQFMSLDKDGVIRMDCSSPYAMAGLRARKDEYDLAFGNDPDYDRHGIVTPKGLMNPNHFLAVCIDYLYRHRQGWAGHVAVGKTLVSSAMIDKVV

SEQ ID NO: 17031 - protein, 174 aa, Vibrio cholerae
ISQQLAGVKRMPIALAKQSELLKQVDLVKPYVDDLVNVVDMAAIQKAKLKIGVDPLGGSGIDYWRQIGNAYQLDLTLVSEAIDPSFQFMSLDKDGVIRMDCSSPYAMAGLLALKDEYDLAFGNDPDYDRHGIVTPKGLMNPNHFLAVCIDYLYRHRQGWAGHVAVGKRMVSSAM

SEQ ID NO: 17032 - protein, 458 aa, Azotobacter vinelandii
MSQVSSPNIMFVFPGQGSQYVGMGSDIHRRFSCVRDLYERASQAMGFDVAELSFQGPEERLNGTEFTQIALLTHSIACLAAFRELTGEAWTPNVLAGHSLGEYSALVAAGVLAFEDALRLIRMRGRLMSEFGRGRMAAFRLDLDSIRPLAEARYCGIGGCNLPDQTVVCGFERDLEALMEDVAARFGRSRAGRYLKTEGAFHTYLMIGAAERYRPHLDAAALAAPRARVLSNYTGDYHADDPEQMRAALFFQMFHPVKWMGGLRRAIDDGVNLVVEFGGGIGRDQPGRVHAPESRKPNLEGIMRKAYAASGRRGLYLPAINRATLERAARTLELLRSASPMEPVWVDERHFSLHLPLHQGTVDEDSLGLGRLVQELGLRRVVETEIEEDDDSLLTLKTYCDEGIASAEPYLEVVVGGETGAFLHYRGDAIRHELAALHARLERPAPAIRAAVGGGLAG

SEQ ID NO: 17033 - protein, 219 aa, Arabidopsis thaliana
MEDIVDQELSNYWEPSSFLQNEDFEYDRSWPLEEAISGSYDSSSPDGAASSPASKNIVSERNRRQKLNQRLFALRSVVPNITKMDKASIIKDAISYIEGLQYEEKKLEAEIRELESTPKSSLSFSKDFDRDLLVPVTSKKMKQLDSGSSTSLIEVLELKVTFMGERTMVVSVTCNKRTDTMVKLCEVFESLNLKILTSNLTSFSGMIFHTVFIEIAIAN

SEQ ID NO: 17034 - protein, 284 aa, Alteromonas sp. 'Sargasso Sea s450ah'
QPNAMGGREVGGLANMLAAHMDLENPEHIEAVKTYWDAPVMPKGQTHKAVDLFNAIESGKVKFVWIMGTNPVVRMPNRGQVERALSKCEMVVVSDIVESNDTLNYAHIALPATGWSEKDGTVTNSERRISRQRGILPPPGSAKHDWQTMCNVAAKMGFGEAFNFTHPSQIFCEYAGLTGYHNNGKRQLDLSPLQGLSEAQYNGLSPVQWPFYNAALNTSSPGAKLEANDKPNLISKRPFEDKQFSTPSGKAKLIPVTYKAPLQVTSDAYPFVVNSGRARDQWHT

SEQ ID NO: 17035 - protein, 269 aa, Alteromonas sp. 'Sargasso Sea s450bo'
QPNAMGGREVGGLANMLAAHCDMKTLSTVNVKAFWQSPAMPECGGLKAVDLFSAMDAGQIKFVWIMGTNPVVSMPYREQVESAQKKCDMVVVSDIVQSNDTLAFADIALPATGWSEKDGTVTNSERRISRQRGIMPPPGEAKHDWQIMCDVANKMGFASGFSYSHPSEIFDEHARLTAYKNDGARCLNLARLTGKSQAQYDAMAPVQWPLTINSDKTLSAVRPFHNKVFSTPTGKANFVAVQFLPPTQVTSNAFPFVLKSGRMRDQWHT

SEQ ID NO: 17036 - protein, 267 aa, Pseudoalteromonas sp. 'Barents Sea 16'
QPNAMGGREVGGLANQLAAHLDIENEGHQSLVQRFWLSPTMAKKAGSNAIDMFDEIAAGKIKAVWIMATNPMVSLPNNAAIKKALETCELVVVSDCIAKSDTLKFADVALPSTGWGEKNGTVTNSERRISRQRPLVAPYSGAKNDWQIMCNVAKKMGSERFDFIDPSGIPEQWAQLTDFENNGSRLLSLSGLVGLTKSQYDNLKPTMWPVVKNQSYKNGQVFTNNQFSTADKKARFIPITPQLPVQQTSSDYLFVMNSGRIRDQWHT

SEQ ID NO: 17037 - protein, 257 aa, Pseudomonas fluorescens PfO-1
MPKEMLPVVNKPLIQYGVEEALDAGLNEISIVTGRGKRALEDHFDISYELENQIKGTDKEKYLVGIRKLLDECSFSYTRQTEMKGLGHAILTGRPLIGDEPFAVVLADDLCVNLEGDGVLTQMVKLYKQFRCSIIAIQEVDPQETSKYGVIAGEMIRDDIYRVHSMVEKPKPEDAPSNLAIIGRYILTPDIFDLIEQTEPGKGGEIQITDALMKQAQNGCVMAYKFKGKRFDCGGAEGYIEATNFCFENFYKTGKAY

SEQ ID NO: 17038 - protein, 302 aa, Psychrobacter sp. 'Barents Sea 19'
QPNAMGGREVGALANLLAAHLDLSNGTHRQLVADFWQAPQSIAPEVGIQACDAADAILVGRIKAIWIMATNPVVSLPEADKFCRALAACDLVIVSDCSVDSDTVKCADIVLPAQGWGEKSGTVTNSERRISRQRALKPALGLAKPDWWILSQVATRMGLAGFEYQHPSEIFNEHVALTAYKNDPSQVPSISNQPRYLNLAKDLPMPILNRADYEVMTPFQWGDPRITMAHSNFIAITPSDSASLPNRHQRRSRPKANGHTESDNIASDNREKDNKSDKPHNGHSSTVNLRLITGRLRDQWHT

SEQ ID NO: 17039 - protein, 321 aa, Lyngbya majuscula
MSMPMDVSKKSFKPAKTQKSKTISNDYIKGLQTKHFLLYNVIPTIGTITAIALLWWYPISSVEIGLLIGMWALSMIGMSVGLHRYFAHRAFKTSQTMSVILAILGCMGAQGPVVSWVAVHRRHHEYSDLPGDPHSPNPELLGEGIFGTLRGLWHAHVGWLTNHEYPNPMYYAPELMRDKTISKINRNYVVWIVLGLLIPTILGGIIHGSWIGAVEGLLWGGFVRMFVVDNSILSINSFSHAFGTHPFDSKDQSRNNIWVAIPTFGESWQNNHHTFENSAAIGLKWWQIDLGYCLIWGLEKLGLVWDVKLPTAKMIEAKKLA

SEQ ID NO: 17040 - protein, 1730 aa, Lyngbya majuscula
MMNKEPIAIIGMGCRFPGAKNPEAFWELLCNGIDAITEVPASRWDNELFYDADISKPGKTNSRWGGFLEQVDRFDPHFFGISPRETQTMDPQQRLLLELAWEALEDAGQPPEELAGTPTGVFMGVSSFDYYELIAQNPSNFSTYTGTGNLNCINANRLSYFFDFHGPSMAIDTACSSSLVAVHLACQSLWSAESTLALVGGVHIVTSPWMSVAYAQGGFMAADGRCKTFDAKADGYVRSEGAGLVILKPLSQALANRDRIYALVKGSAVNQDGYSNGLTAPNPLAQEAVLRAAYKNAGVSPGQVQYIEAHGTGTKLGDPMEMKALGAVLSVGRAPGDYCAIGSAKTNIGHLEAPAGIAGLIKVALSLHYRQIPPNLHFNEPNPYIKFDKLPLRVQETLTPWPEKSIPAIAGVSSFGFGGTNSHVVLAEVENREEGVGNKEEERLERPVHLLTLSAKKEAALDELVTSYKNHLQKHPELAIEDVCYTASVGRSHFQYRIAIVTQSIEQLEKRLKSTEKGEETPGVLKGQKIGRKRPKVAFLFTGQGSQYVNMGRELYENQPTFRQALEQCEELLRPYLENPLLEVLYPQDTPNSNSSLLDQTAYTQPALFALEYALCKLWESWGIKPKVVMGHSVGEYVAATVAGVFSLEDGLKLIALRGRLMQQLAAGGEMVSLIAAESRVIEAISDYTNQVAIAAINGPESVVISGEAAAIGAIVNKLESESIKTKQLQVSHAFHSPLMAPMLAEFAAVAQQITYHQPKIPVISNVTGTIADKSIATADYWVEHVVKPVRFVAGIKTLAEQDIGIFLEIGPKPVLLGMGRECLLGSKKLWLPSLRSGKPESLQMLQSLGQLYVQGIKVDWLGFYQDNAPQKILLPTYPWQRKRYWISALEQYKNKDNSGRGDARTRGRGEGKSHENLTLPQEIATKEESRLQQPKLRLSNPALLSFPKTPVAKQQPAKRELAQLRVPLTQAEPAQLTQAYLEAENQDIVLKQEPTKEPKTMNWEQIEQLKQEYEEKGYCQIKKIFDFSEIKRIEETLEQAKQTSDISKEKVTLKLGGIDDIDTNDHAYDLVKYDFVSSFIQEKLALLNYITGKNLMIMHNALFSVEPNRKGLPWHVGVGSFSFTKTEDFGASIWIPLDKITKEYRGGMQYVPIKRFPGQFYYTVFDLHLKNNIRWDESQGDLNEYVANANTIYNKITEDVIDYTIKDAYEEDEYDLGDAFFFNKYVLHQSVPLKPGLHKIRRAFVIRLVDYDTRVDEERLGLFSKYSQLHSRYYKTLPRYNKDSVLVMVSRAVQKGLKSPYLRDIPHVQQTLPERIATGSISFDETPKAGNRVSREDDQEVSAFTQKKPGFLTDSLGSLPQTQQPLKTLQPLPTPQVSSSQVKQVLKEQLAEALYTEESEIAEDQKFVDLGLDSIVGVEWTTTINQTYNLNLKATKLYDYPTLLELAEYIAQTLSSQGTKPQVNQQPLKTLEPLPQLQVNPSEIKQVLKEQLAEALYTEESEIAEDQKFVDLGLDSIVGVEWTTTINQTYNLNLKATKLYDYPTLLELAEYIAQTLASQGTKPQVSQQPLKTLQPLPQLQVNLSEVKQVLKQQLAEALYTDISEIAEDQKFVDLGLDSIVGVEWTTTINQTYNLNLKATKLYDYPTLLELSAYIAQEITATGSSKLPQGNGNGGYSQESSPNHASQGDSSEEMSQKVRLRAILNKVANNELTVQEANQLVQQLKQQVTV

SEQ ID NO: 17041 - protein, 439 aa, Oryza sativa (japonica cultivar-group)
MGAREEVREEEGEEGEGVGGKEEEKAAAAAAAVSCSICLDAVVAAGGERSTARLQCGHEFHLDCIGSAFNAKGVMQCPNCRKIEKGNWLYANGSRPTQDVNMDEWAHDEDLYDVSYSEMPFRFHWCPFGRLAQLPSFFEEGESSPPVTFHDFMGQHMFTEHVAAVSSAPGAAHPCPYVAYLHPLPSLASSSSSHVPERTMDGPAYHDPWHPLAGPSDGRPLQSVQPADFHHNHWAHVPNSYPQPNNNNGVAEQQGVPFGTTRAARVDGDTQRRGSSISPSYFSNGSGSRSRAPNVPPMVPQFMRAHGSISEQYQQSSSSSLFAGAHRSGGMRTAPPPPLPENPAFCLFPPGSSGHNSMETDDAGGNRFYAWERDRFAPYPLMPVDCETNWWSSQQSHGTSEPAPAPRRLFGQWIGVGRSSPENRSPEGSSYRQMHTPRM

SEQ ID NO: 17042 - protein, 101 aa, Schizosaccharomyces pombe
MPSDCKYSVDTELVHVEGNEDQYHASSVPIYQSATFKQPCLEHMGKFDYTRSGNPTRSVLQVHLAKLMKAKHAFVTSNGMSALDMILRCCKSNSHVVAGHD

SEQ ID NO: 17043 - protein, 159 aa, Triticum aestivum
QNSEFLLAKDRIPPSDSHGRKKTKHHKKKHRSSSAHGAGYNAEQRLYSHAFKKSSSLLSRLMKHKFGWVFNKPVDPVALGLHDYFAIIKHPMDLGTIKGQLTRGHYRDPKEFANDVRLTFHNAMTYNPKGQDVHFMAEQLLGIFEAQWPEIEAEVDYLA

SEQ ID NO: 17044 - protein, 419 aa, Lyngbya majuscula
MQSVGIEALSVYGGAAQLDVRKLVQARQLDISRFDNLMMKEKAVSLPYEDPVSYAVNAAKPIIDRLSNADKQRIEMVITCSESGIDFGKSMSTYIQEYLGLSRNCRMFELKQACYSGTAGLQMAINLILSQTFPGAKALVIATDISRFLVAEGGEALSEDWSFAEPSSGAGAVALLVSDTPYIFQVDVGCNGYYGYEVMDTCRPNPDSEAGDADLSLLSYLDCCENAYRHYQNRVEGVDYQESFDYLSFHTPFGGMVKGAHRSMMRRLKRAKPADIEADFQRRVMPGLVYCQQVGNIMGATLFLSLASTIDNGDFSTPRRIGMFSYGSGCCSEFYSGVVTPEGKQIQAQQGISSQLADRYSLSMEEYEQLLYHSSAVAFGTRNVTLDYQLFPGVWKQIAGKGRLVLKAIKEFHREYEWV

SEQ ID NO: 17045 - protein, 345 aa, Oenococcus oeni PSU-1
MDGKVAVLTGTKKIEVKKLPVPEINDDEMLVKVEGCGVCGTDVFEYKSDPFNYIPVNLGHEGTGEIVKMGKNVKNDWTGKTLKIGDKIVCGPAANGDIYGLMGGEKHYFNGWLANYMVINPNSVVFNVSDMPLDLRILIEPAAVSCHAVAKSKEIYTFKHSSSVVVQGVGPIGLMVIAQMKTLGVRHIIAVDGNASRLELAKKIGATATVNIDDGDSVAAVKELTDGKGANFVFQCTGSTKGASTAWKFLTDHGGICEVGFFVDNGEATYNPHFDVCMPETKITGSWAYVPEDWVEATEFLRETKDEGLDMTQLITNVYPLDQMNEAMAKNMSGTGVKIVYKNNQ

SEQ ID NO: 17046 - protein, 387 aa, Arabidopsis thaliana
MNSILSSVLPAPEDPVLSVYSKGFSSISLISFLDDPSPVKLNLSAGTYRTEEGKPLVLDVVRRAEQQLANDLSRDKEYLPLNGLPEFNKLSTKLILGDDSPALKENRVVTTQCLSGTGSLRVGAEFLATHNKESVIFVPNPTWGNHPRIFTLAGLSVQYFRYYDPKSRGLDFKGMLEDLGAAPPGAIVVLQACAHNPTGVDPTFEQWEKIRRLVRSKSLLPFFDSAYQGFASGSLDADAQAVRMFVADGGECLIAQSYAKNMGLYGERIGSLTIVCTSEDVAKKVENQVLLVVRPMYLTPPIHGASIVATILKNSDMYNDWTIELKGMADRIISMRQQLYAALEARGTPGDWSHIIKHIGMFTFTGLSEEQVRLMAKEYHIYMTYDG

SEQ ID NO: 17047 - protein, 392 aa, Tetrapterys discolor
DLEPVNPADVPVTAAGALKSYKLAAKAISRLQSLPSGNISLLCDVLVKEVRDLTGYDRVMVYKFHEDEHGEVVSECRRSDLESYLGLHYPATDIPQASRFLFMKNKVRMICDCLAPPVKVIQDERLPQPLSLCGSTLRSPHGCHAQYMTNMGTIASLVMSVTVNDDDDMMDGDQQQMTRKLWGLVVCHHTSPRFVPFPLRYACEFLIQVFGVQINKEVELTAQVREKHILQIQTMLCDMLLRDAPVAIITQSPNVMDLVKCDGAALYFKKKTWLLGVTPMEEQVRDIAEWLLEYHSGNTGLSTDSLMEAGYPGASDLGDAVCGMAAVSITSRDFLFWFRSHTAKEIKWGGAKHDPDDKDDGRKMHPRSSFKAFLEVVKWRSVPWEDVEMDAI

SEQ ID NO: 17048 - protein, 392 aa, Stigmaphyllon sagraeanum
DLEPVNPADVPVTAAGALKSYKLAAKAISRLQSLPSGNISLLCDVLVKEVRDLTGYDRVMVYKFHEDEHGEVVSECRRSDLESYLDLHYPATDIPQASRFLFMKNKIRMICDCMAPPVKVIQDETLPQPLSLCGSTLRSPHGCHAQYMTNMGTIASLVMSVTINEDDDTMDGDQQQMTRKLWGLVVCHHTSPRFVPFPLRYACEFLIQVFGVQINKEVELAAQVREKHILQIQTMLCDMLLRDAPVAIITQSPNVMDLVKCDGAALYFKNKTWLLGVTPTEEQIRDMAQWLLEHHSGNTGLSTDSLMEAGYPGASALGDAVCGMAAVSITSRDFLFWFRSHTAKEVKWGGAKHDPDDKDDLRKMHPRSSFKAFLEVVKWRSMPWEDIEMDAI

SEQ ID NO: 17049 - protein, 191 aa, Blumeria graminis
MSLRCVVVGDGAVGKTCLLISYTTNKFPSEYVPTVFDNYAVTVMIGDEPYTLGLFDTAGQEDYDRLRPLSYPQTDVFLVCFSVTSPASFENVREKWFPEVHHHCPGVPCLIVGTQTDLRDDLSVREKLNKQKMQPVKREDGERMAKDLGAVRYVECSALTQYKLKDVFDEAIVAALEPPAPKKKHRNCLIL

SEQ ID NO: 17050 - protein, 555 aa, Mycobacterium avium subsp. paratuberculosis str. k10
MTTARPAKARNEGQWALGNREPLNPNEEMKQAGAPLAVRERIETIYAKNGFDSIDKSDLRGRFRWWGLYTQREQGYDGSWTGDENIEKLEARYFMMRVRCDGGAISAAALRTLGQISVDFARDTADITDRENIQYHWIEVENVPEIWRRLDAVGLRTTEACGDCPRVILGSPLAGESLEEVIDPSWAIAEIARRYIGQPDFADLPRKYKTAISGLQDVAHEVNDVAFIGVNHPEHGPGLDLWVGGGLSTNPMLAQRVGAWVPLHEVPEVWAAVTSVFRDYGYRRLRSKARLKFLVKDWGIEKFREVLETEYLKRPLIDGPAPEPVAHPIDHVGVQRLKNGLNAVGVAPIAGRVSGTILLAVADLAQQAGCDRIRFTPYQKLVLLDIPDDKLDEVVAGLEALGLQSQPSHWRRNLMACSGIEFCKLSFAETRVRAQGLVPELERRLADVNRQLDVPITINLNGCPNSCARIQVADIGLKGQMVDDGEGGSVEGFQVHLGGSLGQDSGFGRKLRQHKVTSDELGDYIERVARNFVKYRGEGERFAQWAMRADEDDLR

SEQ ID NO: 17051 - protein, 392 aa, Lophopterys floribunda
DLEPVNPADVPVTAAGALKSYKLAAKAISRLQSLPSGNISLLCDVLVKEVRDLTGYDRVMVYKFHEDEHGEVVSECRKSDLESYLGLHYPATDIPQASRFLFIKNKVRMICDCLAPPVKVIQDERLPQPLSLCGSTLRSPHGCHAQYMTNMGTIASLVMSVTINEDDDTMDGDQQQTTRKLWGLVVCHHTNPRFVPFPLRYACEFLIQVFGVQINKEVELAAQVREKHILQIQTMLCDMLLRDAPVAIITQSPNVMDLVKCDGAALYFKNKIWLLGVTPTEEQIRDIAEWLLEYHSGNTGLSTDSLMEAGYPGASVLGDAVCGMAAVSITSRDFLFWFRSHTAKEIKWGGAKHDPDDKDDGRKMHPRSSFKAFLEVVKWRSMPWEDVEMDAI

SEQ ID NO: 17052 - protein, 392 aa, Mionandra camareoides
DLEPVNPADVPVTAAGALKSYKLAAKAISRLQSLPSGNISLLCDVLVKEVRDLTGYDRVMAYKFHEDEHGEVVSECRRSDLESYLGLHYPATDIPQASRFLFMKNKVRMICDCLAPPVKVIQDERLPQPLSLCGSTLRSPHGCHAQYMTNMGTIASLGMSVTVNEDDDTMDGDQQQMTRKLWGLVVCHHTSPRFVPFPLRYACEFLIQVFGVQINKEVELAAQVREKHILQIQTMLCDMLLRDAPVAIITQSPNVMDLVKCDGAALYFKNKTWLLGVTPTEEQIRDIAEWLLKYHCGNTGLSTDSLMEAGYPGASALGDAVCGMAAVSITSRDFLFWFRSHTAKEIKWGGAKHDPDDKDDLRKMHPGSSFKAFLEVVKWRSMPWKDVEMDAI

SEQ ID NO: 17053 - protein, 392 aa, Aspicarpa brevipes
DLEPVNPADVHVTAAGALKSYKLAAKAISRLQSLPSGNVSLLCDVLVKEVRDLTGYDRVMMYKFHEDEHGEVVSECRRSDLESYLGLHYPATDIPQASKFLFIKNKVRMICDCLAPSVKVIQDERLTQPLSLCGSTLRSPHGCHAQYMTNMGAIASLVMAVTVNEDEDTMDGDQQHMTRKLWGLVVCHHTSPRFVPFPLRYACEFLIQVFGVQVTKEVELAAQVREKHSLQIQTMLCDMLLRDALVAIITQSPNVMDLVKCDGAALYFKNKTWFLGVTPTEEQIRGIAEWLLKYHSGNTGLSTDSLMEAGYPGASGLGDAVCGMAAVSITSRDFLFWFRSHTAKEIKWGGAKHDPDDKDDLRKMHPRSSFKAFLEVVKWRSTPWEDIEMDAI

SEQ ID NO: 17054 - protein, 529 aa, Azotobacter vinelandii
MQNFNMRRTFQADPGRFHEFSMSCCGLFLDYSKNLVTRTTRDLLVNLAREAGVEQAARAMFDGEPVNASERRPALHTALRRPVGDSLLIDGHNIMRDVHAALAQMTDIVGRIHNKLWRGYSDKAITDVVNIGIGGSYLGPELVSEALLPYTQHGVRCHYLANIDGSEFHELTARLNAETTLFIISSKTFGTLETLKNAQAARTWYLASGGSEERLYRHFIAVTSNIPAAIEFGIREKNIFPMWDWVGGRYSLWSAIGLPTALAIGMANFKDLLSGAYAMDCHFRREPFENNMPVLLAMLGVWYGNFWGAQSHAILPYDHYLRNFVKHLQQMDMESNGKSVRQDGSPVSCETGPVIWGGVGCNGQHAYHQLLHQGTLLIPADFIVPVVSHNPVADHHQWLYANCLSQSQALMLGKSREEAEAELRAKGLPEAEVKRLAPHKVIPGNRPSNTLVMETLNPSRLGALIALYEHKVFVQGVIWGINSFDQWGVELGKELGKNVYGRLTSYEAPPAEDSSTQGLIDYFRGRHRG

SEQ ID NO: 17055 - protein, 114 aa, Klebsiella pneumoniae
SLYDIAPVTPGVAVDLSHIPTDVKIKGFSGEDATPALEGADIVLISAGVARKPGMDRSDLFNVNAGIVKNLVQQIAKTCPQACIGIITNPVNTTVAIAAEVLKKADVYDKNKLF

SEQ ID NO: 17056 - protein, 457 aa, Photorhabdus luminescens subsp. laumondii TTO1
MQKYLKEARSLLALGIPVIIAQFSQTAMGVVDTVMAGSVSATDMSAVAVGTSIWLPVILFGYGLLLALTPIIAQMNGSGRRNLIASQTQQGFWLAIFLSIIIIAILYNSKFLIDRQHNIDPILAEKAVGFIHAIMWGAPGYLFYQVLRNQCEGLSKTKPGMVISFLGLLINIPINYIFIYGKFGAPALGGVGCGVATASVYWVMFLLMRWYVKRASSQRDIRPKHRFAAPEWHILKRISALGLPIAMAVFFEITLFAIVALLISPLGVTAVAGHQIAQNFSSLMFMFPISLAAATTIRVGYNLGKKSIENARISAYTGIMVGLVFACLTATFSIILREPIALMYNDNPEVITMASHLMLFAALYQLSDAIQVVGAGVLRGYKDTRSIFYITFIAFWILGLPSGYILGLTDYIVPAMGPQGFWIGFIIGLTASAVMIFARISWTQKQPDEVILQHSTH

SEQ ID NO: 17057 - protein, 586 aa, Oryza sativa
MASHIILPKEEEAALGVAVEEDHDSPAAPGYQHQQGPPVAKALPFSATCVRISRDSYPNLRALRNASAMSLPDDDAAYAKLEEGDYGYLLDDVPHFTDYLSDLPVSADTPPLPTHPCLALVVPLPDSTPATFPNPLQDHPAYSTVKQYFVNADDTVPEKVVVQKDSPRGVHFRRAGPRQRVYFESEDVKACIVTCGGLCPGLNTVIRELVCGLSHMYNVNDIFGIQNGYKGFYSSNYLPMTPKSVNDIHKRGGTVLGTSRGGHDTKKIVDNIQDRGINQVYIIGGDGTQKGAYEIYKEIRRRGLKVAVAGVPKTIDNDIAVIDKSFGFDSAVEEAQRAIDAAHVEASSAENGIGLVKLMGRYSGFIAMYATLASRDVDCCLIPESPFYLEGEGGLFEYIEKRLKENNHMVIVVAEGAGQDLIAKSIAAADQIDASGNKLLLDVGLWLTHKIKDYCKNKKMEMTIKYIDPTYMIRAIPSNASDNVYCTLLAHSAIHGAMAGYSFTVGMVNGRHAYIPFHRVTSTRNKVKITDRMWARLLSSTNQPSFLSQKDIDAAREADKLASKSPVPVNTKEHGENVKKPANGEK

SEQ ID NO: 17058 - protein, 399 aa, Triticum aestivum
MAAVMDYFRSCWGARSRAGRRGKKGSDAAGRQDGLLWYKDAGQAATGDFSMAVVQANNLLEDQSQVESGPLSMADPGPQGPSLAVWGGHGGPDTSRFINDNMFHHLRRFATEHKCMSADVIRKAFQATEDGFLSVVSKEWSMKPQIAAVGSCCLVGVICSGTLYIANAGDSRAVLGRLVKATGQVVAMQLSAEHNACYEEVRQELQSSHPHDPQIVVLKHNVWRVKGLIQISRSIGDVYLKRPEYNRSPLHSKFRLRETFKKPILSSEPAIAVHQIQPSDQFVIFASDGLWEHLSNQEAVDLVQSNPRNGIARKLVKAAMQEAAKKREMRYSDLKKIERGVRRHFHDDITVVVVFLDASAVSRAGWSKSPPVSVRGGGVSVPANSLAPFSAPTMVSSTY

SEQ ID NO: 17059 - protein, 242 aa, Glycine max
VTPQTPPARSHRRRGPPRVTIKINVTHGSSHHDLHLPAQSTFGDVKKLLVNKTGLEPAEQRLFFRGIEKGDNQRLQAEGVKDKSKLFLLEGIGSKERKLEETRKENEMSKAFEAIASVRAEVDKLSNRVTSIEVSINGGNKASEKEFLVLTELLMSQLLKLNGIEAEGEAKLQRKAEVNRVQNLVDKLDSLKARNANPFSNSSNAVKVTTQWETFDSGMESLDAPSDNPSSTKVTQEWERFD

SEQ ID NO: 17060 - protein, 263 aa, Shigella flexneri 2a str. 2457T
MGKLTGKTALITGALQGIGEGIARTFARHGANLILLDISPEIEKLADELCGRGHRCTAVVADVRDPASVAAAIKRAKEKEGRIDILVNNAGVCRLGSFLDMSDEDRDFHIDINIKGVWNVTKAVLPEMIARKDGRIVMMSSVTGDMVADPGETAYALTKAAIVGLTKSLAVEYAQSGIRVNAICPGYVRTPMAESIARQSNPEDPESVLTEMAKAIPLCRLADPLEVGELAAFLASDESSYLTGTQNVIDGGSTLPETVSVGI

SEQ ID NO: 17061 - protein, 368 aa, Pseudotsuga menziesii
IQPFGCMVAVNDKTFEVIAYSENAPDMLQVSAHAVPSVEDQQILCIGSDARTLFTPSSTMALQKAAKFGDLNLLNPILVHSKSSGKPFYAILHRIDVALVMDFEPIKPSDVSTSAMGALQSYKLAAKAISRLQSIPSGNIGLLCDMIAQEVHELMGYDRVMAYKFHDDDHGEVISEIRRSDLEPYLGLHYPATDIPQASRFLFMRNRVRMICDCCAPPVIVIQDKRLPRDLSFCGSTLRAPHGCHAQYMANMGSIASLVMAVVVTEKEEDADSEGQIQQKGRRLWGLVVCHHTSPRYVPFPLRYACEFLMQVFGIHLNKEVELAIQMKEKRILRTQTLLCDMLLRDAPLGIVSQKPNIMDLVKSDGAA

SEQ ID NO: 17062 - protein, 497 aa, Zea mays
  unsure (1)..(497): unsure at all Xaa locations
FCFALQFRPSSSHDTTVTTTNAGAPVWNDNEALTVGPRGPILLEDYHLIEKVAHFARERIPERVVHARGASAKGFFECTHDVTSLTCADFLRAPGVRTPVIVRFSTVIHERGSPETIRDPRGFAVKFYTREGNWDLLGNNFPVFFIRDGIKFPDVIHAFKPNPRSHVQEYWRVFDFLSHLPESLHTFFFLFDDVGVPSDYRHMEGFGVNTYTFVSAAGKAQYVKFHWKPTCGVRCILTDEEAALVGGRNHSHATQDLYDSIAAGSFPEWTLYVQVMEPDTEEQYDFDPLDDTKTWPEDLLPLRPVXRLVLDRNVDNFFNENEQLAFGPGXLVVPGIYYSDDKMLQCRVFAYADTQRYRLGPNYLMLPVNAPRCAHHNNHYDGAMNFMHRDEEVDYYPSRHAPLRQAAPPTPLPPRPVAGRREKATIRKPNDFKQPGXERYRSWDADRQDRFVKRFADSLGHPKVSQELRSIWIDLLAKCDASLGMKIATRLNMKPNM

SEQ ID NO: 17063 - protein, 303 aa, Bacillus cereus ATCC 10987
MTAEYSNALTLAVPTEFSFQENLRYLSRSNNECMFHIEDNKIYKVISVHDVNPLVAISMNTDGHIQIRFLEELYTSEESIHEAVANYVKDWFDLTTDLAPFYTLAKHDVLLQRPIEQYYGLRTLGIPDLFEALSWGIIGQQINLTYAYTLKRRLVEHFGNYVEWNDRKHWIFPSPETIANLHVEDLKNLKMTTRKCEYLIGIAKLITEGKLSKESLLQIQDVKQAEKQLTAIHGIGPWTANYVLMRCLRFPSAFPIDDVGLHNAIKYITGSESKPTKQEIKDFAANWMNWESYATFYLWRVLY

SEQ ID NO: 17064 - protein, 311 aa, Vibrio cholerae
MKVAVIGAAGGIGQALALLLKNRLPAGSDLALYDIAPVTPGVAADLSHIPTPVTIKGYAGEDPTPALEGADVVLVSAGVARKPGMDRADLFNVNAGIVKALAEKIAVVCPKACVGIITNPVNTTVPIAAEVLKKAGVYDKRKLFGVTTLDVIRSETFVAALKDKDPGQVRVPVIGGHSGVTILPLLSQVEGVSFTDEEVAALTKRIQNAGTEVVEAKAGGGSATLSMGQAACRFGLALVKALQGESDVVEYAYVEGEGEYAPFFAQPIKLGKNGVEALLDIGKLSAYEQAALDGMLDTLKGDIQIGVEFVK

SEQ ID NO: 17065 - protein, 689 aa, ASPERGILLUS NIDULANS FGSC A4
MPAITVKPLTPPAGSAIDFGAVITDVDLEHLTVVLKNQHQLTPKAQYELTRRFDPSATQYGHGKTLDAKRSILHPDLKTIPHQPQVQVIGHGFIDSYEGLENITLKHPHHRTFHRDPIPQEDDYDSTRFYRWHIDAALYGLNPPIVTTLLAVKVPGGRRQTVRYDDGSGETMDVPLGTTAFASGERMFELLSEEDKEFALSSRVEYAPHPYIWMSPARSLPTGLGLHSDDLELPLSELPPIDESAIQILPMVWKNPATGKPALQIHPSAVRKIHCGDGTVIDDLKKVREIAYKLQRPAISPQYVYAHDWEEGDLVLFHNRGVLHSVVGAFGEGEIFRQSLVVPWWIAYCGLGADLAVMNAQSLPTSIRALLQASPTSRTVTLVQRPVPSPDPSKDEHLIRVHAACPCAGELNWPTMVAIDKEIITCNDVAGVVVSAPPSSPFQPGTEVYARTSYWRPGDARDYTIATTEELAHRAKNLSWVESAAVPLSAETAWQAFFTHSGIGKFGSEEWKGKRILVTAAAGGVGVWLVQIGALLGARVVGTCGPRNSEFVRGLGATEILDYHRTDFKAWGLQPENKVDLVVDCVGGKALEDAWWTLKDNGTIIGIVQPPEQKRPEDLEVTGVTDKFFIMSPSGKDLEQVTKFVEEGKCWPVVDSVWSLEQFEPGYERLESGHARGKVVFDLMLNVRK

SEQ ID NO: 17066 - protein, 392 aa, Diplopterys cabrerana
DLEPVNPADVPVTAAGALKSYKLAAKAISRLQSLPSGNISLLCDVLVKEVRDLTGYDRVMVYKFHEDEHGEVVSECRRSDLEPYLGLHYPATDIPQASRFLFMKNKVRMICDCLAPPVKVIQDDRLPQPLSLCGSTLRSPHGCHAQYMTNMGTIASLVMSVTINEDDDTMDGDQQQMTRKLWGLVVCHHTSPRFVPFPLRYACEFLIQVFGVQINKEVDLAVQMREKHILQIQTMLCDMLLRDAPVAIITQSPNVMDLVKCDGAALYFRNKTWLLGVTPTEEQIRDIAEWLLKYHSGNTGLSTDSLMEAGYPGASALGDAVCGMAAVSITSGDFLFWFRSHTAKEIKWGGAKHDPDDKDDLRKMHPRSPFKAFLEVVKWRSMPWEDVEMDAI

SEQ ID NO: 17067 - protein, 114 aa, Klebsiella pneumoniae
SLYDIAPVTPGVAVDLSHIPTDVKIKGFSGEDATPALEGADVVLISAGVARKPGMDRSDLFNVNAGIVKNLVQQIAKTRPQACIGIITNPVNTTVAIAAEVLKKAGVYDKNKLF

SEQ ID NO: 17068 - protein, 130 aa, Glycine max
  unsure (1)..(130): unsure at all Xaa locations
IADADATIDYRAGALVHTSFTGLKAMAGFPTMRTNNDITSIASNRGRVQCMQDWPPFGKKMSVTLSYLPDLDDAQLAKEVQYLLMNGWILWLXEFGAEHGFXYRERNRSPGIYHGRYWTMCTLTMTGCTD

SEQ ID NO: 17069 - protein, 414 aa, Clostridium saccharobutylicum
MTCNDIQLLDEADRCLLCKKPRCKENCPIQTSIPEIISLYKENRLREAGEILFNNNPLSAVCSLVCIHEDQCKGNCIKGIKGEPIRFHDIEYEISMKYLEEVRFENLPKDKDRIAIIGGGPAGITIAFILANKGYDVTIFDAHVKIGGVLRYGIPEYRLPKKILDTIEDRLVELGIKIRPNTLIGPVITLDRLYEDGYKAIFIGTGVWNPKTLNIKGETRGNAHFAIDYLKSPEAYRLGEKVAVIGAGNVAMDAARSAKRNGAKEVTVLYRKGFDEMSATKQEIMEAKEDGVIFNLFKSPIEITEKGIRLSSTENVTDENGKIVTKVIEGKEEFFECDSIIIAVSQTPKTNIVSNTKELNTNKWGLIITDEKGNTTRKGTFASGDVVTGAKTVVEAVVQAKTVANTIEEYCKNN

SEQ ID NO: 17070 - protein, 474 aa, Haemophilus ducreyi 35000HP
MSKEIKTQVVVLGAGPAGYSAAFRCADLGLETVIVERYSTLGGVCLNVGCIPSKALLHVAKVIEEAKHADKNGITFGEPIIDLDKVRKGKEAVVSKLTGGLAGMAKARKVTVVEGLAAFTDSHTLVARDRDGNPTTIKFDNAIIAGGSRPIELPFIPHEDPRIWNSTDALKLKEIPKKLLIMGGGIIGLEMGTVYQSLGSEIEVVEMFDQVIPAADKDVVSIYSKQVEKKFKLMLETKVTAVKAEDDGIYVSMEGKACNDTKRYDAVLVAIGRVPNGKLIDVGKAGVEVDERGFIHTDKQMRTNVPHIFAIGDVVGQPMLAHKGVHEGHVAAEVIAGKKRYFDPKVIPSIAYTEPEVAWVGKTEKECKQEGLNYEVAKFPWAASGRAIASECSEGMTKLIFDKDTHRLLGGAIVGSNGGELLGEIGLAIEMGCDAEDIALTIHAHPTLHESVGLAAEVFEGSITDLPNAKAKKR

SEQ ID NO: 17071 - protein, 523 aa, Haemophilus ducreyi 35000HP
MSKQINVPDIGGDEVTVTEVMVNVGDTITIDQSIINVEGDKASMEVPAPEAGVVKQVLVKVGDKVTTGSAMLVLETADAVPQASAPVAASVASAIVEVNVPDIGGDEVNVTEIMVKVGDAVEVDQSIINVEGDKASMEVPAPFAGVVKEILVRSGDKVSTGSLIMKFEVAGAAPAPASATVAPTAVVAPTTNHTQSAKEQGQSSLSQAQVEASSVFAHATPVIRRLAREFGVNLDKVKGSGRKGRIIKEDLQAYVKTAVQVFEQQGGTTVSASGAGLGLLPWPKVDFSKFGEVEEVELSRINKISGANLHRNWVMIPHVTHFDRTDITALEEFRKEQNKLAEKQKLDVKITPVVFIMKAVAKALEAFPRFNSSLSEDAQRLTLKKYINIGVAVDTPNGLVVPVFKNVNKKGIIELSRELMEVSKKARDGKLTASDMQGGCFTISSLGGIGTTHFTPIVNAPEVAILGVSKSETLPVWNGKEFTPRLMLPLSLSFDHRVIDGADGARFLSYINGVLADIRRLVM

SEQ ID NO: 17072 - protein, 257 aa, Pseudomonas putida KT2440
MPRVPVIGITACTSMIELHATQTISEKYARAAAKAACGLPIVIPSLGELMDSADILDVVDGLIFTGSPSNIEPYHYNGPASAAGTHHDQLRDATTLPLMRAAIAAGVPVLGICRGFQEMNVALGGTLHQKVHETGVFMDHREGKDEPLDKQYGPRHTLHVEPGGMLDRMGLPAIFDVNSIHGQGIDVLAPGLRVEALAPDGLVEAISVESSKGFALGVQWHPEFQVMDNPHYLAIFQSFGKACRHRSVLRQRLLLSA

SEQ ID NO: 17073 - protein, 615 aa, Zea mays
  unsure (1)..(615): unsure at all Xaa locations
MASISGAAAPPSSAVCRLRLRRHLLLRPSHLRLRAPHSIADLSRSSNSAPNPARPALGSGPENGSGGVRAVEKDPIKLWERYVEWLYQHKELGIFVDVSRMGFTEEFLRQMEPRMQQAFVDMRELEKGAIANPDEGRMVGHYWLRDPALAPNSFLRNKIETALDRILAFSQDVVSGKILSPSGRSLQSLYXIGGSALGPQFVAEALAPDNPPLKIRFIDNTDPAGIDHQIAQLGPELATTLVIVISKSGGTPETRNGLLEVQKAFRDAGLQFSKQGVAITQENSLLDNTARIEGWLARFPMFDWVGGRTSEMSAVGLLPAALQGIDIKEMLVGAALMDEETRNTVVKENPAALLALCWYWASEGIGNKDMVVLPYKDSLLLLSRYLQQLVMESLGKEFDLDGNRVNQGLSVYGNKGSTDQHAYIQQLREGVHNFFVTFIEVLRDRPAGHDWELEPGVTCGDYLFGMLQGTRSALYANDRESISVTVQEVTPRAVGALIALYERAVGIYASLVNINAYHQPGVEAGKKAAGEVLALQKRVLTVLKEAICENPTEPLTLDEIADRCHCPEDIEMIYKIIQHMAANDRALIAEGSCGSPRSVKVYLGECSVDEDMQAA

SEQ ID NO: 17074 - protein, 90 aa, Glycine max
  unsure (1)..(90): unsure at all Xaa locations
VYHLSHRLKGAFIRNNYDTRSGVLSQLKVLLTGYKNKPPKTADTPFAVLEKTKARDIYEYALXLXVKNEDQDAFERHLLQKKTYYTDAWK

SEQ ID NO: 17075 - protein, 960 aa, Pseudomonas putida KT2440
MINFFDPASDKSSDLGTPARESDVQVSLSIDGRAISVPAGTSVMRAAAMLGTSIPKLCATDSLEAFGSCRMCMVEIEGMRGYPASCTTPVSEGMVVRTETPRLAGLRRNVMELYISDHPLDCLTCSANGNCELQTVAGQVGLREVRYGYDGANHLDEKKDVSNPYFDYEPSKCIVCSRCVRACEDIQGTFALTITGRGFESRVAAAGGENFLASECVSCGACVQTCPTATLTEKSLVQLGQPERSVITTCAYCGVGCSFRAEIKGDQLVRMVPDKNGGANHGHACVKGRFAWGYATHPDRITKPMIRKRLEDPWQEVSWDEAVTYAASEFRRIQLKYGRDSIGGITSSRCTNEEAYLVQKLVRTAFGNNNVDTCARVCHSPTGYGLKQTLGESAGTQSFDSVMQADVVLVIGANPTDAHPVFGSQLKRRLRQGARLIVIDPRRIDLVDSPHARADLHLQLRPGTNVAMLNALAHVIVTEGLLAQSFIDARCETGDFARWRDFVSLPDNAPEVLGPVCGVPAEQIRAAARLYATGGNAAIYYGLGVTEHSQGSTAVMGIANLAMATGNIGREGVGVNPLRGQNNVQGSCDMGSFPHELPGYRHVSNEGVRAEFEQAWGVTLQPDPGLRIPNMFEAALDGSFKALYCQGEDIAQSDPNTQHVTAALLAMECVVVQDIFLNETAKFAHVFLPGSSFLEKDGTFTNAERRISRVRKVMEPLAGKADWEATVALANALGYPMNYRHPSEIMDEIARLTPTFRRISYAELDRHGSLQWPCNDAAPDGTPTMHIDQFVRGKGRFMLTGYVPTDEKVNNRYPLLLTTGRILSQYNVGAQTRRTGNVAWHDADRLEIHPTDAESRGIQDGDWVGIGSRAGQTVLRAKVSTRVAPGVVYTTFHFPESGANVITTDNSDWATNCPEYKVTAVEVVKVFQPSQWQKRYQDFSDEQQRLLKERRTAEKAEVRR

SEQ ID NO: 17076 - protein, 188 aa, Zea mays
PRVRENCRKRSKHIAFYTIDCKDSCGEIFVDLQKHSYVQKKPGGATEQQELTYSSLQEAISVPWNSLPKKTAKLYFAMRVLEDYELSEGRSPGETTLSDIDAVLARRKDMCDKMSLNESRIPTTLVERLLAAGKKEHPPVCAILGGILGQEVIKSISCKGDPVKNFFYFDVADGKGVIEDIPPPPPAK

SEQ ID NO: 17077 - protein, 242 aa, Rhodospirillum rubrum
MTRPVIGITADSEEEGGGYSAMPWYAIRHNYCDSVAKAGGLPVILPHNAEVAEDFLGLIDGLLITGGAFDVDPALFGEAHRHQTVVLKQRRTAFELAILRGALAADMPILGICGGQQLLAVALGGRLIQHIPDVIKDGLAHEQPNPRTEVGHEISVTPGSLLHRITGVEVFGVNSAHHQAVESVPAPVIVDARAADGVIEGVEDPSRRFCLGVQWHPEYAISAADTAIFDAFVAASRGGEGA

SEQ ID NO: 17078 - protein, 197 aa, Zea mays
MRRAKPQQPSPSPEIRYRGVRRRPSGRYAAEIRDPAKKTPIWLGTFDSAEAAARAYDAAARSLRGPTARTNFPGAAASAPRHRARSASASAAAAAPAAVPATSSHSSTVESWSGGAPRVAAPPRSAAAPMEEDDDEDCHSYCGSSSSVLCEDARGDDDDDAAASHAPLPFDLNLPPPIDAAAEADQMGARYDTLLHL

SEQ ID NO: 17079 - protein, 580 aa, Lycopersicon esculentum
MKYLFSKNGGLLEDENSGLYTRDGSVDIKGNPVLKSETGNWRACPFILGNECCERLAYYGIAANLVTYLTKKLHEGNVSAARNVTTWQGTCYITPLIGAVLADAYWGRYWTIATFSTIYFIGMCTLTLSASVPAFKPPQCVGSVCPSASPAQYAIFFFGLYLIALGTGGIKPCVSSFGADQFDDTDPKERVKKGSFFNWFYFSINIGALISSSLIVWIQENAGWGLGFGIPAVFMGIAIASFFFGTPLYRFQKPGGSPLTRMCQVLVAVFHKWNLSVPDDSTLLYETPDKSSAIEGSRKLLHTDELRCLDKAAVVSDNELTTGDYSNAWRLCTVTQVEELKILIRMFPIWATGIVFSAVYAQMSTMFVEQGMVMDTAVGSFKIPAASLSTFDTISVIVWVPVYDKILVPIARRFTGIERGFSELQRMGIGLFLSMLCMSAAAIVEIRRLQLARDLGLVDEAVSVPLSIFWQIPQYFILGAAEIFTFIGQLEFFYDQSPDAMRSLCSALSLLTTALGNYLSSFILTVVTSITTRGGKPGWIPNNLNGGHLDYFFWLLAALSFFNLVIYVFLCQMYKSKKAS

SEQ ID NO: 17080 - protein, 178 aa, Triticum aestivum
  unsure (1)..(178): unsure at all Xaa locations
MAPTVMASSATVVSPFXGLNSTSFLPFSLLSNGSSLCSVSNGGRIMCMHVWPIEGIKKFETLSYLPPLSTDALLKHVDYLIRSKWVPCLEFNKVGFIFREHNPSPWFYYGRYWTMWKLPMFXGCTDATQVINEVEEVKKEYPDAYVPHXSGFDNMRQVQCVSFIAFKPPGCXEESGKA

SEQ ID NO: 17081 - protein, 365 aa, Oryza sativa (japonica cultivar-group)
MQCPNCRKIEKGNWLYANGSRPTQDVNMDEWAHDEDLYDVSYSEMPFRFHWCPFGRLAQLPSFFEEGESSPPVTFHDFMGQHMFTEHVAAVSSAPGAAHPCPYVAYLHPLPSLASSSSSHVPERTMDGPAYHDPWHPLAGPSDGRPLQSVQPADFHHNHWAHVPNSYPQPNNNNGVAEQQGVPFGTTRAARVDGDTQRRGSSISPSYFSNGSGSRSRAPNVPPMVPQFMRAHGSISEQYQQSSSSSLFAGAHRSGGMRTAPPPPLPENPAFCLFPPGSSGHNSMETDDAGGNRFYAWERDRFAPYPLMPVDCETNWWSSQQSHGTSEPAPAPRRLFGQWIGVGRSSPENRSPEGSSYRQMHTPRM

SEQ ID NO: 17082 - protein, 1131 aa, Glycine max
MSTSRPSQSSSNSRRSRHSARMAQATVDAKIHATFEESGSSFDYSSSVRVSGTADGVNQPRSDKVTTAYLRGKMIQPFGCLLAIDEKNHMQTCKVIAYSENEPEMLTMVSHAVPSVGDHPALGIGTDIKTLFTAPSVSGLQKALGCADVSLLNPILVHCKTSGKPFYAIVHRVTGSLIVDFEPVKPYEVPMTAAGALQSYKLAAKAITRLQSLPSGNMERLCDTMVQEVFELTGYDRVMAYKFHEDDHGEVIREITKPCLEPYLGLHYPATDIPQASRFLFRKNKVRMIVDCHAKHVRVLQDEKLQFDLILCGSTLRAPHSCHAQYMANMDSIASLVLAVVVNDNEEDGDTDAVQPQKTERLWGLVVCHNTTPRFVPFPLRYAREFLPQVFADHVHKEIELEYQIIEKNILHHPGHLLCMLMRDAPLGIASESPNIMDLVKCDGAALIYRNKVWRLGVTPSEPQIREIALWLSEYHMDSTSFSTDSLFDAGFPSALSLGDVVCGMASVRVTAKDMVFWFRSHTAAEIRWGGAKHEAGEKDDSRRMHPRSSFKAFLEVVKARSLPWKEYEMDAIHSLQIILRNAFKEDTESLDLNAKAINTRLRDLKIEGINDLKIERMQELEAVTSEIVRLDYTATVPILAVDVDGLVNGWNIKIAELTGLPIGEATGKHLLTLVEDSSTDRVKKMLNLALLGEEEKNVQFEIKTLGSKMDSGPISLVVNRCASRDLRDNVVGVCFVAHDITAQKNVMDKFIRIEGDYKAIVQNRNPLIPPIFGTDEFGWCCEWNPAMMKLTGWKREEVMDKMLLGEIFGTQMAACRLKNQEAFVNLGVVLNKAMTGSETEKVPFGFFARNGKYVECLLSVSKKLDVEGLVTGVFCFLQLASPELQQALHIQRLSEQTASKRLNALSYMKRQIRNPLCGIVFSRKMLEGTDLGTEQKQLLRTSAQCQQQLSKILDDSDLDTIIDGYLDLEMAEFTLHEVLVTSLSQVMEKSNGKSIRIVNDVAGHIMMETLYGDSLRLQQVLADFLLISINFTPNGGQVVVAGSLTKEQLGKSVHLVKLELSITHGGSGVPEVLLNQMFGNNGLESEEGISLLIRAKLLKLMNGDVRYLREAGKSAFILSAELAAAHNLKA

SEQ ID NO: 17083 - protein, 435 aa, Arabidopsis thaliana
MRKELCRNFQRGSCRYGENCRFLHPQQAKPNNPFGFGTQNQQQQQQQQQQNSSNPFGFGVQSGGSSRPNQFQNTWSRTASTPTGGGAAASTQQTGKQTQPADHKCTDPAACKRVMQDDFKNERPMWKLTCYGHWKYFPCDVTGDISYEELRAVAYEEAKRGIPLQSIVERERNLQNSKIAEFENFLRNPYKGSVTANQSPFAATTPSIFPQSSQINSPSPAFSGFNQQTAFSNTNAGGLSSSGPPNAFASFNQQTTFPNTNAGGVSSSGPPNPFASFTQQSNNQQTAFSNTNAGGLSSSGPPNAFASFNKQPNAFSVNTPQPVPSGPSGFQTNPSTTFKPASFGPGPGFATTPQNNNIFGQSTPTPATNTSQNNQTAFNFNVPVASFTAPAINTTNTSSGTELQIGGDPVDSSIWLKEKWNPGEIPEQAPPDAFV

SEQ ID NO: 17084 - protein, 398 aa, Leuconostoc mesenteroides subsp. mesenteroides ATCC 8293
MTYKNEQNTNILYKGNKINPNRVSDPEVMPLYLSTAHNVADLDDLQNTYDRKGYAYTRSHNANRDGIAELMTYLEQSENSVITNTGMSAISTTLLALLTSGDHVVADKTLYGESIDFLKTLSKYGILVDFVDITNLDEVASVINANTRILYTETVSNPMMTVANIKAIADLAHSHQSYLIVDNTFMTPVLFHALTDGADVVINSLTKFANGHGDVTLGSISAKAEIIEKIYNLQVLLGTTGDPFDSWLATRGIRTLDLRVKKQSSNALSLATFLENHQLISKVYYAGLKSHPQHDLAEAQFSNQYGGMLSFELKGDRQTINKFLQELNLTKYAMTLGGIRTTISHPVSSSHYDTPEEEKAKIGITDQLLRVSVGIEDEADLIHDFEYALSQIELEEGE

SEQ ID NO: 17085 - protein, 399 aa, Leuconostoc mesenteroides subsp. mesenteroides ATCC 8293
MKGTPLMTKNINKNVHNTGLSGIRLVSNFIKKPVNEVIQLTVGEIDLPTPFATKQAGIKAIEQDHTKYTDNMGILALRRIITEYAQEFYSEPYNPVTEVLVTVGASEGIDLAIRALVNPGDEVILVSPGYTAYTQAVTLAGGVPVVVDTRSSNFRLLPNQLEEVISEKSKLVILNYPNNPSGVVLSSQELVELANVIKRHDLYVLTDDVYNRLVYDQDFAPSIASVPDMKERTLVLNGLSKSHSMTGWRIGYLLGPECLIHELYKIHQTDVGCASSISQEAAMTALTVDRDNPSEIVPIFRERRDYVLKRLDEIGISYIKPEGTFYVFANIEKFGMTSLDFVKFLIETVDLAVVHGSAFTEFGEGFIRISYAMDLSILKEALDRFQAAVAKLNNQKSLS

SEQ ID NO: 17086 - protein, 113 aa, Zea mays
IKRRGGYGKMVQRELEAQRELVDYGGSFQPNAPPPYERGERKRGYGDSHRNARGDYQRKRYRSSDDRSAPEESKRAPDSDPAVLAMLLDKNPRFREKGDSDEEDDDYDKRRRR

SEQ ID NO: 17087 - protein, 335 aa, Bacillus cereus ATCC 14579
MCGITGWVDYKRSLEGERDVVTKMAETLAKRGPDDNKVWIKGNVAFGHKRLIVVDPEGGKQPMTCLKDETNYAICYNGELYNTEDIRKELLRRGYRFKGHSDTEVLLASYIEWKEECVDHLNGIYAFAVWDEQKEQVFIARDRLGVKPLFYKYDSGRLLFGSELKAILSHPDVKAEVTLEGLSEIFGLGPSRTPGHGIYAGIKELRPGHAMTFSKNGLCIWRYWNVESKKHEDSFEETVEKTRFLLQDAITRQLVSDVPLCTFLSGGVDSSAITAIAAKEYERSGKGQLHTYSIDYEDNDKYFKANAFQPNSDAPFINLMTETFQTNPSSLRHFE

SEQ ID NO: 17088 - protein, 114 aa, Klebsiella pneumoniae
SLYDIAPVTPGVAVDLSHIPTDVKIKGFSGEDATPALEGADVVLISAGVARKPGMDRSDLFNVNAGIVKNLVQQIAKTCPQACIGVITNPVNTTVAIAAEVLKKAGVYDKNKLF

SEQ ID NO: 17089 - protein, 114 aa, Klebsiella pneumoniae
SLYDIAPVTPGVAVDLSHIPTDVKIKGFSGEDATPALEGADVVLISAGVARKPGMDRSDLFNVNAGIVKNLVQQIAKNCPQACIGVITNPVNTTVAIAAEVLKKAGVYDKNKLF

SEQ ID NO: 17090 - protein, 399 aa, Ralstonia eutropha JMP134
MNPRLDLLQPYPFEKLRVLFAEVKPADKPAISFGIGEPKHPTPEFIKKALAESLAGLANYPTTAGSDALRQCIATWLERRYGLPKVNAATEVLPVTGSREALFAFAQTVVDGTRSGALVLCPNPFYQIYEGAALLAGATPVFANSDPARNFAPAFDRIADDVWKNVQLLFVCSPGNPTGAVLSLEDWKQLFALSDKYGFVIASDECYSEIYFDESRAPLGALEAAHKLGRGFERLVMFSSLSKRSNVPGLRSGFVAGDAALLKKFLLYRTYHGGAMNPAVQTASIAAWNDEAHVRENRAAYVRKFSEVTPMLAEVLDVALPDAGFYLWADVSRTGLNDVEFAAQLLAAQNVTVLPGSYLAREADGINPGANRVRMALVATPEECLEGARRIVEFCKSLG

SEQ ID NO: 17091 - protein, 306 aa, Clostridium perfringens str. 13
MNKKIRKAIIPAAGLGTRFLPATKAQPKEMLPIVDKPTIQYIIEEAIASGIEEILIITGRSKKCIEDHFDKSVELEMELEKSGKNELLDLVRDISDMVDIHYIRQKEPRGLGHAIHCAKTFVGDEPFAILLGDDVVYNEEKPCLKQLIDCYNEYKTSVLGVQTVPESHVSKYGIVDGKHIEGKVYKVKGLVEKPSVEEAPSNVAILGRYIVTPRIFDILEKTKPGKGGEIQLTDALLELMGQEAMYAYDFEGRRYDVGDKLGFLEATVEYALRRPELREGFVEYLNNLSEKESLFKKEVEKEIVTV

SEQ ID NO: 17092 - protein, 489 aa, Halobacterium sp. NRC-1
MSDLDFGDVDWNVQYIDGEYVPPGDRGTLEVDDPSTRELFTEIPAGTTDDVDAAYEAAADAQTEWADTPPQERARIVAAASEILASHRDEVVDLLATESGTTYTKGAAEFEASVGITDEAASFPTRMNGDHKQSVVEGKENIVVREPQGVVGIISPWNFPLNLSIRAVAPAVAAGNSVVLKPASNTPVTGGLLIAKVFEAAGLPEGVFNVVTGKGSEIGDRIAGHPHADVISFTGSTAIGRQVAATAGENLALPAMELGGNNVHIVTEDADLDDAVDSGVFGSFLHSGQICISINRHVVHEDVYDEYVERLTERAAALPTGTAHDADTVVGPIIDESQRDQILDYIERTVDAGATLETGGDHDGLVVEPTVLSDATNDMAAACNEHFGPVAPVIPFSDDDEAVEIANSTEYGLSGSVHAGDTGRARDIADRIDTGMIHINDQPVNQEPHLPFGGYKNSGLGRYNGEYVLNEFTQEKWVSIQRETRDYPF

SEQ ID NO: 17093 - protein, 484 aa, Oryza sativa (indica cultivar-group)
MFGGGGGGRKPLDYEELNENVKKVQYAVRGELYLRASELQKEGKKIIFTNVGNPHALGQKPLTFPRQVVALCQAPFLLDDPNVGLIFPADAIARAKHYLAMAPGGLGAYSDSRGIPGIRKEVAEFIERRDGYPSDPELIYLTDGASKGVMQMLNTIIRNERDGILVPVPQYPLYSAAISPFGGSLVPYYLEEEANWGLDFVNLRQTVASARSKGITVRAMVIINPGNPTGQCLSEGNIKELLKFCFHENLVLLADEVYQQNIYQDERPFISARKVLFDMGPPMSREVQLVSFHTVSKGYWGECGQRGGYFEMTNLPPKTVDEIYKVASIALSPNVPGQIFMGLMVNPPKPGDISYLKFSAESKSILESLRRRARLMTDGFNSCRNVVCNFTEGAMYSFPQIRLPPKAIDAAKRAGKAADVFYCLKLLEATGISTVPGSGFGQKEGVFHLRTTILPAEEDMPAIMTSFKKFNDTFMDQYDGYSRM

SEQ ID NO: 17094 - protein, 291 aa, Zea mays
MSAGRQAYWCYQCRQRVRPRGREMVCPYCDSGFVAEMDDVDALMSHFVGTDPDFHRDPRFGIMEAISAVMRHGMAGMNREVDVRGRPNFFSDLEMEFGSGPWLLFRGQLPGHLTEDNGFDVFVNGRRGGGGGGGMRRANIADYFVGPGLDDLIEQLTQNDRRGPPPAAQSSIDAMPTVKITQRHLSGDSHCPICKEKFEMGSEEAREMPCKHLYHSDCIVPWLEQHNSCPVCRYELPPQGSATGASCSRARSTDQSQSSSSSSSSGRTSGRQRRRNPFSFLWPFRSSSSSR

SEQ ID NO: 17095 - protein, 416 aa, Escherichia coli K12
MESKVVVPAQGKKITLQNGKLNVPENPIIPYIEGDGIGVDVTPAMLKVVDAAVEKAYKGERKISWMEIYTGEKSTQVYGQDVWLPAETLDLIREYRVAIKGPLTTPVGGGIRSLNVALRQELDLYICLRPVRYYQGTPSPVKHPELTDMVIFRENSEDIYAGIEWKADSADAEKVIKFLREEMGVKKIRFPEHCGIGIKPCSEEGTKRLVRAAIEYAIANDRDSVTLVHKGNIMKFTEGAFKDWGYQLAREEFGGELIDGGPWLKVKNPNTGKEIVIKDVIADAFLQQILLRPAEYDVIACMNLNGDYISDALAAQVGGIGIAPGANIGDECALFEATHGTAPKYAGQDKVNPGSIILSAEMMLRHMGWTEAADLIVKGMEGAINAKTVTYDFERLMDGAKLLKCSEFGDAIIENM

SEQ ID NO: 17096 - protein, 437 aa, Haemophilus influenzae R2866
MEILMKSGDLNKYDLVKNTLVLVLAGGRGSRLHELTDKRAKPALYFGGNRRIIDFALSNCINSDLNRIGVVTQYAAHSLLRHLQTGWSFLPQERGEFIDMLPARQQIDDSTWYRGTADAVYQNMAIIKNHYRPKYILILAGDHIYKQDYSVMLMDHVNSGAKCTVGCIEVPRSEAHEFGVMAVNENLKVKAFVEKPKDPPAMVGKPDVSLASMGIYVFDADYLYKMLEREVNTPQTSHDFGKDVLPKCLAEETLYAHPFSRSCMGRNTEGEIYWRDVGTLDSFWQSNIDLVSENPQLDIYDQSWPIRGNPIQAYPSKFFYKHSNVHPVDNSLIGGGCVITDASISNSVLFDHIKIDAFSKVDHCVVLPQVKIGKNCVLKNCIIDRECEIPDGMQIGVNMEEDKKRFRISSTGKVILVTSKMLKILEGHEIGEEGHLD

SEQ ID NO: 17097 - protein, 240 aa, Oryza sativa
  unsure (1)..(240): unsure at all Xaa locations
MARPTMLACCKLYISESRNAAALRAIEQAACGGGAVVVNRFTDDAYNRVGYTLVAPLTPSPAPPPPXAVPTFLFGAVHREGRTLASIRRQLGYFKPNSSGDQWRGAPETDALPVAPDAGPERSPRSKGVVVVGATGWVDNYNVPVRTGDVEAARRIARAVSERGGGLPSVQAMGLAHGGGVVEVACNLLDPARVGAEQVQGMVERLAAGEGLSVGKGYFTDYSQDKIVELYFKSAANTEG

SEQ ID NO: 17098 - protein, 519 aa, Neurospora crassa
MAPEHKACLIVIDGWGIPSEESPKNGDAIAAAETPVMDELSKSATGFSELEASSLAVGLPEGLMGNSEVGHLNIGAGRVVWQDVVRIDQTIKKGELSQNEVIKATFERAKNGNGRLHLCGLVSHGGVHSKQTHLYALLKAAKEAGVPKVFIHFFGDGRDTDPKSGAGYMQELLDTIKEIGIGELATVVGRYYAMDRDKRWERVEVALKGMILGEGEESTDPVKTIKERYEKGENDEFLKPIVVGGDERRIKEDDTVFFFNYRSDRVRQITQLMGGVDRSPLPDFPFPNIKLVTMTQYKLDYPFDVAFKPQQMDNVLAEWLGKQGVKQVHIAETEKYAHVTFFFNGGVEKVFPLETRDESQDLVPSNKSVATYDKAPEMSADGVANQVVKRLGEQEFPFVMNNFAPPDMVGHTGVYEAAIVGCAATDKAIGKILEGCKKEGYILFITSDHGNAEEMKFPDGKPKTSHTTNKVPFIMANAPEGWSLKKEGGVLGDVAPTILAAMGLPQPAEMTGQNLLVKA

SEQ ID NO: 17099 - protein, 458 aa, Xanthomonas axonopodis pv. citri str. 306
MSVSSAPPSATPGFASEVRTTGLLALPLVLGHVSTGLIGFVDNVIAGHHGTATLAAVTIGTSLLWLPMLVPIGTLISLTASVSQLLGAGREREIGPLFRQALWLSLGLSALMFVFLSVVPPLLPTFGIAPDIVPGATAFLHAVRWGVPALTFYFCMRYLSEGMHWTLPTMLLGFGGLLVLAPVGYALTYGKFGFAEHGAEGLGMASAITMWVQASVFALYLWRARRFAHLQLFAHLEGPRWRAIGELLRTGLPIGITVLMEGGLFIVTALLIGRLGSTEAAAHQIAINVAQLCFMIPMGVAEATTVRVGHAVGRGDPQAMRRAAWAGYAIVLGTQALSASALLLGHDAIVGVYTDDVAVAALASVLLLFAATFQFPDGIQVLSAGALRGLKDTRVPMFLAMFSYWGVGMPIGAGLGLGLGWGPKGMWVGLILGLTVASILMGLRFRQTSRRLTATVTP

SEQ ID NO: 17100 - protein, 508 aa, Bifidobacterium longum
MKNKVQLITYADRLGDGTLSSMADILRTRFDGVYDGVHILPFFTPFDGADAGFDPIDHTKVDERLGSWDDVAELSKTHNIMVDAIVNHMSWESKQFQDVLEKGEESEYYPMFLTMSSVFPNGATEEDLAGIYRPRPGLPFTHYKFAGKTRLVWVSFTPQQVDIDTDSDKGWEYLMSIFDQMAASHVSYIRLDAVGYGAKEAGTSCFMTPKTFKLISRLREEGVKRGLEILIEVHSYYKKQVEIASKVDRVYDFALPPLLLHSLFTGHVEPVAHWTEIRPNNAVTVLDTHDGIGVIDIGSDQLDRSLKGLVPDEDVDNLVNTIHANTHGESQAATGAAASNLDLYQVNSTYYSALGCNDQHYLAARAVQFFLPGVPQVYYVGALAGRNDMELLRRTNNGRDINRHYYSTAEIDENLERPVVKALNALAKFRNELPAFDGEFSYEVDGDTSITFRWTAADGTSTAALTFEPGRGLGTDNATPVASLAWSDAAGDHETRDLLANPPIADID

SEQ ID NO: 17101 - protein, 597 aa, Zea mays
MASSASLQRFLLPSSHAAATAASPSSRLRRTGRARAAVSVPPPAAAGEQVPTERLEPRVEERAGGYWVLKEKYRAGLNPQEKVKLEKEPMALFMEGGIQDLARVPMEQIDAAKLTKDDVDVRLKWLGLFHRRKHQYGRFMMRLKLPNGVTTSEQTRYLASVIEAYGADGCADVTTRQNWQIRGVTLPDVPAILDGLRAVGLTSLQSGMDNVRNPVGNPLAGVDPHEIVDTRPYTNLLSSYVTNNSQGNPTITNLPRKWNVCVIGSHDLYEHPHINDLAYMPAVKDGEFGFNLLVGGFISPKRWAEALPLDAWVAGDDVVPVCKAILEAYRDLGSRGNRQKTRMMWLIDELGMEVFRSEVEKRMPNGVLERAAPEDLVDKRWERRDYLGVHPQKQEGLSYVGLHVPVGRLQAADMFELARLADEYGTGELRLTVEQNIVLPNVSNERLDALLAEPLLQEQRLSPRPSMLLRGLVACTGNQFCGQAIIETKARALQVAREVEKRVAVPRPVRMHWTGCPNSCGQVQVADIGFMGCLTKDSDGKIVEAADIFVGGRVGSDSHLADVYRKSVPCKDLVPIVADLLVERFGAVPREREEDEE

SEQ ID NO: 17102 - protein, 245 aa, Saccharomyces cerevisiae
MGSRRYDSRTTIFSPEGRLYQVEYALESISHAGTAIGIMASDGIVLAAERKVTSTLLEQDTSTEKLYKLNDKIAVAVAGLTADAEILINTARIHAQNYLKTYNEDIPVEILVRRLSDIKQGYTQHGGLRPFGVSFIYAGYDDRYGYQLYTSNPSGNYTGWKAISVGANTSAAQTLLQMDYKDDMKVDDAIELALKTLSKTTDSSALTYDRLEFATIRKGANDGEVYQKIFKPQEIKDILVKTGIT

SEQ ID NO: 17103 - protein, 166 aa, Oryza sativa
  unsure (1)..(166): unsure at all Xaa locations
CITAARSDAGLYAVSYDDAMGRKLLIQALCHTEQGCTQVGGLRPFGAAYSXLQWYKHHGFQLYMSDPCGNYRGWKDVARGANSQVGQCMLKQDYRDGLTXREEAVLLRVKVLSKTMDSTSSTAEKLELAEVFLQPGXGEVQXQVCSPEAMGKLLAKAGLSQPAPEA

SEQ ID NO: 17104 - protein, 488 aa, Bacillus cereus ATCC 14579
MNPNNRLTTNQGAPVGDNQNSRTAGRRGPVLLEDYHLVEKLAHFDRERIPERVVHARGAGAHGVFVTKNSMKQYTKAAFLQNEGTETPVFVRFSTVIHGQGSPETARDPRGFAVKFYTEEGNYDIVGNHLPVFFIRDAIKFPDMVHSLKPAPDTNIQTPDRYWDFMTLSPESTHMMTWVFSDYGTPASYREMEGFGVHSFKWINEEGKIVYIKYHWKPQQGVRNLNAKEVQEVQGKDFNHATRDLFDAIEKGNHPKWDLHVQVMQLDEMDSLDFDPLDPTKVWPEDRFPLIEVGTMTLNRNPKNFFAEVEQVAFSPSATVNGIEPSEDKLLQGRLFSYPDTQRYRLGANYLQIPVNCPYAAVHNQQRDGAMQVNQNPSTINYEPSRHAENPVEDPAYRDSTMKVEGYVSREKIEKPNDFKQAGERYRSFSKEEQDNLIANLTNDLKDVNERTKLLAVCNFFRADQEYGMRLAQALNVDITQYVGNAPK

SEQ ID NO: 17105 - protein, 410 aa, Bacillus cereus ATCC 14579
MNMGDTVFMFVTTVMVMLMTPGLALFYGGMVRSKNVLSTTMHSYSAMAIVSIQWIVIGYSLSFGPDWHGLIGTLDWFGLNGVTYAPNPDYSSTIPHNLFMMFQLMFAILTPALISGAFAERMRFSAFLIFILLWTTIVYNPVAHWVWGVGGWLREFGALDFAGGNVVHITSGVAGLVLAIFLGKRKNINGSSPHHLPFTMLGAGLLWFGWFGFNVGSALSLNDVALTAFINTNIAAAASALTWMLSEWFFQSKPTAMGAACGAVSGLVAITPACGFVTPFSALLIGAIGGVLCFGAVFFLKTKFGYDDTLDAFGCHGIGGTWGGIATGLFATTAVNGDGANGLFYGNASLLLKQLVAIGATYAFTIIMTYAIIKAINFFLPVRVDEHEEHMGLDISMHGEKAYEYTERVN

SEQ ID NO: 17106 - protein, 113 aa, Zea luxurians
  unsure (1)..(113): unsure at all Xaa locations
MGRRACCAKEGVKRGAWTTKEDDALAAYVKAHGEGKWREVPQKAGLRRCGKSCRLRWLNYLRPNIRRGNISYDEEDLIIRLHKLLGNRWSLIAGRLPGRTDNEIKNYWXSTLV

SEQ ID NO: 17107 - protein, 751 aa, Nostoc sp. PCC 7120
MNINDITIPFQVDLSNCSKEPIHIPGLIQPHGVLLVLQEVDLTILQVSNNTFNILGRHPEQLLNQHLSCLLEAEQLSLLKDCLAQEDLQIINPLEFIIKSHNESISFDVIAHRSNNLLILELEANLSDKTHSFFRFYHLVKLAMLKLQGTATTTEISQILAQEVRKITGFDRVMVYRFDEQWNGKVIAEVKPEYLTSYLGLNYPASDIPQQARKLYSQNWLRLIPDAKYQPVPIVPINNPLNDQPLDLSRSVLRSVSPLHIEYMQNMGVTASMSISIMKNQKLWGLIACHHQSPKYIPYEIRSACEFLGQMTSVEMSAKEDSEDTEDKIQVKSVHSKLVQYMSAENDFINALIDHQPNILDLVKAQGAAVCFNGNSCTVGQVPPMPDIQVLVEWMSQNIHEEIFATDSLATVYPDAEKLRDVASGLIALSISRSQKNYILWFRPEVVRTVDWGGNPHKPVEVIANGEIRLSPRKSFDLWKETVLLKSQPWKSHEVNAALELRSAIIGIVLQKADELAQLNIELERSNQELDAFAYIASHDLKEPLRGIHNYSNFLMEDYGEIIDAPGKEKLLTLIRLTQRMEDLIDSLLHFSRLGRVDLSMQDTDLNEIVHRILDMLSGRIEETGVEIRILQLLPVVYCDRIQIGEVFSNLIANSIKYNDKANKWIEIGYIDNPPLPPTFYVRDNGIGIREKHFETIFRIFKRLHSPSKYGGGTGAGLTIAKKIVERHGGKIWVESTYGEGSTFYFTLQDV

SEQ ID NO: 17108 - protein, 453 aa, Xylella fastidiosa Ann-1
MAVSFVISRFGSEVRPTLLLALPLVLGHVSTGLIGFVLNVIAGHHSTVTLAASTIGTALLWLPMLVPMGTLISLTVLVSQLHGAERERDIGPLFRQALWLAMLLGLVMFTFLSVVPALLPLFGIVPDIVPGAAKFLHVVRWGSLAFPLYFCMRYFCEGMHCTFPTMLLGFGGLLVLVPLSYALTYGRFGFAEYGVEGLGIATVTVMWLQAVVFALYLWRSRRFAHLQLFAHLELPCWAPIRDLLNIGLPIGISILMEGGLFIVTTLLIGRFGTDEIAAHQIALSVAQLCFMIPMGVAEATTVRIGHAVGRCDLLVMRRVAWAGYAIVIGTQTLSASVLLLGYDVIVAAYTDDLVVASLASKLLLFAAIFQFPDGLQMLSSGVLRGMKDTRVPMLLAMISYWGLGMPLGLGLGFALEWNSRGMWIGLIIGLTAAAVLLGWRFRVVSERMFAGIP

SEQ ID NO: 17109 - protein, 188 aa, Zea mays
  unsure (1)..(188): unsure at all Xaa locations
MASSMLSSAAVVTSPAQATMVAPFTGLKSSAAFPVTRKANNDITSIASNGGRVSCMKVWPPVGKKKFETLSYLPDLTEVELXKEVDYLLRNKWIPCVEFELEQXDFVYREHGSTPGYXIDGRYWTMWKLPLXFGCTDSAPRGLKEVQEXKTEYPNAFIRDSSIEQTGPGSKGASFSSPTNHKGFPGGV

SEQ ID NO: 17110 - protein, 475 aa, Bordetella parapertussis 12822
MSKQFDVVIIGAGPGGYIAAIRAAQLGMSVACIDAWQNGQGGPAPGGTCTNVGCIPSKALLQSSEHYEQANHHFAEHGIEVKGVSLKLDTLIGRKNTVVKQNNDGILYLFKKNKVTYFHGKGAFAGQVDGGWSIKVTGTTDADLVAKHVIVATGSSARELPGLPFDEKNILSNDGALNIGAVPKKLGVIGAGVIGLEMGSVWRRLGAEVTILEAMPEFLAAADQQVAKEALKSFAKQGLDIQTGVKIGEIKAAAKSITVPYVDAKGAEQKLVVDKLIVSIGRVPYTGGLNAEAVGLKLDERGFVAVDEDCKTNLPNVWAVGDVVRGPMLAHKAEEEGVAVAERIAGQHGHVNFATVPWVIYTSPEIAWVGKTEQQLKAEGREYKAGSFPFMANGRARALGDTTGFAKVIADAKTDEVLGVHIIGPMASELISEAVTIMEFRGAAEDIARICHAHPTLSEAVKEAALAVDKRTLNF

SEQ ID NO: 17111 - protein, 405 aa, Bordetella parapertussis 12822
MAITDVLVPQLSESVSEATLLTWKKQAGAAVEADEILIEIETDKVVLEVPAPSSGVLSEIVMGDGSTVTSGEVIARIDTAAKAAAAPAAAAEAPAAAAAAPAAAAPAAASSAASGVASPAAAKILAEKGVDAASVAGTGRDGRVTKGDALAAGNAPAAKAAAPVAPPTLSLDGRPEQRVPMSRLRARIAERLLQSQAENAILTTFNEVNMQAVMDLRARYKDKFEKEHGVKLGFMSFFVKAAVAALKKYPVLNASVDGKDIIYHGYFDIGIAVGTPRGLVVPILRNADQLTIAEIEKTIADFGKRAADGKLGIEEMTGGTFSISNGGVFGSMLSTPIINPPQAAILGIHATKERPVVENGQIVIRPINYLAMSYDHRIIDGREAVLGLVAMKEALEDPQRLLLDL

SEQ ID NO: 17112 - protein, 113 aa, Zea luxurians
MGRRACCAKEGVKRGAWTSKEDDALAAYVKAHGEGKWREVPQKAGLRRCGKSCRLRWLNYLRPNIRRGNISYDEEDLIIRLHRILGNRWSLIAGRLPGRTDNEIKNYWNSTLV

SEQ ID NO: 17113 - protein, 850 aa, Azoarcus evansii
MEAVQTSEIRWWKASKPAGMAEFGAPVKLSIDGVEVEAPAGASVLNAATAAGLYIPALCAHPDLPPAGQRGAGEGGCNLCMVEIDGVDGVVKACSTTVTAGMVVTTKSPAIQEVRQASLAKILGPHPHVCLTCPQRDGCSRSQCSYGNPQETRCCTIFSSCELRKVSDYIGIPNTTPPYKPAQLPVVLDEPFFDRDYNLCIDCRRCLVACNDVRGVGCLEFKGSRDAWQGKRTYVGTIAPTLIESGCTFCQACVTVCPTGALMDRTLDPAKREESMVPCKNACPAGIDVPRYVQLAAEGKYGEAIAVVRERLPFPGILGRACFAMCESACRRKDLDDPLSIRNLKRIAADNDTGVWREHAKKLPATGKKAAVIGAGPAGLTVAYYLAKQGHGVTVFDAQPAAAGMARYGIPSYRVPAEVIDNEVAEVSALGVEFRFGAKVENVDTLFNDGYGAVFVGIGAQGGDKLGIPGDDLPGVVDSPTYLKAVTMGLVNTPEGIQTGKKVAVIGGGNVATDNARSSRRFGAEVDMVYRRTREEMPARLEEFEGCVEEGVNIRYLLAPKKIEPGTNGFRLQITYAKMALGEPDASGRRKPVETGEEVVEGVDLVIAAIGQFPNRFEGFGVETDRKGRITVREDSMLTSRPKVYAGGDCVLGPSTLIESVAQGRVAASAMDIVLGGDGDISEVLLRTGWETNPCIGRKEGFNKIRKFHPIMLAPEQRTGWDEVELGFDDATARAEAARCFKCNLAPKIADAILPPESSLKFDEATIASVPTESGVFQLLDGDKNVLIIKGVENLREGLMEQLERGGDATNFVFEEAALFTSRESQMIQAYLQQYGKMPGGGSDELDDLF

SEQ ID NO: 17114 - protein, 568 aa, Escherichia coli CFT073
MGPLPRKGNMKQKITDYLDEIYGGTFTATHLQKLVTRLESAKRLITQRRKKHWDESDVVLITYADQFHSNDLKPLPTFNQFYPQWLQRIFSHVHLLPFYPWSSDDGFSVIDYHQVASEAGEWQDIQQLGECSHLMFDFVCNHMSAKSEWFKNYLQQQPGFEDFFIAIDPKTDLSAVTRPRALPLLTPFQMRDHSMRHLWTTFSDDQIDLNYRSPEVLLAMVDVLLCYLEKGAEYVRLDAVGFMWKEPGTSCIHLEKTHLIIKLLRSIIDNVAPGTVIITETNVPHKDNIAYFGEGDDEAHMVYQFSMPPLVLHAVQKQNVEALCAWAQNLTLPSSNTTWFNFLASHDGIGLNPLRGLLPENEILALVEVLQQEGALVNWKNNPDGTRSPYEMNVTYMDALSRRECSDEERCARFILAHAILLSFPGVPAIYIQSILGSRNDYAGVEKLGYNRAINRKKYSSKEITTELNNKATLRYSIYYKLSHLITLRRSHKEFHPDNNFTIDAINSFVMRIQRSNADGDCLTGLFNVSENIQHINITDLHGRDLISEVDILGNEITLHPWQVMWIK

SEQ ID NO: 17115 - protein, 572 aa, Streptococcus agalactiae 2603V/R
MTYTENLQKWLDFEQLPDYLRQELLSMDEKTKEDAFYTNLEFGTAGMRGYIGAGTNRINIYVVRQATEGLAKLIETKGEEAKKRGVAIAYDSRHFSPEFAFESAQVLAQHGIKSYVFEALRPTPELSFAVRHLNAYAGIMVTASHNPAPFNGYKVYGQDGGQLPPADADALTDFIRAIENPFAVELADLDESKSSGLIQVIGEDVDIEYLREVKDVNINQDLINNFGKDMKIVYTPLHGTGEMLTRRALAQAGFESVVVVESQAKADPDFSTVKSPNPESQAAFALAEELGREVDADVLVATDPDADRLGVEIRQPDGSYKNLSGNQIGAIIAKYILEAHKTAGTLPENAALAKSIVSTELVTKIAESYGATMFNVLTGFKFIAEKIQEFEEKHNHTYMFGFEESFGYLIKPFVRDKDAIQAVLLVAEIAAYYRSRGLTLADGIDEIYKEYGYFAEKTISVTLSGVDGAAEIKKIMDKFRENGPKQFNNTDIVLLEDFQKQTATKNDGTISNLTTPPSNVLKYTLADDSWIAVRPSGTEPKIKFYIATVGNDLADAETKIANIEKEITTFVN

SEQ ID NO: 17116 - protein, 355 aa, Azoarcus evansii
MIPEFIDTWQMTEPGKLQKTRVPMPELGPGDVVVKIAGCGVCHTDLSYFYMGVPTVQKPPLSLGHEISGTVIGGEASMIGKEVIVPAVIPCGECELCNTGRGNRCLSQKMPGNSMGIYGGYSSHIVAQSKYLCVVENRGGTPLEHLAVVADAVTTPYQAAVRADLKKDDLVIVIGAAGGVGSFMVQTAKGMGAKAVIGIDINEEKLVMMKDFGADFVINPKDKSAKDIKELFKGFCKERGLPSNYGWKIFEVTGSKPGQELALSLLSFTGKLVIVGYGTAETTYMLSKLMAFDAEIIGTWGCPPDPYAAVRDMCLDGRIKLGPFVETRPMSQIEQVFDEAHHGKLKRPVILTPDF

SEQ ID NO: 17117 - protein, 314 aa, Clostridium perfringens str. 13
MNNKIRKAIIPAAGLGTRFLPATKAQPKEMLPIVDKPTIQYIIEEAIASGIEEILVITGRSKKSIEDHFDRNVELEMELEKSGKTELLDLVRDISDMVDIHYIRQKEPRGLGHAIYCAKTFVGDEPFAILLGDDVVYNEEKPCLKQLIDCYNEYRTSVLGVQTVPEENVSKYGIVNGKHIEGRVYKVKGLVEKPSPEEAPSNVAILGRYIVTPRIFDILENTKPGKGGEIQLTDALLELMSEEAMYAYDFEGRRYDVGDKLGFLEATVEYALRRPDLRDGFIDYLRELSATENIFTEANGKEKKDKEEELVTEA

SEQ ID NO: 17118 - protein, 346 aa, Mesorhizobium loti MAFF303099
MMPSDRSVLVLAPVGRDAKVASAILAENDIKSHICATLDEAVPLLDQAQCFLVTEEALISSNRNQFASWLNHQPTWSDFPIVLLTMRETEIDKRLAFLDRYLIVLERPFLASSLANSVRSALRARARQLEVKSYIEQKQEVADRQKLLIRELHHRVKNTLANVRAMMGATAKSSGSVDDFVRDFSARIVSLADTHSMLTDDYWQMASLHKLLESELRHYDTSDRPRVVLEGPNVALVADIAIPIGMAFHELASNSSKYGALSRPHGRLEVRWSVTNSEGERMLNLDWLEKGGPKVEQPRRRGFGTTLLEKVVAVQCQAKVELNYHPDGLRFAMALPLRDTRLVPAY

SEQ ID NO: 17119 - protein, 545 aa, Prochlorococcus marinus subsp. pastoris str. CCMP1986
MTEVNVINIKNPFLDQKPGTSGLRKSTLKFKEEHYLEIFIEAIFKSLNNLSGSTLVVGGDGRYGNIEAIEKIIQICVAHKVGKVIIPKNGLLSTPATSHLIRKEEAIGGIILSASHNPGGIDGDFGVKLNTANGGPAPESITDQIFQCSQSLKSYKISNIKIPDLDKFGVFSLGETSLEIIDGLKDYSDLMENIFDFDQISDFLKNDFSLIFDAMNAVTGPYAKNIFVEKMGLVDACVMNGTPLEDFGGLHPDPNLTYASKLADLLLVQKAYSFGAACDGDGDRNMILGQGCFVNPSDSLAVITANTNCVPGYKDGIAGVARSMPTSSAVDFVARALNIPCFETPTGWKFFGNLLDSNLITICGEESFGTGSNHVREKDGLWAVLYWLQILAVKNCSVSELIQNHWKQYGRNYYSRHDYEAIPSTIANQIFNNLSSMLPSLKDNKFAGNLVKQADNFSYLDPVDNSVSKNQGLRIILEDNSRVIIRLSGTGTKGSTLRLYFEKFANSQHNLDLNPQIALKDLINDLDHLLNISKLTKMEKPTVIT

SEQ ID NO: 17120 - protein, 236 aa, Pyrococcus furiosus DSM 3638
MPISVDKAVIARLKIHGEVFEILVDPYLARDFREGKDVPIEEILATPYVFKDAHKGDKASEHEMEKIFGTSDPYEVAKIILRKGEIQLTAQQRREMLEEKKRQIATIIHRNAVDPRTGYPHPVERILRAMEEVGVRVDIFKDAEAQVQDVIKAIRQVLPLRIETKVIAVKIPGEYVGKAYGEVRKFGTIKKEEWGSDGSWMFLIEIPGGVEEEFYEKLNALTKSSAQTKLIERKGL

SEQ ID NO: 17121 - protein, 298 aa, Triticum aestivum
FSLKPLVPRLSELLGLEVVMAPDCIGEEVEKLAAALPDGGVLLLENVRFYKEEEKNDPEFAKKLASVADLYVNDAFGTAHRAHASTEGVTKFLMPSVAGFLMQKELDYLVGAVANPKKPFAAIVGGSKVSSKIGVIESLLAKVDILILGGGMIFTFYKAQGLAVGKSLVEEDKLELATSLIETAKSKGVKLLLPTDVVVADKFAADAESKIVPATAIPDGWMGLDVGPDSIKTFAEALDTTKTVIWNGPMGVFEFEKFAAGTDAIAKQLAELTGKGVTTIIGGGDSVAAVEKAGLADK

SEQ ID NO: 17122 - protein, 411 aa, Pseudomonas aeruginosa PAO1
MAESRPARRFARIDRLPPYVFNITAELKMAARRRGEDIIDLSMGNPDGPTPPHIVEKLCTVAQREDTHGYSTSRGIPRLRRAISHWYRDRYDVQIDPESEAIVTIGSKEGLAHLMLATLDHGDTILVPNPSYPIHIYGAVIAGAQVRSVPLVPGIDFFNELERAIRESIPKPRMMILGFPSNPTAQCVELDFFERVVALAKQYDVMVVHDLAYADIVYDGWKAPSIMQVPGAKDIAVEFFTLSKSYNMAGWRIGFMVGNPELVSALARIKSYHDYGTFTPLQVAAIAALEGDQQCVRDIARQYQQRRDVLVKGLREAGWMVENPKASMYVWAKIPEPYAHLGSLEFAKKLLQDAKVSVSPGIGFGDYGDDHVRFALIENRDRLRQAVRGIKAMFRADGLLSPQRKVDSLAE

SEQ ID NO: 17123 - protein, 173 aa, Triticum aestivum
  unsure (1)..(173): unsure at all Xaa locations
MAPTVMASSATSVAPFQGLKSTAGLPVSRRSNGASLGSVSNGGRIRCMQVXPSEGIKNSETLSYLPPLNTXGLLKQVDYXIRSKWVPCLXFKQVGFIFRXAQCVSPGYYDGRYWDNVELPMFGXCTDATQVXNEWRSQEGLPDAYVRIIGFDNMRKCNASAQCLQATGCDPAR

SEQ ID NO: 17124 - protein, 570 aa, Escherichia coli O157:H7 EDL933
MSEKHPGPLVVEGKLTDAERMKLESNYLRGTIAEDLNDGLTGGFKGDNFLLIRFHGMYQQDDRDIRAERAEQKLEPRHAMLLRCRLPGGVITTKQWQAIDKFAGENTIYGSIRLTNRQTFQFHGILKKNVKPVHQMLHSVGLDALATANDMNRNVLCTSNPYESQLHAEAYEWAKKISEHLLPRTRAYAEIWLDQEKVATTDEEPILGQTYLPRKFKTTVVIPPQNDIDLHANDMNFVAIAENGKLVGFNLLVGGGLSIEHGNKKTYARTASEFGYLPLEHTLAVAEAVVTTQRDWGNRTDRKNAKTKYTLERVGVETFKAEVERRAGIKFEPIRPYEFTGRGDRIGWVKGIDDNWHLTLFIENGRILDYPGRPLKTGLLEIAKIHKGDFRITANQNLIIAGVPESEKAKIEKIAKESGLMNAVTPQRENSMACVSFPTCPLAMAEAERFLPSFIDNIDNLMAKHGVSDEHIVMRVTGCPNGCGRAMLAEVGLVGKAPGRYNLHLGGNRIGTRIPRMYKENITEPEILASLDELIGRWAKEREAGEGFGDFTVRAGIIRPVLDPARDLWD

SEQ ID NO: 17125 - protein, 193 aa, Triticum aestivum
  unsure (1)..(193): unsure at all Xaa locations
MAPTVMASSATSVAPFQGLKSTAGLPVSRRSNGASLGSVSNGGRIRCMQVWPIEGIXKKFETLSYLPTAQHGRPSLKARSNYLIRSKWGALASSSTRVGFNFREQNATPGXYYDGRYWXTMWKLPMFGXCNDATQVYERXEEVKKDYPDAYVRIIGXDNMRQVQCVSFIRXSKPPGCEGVPARPKQSLNDRHI

SEQ ID NO: 17126 - protein, 316 aa, Shigella flexneri 2a str. 2457T
MNELDGIKQFTTVVADSCDIESIRHYHPQDATTNPSLLLKAAGLSQYEHLIDDAIAWGKKNGKTQEQQVVAACDKLAVNFGAEILKIVPGCVSTEVDARLSFDKEKSIEKARHLVDLYQQQGVEKSRILIKLASTWEGIRAAEELEKEGINCNLTLLFSFTQARACAEAGVFLISPFVGRIYDWYQARKPMDPYVVEEDPGVKSVRNIYDYYKQHHYETIVMGASFRRTEQILALTGCDRLTIAPNLLKELQEKVSPVVRKLIPPSQTFPRPAPMSEAEFRWEHNQDAMAVEKLSEGIRLFAVDQRKLEDLLAAKL

SEQ ID NO: 17127 - protein, 184 aa, Thermobifida fusca
MDAKDMGSALDKILVTEEQIRTRTRELAAEIDADYAGKDLLLVGVLKGAVMVMADLARELHHPCEMDWMAVSSYGAGTTSSGVVRILKDLDTDIQGRNVLIVEDVIDSGLTLSWLVGNLKSRHPASVEICTMVRKPMAFNVDLDVKYVGFDLPNEFIVGYGLDYAEKYRNLPFIATLAPHVYDD

SEQ ID NO: 17128 - protein, 233 aa, Vigna unguiculata
MQSIPLQKQVDYYSQVHETLRQQIEASSLEKHLSKSIFIVVIGGNDVFGYFDSKDLQNKNTPQQYADSMASTLKLQLQRLYNNGAKKFEIAGVGPIGCCPAYRLKNKTECASAANDLSAKYNEALQYMLKEWKLEKKDINYSYFDTYAALQDLIHNPTSYGFVNVKGACCGLGELNAQIPCLPVSSICSNRQDHVFWDAFHPTEAASRIFVDEIFKGPSKFISPINMEQLLAI

SEQ ID NO: 17129 - protein, 178 aa, Glycine max
  unsure (1)..(178): unsure at all Xaa locations
MASSTISSPTVTTVNRAGAGMDAPFTGLKAMAGFLTTKTNNDITSIASTGGRXHCMQVWPPPGNKNIETLSYLPHLDDAQLAKEGQHLLKKGWIPCLELQXEHSCRYREHNRSPRYYDGRYCTMXNLPMFGCTDAYHALNELRDADTAYPNGFIRIIRCNIVEQVQCINFIAYKPPDF

SEQ ID NO: 17130 - protein, 113 aa, Zea luxurians
  unsure (1)..(113): unsure at all Xaa locations
MGRRACCAKEGVKRGAWTTKEDDALAAYVKAHGEGKWREVPXKAGLRRCGKSCRLRWLNYLRPNIRRGNISYDEEDLIIRLHKLLGNRWSLIAGRLPGRTDNEIKNYWNSTLV

SEQ ID NO: 17131 - protein, 113 aa, Zea luxurians
MGRRACCAKEGVKRGAWTSKEDDALAAYVKAHGEGKWREVPQKAGLRRCGKSCRLRWLNYLRPNIRRGNISYDEEDLIIRLHRLLGNRWSLIAGRLPGRTDNEIKNYWNSTLV

SEQ ID NO: 17132 - protein, 79 aa, Azotobacter vinelandii
AIDIKAPTFPESIADGTVATWHKKPGEAVKRDELIVDIETDKVVMEVLAEADGVIAEIVKNEGDTVLSGELLGKLTEGG

SEQ ID NO: 17133 - protein, 549 aa, Salmonella typhimurium LT2
MKNINPTQTSAWQALQKHYDEMKDVTIAELFANDSDRFAKFSATFDDLMLVDFSKNRITEETLAKLQDLAKETDLAGAIKSMFSGEKINRTEDRAVLHVALRNRSNTPIIVDGKDVMPEVNAVLEKMKTFSQAIISGQWKGYTGKAITDVVNIGIGGSDLGPFMVTEALRPYKNHLTMHFVSNVDGTHIAEVLKKVNPETTLFLVASKTFTTQETMTNAHSARDWFLKTAGDEKHVAKHFAALSTNAKAVGEFGIDTANMFEFWDWVGGRYSLWSAIGLSIILSVGFDNFVELLSGAHAMDKHFSTTPAEKNLPILLALIGIWYNNFFGAETEAILPYDQYMHRFAAYFQQGNMESNGKYVDRNGNAVDYQTGPIIWGEPGTNGQHAFYQLIHQGTKMVPCDFIAPAITHNPLSDHHQKLLSNFFAQTEALAFGKSREVVEQEYRDQGKDPAQLEHVVPFKVFEGNRPTNSILLREITPFSLGALIALYEHKIFTQGVILNIFTFDQWGVELGKQLANRILPELGDDKAISSHDSSTNGLINRYKAWRA

SEQ ID NO: 17134 - protein, 472 aa, ASPERGILLUS NIDULANS FGSC A4
MPPVETKQYDYIVLGGGSGGSGSGRRAAGWYGAKTLIVESGRAGGTCVNVGCVPKKMTWNFASITESIEAGRHYGYDLPHNIDVNYTHFKKLRDSTIERLNGVYEKNWGNEGIDLVHGRARFVEKKTIEVTNQDGSRTRYTAPHILIATGGRPSLPDIKGSEHGISSDGFFEIEELPPKLAVVGAGYIAVELAGVMGTVGVDTHMFIRGETFLRKFDPMIQKTMTERYEAVGIHVHKKHPGIKEVQLLRDGKGKDKLLKLIMNDGSEMEVNELLWAIGRVPEVEDLHLEIPGVELNKSGHVVVDEYQNTNVEGIYAIGDVTGQAELTPVAIAAGRQLGNRLFGGPQFKNAKLSYDNIPTVVFSHPEVGTVGLTEPQARERFGDENVKVYHTRFPAMFYSVFPPEEKAKNPTEFKMVVAGPEEKVVGLHLLGLGVGEMTQGFGVAVKMGATKKDFDSCVAIHPTSAEELVTLR

SEQ ID NO: 17135 - protein, 499 aa, Arabidopsis thaliana
MARKMLVDGEIDKVAADEANATHYDFDLFVIGAGSGGVRAARFSANHGAKVGICELPFHPISSEEIGGVGGTCVIRGCVPKKILVYGATYGGELEDAKNYGWEINEKVDFTWKKLLQKKTDEILRLNNIYKRLLANAAVKLYEGEGRVVGPNEVEVRQIDGAKISYTAKHILIATGSRAQKPNIPGHELAITSDEALSLEEFPKRAIVLGGGYIAVEFASIWRGMGATVDLFFRKELPLRGFDDEMRALVARNLEGRGVNLHPQTSLTQLTKTDQGIKVISSHGEEFVADVVLFATGRSPNTKRLNLEAVGVELDQAGAVKVDEYSRTNIPSIWAVGDATNRINLTPVALMEATCFANTAFGGKPTKAEYSNVACAVFCIPPLAVVGLSEEEAVEQATGDILVFTSGFNPMKNTISGRQEKTLMKLIVDEKSDKVIGASMCGPDAAEIMQGIAIALKCGATKAQFDSTVGIHPSSAEEFVTMRSVTRRIAHKPKPKTNL

SEQ ID NO: 17136 - protein, 298 aa, Triticum aestivum
FSLKPLVPRLSELLGLEVVMAPDCIGEEVEKLAAALPDGGVLLLENVRFYKEEEKNDPEFAKKLASVADLYVNDAFGTAHRAHASTEGVTKFLRPSVAGFLMQKELDYLVGAVANPKKPFAAIVGGSKVSSKIGVIESLLAKVDILILGGGMIFTFYKAQGLPVGKSLVEEDKLELATSLIETAKSKGVKLLLPTDVVVADKFAADAESKIVPATAIPDGWMGLDVGPDSIKTFAEALDTTKTVIWNGPMGVFEFEKFAAGTDAIAKQLAELTGKGVTTIIGGGDSVAAVEKAGLADK

SEQ ID NO: 17137 - protein, 437 aa, Yersinia pestis biovar Medievalis str. 91001
MAYQQERIMSHRELEQRRKEATPRGIGVLCDFYAVRAENATLWDEQGREYIDFTAGIATLNIGHRHPKVMAAVRQQLDQFTHTAYQVVPYASYVTLAEKINSLAPISDSNMTAAGNSKTAFFTTGVEAIENAVKIARAATGRPGVIAFSGAFHGRTLLAMALTGRAVPYKVGFGPFPASIFHALYPNELYGVSVEEAISSVERLFRCDISPTQVAAILFEPIQGEGGFNIAPPEFVSALRTLCDEHGILLIADEVQTGFARTGKLFAMEYYPDTKVDVITMAKSLGGGMPISAVTGRADIMDAPLPGSLGGTYAGNPLAVAASLAVLDIIAEEKLCERALILGAKLVDVLEKAQMSNAAIVGIRARGSMVAVEFNDPVSGKPSPELTRAYQRQALEEGLLLLSCGVHSNVIRFLYPLTIPDKQFKQAMNILTRLLAS

SEQ ID NO: 17138 - protein, 295 aa, Xylella fastidiosa Ann-1
MTQRKGIILAGGAGTRLYPITQGIGKQLLPVYDKPMIYYPLSVLMLAGIRQVLVITMLHEQPLFQRLLGDGTQWGMEICYAVQASPDGVAQSYLIGRAFIDDKPSCLILGDNIFYGHGLTDTLCHADARTVGATVFGYWVSDPERYGVAEFDGDGRVINIEEKPAQPRSNYAVTGLYFYDGRAPAFAAELTPSVRGELEITDLNRRYLAEGALHLEALGRGYAWLDTGTHQSLQDASNFIGTIQTRQGLQVCCPEEVAFWKGWIDATHLERLAAPLAKNAYGQYLLNLAQRGRSL

SEQ ID NO: 17139 - protein, 298 aa, Hordeum vulgare subsp. vulgare
FSLKPLVPRLSELLGLEVVMAPDCIGQEVEKLAAALPDGGVLLLENVRFYKEEEKNEPEFAKKLASVADLYVNDAFGTAHRAHASTEGVTKFLRPSVAGFLMQKELDYLVGAVANPKKPFAAIVGGSKVSSKIGVIESLLAKVDILILGGGMIFTFYKAQGLAVGKSLVEEDKLELATSLIETAKSKGVKLLLPTDVVVADKFAADAESKIVPATAIPDGWMGLDVGPDSIKTFAEALDTTKTVIWNGPMGVFEFEKFAAGTDAIAKQLAELTGKGVTTIIGGGDSVAAVEKAGLADK

SEQ ID NO: 17140 - protein, 329 aa, Bordetella parapertussis 12822
MSKPALRVAVTGAAGQIGYALLFRIASGEMLGKDQPVILQLLEIPDEKAQKALKGVIMELEDCAFPLLHEVTAHSDPRTAFKDADVALLVGARPRGPGMERKDLLSVNAQIFTAQGRALNDVASRNVKVLVVGNPANTNAYIAMKSAPDLPAKNFTAMLRLDHNRALSQLSAKSGKRVADIEKLIVWGNHSPTMYPDFRFATVGGQGLTQLINDDAWNRDTFIPTVGKRGAAIIEARGLSSAASAANAAIDHVRDWVLGSNGKWVTMGIPSDGSYGIPEGIIYGFPVVTENGEYKMIKDLEIDAFSRERLDFTLKELLEERDGVKDLLK

SEQ ID NO: 17141 - protein, 487 aa, Neurospora crassa
MTDNPEEPLIANTQSTERDQDDGSHDVEHAHDSRGGKQHISPPGLFIWLLTFSAGISGLLFGYDTGVISATLVSIGTSLSHRPLTSLDKSVITSCTSLFALLALPFASALADDRGRKRVVLFADTLFIIGALCQAASRTVEVMVIGRSVVGIAIGAASFVTPLYIAELAPATHRGRLVTMNIVFITLGQVVAYVVGWIFGTYGSPETTGWRWMVGLGAVPAVCQVVILLWMPESPRWLVKDGRSQEARAVIAKIAAGDDAQDPSTRREVDAVLKSIEIEGLQQLCGFNSLMYFSATIFTMVGFSEPTLTSLVVAVTNFAFTLVALVLIDRVGRRRILLWSLPFMIAGLVLAGYGFSFIELPNSETSSPSTTGGQGGAVIILASIMIYVAGYAIGLGNVPWMQSELFSLSVRSVGSGVATATNWSANFVIGLTFLPLMEALSPSWTFVLYAVICAVGYGLIWTVYPETAGLSLEDAATLLEADDWGVR

SEQ ID NO: 17142 - protein, 299 aa, Zea mays
YSLKPLVPRLSELLGVEVVMANDCIGEEVEKLAAALPEGGVLLLENVRFYKEEEKNEPEFAKKLASVADLYVNDAFGTAHRAHASTEGVTKYLKPAVAGFLMQKELDYLVGAVANPKKPFAAIVGGSKVSSKIGVIESLLAKVDILILGGGMIYTFYKAQGYSVGKSLVEEDKLELATSLIEKAKAKGVSLLLPTDIVVADKFAADAESKIVPATAIPDDWMGLDVGPDATKTFNEALDTTKTVIWNGPMGVFEFEKFAAGTEAIAKKLAELTTTKGVTTIIGGGDSVAAVEKAGLADK

SEQ ID NO: 17143 - protein, 499 aa, Azotobacter vinelandii
MQASNDTRSNYAPDSSYGLFIDNQWVAGENGETITILNPANGKTLTGIPNATAVDVDRAVQAAQRAFEAWRSTTPIERANALLKIADLLEADAERFAALESLDVGKPIRESSSVDIPLAIDHFRYFAGVIRSHSDEAVMLDEQTLSIVLSEPLGVVGQVIPWNFPLLMAAWKIAPAIAIGNTVVIKPSELTPVSILELAKIFAQVLPAGVVNIVTGTGASAGQALLDHPDVRKLAFTGSTSVGHRVADAAAKKLIPATLELGGKSANIVFPDANWDKAVEGAALAILWNQGQVCESGARLFVHESIYERFLDEVKQKFEAVRVGDPLHPDTMMGAQVSKTQMERILGYVDIAKQEGAKVLLGGGRLTGADYDAGFFIQPTILVDVRNDMRVAYEEIFGPVLCVIPFKDEADVIAMANDSEYGLAGAVWTQDINRALRVARAVETGRMWVNTYHEIPAHAPFGGYKKSGLGRETHKSILEAYSQKKNIYVSLNEAPLGLF

SEQ ID NO: 17144 - protein, 492 aa, Zantedeschia aethiopica
MDPCKYRPSSSYDASFTTTNAGGPVWNDDVALTVGSRGPILLEDYHLIEKVAHFARERIPERVVHARGASAKGFFECTHDVTHLTFADFLRAPGVQTPVIVRFSTVIHERGSPETIRDPRGFAVKFYTREGNWDLLGNNFPVFFIRDGIKFPDVIHAFKPNPKSNVQEYWRVLDFLSHLPESLHTFCFLYDDVGVPLNYRHMEGFGVNTYTFINKAGKTNYVKFHWKPTCGVKCMLEDEAVVVGGKNHSHATQDLYDSIAAGNYPEWKLFVQVMDPDEEDKYDFDPLDDTKTWPEDLLPLQPVGRLVLNRNIDNFFNENEQLAFSPGIIVPGIYYSDDKMLQCRTFAYGDTQRYRLGPNYLMLPVNAPKCAHKNSHYDGLMNFMHRDEEVNYYPSRHDRLRNAERFPINNRPIIGKREKCTIEKQNDFKQPGERYRSWAPDRQERFVRRWVEALAHPKVTFEIRTIWVSYLSKCDASLGQKVANRLNMKPSM

SEQ ID NO: 17145 - protein, 156 aa, Haemophilus influenzae
NRTNTPVLVDGKDVMPEVNAVLAKMKDFCQRIISGEWKGYTGKAITDVVNIGIGGSDLGPYMVTEALRPYKNHLNMHFVSNVDGTHIAETLKKINPETTLFLVASKTFTTQETMRNAQSARDWLLKAAKNESAVAKHFAALSTNAKDVEKFGIDTN

SEQ ID NO: 17146 - protein, 391 aa, Heliobacillus mobilis
MNTYGRLPIALVKGEGAKVWDADGREYLDFLAGLAVNSLGHCHPKVTEAVKAQVDQLIHVSNLYWIEPQIELAQSLVENSFADKVFFCNSGAEANEGAIKLARKYAKLHMGPDKYEIITMEKSFHGRTLATVTATAQPKYQKAFTPLPEGFRYVPFGDLKALEKAIGPHTCAIMVEPVQGEGGVNLAEPAFWEGLAKLAKEQNLLLIFDEVQSGLGRTGKLFAHEHYGITPHIMTLAKALGGGTPIGALLATDEVASAFEPGDHASTFGGNPLVTAAGVATMDVLVQGGLLAHCLEMGAYFRGHLNRLAEKYTFIQEVRGLGLILACELDRPGADIVAACLEKGLIINCTAVNVLRFLPPLIITKEDIDHAVAILEEVLASVEANAGGTPA

SEQ ID NO: 17147 - protein, 265 aa, Arundo donax
AESNMCDLLRINTDRGVMIGDGKSRFSINGKPIYHFVGTSTFSEYTVMHVGCVAKINPEAPLDKVCVLSCGISTGLGASINVAKPPKGSTVAIFGLGAVGLAAAEGARIAGASRIIGVDLNANRFEEAKKFGCTEFLNPKDHSKPVQEVLAEMTNGGVDRSVECTGNINAMIQAFECVHDGWGVAVLVGVPHKDAEFKTHPMNFLNERTLKGTFFGNFKPRTDLPNVVELYMKKELEVEKFITHTVPFSEINKAFDLMAKGEGIR

SEQ ID NO: 17148 - protein, 212 aa, Eragrostis japonica
KSRFSINGKPIYHFVGTSTFSEYTVMHVGCLAKINPEAPLDKVCVLSCGISTGLGASINVAKPPKGSTVAVFGLGAVGLAACEGARIAGASRIIGVDLNPNRFEEARKFGCTEFVNPKDHNKPVQEVLAEMTNGGVDRSVECTGNINAMIQAFECVHDGWGVAVLVGVPHKDAEFKTRPMNFLNERTLKGTFFGNFKPRTDLPNVVELYMKK

SEQ ID NO: 17149 - protein, 431 aa, Salmonella typhimurium LT2
MVSLEKNDRVMLARQLPLKSVALILAGGRGTRLKDLTNKRAKPAVHFGGKFRIIDFALSNCLNSGIRRIGVITQYQSHTLVQHIQRGWSLFSEEMNEFVDLLPAQQRMKGENWYRGTADAVTQNLDIIRRYKAEYVVILAGDHIYKQDYSRMLIDHVEKGARCTVACMPVPIKEATAFGVMAVDESDKIIDFVEKPANPPAMPGDASKSLASMGIYVFDADYLYELLAADDKDDASSHDFGKDIIPKITREGMAYAHPFPLSCVQSDPQAEPYWRDVGTLEAYWKANLDLASVTPELDMYDQNWPIRTHMESLPPAKFVQDRSGSHGMTLNSLVSGGCIISGSVVVQSVLFPRVRINSFCNIDSAVLLPEVWVGRSCRLRRCVIDRACIIPEGMVIGENAEEDARRFYRSEEGIVLVTREMLRKLQVKQER

SEQ ID NO: 17150 - protein, 386 aa, ASPERGILLUS NIDULANS FGSC A4
MATATVLEKPNIGVFTNPKHDLWVAESKPTLEEVKSGESLKPGEVTIEVRSTGICGSDVHFWHAGCIGPMIVTGDHILGHESAGDVIAVAPDVTSLKVGDRVAIEPNVICNACEPCLTGRYNGCEKVAFLSTPPVDGLLRRYVNHPAVWCHKIGDMSYEDGALLEPLSVSLAAVERSGLRLGDPCLITGAGPIGLITLLSARAAGATPLVITDIDEGRLKFAKELVPEVRTYKVEIGFSAEETAEGIINAFNDGQGAGPDALRPRIALECTGVESSVASAIWSVKFGGKVFVIGVGKNEMKIPFMRLSTQEIDLQYQYRYCNTWPRAIRLVKNGVINLQKLVTHRYALEDALKAFETAANPKTGAIKVQIMSSTADVEAASAGQKN

SEQ ID NO: 17151 - protein, 516 aa, Oryza sativa
MASLMEVQVPLLGMGTTMGALALALVVVVVVHVAVNAFGRRRLPPSPASLPVIGHLHLLRPPVHRTFHELAARLGPLMHVRLGSTHCVVASSAEVAAELIRSHEAKISERPLTAVARQFAYESAGFAFAPYSPHWRFMKRLCMSELLGPRTVEQLRPVRRAGLVSLLRHVLSQPEAEAVDLTRELIRMSNTSIIRMAASTVPSSVTEEAQELVKVVAELVGAFNADDYIALCRGWDLQGLGRRAADVHKRFDALLEEMIRHKEEARMRKKTDTDVGSKDLLDILLDKAEDGAAEVKLTRDNIKAFIIDVVTAGSDTSAAMVEWMVAELMNHPEALRKVREEIEAVVGRDRIAGEGDLPRLPYLQAAYKETLRLRPAAPIAHRQSTEEIQIRGFRVPAQTAVFINVWAIGRDPAYWEEPLEFRPERFLAGGGGEGVEPRGQHFQFMPFGSGRRGCPGMGLALQSVPAVVAALLQCFDWQCMDNKLIDMEEADGLVCARKHRLLLHAHPRLHPFPPLL

SEQ ID NO: 17152 - protein, 134 aa, Zea mays
INVLGDITEETFPGCSNLPDYNKISFNKVEKPTGLEACLPNRSPTEVSIIKQLVCYDTAKRTSAVDLLNDRYFTEEPLPAPIEGLHVPASKDEDDDSSTEEWGNYRDGVSRVDFDEFGSMDATKTEKGFSIQFS

SEQ ID NO: 17153 - protein, 215 aa, Sinorhizobium meliloti 1021
MRIIRTHEDIEAGLAGLVMLDARLEHVIDKAGPVPLRRTDPGYRGLANIIVSQMVSKASAAAIWNRMEASLGEITADAVLALDDDDCRRFGLSRAKADTLRRVAAAATAGEIDLDAICNEEAVKAIHELTAIKGIGRWTAEVYLLFCAGHPDVFPAGDVALQNAIGHALGLELRPTASEVDSLAGGWSPWRSVAARLFWAYYAQEMRRDALPVTP

SEQ ID NO: 17154 - protein, 554 aa, Pseudomonas aeruginosa PAO1
MKHHLTPLDATQLDSWRALAAHRQELQDFRMRQAFIDDPERFKRFSFSACGLFLDFSKNLIRQDTIDLLVKLAEEARLSDAIRAMFDGEAINASERRPVLHTALRRPIGDKVLVDGVDVMPEVHRVLHQMTELVGYVHNGLWRGYTEKPITDVVNIGIGGSFLGPQLVSEALLPFAQKGVRCHYLANIDGSEFHELASRLNAETTLFIVSSKSFGTLETLKNAQAARAWYLAQGGTEEELYRHFIAVSSNKEAAIAFGIREENIFPMWDWVGGRYSLWSAIGLPIAMSIGISNFKELLSGAYNMDQHFQTAPFERNIPVLLGLLGVWYGDFWGANSHAILPYDYYLRNITDHLQQLDMESNGKSVRQDGTPVTSGTGPVIWGGVGCNGQHAYHQLLHQGTQLIPADFIVPVSSYNPVADHHQWLYANCLSQSQALMLGKSREEAEAELRAKGLPEAEVQRLAPHKVIPGNRPSNTLVVERISARRLGALIAMYEHKVYVQSILWGINAFDQWGVELGKELGKGVYSRLVGSEETPAEDASTQGLIDFFRGRHRG

SEQ ID NO: 17155 - protein, 314 aa, Clostridium perfringens str. 13
MAKLGFLFAGQGAQYVGMGKEFFDNFEESKEVFKRSSEALGIDMEELCFSDPEGLLNKTEFTQPAIITTNMAILTALDKLGVKSHISCGLSLGEYSALIHSGAINFEDGVKLVKKRGKFMQEAVAEGIGGMVAVLRMTPEQVDEIIEKSSPYGIVEGANYNSPGQIVISGELVALEKAMEFIKEVGGRAIKLPVSAPFHCSMLQPAAEKLEDELNKISINKLNGIVMSNVKGEAYLEDDNIIELLTSQVKKPVLFINDIEKMIESGVDTFIEIGPGKALSGFVKKINKNVTVLNVEDLKSLEKTLSKLREMEVL

SEQ ID NO: 17156 - protein, 137 aa, Zea mays
  unsure (1)..(137): unsure at all Xaa locations
NGSPGLGGHSPPPPPPKGXVXADLXVPLDDAXXXTDXTXIXASVPTIKXXLXKXAKVILASHLGRPKGVTPKXSLKPLVPRLSELLGVEXGMANDCIXEKXEXLVXALPKKGSSAPXXGXXXXGXKKNEPXFXKKTW

SEQ ID NO: 17157 - protein, 262 aa, Muhlenbergia setarioides
WPCSSCVHWGMQGVRPLQVVWEQPVWSAQDQHRPGCDDWCRQLTVSIDGKPIYHFVGTSTFSEYTVIHVGCLAKINPEAPLDKVCVLSCGISTGLGASINVAKPPKGSTEAVFGLGAVGLAAAEGARIAGASRIIGIDLNTSRFEEAKKFGCTEFVNPKDHDKPIQEVLAEMTNGGVDRSVECTGNINAMIQAFESVHDGWGVAVLVGVPHMDAEFKTKPMNFLNERTLKGTFFGNFKPRTDIPNVVELYLKKELVLEKFIN

SEQ ID NO: 17158 - protein, 446 aa, Zea mays
MAATIQSVKARQIFDSRGNPTVEVDVFCSDGTFARAAVPSGASTGVYEALELRDGGSDYLGKGVSKAVNNVNSVIGPALIGKDPTAQTEIDNFMVQQLDGTKNEWGWCKQKLGANAILAVSLAVCKAGASIKRIPLYQHIANLAGNKQLVLPVPAFNVINGGSHAGNKLAMQEFMILPTGAASFKEAMKMGVEVYHHLKSVIKKKYGQDATNVGDEGGFAPNIQENKEGLELLKTAIEKAGYTGKVVIGMDVAASEFYSDKDQTYDLNFKEENNDGSQKISGDSLKNVYKSFVSEYPIVSIEDPFDQDDWVHYAKMTEEIGEQVQIVGDDLLVTNPTRVAKAIKEKSCNALLLKVNQIGSVTESIEAVKMSKRAGWGVMTSHRSGETEDTFIADLAVGLSTGQIKTGAPCRSERLAKYNQLLRIEEELGAIAVYAGAKFRAPVEPY

SEQ ID NO: 17159 - protein, 188 aa, Anomochloa marantoidea
VIHVGCLAKINPEAPLDKDCVLSCGISTGLGAALNVAKPPKGSSVAIFGLGAVGLAAAEGARLAGASRIIGVDLNPNRFELAKKFGCTEFVNSKDLDKPVQEVLAEMTNGGVDRSIECTGNINAMISAFECVHDGWGVAVLVGVPRKDAEFKTNPMNVLNERTLKGTFFGNYEPRTDLPNVVEMYMRK

SEQ ID NO: 17160 - protein, 188 aa, Joinvillea ascendens
VIHVGCVAKINPEAPLDKVCVLSCGISTGLGATLNVAKPPKGSTVAIFGLGAVGLAAAEGARLAGASRIIGIDLNPNRFEQAKNFGCTEFVNPKDHNKPVQEVLAEVTNGGVDRSVECTGHIDAMVSAFECVHVGWGVGVLVGVPHKDAVFKTNPMNLLNERTLKGTFFGNYKPRSDLPSVVEMYMNK

SEQ ID NO: 17161 - protein, 327 aa, Bacillus amyloliquefaciens
MVTECEKTSVVHADDVLVKVKRVGICGSDLHIYHGTNPLASLPRVIGHEVTGEVANTGSHVRRFKPGDRVVVEPISYCGTCYACRKGRPNVCKALSVFGVHEDGGMREYIVVPEKQLHAVSPDLPWEEAVMAEPYTIGAQAVWRGRVEKEDTVLIHGAGPIGICILKMAKFKGASVMITDLNDERLAFAEKNGADVTVNAQKEDPVLRVNEWTKKEGANVVIDAVCLPSTFETSIDAVSPAGHVVVLGFDERTVGISQLPITKKEVTITGSRLQTNQFPYITDLLNKGLLTHGGLITHTFSADDVHQAFQLIEQHPGKVGKAIITFD

SEQ ID NO: 17162 - protein, 188 aa, Lithachne humilis
VMHVGCVAKINPAAPLDKVCVLSCGISTGLGASINVAKPPKGSTVAIFGLGAVGLAAAEGARIAGASRIIGVDLNPNRFEEARKFGCTEFVNPKDHNKPVQEVLAEMTNGGVDRSVECTGNINAMIQAFECVHDGWGVAVLVGAPHKDAEFKTHPMNFLNERTLKGTFFGNYKPRTDLPNVVELYMKK

SEQ ID NO: 17163 - protein, 188 aa, Anomochloa marantoidea
VIHVGCLAKINPEAPLDKVCITSCGVSTGLGATLNVAKPKKGSTVAIFGLGAVGLAAVEGARLAGASRIIGVDLNPAKFGQAKKFGCTDFVNPKDYNKPVQEVLIAMTNGGVDRSVECTGHIDAMISAFECVHDGWGVAVLVGVPHKEALFKTHPMNFLNEKTLKGTFFGNYKPRSDLPNVVEMYMKK

SEQ ID NO: 17164 - protein, 405 aa, Arabidopsis thaliana
MKNGIAECPACHSKLVSPGSKTISRAYDDHKIRVSSKQRVLNVLLVVGDCMLVGLQPVLVYMSKVDGKFNFSPISVNFLTEIAKVIFAIVMLLIQARHQKVGEKPLLSVSTFVQAARNNVLLAVPALLYAINNYLKFTMQLYFNPATVKMLSNLKVLVIAVLLKMVMKRRFSIIQWEALALLLIGISVNQLRSLPEGATAIGIPLATGAYVCTVIFVTVPSMASVFNEYALKSQYDTSIYLQNLFLYGYGAIFNFLGILGTVIYKGPGSFDILQGHSRATMFLILNNAAQGILSSFFFKYADTILKKYSSTVATIFTGIASAALFGHVITMNFLLGISIVFISMHQFFSPLAKARDEQQQNGNLELGNTKDTHRANESFINMAAGANEEASHRGESDDRTPLLPR

SEQ ID NO: 17165 - protein, 506 aa, Caulobacter crescentus CB15
MTKPEFIESLSRPPFKARYDNFIGGQWVAPADGRYFDNSSPIHGRKICEIARSQAIDIERALDAAHAAKAGWARTSAADRSRILLRIADRMEENLAALATAETWDNGKPIRETLAADIPLAIDHFRYFAGCLRSQEGSISEIDHDTIAYHFHEPLGVVGQIIPWNFPLLMACWKLAPALAAGNCVVLKPAEQTPASIMVWAEMIGDLLPAGVLNIVNGFGLEAGKPLASSPRIAKIAFTGETSTGRLIMQYAAQNLIPVTLELGGKSPNIFFDDVAREDDDYLDKALEGFTMFALNQGEVCTCPSRALVQESIYEKFMERALKRVNAVVQGSPLDPATMIGAQASEEQLNKILGYMDIGRNEGAKLLAGGQRKILPGQLADGYYVEPTVFEGHNKMRIFQEEIFGPVLAVTTFKTEEEALEIANDTAFGLGAGVWSRDANRCYRFGRGIEAGRVWTNCYHAYPAHAAFGGYKQSGVGRETHKMMLDHYQQTKNMLVSYSPKALGFF

SEQ ID NO: 17166 - protein, 327 aa, Salmonella typhimurium LT2
MATRIEFHKHGGPEVLQTVEFTPAEPAEHEIQVENKAIGINFIDTYIRSGLYPPPSLPAGLGTEAAGVVSKVGNGVEHIRVGDRVVYAQSTLGAYSSVHNVTADKAAILPDAISFEQAAASFLKGLTVFYLLRKTYEVKPDEPFLFHAAAGGVGLIACQWAKALGAKLIGTVGSAQKAQRALDAGAWQVINYREESIVERVKEITGGKKVRVVYDSVGKDTWEASLDCLQRRGLMVSFGNASGPVTGVNLGILNQKGSLYATRPSLQGYITTREELTEASNELFSLIASGVIKVDVAENQRYALKDARRAHEVLESRATQGSSLLIP

SEQ ID NO: 17167 - protein, 428 aa, Bordetella parapertussis 12822
MSAIVDIIGREILDSRGNPTVECDVLLESGAMGRASVPSGASTGSREAIELRDGDKGRYLGKGVLRAVENLNTEISEALMGLDAQEQTFVDRTLIELDGTDSKERLGANAMLAASMAVARAAADESGLSLYRYFGGSGPMSMPVPMMNVINGGAHANNTLDLQELMILPVGAASFREALRWGAEVFHMLKKLIHDQGMSTAVGDEGGFAPNVASHEAAIQLILKAITEAGYEPGTQIALGLDCASSEFYRDGKYTLAGEGGVSLSSQEFANLLATWCDKYPIISIEDGMAENDWDGWKLLTDQLGKKVQLVGDDLFVTNTRILREGIQKGVANSILIKINQIGTLTETFAAIEMAKRAGYTAVVSHRSGETEDSTIADIAVATNAMQIKTGSLSRSDRMAKYNQLLRIEEELAEVASYPGLEAFYNLR

SEQ ID NO: 17168 - protein, 470 aa, Lactobacillus plantarum WCFS1
MVVGDFAEERDTMIIGAGPGGYVAAIRAAELGQKVTVVEKEYIGGVCLNVGCIPSKALISAGHRLQEAKDSKIFGIKNIQDPVLDFKVTQDWKDHQVVDRLTGGVEMLLKKHKVEVVRGEAYMHDNHTLRVMNGDHTGQTYKFKHLIIATGSRPVEIPGFKFSGRVVDSTGGLNLPEVPKELVVIGGGYIGSELAGAYANLGAHVTILEGTPQILPNFEKDMVKLVLNSFKKKGVDVITNAMAKNSEQDDSGVTVTYAVDGKETEIHADYVMVTVGRRPNTDDMGLEYTDVKLTKRGLIEVDEQGRTAAEDIFAIGDIVAGAALAHKAFAEAKVAAGAISGKKTANDYVSIPAVCFTDPELATVGMTKAEAEEAGLQVKTSKFPFAGNGRAISLNAMDGFFRLVSTKDEGTIVGAQIAGPGASDLISELSVAVNGGMNVEDLALTIHPHPTLGEVVQEAADEAMGYPTHI

SEQ ID NO: 17169 - protein, 125 aa, Glycine max
ACSMISSPSVTTVNRACAGMFAPFTGLNSIAGFPIMNTNTDITSIASNGGRVQCMQVWPPVCKKKCETLSYLPDLDDAQSAYEVQHHLMNGWITCLECQLEHCFVYRVHYMSPVYYDGLYWTIWN

SEQ ID NO: 17170 - protein, 431 aa, Lactobacillus plantarum WCFS1
MAYEFKLPELGEGLEEGEIASWLVKPGDEVKEDDSLVEIQNDKSVEELPSPVSGKVIDILVPEGETAKIGDVIVTIDDGSGDAAPAATKTEAPASEAAETPAATSAQPTGTPAAGNPNKRVLAMPSVRQYARDKDIDITLVTPTGAHGQITKQDIDNYTGAPAATGAKPAATPATTAPAASEAPAPTPVKPYVSDTPELETREKMTPIRKAISKAMVNSKHTAPHVTLFDEVEVSALMAHRKKYKQVALDRDIHLTFLPYFVKALVAVLQQFPELNASIDDANKEIVYKHYFNIGVATDTDRGLLVPNIKHAEGKGLFAIAKEITDNTQKAYDGKLKASEMSGGSITISNIGSIGGGWFTPVINQPEVAILGVGRIGKEPYVNDDGEIVVGKMQKLSLSFDHRLIDGATAQRAMNLLKQLLHDPELLLMEG

SEQ ID NO: 17171 - protein, 235 aa, Matricaria chamomilla
MIRNNAFDSDFALLESVRRHLLDDNAPPMSCRSNNFLFPHLSDSWGELPLQQNDSEDMLIAKFLNEALPLQQNDSEGIITPEMTSSSENIFFVKSEPETSSFQPKSLGSQKGKHYRGVRRRPWGKYAAEIRDPAKNGARVWLGTYETAEDAAVAYDMAAYRMRGSRALLNFPLRINSGEPEPVRITSKRKTTSPSEGLVVKKVKVELEMSTQAEFPLVYGCYYCVILGPFLVKCF

SEQ ID NO: 17172 - protein, 302 aa, Glycine max
PLYGVILFNIGSGQACQSPGSKKLLCFRLCAGLTLESDVGLKVSSRKVLQEVLFCYSVPENLFGKVCVIIDKIEKIPADEIKKELKAVGLSQEAVQELLQVLSVKSLTELEERLGSSGEAVADLKQLFSLAEKIGYSKWLQFDASVVRGLAYYTGIVFEGFDREGKLRAICGGGRYDHLFSTFGADDIAACGFGFGDAVIVELLKEKGLLPELNLQIDDIVCALDEDLQGCAAMVANILREKGQIVELVLESKPLKWVFKRAARLNAERLVLVGNSEWQRGVVGVKILSTAEQYEVKLDDLK

SEQ ID NO: 17173 - protein, 607 aa, Triticum aestivum
QHFCRSFCPVTERSSPAPPAIGLSPSVQIFPPPAGEATPPHLSLTRASQPQPPRAQRQGRPRPPAPTLTCGPWAGDVVGVTLCLRLPPDKAKPSDANNSSSSSSWTPPKTKPSSLFGVGCAARDQRAAARSQPTATATSGGDGVHLRRGGAALLLLRVPAAAAEAAAHAPLPPPPPRAPFRRRSLSRSSDSPHAPAPPLASRAPAQGGGAAVEKDPIKLWDRYVEWLYQHKQLGLFVDVSRMGFTDDFLLRMEPLMQRAFVAMGELEKGAIANPDEGRMVGHYWLRDPGLAPNSFLRTKIEKTVDHILAFSQGIVPRMAQLGEALDAPLALVLSMGGGAPASRPQFVSEALAPDNPPLKIRFIDNTDPAGIDHQIAQLGEELKSTLVIVISKSGGTPETRNGLLEVQKAFRDAGLDFSKQGVAITQENSLLDNTARIEGWLDRFPMFDWVGGRTSELSAVGLLPAALQGIDVKEMLVGAALMDEETRNTVVKENPAALLALSWYWATDGIGSKDMVVLPYKDSLLLLSRYLQQLVMESLGKEFDLDGNRVNQGLTVYGNKGSTDQHAYIQQPISVTDNFFVTFIEVLRDRPSERAGGIYACLVYVNA

SEQ ID NO: 17174 - protein, 280 aa, Bambusa multiplex
  unsure (1)..(280): unsure at all Xaa locations
IVESVGEGVTDLAPGDHVLPVFTGECKECPHCKSAESNMCDLLRINTDRGVMIGDGKSRFSINGKPIYHFVGTSTFSEYTVMHVGCVAKINPEAPLXKVCVLSCRISTGLGASINVAKPPKGSTVAIFGLGAVGLASAEGARIAGASRIIGIDLNPSRFEEAKKFGCTEFVNPKDHSKPVQEVLAEMTNGGVDRSVECTGNINAMIQAFECVHDGWGVAVLVGVPHKDAEFKTHPMNFLNERTLKGTFFGNYKPRTDLPNVVELYMKKELEVEKFITHSV

SEQ ID NO: 17175 - protein, 507 aa, Mesorhizobium sp. BNC1
MQSPENVRFLLVDDVDENLLALDGLLRRDGLELFMARSGRQALEMLLVHDFALAIFDVQMPEMDGFELAELMRSTERTRNVPIIFLTAVATDERRRFRGYEAGAVDYLLKPVDPQILRNKAAIFFELARQRQELARQRDELSRSAEKLSKALSVLQAHSDNSPLAVVEFDPNFRFNSWSKSAQRMFGWSAEQVLGQKLVELGWLQREDVARLMDVTGGILTGGEPGSVFACRVSCRDGSVIDSEWFISVLADRGGAVMSVNAQILDVTERNRAEATRQLLIGELNHRVKNTLSTVQAIASQTLRHMESPEDFKASFMARLESLARAHSLLSEANWEGAYLTKLVQDQQQLNLIEEDKFAVSGPEVHLPPQLALHLGLILHELTTNAQKHGALAAPQGRIALSWDLAGKALCVRWVESGVALAKTPSSRRGFGSNLIQRSTSAEGGTAQMAYKPDGISWELTFALAHHNAYASPITSRAHPERIRRSPHPYAGSSDKSEIARPVTSAE

SEQ ID NO: 17176 - protein, 156 aa, Haemophilus influenzae
NRANTPVLVDGKDVMPEVNAVLAKMKDFCQRIISGEWKGYTGKAITDVVNIGIGGSDLGPYMVTEALRPYKNHLNMHFVSNVDGTHIAETLKKVNPETTLFLVASKTFTTQETMTNAQSARDWLLKATKDESAVAKHFAALSTNAKDVEKFGIDTN

SEQ ID NO: 17177 - protein, 268 aa, Arabidopsis thaliana
MMEWDNQLQPNNHHSSNLQGIDVNGGSGAGGGMYVKVMTDEQYETLRKQIAIYGTICERLVEMHKTLTAQQDLAGGRMGGLYADPMMSSLGHKMTARQRWTPTPVQLQILERIFDQGTGTPSKQKIKDITEELSQHGQIAEQNVYNWFQNRRARSKRKQHGGGSSGNNNGESEVETEVEALNEKRVVRPESLLGLPDGNSNNNGLGTTTATTTAPRPEDLCFQSPEISSDLHLLDVLSNPRDEHLVGKMGLAESYNLYDHVEDYGMSG

SEQ ID NO: 17178 - protein, 448 aa, Oenococcus oeni PSU-1
MSTANTTFLILSSVLVLFMTPGLAFFYGGLGSKKNVVNTMMSVFVMCGLAVVLWVICGYSLSFVGDFGGVFGSLSALLLHGVKLTALTSTKIPTSLYLIFQMMFAVITPALFVGAVVGRIRFKFLLLFTVFWSIFIYYPLVHMVWANGFLAKMGVIDFAGGTVVHIDAGVTALVLAYFLGPRIGYRKGKQEGHYSLPWALLGTTILWIGWYGFNAGSALAANQIAVQAVLTTTVATACSMITWMLIEMSLKGKATLAGICNGTLCGLVGITPATGYVTVAGSFWIGILAAVASYFFVNFLKARIGIDDALDAFGCHGVCGIVGSILTGLFASRAVNSSISINGLFYGGGFKLFAVQLFATLFSVIFTALICFLIIKFLKLFMKMRVDVKEEQKGLDFGEHGENVDYVISLTLEAYQFEDQKKEFFQDEPNNLKEVSKNSKDTLNSTIS

SEQ ID NO: 17179 - protein, 337 aa, Mycobacterium avium subsp. paratuberculosis str. k10
MPTHQAVQIQSAGAALELVDTETRPPGRDEVRLTVGACGICGTDAHFVNGAFPGLSWPLTPGHEIAGRIAELGEGVEGFAVGQRVAVGWFGGCCYRCDPCRAGLFIHCVNGKVPSWHYPGGYAESVTVPTSALARIPEELTDAEAAPMGCAGVTTYNALRHTKALPGDRVAILGVGGLGHLGVQFAAAMGFETIAINRGTGKADDARKLGAHHYIDSTAEDPAEALRALGGAAVVLATAGNSQAMAATVGGLAPQGELVTIGVTPEPLPISPLQLITPGLSIVGHPSGTAKDVEDTMQFAVLSGVRAWIEELPLSRAADGYAALEGGRAHYRTVLTM

SEQ ID NO: 17180 - protein, 258 aa, Borrelia hermsii
MIYIRFKEFIAEFLGTFILLALGTGSIAMTTLFPSNPAVAGEIIKGGYTNIVLGWGLGVTFGVYTAAKISGAHLNPALSIGLASIGKFPTSKLFHYILAQILGAFSGALMTLIVFYPKWIEIDPTFEITQGIMSTFPAVSGFWPGFIDQIFGTFLLMFLVLVVGKFVKEETQNPFFPFIIGAIVLAIGISFGGMNGYAINPARDLGPRILLLLAGFKNHGFDDMTVFIIPILGPIIGAILGAIVYEFTLEDKNNLKEF

SEQ ID NO: 17181 - protein, 255 aa, Physcomitrella patens
MGSICSMKFPILMVAFLALGLPSVLGAPYGWKDAHITYYGSPNGGGTQGGACGYQNTYALGYGSFTAALSAPLFQGGAACGGCYQLKCAPVRETRTVHNWCWSYSRSIVVTATNLCPPGSHGGWCAWRPHFDLPMPAFTSLAKQVGGVAPVFYRRVRCAKRGGVRFTIGGNPYFLMVLIHNVGGAGDIRSVRIKGQYSGWVTMFRNWGSLWTCRTKLSGPLSFMITTSDGRTLVSNRAVGSWWKFGQTWEGSQFR

SEQ ID NO: 17182 - protein, 242 aa, Halobacterium sp. NRC-1
MQAVVLAAGEGTRLRPLTEDKPKGMVEVDGKPILTHCFEQLVELGADGLVVVVGYRKQDIIEHYGDEFEGVPITYAHQREQKGLAHALLNVEEHVDEDFMLMLGDNIFQANLEDVVRRQQEERADAAFLVEEVDWDDASRYGVCDTNQYGEVTDVVEKPDDPPSNLVMTGFYTFSPAIFHACHLVQPSNRGEYEISEAIDLLIQSGRTIDAIGLEGWRVDVGYPEDREEAEERLAEAEDAVA

SEQ ID NO: 17183 - protein, 255 aa, Physcomitrella patens
MAMATHVALLLVSALALVTSVQSGYAGSDWISGVAHATFYGGVDAQGTQGGACGYGNLYSTGYGTSTTALSSALFNAGLSCGACFELKCDSANSKYCLPGDKSITVTATNYCPQGSDGGWCDSPKQHFDLSHPMFTSLAQEVGGVIPVTYRRAPCAKKGGMRFTINGNPWFVMILVTNCGGAGDVQQLQIRGSDTPWYPCVRNWGQMWQMTSDPNLPGKALSFRATLSDGSVAESLNAAPSNWGWGQTFEGVATY

SEQ ID NO: 17184 - protein, 273 aa, Citrullus lanatus
MTLNRSPTPLRRLDGKVAIITGGASGIGTSAVRIFHENGAKVIIADIQDEIGQKIADELGDDVSYIHCDVSKEDDVSNLVDAAVHRHGKLDIMYSNAGVLDRSFSGILDVTKSDLDKVLGVNVMGAFWGAKHAARVMIPEKNGCILFTSSATTNIAGLSSHPYAASKCAVLGLVRNLAAELGQHGIRVNCVAPFVVATGIAGSRDPMQAEALETMVTTWANLKGRVLKADDIAKAALYLASDDANYVSGLNLVVDGGYSVVNPTMLKTLKLMD

SEQ ID NO: 17185 - protein, 341 aa, Mycobacterium avium subsp. paratuberculosis str. k10
MRTVVVDGPRSIRVDTRPDPVLPGPDGAIVEVSAAGICGSDLHFYEADFPMPDPIALGHEAIGTVVEAGPQVRNVKVGDQVMVSSVAGCGSCAGCATRDPVLCHSGFQIFGGGVLGGAQADLLAVPAADFQLLKIPEGISTEQALLLTDNLATGWAAAQRADIPFGGTVAVIGLGAVGLCALRSALFQGAATVFAVDQVDGRLARAARWGATPVKAPALEAILAATGGRGADAVIDAVATDASLTEALNAVRPGGTVSVVGVHDMNPFPLNALGCLIRSITLRMTTAPVQRTWPELIPLLQSGRLDVDGIFTTTMPLDEAAIGYATAGSRSGDDVKILLKP

SEQ ID NO: 17186 - protein, 148 aa, Emericella nidulans
MAANINNAAAWLTEAKAHPFQVKEAPSYTPEENEILVKNHAVAINPVDGSLQSKAWWPMNYPTILGQDVAGEVVQVGPNVARFQPGDRVVGHAVGMATKRLQDNAFQAYTILQTNMASQLPSEISYEDAAVLPLGLSTAALGLFRTSF

SEQ ID NO: 17187 - protein, 214 aa, Paeonia anomala
IVESVGEGVTDLKPGDHVLPVFTGECKECRHCKSEESNMCDLLRINTDRGVMLNDGKSRFSINGQPIFHFVGTSTFSEYTVVHVGCVAKINPEAPLDKVCVLSCGISTGLGATLNVAKPKKGSSIAIFGLGAVGLAAAEGARIAGASRIIGVDLNPKRFEEAEKFGVTEFVNPKDYNKPVQEVIAEMTDGGVDRSVECTGSIMAMISAFECVHD

SEQ ID NO: 17188 - protein, 156 aa, Haemophilus influenzae
NRTNTPVLVDGKDVMPEVNAVLAKMKDFCQRIISGEWKGYTGKAITDVVNIGIGGSDLGPYMVTEALRPYKNHLNMHFVSNVDGTHIAETLKKINPETTLFLVASKTFTTQETMTNAQSARDWLLKATKDESAVAKHFAALSTNAKDVEKFGIDTN

SEQ ID NO: 17189 - protein, 442 aa, Bacillus subtilis subsp. subtilis str. 168
MAFEFKLPDIGEGIHEGEIVKWFVKPNDEVDEDDVLAEVQNDKAVVEIPSPVKGKVLELKVEEGTVATVGQTIITFDAPGYEDLQFKGSDESDDAKTEAQVQSTAEAGQDVAKEEQAQEPAKATGAGQQDQAEVDPNKRVIAMPSVRKYAREKGVDIRKVTGSGNNGRVVKEDIDSFVNGGAQEAAPQETAAPQETAAKPAAAPAPEGEFPETREKMSGIRKAIAKAMVNSKHTAPHVTLMDEVDVTNLVAHRKQFKQVAADQGIKLTYLPYVVKALTSALKKFPVLNTSIDDKTDEVIQKHYFNIGIAADTEKGLLVPVVKNADRKSVFEISDEINGLATKAREGKLAPAEMKGASCTITNIGSAGGQWFTPVINHPEVAILGIGRIAEKAIVRDGEIVAAPVLALSLSFDHRMIDGATAQNALNHIKRLLNDPQLILMEA

SEQ ID NO: 17190 - protein, 234 aa, Ralstonia metallidurans CH34
MNIGKRFTAEWLGTFWLVFGGCGAAVFAAAFPNVGIGLLGVSLAFGLTVVTMAYAIGPVSGCHLNPAVTVGLAVAGRFPVAEAPLYILAQLLGAICAAGTLLYLASANPGFDLMANGLATNGYGAASPGGYGLRAVVTTETLMTAFFLIIIIGATSYRRTRAAAPVAIGLALTLIHLISIPISNTSVNPARSTGPAIIVGGVAIQQLWVFWVAPICGAILAGLLGRLLFVNEAD

SEQ ID NO: 17191 - protein, 470 aa, Bacillus subtilis subsp. subtilis str. 168
MVVGDFPIETDTLVIGAGPGGYVAAIRAAQLGQKVTVVEKATLGGVCLNVGCIPSKALINAGHRYENAKHSDDMGITAENVTVDFTKVQEWKASVVNKLTGGVAGLLKGNKVDVVKGEAYFVDSNSVRVMDENSAQTYTFKNAIIATGSRPIELPNFKYSERVLNSTGALALKEIPKKLVVIGGGYIGTELGTAYANFGTELVILEGGDEILPGFEKQMSSLVTRRLKKKGNVEIHTNAMAKGVEERPDGVTVTFEVKGEEKTVDADYVLITVGRRPNTDELGLEQVGIEMTDRGIVKTDKQCRTNVPNIYAIGDIIEGPPLAHKASYEGKIAAEAIAGEPAEIDYLGIPAVVFSEPELASVGYTEAQAKEEGLDIVAAKFPFAANGRALSLNETDGFMKLITRKEDGLVIGAQIAGASASDMISELSLAIEGGMTAEDIAMTIHAHPTLGEITMEAAEVAIGSPIHIVK

SEQ ID NO: 17192 - protein, 254 aa, Physcomitrella patens
GTRKLAVCIAAVAILALNSLPSVLGAPYGWKEAHITYYGTANGGGTQGGACGYPNTFAMGYGVMTAALSYPLFQGGKSCGACYQLKCKWLAPTRTVHNWCWSYSRTITITATNSCPPGSHGGWCDWKPHFDLPMPAFMTLARREGGVAPVYYRKVRCAKRGGIRFTLGGNPYFMMILIHNVGGAGDLRAVKIKGRNGYWVPMWQNWGALWTCKTKLSGALSFQITTGDGRTVTVNRAVGDYWKFGQTWEGSQFR

SEQ ID NO: 17193 - protein, 288 aa, Neisseria gonorrhoeae
MKGIILAGGSGTRLYPITRGVSKQLLPVYDKPMIYYPLSVLMLAGIRDILVITAPEDNAAFQRLLGDGSDFGIRLQYAVQPSPDGLAQAFIIGEEFIGNGNVCLILGDNIFYGQSFTQTLKQAAAKTHGATVFGYRVKDPERFGVVEFDENFNALSIEEKPQQPKSDWAVTGLYFHDNRAVEFAKQLKPSARGELEISDLNRMYLEDGSLSVQILGRGFAWLDTGTQESLHEAASFVQTVQNIQNLHIACLEEIAWRNGWLTKKDVETRAKHLEKTAYGQYLLHLIGK

SEQ ID NO: 17194 - protein, 254 aa, Heliobacillus mobilis
MPDEFHSAEEKERYIQSTFSTIASRYDLINQVFTFNSDRRWRRKTAYYSAVGIGGTALDVCCGTGELAQALAERVGRRGHVVALDFNHDMLEVAREKQRQRLLEPQIEFIQGNAMELPFEDNRFDAATVGFGLRNVPDYRQALREMTRVIRPGGTVVCLETSKPVSTGLRLLHGLYVDHFIPMLDKMAAGRQGPYAWLARSTQAFLSQEELAQVFRDIGLINVRYYNLFGGAAAIHVGYKPANPISPSHTGESS

SEQ ID NO: 17195 - protein, 345 aa, Streptococcus agalactiae 2603V/R
MKVATFIEPGKMVITDTPKPVIEQETDAVIKIVRACVCGSDLWWYRGISKRESGSFAGHEAIGIVEEVGTKVTDVSKGDFVIVPFTHGCGQCPSCKAGFDGNCTNHQAAKNVGYQGQYLRYTNANWALVKIPGQPSDYDNETLNSLLTLSDVMATGYHAAATAEVKEGDTVVVMGDGAVGLCGVIAAKMLGANRIIAMSRHKDRQELALTFGATDIVEERGDEAVKRVLDLTNQAGADAVLECVGTEQSVDTATQIARPGAVIGRVGIPQNPDMNTNNLFWKNIGLRGGIASVTTFDKSVLLDAVLTHKINPGLVFTKSFVLDDIQKAYEAMDKRDAIKSLVIVD

SEQ ID NO: 17196 - protein, 284 aa, Streptococcus agalactiae 2603V/R
MTDTMILNDNHKIPTLGLGTWMIDNDRVAQVVKDAIELGYRHIDTAQAYNNEKGVGVGIKESGITRESLFVTTKIAAEHKDYESATKSIDQSLEALGLDYIDLMIIHSPQPWKEWRETDKHFDQGNLEAWRALEDAQKSGKMKSIGVSNFLEKDLENILKNGHVKPAVNQILAHIGNTPFDLIDYCQSKGIQVEAYSPIAHGQALKSDGIQKMAEKYGVSVAQLCIQYLLQLNLIVLPKASSKEHLQSNLDFDFVISDEDMSILKSLMFDDYGEFSNFPVFSGK

SEQ ID NO: 17197 - protein, 245 aa, Bacillus cereus ATCC 14579
MKGIILAGGTGSRLYPITKVTNKHLLPVGRYPMIYHAVYKLKQCDITDIMIITGKEHMGDVVSFLGSGHEFGVSFTYRVQDKAGGIAQALGLCEDFVGNDRMVVILGDNIFSDDILPYVEEFANQKEGAKVLLQSVEDPERFGVAHIQNRKIVEIEEKPKEPKSSYAVTGIYLYDSKVFSYIKELKPSARGELEITDINNWYLKRGVLTYNEMNGWWTDAGTHASLQKANTLARDINFGKQFNGE

SEQ ID NO: 17198 - protein, 200 aa, ASPERGILLUS NIDULANS FGSC A4
MVRYDYLFKLLLIGDSGVGKSCLLLRFADDTYTESYISTIGVDFKIRTIELDGKTVKLQIWDTAGQERFRTITSSYYRGAHGICVVYDVTDMDSFNNVKQWLQEIDRYATEGVNKLLVGNKSDMEDKKVVEYTVAKEFADSLGIPFLETSAKNASNVEQAFLTMARQIKERMGTATVNNKPTVQVGQGQGVQSGSAGGCC

SEQ ID NO: 17199 - protein, 289 aa, Neurospora crassa
MAERQLTQILTQLQTSASSLSYTDSSALLSKAKLLLLQLNALTPTAPGSASNPSLFSLARQVYEQGALASIRAKNPDAFLRYVSQLQGFYELESTVGTGAAGGRIAGADANREEKNKVTGLYLLLLLTQGQYAEFHSELEALSTRLGGATRELEADRYLGYPIKLERWLMEGSYDRVWKAMKKGEVPCEEYGVFSEILTFQIRSEIASSSERAYPSLPISSTKSLLFLESEGEVVEFARSRGWVLKDGHIYFPSAEPTTEEAGAEQEKPFSRLIIENTLGYARELETIV

SEQ ID NO: 17200 - protein, 463 aa, Glycine max
MASSVLSAASHSVSPSCSLSTTHKGKPMIRDNTLGFHRGPNSFSSSRSRGRISMAVAVNVSRFEGIPMAPPDPILGVSEAFKVDNSDVKLNLGVGAYRTEELQPYVLNVVKKAENLMLERGDNKEYLPIEGSAAFNKATAELLLGADNPAIKQQRVATVQGLSGTGSLRLGAALIERYFPGAKVLISAPTWGNHKNIFNDASVPWSEYRYYDPKTVGLDFEGMIEDIKSAPEGSFILLHGCAHNPTGIDPTPEQWEKIADVIQEKNHIPFFDVAYQGFASGSLDEDAASVRLFVARGMEVLVAQSYSKNLGLYAERIGAINVVSSSPESAARVKSQLKRIARPMYSNPPVHGARIVADVVGNPVLFNEWKAEMEMMAGRIKNVRQQLYDSITSKDKSGKDWSFILKQIGMFSFTGLNTNQSDNMTNKWHVYMTKDGRISLAGLSLAKCEYLADAIIDSYHNVS

SEQ ID NO: 17201 - protein, 314 aa, Phytophthora nicotianae
MSQCASFSTGGKGPFARSRKKQQESAVESVEYAELDLNRLAVIGGGNMAEAIITGVLTEGLIPSSKVVVSDPNPSMRGKYAKLNVETHTRNSSAVKDADVILVAVKPQVVDDVLRAVKASMDPDALVISVVAGQSIKQLQQHLGQDSHIIRTMPNTPAMIGEGTTVWAQSAEVTSVQHELTKQILGSFGVEVFVDDENALDMATALSGSGPAYFFLVAEAMIDTGVHMGFSRPVATKLVQQTMLGSALYMQSEDVHPVELRNNITSPGGTTAAGLYRAEKNGFRAVIADSIWAAYERCLELGSSEPVQRQRPRS

SEQ ID NO: 17202 - protein, 491 aa, Methylococcus capsulatus str. Bath
MSHELRLDQPGLLRTRCLIDGQWVDADHSKTFSVTDPATGRALADVPAMGAAETMRAIAAAEHAWTGWRGKTAKERAAVLRRWYELILSHTEDLARILTAEQGKPLTEARNEIGYAAGFVEWFAEEAGRAYGETIPSPVPDKRLLVIRQPIGVCAAITPWNFPAAMITRKIAPALAAGCTVVVKPAEQTPLTALALADLAVQAGFPPGVINVVTGDPEAIGGELTSNPLIRKLSFTGSTEVGRLLMAQCAATVKKISLELGGNAPFIVFEDADLDAAVEGALLSKYRNTGQTCVCTNRFLIQDSIYDAFAERLAAKVRRLEVGNGLDEGVVQGPLIDEQALAKVERHIADALDRGARVLAGGGRHPLGGRFFQPTVLVDVTPEMLCTREETFGPVAPLLRFGSEEEALAIANATEYGLAAYFYTRDLARAFRVGEALEYGMVGINTGMLSYDVAPFGGVKQSGIGREGSHHGMDEYLELKYLCLGGMAPSA

SEQ ID NO: 17203 - protein, 497 aa, Pseudomonas putida KT2440
MLSELPILPATRAFLERKLKMRIGADWQDAASGRTLSFRNPATGEVLGEVPAAEAEDVDRAVRAARQAFDDSPWSRMRPRERQNLLWRLADLMERDARQLAELECLNNGKSAAVAQMMDVQLAIDFLRYMAGWATKIEGSTVEASMPLMPNDQFHGFVRREAVGVVGAIVAWNFPLLLACWKLGPALATGCTVVLKPADETPLSVLKLAELVDEAGYPAGVFNVVTGTGLNAGAALSRHPGVDKLTFTGSTEVGKLIGKAAMDNMTRVTLELGGKSPTIVMPDANLQEAAAGAATAIFFNQGQVCCAGSRLYVHRKHFDNVVADIAGIANAMKLGNGLDPAVQMGPLISAKQQDRVTGYIELGRELGATIACGGEGFGPGYFVKPTVIVDVDQRHRLVQEEIFGPVLVAMPFDDIDEVIGMANDNPYGLGASIWSNDLAAVHRMIPRIKSGSVWVNCHSALDPALPFGGYKMSGVGREMGSAAIEHYTELKSVLIKL

SEQ ID NO: 17204 - protein, 355 aa, Oryza sativa
  unsure (1)..(355): unsure at all Xaa locations
MGSPRGRRRGDNGRLLLLAAAAVVIASLXAAARRSRRRPGPARTTSTPRASTRPWPSRIVVLVTAFFFLGFFSIYIRRCAGGPLGGPGGYGVGGGGGGRVGGGFTFAAARSRRVRGLDPAVLGAFPTMAYADVKAHKAGKGALECAVCLSEFDDDETLRLLPRCSHAFHADCIDAWLASHVTCPVCRANLAFDAGVPPPPLAPPHALTTGQDVAAAPPQPAAPEQVTVDVVVADAYETEERIRREEAAELMRIGSVKRALRSKSGRRPPQFPRSHTTGHSLAAAAAVPATADDAAERYTLRLPDHVLREIVTSARLRRTTPPLRSAPPPPPRRRLVSREERPARPVREVVQRVSR

SEQ ID NO: 17205 - protein, 277 aa, ASPERGILLUS NIDULANS FGSC A4
MADSDDEYIGGLSGDEGDDDIIRETRGAVGQAPKRRKQKGGAEFELARTWETLVEGADGTISSTVGGLLEASKRKRLLKDTTPLQRGIIRHIILILDLSQSMMEKDLRPTRYLLTLRYAQEFVREFFEQNPISQVGVIGLRDGLALRISDMSGNPTEHISAIQDLRSQDPKGLPSLQNGLEMARGALFHTPSHGTREIFIVFGSLLSSDPGDIHQTITTLIDDKIRVGIVGLAAQCAKIIFVLIVISLLMRWYIIALVVRAGLSAIPRTIYLEFKKV

SEQ ID NO: 17206 - protein, 110 aa, Triticum aestivum
GPLCCWRLLGTVGAVWFIHKASQVGTVTEAIEAVKQAKDAHWGVMVSHRSGDTDDSFIADLAVGAAAGQIKAGAPCRGECLTKYNQLLRIEEEFGSEGVYAGENWRTTAS

SEQ ID NO: 17207 - protein, 388 aa, ASPERGILLUS NIDULANS FGSC A4
MVQFAFVSLWCLLLSYLSTKLPWLKTSIPALKNNIRPPSRDVIMTALPLAIFQLAGHILSSMATSQIPVSLVHTIKGLSPLFTVLAYRFLFRIRYAKATYLSLVPLTLGVMLACSTGFSTNFFGILCALVAALVFVSQNIFSKKLFNEAERAESDIQSAGRRKLDKLNLLYYCSGLAFILTLPIWLVTEGYPLFSDLMQDGAISLTNKAGSLDHGALFLEFVFNGVSHFAQNILAFVLLSMVSPVSYSVASLIKRVFVIVVAIVWFGNSTTPVQGFGIALTFLGLYLYDRNSHDDVADQKANADHFHFKNPILPLNTRGASKLRGSNGYAIPQGRPVDQHVLDRSFPISSNSKKDDGVGHARPRASSNTKAWLPPGTKQETTWQSSDS

SEQ ID NO: 17208 - protein, 502 aa, Oryza sativa (japonica cultivar-group)
MASLARRRAAEAALLRRAPAAAWASAWRGYAAAAAGEESDVVVIGGGPGGYVAAIKAAQLGLKTTCIEKRGTLGGTCLNVGCIPSKALLHSSHMYHEAKASFAHHGIKFSNLEIDLPAMMSQKDKAVAGLTKGIEGLFKKNKVEYVKGFGKFVSPSEVSVDLLDGGSTTVKGKNIIIATGSDVKSLPGVTIDEKKIVSSTGALALSEIPKKLVVIGAGYIGLEMGSVWNRLGSEVTVVEFASDIVPSMDGEIRKQFQRMLEKQKMKFMLKTKVVGVDTSGSGVKLTVEPAAGGEQSVLECDIVLVSAGRVPYTSGLGLNALGVETDKGGRILVDKRFMTNVKGVYAIGDAIPGPMLAHKAEEDGVACVEFIAGKEGHVDYDTVPGVVYTHPEVASVGKTEEQVKASGVAYQVGKFPLLANSRAKAIDDAEGLVKVVAEKETDRILGVHIMAPNAGEIIHEAVLALQYGASSEDIARTCHAHPTVSEALKEACLQTYLKAIHI

SEQ ID NO: 17209 - protein, 528 aa, Oryza sativa
MPELQDNLCSLLHHARQESSMLSPLRLMVIKDMLYLIHAKGLAEHASPSARSQHKLAFVDLEKSCSKLLSETEENGALHEFLSIQDLFSANFPVDADVDLPIIQPEAKGQMSEIPEGTTMDNFGFRIADGTSLVIDLSTFLESAQIALPSLNGWLLGYPVTYLFCNESAETATQNLSKHSLHIYRIYAVRCRQSAAKQSEQELMSFSVPCDMSTKRDEEPWAKSFLAHMNEKIKQCNHVWASVRMEIEENRNARLHESQSRSAMRFGSDSDQDPWQQPMDGSHASGSKAAAAVADGPGTQRTQYPYVTGSSIIALKYKDGVIMASDTGASYGSTLRYKSVERIKAVGKHSLIGASGEFSDFQEILRYLDELTLSDHMWDDGNSLGPKEVHSYLTRVMYNRRNKFDPLWNSLVIGGVKKGPKGEEKYLGMVNMIGTHFEENHIATGFGNHMAIPILRTEWREDMTFEEAVKLVEKCLLVLLYRDRSSINKFQIAKITTEGATIYPPYSLKTYWGFAAFENPAQGAVGSW

SEQ ID NO: 17210 - protein, 485 aa, Arabidopsis thaliana
MSSPRSNKPKIVNGPGGYILQDVPHLIDYLPDLPTYPNPLQDNPAYSVVKQYFVHADDSVPEKVVVHKDGPRGVHFRRAGPRQKVYFESDEVHACIVTCGGLCPGLNTVIREVVSSLSYMYGVKRILGIDGGYRGFYAKNTIPLNSKVVNDIHKRGGTIIGTSRGGHDTNKIVDSIQDRGINQVYIIGGDGTQRGASVIFEEIRRRRLKVAVVGIPKTIDNDIPVIDKSFGFDTAVEEAQRAINAAHVEAESNENGIGFVKLMGRYSGYIAMYATLASRDVDCCLIPESPFYLEGEGGLFEFIERRLKDHGHMVIVLAEGAGQDLMCKSMESTPMDASGNKLLKDVGLWLSQSIKDHFKKNKMVMNLKYIDPTYMIRAVPSNASDNVYCTLLAQSAVHGAMAGYTGYTSGLVNGRQTYIPFYRITETQNNVVITDRMWARLLSSTNQPSFLGPKDTSEEKKELPETPLLDDGAVDIPPVTKEVTK

SEQ ID NO: 17211 - protein, 217 aa, Caulobacter crescentus CB15
MQIFLDSTDTKVIADLASTGLIDGVTTNPTLIAKSGRPMLEVIAEICDIVPGPISAEVAATTADAMIAEGQKLAKIAPNVVVKIPLTRDGLIACAAFADEEIKTNVTLCFSPTQALLAAKAGATYISPFIGRLDDYGFDGMDLIRDIRAIYDNYGYETEILAASVRNAAHVKEAAIVGADVVTIPPAVFSDLYKHPLTDKGLEQFLKDWASTGQSIL

SEQ ID NO: 17212 - protein, 298 aa, Prochlorococcus marinus subsp. pastoris str. CCMP1986
MTVAWVFPGQGSQKIGMANKVIDLPNAKFRFNYASEVFERNLFEICELNSDKKNLSDDLNNTKNTQICLFLVESVLLDSLKENGFKPTYIAGHSLGEITALYCADVLSFEDCVQLIKVRSGLMADAAKGSMAALISFDRDQLDLLVEEIDDLVIANDNSSSQVVLSGSEKALDNISKRIKAKRFLKLNVSGAFHSPFMKESSFQFSKYLDTLEFNQPSMPVISNSHPSLCNNPNDLKVRFKNQMCNGVRWRQTMDLMKENSILQMVEIGPSNVLGGLGKRHLKDVKISQVSSADQIKY

SEQ ID NO: 17213 - protein, 227 aa, Paulownia kawakamii
MAREKIQIKKIDNATARQVTFSKRRRGIFKKAEELSVLCDADVGLIIFSSTGKLFEYASSSMKEILGRHNLHSKNLDKLEQPSLELQLVEDSNYSRLSKEVAERSHQLRRMRGEELQGLSIEKLQHLKKSLESGLSRVIEKKGEKIMKGDQSTSRKGKQLMEENERLRQQVADISNDCKNNAASDSENIVYDEGQSSESVNACNSVGPPQDYDSSDTSLKLGLPYSG

SEQ ID NO: 17214 - protein, 352 aa, Xanthomonas campestris pv. campestris str. ATCC 33913
MSKAHAYAAQTADQPLAPFVFERRAPGPDDVQIDIAYCGVCHSDLHTARNEWHNTVYPSVPGHEIVGRVTAVGSAVTNFKVGDLAGVGCMVDSCRSCASCQEGEEQYCEQGFTGTYNGPMFGGGENTYGGYSDHIVVDQKYVLHISHSDNLAAVAPLLCAGITTYSPLAHWKVGPGQKVGVVGLGGLGHMAVKIAKAMGATVVLFTTSESKRADALRLGASEVVISKDEAQMAAQYNTLDFILNTVAAPHNLDPFLNALKRDGAMVLVGVPEHSHPSPAVFNLVMKRRTLAGSLIGGIRQTQEMLDFCAKHNIVSDIETIRADQINEAYERMLKGDVKYRFVIDMDTLAKAA

SEQ ID NO: 17215 - protein, 408 aa, Streptomyces avermitilis MA-4680
MSAATPPTERRVSARVGAISESATLAVDAKAKALKAAGRPVIGFGAGEPDFPTPDYIVQAAIEACSNPKYHRYTPAGGLPELKAAIAAKTLRDSGYEVDASQVLVTNGGKQAIYEAFAAILDPGDEVIVPAPYWTTYPESIRLAGGVPVDVVADETTGYRVSVEQLEAARTENTKVLLFVSPSNPTGAVYTREQIEEIGRWAAEKGLWVLTDEIYEHLVYGDAEFHSLPVVVPELADKCIVVNGVAKTYAMTGWRVGWVIGPKDVIKAATNLQSHATSNVSNVAQVAALAAVSGDLTAVAEMREAFDRRRKTIVRMLNEIGGVLCPEPEGAFYAYPSVKALLGKEIRGKRPQDTVELAALILEEAEVAVVPGEAFGTPGYLRLSYALGDEDLVEGVSRIQKLLSEAKD

SEQ ID NO: 17216 - protein, 493 aa, Xanthomonas campestris pv. campestris str. ATCC 33913
MSRKQAFQFLDLPRTMPTRIPVELRTSGDWGELYGKFDKADAQYQSGRCLDCGNPYCSWKCPVHNAIPQWLQLVQEDRIIEAAALCHSTNPLPEVCGRVCPQDRLCEGSCTLEEFGAVTIGAVEKYIVDTAFSMGWRPDLGNVQPSGHRVAVVGAGPAGLSCADRLVRAGIEAVVYDRYEQIGGLLQFGIPSFKLDKSVIGKRREILEGMGVQFRLGVEIGKDVSIEQLLGEYDAVFLGTGAYRYTDGGLDGQDLKNVLPALPFLVQNSRIVSGNDPHGRPIAGWEDQIALPDLNGKRVVVLGGGDTGMDCVRSAIRLGAAKVTCAYRRDESSMPGSAREVANAREEGVRFLFNRQPLSIESGADDEAIGVTVVETKLGEPDASGRRNAVPVEGSESLLEADVVIIAFGFSPTVPEWLSSQGVEAGSNGRIVAPAEGNGRLPYQTSNPRLFAGGDCVRGADLVVTAVAEGRDAAGSIVQLLGVKAQVKEPAAA

SEQ ID NO: 17217 - protein, 517 aa, GIBBERELLA ZEAE PH-1
MDSSQAPLIAGHSDEEEELEYASEGSRSPEEAGKTGSGMPSAFVLALTFAADDTGVVSATLVSIGTSLSNRELTSMDKSIITSSTSLFALIISPFSSVLADRLGRKHVILYADILFVTGALLQAWSSTVPIMVAGRCIIGAGVGAASFVVPLYIAEVAPAAHRGRLVTLNIMFITLGQVIAYIVGWAFSTYSSPATGWRWMVGLGALPAVLQGGMIAFMPETPRWLVKAGRSNAAKEVIRRANGDTLQHNADAVIREIELEVREEHEAERLRDHQVSDRWTWLGKWGPLVSEGRNRRALAIACLLQGLQQLCGFNSLMYFSATIFTVIGFQSPTLTSMVVAVTNFLGTVAALGLVDRIGRRRVLLYSIPFMIVGLLLSAYGFSFLSLATGINTTASEPPATAGHEMAALTILVSIMVYVAAYALGLGNVPWMQSELFPLAVRSLGSGVATATSWAANFVVGLTFLPLMDLLSPSWTFVLYAIICGGGYFLVWRIYPETAGLSLEEATALLDNGWGVR

SEQ ID NO: 17218 - protein, 525 aa, Hordeum vulgare subsp. vulgare
  unsure (1)..(525): unsure at all Xaa locations
MDMDQLCLMAVATILLTLILRQVLGGKGTGAKLPPGPWNLPVIGSLHHLVATKPPPHRALLSLSRRYGPVMLLRLGEVPNVIVSTPEAAVLVLKTNDLTFATRTSGPTLDVVGSASEGIIFAPYGEHWRQMRKVCVVELLSAMQVRRIQSIMQAEIAHLLESVAAASSASPFRSAVVDVGKGLARLTNNVIARAVFGGKSRQQEAYLRELGVMAILGGGFSLVDLFPSSRLVRWLSSSGRAMRRLHSRMQRILGDIIQDRKETRAPNGASDAATARDNEDLLDVLLRLGKQDALSFXLTSEIISAVIFDIFSAATDTTAATLEWAMAELVXNPQAMARAKLEVRQMLRHRRSSTITSADLAGLHYLRMVIKETLRLHPSAPLIHRASQENCRVMGYDIPKGTAVMINAFAVGRDPAHWGADAAEFRPERFQGTSVEYSSQGPHMEFVPFGAGRRQCPGALFATTMLELVLANLLYHFDWAIPGGESPEAMDMGEVFGIIVHTRSSLHLQASEACHLQDQTTGVVS

SEQ ID NO: 17219 - protein, 489 aa, Citrus unshiu
MWGRQREASMMYKRTSSRDRSSTFDVEETTALVQNGTEVENTNPSWKLSFPHVLVATLSSFLFGYHLGVVNEPLESISLDLGFNGNTLAEGLVVSMCLGGAFIGSTLSGWIADGVGRRRAFQLCALPMIIGASISATTRNLIGMLLGRFVVGTGMGLGPTVAALYVTEVSPPFVRGTYGAFIQIATCLGLMGSLLIGIPVKEIAGWWRICFWVSIVPAAILCLAMVFCAESPHWLYKKGRTAEAEAEFEKLLGGSHVKSSLAELSKLDRGDDGDIVKFEELLYGRHFRVVFIGSTLFALQQLSGINAIFYFSSSVFKSAGLSSGLANVFVGIANLLGSVVAMVLMDKLGRKALLQWSFFSMAVSMAIQVAASSSYIPGSASLYLSVGGMLMFVLTFALGAGPVPSLLLPEIFPSRIRAKAMAVCMSVHWVINFFVGLLFLRLLEQLGPQLLYSIFGTFCLMAVAFVKRNVVETKGKSLQEIEIALLPQE

SEQ ID NO: 17220 - protein, 831 aa, Paracoccus denitrificans
MTISRRDLLKAQAAGIAAMAANIPLSSQAPAVPGGVESLQITWSKAPCRFCGTGCGVMVGVKEGRVVATHGDLLAEVNRGLNCVKGYFLSKIMYGADRLTQPLLRKKDGVYAKDGEFTPVSWEEAFDTMAAQAKRVLRDKGPTALGMFGSGQWTIFEGYAATKLMRAGFRSNNLDPNARHCMASAAYAFMRTFGMDEPMGCYDDFEAADAFVLWGSNMAEMHPILWTRVADRRLGHPHVKVAVLSTFTHRSSDLADIPIVFKPGTDLAILNYIANHIIQTGRVNRDFVDRHTTFVAGATGIGYGLRDDDPREMAARTAEDPAATTPSTFEEFAELVSEYTLDKVSELSGVEPAFLEQLAELYADPDRKVMSLWTMGFNQHVRGVWANQMVYNLHLLTGKISEPGNSPFSLTGQASACGTARQVGTFRHRLPSDMTVTNPERRQDAEEIWRIPHGVIPEQPGLHAVAQDRALHDGTLNFYWIQVNNNLQASPNNDGEAWPGYRNPDNFIVVSDAYPTVTALAADLILPAAMWVEKEGAYGNAERRTHVWHQLVEAPGEARSDLWQMMEFSTRFTTDEVWPEEILAANPNYRGQSLFDVLFRNGSVDRFDLSELNPVTPTAESNAFGFYVQKGLFEEYAPFGRGHGHDLAPYDTYHEVRGLRWPVVDGKETLWRYREGLDPYVEPGAGVQFYGNPDGKARIIAVPYEPPAEPPDEEYNIWLVTGRVLEHWHSGSMTMRVPELYRAFPGARCFMNPEDARDMGFNQGAEVRIVSRRGEIRSRVETRGRNRMPRGVVFVPWFDASQLINKVTLDATDPISKQTDFKKCAVKILPV

SEQ ID NO: 17221 - protein, 560 aa, Oryza sativa
MASSGFSWTLPDHPKLPKGKTVALVVLDGWGEANADKYNCIHVAQTPVMDSLKNGAPERWRLVKAHGTAVGLPSEDDMGNSEVGHNALGAGRIFAQGAKLVDLALASGKIYDGEGFNYIKECFDKGTLHLIGLLSDGGVHSRLDQVQLLLKGASERGAKRIRVHILTDGRDVLDGSSVGFVETLESDLSQLRDKGIDARIASGGGRMYVTMDRYENDWDVVKRGWDAQVLGEAPYKFQNAVEAVKTLRAETKASDQYLPPFVIVDESGKSVGPVVDGDAVVTFNFRADRMVMLAKALEYADFDKFDRVRVPKIRYAGMLQYDGELKLPSHYLVSPPEIERTSGEYLVKNGVRTFACRHETVKFGHVTFFWNGNRSGYFDETKEEYVEIPSDIGITFNVKPNMKALEIAEKARDAILSGKFDQVRVNLPNGDMVGHTGDIEATVVACKAADEAVKIILDAIEQVGGIYLVTADHGNAEDMVKRNKSGQPLLDKNGGIQILTSHTLQPVPVAIGGPGLHPGVKFRSDIQTPGLANVAATVMNFHGFEAPADYEPTLIEVVDN

SEQ ID NO: 17222 - protein, 113 aa, Pseudomonas syringae pv. tomato str. DC3000
MSKALQITDLHIGEGKAAVKGALITTHYTGTLEDGTVFDSSHERGKPFQCVIGTGRVIKGWDQGLIGMKVGGKRTLFVPAHLAYGDRTIGAHIKPGADLKFEIELLEVLTRDD

SEQ ID NO: 17223 - protein, 153 aa, Mycobacterium avium subsp. paratuberculosis str. k10
MRSGPRTTIAVFGGAAMLVLAVGCGGGHKGGPSTTSTTTPTTTPSTSVVPSTTPGGGGTVPGGPTGGGGPGGGGGSIPGGPTGGGGPGGGGGSIPGGPTGGGGPGGGGGSIPGGPTGGGGPGGGGGSIPGVGGGGGGPGGGGGCVGNVCGGYP

SEQ ID NO: 17224 - protein, 263 aa, Lolium perenne
MASSSSVLLVVALFAVFLGSAHGIAKVPPGPNITAEYGDKWLDAKSTWYGKPTGAGPKDNGGACGYKNVDKAPFNGMTGCGNTPIFKDGRGCGSCFEIKCTKPESCSGEAVTVTITDDNEEPIAPYHFDLSGHAFGSMAKKGEEQNVRSAGELELQFRRVKCKYPDDTKPTFHVEKASNPNYLAILVKYVDGDGDVVAVDIKEKGKDKWTELKESWGAVWRIDTPDKLTGPFTVRYTTEGGTKSEFEDVIPEGWKADTSYSAK

SEQ ID NO: 17225 - protein, 423 aa, Halomonas elongata
MQTQILERMESEVRTYSRSFPTVFTEAKGARLHAEDGNQYIDFLAGAGTLNYGHNHPKLKQALADYIASDGIVHGLDMWSAAKRDYLETLEEVILKPRGLDYKVHLPGPTGTNAVEAAIRLARNAKGRHNIVTFTNGFHGVTMGALATTGNRKFREATGGIPTQGASFMPFDGYMGEGVDTLSYFEKLLGDNSGGLDVPAAVIIETVQGEGGINPAGIPWLQRLEKICRDHDMLLIVDDIQAGCGRTGKFFSFEHAGITPDIVTNSKSLSGFGLPFAHVLMRPELDIWKPGQYNGTFRGFNLAFVTAAAAMRHFWSDDTFERDVQRKGRVVEDRFQKLASFMTEKGHPASERGRGLMRGLDVGDGDMADKITAQAFKNGLIIETSGHSGQVIKCLCPLTITDEDLVGGLDILEQSVKEVFGQA

SEQ ID NO: 17226 - protein, 426 aa, Escherichia coli O157:H7
MSSNKELMQRRSQAIPRGVGQIHPIFADRAENCRVWDVEGREYLDFAGGIAVLNTGHLHPKVVAAVEAQLKKLSHTCFQVLAYEPYLELCEIMNQKVPGDFAKKTLLVTTGSEAVENAVKIARAATKRSGTIAFSGAYHGRTHYTLALTGKVNPYSAGMGLMPGHVYRALYPCPLHGISEDDAIASIHRIFKNDAAPEDIAAIVIEPVQGEGGFYAATPAFMQRLRALCDEHGIMLIADEVQSGAGRTGTLFAMEQMGVAPDLTTFAKSIAGGFPLAGVTGRAEVMDAVAPGGLGGTYAGNPIACVAALEVLKVFEQENLLQKANDLGQKLKDGLLAIAEKHPEIGDVRGLGAMIAIELFEDGDHNKPDAKLTAEIVARARDKGLILLSCGPYYNVLRILVPLTIEDAQIRQGLEIISQCFAEAKQ

SEQ ID NO: 17227 - protein, 406 aa, Oryza sativa
MAATIQSVKARQIFDSRGNPTVEVDICCSDGTFARAAVPSGASTGVYEALELRDGGSDYLGKGVLKAVDNVNSIIGPALIGKDPTEQTVIDNFMVQQLDGTKNEWGWCKQKLGANAILAVSLALCKAGAIIKKIPLYQEFMILPTGASSFKEAMKMGVEVYHNLKSVIKKKYGQDATNVGDEGGFAPNIQENKEGLELLKTAIEKAGYTGKVVIGMDVAASEFYTEDQTYDLNFKEENNDGSQKISGDSLKNVYKSFVSEYPIVSIEDPFDQDDWVHYAKMTEEIGDQVQIVGDDLLVTNPTFPCWLQYSNQFDLQRVAKAIKDKACNALLLKVNQIGSVTESIEAVKMSKRAGWGVMTSHRSGETEDTFIADLAVGLSTLLRIEEELGAAAVYAGAKFRAPVEPY

SEQ ID NO: 17228 - protein, 611 aa, Geobacter sulfurreducens PCA
MCGIVGKYYFNKNAGDSSDIDAMMQAIYHRGPDSSGKYINGRAALGFQRLSIIDTVSGHQPLYNETKTIVLLANGEIYNYKEFVPFLESKGHVFSTRSDCEVIIHLYEEYGIEFISKLNGMFAFCLYDTRNDVMFIARDRVGIKPLYYHLNKEAIIFGSEIKGILASGEVVTEEANDCLAEYLCFRYVANFRTFFSSVNALEPGTYIKISPNGCTFEKFWDLSKYVLNYAQDGDLVETVDAALTASVQRQMMTDVPLGTQLSGGVDSSLVSKLAAGYSPGLKTFTVSFFESAYDESAYARLLADSAGLEYHQIRVDGKTFADTLPKVIWYHDEPLCHANSVHMYLLCTYARQFVTVLLTGEGADELFAGYPRYQICRFGDAYNKLNPSVASLVKSVLKGVPARKIVKIVDNLGLGARELALWNSSFTTKEKVSWLLDSGDVTLDARSALVDSVWNDELSLFDNLLLYEQKSYLQPILMRQDKMSMAASVESRVPVLDNEMLDVANTIPYQYKVRHFTPKHVFKKVAERHISRKIVYKKKVGFGVPVDEWLRDHSGLGRYLDLLLDTARGINGVSRPRIEQLIAEHASRRYNHGDVLWPLVNYAIWREQFFK

SEQ ID NO: 17229 - protein, 350 aa, Vibrio vulnificus CMCP6
MVTPWYGIKEGFGFEHLIWLLVTFSFTNLSITAGYHRLWSHKTYEAHPLLRVVFAIGGAFSLQNSALHWSSDHRMHHKFVDHHDKDPYSASRGFWFSHIGWMLRDYNQSTYNDYTNCRDLQKDPVIMWQHKYYVPLAIATNLGIPLLLGWYYQDIIGMLLVVGALRLTLSHHSTFFINSLAHIWGKQTFTDKNSARDNGFLAVLTFGEGYHNFHHIFENDYRNGIYWWQYDPTKWLIKSCSWLGLTRNLRLTPQMKIDKARAATRLKNALHQLAQRGEQESLKQQLQLEFDGLVATMKDYYDAKKQLLECKKQTAFKKYEVALVKIRYQQAKEDLLSRYKRWHALTAHYA

SEQ ID NO: 17230 - protein, 368 aa, Streptococcus agalactiae 2603V/R
MPKKTDTPAYKPSIYSLTRDELIAWAIEHGEKKFRASQIWDWLYKKRVQSFDEMTNISKDFIALLNENFVVNPLKQRIVQESADGTVKYLFELPDGMLIETVLMRQHYGLSVCVTTQVGCNIGCTFCASGLIKKQRDLNNGEITAQIMLVQKYFDERGQGERVSHIVVMGIGEPFDNYTNVLKFLRTVNDDNGLAIGARHITVSTSGLAHKIREFANEGVQVNLAVSLHAPNNDLRSSIMRINRSFPLEKLFAAIEYYIETTNRRVTFEYIMLNGVNDTPENAQELADLTKKIRKLSYVNLIPYNPVSEHDQYSRSPKERVEAFYDVLKKNGVNCVVRQEHGTDIDAACGQLRSNTMKRDRQKAKVGQ

SEQ ID NO: 17231 - protein, 208 aa, Pirellula sp. 1
MNRMFDLVLGTGNAKKLVELRMMLPEETIALTALSEIENAIDVVEDGETFSANAAKKATEQAKHLERWVLAEDSGLSVDALKGAPGVYSARYAGTHGDDEANNEKLLRELTDVPMDRRGAQFNCHLCLSDPDGNVRLAESGICRGRIATERSGGAGFGYDPLFVIPEYHKTFGELNLTVKRALSHRSRALRLFIPQLLRLVQSNSTSA

SEQ ID NO: 17232 - protein, 350 aa, Cicer arietinum
ETHVLLFLSLFLTCGSYAQDSTLLVPAIITFGDSAVDVGNNDYLPTLFKANYPPYGRDFVNKQPTGRFCNGKLATDITAETLGFTSFAPAYLSPQASGKNLLIGANFASAASGYDEKAAILNHALPLSQQLEYYKEYQSKLAKVAGSKKAASIIKDALYLLMLAAVTLYKIIMSILGINKVLTVDQYSSYLLDSFSSFVKDLYGLGARKIGVTSLPPLGCLPAARTLFGFNENGCVSRINTDAQGFNKKVNSAASNLQKQLPGLKIVIFDIYKPLYDLVQNPSNSGFAEAGRGCCGTGTVETTSLLCNPKSIGTCSNATQYVFWDSVHPSQAANQVLADSLLLQGIALIA

SEQ ID NO: 17233 - protein, 288 aa, Escherichia coli
IGQALALLLKTQLPSGSELSLYDIAPVTPGVAVDLSHIPTAVKIKGFSGEDATPALEGADVVLISAGVARKPGMDRSDLFNVNAGIVKNLVQQVAKTCPKACIGIITNPVNTTVAIAAEVLKKAGVYDKNKLFGVTTLDIIRSNTFVAELKGKQPGEVEVPVIGGHSGVTILPLLSQVPGVSFTEQEVADLTKRIQNAGTEVVEAKRGGGSATLSMGQAAARFGLSLVRALQGEQGVVECAYVEGDGQYARFFSQPLLLGKNGVEERKSIGTLSAFEKNSLEGMLDTL

SEQ ID NO: 17234 - protein, 93 aa, Zea mays
GRTDSPERPTPPTRTPTRTATRTPTRTLIGGWGGRIQSGEGGQNFDRRGNPTIGGEVVWSEGNFGRAAVSSGALNGGYEALELRDGGSDYLGK

SEQ ID NO: 17235 - protein, 428 aa, Trichodesmium erythraeum IMS101
MKNVLSIILGGGAGTRLYPLTKLRAKPAVPLAGKYRLIDIPISNCINSEIQKIYVLTQFNSASLNRHITRTYNFSGFSDGFVEVLAAQQTKDNPEWFQGTADAVRKYIWLFKEWDIDYYLILSGDHLYRMDYRDFVQRHIDTKADITLSVLPIDEARASEFGVMKIDNSGRIVEFSEKPKGNALKAMAVDTSILGVSPEIATKQPYIASMGIYVFNKDAMIKLIEDSEDTDFGKEILPKSAQSYNLQAYPFQGYWEDIGTIKSFYEANLALTQQPQPPFSFYDEQAPIYTRSRYLPPSKLLDCEITESIVGEGCILKKCRIDHCVLGVRSRIEANCIIQDSLLMGSDFYESPTERRYGLKKGSVPLGIGAETKIRGAIIDKNARIGCNVQIINKDNVEEAQREEEGFIIRSGIVVVLKNATIPDGTVI

SEQ ID NO: 17236 - protein, 459 aa, Ralstonia eutropha JMP134
MAQGFDAIIIGTGQAGPALAARLSGAGMKLAIIERARFGGTCVNTGCIPTKTLIASAYAAQLARRAAEYGVTIGGPVAVDMKRVKARKDEISGRSSNGVEQWMRGLANITVYQGHARFENAHSVQVNGELLEATQIFVNVGGRALVPPMPGLDQVPYLTNAGMMDVDFLPEHLIVIGGSYIGLEFGQMYRRFGARVTVVEKGPRLIQREDEDVSQAVREILEAEGIDIRLNANCLSARRDGDHLAVGLDCASGAPEVHGTHLLMAVGRVPNTDDLGLDKAGVETDARGYIKVDEQLRTNVPGIWALGDCNGRGAFTHTSYNDHEIVAANLLDNDPRKVSDRIAAYAMFIDPPLGRAGMTETEARQSGRKILVGTRPMSRVGRAVERGESLGFMKVVVDADTRVILGAAILGLTGDEVIHSILDVMYAGAPYTVISRAMHIHPTVSELVPTLLQELRVPG

SEQ ID NO: 17237 - protein, 431 aa, Triticum aestivum
  unsure (1)..(431): unsure at all Xaa locations
MTTVASLSLVPHLLFKPSVRCLSRKGVGRYGGIKVYAVLRDESADYLKDNHHWEALFHVDDPGPRVPIEKGQYLEAKQALDAVRLHGQYXDWRARSDLLTIMVLHNKVVEVLNPLARDFKSVGNLRKDLDGLQEELAKAHNQLYLSESRVSSALDKLAQMETVVNERLLSDGSAFANTADCASLDPSTSLDTTTSTSSTVRLGAKNPGRRSLPVAGPGTPFGADLGNFRDPVAPARHLKDHTLLPFVCFGEPCVRFRXKXDKRPGCVQNTCAHRACPLDLGSVNEGRITCPYHGWEYSTDGKCEKMPSTKMLNVRIRALPCFEQEGMVWIWPGDDTPTPTIPSLLPPSGFTIHAEIVMELPVEHGLLLDNLLDLAHAPFTHTSTFAKGWSVPSFVKFLTPTSGLQGYWXPYPIDNGVTDPPXHWFLSNHLG

SEQ ID NO: 17238 - protein, 441 aa, Ralstonia eutropha JMP134
MTHVFHRNPRQTLPVAVAGSGVELVDSEGRRYLDASGGAAVSSLGHGHPRVIAAIKAQLDTIAYAHTSFFTTEVSETLAQTLAQAAPGDLEHVYFVSGGSEAVEAALKLARQYFVELGQGSRRHFIARRQSYHGNTLGALAIGGNAWRREPFLPLLVPAHHVSPCYAYRDQVAGETDAQYAQRLADELEAKIQELGAENVAAFVAETVVGATAGAVPPVGDYLKRIRAVCDKYGVLLILDEVMSGMGRTGYLFACEEDGVVPDIVTIAKGLGGGYQPIGAMISTRRIYDTIVAGSGFFQHGHTYIGHATACAAALAVQRTIAEDNLLANVRQRGEQLRARLRESLGNHPNLGDIRGRGLFVGVEFVADRDSKATLDPKLKTHARLKSTAMQHGLLVYPMGGTVDGVHGDHVLFAPPFICTAQDIDKIVERFTAAVAAVLPA

SEQ ID NO: 17239 - protein, 484 aa, Thermobifida fusca
MTSHSDGLRRLRNFINGEYVDSVDGRTAPVVNPATGEAYAEAPVSTAEDVDRAFRAAADAFENGWRDSTPAERQIILNKIADAVEERADELVAAEVENCGKPVKATREEEIWQVTDALRFFAGAARVLEGKAAGEYMADHTSWIRREPIGVVGQITPWNYPMAMAAWKIGPALAAGNTIVLKPSDTTPVSTLLLAEIAAEFLPPGVFNVVTGDRDTGRALVDHPIPRLVSLTGSTRAGYEVAQSASRDLKRLHLELGGKAPVIVFDDADVEKAAEGIAGAGYFNAGQDCTAATRVLAAPGIHDDLAAALAEQAKKTKTAGPDETDAYYGPLNNPNQLDRVSGFFERLPDHAEVLTGGSAVDRPGYFFSPTVVSNLRQGDEMVSEEIFGPVITVQRFDDEDTAVAWANSVKYGLASSVWTKDHARALRVSRRLDFGCVWINTHIPIIAEMPHGGFKHSGYGKDLSLYSLEEYTRIKHVMSYIGRD

SEQ ID NO: 17240 - protein, 588 aa, Zea mays
  unsure (1)..(588): unsure at all Xaa locations
MASHIILPPDDADENHNHQTAAAAAAEEEEEERDELGRDDDDDEHGVPPALPPKAALPFSATCVRISRDSYPNLRALRNASSVSLADAAYVKISEGDFGYVLDDVPHFTDYLPDIPTYPNPLQDHPAYSTVKQYFVNEDDTVPQKVVVQKNSRRGVHFRRAGPRQRVYFGTDEVKACIVTCGGLCPGLNTVIRELXVCGLSHMYNVSSIFGIQNGYKGFYSSNYLPLTPKSVNDIHKRGGTVLGTSRGGHDTKKIVDNIQDRGINQVYIIGGDGTQKGAYEIFKEIRKRGLKVSVAGVPKTIDNDIAIIDKSFGFDTAVEEAQRAIDSAHVEACSAENGIGLVKLMGRYSGFIAMYATLASRDVDCCLIPESPFYLDGEGGLLQYVEKRLKENKHMVIVVAEGAGQDLIAKSLATSDQQDASGNKLLLDIGLWLTHKIKDYFKSKKMEMTIKYIDPTYMXRAIPSNASDNVYCTLLAHSAIHGAMAXGYSFTVGMVNGRHTYIPFYRVTSTXRNKVKVTDRMWARLLSSTNQPSFLSQKDIDEASEADRLANRPPLPTGASSRVVRSFDQSSSCSSNGRDLSALLVHR

SEQ ID NO: 17241 - protein, 717 aa, Azospirillum brasilense
EFTPISWDQAFDIMATKWKETLKKKGPTAVGMFGSGQWTIMEGYAASKFMKAGLRSNNLDPNARHCMASAVVGFMRTFGMDEPMGCYDDMEQADAFVLWGSNMAEMHPILWTRVTDRRLTHEGCKVAVLSTYEHRSFDLADIGLVFTPQSDLAILNYIANHIIKTGRVNQEFIAKHVNFKRGRDDIGYRLRPEHPLEQKAKNVAKANESDPISFEEFAKFVEPYTLEKAHELSGVPKNRLEALAELYADPKVKVMSFWTMGFNQHTRGVWANNLVYNIHLLTGKISQPGCGPFSLTGQPVRCGTAREVGTFSHRLPADMVVTNPEHRKHAEEIWKLPEGTIPDKVGYHAVQQDRMLKDGKLNAYWVQCNNNMQTAPNTANETYLGYRNPENFIVVSDAYPTVTALAADLILPTAMWVEKEGGYGNAERRTQVWHQLVGAPGEARSDLWQIIEFSKRFAIEEVWPEELIAKKPEVRGKTLYDVLYCNGQVNAFPLSDCDPAYENRESQAFGFYVHKGLFEEYATFGRGHGHDLAPYDMYHQERGLRWPVVNGKETKWRYREGFDPYVPAGEGVRFYGNKDGKANIFALPYEPAAESPDKDYPFWLCTGRVVEHWHSGSMTLRVPELRKAFPSAVVFIHPDDAKDLNLRRGQEVRIASRRGEVRVRVETRGRNKPPRGLVFVPFFDHTVLINKVTLDATDPLSKQTDFKKCAVKIIPVA

SEQ ID NO: 17242 - protein, 244 aa, Saccharomyces cerevisiae
GSRRYDSRTTIFSPEGRLYQVEYALESISHAGTAIGIMASDGIVLAAERKVTSTLLEQDTSTEKLYKLNDKIAVAVAGLTADAEILINTARIHAQNYLKTYNEDIPVEILVRRLSDIKQGYTQHGGLRPFGVSFIYAGYDDRYGYQLYTSNPSGNYTGWKAISVGANTSAAQTLLQMDYKDDMKVDDAIELALKTLSKTTDSSALTYDRLEFATIRKGANDGEVYQKIFKPQEIKDILVKTGIT

SEQ ID NO: 17243 - protein, 474 aa, Pseudomonas fluorescens PfO-1
MQTKLLINGQLVNGEGPAQPVLNPARGEVLVEINEATEAQVDAAVRAADSAFAEWSQTTPKDRSLLLLKLADAIEAHGEELAKLESDNCGKPYNAALNDEIPAIADVFRFFAGASRCMSGSAGGEYLPGHTSMIRRDPVGVIASIAPWNYPLMMVAWKIAPALAAGNTVVLKPSEQTPLTALRLAELASDIFPAGVLNLVFGRGPSVGSPLVTHPKVRMVSLTGSIATGSNIISSTADSVKRMHMELGGKAPVIIFDDADIDAAVEGIRTFGFYNAGQDCTAACRIYAQQGIYDKFVEKLGAAVSSIKYGLQDDPSTELGPLITAQHRDRVAGFVERAVAQPHIRLITGGKAVDGNGFFFEPTVLADAQQDDEIVRREVFGPVVSVTKFTDEAQALEWANDSDYGLASSVWTADVGRAHRLSARLQYGCTWVNTHFMLVSEMPHGGQKLSGYGKDMSMYGLEDYTTVRHVMFKH

SEQ ID NO: 17244 - protein, 254 aa, Zea mays
PRDPAQPAWTGTHRWRSPLRLLRLQERKRYPYVTGTSVIALKYKDGVIMACDTGASYGSTLRYKSVERIKAVGKHSIIGASGEFSDFQEILRYLDELTLSDHMWDDGNSLGPKEIHSYLTRVMYNRRNKFDPLWNSLVLGGVKKGPKGDEKYLGMVNMIGTHFEENHVATGFANHLAIPILRAEWREDMTFEEAVKLVEKCLLVLLYRDRSSINKFQIAKVTTQRSTIYPPYSLKTYWGFTHFENPAQGAVGSW

SEQ ID NO: 17245 - protein, 162 aa, Halobacterium sp. NRC-1
MNVALGGTFDPIHDGHRKLFERAFDRGDVTVGLTSDDLAADTRHVDRHVRSFDARHADLDDELAALAETHDREYTIRTLDSPTGIATEPHFDVLVVSPETAAGGERINELRAQDGTDPLEIEVVDHVDAADGDIISSTRIVRGEIDEHGALTPGREGRDPRQ

SEQ ID NO: 17246 - protein, 450 aa, Salmonella typhimurium LT2
MTKHYDYIAIGGGSGGIASINRAAMYGQKCALIEAKELGGTCVNVGCVPKKVMWHAAQIREAIHLYGPDYGFDTTINQFDWSKLIASRTAYIDRIHTSYDNVLGKNNVDVIKGFARFVDAKTIEVNGETITADHILIATGGRPSHPEIPGVEYGIDSDGFFALSALPERVAVVGAGYIAVELAGVINALGAKTHLFVRKHAPLRSFDPMISETLVEVMNAEGPQLHTHAVPKAVVKNADGSLTLELEDGRSETVDCLIWAIGREPSTDNINLAAAGVKTNEKGYIIVDKFQNTNVEGIYAVGDNTGAVELTPVAVAAGRRLSERLFNNKPEEHLDYSNIPTVVFSHPPIGTVGLSEPQAREQYGDEQVKVYKSSFTAMYTAVTTHRQPCRMKLVCVGPEEKIVGIHGIGFGMDEMLQGFAVALKMGATKKDFDNTVAIHPTASEEFVTMR

SEQ ID NO: 17247 - protein, 485 aa, Pseudomonas fluorescens PfO-1
MAGAQTHMHTALLIDGELVAGQGFVEPILNPATGEVLTQIAEASTEQVEAAILAAHRAFAEWSRTTPQQRSNLLLEIANAVEKHADHLARLEALNCGKPLHLARQDDLTATIDVFRFFAGAVRCQTGQLSGEYVPGYTSMVRRDPIGVVASIAPWNYPIMMAAWKIAPALAAGNTLVFKPSEHTPLSILALAPALAEILPRGVINIVCGGGEGVGSHLVGHPKVRMVSLTGDIVTGQKILQAAAKTLKRTHLELGGKAPVIVCNDADLKAVVEGVRTYGYYNAGQDCTAACRIYAQAGIHDKLVAELGAAVSSLRFAGKRDADNEIGPLISTRQRDRVASFVERALGQPHIERVTGAAVHSGAGFFYQPTLLAGCKQSDEIVQREVFGPVVTVTRFDELAQAVDWANDSEYGLASSVWTQNLDKAMQVAARLQYGCTWINSHFMLASEMPHGGLKRSGYGKDLSSDSLQDYSVVRHIMARHGQHL

SEQ ID NO: 17248 - protein, 512 aa, Mycobacterium avium subsp. paratuberculosis str. k10
MLSKCSALSAVGAGHDGSPEDSPEERDQMTVQAVLDDIRKRPGTGDVIAVIDPATEEKITEFTDCGAEAVDEAAARAKASFESGVWSQLPGRERAKILWRIGDLIDEHAEEFAQLDSLNTGMPLLQAQLQMSTCSEFFRYYAGWCSKINGTAYDVKTDGIATDTFVNMHAYTLKEPYSVVGLIFPWNGPIFNANAKLAPALAAGCSLLVKPAEETPLSALLLDRLVHEAGVPEGVVNLLTGYGHTAGAAITAHPDVEKVAFTGSTEVGKEIVRASAGNLKKVTLELGGKSPVLIFDDADLDKAILMASLGIFVHSGQGCVCGSRIFVQRGVYDRVVEGIAMMANTFKLGAPSEEGCVSGPLISQKQLNRVMGFIDEGKNDGVEVVTGGYRLDRKGYFVHPTVLTNVDPGMRLYQQEIFGPVVAILPFDDEDEAVAMANDTTYGLAATAWTENLGRAHRIVKRLQAGSVQVNCQLVFDHDVPFGGYKQSGWGHEFGKEGLEIYLKTKSVWAQL

SEQ ID NO: 17249 - protein, 147 aa, Solanum demissum
MGRFDKEGLKKGPWTPEEDQKLLSFIDKHGCGSWRALPAKAGLQRCGKSCRLRWINYLRPDIKRGKFSLQEERTIIQLHALLGNRWSAIAAYLPSRTDNEIKNYWNSCLKKRLTKMGIDPMTHNQMVKAHQNMLQILVIWLNGKVQD

SEQ ID NO: 17250 - protein, 271 aa, Xylella fastidiosa Ann-1
MFGELISEAIAMFIIIALGESAAAMYILYDPSPYQNAYWGLCICWGLAVTIAIYVTASVSGTHANPAVTLALALYRGFPWEKVLPYWAAQVIGAFIGAMIVYQLYSPVIDYYNHIHQLTRDAGGAAGVFFTSTGMAITPIHALGDEIILTAFLVFGIFAITERFNEAAPTANSGALVIGLLVATIGACMGYLEGWAINPARDLGPRLFAFLAGWGESAFPGKDHYWWIPIIGPLIGGVMGATAFQCLIYPFLPARVHAKQQAAILLNRQHP

SEQ ID NO: 17251 - protein, 184 aa, Oenococcus oeni PSU-1
MKIAFQTAAKRNHHVTLVDKANVLATSKLWRRIANQVAKEFPEISFDSCYVDAAAMKIISAPEKFDVIVTENLFGDILSDEASQITGSLGTIPSISRGDHGPALYEPIHGSAPDIAGKGIANPLSMINSVAMMLDHSFNRKDLAKRITDSVNKTIEGGTTTPDLGGNSKTTVVTNAIIKRIEEN

SEQ ID NO: 17252 - protein, 288 aa, Escherichia coli
IGQALALLLKTQLPSGSELSLYDIAPVTPGVAVDLSHIPTAVKIKGFSGEDATPALEGANVVLISAGVARKPGMDRSDLFNVNAGIVKNLVQQVAKTCPKACIGIITNPVNTTVAIAAEVLKKAGVYDKNKLFGVTTLDIIRSNTFVAELKGKQPGEVEVPVIGGHSGVTILPLLSQVPGVSFTEQEVADLTKRIQNAGTEVVEAKRGGGSATLSMGQAAARFGLSLVRALQGEQGVVECAYVEGDGQYARFFSQPLLLGKNGVEERKSIGTLSAFEKNALEGMLDTL

SEQ ID NO: 17253 - protein, 438 aa, Penicillium citrinum
MPIAKVHARSVYVSRGNPTVEVDVVTETGLHRAIVPSGASTGQHEAVELRDGDKAKWGGKGVLKAVKNVNETIGPALIKENIDVKDQAKVDEFLNKLDGTANKGNLGANAILGVSLAIAKAAAAEKGVPLYVHISDLAGTKKPYVLPVPFQNVLNGGSHAGGRLAFQEFMIVPDTAESFSEGLRQGAEVYQKLKALAKKKYGQSAGNVGDEGGVAPDIQTAEEALDLITEAIEQAGYTGKISIAMDVASSEFYKTDAKKYDLDFKNPDSDPTKWLTYEQLADLYKSLAAKYPIVSIEDPFAEDDWEAWSYFYKTSDFQIVGDDLTVTNPLRIKKAIELKSCNALLLKVNQIGTLTESIQAAKDSYADNWGVMVSHRSGETEDVTIADIAVGLRSGQIKTGAPARSERLAKLNQILRIEEELGENAIYAGKNFRTSVNL

SEQ ID NO: 17254 - protein, 476 aa, Geobacter sulfurreducens PCA
MTSDIKAILEQVVISPDVPIAEAIAQLDRAGTGSLVVCSADKKLYGLLTDGDVRRALLKAVDMGAPCGDIANRKPVITFVPLLPIEALRLMNHHDINHLPVLDAEGRVVDFLLRRDLVAEDELAARARRRLDSVVIPCSASIAEAIAQLDRAGTGALVLCSEGDRLHGLLTDGDIRRAVLRGISLDAPCQDVASRRPVTVEPSFSAAQALHLMNQHDINHLPVVDDTGRVVDFLLRRDLIADDQLNLSAVVMAGGYGKRLLPLTEQVPKPMLPVGDRPLLERTIDQLRRSGIREVNLTTHYLPDSIVEHFGDGDSFGVKLNYLKEDHPLGTAGGLKLMKKASDPFLVMNGDILTGVPFQEMFAYHRKNGAEITVGVRKYEVQVPFGVVECDDVRITGLKEKPSLTFFINAGIYLLEPSVCDLIPEGERFDMTDLIQKLLDEGRSVVSFPIMEYWLDVGRHEDYQKAQEDVRSGKIQ

SEQ ID NO: 17255 - protein, 291 aa, Caulobacter crescentus CB15
MKPVRKAVLPVAGLGTRVLPGTKTTPKELLNVVDRPILSYIVEEGRKAGIEHFVFVTGRSKGAIEDYFDHQIELEAQLEAKGKIEILEQLRAELPKPGEMSFVRQMAPLGLGHAVWCARDIIGDEPFAVMLPDVIVDAERACLGQLIDLYNKVGGGNVIGVEEVPESETHKYGVVAPGKVDGRMATMTGMVEKPAKGTAPSNWAIAGRYILQPEIFALLAAQEKGAGNEIQLTDSMAKLMQDQAFHAYVYEGVTHDCGDKIGLLRANVALALKRADLGAAARAAVEAALKA

SEQ ID NO: 17256 - protein, 278 aa, Pseudomonas aeruginosa
MIKKCLFPAAGYGTRFLPATKAMPKEMLPVVNKPLIQYAVEEALEAGLSEIGIVTGRGKPSLEDHFDISYELEHQIRNTDKEKYLVGIRRLIDECTFAYTRQVEMKGLGHAILTGRPLMAATFSVVLADDLCLNLEGAQVLKQMVKLYNQWRCSIVAIQEVPPEETNKYGVIAAEMIRDDIFRVNTMVEKPKPEEAPSNLAIIGRYILTPDIFDLIEQTEPGKGGEIRVTDALMKQAQDGCVLAYKFKGKRFDCGTAEGYIEATNFCYENLYKTGKAH

SEQ ID NO: 17257 - protein, 231 aa, Photorhabdus luminescens subsp. laumondii TTO1
MLRKLAAELLGTFVLVFGGCGSVVFAAAFPELGIGFVGVSLAFGLTVLTMIYAVGHISGGHFNPAVTIGLWAGGRFRAVEVIPYIISQVIGGILAAAVLYVIASGQVGFDATTSGFASNGFGEHSPGGFSLQSAIVAEIVLTAIFLIVIIGATDRRAPPGFAPLAIGLALVLINLISIPITNTSVNPARSTAVAIFQNTWALEQLWFFWVMPIIGGIVGGGIYRLLFAEKQ

SEQ ID NO: 17258 - protein, 288 aa, Escherichia coli
IGQALALLLKTQLPSGSELSLYDIAPVTPGVAVDLSHIPTAVKIKGFSGEDATPALEGANVVLISAGVARKPGMDRSDLFNVNAGIVKNLVQQVAKTCPKACIGIITNPVNTTVAIAAEVLKKAGVYDKNKLFGVTTLDIIRSNTFVAELKGKQPGEVEVPVIGGHSGVTILPLLSQVPGVSFTEQEVADLTKRIQNAGTEVVEAKRGGGSATLSMGQAAARFGLSLVRALQGEQGVVECAYVEGDGQYARFFSQPLLLGKNGVEERKSIGTLSAFEQNALEGMLDTL

SEQ ID NO: 17259 - protein, 375 aa, Fagus sylvatica
MCGGAIISDFIAPTGSRRLTADYLWGDRKKPISGKRFSKPVVDLDDEFELDFQGFKDEEESDIDEEEVLVQDVKPFTFSAPPSSGSKPVKSVEFNGQAEKSAKRKRKNQYRGIRQRPWGKWAAEIRDPRKGVRVWLGTFNTAEEAARAYDAEARRIRGKKSKGNFPMRLPVPKRSVKANLQKPLAKANLNSVQPNLNQNFNFMNSDQDYTMGLMEEKPFTNQYGYMDSIPVNADVGLKSFASNNTAPYFNSDQGSNSFDCSDYGWGEQGSKTPEISSVLSATLEGDESQFVEDAVPTKKLKSDSGNAVFIENNTAKTLSEELSAFESQMNFQMPFLEGSWESNMEALFSGDTTQDGNSMDLWSFDDLPVMAGGVL

SEQ ID NO: 17260 - protein, 95 aa, Lactococcus lactis subsp. lactis
MKIKMKNGKLIVPDYPTIGYIRGDGVGEDIFPQAKRVFDAAVLKIFGEKKKIDWQKLLAGGEAFASRGEYLPDETLEQIKENLIIYNHQKFVKKS

SEQ ID NO: 17261 - protein, 461 aa, Saccharomyces cerevisiae [sequence omitted]

SEQ ID NO: 17262 - protein, 289 aa, Triticum aestivum
VRPRVRPRVRPRVRGRVGANSSGSGAAPGSGSGPLWWVSDCHGAWYSLAVMLPSLAFVGFLAWQARRSFRRLSYGRSHVVVVAYYALLWAVALLNLLWCFLQAWQCMPDRAFSWNVLSLFTKPGMLFLEVSLIAFLLQGNRSHADVLLKTIYVFGFGVPLFIDADQGTGGKWGLWILHKLVLTGVYGLIVFMHHSRWKDRLPAKPAYYQYVCAMLALNGLSLFGCFLIACGAGFGLWLYNLTTVCYHALYLPLLYVTFLADFFQEEDMLLENVYYSEMKDAGFFDADWD

SEQ ID NO: 17263 - protein, 240 aa, Atriplex hortensis
MSYSYPPPLPSNTLNNFLSPKPVTMKTTGGPPKPTKLYRGVRQRHWGKWVAEIRLPKNRTRLWLGTFDTAEEAALAYDKAAYKLRGDFARLNFPNLRHEGSHIGGEFGEYKPLHSSVNAKLEAICESLAKQGNEKQGKSGKSKKKDVANNNNNTSSSSSSSCCTTATAAADAPQQQQRMPENGGDVKTESTSDSEVGSGGSSPLSDLTFGDNEEMGSENFLLESCPSHEIDWDAILSSES

SEQ ID NO: 17264 - protein, 176 aa, Oryza sativa
ARGEQLAFCPGIIVPGIYYSDDKLLQTRIFSYSDTQRHRLGPNYLLLPPNAPKCAHHNNHYDGFMNFMHRDEEVDYFPSRYDPAKHAPRYPIPSATLTGRREKVVIAKENNFKQPGERYRSWDPARQDRFIKRWIDALSDPRLTHEIRSIWLSYWSQADRSLGQKLASRLSAKPSM

SEQ ID NO: 17265 - protein, 806 aa, Bradyrhizobium japonicum
MLLDLASRDGEFKEVTARMRRLMLNLLGGAKDYSVVPIQGGGSFAMEAARSSFVSRNDKPLVCINGIYGERIFKILRLWGVEALKLVKRATEPLDPQEVAEQLSRNPGVTHLCLVHCETTTGIVNPLDAIIEEARRRGVKTIVDGMSSFGAIDIDLSRGGPDVLVTSSNKCIEGPPGLAFVIASRELLEKAVQEPRSFVLDVTHQWLSLERTGEWRSTPPTHIVQATTKALEILEGEGIDARRRRYEKVRDDLVQELEGVVSPLLSAELQSPVCVAFSAPSGIADQAGFDGLYRHLAAHNLYIYSKLHLATRSFRVGCIGEIQPSWIEQLGCAFRTYFRSGPASSMGTPSTRQACERGVEMSSSFAKDSQLPFSAETAVLHAGYRRDPVTKAVAVPIYQNTAYELDGDLNHIADVYNVKADGFTYTRIINPTTRALEKRYAAVDMGSDSLAVASGQAATFLAILNLSSGEVGDNIVASPYLYGNTWNLLHNTLKRLGISVRTADPRRPETFERAIDDRTICLFGEVISNPCLIPLPVKQLAEIGRKHGVPLVVDNTTTPLVCRPSDLGAAITTYSATKYICGHGTTLGGLIVDNGKFSYRGASRFPLFNSPDEAHGGIIWRNALQDVDDLGKSEVLLKARMTWLRDTGAAIAPFASFQLIQGLETLPLRMKQHCANARIVADVLKEHPKVRRVFYPGLFEGADRETVDQTLNPAYGHGAMVMFEVEDEQAGRKFIQNVDLMYHVSNVGDARTLVTHPVSTTHTTVPREKREPPAYLAARSDFAWASKMSTTSCAIWTGRFPQSDNL

SEQ ID NO: 17266 - protein, 322 aa, Glycine max
MGKKLMHAVQYDSYGGGPAGLKHVEVPIPTPSKDEVLIKVEAASINPFDWKVQKRMLWPLLPRKFPHIPGTDITGEVTEVGQGVQKFKPGDKVNGGGLAEFAVAKESVTASRPSETSASECAALPVAGLTALQALTKSIGIKLDGSGERKSILVTAASGGVGHYAVQLAKLGNTHVTATCGARNIELVKSLGADEVIDYKTPDGAALKSPSGKKYDAVIHCAMGFPWSTFEPNLTVTGKVVDITPSSASMLTFALKKLTFSKKQLVPLLLFPKGEDLQHLIHLVKEGKLKTVVDSKYPLTKAEDAWAKSINGHATGKIIIEF

SEQ ID NO: 17267 - protein, 264 aa, Solanum tuberosum
MCGGAIISDYEPAGNFYRKLSARDLWAELDPISDYWSSSSSSSTVENPYSAQSPVTHSVDKPKKSDSGKSNQLKKGNKTVKVEKEKSTGPRQRKNKYRGIRQRPWGKWAAEIRDPQKGVRVWLGTFNTAEDAARAYDEAAKRIRGNKAKLNFPAPSPPAKRQCTSTVAADPPPALLLESSNIISYNNSPLMNFGYDVQSQTPYYPMEMPVASDDYELKEQISNLESFLELEPADSSDQFSGIVDPDPLNVFLMEDFASTQHQFY

SEQ ID NO: 17268 - protein, 426 aa, Prunus avium
MAGICCGVVGEAEASTTIEASSRNSRRRRLELLPLKYIADMAVKPSTVENSRKRQKIDLYRSSSSVPHNAVESSSEAKSKSESEGSKLNATVRFGDDDFDAVNTRGDHQESKSVRVDNEAVQVQALQGSPRFGMTSVCGRRRDMEDAVSIHPSFYQNDGPDSNGAHFYGVFDGHGCSHVALKCKDRLHEIVKQELETEGGYIQWKGAMERSFAKMDDEVQEGNLVAQGPNCRCELQTPQCDAVGSTAVVAVVTPEKIIVSNCGDSRAVLCRNGVAVPLSSDHKPDRPDELVRIEAAGGRVIYWDGARVLGVLAMSRAIGDNYLKPYVISEPEVTIMDRSAEDECLILASDGLWDVVSNDTACGVVRMCLRAQKTTSHSESSGRDAAVRSDKACSDASILLTKLALARQSSDNVSVVVVDLRRPGRC

SEQ ID NO: 17269 - protein, 359 aa, Vitis vinifera
MSPPLLGVGEEEGQSNVTILASSASMESVCQISSGLKERNYMGLSECSSVDSSAISTDSDGNKSSLNLKATELRLGLPGFLSPGREPELCLLSSTKLDEKPLFPLHPSKDLTYTSSQKTVVSGNKRGFADAMNGFSEGKFLANSEVNVMLSPRPSPNKENLGSQPAKMKEMASPKIVQERPRATNETPPNHTGTGNNNSSAPATKAQVVGWPPIRSFRKNTLATTSKNTEVDGKAGPGALFVKVSMDGAPYLRKVDLRNYSAYQELSSALEKMFSCFTIGQYGSHGAPGREMLSESKLKDLLHGSEYVLTYEDKDGDWMLVGDVPWQMFIETCKRLRIMKSCDAIGLAPRAVEKCKNRN

SEQ ID NO: 17270 - protein, 384 aa, Burkholderia fungorum LB400
MQSAMQARSKLPDVGTTIFTVIGQLAAQYDALNLSQGAPNFAPDASLIDGVAQAMRAGHNQYAPMAGIAALREALADKVATLYGVHYDPASEVTVIASASEGLYSTISALVHPGDEVIYFEPSFDSYGPIVRLQGATPVAIKLSLNDFRVDWDEVAAAITPKTRMIIINTPHNPTATVFSEADVARLKAITRNTDIVILADEVYEHVVFDGAKHQSMACHAELAERSVIVSSFGKSYHVTGWRVGYCLAPAALMDEIRKVHQFMVFSADTPMQYAFVDALARRESYLGLSAFYQKKRDLLTDALRDSRFELLPSEGSFFMLARFRGFSEESDSDFVLRLIRDARVATIPLSAFYTDGTDSGLIRLSFSKDDATLIEGARRLCQI

SEQ ID NO: 17271 - protein, 401 aa, Zea mays
MDRRQELCRNFQRGSCKYGSHCRFVHASSQQQQQAKPNPFGFGLGSRQQQQQQSSFRAQFQQQQQQKPNPFGFGVQGSAAAQSRNAPGQAKPFQNKWVRDPSAPTKQQEAAQPPAAAHTSCTDPESCRQQIAEDFKNETPLWKLTCYAHLRSGPCDITGDISFEELRANAYEQGRQGHPLQSIVEGEKKLKNAKLTDFNNFLNMPRLSVSQTPSFPTVASFPEVKNNSAFGVSQNNGPPVFSSFSQIGVTTNMGPGSRTTPGVPTNTLFGQSTQPSHPTFPAPTFGRSDMKFGVSGPFGSQISQQSSGSFQGSNMSSFGNFSKPHASYQQSPSSSSHHRDIDRQSQDLLSGIVVPTSATNEAPVEDNKNENQDDSIWLKEKWSIGEIPLGEPPQRHVSHVF

SEQ ID NO: 17272 - protein, 529 aa, Geobacter sulfurreducens PCA
MNAHELWQRYQTYLLFDADTGLILDVSRMAFSDDFFASMEPAMQRAFDAMERLEAGEIANPDENRMVGHYWLRSPELAPDPAIAAAIRETVDRVTAFAADVHNGVVTAPRARLFRNVLVIGIGGSALGPQFVADALGGHGDRMRPFFFDNTDPDGMDRVLETLGADGLAETLAIVISKSGGTKETRNGMLEAEAAYRRAGLDFSRHAVAVTGAGSELDRTAEAGGWLCRFPMWDWVGGRTSETSAVGLLPAALQGIPIRDFLDGARTCDTLTRRRETLRNPAALLALMWHHATRGSGSRDMVVLPYKDRLLLFSRYLQQLIMESIGKELDLDGTVVNQGLTVYGNKGSTDQHAYVQQLREGTNNFFVAFIEVLKDREGASLAVEPGFTSGDYLSGFLQGTRTALSEKGRESLTITIPAITPRTVGVLVALFERAVGLYASLVNINAYHQPGVEAGKKAAGGVLALTGEALAFLRREGGTLSATEIAAALGRPEEAETIFRSLLHAAANPDHGVVMEAASPLTRSRFSAR

SEQ ID NO: 17273 - protein, 338 aa, Solanum demissum
MGRSKCCDEEGLKKGPWTHEEDQKLLSFIDKYGCGSWRGLPAKAGLQRCGKSCRLRWINYLRPDIKRGKFSLQEERTIIHLHAFLGNRWSTIATYLPSRTDNEIKNYWNSRLKKRLMKMGIDPMTHKPNAAGSSKYVANLSHMAEWESARLEAEARLVRKSKILFNKNNNSHNYNINPTTISQQLPYHQQLPCLDILKAWQMTSTKLPTINDISHAILLNNSRNKNLESSIPSTLNSSENIFANNVPTTTKVADDHQNLHNLSTINSCFEDDQLQTELPSFMQEFSGVFPEYTQNSTNGLQVDNIMGSFYGDFEDNKLINWNNFPNYLVNSPIGSPVF

SEQ ID NO: 17274 - protein, 335 aa, Geobacter sulfurreducens PCA
  unsure (1)..(335): unsure at all Xaa locations
MTESLAQSSPCIEAFSRALERCGLELRRDRTTTLQVNVGFLCDLACRHCHLEAGPSRTEIMTPETMEEVIAYASRCRFQAIDITGGAPELVPGIERLVTGLAPLTPRLIIRTNLSAFLNPGVAHLPELLRSAGAAIVASFPSANVGQAEAQRGHGIMERSITALKLLNDLGYGRDGSGLELDLVANPTGAFLPPSQCEAEQKLRRDLERKYGVVFSHLYTFANVPLGRFRRWLEDSGNLEGYLQRLAGNFNPATVPGLMCRALVSVAWDGHLYDCDFNLAAGRGLGGERRHVADMACLPPEGTLIPTDDYCYACTAGSGFTXGGAIGAPEGPGTP

SEQ ID NO: 17275 - protein, 492 aa, Zea mays
MDPYKHRPSSGSNSSFWTTNSGAPVWNNNSALTVGQRGPILLEDYHLIEKLAQFDRERIPERVVHARGASAKGFFEVTHDVSHLTCADFLRAPGVQTPVIVRFSTVVHERGSPETLRDPRGFAVKFYTREGNFDLVGNNMPVFFIRDGMKFPDMVHAFKPNPKTNLQENWRIVDFFSHHPESLHMFTFLFDDVGIPLNYRHMEGFGVNTYSLINRDGKPHLVKFHWKPTCGVKCLLDNEAVTVGGTCHSHATKDLYDSIAAGNYPEWKLYIQTIDLDHEDKFDFDPLDVTKTWPEDIIPLQPVGRMVLNKNVDNFFAENEQIAFCPAISVPGIHYSDDKLLQTRIFSYADTQRHRLGPNYLMLPVNAPKCAHHNNHHDGFMNFMHRDEEVNYFPSRFDPARHAEKVPIPPRVLTGCREKCIIQKENNFKQAGERYRSFDPARQDRFIQRWVDALTDPRVTHEHRTIWISYWSQCDAALGQKLPSRLNLKPSM

SEQ ID NO: 17276 - protein, 505 aa, Geobacter sulfurreducens PCA
MSDNFASPHDRDLDERVRPPGWINPSPAPRYDLVVVGAGTAGLVCAAGAAGLGARVALVERHRLGGDCLNYGCVPSKALIRAARAAHDAGNGAPFGVTGCHGTGVDGAAVMERMRRLRAEIGRHDAAVRFRDLGVHVFFGQGSFISRNALEVDGRRLNFVHAAVCTGARAAAPPVPGLAEAGYLTNETIFSLATLPARLAVIGGGPIGCELAQAAARLGSSVTVIEAAPEILPREDTDAAALVRHALERDRVSFLTAAAVVGVERRSGARTLIVRQGDQSHEVTADEILVGAGRTPNIEGLGLERAGIVADPLRGVRVNDRLRTDNPRVYAAGDICSPYRFTHAADAMARIVVANALFGARQRFSTQIIPWCTYTDPEVAHVGLYEREAGERGLAVDTLTVPLTEVDRALLDGEDEGFARVHLKRGTDRIVGATIVARHAGEMLNELTLAMSAGLGLSAIGRSIHPYPTQAEAIKKLADAWNRTRLTPGVKRLMGIMLTLRRLWR

SEQ ID NO: 17277 - protein, 533 aa, Oryza sativa (japonica cultivar-group)
MAGHQYNNSQMSRMDHMDRLNNEPPPFGQKLFMHPRSDPANGAGSSGYVGNTMRSNDLPSSSYAGQAYGQQNRAPIHASYSGHAPAGSSSGSYAPYNTQHMPASSYPHGSEDNFIPSSHVDGRRVALKRRNPIIHPTDGFGVGNYYAGSSSNTQFSRPMPPNPIPPPESCVRMPSHLGSNHWNDHRYVNHEGSQRNVRGRHDHSTIHLEQSPAAACPSSSINVPPYHPNANGPFGSAPVQRDRAPLSVHPRILPPGPDGSSIAFRERPYYPAPQSTNISAPVPTLPISCDSAPFAHGGYAPRSAHRNNLRTYPPPAFASSSNPGAVSHEPAIPSYPPAAPSYPPATSAASSSVQPFHAEAAAHLRHPRHVSVGGSGSARSRRMRDSYHGFHHLMIEDNNLGRSAAERFMMLDQLVIHESREAFDPHWDMRLDIDDMSYEELLALEERIGHVNTGLADEKISGCVMEVACCSSSHLQDDQDNERCVICLEEYKHEDTLGRLKCGHGFHCNCIKKWLQVKNTCPVCKAAAADEGS

SEQ ID NO: 17278 - protein, 491 aa, Zea mays
MDPYKHRPSSAFNAPYWTTNSGAPVWNNDSSLTVGARGPILLEDYHCEKLANFDRERIPERVVHARGASAKGFFEVTHDITHLTCADFLRAPGVQTPVIVRFSTVIHERGSPETLRDPRGFAVKFYTREGNWDLVGNNFPVFFIRDGIKFPDMVHALKPNPRTHIQDNWRILDFFSHHPESLHMFSFLFDDVGIPADYRHMDGSGVHTYTLVSRAGTVTYVKFHWRPTCGVRSLMDDEAVRCGANHSHATKDLTDAIAAGNFPEWTLYIQTMDPEMEDRLDDLDPLDVTKTWPEDTFPLQPVGRLVLNRNIDNFFAENEQLAFCPGLIVPGIYYSDDKLLQTRIFSYSDTQRHRLGPNYLLLPANAPKCAHHNNHYDGSMNFMHRHEEVDYFPSRYDAVRNAPRYPIPTAHIAGRREKTVISKENNFKQPGERYRAMDPARQERFITRWVDALSDPRLTHEIRTIWLSNWSQADRSLGQKLASRLSAKPSM

SEQ ID NO: 17279 - protein, 449 aa, ASPERGILLUS NIDULANS FGSC A4
MAGSKVVEKGSVDGAPAAKLHITELPMTWSNWYQHVNWLNCFFVLFIPLVGCIGAIWTPLRLHTAIFAIIYYFNAGLGITAGYHRLWAHCCYKATLPLQIYLALAGAGAGQGSIRWWSRGHRAHHRYTDTEKDPYSVRKGFWYSHIGWIIMKQNYKKVGRSDASDLDADPVVIWQHKNYINTALFMTLIFPTLVCGLGWGDWRGGFIYGGILRVFFIQQATNCVNSLAHWIGEQPFDDRNSPRDHVITALVTLGEGYHNFHHEFPSDYRNAIEWWQYDPTKWMIWIWKQVGLAYDLKQFRANEIEKGRLQQMQKKVDARRAALDWGVPLKELPVFSWDEFIAESANRALVAIGGVIHDVSDFIKEHPGGKTFISSAVGKDATAMFNGGVYQHSNAAHNLLAMKRVGVVRGGGEVEIWKDAKQPSKVSFPEMVRAGEQITRRTVPVLDRS

SEQ ID NO: 17280 - protein, 246 aa, Arabidopsis thaliana
MCGGAIISDYAPLVTKAKGRKLTAEELWSELDASAADDFWGFYSTSKLHPTNQVNVKEEEAVKKEQATEPGKRRKRKNVYRGIRKRPWGKWAAEIRDPRKGVRVWLGTFNTAEEAAMAYDVAAKQIRGEKAKLNFPDLDHHPSTPPPSSTSLRLSDQPPAKKVCVVSQSELAQPSFPVECVGFGKGEEFQNLMYGFEPDYDLKQQISSLESFLELDGTTAEQPSQLDESVCDVDMWMLDDVIASYE

SEQ ID NO: 17281 - protein, 495 aa, Zea mays
MTMDPTKFRPSSSHDTTVTTTNAGAPVWNDNEALTVGPRGPILLEDYHLIEKVAHFDRERIPERVVHARGASAKGFFESTHDVTSLTCADFLRAPGVRTPVIVRFSQVIPEPGSGRTIRDARGFAVKFYTREGNWDLLGNNFPVFFIRDGIKFPDVIHAFKPNPRSHVQEYWRVFDFLSHLPESLHTFFFLFDDVGVPSDYRHMEGFGVNTYTFVSAAGKAQYVKFHWKPTCGERCILTDEEARVGGRNHSHTQDLYDSIAAEGSFPEWTLYVQVMDPAQEEQYDFDPLDDTKTWPEDLLPLRPVGRLVLDRNVDNFLNENEQLAFGPGLVVPGIYYSDDKMLQCRVFAYADTQRYRLGPNYLMLPVNAPRCGTHNNHYDGAMNLMHRDEEVDYYPSRHARRCGRAAPTPLPPRPVAGRREKATIRKPNDFKQPGERYRSWDADRQDRFVKAIRRLARTPKGQPELRSIWIDLLAKVDASLGMKIATRLNMKANM

SEQ ID NO: 17282 - protein, 288 aa, Escherichia coli
IGQALALLLKTQLPSGSELSLYDIAPVTPGVAVDLSHIPTAVKIKGFSGEDATPALEGADVVLISAGVARKPGMDRSDLFNVNAGIVKNLVQQVAKTCPKACIGIITNPVNTTVAIAAEVLKKAGVYDKNKLFGVTTLDIIRSNTFVAELKGKQPGEVEVPVIGGHSGVTILPLLSQVPGVSFTEQEVADLTKRIQNAGTEVVEAKRGGGSATLSMGQAAARFGLSLVRALQGEQGVVECAYVEGDGQYARFFSQPLLLGKNGVEERKSIGTLSAFEQSALEGMLDTL

SEQ ID NO: 17283 - protein, 340 aa, Pinus taeda
MGRQPCCDKVGLKKGPWTAEEDRKLVNFITLHGHGCWREVPKLAGLLRCGKSCRLRWTNYLRPDLKRGLLSESEEKLIIDLHAAIGNRWSRIAAQLPGRTDNEIKNYWNTRIKKKLRQMGIDPVTHKPLTQMQMQSTPAQTLLLQENDTEQKQQEQHNEPDPDQNQSSNGTVETLVSRAREPHDDIEPLQNFNMEDSNFNMEDSMQLFNVCSPTSGISLSGRTEEVDSDDSDQVSKSFGNGSSTHSQYIGRESSGVKAECGLSGWDQMAGVLGDPLSEWNVDLESWAAGLDATAASASAWIQQLPDCQWNDFQGDFEICSSKSCPETLQRLGPFLDDDEL

SEQ ID NO: 17284 - protein, 277 aa, Rubrivivax gelatinosus
MRRAFGEPVKVSSQPDTLLDERLPRPMNEPTPLSRSFGYQSVDEREREQRIRRVFSAVAARYDLMNDLMSFGIHRLWKRRFVRMAAPQAGQHIVDLAGGTGDVAALMAAADRRVTVVDPSAEMMAVGQARGHAHVDWQVGSAEQLPLADASVDTLTISFGIRNATRIDVALREIHRVLKPGGRFLCLEFSTPAWWLRPFYNLFSFTVIPRLGAWIANSPEAYTYLVESIRRFPDQRGFAAMISAAGFESVRWHDLSFGIACVHVGTRAAAATPAGTA

SEQ ID NO: 17285 - protein, 156 aa, Rumex acetosa
GGVCGYGNLYSQGYGTNTAALSTALFNDGLSCGACFEMRCSGDPRWCIGGVITVTATNFCPPNFALSNDNGGWCNPPLQHFDLAEPAFLQIAQYHAGIVPVSFRRVPCGRKGGIRFTINGHSYFNLVLITNVGGAGDVHSVSIKGSRGGWQAMSRN

SEQ ID NO: 17286 - protein, 157 aa, Rumex acetosa
GACGYGNLYSQGYGVSTAALSTALFNNGGRCGACFEIKCDSDPSWCLPGNPSITVTATNFCPPNFAQASDNGGWCNPPREHFDLAQPSFLKLAQYKAGIIPVSYRRVPCRKQGGIRFTINGFRYFNLVVVTNVAGAGDVMRVRVKGSSTSWMSMSRN

SEQ ID NO: 17287 - protein, 123 aa, Oryza sativa
  unsure (1)..(123): unsure at all Xaa locations
MATKRLVVTLREANLTGKKEPVRSDLNVPLERRTIRSPITPRIRSXVPTGKFLLERGAKVMLASHLGRAXDVTPYYRLKPIVPRWSELLGVDAVMANDCIGXEVEKLIAVLPEGGVLLLENVR

SEQ ID NO: 17288 - protein, 198 aa, Escherichia coli
MNVRQGEPLGLGHSILCARPAIGDNPFVVVLPDVVIDDASADPLRYNLAAMIARFNETGRSQVLAKRMPGDLSEYSVIQTKEPLDREGKVSRIVEFIEKPDQPQTLDSDIMAVGRYVLSADIWPELERTQPGAWGRIQLTDAIAELAKKQSVDAMLMTGDSYDCGKKMGYMQAFVKYGLRNLKEGAKFRKGIEKLLSE

SEQ ID NO: 17289 - protein, 456 aa, Ralstonia eutropha JMP134
MTQNENPSAQSGAKPEDKARPAKALQGVKGMNDMLPADAPLWEHFENAARAMLRAYGYQQIRTPIVEHTQLFVRGIGEVTDIVEKEMYSFTDALNGEQLTLRPEGTAAAVRATIEHNLLYDGPKRLWYTGPMFRHERPQRGRYRQFHQLGAEALGFAGPDVDAEIILMCQRLWDDLGLTGVRLEINSLGQAHERAAHREELIKYLEGFKDILDEDGKRRLYTNPLRVLDTKNPALQEMAANAPKLIDFLGEESLAHFEGVQRLLKANNIPYKINPRLVRGLDYYNLTVFEWITDKLGAQGTIAGGGRYDPLIAQMGGKAAPACGWAMGIERIIELIREEGVVPDAVGCDVYLVHQGEAAQQQATVAAERLRDAGLDVVLHATPDGKSGSFKSQMKRADASGAAYAVIIGEDEVAAGVVQVKELRQGAQAEGGGQQAQVPAENLVDYLIDAMVGASE

SEQ ID NO: 17290 - protein, 243 aa, Zea mays
PRVRAFADPGLGYVDIPNAQIRKVTANRLLASKQTIPHYYLTVDARVDKLVQLRGELNPLQDASGGKKISINDLVIKAAALALRKVPQCNSSWMNDFIRQYHNVNINVAVQTEHGLFVPVIRDADKKGLGAIAEEVKQLAQKARDNSLKPADYEGGTFTVSNLGGPFGIKQFCAIINPPQSAILAIGSAEKRVIPGSADGQFEFGSFMSATLSCDHRVIDGAIGAEFLKAFKGYIENPTSMLL

SEQ ID NO: 17291 - protein, 99 aa, Triticum aestivum
  unsure (1)..(99): unsure at all Xaa locations
MAPTVMASSATSVAPFQGLKSTAGLPVSRRSNGASLGSVSNGGRIRCMQVWPIEGIKKFETLSYLPPLSTEALLKQVDYLIRSKWVPCLXFSKVXFIFR

SEQ ID NO: 17292 - protein, 288 aa, Escherichia coli
IGQALALLLKTQLPSGSELSLYDIAPVTPGVAVDLSHIPTAVKIKGFSGEDATPALEGADVVLISAGVARKPGMDRSDLFNVNAGIVKNLVQQVAKTCPKACIGIITNPVNTTVAIAAEVLKKAGVYDKNKLFGVTTLDIIRSNTFVAELKGKQPGEVEVPVIGGHSGVTILPLLSQVPGVSFTEQEVADLTKRIQNAGTEVVEAKRGGGSATLSMGQAAARFGLSLVRALQGEQGVVECAYVEGDGQYARFFSQPLLLGKNGVEERKSIGTLSAFEQNALEGMLNTL

SEQ ID NO: 17293 - protein, 217 aa, Oryza sativa
MGGRVDHEYSYLFKMVLIGDTGVGKSNILSRFTRNHFSLDSKSTIGVEFATKSLQMEGKTIKAQIWDTAGQERYRAITSAYYRGAVGALLVYDITKRQSFDNVHRWLRELRDHADSSIVIMMVGNKSDLIHLRAVSEDEGKALAEKEGLFFLETSAMEAVNVEEAFQTIITEVYGIVNRKALAAKEAAAASRPLPSQGKTISIDSAAGNTKRACCSA

SEQ ID NO: 17294 - protein, 288 aa, Escherichia coli
IGQALALLLKTQLPSGSELSLYDIAPVTPGVAVDLSHIPTAVKIKGFSGEDATPALEGADVVLISAGVARKPGMDRSDLFNVNAGIVKNLVQQVAKTCPKACIGIITNPVNTTVAIAAEVLKKAGVYDKNKLFGVTTLDIIRSNTFVAELKGKQPGEVEVPVIGGHSGVTILPLLSQVPGVSFTEQEVADLTKRIQNAGTEVVEAKRGGGSATLSMGQAAARFGLSLVRALQGEQGVVECAYVEGDGQYARFFSQPLLLGKNGVEERKSIGTLSAFEQNALEGMLDTL

SEQ ID NO: 17295 - protein, 250 aa, Saccharomyces cerevisiae
MPINQPSGQIKLTNVSLVRLKKARKRFEVACYQNKVQDYRKGIEKDLDEVLQIHQVFMNVSKGLVANKEDLQKCFGTTNVDDVIEEIMHKGEIQLSEKERQLMLNKVNNEMLTIVSAKCINPVSKKRYPPTMIHKALQELKFSPVINKPAKLQALEAIKLLVSKQIIPIVRAKMKVKVAISEPSRQPELIEKISKLIASSPGESTKPELDPWTCTGLIDPVNYRDLMTLCDKKGTVQVLDMAVIDNTTHN

SEQ ID NO: 17296 - protein, 156 aa, Rumex acetosa
GACGYGNLYSEGYGTSTAALSTALFNNGMSCGACFEIRCVNDGKWCLPGKSIVVTATNFCPPNNALPNNAGGWCNPPLQHFDLAQPVFQQIAQYRAGIVPVSYRRVPCNKKGGIRFTINGHSYFNLVLITNVGGAGDVHSVQVKGSRSGWQSMSRN

SEQ ID NO: 17297 - protein, 463 aa, Arabidopsis thaliana
MLRAVIRRAASNGSSPSLFGKSLQSSRVAASSPSLLSGSETGAYLHRGNHAHSFHNLALPAGNSGISRSASLVSSTLQRWVRPFSAETGDTVEAVVPHMGESITDGTLATFLKKPGERVQADEAIAQIETDKVTIDIASPASGVIQEFLVNEGDTVEPGTKVAIISKSEDTASQVTPSQKIPETTDTKPSPPAEDKQKPKVESAPVAEKPKAPSSPPPPKQSAKEPQLPPKERERRVPMTRLRKRVATRLKDSQNTFALLTTFNEVDMTNLMKLRSQYKDAFYEKHGVKLGLMSGFIKAAVSALQHQPVVNAVIDGDDIIYRDYVDISIAVGTSKGLVVPVIRGADKMNFAEIEKTINSLAKKANEGTISIDEMAGGSFTVSNGGVYGSLISTPIINPPQSAILGMHSIVSRPMVVGGSVVPRPMMYVALTYDHRLIDGREAVYFLRRVKDVVEDPQRLLLDI

SEQ ID NO: 17298 - protein, 701 aa, Pirellula sp. 1
MKNRTNIKTTNPQAIRMTTATNVNLPKPPPLPEPESAPAETMNAMLTNALMHAVRNGVKDSRAQSALNRLLPKLESFWEVENVSQQEADEIQLRIVQHWDDLFGYLLHLYGDQWDFFYHLEQILLTIIRGWRMRPEQLKQDDEHRINNPEWYQSEKLVGGALYVDLFSENLGELRKQIPYFQDLGLSYLHLMPLFAVRPGNNDGGYAISNYRSVDPRVGTIDDLRLLADDLREAGILLVLDFVFNHTADDHYWAQQAQSGNEEYQKYYFIFPDREVPDQYERTLREIFPTVRRGNFTWHDGMQQWVWTTFNSFQWDLNYRNPEVFRAMLSEMLFIANTGVDLLRLDAVAFIWKQMGTNCENLPEAHTLIRAFNSCVRIAAPGLVFKSEAIVHPDDVVRYISHKECQTSYNPTLMALMWESLATRDTKLLRRSLARRHKLPERTTWVNYLRCHDDIGWTFDDADAAAVGIDAFGHRQFLNAFYTGQFEGSFARGVPFQHNPDNGDMRISGTLASLAGLEQAIESDRDDWKELAIRRILLLNAMMLSVGGIPLVYLGEEWGALNDYDFVKDPAKAGDTRWVHRPKMQWKFLEELGDDGSIRGRIYRSIRKLIAIRKMTPAFGGLDMELLVLESPHLLGYVRQHEGNRVIVIANFCEHAQEIDSNRLRTAGMGRFFEDLYSGQTITTSHPLTLGPYEFMWLHRV

SEQ ID NO: 17299 - protein, 424 aa, Synechocystis sp. WH 8501
MRIKRIIASEMLDSRGNPTVEAQVMLEDGTVGSALVPSGASTGEKEAVEMRDGDKSRYKGKGVLKAVENANNHLAPALIGMDVTQQRAIDQTMIDLDGTPNKAKMGANAILAISLAAARTAANYLKMPLYRYLGGTNASLLPVPCMNVINGGSHADNTVDFQEFMIAPHNAPSFAEAIRMGAETFHTLKGLLKDKGLSTGIGDEGGFAPNLKSNEDAIEFIIEAIEAAGYKPGEDISICLDPATSELWKDGKYLFFKSDNSTKTPSEMVALWQDWMNKYPIVSLEDGMGENDWDGWKELTDKIGDKVELVGDDLFCTNPTILAEGIEKGVANSVLIKVNQIGSLTETLDTIELAKKHNYKCFVSHRSGETEDTTIADLVVATSAGQIKTGSGCRGERIAKFNQLLRIERDLGKAARFAGKAAFL

SEQ ID NO: 17300 - protein, 477 aa, Cyanidioschyzon merolae
MIAFVINSATKAAVSPLKGQICRGLPKNPSFAASTWLGQAALSTRPRSSQGRGRSGVRESAATRARAPVCVQTSDVAMRVRSIRDLQDAEIRGKRVFVRSDLNVPLDGKRITDDTRIRASVPTIKYLADKGAKVIVVSHLGRPKGGFEDKYSLAPVAERLSELLGKKVRMAKDCIGDAVATEVAAMSPGDVVLLENVRFYPEEEKNDPDFARKLAANADLYVNDAFGTAHRAHASTEGVTAFLKPAVAGFLLEKELDYLSNAIESPKRPFAAIVGGSKVSTKIAVLEKLLQKCDTIIIGGGMVFTFLRARGLKTGSSLVEEDKIELARVIEEEARKRGIELLLPLDVVVADKFANDANTKVVPVEEIPDGWMGLDNGPETTRMIQEKLRTMKTVLWNGPLGVFEMPNFAKGTFAIAETLAEITQNGCITIVGGGDSVAAMEQSGKADKVSHISTGGGAALELIEGRVLPGVAALQRA

SEQ ID NO: 17301 - protein, 461 aa, Chlamydophila pneumoniae TW-183
MTQEFDCVVIGAGPSGYVAAITAAQSKLRTALIEEDQAGGTCLNRGCIPSKALIAGANVVSHITHAEQFGIHVDGYTIDYPAMAKRKNTVVQGIRQGLEGLIRSNKITVLKGTGSLVSSTEVKVIGQDTTIIKANHIILATGSEPRPFPGVPFSSRILSSTGILELEVLPKKLAIIGGGVIGCEFASLFHTLGVEITVIEALDHILAVNNKEVSQTVTNKFTKQGIRILTKASISAIEESQNQVRITVNDQVEEFDYVLVAIGRQFNTASIGLDNAGVIRDDRGVIPVDETMRTNVPNIYAIGDITGKWLLAHVASHQGVIAAKNISGHHEVMDYSAIPSVIFTHPEIAMVGLSLQEAEQQNLPAKLTKFPFKAIGKAVALGASDGFAAIVSHEITQQILGAYVIGPHASSLIGEMTLAIRNELTLPCIYETVHAHPTLSEVWAEGALLATNHPLHFPPKS

SEQ ID NO: 17302 - protein, 483 aa, Oryza sativa
MNVLASKIFPSRSNVVSEQQQSKREKATIDDAKNSSKNKNLDRSVDESVLGIILGGGAGTRLYPLTKKRAKPAVPLGANYRLIDIPVSNCLNSNISKIYVLTQFNSASPNRHLSRAYGNNIGGYKNEGFVEVLAAQQSPDNPNWFQGTADAVRQYLWLFEEHNVMEFLILAGDHLYRMDYEKFIQAHRETDSDITVAALPMDEKRATAFGLMKIDEEGRIVEFAEKPKGEQLKAMMVDTTILGLDDVRAKEMPYIASMGIYVISKNVMLQLLREQFPGANDFGSEVIPGATNIGMRVQAYLYDGYWEDIGTIEAFYNANLGITKKPVPDFSFYDRSAPIYTQPRHLPPSKVLDADVTDSVIGEGCVIKNCKIHHSVVGLRSCISEGAIIEDSLLMGADYYETEADKKLLGEKGGIPIGIGKNCHIRRAIIDKNARIGDNVKIINVDNVQEAARETDGYFIKSGIVTVIKDALLLAEQLYEVAA

SEQ ID NO: 17303 - protein, 120 aa, Zea mays
MPPPQPPTMDPKMTEVTQMFARFKTAYARNDLNTCVTLLSQLKVHLTQFPSLPALFQQTPNIVEELKLARDIYEHAVVLSVKFEDQDAFERDFCQLKPYYMDTWLVLCHPICRFYFPLLF

SEQ ID NO: 17304 - protein, 516 aa, Zea mays
MVGFCSLRTEDSTRKRRRMTQACAEACPRSRSCREGRYLLGKGAKVIFSSHLGRPKGFTPKFSLAPLVARLSELLGIQVQKADDVIGPEVEKLVAALPNGVAVLRERVRFYKEEEKNEEHSAPELEGKRVFVRADLNVPLDENQNITDDTRIRAAIPTIQYILSKGAKVILSSHLGRPKGFTPKFSLAPLVGRLSELLGIQVQKADDVIGPEVEKLVAALPNGGVLLLENVRFYKEEEKNDPEFAQKLASLADLYVNDAFGTAHRAHASTEGVTKFLQPSVAGFLLQKELDYLVGAVSSPKRPFAAIVGGSKVSSKIGVIESLLEKCDILLLGGGMIFTFYKAQGLPVGASLVEEDKLELATSLLAKAKEKGVSLMLPTDVVIADKFAPDANSQIVPASAIPDGWMGLDIGPDSVASFNAALDTTKTVIWNGPMGVFEFDKFAVGTEAVAKKLAELSGKGVTTIIGGGDSVAAVEKVGVADVMSHISTGGGASLELLEGKELPGVVALNEAATVTV

SEQ ID NO: 17305 - protein, 473 aa, Oryza sativa
MTTTGSTPPRKNRSNVTGGEGGSLEEYAWRAAGEAAAAKKATRAWGVSVSLRSHFSSLVLLLLLLLVALAVSATTKNGDPAETPHAPPLPPPASIKLPSSSSSGGGECDLFSGRWVYDEAAYPLYRESACRVMSEQSACEKYGRTDLRYQHWRWQPHGCDLPRFDAEKFLGKLRNKRLVFVGDSLNRNQWASMLCLIDTGAPELHTSINSSRSLTTFKIHEYNASVDFYWSPLLVESNSDHPLRHRVADRTVRAASINKHAAHWTNADVLVFNSYLWWQRPAMKVLWGSFDNPAAVVAAAAEEGDEYAVSKVIDSLRAYELAVRTWADWMEFHVDRARTQLFFMTMSPTHLRSDEWEDAAAAAAGGNHGCYGETEPIAAEEYRGTSGTDMAFARAVEAEARRLGERSVAVRLINVTRLSERRKDAHPSVHRRYWDPVTDEQRRNPSSYADCIHWCLPGVPDVWNQLLYAHIVS

SEQ ID NO: 17306 - protein, 506 aa, Dechloromonas sp. RCB
MLYASPGTAGAKIAYKAQYDNFIGGKWVAPVNGQYFDVVTPISGKPYTKAARSTAEDMELALDAAHAAFPTWGKTSAADRANVLLKIADRLEANLELLAYAETVDNGKAIRETLNADIPLAVDHFRYFAGCLRAQEGGISEIDENTMAYHIHEPLGVVGQIIPWNFPILMAAWKLAPAIGAGNCVVLKPAESTPISILILAELIADILPAGVLNIVNGYGREAGMPLATSKRIAKIAFTGSTSTGRVIAQAAANNLIPATLELGGKSPNVFFADIMDKDDSFLDKAVEGMVLFAFNQGEVCTCPSRALIQESIYEKFMERVLKRVAAIKQISPLDTDCMMGAQCSQEQMTKIQSYLELGKQEGAECLIGGERAHLGGDLEGGYYIQPTMFKGHNKMRIFQEEIFGPVLAVTTFKDEAEALAIANDTIYGLGAGVWSRNGNVAYRMGRAIQAGRVWTNCYHAYPAHAAFGGYKESGIGRETHKVMLDHYQQTKNLLVSYSETKLGFF

SEQ ID NO: 17307 - protein, 564 aa, Streptococcus agalactiae 2603V/R
MNYKEIYQEWLENDSLGKDIKSDLEAIKGDESEIQDRFYKTLEFGTAGLRGKLGAGTNRMNTYMVGKAAQALANTIIDHGPEAIARGIAVSYDVRYQSKEFAELTCSIMAANGIKSYIYKGIRPTPMCSYAIRALGCVSGVMITASHNPQAYNGYKAYWKEGSQILDDIADQIANHMDAITDYQQIKQIPFEEALASGSASYIDESIEEAYKKEVLGLTINDTNIDKSVRVVYTPLNGVGNLPVREVLRRRGFENVYVVPEQEMPDPDFTTVGYPNPEVPKAFAYSESLGKSVDADILLATDPDCDRVALEVKDSKGEYIFLNGNKIGALLSYYIFSQRCALGNLPHHPVLVKSIVTGDLSKVIADKYNIETVETLTGFKNICGKANEYDISKDKTYLFGYEESIGFCYGTFVRDKDAVSASMMVVEMTAYYKERGQTLLDVLQTIYDKFGYYNERQFSLELEGAEGQERISRIMEDFRQDPILQVGEMTLENSIDFKDGYKDFPKQNCLKYYFNEGSWYALRPSGTEPKIKCYLYTIGCTEADSLSKLNAIESACRAKMNSTK

SEQ ID NO: 17308 - protein, 124 aa, Triticum aestivum
  unsure (1)..(124): unsure at all Xaa locations
RGRTSRGHGTGSWQKKKNLMDNAPCYYCHRXFHYENSQVQHHNAKYFECHDCLKKLSTDCEMDMHDLSAHKEYDPTDANAKPEMYSADIDIIGMPAIPSDVITVHYAEEVDPSSEEVEGSWTST

SEQ ID NO: 17309 - protein, 471 aa, Zea mays
  unsure (1)..(471): unsure at all Xaa locations
MDRKDVGILAMDIYFPPSCVQQEALEAHDGASKGKYTXLGLGQDCMAFCSEVEDVISMSLTVVNSLLKKYKIDPKLIGRLEVGSETVIDKSKSIKTWLMQIFEESGNSDIEGVDSSNACYGGTAALLNCVNWVESNSWDGRYGLVVCTDSAVYAEGPARPTGGAAAIAMLIGPNAPISFESKYRASHMAHVYDFYKPDLASEYPVVDGKLSQTCYLMALDSCYRQFCNKYEKIAGKQFSICDAEYFVFHSPYNKLVQKSFARLYYNDFLRNCSSVDDDAKEKLQSFSNLTGEESYQSRDLEKASQQVAKHLHDIKVQPSTLLPKQIGNMYTASLYAALASVLYNKHDSLNGQRIVMFSYGSGLTSTMFSLRLNNGQHPFSLSNIASVLDVTEKLQSRHETLPEKFVETLKLMEHRYGAKDFETSRDTSLLQPGTFYLTKVDSMYRRFYSQKLSEETGGGKTKCCNGLANGH

SEQ ID NO: 17310 - protein, 283 aa, Salmonella enterica
IGQALALLLKNQLPSGSELSLYDIAPVTPGVAVDLSHIPTAVKIKGFSGEDVTPALEGADVVLISAGVARKPGMDRSDLFNVNAGIVKNLVQQIAKTCPKACVGIITNPVNTTVAIAAEVLKKAGVYDKNKLFGVTTLDIIRSNTFVAELKGKLPTEVEVPVIGGHSGVTILPLLSQIPGVSFTEQEAAELTKRIQNAGTEVVEAKAGGGSATLSMGQAAARFGLSLVRALQGEKDVVECAYVEGDGQYARFFSQPLLLGKNGVEERKSIGTLSAFEQHSLDA

SEQ ID NO: 17311 - protein, 283 aa, Salmonella enterica
IGQALALLLKNQLPSGSELSLYDIAPVTPGVAVDLSHIPTAVKIKGFSGEDATPALEGADVVLISAGVARKPGMDRSDLFNVNAGIVKNLVQQIAKTCPKACVGIITNPVNTTVAIAAEVLKKAGVYDKNKLFGVTTLDIIRSNTFVAELKGKRPTEVEVPVIGGHSGVTILPLLSQIPGVSFTEQEAAELTKRIQNAGTEVVEAKAGGGSATLSMGQAAARFGLSLVRALQGEKGVVECAYVEGDGQYARFFSQPLLLGKNGVEERKSIGTLSAFEQHSLDA

SEQ ID NO: 17312 - protein, 535 aa, Magnaporthe grisea 70-15
MVRGFKRPENEAGAAWPAILVGAFVSFGGVLFGYDTGTISGILAMKYWKELFSTGYTDATGQLGISPSEEAAVVSILSAGTFFGALASVFLADSIGRRWALIASCWVFNLGVIFQTAAVALPLFLAGRFFAGFGVGLISAMIPLYQSETAPKWIRGAIVGAYQLSITIGLLLAAIVNNSTHERDDTGSYRIPIAVQFAWSIILIVGMLILPETPRFLVKKGKMDQAARSLGKLRRLPADHEAIVAEVAEIKANNDYEMSQGTAGYIDCFRGPMLKRQLTGMGLQALQQLTGVNFIFYYGTKYFENSGISQPFVIQMITSVINVVSTIPGLIAVDRWGRRPMLLWGAIGMTISQFLVAMLGTLTTGQRADGSIIVYNVEAQKAGVAFVCIYIFFFASTWGPLAWVVTGEIFPLKQRARGLSLTTATNWLLNWAIAYMTPYLVNFGPGYANLQSKIFFVWFGACFLCIAFVYFFIYETKGLSLEEVDELYAQVSSARHSSAWQPSVSFTQRTGVDSATVEKIEGDASDHAVDQANRV

SEQ ID NO: 17313 - protein, 453 aa, Arabidopsis thaliana
  unsure (1)..(453): unsure at all Xaa locations
MASLMLSLGSTSLLPREINKDKLKLGTSASNPFLKAKSFSRVTMTVAVKPSRFEGITMAPPDPILGVSEAFKADTNGMKLNLGVGAYRTEELQPYVLNVVKKAENLMLERGDNKEYLPIEGLAAFNKATAELLFGAGHPVIKEQRVATIQGLSGTGSLRLAAALIERYFPGAKVVISSPTWGNHKNIFNDAKVPWSEYRYYDPKTIGLDFEGMIADIKEAPEGSFILLHGCAHNPTGIDPTPEQWVKIADVIQEKNHIPFFDVAYQGFASGSLDEDAASVRLFAERGMEFFVAQSYSKNLGLYAERIGAINVVCSSADAATRVKSQLKRIARPMYSNPPVHGARIVANVVGDVTMFSEWKAEMEMMAGRIKTVRQELYDSLVSKDKSGKDWSFILKQIGMFSFTGLNKSQSDNMTDKWHVYXTKDGRISLAGLSLAKCEYLADAIIDSYHNVS

SEQ ID NO: 17314 - protein, 283 aa, Salmonella enterica
IGQALALLLKNQLPSGSELSLYDIAPVTPGVAVDLSHIPTAVKIKGFSGEDATPALEGADVVLISAGVARKPGMDRSDLFNVNAGIVKNLVQQIAKTCPKACVGIITNPVNTTVAIAAEVLKKAGVYDKNKLFGVTTLDIIRSNTFVAELKGKLPTEVEVPVIGGHSGVTILPLLSQIPGVSFTEQEAAELTKRIQNAGTEVVEAKAGGGSATLSMGQAAARFGLSLVRALQGEKGVVECAYVEGDGQYARFFSQPLLLGKNGVEERKSIGTLSTFEQHSLDA

SEQ ID NO: 17315 - protein, 444 aa, Saccharomyces cerevisiae
MKQRFIRQFTNLMSTSRPKVVANKYFTSNTAKDVWSLTNEAAAKAANNSKNQGRELINLGQGFFSYSPPQFAIKEAQKALDIPMVNQYSPTRGRPSLINSLIKLYSPIYNTELKAENVTVTTGANEGILSCLMGLLNAGDEVIVFEPFFDQYIPNIELCGGKVVYVPINPPKELDQRNTRGEEWTIDFEQFEKAITSKTKAVIINTPHNPIGKVFTREELTTLGNICVKHNVVIISDEVYEHLYFTDSFTRIATLSPEIGQLTLTVGSAGKSFAATGWRIGWVLSLNAELLSYAAKAHTRICFASPSPLQEACANSINDALKIGYFEKMRQEYINKFKIFTSIFDELGLPYTAPEGTYFVLVDFSKVKIPEDYPYPEEILNKGKDFRISHWLINELGVVAIPPTEFYIKEHEKAAENLLRFAVCKDDAYLENAVERLKLLKDYL

SEQ ID NO: 17316 - protein, 400 aa, Rhizobium leguminosarum
MAFLADALSRVKPSATIAVSQKARELKAKGRDVIGLGAGEPDFDTPDNIKKAAIDAINRGETKYTPVSGIPELRKAIAAKFKRENGLDYSWEQTIVGTGGKQILFNAFMATLNPGDEVSIPAPYWVSYPEMVALCGGTRFFVSATQEHNFKLQAADLEKAITPKTKWFIFNSPSNPTGAAYTHDELKALTDVLMKNPQVWVLTDDMYEHLTYGDFKFVTPVEVEPQLYDRTLTMNGVSKAYAMTGWRIGYAAGPIQLIKAMDMIQGQQTSGATSIAQWAAVEALNGTQDFIPENKKIFEGRRDLVVSMLNQAKGIVCPVPEGAFYVYPSCKGLIGKTAPSGKVIETDEDFVSELLESEGVAVVHGSAFGLGPNFRISYATSEEQLEEACRRIQRFCGACK

SEQ ID NO: 17317 - protein, 283 aa, Salmonella enterica
IGQALALLLKNQLPSGSELSLYDIAPVTPGVAVDLSHIPTAVKIKGFSGEDATPALEGADVVLISAGVARKPGMDRSDLFNVNAGIVKNLVQQIAKTCPKACVGIITNPVNTTVAIAAEVLKKAGVYDKNKLFGVTTLDIIRSNTFVAELKGKLPTEVEVPVIGGHSGVTILPLLSQIPGVSFTEQEAAELTKRIQNAGTEVVEAKAGGGSATLSMGQAAARFGLSLVLALQGEKGVVECAYVEGDGQYARFFSQPLLLGKNGVEERKSIGTLSAFEQHSLDA

SEQ ID NO: 17318 - protein, 716 aa, Claviceps purpurea
MVRTSLAAFSLAVAGLASAQCPFADPGRLAARAQGLDESSRGHLAGFEVDDSEGYLTSDVGGPIEDQNSLKAGDRGPTLLEDFIFRQKITHFDHERVPERAVHARGTGAHGTFTSYGDYSNITAASFLGQKDKKTPVFVRFSTVAGSRGSADTARDVHGFAVRLYTDEGNFDIVGNNVPVFFIQDAIQFPDLIHSVKPRQDNEIPQAATAHDSAWDFFSQQTSTLHTLFWAMAGYGIPRSLRHMDGFGVHTYRLVTDDGTSKLVKWHWKSKQGKASLVWDEAQRAAGKNADYHRQDLFDAIQSGNYPEWELNLQIINEDQALAFGFDVLDPTKIIPEEYAPLMPVGVMRLDANPSNYFAETEQVMFQPGHIVRGVDFTEDPLLQGRIFSYLDTQINRHGGPNFEQLPINRPVVPIHNNNRDGAGQNFIHKNNAPYTPNTLNKGFPKQANQKEGKGFFTAPGRKVSGSLQRRLSNTFLDHWTQPRLFFNSITPIEQQFLINAIRFETSHLSQVVQKNVLAQLNKISHDVAVRVGKALGLDAPPADDKYYHNNQTKGLSIFGEELPTIATLIVGVLASTASKNSLAQAQALKDAFKTREVNVIVVAESLATGVDQTYDAADAVSFDGIVVADGVEALFDNTKKSSLFQPGRPSQIVNDGYNWGKPMGFLGSAKRAVKATSVVEGAGVYMRNSTATLVGDFQKGLAKFKFTDRFPMDTK

SEQ ID NO: 17319 - protein, 156 aa, Rumex acetosa
GGACGYGNLYSQGYGTNTAALSTAMFNNGLACGSCYEITCVADRKWCIPGSIMVTATNFCPPNNALPNNAGGWCNPPLHHFDLAQPVFQHIAQYKAGIVPVAYRRVPCRRRGGMRFTINGHSYFNLVLITNVGGAGDVHAVAIKGSRTRWQAMSRN

SEQ ID NO: 17320 - protein, 548 aa, Methylococcus capsulatus str. Bath
MYQYDQYDQRLVDERVAQFRSQTRRFLQGELSEDQFRPLRLMNGLYLQRHAPMLRVAIPYGVLSSRQLHKLAEIARRYDKSVAHFTTRQNIQFNWPRLEDVPDILAELATVQMHAIQTSGNCIRNVTSDPLAGVCPDEIEDPRPYCEIIRQWSTLHPEFSYLPRKFKIAVSGARKDRAATQVHDIGLQMVENEAGETGFEVLVGGGLGRTPIIGQTIRPFLAKTDLLSYLEAILRVYNRFGRRDNKYKARIKILLKETGIEDFTRRVEAEWVQIRQQLVLDTGEIERVKRHFTAPEYKTVAGPGLDAQAAADPRFAVWLRNNTTPHKIPGYRAVFLSLKARGVPPGDIADTQLDAVADLAERYSFGEVRATHTQNLVFADVHQDDLHELWQRLDSIGLATPNIGKATDMICCPGLDYCSLANASSISVAEDIYSRIDDLDYLHDLGDLRINISGCMNGCAHQSVGHIGILGVDKKGEEWYQLTLGGSSSNDASLGERLGPAIDKAHVAEAVETILQTYIELRQDGESFLDTVRRLGINPFQERVYAHH

SEQ ID NO: 17321 - protein, 434 aa, Fusobacterium nucleatum subsp. nucleatum ATCC 25586 [sequence omitted]

SEQ ID NO: 17322 - protein, 521 aa, Lycopersicon esculentum
MAASIGALKSSPSSHNCINERRNDSTRAISSRNLSFSSSHLAGDKLMPVSSLRSQGVRFNVRRSPLIVSPKAVSDSQNSQTCLDPDASRSVLGIILGGGAGTRLYPLTKKRAKPAVPLGANYRLIDIPVSNCLNSNISKIYVLTQFNSASLNRHLSRAYASNMGEYKNEGFVEVLAAQQSPENPDWFQGTADAVRQYLWLFEEHNVLEYLILAGDHLYRMDYEKFIQAHRETDADITVAALPMDEKRATAFGLMKIDEEGRIIEFAEKPQGEQLQAMKVDTTILGLDDKRAKEMPFIASMGIYVISKDVMLNLLRDKFPGANDFGSEVIPGATSLGMRVQAYLYDGYWEDIGTIEAFYNANLGITKKPVPDFSFYDRSAPIYTQPRYLPPSKMLDADVTDSVIGEGCVIKNCKIHHSVVGLRSCISEGAIIEDSLLMGADYYETDAERKLLAAKGSVPIGIGKNCLYKRAIIDKNARIGDNVKIINKDNVQEAARETDGYFIKSGIVTVIKDALIPSGIVI

SEQ ID NO: 17323 - protein, 335 aa, Craterostigma plantagineum
MNQQQVVKVSKNKQINSEDDDDSSDLRRGPWTVDEDFTLINYIAHHGEGRWNSLARFAGLKRTGKSCRLRWLNYLRPDVRRGNITLEEQLLILELHSRWGNRWSKIAQHLPGRTDNEIKNYWRTRVQKHAKQLKCDVNSKQFKDTMRYLWMPRLVERIQRAATTDDGAPPLASSASSPSSAMNTACYSTAMAAGDHRRQFMLMPQYYAMTTHSNLMIAQENSSTVASSESFGSLSSELTEANYANYHQVINGADHQQIDSSTTTSYGWQNDFAINTVGNNGNSDQLGMGSVDDRRSNEQWMMMDDVDNGGSSDKDNNLLWNVDDVWFLQQFSSCF

SEQ ID NO: 17324 - protein, 443 aa, Yersinia pseudotuberculosis
MTTLENNNTLNVFSDHESSARSYCRNFPVIFQRASGCYLYDQHDNAWLDFLSCAGSVNYGHNPTALKEALIAYLAADGIQAALDMHSVAKAEFITAFNAIILQPRGLDYKMQFTSPTGTSVVESAIKLVRKVTNRTNVVAFTNGFHGMSSTALGLTGNRDNRQNTIDSHVFRLPYDGYLEGLDTIAYFEKLLTDNSSGMDIPAAVILETVQGEGGINVASKTWLQRLHTLLQRHDILLIIDDIQAGCGRTGHFFSFEFASIQPDMVCLSKSLSGYGLPFSLLLFKPQWDQWKPGEDNGTFRGNTSAFVTAKAALENYWSDDQLSQHVFRQEKVVQQWLQEITARFPRFIKQTRGRGLFYGIELYSPELAQKITQHCFGQQLIVERSGDRDQVIKIMPALSIPEETLLSGLVILERAMEACLTDAEAIPSATRADALHHVGVTQ

SEQ ID NO: 17325 - protein, 398 aa, Oryza sativa
MQSAAAVGLLRPCGATTAAAPLQLRNPSPRGFGVGVGQPLLPPRGLRLSARIGLVPASPEQEDERRRGARDVAVAATAAAAGEAGAEEGGGLAKTLQLGALFGLWYLFNIYFNIYNKQVLKVFPYPINITNVQFAVGTVIALFMWITGILKRPKISGAQLAAILPLAMVHTMGNLFTNMSLGKVAVSFTHTIKAMEPFFSVLLSALFLGEMPTPFVVLSLVPIVGGVALASLTEASFNWAGFWSAMASNVTFQSRNVLSKKLMVKKEESLDNITLFSIITVMSFFLLAPVTLLTEGVKVTPTVLQSAGLNLKQIYTRSLIAAFCFHAYQQVSYMILARVSPVTHSVGNCVKRVVVIVTSVLFFRTPVSPINSLGTGVALAGVFLYSQLKRLKPKPKTA

SEQ ID NO: 17326 - protein, 321 aa, Synechococcus elongatus PCC 7942
MTSDRYGPPEVLQARQVARPPLTDNGVLVRVRASSVNAGDWHLLRGEPWLVRLIYGGLLTPKIPILGTDLAGQVEAVGQQVTLFQPGDDVVGELSACGFGAFAEYVCVPESALVAKPVHISYEQAAAVPAAGMAALQGLRDLGQLQPGQRLLVGGASGGVGSLAVQIGKALGAEVTALARPEKMEMLRGLGADDVVDVNRLEVLIDSGQHYDVILDAAAFRPVADYRPLLSPGGAYILVGGSIARLFQVMLFGQWMSWRQQRRIRCLSSTPTQADLTTLCDWLEAGILTPFIDRTFPLSQLSEAIRYVERRQVRGKVVVLI

SEQ ID NO: 17327 - protein, 441 aa, Pseudomonas syringae pv. tomato str. DC3000
MVNRLHGKSLLALLTLSALAPWAQAAETPVLNTGSTAWMITAAVLVLFMCLPGLALFYGGLVRAKNMLSLFTQCFGIAGVVGVLWVIYGYSMVVDTSNMVEGQVTFNSFVGGLSRAFLAGMTPDSLVGEIPEGVFVTFQMTFAIITPALIAGAFAERMKFSAALLFMALWFTLVYAPVAHMVWGGAGALMHNWGVLDFAGGTAVHINAGVAALAACLVLGKRKGYQNTPMPAHNLSLTMAGAAMLWVGWFGFNIGSGGGLSGTSGIVMLNTQVGACAGILGWMFTEWFKVGKPSALGLASGALAGLVGITPACAYVGVGGALAIGVLCGVFCYLSVTVLKKRLGYDDSLDVFGLHGIGGMIGAVLTGVFCVPALGGLVPEVTMGAQVIAQVKGVLFTTVYCFAVSWIILKAVNALIGLRAHESVEEMGLDLAEHNERAYNH

SEQ ID NO: 17328 - protein, 446 aa, Zea mays
MAVTITWVKARQIFDSRGNPTVEVDVGLSDGSYARGAVPSGASTGIYEALELRDGGSDYLGKGVLKAVSNVNNIIGPAIVGKDPTEQVEIDNFMVQQLDGTSNEWGWCKQKLGANAILAVSLAVCKAGAMVKKIPLYQHIANLAGNKTLVLPVPAFNVINGGSHAGNKLAMQEFMILPTGASSFKEAMKMGVEVYHNLKSIIKKKYGQDATNVGDEGGFAPNIQENKEGLELLKAAIEKAGYTGKVVIGMDVAASEFFGEKDKTYDLNFKEENNDGSKKISGDSLKDLYKSFVSEYPIESIEDPFDQDDWSTYAKLTDEIGQKVQIVGDDLLVTNPTRVAKAINEKTCNALLLKVNQIGSVTESIEAVRMSKRAGWGVMASHRSGETEDTFIADLSVGLSTGQIKTGAPCRSERLAKYNQLLRIEEELGDAAVYAGAKFRAPVEPY

SEQ ID NO: 17329 - protein, 978 aa, Bacillus cereus ATCC 14579
MAEQTVRVTVDGKEFSASGEKTILQLFNESNLEHPQICHVPEVDPIQTCDTCIVEVNGKLLRACSTKLENGMHIERQSQRAKEAQTEAMDRILENHLLYCTVCDNNNGNCKVHNTVHMMGIEEQKYPYEPKVSACEVDMSHPFYRYDPNQCIACGQCVEVCQNLQVNETISIDWSLDRPRVIWDNGVSINESSCVSCGQCVTVCPCNALMEKSMLGEAGFMTGLKPDVLDPMIDFVKDVEPGYSSILAVSEVEAAMRKTKVNKTKTVCTFCGVGCSFEVWTKDRHILKVQPVSDAPVNGISTCVKGKFGWDFVNSEDRITKPLIRQGDMFVEASWEEALEVVASNMQHIKSEYGSDAFGFISSSKVTNEENYLMQKLARQIYGTNNVDNCSRYCQSPATDGLFKTVGMGGDAGTVKDIAEAGLVIIVGANPTEGHPVLATRVKRAHKLHDQKLIVADLRKHEMAERADLFIHPRQGTDYVWLAGITKYIIDQDWHDKKFIAENVKNFDEYSKMVEKYTLDYTEEITGISKENLKEMARMVYEADGTCVLWGMGVTQNTGGSTTSAAISNLLLVTGNYRRPGAGAYPLRGHNNVQGACDMATLPNWLPGYQAVSDDALRAKFEKAYGTTIPKAPGLNNIAMLLAADEGKLRGMYVMGEEMALVDSNANHVQHILANLDFLVVQDMFLSKTARFADVILPAAPSLEKEGTFTNTERRIQRLYEVLKPLGDSKPDWWILQKVARALGGDWNYENPSEIMDEIASLAPLYSQATYDRLEGWNSLCWGSHDGSDTPLLYVDGFNFPDKLARLSLDEWVPPVVAPDEYDLLLNNGRMLEHFHEGNMTNKSAGILSKVSEVFVEISPELALERNVKDGGLVELASPFGKIKVQALVTDRVMGKELYLPMHATVNEEAINILTGTATDLYTCTPAYKQTMVKMRVLREKGNRPLPSSNPRDKKRNPQNGVEIQQKWQRKQYVSLVD

SEQ ID NO: 17330 - protein, 181 aa, Glycine max
  unsure (1)..(181): unsure at all Xaa locations
MATIVSIKARQIFDSRGNPTVEXAVPSGASTGIYEALELRDGGSDYLGKGVSKAVDNVNTVIGPALIGKDPTEQTAIDNLMVQQLDGTVNEWGWCKQKLGANAILAVSLAVCKAGASGLKMPLYKHIANIAGNKSLVCCSAFKVXNGGSHAGTNLCSYGLPGELVKEPEGEVTVWLKNAIL

SEQ ID NO: 17331 - protein, 342 aa, Pirellula sp.
MKALQLSAPKQWEQIEIDEPSPPGPGEALVRIHRVGVCGTDLGGYLGKFPFFSYPRIPGHELGVEVVAVGEGVENVKVGDRCSVEPYINCQKCYSCERGLTNCCESHQTLGVMCDGGLTEKMILPARKLHPANNLSYEQSALVETLAIGCHAIDRAHVTEKDTVLVIGSGPIGLSAIEFARVAGARVIVADLSQTRLDFVTEKMGMTDTIQFDGSEADIEKLEAMTDGRRADVVVDATGNHHSMRRAMEMAAFGGRVVYVGITQQDLQFPHAPFLHRRELTILASRNALTGDFARIIQLIESGVIDTDPWITHHAKFEEVIESFPAWTDPESGVVKAVIHIS

SEQ ID NO: 17332 - protein, 283 aa, Salmonella enterica
IGQALALLLKNQLPSGSELSLYDIAPVTPGVAVDLSHIPTAVKIKGFSGEDATPALEGADVVLISAGVARKPGMDRSDLFNVNAGIVKNLVQQIAKTCPKACVGIITNPVNTTVAIAAEVLKKAGVYDKNKLFGVTTLDIIRSNTFVAELKGKLPTEVEVPVIGGHSGVTILPLLSQIPGVSFTEQEAAELTKRIQNAGTEVVEAKAGGGSATLSMGQAAARFGLSLVRALQGEKGVVECAYVEGDGQYARFFSQPLLLGKNGVEERKSIGTLSAFEQHSLDA

SEQ ID NO: 17333 - protein, 396 aa, Aeromonas hydrophila
MFEKVVAAPPDPILGLTEAFRADSRSHKINLGVGIYKDETGATPILHCVKKAEQKLLTDEKTKNYLGIEGNIEYGRIVQQLLFGQDSALIASGRAKTAQAPGGTGALRIAAEFVVRNGLAKTIWISDPTWANHVSVFQAAGLTVKWYKYYDAATKGLDFAAMQASLNDVQAGELVLLHGCCHNPTGIDPTAEQWRALAKQSAAAGWLPLFDFAYQGFARGIEEDAEGLRIFAECHDELLVASSFSKNFGLYNERVGAFTLVSATKAIADVAFTQVKTVIRANYSNPPSHGAAVVTTIVSDPALYVEWVEEVAAMRVRIREMRELLVEKLAALGVSQDFSFIREQNGMFSFSGLSKDQVEQLKSEFAIYIVGSGRISVAGITRANIDPLCDAIAKVL

SEQ ID NO: 17334 - protein, 493 aa, Methanosarcina mazei Goe1
MCGIAGMFGTPDSNTKVKKMLAILGHRGPDACGIHTEGKLSIGNTLLKITGDMPQPLTGTGSLVLNGEIYNFRELAAEIGLKTDSDTELLFTLIERKVRKGIKPTNAVFSVLSKVNGDYALAYACGTELVLARDPSGVKPLYYFYEKSMVKPGLAFASEKKALAFTGREVKPFPQGGIMGFSTENGKIAEKFTEKSLKITQPEKRISAEKEAIIYLKAALEKAVELRLTPVSGIAFSGGIDSTFLAALAKRIDPYVSLYAVGLPDSHDIAQAEYAAEAIGMKRNLKTHFLSPEEIEAAVPEVIYATESTDPMKVAIGLPLHIVAKTAREEGKRVLLTGQGADELFGGYSRHEGFFEQGADVLDREIYSDLENISAINLERDDMVAMANSVELRVPFLDKEVIKTGLAISPELKVRKKEGVYIRKYILRKAAEGLLPPKILWKEKKAVQYGTGVQKTLDRLARDSGFSKKQGGHIEKYLSQIASEKGFDFINEM

SEQ ID NO: 17335 - protein, 400 aa, Methylococcus capsulatus str. Bath
MNRRQHEAGQPIPAAEQGGCLADAIRPFHVMAILARARELESSGRSIVHLEIGEPDFPTPEPVAAAATRFLAGGQVRYTPAAGLPELRERIAAYYAERYGVAVAPQRIFLTPGASGALSLALAVALSPGRRVMLADPGYPCYSNFVRLYSGDPHAVPVGAEQDFQLNAALCRMHCGGDVPVAISASPSNPTGTVMRTGVLRELVEWFEAEGGILISDEIYHGLEYGGRAVSALEFGQHTFVVNSFSKYFGMTGWRLGWVVVPEAYAAAVERVAQNIFISAPTLSQYAALAAFSEESRAELERRRRAFEARRDFLWGELVKLGFGVPVAPSGAFYIYADCSAFAEDSAEFAARLLETAGVAVTPGKDFGAQSPERYLRFAYTADIPVLQEAVGRIRRFVTG

SEQ ID NO: 17336 - protein, 288 aa, Escherichia coli
IGQALALLLKTQLPSGSELSLYDIAPVTPGVAVDLSHIPTAVKIKGFSGEDATPALEGADVVLISAGVARKPGMDRSDLFNVNAGIVKNLVQQVAKTCPKACIGIITNPVNTTVAIAAEVLKKAGVYDKNKLFGVTTLDIIRSNTFVAELKGKQPGEVEVPVIGGHSGVTILPLLSQVPGVSFTEQEVADLTKRIQNAGTEVVEAKRGGGSATLSMGQAAARFGLSLVRALQGEQGVVECAYVEGDGQYARFFSQPLLLGKNGVEERKSIGTLSAFEKNALEGMLDTL

SEQ ID NO: 17337 - protein, 84 aa, Vibrio cholerae
MKHTVEVMISEQEVAQRIRELGQQITEHYQGSSDLVLVGLLRGSFVFMADLARQIHLTHQVDFMTASSYGNSMQSSRDVRILKD

SEQ ID NO: 17338 - protein, 298 aa, Arabidopsis thaliana
MNRGIEVMSPATYLETSNWLFQENRGTKWTAEENKKFENALAFYDKDTPDRWSRVAAMLPGKTVGDVIKQYRELEEDVSDIEAGLIPIPGYASDSFTLDWGGYDGASGNNGFNMNGYYFSAAGGKRGSAARTAEHERKKGVPWTEEEHRQFLMGLKKYGKGDWRNIARNFVTTRTPTQVASHAQKYFIRQVNGGKDKRRSSIHDITTVNIPDSPDAAAADNATANAPCSPPSVGGNQRETSEWEGQTLYDETAAAFYNQNAFSETLLGMSSTPYMAKLQEQSFLNASQFESYNAYLQM

SEQ ID NO: 17339 - protein, 207 aa, Zea mays
  unsure (1)..(207): unsure at all Xaa locations
MNDLMSVGLHRLWKDRLISKLNPFPGMKHLDVAGGTGDVAFRVLERVKSVCHRAMQGTLTETEEGTHIYVCDINPNMLNVGNKRAXKRGYSEXHCFSWIQGDAEALSFEDGSMDGYTITFGIRNVTHIEKALSEAYSXDGSKARVEVPMLGVESCGYRRRXNMLTRHVNLEPWQEKFAQMIQEAGFQRVEYENLLSGVVVIHSGLKL

SEQ ID NO: 17340 - protein, 483 aa, Bacillus subtilis subsp. subtilis str. 168
MSSNKLTTSWGAPVGDNQNSMTAGSRGPTLIQDVHLLEKLAHFNRERVPERVVHAKGAGAHGYFEVTNDVTKYTKAAFLSEVGKRTPLFIRFSTVAGELGSADTVRDPRGFAVKFYTEEGNYDIVGNNTPVFFIRDAIKFPDFIHTQKRDPKTHLKNPTAVWDFWSLSPESLHQVTILMSDRGIPATLRHMHGFGSHTFKWTNAEGEGVWIKYHFKTEQGVKNLDVNTAAKIAGENPDYHTEDLFNAIENGDYPAWKLYVQIMPLEDANTYRFDPFDVTKVWSQKDYPLIEVGRMVLDRNPENYFAEVEQATFSPGTLVPGIDVSPDKMLQGRLFAYHDAHRYRVGANHQALPINRARNKVNNYQRDGQMRFGDNGGGSVYYEPNSFGGPKESPEDKQAAYPVQGIADSVSYDHYDHYTQAGDLYRLMSEDERTRLVENIVNAMKPVEKEEIKLRQIEHFYKADPEYGKRVAEGLGLPIKKDS

SEQ ID NO: 17341 - protein, 393 aa, Listeria monocytogenes EGD-e
MKISKRLQNLPDQFFSSLVEKVGKKVAEGHDVINLGQGNPDQPTPKHIVEAMKTASEKPLNHKYSLFRGKQELKQAAADFYAREYNVTIDPNTEVAILFGTKTGLVELPMCLMDPGDTMLLPDPGYPDYLSGVVLGEVQFEKMPLIAENDFLPDFTKIPEDIAEKTELMYLNYPNNPTGAVATADFFEETVAFAKNHNIVVAHDFAYGGIGFDGKKPISFLETNGAKEVGIELYTLSKTYNMAGWRVGFAVGNSEVIEAINLIQDHMYVSLFPGIQDAAIEALTGDQACVRELTARYENRRDAFISACREIGWEAVAPAGSFFAWMPVPEDFTSSEFADYLLEEVSVAVADGSGFGEFGEGYVRVGLLMDEERLEEAVTRVSKLHLFDKVTQQ

SEQ ID NO: 17342 - protein, 147 aa, Triticum aestivum
EALEPGKPVKSDKAAILSDATRMVIQLRAEAKQLKDTNESLEDKIKELKAEKDELRDEKQKLKVEKETLEQQVKILTATPAYMPHPTLMPAPYPQAPLAPFHHAQGQAAGQKLMMPFVGYPGYPMWQFMPPSEVDTSKDSEACPPVA

SEQ ID NO: 17343 - protein, 329 aa, Bdellovibrio bacteriovorus HD100
MAQFDKKIQKIGVYTSGGDAPGMNAAIRAVVRVGISQKLEVYGIHNGYVGMIENKIEPLQLRDMANIIQRGGTILKTGRSTEFMRPEGRARAAQNIKNLGLDALVCIGGDGSFRGAHALWEEHQIPVVGVPGTIDNDIFGSDKTIGFDTAVNTALEAIDRIRDTAASHDRLFIVEVMGRNSGFIASHVGLAGGAEEIFTPDANTTVEKAIDRINEAKSRGKTSSIIITAEGQKPGRAYDLADAIRKKSGMDAKVCILGHQQRGGSPTAADRILASRMGAAAVDALFKGYCDVMIGTEGERLIQVPLDLVYKNEKKNQLDLISLASVLAT

SEQ ID NO: 17344 - protein, 120 aa, Zea mays
  unsure (1)..(120): unsure at all Xaa locations
MATKRSVGTLKEADLKGKSVFVRVDLNVPLDDNSNITDDTRIRAAVPTIKYLMGNGXSRVVLCSHLGRPKGVTPKYSLKPLVPRLSNXLGVEGVMANDSIWVRKVXKXVAGLPXKGGCSW

SEQ ID NO: 17345 - protein, 283 aa, Salmonella enterica
IGQALALLLKNQLPSGSELSLYDIAPVTPGVAVDLSHIPTAVKIKGFSGEDATPALEGADVVLISAGVARKPGMDRSDLFNVNAGIVKNLVQQIAKTCPKACVGIITNPVNTTVAIAAEVLKKAGVYDKNKLFGVTTLDIIRSNTFVAELKGKLPTEVEVPVIGGHSGVTILPLLSQIPGVSFTEQEAADLTKRIQNAGTEVVEAKAGGGSATLSMGQAAARFGLSLVHALQGEKGVVECAYVEGDSQYARFFSQPLLLGKNGVEERKSIGTLSAFEQRSLEG

SEQ ID NO: 17346 - protein, 138 aa, Shorea maxwelliana
EKNIPVLLGLLSIWNVSFLGYPARAILPYSQALEKFAPHIQQVSMESNGKGVSIDGVPLPYEAGEIDFGEPGTNGQHSFYQLIHQGRVIPCDFIGSAKNQQPIHLKGEVVSNHDELMSNFFAQPDALAFGKTPEELHK

SEQ ID NO: 17347 - protein, 1123 aa, Solanum tuberosum
MSSSRPSQSSTTSSRSKHSARIIAQTSIDAKLHADFEESGDSFDYSSSVRVTNVAEGEQRPKSDKVTTAYLHQIQKGKFIQPFGCLLALDEKTLKVIAFSENAPEMLTMVSHAVPSVGEHPVLGIGIDIRTIFTGPSGAALQKALGFGEVSLLNPVLVHCKNSGKPFYAIVHRVTGSLIIDFEPVKPYEVPMTAAGALQSYKLAAKAITRLQSLPSGSMERLCDTMVQEVFELTGYDRVMGYKFHDDDHGEVVSEITKPGLEPYLGLHYPATDIPQAARFLFMKNKVRMICDCRAKHVKVVQDEKLPFDLTLCGSTLRAPHYCHLQYMENMNSIASLVMAVVVNDGDEEGESSDSSQSQKRKRLWGLVVSHNTTPRFAPFPLRYACEFLAQVFAILVNKELELENQFLEKNILRTQTLLCDMLMRDAPLGIVSQSPNIMDLIKCDGAALLYKNKIHRLGMNPSDFQLHDIVSWLCEYHTDSTGLSTDSLYDAGFPGALALGDAVCGMAAVRISDKDWLFWYRSHTAAEVRWGGAKHEPGEKDDGRKMHPRSSFKGFLEVVKTRSIPWKDYEMDRIHSLQLILRNAFKDADAVNSNTISIHTKLNDLKIDGMQELEAVTAEMVRLIETASVPIFAVDVDGQVNGWNTKVAELTGLPVDEAIGKHLLTLVEDSSVDTVNKMLELALQGQEERNVEFEIKTHGPSRDSSPISLIVNACASKDVRDSVVGVCFIAQDITGQKSIMDKFTRIEGDYRAIIQNPHPLIPPIFGTDQFGWCSEWNSAMTMLTGWRRDDVMDKMLLGEVFGTQAACCRLKNQEAFVNFGVILNNAITGQESEKIPFGFFARYGKYVECLLCVSKRLDKEGAVTGLFCFLQLASHELQQALHVQRLSEQTALKRLKVLAYIRRQIRNPLSGIIFSRKMLEGTSLGEEQKNILHTSAQCQRQLDKILDDTDLDSIIEGYLDLEMLEFKLHEVLVASISQVMMKSNGKNIMISNDMVEDLLNETLYGDSPRLQQVLANFLLVSVNSTPSGGKLSISGKLTKDRIGESVQLALLEFRIRHTGGGVPEELLSQMFGSEADASEEGISLLVSRKLVKLMNGEVQYLREAGRSTFIISVELAVATKSS

SEQ ID NO: 17348 - protein, 83 aa, ASPERGILLUS NIDULANS FGSC A4
MPEIVFITGNPHKVLEVKSVLGDSVCIRPVALEMREIQGTSEEIVRDKCRTAAEIIGGPVLVEDSALEMHALNRLQGPYVFVP

SEQ ID NO: 17349 - protein, 283 aa, Salmonella enterica
IGQALALLLKNQLPSGSELSLYDIAPVTPGVAVDLSHIPTAVKIKGFSGEDATPALEGADVVLISAGVARKPGMDRSDLFNVNAGIVKNLVQQIAKTCPKACVGIITNPVNTTVAIAAEVLKKAGVYDKNKLFGVTTLDIIRSNTFVAELKGKLPTEVEVPVIGGHSGVTILPLLSQIPGVSFTEQEAADLTKRIQNAGTEVVEAKAGGGSATLSMGQAAARFGLSLVRALQGEKGVVECAYVEGDGQYARFFSQPLLLGKNGVEERRSVGTLSAFEQRSLEG

SEQ ID NO: 17350 - protein, 375 aa, Zea mays
MPTQKRPPPPPPPSPSPSAAPGAGSPPPSSPPLPTAEPAEKKPKLEVNGSAGAEANGNANDFGAKEGTEVEASESESEDADAAKQEFVPVKLSDVRKEVQCPICLGIIRKTRTVMECLHRFCRECIDKSMRLGNNECPACRTHCASRRSLRDDPNYDALIAALYPDIDKYEEEELAFNEEENDRNKQIQASIAEAFRKQSEVIGRKSTAKATAAAFVRRSRRNIRPNGQNTYFRGRGKASSDDVALACAEDEEDGNGESCSKEASSAEESSPEKKQKRLPKWPTPRSSPARACNDEVASDEKDDVGISRENFSTSPLRAWGKNGTRSQTRHSSFSGSNGRMVKGGRMIKLVECLRNSDDNEGEVNTKMHVICFLA

SEQ ID NO: 17351 - protein, 171 aa, Glycine max
  unsure (1)..(171): unsure at all Xaa locations
KKEAEHAQKGKGKRGAHHTTPPKPDRQTERAPASDEASQAKPRSNPPPPESMDGSHSHAAGGGEGTQRTLNPYVTGNSVIAMKYKDGVIMACDTGASYGSTLRYKSVERIKEVGKHSLIGGXVGEFSDFQEILRYLDELTLNDHMWDDGNSLGPKEIHAYLTRVMYNRRNK

SEQ ID NO: 17352 - protein, 400 aa, Xanthomonas campestris pv. campestris str. ATCC 33913
MSFFANVEQVPGDPILGLTEAYNADSRPNKVNLGVGIYYDENGRIPLLRAVQKIEQQLALDAKPRGYLPIDGLAAYDKATQELLFGAESALVASGRVATSQTVGGSGALRVGADLLKKLLPTSTIAISNPSWENHRAVFGAAGFEVVDYTYFDAASHGLNFDGMLADLAKLEPGTVVLLHACCHNPTGADLSREQWKQLAGLLKERNLFPFVDIAYQGFDKGIEADAYAVRLLAAEGIDTYVVASSYSKSFSLYGERVGALSVVSATAAEAKAVQSQVKRIIRTIYSSPSTHGAALVAGVLTSPELRDVWEQELTEMRERIHALRAGLVAKLAALGAPEFEFIQRQAGMFSYSGLTKSQVDRLRDEFAIYAVGTGRICVAALSQRNLDYVAQAVATVSRG

SEQ ID NO: 17353 - protein, 520 aa, Lycopersicon hirsutum
MKSTVHLGRVSTGGFNNGEKEIFGEKMRGSLNNNLRINQLSKSLKLEKKEKKIKPGVAYSVITTENDTETVFVDMPRLERRRANPKDVAAVILGGGEGTKLFPLTSRTATPAVPVGGCYRLIDIPMSNCINSAINKIFVLTQYNSAALNRHIARTYFGNGVSFGDGFVEVLAATQTPGEAGKKWFQGTADAVRKFIWVFEDAKNKNIENILVLSGDHLYRMDYMELVQNHIDRNADITLSCAPAEDSRASDFGLVKIDSRGRVVQFAEKPKGFELKAMQVDTTLVGLSPQDAKKSPYIASMGVYVFKTDVLLKLLKWSYPTSNDFGSEIIPAAIDDYNVQAYIFKDYWEDIGTIKSFYNASLALTQEFPEFQFYDPKTPFYTSPRFLPPTKIDNCKIKDAIISHGCFLRDCSVEHSIVGERSRLDCGVELKDTFMMGADYYQTESEIASLLAEGKVPIGIGENTKIRKCIIDKNAKIGKNVSIINKDGVQEADRPEEGFYIRSGITIISEKATIRDGTVI

SEQ ID NO: 17354 - protein, 392 aa, Bradyrhizobium japonicum USDA 110
MSINIDSGQDSDQEHDDVMYPQVLPFVLIHAGCLAAIWSGVSWQAVAICVALYWLRMFGITAGYHRYFSHRAYATSRAFQFILAFLAQSSAQKSVLWWAAKHRHHHLHSDTAQDVHSPRHKGFVYSHLGWIFYRQHDATDLVKVSDLASYPELMWLHRLELLPAVVLAGLCFLIAGWSGLVVGFMWSTVVLYHATFCINSLAHVHGRRRYVTGDDSRNNWLLALLTMGEGWHNNHHAYQASARQGFYWYEVDLTYYALVALSWLGIVWDLKLPPRQVLRNEHRLGSRVVKQAAEQLAARFDPEHIALAIRTSIHETELSVRDALSLLQHRADLRLSSMPTREQLLAEAQRMFAKTISLDDIVDRAYELLHDSVGFLLATPALSANTNAKSGI

SEQ ID NO: 17355 - protein, 254 aa, Bradyrhizobium japonicum USDA 110
MNISFEGQVALVTGAASGLGLATAKAFAESGASVALADWNEDAVRAAAGELVTRGHKAVAIRCDVSNDAQVEAMVAQTVSVFGRLDAAYNNAGVQNVLAETADTTREDYDRVMGINLRGEWSCMKFELQQMRKQGSGAIVNCSSLGGLVGGAERGIYHAAKHGVLGFTKSAALEYAARGVRINAICPGLIWTPMADQMVAAGQGDALRALEKSVPMGRVGRPEEIASAVLWLCSDAASYVTGQSISVDGGFIMR

SEQ ID NO: 17356 - protein, 509 aa, Xanthomonas campestris pv. campestris str. ATCC 33913
MNALPSAKSLNTDPQSIFKPRYDNFIGGAWVAPQGGQYFDNTTPITGKVFTSIARSTAPDIEAALDAAHAAKEAWGKTSTTDRSNVLLKIADRIEQNLELLAYAETWDNGKPVRETLNADVPLCVDHFRYFAGAIRAQEGGISEIDSDTIAYHFHEPLGVVGQIIPWNFPLLMACWKLAPALAAGNCVVMKPAEQTPASILVLMEVIGDLLPPGVLNVVNGFGLEAGKPLASNPRIAKIAFTGETTTGRLIMQYASQNLIPVTLELGGKSPNIFFADVMAEDDDFLDKAVEGFVLFAFNQGEVCTCPSRALIQESIYDTFMEKALKRVAAIKQGNPLDPNTMVGAQASSEQLEKILSYIDIGKQEGAEILIGGERNMLDGELSDGFYVKPTVFKGHNKMRVFQEEIFGPVVSVTTFKDEAEALAIANDTLYGLGAGVWSRDASRLYRMGRAIQAGRVWTNCYHAYPAHAAFGGYKQSGIGRENHKMMLDHYQQTKNLLVSYSPKALGFF

SEQ ID NO: 17357 - protein, 332 aa, Eremothecium gossypii
MFCRVARRGFRADGVRAYRVSVLGANGGIGQPLSLLLKLNKRVTDLRLYDLKGAKGVAADLSHIPTNSQVSGYTAENPEALREALTGADVVVVPAGVPRKPGMTRDDLFAINAGVVQQLAGAIGQHAPGAAVLVISNPVNSTVPIMAAELRKLGVYDPRKLFGVTTLDSIRASRFISEVQGTDPTRERVPVIGGHSGITIIPVLSQTQHTGIDKATRDALIHRIQFGGDEVVKAKNGAGSATLSMARAGAKFADAVLAGLAGEQGVVEPAFVDSPLYKSEGIEFFASAVTLGPRGVEEVHPVGTLSAEEEEMLAKCKETLKQNIEKGINFAK

SEQ ID NO: 17358 - protein, 379 aa, Pichia pastoris
MSTEGQIIKCKAAVAWEAGKDLSIEEIEVLPPRAHEVRVKVEFTGVCHTDAYTLSGADAEGSFPVVFGHEGAGVVESVGEGVESVKVGDSVVLLYTPECRECKFCLSGKTNLCGKIRATQGKGLLPDGTSRFRCKGKDLFHYMGCSSFSQYTVVADISVVKVQDEAPKDKTCLLGCGVTTGYGAAINTAKISKGDKIGVFGAGCIGLSVIQGAVSKGASEIIVIDINDSKKAWADQFGATKFVNPTTLPEGTNIVDYLIDITDGGFDYTFDCTGNVQVMRNALESCHKGWGESIIIGVAAAGKEISTRPFQLVTGRVWRGCAFGGIKGRTQMPSLVQDYLDGKIKVDEFITHRHDLDNINKAFHDMHAGNCIRAVITMH

SEQ ID NO: 17359 - protein, 738 aa, GIBBERELLA ZEAE PH-1
MTEQVTGAIKHAVMGHKNDKIDQLKANMVEPNENSRITSDYGVKQNNTDQWLRVASEDQTGPSLLEDAFGREKIHRFDHERIPERVVHARGAGAHGTFRLFESAADVTKAGLFTDTSRETPVFVRFSTVLGSRGSADTVRDVRGFAIKFYTQEGNFDIPGNNIPVFFIQDAMKFPDVIHAGKPEPNNEVPQAQTAHNNFWDFMFEHPEATHMHTWAMSDRTIPRSYRMMQGFGVNTYTLVNEKGERRFVKFHWTPELGVHSLVWDEALKLAGQDPDFHRKDLQEAIENGAFPKWKFGIQVLDESQEHDFDFDILDATKVWPEDLIPVRYIGELELNQTVDEYFTQTEQVAFCTSHLVPGIGHSDDPLLQGRNFSYQDTQLSRLGTNWEELPINKPVCPVMNFNRDGAMRHTITKGKVNYWPNRFSHQPPATESEGAYVDYAAKIVGMKQRTLSKKFKDHFTQAQLFYNSLSEIEKSHVQAAYSFELDHCDEAIVYERLTERLGEIDGDLANTIAEMVGGKKPANPKPNAGKKAKNLSQLDFVPETPTIKSRRIAIIIADGYDPVAFNAMYGAIKAQSALPFVIAPRRAPIFSAAEDSSSSKGIFPDHHLEGQRSTMFDAIFVPGGAKSIETLSKNGRALHYIREAFGHLKTIGGTGEAVEFINKAIQLSEVALSSTDGSGVVDSYGVVTLKNASPDTLKEIATVASDAKGFLEKFVYNVSCHRNWQRELDGLSTMVAY

SEQ ID NO: 17360 - protein, 421 aa, Brucella melitensis 16M
MRKTGPRPVTVNRACHLWRSIMAFLADALSRVKPSATIAVSQKARELKAKGKDVIVLGAGEPDFDTPENIKQAAIAAINRGETKYTPVSGIPQLRQAIVSKFKRENGLDYKPEQTIVGTGGKQILFNAFMATLNPGDEVIIAAPYWVSYPEMVAINGGTPVFVDTKIEDNFKLTAADLEKAITPKTKWLIFNSPSNPTGAAYTQAELKSLTDVLVRHPHVWILTDDMYEHLVYGDFVFTTPAQVEPSLYDRTLTMNGVSKAYAMTGWRIGYAAGPIELIKAMDMIQGQQTSGACSIAQWAAVEALNGTQDFIPANKKIFQARRDLVVSMLNQATGLQCPTPEGAFYVYPSCAGLIGKKTEAGKVIETDKDFVTELLETEGVAVVHGSAFGLGPNFRISYATSDELLEKACIRIQRFCASLR

SEQ ID NO: 17361 - protein, 497 aa, Oceanobacillus iheyensis HTE831
MTALTLETDVLKNFIDGKWVDVNNTTAVTNPANGERIVQVPLSDQSHVEEAVQAAIKAQKEWALVPAPQRAEVLYRVGMIMKDKKERLSRLLTMENGKVLEEARGEVQEGIDMAFYMAGEGRRLFGQTTPAELKDKFAMSQRVPVGVVGIITPWNFPIAIATWKSFPAIVAGNAVVWKPATETPIMAYELAKIFEEAGLPSGVINVVFGKGSEVGDSMVQHKDIRVISFTGSNDTGRNIASDCGKQLKKVSLEMGGKNAVIVMDDADLDLAVEGILWSAFGTSGQRCTACSRVIVHHKVKKTLEERLLAAMDHLTIGNGLEDGIKVGPIINEAGLNKIKKYIEVGKQEGATLLAGGTEWETNNPGYYFTPTLFTDAKPDMRIAQEEIFGPVVSLIEVSSFEEAIEVNNQVTFGLSSSIFTKDVNRVFKAQRDLDTGIVYVNAGTTGAEIHLPFGGTKGTGNGHRDSGVQALDVFTEWKAIYVDYSGKLQRAQIDTEE

SEQ ID NO: 17362 - protein, 671 aa, Yersinia pseudotuberculosis
MNPFIVADAESCIGCRSCEVACVVAHHEGQFPDKPEYFTPRVKVFKGDQCATAVFCHHCEDAPCASTCPNGAIVELNNSIQVIQEKCIGCKTCMIACPFGMMTVVTETVQPASHRLADVYRRTEAQKCDLCLDQPDGPACIKTCPTQALTLVDQQYLLHQQQQKRQHMALNEHNGRLFSRAVVQAASTSSNKSIRDATPVNLLQRPRAPRLEPKKIPLAERKTGFAEIYLPFTESQIHEQAERCLECGDKTICQWTCPLHNAIPKWISLAHQGRIHEAAELSHQTSSLPEVCGRVCPQDRLCEQSCTLNDHDGAVTIGQIERHITETALATGWRPDLSQVKPSGKRVAIIGAGPAGLGCADILVRNGITPVVFDRYPEIGGLLTFGIPAFKLEKSVMTRRREIFTEMGVEFCLNTEIGRDITMENLLHDFDALFLGVGTYRSMRSGLENEDAQGVYDALPFLIGNTQHLMGYTANGAHPYVSMQDQRVVVLGGGDTAMDCVRTSLRQGASRVVCAYRRDEKNMPGSKREVKNAREEGAEFMFNLQPMSIVVDESGQVTGIKMVRTEMGQADAQGRRQALPIAGSEHLIPADAVIMAFGFSPHRMSWLAEHNVVLDKQGRVVAPTISGYPYQTSNPKIFAGGDIVRGADLIVTAIAEGRKAAESIAYYLNVL

SEQ ID NO: 17363 - protein, 142 aa, Sorghum bicolor
NSLHSAFSTYGEVLESKIILDRETQRSRGFGFVTFSTEEAMRSAIEGMNGKELDGRNITVNEAQSRGGRGGGGGGGYGGGRGGGGGYGRRDGGGGGYGGGGGGYGGGRGGYGGGGYGGGGGGYGGGSRGGGGYGNSDGNWRN

SEQ ID NO: 17364 - protein, 283 aa, Salmonella enterica
IGQALALLLKNQLPSGSELSLYDIAPVTPGVAVDLSHIPTAVKIKGFSGEDATPALEGADVVLISAGVARKPGMDRSDLFNVNAGIVKNLVQQIAKTCPKACVGIITNPVNTTVAIAAEVLKKAGVYDKNKLFGVTTLDIIRSNTFVAALKGKLPTEVEVPVIGGHSGVTILPLLSQIPGVSFTEQEAADLTKRIQNAGTEVVEAKAGGGSATLSMGQAAARFGLSLVRALQGEKGVVECAYVEGDGQYARFFSQPLLLGKNGVEERKSIGTLSAFEQRSLEG

SEQ ID NO: 17365 - protein, 168 aa, Sorghum bicolor
MAAADVEYRCFVGGLAWATNNETLEQAFANFGQVIDSKVITDRETGRSRGFGFVTFSSEQSMLDAIENMNGKELDGRNITVNQAQSRGGGGGGGGYGGGGGGYGGREGGGYGGGGGGYGGRREGGGGYGGGGYGGGGGGYGGREGGGGYGGGGGYGGNRGDSGGNWRN

SEQ ID NO: 17366 - protein, 283 aa, Salmonella enterica
IGQALALLLKNQLPSGSELSLYDIAPVTPGVAVDLSHIPTAVKIKGFSGEDATPALEGADVVLISAGVARKPGMDRSDLFNVNAGIVKNLVQQIAKTCPKACVGIITNPVNTTVAIAAEVLKKAGVYDKNKLFGVTTLDIIRSNTFVAELKGKLPTEVEVPVIGGHSGVTILPLLSQIPGVSFTEQEAADLTKRIQNAGTEVVEAKAGGGSATLSMGQAAARFGLSLVRALQGEKGVVECAYVEGDGQYARFFSQPLLLGKNGVEERKSIGTLSAFEQRSLEG

SEQ ID NO: 17367 - protein, 217 aa, Triticum aestivum
LILEIHPTKGNKSWSSTAVAAALELVDPPGCRNSAPARAPPSPSSSSIPMQQRRGRPSGTDGSDFSYRMVVDSRYQRVADGRSRLARLMLVQTLHQVAGGALLLLSLSKGTEINKFAVLSLAAGLLAILLGEFGRRRTVAVFLRLYTSLSSIAIAFSVTCIIRSDLFVKITKQNTAAITSYEMFDVVRVALGVLLQLVVIATTTRLLQNMSPPKRTS

SEQ ID NO: 17368 - protein, 393 aa, Dechloromonas aromatica RCB
MNVIKLTDLDVSGKRVFIRADLNVPQDEAGNITEDTRIRASLPSIKYCLEKGAAVMVTSHLGRPTEGELNHEDSLMPVAVRLGQMLHTSVRLITDWVDGGFEVKPGEVVLLENCRVNKGEKKNNDELAQKMAKLCDIYVNDAFGTAHRAEATTHGIAKYAPVACAGMLMGAEIDALSKALHEPKRPLVAIVGGSKVSSKLTILKSLASKVDQLIVGGGIANTFLLADGKRIGHSLAEPDLVKEAHTIMDIMKERGAEVPLPTDVVVADEVSALARANKISVDDVHANDRILDVGPKTAAKFAEIIANAGTIVWNGPVGVFELPQFAGGTKMMASAIAHSEAFSIAGGGDTLAAIAKFHIADDVGYISTGGGAFLEFLEGKTLPAIAILEERAA

SEQ ID NO: 17369 - protein, 283 aa, Salmonella enterica
IGQALALLLKNQLPSGSELSLYDIAPVTPGVAVDLSHIPTAVKIKGFSGEDATPALEGADVVLISAGVARKPGMDRSDLFNVNAGIVKNLVQQIAKTCPKACVGIITNPVNTTVAIAAEVLKKAGVYDKNKLFGVTTLDIIRSNTFVAELKGKLPTEVEVPVIGGHSGVTILPLLSQIPGVSFTEQEAADLTKRIQNAGTEVVEAKAGGGSATLSMGQAAARFGLSLVRALQGEKGVVECAYVEGDGQYARFFSQPLLLGKNGVGERKSIGTLSAFEQRSLEG

SEQ ID NO: 17370 - protein, 399 aa, Bordetella bronchiseptica RB50
MRFADRMARIAPSPSSMAGQRMRELRAAGRDVIGLTAGEPDFATPDNIQQAALRAMRNGQTKYTDVGGVPELKAAVAEKFRRENSLAYRQDQIIVSSGAKQVIFNALLCLVQRGDEVVIPAPYWVSYPDMVRFAGGTPVAVACAQQHRFKLQPDELERAVTPRTRCLILNSPNNPSGAAYDETELKALAQVLLRHPDICVITDDIYEHLLYDGRRFATIAAVEPALADRVLTVNGVSKSYAMTGWRIGYAGGPAALIANMVKLQSQSTSCPSAVSQAAAIEALTGPQDIIASSRKLFQARRDLLVRRINAIPGLHCDTPDGAFYVFASCAGLAGKRTPQGRTIDNDTDLALHLLDAEGVVVIQGDAYGMPGFFRLSIAASETLIEEAQRRIAAACAALH

SEQ ID NO: 17371 - protein, 154 aa, Triticum aestivum
TKVSILNCFLRLKEDAWQIFVKLADLCGALHCDLTMEFKKPKSKCNAAAAARNRHLCESLADSCFPVNQGHSASRLHEFFLRQFCDAHTCNGASKPFPKGGRKQTNRFYLALCILTMLLLPVFYLIVFLHQREMKKGDQVFKRIGKTVHKKKPS

SEQ ID NO: 17372 - protein, 283 aa, Salmonella enterica
IGQALALLLKNQLPSGSELSLYDIAPVTPGVAVDLSHIPTAVKIKGFSGEDATPALEGADVVLISAGVARKPGMDRSDLFNVNAGIVKNLVQQIAKTCPKACVGIITNPVNTTVAIAAEVLKKAGVYDKNKLFGVTTLDIIRSNTFVAELKGKLPTEVEVPVIGGHSGVTILPLLSQIPGVSFTEQEAADLTKRIQNAGTEVVEAKAGGGSATLSMGQAAARFGLSLVRALQGETGVVECAYVEGDGQYARFFSQPLLLGKNGVEERKSIGTLSAFEQRSLEG

SEQ ID NO: 17373 - protein, 320 aa, Zalerion arboricola
MASTAKEGSELTLAVIGCGTMGIAILSGILASLDEIHAPNSQSSETDETPSKLPTKFIACVRSPKGAEKIKKALSPYKTPVKIIQSDNVTACREADVVLLGCKPYMAEGILGEEGMVDALKGKLLISILAGVPAEQIYGYMYGKTPVNPEKEGLCQVVRAMPNTASGIRESMTVIATSSPPLSATTSSLITWIFKRIGDVVQLPAATMDASTALCGSGPAFFALILEAAIDGAVAMGLPRAEAQRMAAQTMKGAAGLVLSGEHPALLKDKVTTPGGCTIGGLMVLEEGGVRGTVARAVREATVVASQLGKGVQGVNGTRF

SEQ ID NO: 17374 - protein, 237 aa, Zea mays
MSCAGQAGGWLLDYALVEEEIQGSEFIYMVDDPAVSSVILGFDAPRKEDGVQDNPGAKKRSRPESSAPPGTKACREKLRRDRLNERFNELCAILEPGKPPKADKVAILSDAARLLNQLQGEAQKLKQSNESLQESIKSLKAEKSELRDEKTRLKAEKERLEQMLKGVVSHAAVAAPGPFVPHPAAVAPSFHHHPAAFAQAGKFVPYPSYPPPAAFWQWIPPTSLDTTKDPAHWPPVA

SEQ ID NO: 17375 - protein, 402 aa, Zea mays
MATLRSVGTLGEADLKGKKVFVRADLNVPLDDAQKITDDTRIRASVPTIKFLLEKGAKVILASHLGRPKGVTPKYSLKPLVPRLSDFLGVEVVMANDCIGEEVEKLAAALPEGGVLLLENVRFYKEEEKNEPEFAKKLASVADLYVNDAFGTAHRAHASTEGVTKYLKPAVAGFLMQKELDYLVGAVANPKKPFAAIVGGSKVSTKIGVIESLLAKVDILILGGGMIYTFYKAQGYSVGKSLVEEDKLELATSLIEKAKAKGVSLLLPTDIVVADKFAADAESKIVPATAIPDDWMGLDVGPDATKTFDEALDTTKTVIWNGPMGVFEFQKFAAGTEAIAKKLAELTTTKGVTTIIGGGDSVAAVEKAGLADKMSHISTGGGASLELLEGKTLPGVLALDDA

SEQ ID NO: 17376 - protein, 305 aa, GIBBERELLA ZEAE PH-1
MDALNATSFASFNQTKDYFVVLEEVSKYNVQLNMVEKLWAAWYLWMQNDTLATGIMSFVLHELVYFGRCIPFMLMDFIPYFQQFRIQKQKIPTIKEQWDCAAIVLISHFTAELPQIWFFHPIATYFGMDYGVPFPPVWKMALQIAICFVMEDAWHYWFHRALHYGPLYKAIHKMHHTYSAPFGLAAEYASPIETALLGIGVVGCPIVLLAVTGELHLFTMYTWIVLRLFQAIDSHSGYDFPWSLRHILPVWAGAHHHDLHHEKFIGNYASSFTWWDYCLDTEAGADAHKRRREKKLAAIKAQKQQ

SEQ ID NO: 17377 - protein, 417 aa, Desulfovibrio vulgaris subsp. vulgaris str. Hildenborough
MSKITKIKGFADLFPPESDVFTRMESVARQVFGRYGFVELRTPILERTDLFCRSIGTETDVVQKEMYTFPDRKDRSLTMRPEATAGVMRAYIESGRHTQEPVSKLFTSGPMFRYERPQKGRMRQFHQINCEVLGPVEPHADAELVLMLMRFLTELGLTGLSLQINSLGCKECRPLYRKALSDFLASIDNAALCEDCRRRMETNPLRVLDCKVPGCRELTANAPTILEHNCPECRTHFDAVLRILDSRNVPYVLNDRLVRGLDYYNRTTFEVVSDSIGSQGSVAGGGRYDGLISQLGGPDVPGVGFACGMERLALMMPGADAPRPHFHVAVLDPAAQDAALLLAEDLRAQGLTGSVGFGAGSIKSRMRLAGKSGARACLILGGDELAAGTVVVKDMDSGEQETIGRDAVAARLLAAGA

SEQ ID NO: 17378 - protein, 167 aa, Pyrus communis
MIGLLFGVSSAVTGAFEAEGAGLPPEEKPRLCDNSCEKELLKVPMVTTESGLQYKDIKVGQGPSPPVGFQVAANYVAMVPSGQIFDSSLEKGQVYIFRVGSGQVIKGLDEGILSMKVGGKRRLYIPGSLAFPKGLNSAPGRPRVAPSSPVVFDVSLEYVPGLDIEEE

SEQ ID NO: 17379 - protein, 356 aa, Saccharomyces cerevisiae
MTDLTTQEAIVLERPGKITLTNVSIPKISDPNEVIIQIKATGICGSDIHYYTHGRIANYVVESPMVLGHESSGIVALIGENVKTLKVGDRVALEPGIPDRFSPEMKEGRYNLDPNLKFAATPPFDGTLTKYYKTMKDFVYKLPDDVSFEEGALIEPLSVAIHANKLAKIKFGARCVVFGAGPIGLLAGKVASVFGAADVVFVDLLENKLETARQFGATHIVNSGDLPHGVTVDSVIKKAIGKKGADVVFECSGAEPCVRAGIEVCKAGGTIVQVGMGQEEIQFPISIIPTKELTFQGCFRYCQGDYSDSIELVSSRKLSLKPFITHRYSFKDAVEAFEETSHHPLNNIKTIIEGPE

SEQ ID NO: 17380 - protein, 555 aa, Borrelia burgdorferi
MNTSLFKQERQKYIPKLPNILKKDFNNISLVYGENTEAIQDRQALKEFFKNTYGLPIISFTEGESSLSFSKALNIGIILSGGPAPGGHNVISGVFDAIKKFNPNSKLFGFKGGPLGLLENDKIELTESLINSYRNTGGFDIVSSGRTKIETEEHYNKALFVAKENNLNAIIIIGGDDSNTNAAILAEYFKKNGENIQVIGVPKTIDADLRNDHIEISFGFDSATKIYSELIGNLCRDAMSTKKYWHFVKLMGRSASHVALECALKTHPNICIVSEEVLAKKKTLSEIIDEMVSVILKRSLNGDNFGVVIVPEGLIEFIPEVKSLMLELCDIFDKNEGEFKGLNIEKMKEIFVAKLSDYMKGVYLSLPLFIQFELIKSILERDPHGNFNVSRVPTEKLFIEMIQSRLNDMKKRGEYKGSFTPVDHFFGYEGRSAFPSNFDSDYCYSLGYNAVVLILNGLTGYMSCIKNLNLKPTDWIAGGVPLTMLMNMEERYGEKKPVIKKALVDLEGRPFKEFVKNRDKWALNNLYLYPGPVQYFGSSEIVDEITETLKLELLK

SEQ ID NO: 17381 - protein, 313 aa, Triticum aestivum
MMTMDLIGGYGRADEQVAIQEAAAAGLRGMEHLILQLSRTGTSESSPVGSSEAPEQQVDCREITDMTVSKFKKVISILNHRTGHARFRRGPVVAQSQGPAVSEPAPVRASSSRSVTLDFTKASSGYGNDAGFSVSAASSSFMSSVTGDGSVSNGRGGGSSLMLPPLPSASCGKPPLASSAASTGAGAGQKRKCHDHAHSENVAGGKYGASGGRCHCSKRRKSRVRRMTRVPAISSKAAEIPADDFSWRKYGQKPIKGSPYPRGYYKCSTVRGCPARKHVERDPSDPSMLIVTYEGEHRHTPADQEPLAPLPEL

SEQ ID NO: 17382 - protein, 336 aa, Burkholderia fungorum LB400
MKAVQVAQAGGPLELVERDVPEPGAGQVLIKIQACGICHSDVLTKEGQWPGLEYPRVPGHEIAGVIDTVGAGVEEWQAGQRVGVGWHGGHCGHCEHCRRGDFVLCQRALVPGISYDGGYAEFMLAPVEALARIPDDLADVDAAPLLCAGITTFNALRNSGARAGDVVAILGIGGLGHLGVQFARKMGFVTVAIARGQDKASLAKQLGAHHYIDSTAANVAQALQALGGARVILATVTSGKAMSAVVGGLGLNGKLIMVGLSDEPVEVPVAQFIMGRNSVQGWPSGTSADSQDTLAFSALSGIKPMIEEFPLTKAAEAYERMMSGAARFRVVLNTGR

SEQ ID NO: 17383 - protein, 486 aa, Glycine max
  unsure (1)..(486): unsure at all Xaa locations
MPPKPLDYGSINENVKKXCNMLCRGELYLRASELQKEGKKIIFTNVXGNPHALGQKPLSFPRQVVALCQAPFLLDDPNVGLLFPADAIARAKHYLSLTSGGLGAYSDSRGLPGVRKEVAEFILRRDGYPTDPELIYLTDGASKGVMQILNTIIRGQDDGILVPVPQYPLYSATIALLGGXTLVPYYLEETANWGLDVNELRQSVEQARFKGITVKAMVIINPGNPTGQCLSEANLREVLQFCYQENLALLGDEVYQTNIYQDERPFISSRKVLMELGPPISKEVQLISFHSVSKGYYGECGXQRGGYFEMTNIPPETVDEIYKVASISLSPNVPAQIFMGVMLNPPQPGDISYDKFVRESTGILESLRRRARIMTDGFNSCRNVVCNFTEGAMYSFPQIRLXPPRALEAAKQAGKVPDVYYCLKLLEATGISTVPGSGFGQKEGVFHLRTTILPAEEDMPDIMDSFKKFNDEFMEQYEDDRGYSRL

SEQ ID NO: 17384 - protein, 271 aa, Glycine max
MADYSAGTESQEVVVNVTKNTSETIQRSDSLVSVPFLQKLVAEAVGTYFLIFAGCASLVVNENYYNMITFPGIAIVWGLVLTVLVYTVGHISGGHFNPAVTIAFASTRRFPLIQVPAYVVAQLLGSILASGTLRLLFMGNHDQFSGTVPNGTNLQAFVFEFIMTFFLMFVICGVATDNRAVGELAGIAIGSTLLLNVIIGGPVTGASMNPARSLGPAFVHGEYEGIWIYLLAPVVGAIAGAWVYNIVRYTDKPLSEITKSASFLKGRAASK

SEQ ID NO: 17385 - protein, 483 aa, Arabidopsis thaliana
MIARRIWRSHRFLRPFSSSSVCSPPFRVPEYLSQSSSSPASRPFFVHPPTLMKWGGGSRSWFSNEAMRTDSNSGLIDVPLAQTGEGIAECELLKWFVKEGDSVEEFQPLCEVQSDKATIEITSRFKGKVALISHSPGDIIKVGETLVRLAVEDSQDSLLTTDSSEIVTLGGSKQGTENLLGALSTPAVRNLAKDLGIDINVITGTGKDGRVLKEDVLRFSDQKGFVTDSVSSEHAVIGGDSVSTKASSNFEDKTVPLRGFSRAMVKTMTMATSVPHFHFVEEINCDSLVELKQFFKENNTDSTIKHTFLPTLIKSLSMALTKYPFVNSCFNAESLEIILKGSHNIGVAMATEHGLVVPNIKNVQSLSLLEITKELSRLQHLAANNKLNPEDVTGGTITLSNIGAIGGKFGSPLLNLPEVAIIALGRIEKVPKFSKEGTVYPASIMMVNIAADHRVLDGATVARFCCQWKEYVEKPELLMLQMR

SEQ ID NO: 17386 - protein, 216 aa, Zea mays
PSLPPSFEQTPNAVEELKLARDIYEHAVVLSVKLEDQDAFERDFCQLKPYYMDTCGIIPPSPEEYPILGLNLLRLLVQNRIAEFHTELELLPVKALEHPCIKHAVELEQSFMEGAYNRVLSARQAVPHETYVYFMHLLGQTARPEIAGSTDDGMNPDVRPLQGGLHPQRPRRLRHPPLTAQVHLTKFPSLPPSFEQTPKAVEELKLARDIYEHAVV

SEQ ID NO: 17387 - protein, 277 aa, Populus tremula x Populus tremuloides
MATATVLGTERADLNYKATELCLGLPGAVGVKNEVETPNKATGKRGFAETVDLKLNLQAKEGVMDLNENINNIASEDKNHLPSATIKDPAKPPAKAQVVGWPPVRSYRKNVLAQKNASEEGFGAQVEGWPPVRSYRKNVLVQKNASEEGEKASTGGCSAAFVKVCMDGAPYLRKVDLKMYKSYQELSDALAKMFSSLTMGNYGAQGMIDFMNESKLMDLLNSSEYVPSYEDKDGDWMLVGDVPWEMFVDSCKRPRIMKGSEAVGLAPRAMEKCKSRT

SEQ ID NO: 17388 - protein, 283 aa, Salmonella enterica
IGQALALLLKNQLPSGSELSLYDIAPVTPGVAVDLSHIPTAVKIKGFSGEDATPALEGADVVLISAGVARKPGMDRSDLFNVNAGIVKNLVQQIAKTCPKACVGIITNPVNTTVAIAAEVLKKAGVYDKNKLFGVTTLDIIRSNTFVAELKGKLPTEVEVPVIGGHSGVTILPLLSQIPGVSFSEQEAAELTKRIQNAGTEVVEAKAGGGSATLSMGQAAARFGLSLVRALQGEKGVVECAYVEGDGQYARFFSQPLLLGKNGVEERKSIGTLSAFEQRSLEG

SEQ ID NO: 17389 - protein, 104 aa, Triticum aestivum
  unsure (1)..(104): unsure at all Xaa locations
VQDAGFKAAIVYDNENSGVLVSMAGSSSGIQIYAVFISKVSGEVLKKFSGRTDVEVWIIPTFENSXWAIMAISFISLLAMSAVLAXLFSLXRKTSEAGTGNRIP

SEQ ID NO: 17390 - protein, 283 aa, Salmonella enterica
IGQALALLLKNQLPSGSELSLYDIAPVTPGVAVDLSHIPTAVKIKGFSGEDATPALEGADVVLISAGVARKPGMDRSDLFNVNAGIVKNLVQQIAKTCPKACVGIITNPVNTTVAIAAEVLKKAGVYDKNKLFGVTTLDIIRSNTFVAELKGKLPTEVEVSVIGGHSGVTILPLLSQIPGVSFSEQEAAELTKRIQNAGTEVVEAKAGGGSATLSMGQAAARFGLSLVRALQGEKGVVECAYVEGDGQYARFFSQPLLLGKNGVEERKSIGTLSAFEQRSLEG

SEQ ID NO: 17391 - protein, 428 aa, Methanosarcina mazei Goe1
MSYIGLQQDSGEYKIQKIHAREILDSRGNPTVEVDVFTPKGFGRASVPSGASTGTNEALELRDADPNRYGGKGVLTAVKNVNTIIQKELLGLDVRNQREIDELMIELDETENKSNLGANAILGVSMAVAKAAADSLNIPLYRYFGGSNAFTLPVPTMNVLNGGKHAGNELAIQEFMIQPKGAETFYEALQIGAEIYQTLGKFLENKYGRSSTNVGYEGGYAPKMGESTEALDALVHAIEEAGYTESEVTIGLDAAATEFYEEEFYNIDGKKLAAPELLDYYVELVNSYPILSIEDPFYEEAFEDFEALTNELWDTIIVGDDLFVTNIERLSKGVDMGAANALLLKVNQIGSISEAFDAASMASRNGYTVIVSHRSAETEDTTISDLAVAIGAEMIKTGAPARGERTAKYNQLLRIEEDLGEVAHYVQL

SEQ ID NO: 17392 - protein, 138 aa, Shorea materialis
EKNIPVLLGLLSIWNVSFLGYPARAILPYSQALEKFAPHIQQVSMESNGKGVSIDGVPLPYEAGEIDFGEPGTNGQHSFYQLIHQGRVIPCDFIGSAKSQQPIHLKGEAVSNHDELMSNFFAQPDALAFGKTPEELHK

SEQ ID NO: 17393 - protein, 283 aa, Salmonella enterica
IGQALALLLKNQLPSGSELSLYDIAPVTPGVAVDLSHIPTAVKIKGFSGEDATPALEGADVVLISAGVARKPGMDRSDLFNVNAGIVKNLVQQIAKTCPKACVGIITNPVNTTVAIAAEVLKKAGVYDKNKLFGVTTLDIIRSNTFVAELKGKLPTEVEVPVIGGHSGVTILPLLSQIPDVSFTEQEAAELTKRIQNAGTEVVEAKAGGGSATLSMGQAAARFGLSLVRALQGEKGVVECAYVEGDGQYARFFSQPLLLGKNGVEERKSIGTLSAFEQHSLDA

SEQ ID NO: 17394 - protein, 92 aa, Zea mays
  unsure (1)..(92): unsure at all Xaa locations
VIKADDVVGPEVXKLVSALPNGNVVLLENVRFYKEEEKNDPEFAKKLASLADLYVNDAFGTAHRAHASTEGVTKFLKPSVAGFLLQKELDYL

SEQ ID NO: 17395 - protein, 119 aa, Glycine max
GVSLLLPSDVVIADKFAPDANSKVVPASAIPDGWMGLDIGPDSVKSFSEALDTTQTIIWNGPMGVFEFDKFAVGTEVCMQEHPPTYEIPFKFYVKPKFTVNIKNVHSKRCILRGICSRG

SEQ ID NO: 17396 - protein, 504 aa, Staphylococcus epidermidis ATCC 12228
MKIRKRLDTYYTTIFLSTNSNYSYLSKEESRMTGEVKKYVDLLVIGAGSGGYVAAIRAAQLGKKVVLVDKAELGGVCLNRGCIPSKALISASERVKHIKHANTMGLKVSGEVQVDMPEVVKWKDGIVNKLTDGIRTLLKGNGVEVISGEAYLTEAHIAKIKIEDEEQIFSYKDLILAIGSLPVELKSMPFDQKRIISSTEALQLQEVPNHLVVVGGGYIGLELGTAYAKFGAKVTILEGSDTILSGTDPILTKTVKRHLKEIGITVITDALVQGGENTGDEVNVHVQVDGKEEIIQCDYCLVSIGRKPNTGKIGLENIGVVLDDQGFIKINNKCQTNIEHVYAIGDCAGGDLLAHKASYEAKIAAEVISGQNSVIDFQAMPFVIFSDPEVAYTGLTEKEAKEKGYETVSSRFPFQANARALSVSDADGFVQVVAEKNTKRVLGVQMVGPEVSSLIAEAVFAIEAGANAEDLSLTIHAHPTLPEPLMEAAEGVMGHATHMLNKKQ

SEQ ID NO: 17397 - protein, 491 aa, Escherichia coli
MMSRMAEQQLYIHGGYTSATSGRTFETINPANGNVLATVQAAGREDVDRAVKSAQQGQKIWASMTAMERSRILRRAVDILRERNDELAKLETLDTGKAYSETSTVDIVTGADVLEYYAGLIPALEGSQIPLRETSFVYTRREPLGVVAGIGAWNYPIQIALWKSAPALAAGNAMIFKPSEVTPLTALKLAEIYSEAGLPDGVFNVLPGVGAETGQYLTEHPGIAKVSFTGGVASGKKVMANSAASSLKEVTMELGGKSPLIVFDDADLDLAADIAMMANFFSSGQVCTNGTRVFVPAKCKAAFEQKILARVERIRAGDVFDPQTNFGPLVSFPHRDNVLRYIAKGKEEGARVLCGGDVLKGDGFDNGAWVAPTVFTDCSDDMTIVREEIFGPVMSILTYESEDEVIRRANDTDYGLAAGIVTADLNRAHRVIHQLEAGICWINTWGESPAEMPVGGYKHSGIGRENGVMTLQSYTQVKSIQVEMAKFQSIF

SEQ ID NO: 17398 - protein, 157 aa, Oryza sativa
MFPPGLIHHRPDGGEAGRAAGGGPSLVLTADPKPRLRWTADLHERFVDAVAQLGGPEKATPKTILRTMGVKGLTLFHLKSHLQKYRLGKQSGKEASEQSKDASYLLDAQGGMSVSPRVSTQDVKENQEVKEALRAQMEMQRRLHEQVEVQKHVQIRM

SEQ ID NO: 17399 - protein, 453 aa, Staphylococcus epidermidis ATCC 12228
MRRIMMTKKYDLIVIGTGSAGSITAAKCNKAGWNVAMVDDRPFGGTCALRGCDPKKVLHGAAELIDWNKRMVKNGVPSEVSINWKDLMNFKRTFTDDVPEKKEEALNKQGIDTYHGNASFVSEDKLEVNKEVLEGSHFLIASGAKPTPLPIKGEEHLTYSDEFLELDELPQRIVFVGGGYISFEFAHIAARAGSEVHIIHRGQRPLENFDIDLVDILLEKSKEIGIQVHLQHSVESIEKEQGKFHVYARKKEDITRFEADIVIHGAGRVPALDMNLEKGNIERKKHGVHVNEYLQSVSNPNVYAAGDAAATDGLPLTPVASADSHVVASNLLKGNSKKIEYPVIPSAVFTVPKMASVGMSEEEAKNSGRNIKVKQKNISDWFTYKRTNEDFAAFKVLIDEDSDQVVGAHLISNEADELINHFATAIRFGISTKELKQMIFAYPTAASDIAHML

SEQ ID NO: 17400 - protein, 204 aa, Populus tremula x Populus tremuloides
MEFERDLNLDATELRLGLPGTATRQSEKQTPNSNLAKSNKRSLPDMNEDPAGSSRENSSTVSSNEEKSHDQETAPPPIKAQVVGWPPIRSYRKNCLQAKKQEAEAAGLYVKVSMDGAPYLRKIDLKVYKGYPELLKALEEMFKSKVGEYSEREGYNGSEHVPTYEDKDGDWMLVGDVPWDMFINSCKRLRIMKESEARGLGCAV

SEQ ID NO: 17401 - protein, 519 aa, Ustilago maydis 521
MTPHGESSDASIGDQVAHKLKATADAVLSAIQHEDQSEAHRIFRSHPGHNGRRASNISSADKHAFQSSLHRTQEEIGERFPAIEHPGSTGVIYVTDRATSNGFYYGNPEWANMGQGAPEVGNIEGGVPRMLQFDLSEFGEGVHEYAPNTGTMALRKAVANYYNQTFRQNHTKKFDYSNVCIVPGGRAGMTRLAAVIGNVNCGYQLPEYTSYESMLSAFKSLVPIPTVLSEEDRYKLSTDDLRKEIKGRGLSAMIMSNPRNPTGMLIEGQELKRLVETSKELGCTILLDEFYSWYMHEGPLGRANSAAEHIDDINETPVVLIDGLTKGFRLPGWRVCWVVGPKDIITALNQSGSFLDGGTSHPMQCMALQMLDIDRCNQDRIALQKLFRHKRQHVLARLKKMGLEVKVEPQATFYIWLSLANLPSPLDSGLVMFEELLREKTIVVPGIAFDINPAHRRNIVQSPCEKFIRISYGPELAQINRGLDALERVIAKADPNHAENAKLGKGFAPTKSTHADDQK

SEQ ID NO: 17402 - protein, 162 aa, Corynebacterium efficiens YS-314
MEAMTSIHDIPVTLTDGTETTMADWAGHLVMVVNVASRCGLTPQYEGLQRLFEDYQDRGFFVIGVPCNQFMGQEPGTDAEICTFAQEKYDVTFPLLAKTDVNGENEHPLYTELKRFGEGGDIEWNFEKFLINADGETIARFGPRMDPEDDEVTSVIEDNLPV

SEQ ID NO: 17403 - protein, 281 aa, Escherichia coli
MSQTSTLKGQCIAEFLGTGLLIFFGVGCVAALKVAGASFGQWEISVIFGLGVAMAIYLTAGVSGAHLNPAVTIALWLFACFDKRKVIPFIVSQVAGAFCAAALVYGLYYNLFFDFEQTHHIVRGSVESVDLAGTFSTYPNPHINFVQAFAVEMVITAILMGLILALTDDGNGVPRGPLAPLLIGLLIAVIGASMGPLTGTAMNPARDFGPKVFAWLAGWGNVAFTGGRDIPYFLVPLFGPIVGAIVGAFAYRKLIGRHLPCDICVVEEKETTTPSEQKASL

SEQ ID NO: 17404 - protein, 167 aa, Klebsiella oxytoca
KHFSTTAPEKNLPVLLALIGIWYNNFFGAETEAILPYDQYMHRFAAYFQQGNMESNGKYVDRNGNAVDYQTGPIIWGEPGTNGQHAFYQLIHQGTKMVPCDFIAPAITQNPLSDHHPKLLSNFFAQTEALAFGKSREVVEQEYRDQGKDPAALEHVVPFKVFEGNRP

SEQ ID NO: 17405 - protein, 108 aa, Oryza sativa
GTRGNYDKACNALLLKVNQIGSVTESIEAVKMSKRAGWGVMTSHRSGETEDTFIADLAVGLSTGQIKTGAPCRSERLAKYNQLLRIEEELGAAAVYAGAKFRAPVEPY

SEQ ID NO: 17406 - protein, 491 aa, GIBBERELLA ZEAE PH-1
MRRLIWRTALHQARSRWIQPNFVAEEKDLVVIGGGVAGYVAAIKAGQEGMKVTCIEKRGSLGGTCLNVGCIPSKSLLNNSHLYHQILHDTKHRGIEVSDVKLNLANFMKAKETSVSGLTKGIEYLFKKNGVEYIKGAGSFVNEHEVKVDLNEGGETSVRGKNILIATGSEATPFPGLEIDEKRVITSTGAIALEKVPETMTVIGGGIIGLEMASVWSRLGSKVTIVEFLGQIGGPGMDSEIAKNTQKILKKQGLEFKLNTKVVSGDKSGDKVKLEVDSAKGGKVESIESDVVLVAIGRRPYTAGLGLENIGLEADDRGRVVIDSEYRTKIPHIRCVGDCTFGPMLAHKAEEEAVAVVEYIKKGYGHVNYGAIPSVMYTHPEVAWVGQSEQDLKSQNIPYRVGSFPFAANSRAKTNIDTEGMVKMLADPETDRILGVHIIGPNAGEMIAEGTLALEYGASSEDIARTCHAHPTLAEAFKEAAMATHAKAIHY

SEQ ID NO: 17407 - protein, 131 aa, Dechloromonas aromatica RCB
MIEQALPMISIELFAHNPTMIRVPAGQALFREGEEGHMMFVLATGSADVVVHERVVETLQHGSIVGEVGIVLPGPRSASVIATTDCEFVAVDEKRFQFLVQQTPFFATQVMRVMAERLRNLNQLVTPIEDI

SEQ ID NO: 17408 - protein, 518 aa, Lotus japonicus
MLVEIALALLALALFLQFRPTPTAKSKALRHLPNPPSPKPRLPFVGHLHLLDQPLLHNSLIKLGEKYGPLYTLYFGSMPTVVASTPELFKLFLQTHEATSFSTRFQTSAIRRLTYDNSVAMVPFAPYWKFIRKVIMNDLLNATTVNKLRPLRSQEIRKVLKAMAQSAESQKPLNVTEELLKWTNSTISRMMLGEAEHVKDIVREVLKIFGEYSLTDFIWPLKKLRVGQYEKRIDEIFNKFDPVIEKVIKKRQEIIKRRKERNGELEEGEQSVVFLDTLLEYAADENMEIKITKEQIKGLVVDFFSAGTDSTAVATDWALAELINNPRVLKKAREEVDSVVGKDRLVDESDIQNLPYIRAIVKETFRMHPPLPVVKRKCVQECELNGYVIPEGALVLFNVWAVQRDPKYWKTPLEFRPERFLEEADIDLKGQHFELLPFGSGRRMCPGVNLATAGMATLLSSVIQCFELQVVGPKGQILKGSDAKANMEERAGLTVPRANSLMCVPLARSKVAAELLSS

SEQ ID NO: 17409 - protein, 349 aa, Escherichia coli
MKIKAVGAYSAKQPLEPMDITRREPGPNDVKIEIAYCGVCHSDLHQVRSEWAGTVYPCVPGHEIVGRVVAVGDQVEKYAPGDLVGVGCIVDSCKHCEECEDGLENYCDHMTGTYNLPTPDEPGHTLGGYSQQIVVHERYVLRIRYPQEQLAAVAPLLCAGITTYSPLRHWQAGPGKKVGVVGIGGLGHMGIKLAHAMGAHVVAFTTSEAKREAAKALGADEVVNSRNADEMAAHLKSFDFILNTVAAPHNLDDFTTLLKRDGTMTLVGAPATPHKSPEVFNLIMKRRAIAGSMIGGIPETQEMLDFCAEHGIVADIEMIRADQINEAYERMLRGDVKYRFVIDNRTLTD

SEQ ID NO: 17410 - protein, 525 aa, Glycine max
MDSSSSSPNNNNHHKLGFQPARSRSRLAMASPANTSEPKIVTGTAGYILEDVPHFTDYIPNLPTYPNPLQDNPAYSVVKQYFVHVDDSVPQKVVVHKDGARGVHFRRAGPRQKVYFEADEVQAAIVTCGGLCPGLNTVIRELVCGLHHMYGVKKVLGINGGYRGFYARNTITLTPKSVNDIHKRGGTVLGTSRGGHDTKKIVDSIQDRGINQVYIIGGDGTQKGASAIFEEVRKRGLKVSVVGIPKTIDNDIPVIDKSFGFDTAVEEAQRAINAAHVEAESVENGIGVVKLMGRNSGFIAMYATLASRDVDCCLIPESPFYLEGPGGLYEYIEKRLKENGHMVIVIAEGAGQELVSESVQSMSKQDASGNKLFQDVGLWISQKIRDHFAAQKTLPITLKYIDPTYMIRAIPSNASDNVYCTLLAQSAVHGAMAGYTGYTSGLVNGRQTYIPFYRITERQNHVVITDRMWARLLSSTNQPSFLDAKGDNEEKEEEEALNQLPDGHCAKDTSLASKEINSSIYPTAC

SEQ ID NO: 17411 - protein, 548 aa, Glycine max
  unsure (1)..(548): unsure at all Xaa locations
MAASAGGQITLSSTVQLHGVACSRNWKLVKFCNGEVMGRKLVLKSAYGGSTKDVRHHQQQQHICMSLTADVSTESKLRDLDMERRNPRTVLAVILGGGAGTRLFPLTKRRAKPAVPIGGAYRLIDVPMSNCINSGINKVYILTQFNSASLNRHIARAYNSGNGVTFGDGYVEVLAATQTPGEAGKKWFQGTADAVRQFHWLFEDPRSKDIEDVLILSGDHLYRMDYMDFVQNHRESGADITLSCLPMDDSRASDFGLMRIDNKGRILSFSEKXPKGEELKAMQVDTTVLGLSKDEAQKKPYIASMGVYVFKKEILLNLLRNMHREXLILFQSLFFKCYKLIXFRWRFPTANDFGSEVIPASAREFYMKAYLFNDYWEDIGTIRSFFEANLALTEHPPRFSFYDAAKPMYTSRRNLPPSKIDNSKIVDSIISHGSFLNNSFIEHSVVGIRSRINSNVHLKDTVMLGADYYETDAEVVALLAEGRVPIGIGENTKIKDCIIDKNARIGKNVVIANSEGIQEADRSSEGFYIRSGVTIVLKNSVIEDGFII

SEQ ID NO: 17412 - protein, 466 aa, Nostoc punctiforme
MSSTTVRRKSNTFYVILIAGAAALGGFLFGFDTAVINGAVLSLAKAFNTSSWVTGLAVSLALLGSAVGAFFAGQIADRYGRVKAMVVASVLFTISAIGSGMAFTIWDFIFWRVLGGIGIGVASVIAPAYIAECSPTHLRGRLGSLQQLAIVVGIFVALLSDYFIATSAGSADSPFLFGVAAWRWMFWTAVPPAVFYGMVALTIPESPRYLVAKGRESEAVNVLTKILGGDVLPKIEEIRQTVLRERQPKFSDLLSRSGGLLPIVWIGIGLSVLQQFVGINVIFYYSSVLWRAVGFSEKDSLSITVITGAVNIITTLIAIAFVDKFGRKPLLIIGSIGMTLTLGTMAYIFGNAPLDAAGNPSLAGSAGTVALIAANLYVFCFGFSWGPIVWVLLGEMFNNKIRAAALSVAAAIQWVANFLISTTFPPILQYFGLGSAYGLYTIAAATSFFFILFFIKETKGIELEDM

SEQ ID NO: 17413 - protein, 440 aa, Zymomonas mobilis
MSIEVKMPALSPTMTEGTLAKWLVKEGDAVKAGDILAEIETDKAIMEFETVDAGIIAKILVPEGSENIAVGQVIAVMAEAGEDVSQVAASASSQISEPSEKADVAQKETADSETISIDASLDKAISNAGYGNKTENMTASYQEKAGRIKASPLAKRLAKKNHVDLKQVSGSGPHGRIIKADIEAFVTGANQASSNPSVSTPEVSGKITHDTPHNSIKLSNMRRVIARRLTESKQNIPHIYLTVDVQMDALLKLRSELNESLAVQNIKISVNDMLIKAQALALKATPNVNVAFDGDQMLQFSQADISVAVSVEGGLITPILKQADTKSLSALSVEMKELIARAREGRLQPQEYQGGTSSISNMGMFGIKQFNAVINPPQASILAIGSGERRPWVIDDAITIATVATITGSFDHRVIDGADAAAFMSAFKHLVEKPLGILAQ

SEQ ID NO: 17414 - protein, 295 aa, Bacillus cereus ATCC 10987
MKKVRKAIIPAAGLGTRFLPATKAMPKEMLPIVDKPTIQYIVEEAVKSGIEDIIIVTGKTKRSIEDHFDNAFELEQNLLEKKKYELLEKVQASSKMVDIHYIRQKEPKGLGHAVWCARKFIGDEPFAVLLGDDIVQAEKPCLRQLIEEYDKTLSSVIGVQTVPEDETHRYGIIDPLEQEGRRYQVRNFVEKPAAGTAPSNLAIMGRYVLTPEIFMFLDQQHIGAGGEIQLTDAIQSLNEIQRVFAYDFEGKRYDVGEKLGFVQTTIEMALQHPELRDDMVTMMKKILEEQTNQES

SEQ ID NO: 17415 - protein, 466 aa, Zymomonas mobilis
MADHFDLIVLGGGPGGYVAAIRAAQLNLKVALVERVHLGGICLNWGCIPTKSLLRSAEVYHEMQNAEAYGLTSFKPDFDLDKIIARSREVAARLASGVKTLLRKNKVEVISGVGQLTGNQQMRVETTEGEEKILEAKDIIIATGARARQLPNVHSDGKHIWTYHHALKPPAMPKKLLVIGSGAIGIEFASLYADFGAEVSIVEHAPQILPMEDAEVSAYVAKAFKKRGIRILTQSALQNLTPDDEGVTAEIAGADGKVTKERFSHAIVAIGVVANVENIGLDKLGIKLDRGFIAVDGFGRTNVDHVWAIGDVAGAPCLAHKASHQGVIAAEDIAGCDHVHPLNTQNIPGCTYARPQVASVGLTEEKARQQGYNVKIGNFPFIANGKAIAQGATDGFVKTVFDADSGALLGAHMVGAEVTEMIHGYTVARTLETTEAEIMETIFPHPTLSEAMHESVLAAYGRALHF

SEQ ID NO: 17416 - protein, 574 aa, Bacillus cereus ATCC 10987
MNWKQEFSRWLSYAELDAELKEQLENMKQDEKKIEDSFYKNLEFGTGGMRGELGAGTNRLNVYTVRKATQGLAKFIEKLGEEAKKRGVVVAYDSRHKSPEFAMEVAATLGAHGITTYVFESLRPTPVLSFAVRHLHTVSGIVLTASHNPPEYNGYKVYGEDGGQLPPKEADELISYVNAVEDELTVEVADVEQLKADGLLHIIGQEVDDAYAAELNNVIINKEMVQKVGKDLKIVFTPLHGTSNISVRRGLKEVGFTDVTVVKEQELPDPNFSTVKSPNPEEHAAFEYAIRDGEKVGADVLIATDPDADRLGVAVRNHDGEFQVLTGNQTGALMLDYLLSQKKENGTLPENGVVLKTIVTSEIGRTIAKAYGLDTVDTLTGFKFIGEKIKQYEESGQYEFQFGYEESYGYLIRPFCRDKDAVQSVLFACEVAAYYKSQGKTLYDGLLEVFEKYGFFREDLVSLTLKGKDGAEQIQEMMATFRENPPKEVAGLTVVAVEDYKASMITSLQDGHKEEIHLPKSNVLKYQLEDGSWFCLRPSGTEPKIKFYFGVQDNSLQNSEQKLLTIKEDIMNRL

SEQ ID NO: 17417 - protein, 138 aa, Shorea isoptera
EKNIPVLLGLLSIWNVSFLGYPARAILPYSQALEKFAPHIQQVSMESNGKGVSIDGVPLPYEAGEIDFGEPGTNGQHSFYQLIHQGRVIPCDFIGSAKSQQPIHLKGEVVSNHNELMSNFFAQPDALAFGKTPEELHK

SEQ ID NO: 17418 - protein, 277 aa, Salmonella enterica
QLPSGSELSLYDIAPVTPGVAVDLSHIPTAVKIKGFSGEDATPALEGADVVLISAGVARKPGMDRSDLFNVNAGIVKNLVQQIAKTCPKACVGIITNPVNTTVAIAAEVLKKAGVYDKNKLFGVTTLDIIRSNTFVAELKGKLPTEVEVPVIGGHSGVTILPLLSQIPGVSFTEQEAAELTKRIQNAGTEVVEAKAGGGSATLSMGQAAARFGLSLVRALQGEKGVVECAYVEGDGQYARFFSQPLLLGKNGVEERKSIGTLSAFEQHSLDAMLDTL

SEQ ID NO: 17419 - protein, 348 aa, Pichia stipitis
MSVPTTQKAVVFESNGGPLLYKDIPVPTPKPNEILINVKYSGVCHTDLHAWKGDWPLDTKLPLVGGHEGAGVVVGIGSNVTGWELGDYAGIKWLNGSCLNCEFCQHSDEPNCAKADLSGYTHDGSFQQYATADAVQAARLPKGTDLAQAAPILCAGITVYKALKTAQIQPGNWVCISGAGGGLGSLAIQYAKAMGFRVIAIDGGEEKGEFVKSLGAEAYVDFTVSKDIVKDIQTATDGGPHAAINVSVSEKAIAQSCQYVRSTGTVVLVGLPAGAKVVAPVFDAVVKSISIRGSYVGNRADSAEAIDFFTRGLIKCPIKVVGLSELPKVYELMEAGKVIGRYVVDTSK

SEQ ID NO: 17420 - protein, 113 aa, Triticum aestivum
  unsure (1)..(113): unsure at all Xaa locations
MAPTVMASSATSVAPFQGLKXXVGLPVSRRSNGASLGSVSNGGRIRCMQVWPXEGIMKFETLSYXPPXRXETLLKQXXYLIXRSKXVPXLXFXSXXXFILRXLXEXXXYXESS

SEQ ID NO: 17421 - protein, 458 aa, Rhodococcus rhodochrous
LQIVHQATADDVDEAVAAGRVAAADPAWRRMLPHERARYLHRIADAIEHEASRLALLQSYNTGKTLTETTALVGSAAGTFRYFAAVLETSDDDLTTQRGNYLTMSIHEPIGVIGAIAPWNSPIASDAQKIAPALAAGNAVVLKPAEWTPLVSMALARAIHDSGLPPGLLSVLPGKGSIVGDAIVQHPHVGKVTFTGGTRTGRAVAHAGAEKLMPVSLELGGKSPTIVLDDADIEAAVAGVMYGIFSSTGQSCIAGSRLFVDRSLYEAFMERLVERTRALRIGNGRDPRTQVGPLVHHTHRASVARYVDLARCEGGRVLCGGTAPDDPELADGAYYLPTVIDGLSNDAAVCQDEIFGPVLIALPFDGESDLLAQANDSVFGLASGIWTRDYRRAWRLARQLEAGTVWVNTYKRFSISTPFGGIKESGLGTEKGRAGIAAYSRQKSIYLGLDDEPDRWVD

SEQ ID NO: 17422 - protein, 525 aa, Phaseolus vulgaris
MASSSVTLKANAHLANSEKGHLFRQESSFLGERVKVGPNNSAFVTNQLARCSRSQKRVNHGVASAILTSNDAKESLSLQVPSFMRRRVDPKNVVSIILGGGPGKQLFPLTQRAATPAVPVGGCYRLIDIPMSNCINSGINKIFVLTQFNSASLNRHIARTYFGNGINFGDGTVEVLAATQTPGEAGKKWFQGTADAVRQFTWVFEDAKNTHVENVLILAGDHLYRMDYMDLIQSHVDRNADITVSCAAVGNSRASDYGLVKVDDRGRIIQFSEKPKGDDMTAMQADTSLLGLSPPDALKSPYIASMGVYVFKTDVLLNLLKCRHPTSNDFGSEIIPAAVRDHNVQSYFFRDYWEDIGTIKSFYDANLALTEESHEFEFYDPKTPIYTSPGFLPPTKIDKSRIVDAIISHGCFLRECTVQHSIVGERSRLDYGVEIQDTVMMGADYYQTESEIASLLAEGKVPIGIGRNTKIRNCIIDKNAKIGKDVIIKNKDDVQEADRPEDGFYIRSGITIIAEKATIEDGTVI

SEQ ID NO: 17423 - protein, 515 aa, Phaseolus vulgaris
MASMASIGSLNVPCSSSSSSSNGGRKILPRALSFSASQLYGDKISTDSVSVAPKRVRNPVVVSPKAVSDSQNSQTCLDPDASKSVLGIILGGGAGTRLYPLTKKRAKPAVPLGANYRLIDIPVSNCLNSNVSKIYVLTQFNSASLNRHLSRAYASNMGGYKNEGFVEVLAAQQSPENPNWFQGTADAVRQYLWLFEEHNVLEYLVLAGDHLYRMDYEKFIQVHRESDADITVAALPMDENRATAFGLMKIDEEGRIIEFAEKPKGEQLKAMKVDTTIFGLDDERAKEMPYIASMGIYVVSKNVMLNLLREKFPAANDFGSEVIPGATSIGLRVQAYLYDGYWEDIGTIEAFYNANLGITKKPVPDFSFYGRSSPIYTQPRYLPPSKMLDADVTDSVIGEGCVIKNCKIHHSVVGLRSCISEGAIIEDTLLMGADYYETDADKRFLAAKGSVPIGIGRNSHVKRAIIDKNARIGENVKILNSDNVQEAARETDGYFIKSGIVTVIKDALIPSGTVI

SEQ ID NO: 17424 - protein, 274 aa, Bacillus subtilis subsp. subtilis str. 168
MTAFWGEVIGTMLLIIFGAGVCAGVNLKKSLSFQSGWIVVVFGWGLGVAMAAYAVGGISGAHLNPALTIALAFVGDFPWKEVPVYIAAQMIGAIIGAVIIYLHYLPHWKSTDDPAAKLGVFSTGPSIPHTFANVLSEVIGTFVLVLGILAIGANQFTEGLNPLIVGFLIVAIGISLGGTTGYAINPARDLGPRIAHAFLPIPGKGSSNWKYAWVPVVGPILGGSFGGVFYNAAFKGHITSSFWIVSVILVVVLLGLYVYTKSHSAKTLSNSKYI

SEQ ID NO: 17425 - protein, 246 aa, Vitis labrusca x Vitis vinifera
MTLVGLFLVGFLSMVSSVHGQGWINAHATFYGGGDASGTMGGACGYGNLYSEGYGTNTAALSTALFNNGLSCGSCYEIKCVNDGKWCLPGSIVITATNFCPPNNALPNNAGGWCNPPLHHFDLSQPVFQHIAQYRAGIVPVSYRRVPCRRRGGIRFTINGHSYFNLVLITNVGGAGDVHAVAIKGSRTGWQSMSRNWGQNWQSNTYLNGQSLSFKVTTSNGHTIVSYNCVPAHWSFGQTFSGAQFR

SEQ ID NO: 17426 - protein, 396 aa, Fusobacterium nucleatum subsp. nucleatum ATCC 25586
MRISDRVKNMKYSAVRKLAPLAAEAEKKGIKVYRLNIGQPNIETPKLFFEGLKNIPDHVIRYADSRGISILLEQVIEVYARDGHILKKEDIIVTEGGSEALTFAMLAICNPNDEVLIPEPFYSNYKSFLDIAGAKIIPIPTDIKNDFALPKKEEIQKLITSKTKAILYSNPCNPTGKVYTEEEVKLLANLAAENDLFVIADEPYREFIYDDNDKHYSLLDIEKAKENVIIIDSVSKHYSACGARVGFLISKNKDFMTYIMKLCQARLAAPTVEQYAVASLMKAPKEYFKEIKEIYKRRRDIIVNSLNKIEGVTCSTPKGAIYAFAKLPVESSEDFCKWLLTEFVYDNSTVMLAPGEGFYETEGLGKNEVRFSFCVGENDIEKAMRVLEEALKVYKK

SEQ ID NO: 17427 - protein, 142 aa, Glycine max
  unsure (1)..(142): unsure at all Xaa locations
GYGSQHTNYDITSIASNGGRVQCMQVWPPGGXKKVETVSSLPDLDDAQLAXEVKYLLRKGWIPCLEFELKHGFVYREHNRSPGYYDGRYWTMCEAAMFGCTDASQVSQELQEPRLHTLRLDAFMRFRHVRRALCMSLIAYMP

SEQ ID NO: 17428 - protein, 202 aa, Triticum aestivum
  unsure (1)..(202): unsure at all Xaa locations
MESSTADAGDKHLGSYLTWGGTVSQSKKGDTKFPEGLSLLATYLGRSVQKNEELLGSNGIKEAATIFHGQKVPDLSIQLYAERIFKYAECSPSCFVLALVYLERYLQQPNVYMTLFSVHRLLITSVVVAAKFTDDAFFNNAFYARVGGISTIEMNRLELDLLFNLDFRLKVNLRTFXSYCLHLEKHAPVFTEKLAVQVHCVR

SEQ ID NO: 17429 - protein, 253 aa, Ralstonia eutropha JMP134
MEYIDMKLKDKVAIVTGGASGIGEATVRLFASQGASVVIADRSALGEKLARELSESSLAAHYSEVDVSREDDTRRLIDDTVSRFGRLDIMVANAGIAHPSAPVEDVSVEQWQQMIDVNLTGVFLSNKLAIVQMKKQGTGGAIVNMASILGHVGMPGAASYNAAKGGVVNLTRSLGVSHAQDGIRVNAVCPGFVATPLIERATEEARARLVAAHPIGRLGHADEVAKAVLFLASDDASFIVGTSLMVDGGYCAQ

SEQ ID NO: 17430 - protein, 251 aa, Ralstonia eutropha JMP134
MRLQGKVAILTGAAGGIGRATALGFAREGASIVVTDINRDGAQEVADTINAAGGRAMALAHDVGCETQWTRVVDAAVEAFGTVDVLFNNAGIFVLKPLAETTLDEWNRLMAINVTGVFLGMKHVMPLMARAGKGSVINVSSVAGLVGSPRSTMYSASKGAVRAMTKGAALEYAAKGVRVNSIHPGLIDTAMADYASGTAGRSKQDLGQVMSPMGRLGTADEVGGLALFLASDESSYMNGAELVLDGGFTAA

SEQ ID NO: 17431 - protein, 182 aa, Mesembryanthemum crystallinum
MASSMVSSAAVATVNRTPAQASMVVPFNGLKSVAAFPVTKKNNDITSVATNGGRVQCMQVWPPLGKKKFETLSYLPPLSEESLMKEVQYLLNNGWVPCLEFEPTHGFVYREHGNTPGYYDGRYWTMWKLPMFGCTDPSQVVAELREAKKAYPEAFIRIIGFDNVRQVQCISFIAYKPASYDA

SEQ ID NO: 17432 - protein, 910 aa, Nostoc punctiforme
MTSTDKPNGLQQSLEQESLLHRMIKQIRRSLDLQEILTTTVTEVRSFLRADRVKVYRFDTSGSGEVIAESIHNERLPSLLGLRFPVHDIPEAAREMFLLAGQRSIVDVANHKIGLSPLQSTETGKHLQTNIYYRKVDPCHIQYLKAMGVQSSLVVPILDSDPQQSAKPKLWGLLVSHQSKPRKILKREIKVLQQVADQVAIAIAQSNLLTAALTQQKQEATINRVTTLLHKLPTIQLQGAIEEVITAFSGVGGRLYIEQSRELYTWGDQPTLPYELDSSIIEQHPTWQNWMTECQPGNIWATSDLYKEPHLRVLALAFRSTQIRGLMVIPLHYREQFIGVLSIFRAEFETEILWAGRCEQNRRQLLPQLSFEIWREQKKGLAPEWKPEDMTLAQALYDHFSMAIQQQQIYKEVQALNANLELRVQEQTAELEKSLLLTKVIKQITEQIRRTLDLQTTLQTIVSEVRSLLNSDRVVIFQLNSKSVIVEEMNGNWQSVLGVNAPPECFPNEHRDLYSQGRVRAINNVSTDSLSDCHREFLQSLQIQANLTVPINIGIELWGLLIAHECNTPRNWQDVEIDLLQQLGDQAAIAIQQAQLYEQTCKAETEARNKAGELGQTLHKLQETQTRLIQTEKMSGLGQLVAGIAHEINNPVNFIYGNLCHASDYIEQLLEILRLYQLHYPDPHSEISAAIEAVDFEFLVEDLPRIITSMQVGSDRIRSIVLSLRNFSRLDEAENKRVDLHEGIDNTLLILQHQLKGNGKFPGIQVIKDYGNIPKVECYAGQMNQVFMNIFSNAIDALEMGTAEEDKENKPSPVPTIRISTKISADNSRLLIRISDNGPGMIPEIKKRIFDPFYTTKPVGRGTGLGLAISYQIIVEKHGGIMECISEPGIGTEFWIEIPVKPPAKIVYSR

SEQ ID NO: 17433 - protein, 552 aa, Buchnera aphidicola str. Bp (Baizongia pistaciae)
MKKINPNNTESWKMLQNHFYEIKSFHIKELFKKDKNRFKKFSLKFDNRILVDYSKNRITSFTIKLLLKLANEMDLNNSIKSMFSGKIINETENRAVLHTALRNRSNSSIIHNGCNIMFDINKVLEKMKHFSNLVINRKWLGYTGKYITDIVNIGIGGSDLGPKMVIKALNSYRNHLNIHFVSNVDGANIFNVLKKLNPESTLFIIVSKTFTTQETIVNANTAKKWMLNAVNKNEFLDQHFIAVTTNAQEAMNFGIRYKNIFLFWDWVGGRFSLWSSVGLSIVLAVGFKNFEQLLDGAYMMDQHYLHTKFDNNIPVLLALIGVWYNNFFKSETEAIFFYDWNMNYFSSFLQQMNMESNGKNICRSGEFVNWQTGPIIWGEPGTNGQHAFYQLLHQGTKLIPSDFIISIIPKHPFKDHHKYLLSHFFAQTQALAFGKFNQKCNVHINDKKTFDERLSSISFHKVCKGNQPSNSIVLDQLNPYNLGILIALYEHKVFTQGVIFNIFSFDQWGVELGKLLAKEIFLNMNTTGSKNYEYDSSTNGLINFYKIHSNNT

SEQ ID NO: 17434 - protein, 546 aa, Salmonella enterica subsp. enterica serovar Typhi Ty2
MAIHNRAGQPAQQSDLINVAQLTAQYYVLKPEAGNAEHAVKFGTSGHRGSAGRHSFNEPHILAIAQAIAEERAKNGITGPCYVGKDTHALSEPAFISVLEVLAANGVDVIVQENNGFTPTPAVSNAILVHNKKGGPLADGIVITPSHNPPEDGGIKYNPPNGGPADTNVTKVVEDRANALLADGLQGVKRISLDAAMASGHVKAVDLVQPFVEGLADIVDMAAIQKAGLTLGVDPLGGSGIEYWKRIAEHYKLNLTLVNDQVDQTFRFMHLDKDGAIRMDCSSECAMAGLLALRDKFDLAFANDPDYDRHGIVTPAGLMNPNHYLAVAINYLFQHRPLWGKDVAVGKTLVSSAMIDRVVNDLGRKLVEVPVGFKWFVDGLFDGSFGFGGEESAGASFLRFDGTPWSTDKDGIIMCLLAAEITAVTGKNPQEHYNELAARFGAPSYNRLQAAATSAQKAALSKLSPEMVSASTLAGDPITARLTAAPGNGASIGGLKVMTDNGWFAARPSGTEDAYKIYCESFLGEEHRKQIEKEAVEIVSEVLKNA

SEQ ID NO: 17435 - protein, 469 aa, Corynebacterium glutamicum ATCC 13032
MTEHYDVVVLGAGPGGYVSAIRAAQLGKKVAVIEKQYWGGVCLNVGCIPSKSLIKNAEVAHTFTHEKKTFGINGEVTFNYEDAHKRSRGVSDKIVGGVHYLMKKNKIIEIHGLGNFKDAKTLEVTDGKDAGKTITFDDCIIATGSVVNTLRGVDFSENVVSFEEQILNPVAPKKMVIVGAGAIGMEFAYVLGNYGVDVTVIEFMDRVLPNEDAEVSKVIAKAYKKMGVKLLPGHATTAVRDNGDFVEVDYQKKGSDKTETLTVDRVMVSVGFRPRVEGFGLENTGVKLTERGAIEIDDYMRTNVDGIYAIGDVTAKLQLAHVAEAQGIVAAETIAGAETQTLGDYMMMPRATFCNPQVSSFGYTEEQAKEKWPDREIKVASFPFSANGKAVGLAETDGFAKIVADAEFGELLGAHLVGANASELINELVLAQNWDLTTEEISRSVHIHPTLSEAVKEAAHGISGHMINF

SEQ ID NO: 17436 - protein, 294 aa, Nicotiana tabacum
MDQYEKVEKIGEGTYGVVYKARDRVTNETIALKKIRLEQEDEGVPSTAIREISLLKEMQHANIVRLQDVVHSEKRLYLVFEYLDLDLKKHMDSSPEFSKDPRLVKMFLYQILRGIAYCHSHRVLHRDLKPQNLLIDRRTNALKLADFGLARAFGIPVRTFTHEVVTLWYRAPEILLGSRHYSTPVDVWSVGCIFAEMVTQRPLFPGDSEIDELFKIFRVMGTPNEDTWPGVTTLPDFKSAFPKWPSKDLATIVPNLDGAGLDLLDKMLRLDPSKRITARNALEHEYFKDIGYVP

SEQ ID NO: 17437 - protein, 519 aa, Triticum aestivum
  unsure (1)..(519): unsure at all Xaa locations
PPPPRPLDAADPAPAPSRPLPVVGTAKLAERPLHRHGDWRAPALAPPPPVIPPTTGASRGELPAGTPEDVDAAVAAARPALRTNRARVGTRAPGPLRAXSPREFGANVIELIWDLSSPGTLXWERPLGGAMWHADFXFPAFSAARGARKQSAEVAMLQIFKRNIFNEPIXGVPLVYLCYYHLLKVVSYVGCGLAARCSGVLKQSXLASLTCLELGDVCKEIGLPSGVLNIVTGLGHEAGAPLSSHPDVDKVAFTGSYATGQMIMVAAAPTVKPVTLELGDRSSXGKSPIVVFDDVDIDKAVEWTLFGCFWTNGQICSATSRLLIHKNIAKEFVDRMVAWSKNIKVSDPLEEGCRLGPVVSEGQYEKIKKFVANAKSEGATILTGGVRPKHLEKGFFIEPTIITDINTSMEIWREEVFGPVLCVKEFSTEEEAIELANDTHYGLAGAVISGDRERCQRLAEEIDAGCIWVNCSQPCFCQAPWGGNKRSGXEGGIDNYLSIKQVTEYTSDAPWGWYKAPAN

SEQ ID NO: 17438 - protein, 292 aa, Corynebacterium glutamicum ATCC 13032
MVPAAGMGTRFLPATKTIPKELLPVVDTPGIELVAKEAADLGATRLAIITAPNKDGILKHFEEFPELEATLEARGKTDQLNKVRAARELIATVPVVQEKPLGLGHAVGLAESVLDDDEDVVAVMLPDDLVLPFGVTERMAEVRAKFGGSVLAAIEVAEDEVSNYGVFKLGELDAESESEGIRRVVGMVEKPAPEDAPSRFAATGRYLLDRAIFDALRRIEPGAGGELQLTDAIALLIEEGHPVHIVVHEGKRHDLGNPAGYIPAVVYFGLRHAEYGSKIHRAVKEILAEFES

SEQ ID NO: 17439 - protein, 451 aa, GIBBERELLA ZEAE PH-1
MATQAAYGVEKIVGHSDNAITAQDVTSYQETGDHSQTMKALAWMGKNKVQMVDAPKPKVIEDRDVILRVTGSTVCGSDLHLLHGTVIQLSEGDILGHEFCGVVDEVGAGVTGIDVGGRYVASFQIACGDCFFCKQKLSSQCEKTNSNTTERAMYGGRTAGMFGYSHFTGGFAGGQAEYVRVPLGDVNLLKIPDDVPDEKALYLSDVLATSYNAVKDTAVYPNDSVAVFGAGPIGQMAGIFALKEGASKVIFVDTEPRLSFVRERWPAEHKDKLELVDFKQLSHGVTNKPTVVSRLKELTGNRGPDCAIECVAGEYPKGWMHTIELAIGAETDTSEIINEMIEGVRNYGRCGVTGVYVGYTNHFNIGSLMERGIRLIGNGQAPVHKYWDELLEMIQRGELDPAQMLSHRVRLEDLDKVYYKFEKKEDGMQKVFVETKFSFPRDPSTPALTTY

SEQ ID NO: 17440 - protein, 391 aa, Methylococcus capsulatus str. Bath
MAFKRMTDIDLAGKRVLIREDFNVPVKDGRVTSDARIRAALPTIRHALDAGAAVMLMSHLGRPTEGEYAEEFSMKPVADRLSELLGQPVTLVKDYLGGADPAVGSVVLFENVRFNKGEKKDDEVLARQLAALCDVYVMDAFGTAHRAEASTHGVGKYAPTACAGLLLATELDALGRALHDPARPLVAIVGGSKVSTKLTVLDSLSQVVDQLIVGGGIANTFIKAAGFNVGKSLYEEDLVAEARRLMEAAKAKGGEIPVPVDVVVGKRFDAAEPAMVKSVADIAEDDMILDIGPETSRRYAEFIGRAGTVVWNGPVGVFEFDQFGEGTRRLGLAIAESHAFSIAGGGDTLAAIDKYGIADRISYISTGGGAFLEFLEGKQLPAVAMLESRAD

SEQ ID NO: 17441 - protein, 191 aa, Oryza sativa (japonica cultivar-group)
MSGAAAAAARALPKAVTFVTGNAKKLEEVRAILGSSIPFQSLKLDLPELQGEPEDISKEKARMAASQVNGPVLVEDTCLCFNALKGLPGLNNLLLAYEDKSAFAMCIFSLALGPGEEPMTFVGKTAGKIVPARGPADFGWDPVFQPDGFDQTYAEMPKSVKNQISHRGKALALVKEHFAAANYKVQNDGSA

SEQ ID NO: 17442 - protein, 403 aa, Triticum aestivum
IRHEEALELRDGGSDYLGKGVSKAVNNVNSIIAPALVGKDPTAQTELDNFMVQQLDGTKNEWGWCKQKLGANAILAVSLAVCKAGASVKKIPLYQHIANLAGNKQLVLPVPAFNVINGGSHAGNKLAMQEFMILPTGATSFKEAMKMGVEVYHNLKSVIKKKYGQDATNVGDEGGFAPNIQENKEGLELLKTAIEKAGYTGKVVIGMDVAASEFYNDKDKTYDLNFKEENNDGSQKISGDSLKNVYKSFVSEYPIVSIEDPFDQDDWVHYAKMTEECGVEVQIVGDDLLVTNPTRVAKAIQEKSCNALLLKVNQIGSVTESIEAVKMSKHAGWGVMTSHRSGETEDTFIADLAVGLSTGQIKTGAPCRSERLAKYNQLLRIEEELGDAAVYAGLKFRAPVEPY

SEQ ID NO: 17443 - protein, 514 aa, Shigella flexneri 2a str. 2457T
MSVSKKPMVLVILDGYGYREEQQDNAIFSAKTPVMDALWANRPHTLIDASGLEVGLPDRQMGNSEVGHVNLGAGRIVYQDLTRLDVEIKDRAFFANPVLAGAVHKAKNAGKAVHIMGLLSAGGVHSHEDHIMAMVELAAERGAEKIYLHAFLDGRDTPPRSAESSLKKFEEKFAALGKGRVASIIGRYYAMDRDNRWDRVEKAYDLLTLAQGEFQADTAVAGLQAAYARDENDEFVKATVIRAEGQPDAAMEDGDALIFMNFRADRAREITRAFVNADFDGFARKKVVNVDFVMLTEYAADIKTAVAYPPASLVNTFGEWMAKNDKTQLRISETEKYAHVTFFFNGGVEESFKGEDRILINSPKVATYDLQPEMSSAELTEKLVAAIKSGKYDTIICNYPNGDMVGHTGVMEAAVKAVEALDHCVEEVAKAVESVGGQLLITADHGNAEQMRDPATGQAHTAHTNLPVPLIYVGDKNVKAVAGGKLSDIAPTMLSLMGMEIPQEMTGKPLFIVE

SEQ ID NO: 17444 - protein, 172 aa, Glycine max
  unsure (1)..(172): unsure at all Xaa locations
AYSMISSPTVTNVNPACAGMVAPFTGLKSIAGFPTRKTNNDITSIATNGGRVXCMHVWPPVGKKKFETLSYLPDLDDAQLAKEVEYLLKNGWIPCLKFELEHGFVYREHNRSPGYYDXRYWTMWNLPMTCCTDAYDVFKELQXANTAIANSFIQIIRFDNLLSVQCMSFDRY

SEQ ID NO: 17445 - protein, 181 aa, Arabidopsis thaliana
MASSMLSSAAVVTSPAQATMVAPFTGLKSSAAFPVTRKTNKDITSITSNGGRVSCMKVWPPIGKKKFETLSYLPDLSDVELAKEVDYLLRNKWIPCVEFELEHGFVYREHGNTPGYYDGRYWTMWKLPLFGCTDSAQVLKEVEECKKEYPGAFIRIIGFDNTRQVQCISFIAYKPPSFTEA

SEQ ID NO: 17446 - protein, 374 aa, Glycine max
MGEQTLGQAQSLIEPQPLPAPSSTAVPDGATVDSELNNVPRPTTSPATKIPLRPRKIRKVSPDPSTSESQTETPKPAKTGGRNTTKAAPPRALTVVPRIVARSLSCDGEVEIALRYLRNADPVLSPLIDIHQPPTFDNFHTPFLALTRSILYQQLAYKAGTSIYTRFIALCGGENGVVPETVLALTPQQLRQIGVSGRKASYLHDLARKYQNGILSDSAIVNMDDKSLFTMLTMVNGIGSWSVHMFMIFSLHRPDVLPINDLGVRKGVQLLYNLEDLPRPSQMDQLCDKWRPYRSVASWYMWRFVEAKGTPSSAVAVATGAGLQQQQHHQHHHQHQQQEQQQQQQQQQQHPPQPQLLDPINSMFNLGAACAWGQ

SEQ ID NO: 17447 - protein, 287 aa, Arthrobacter keyseri
MTTETIDTTASETPRLRLLHGHSIPRLGLGTWPMLEDECEAAVRVAVQSGYRLVDTAFQYRNEEAVGRGIRTAGVPRSELFISSKFNKESHSIDGVQRAYDESLRKLGLDHLDMFMCHWPVPALGKYVDAWKGLVKLLEEGRVKAIGVSNFKPSHLKEIIDATGVVPDVNQIQLSPDIARTEPRAVHRLLGTVTEAWSPIGRSSGLRANPIIIEIAQRLNKSPAQILLRWHVQQDIVPIPQASDPLWLTENLSVFDFSLSATEMAAIRQLDKGEGAARDSDLPENGH

SEQ ID NO: 17448 - protein, 181 aa, Arabidopsis thaliana
MASSMLSSTAVVTSPAQATMVAPFTGLKSSASFPVTRKANNDITSITSNGGRVSCMKVWPPIGKKKFETLSYLPDLSDVELAKEVDYLLRNKWIPCVEFELEHGFVYREHGNTPGYYDGRYWTMWKLPLFGCTDSAQVLKEVEECKKEYPGAFIRIIGFDNTRQVQCISFIAYKPPSFTEA

SEQ ID NO: 17449 - protein, 465 aa, Oryza sativa
MMMQGGRIARRGLSRLAAAVETAAVAPPRMADFNHVPLPYDGPSAAEIARKRAEFLSPSLFHFYSKPLNIVEGKMQYLFDERGRRYLDAFAGIATVCCGHCHPDVVGAIAAQAGRLQHSTVLYLNHAIADFAEALASKMPGDLKVVFFTNSGTEANELAIMMARLYTGSHDIISLRNSYHGNAAGTMGATAQKNWKFSVVQSGVHHAVNPDPYRGAFGSDAEKYARDVQEIIEFGTTGQVAGFISEAIQGVGGIVELSPGYLPLAYEAVRSAGGLCIADEVQAGFARVGSHFWGFETHGVVPDIVTMAKGIGNGIPLGAVVTTPEIAQVLTRRCYFNTFGGNPLCTAGGLAVLRVLEKEGLQANAHAVGSYLKDRLRALQDKHEIIGDVRGTGFMLGVELVTDRQLKTPAKDEICRAMEHMKEMGVLVGKGGFYGNVFRITPPLCFTKEDADFFVAVMDSALSKL

SEQ ID NO: 17450 - protein, 180 aa, Arabidopsis thaliana
MASSMLSSATMVASPAQATMVAPFNGLKSSAAFPATRKANNDITSITSNGGRVNCMQVWPPIGKKKFETLSYLPDLTDSELAKEVDYLIRNKWIPCVEFELEHGFVYREHGNSPGYYDGRYWTMWKLPLFGCTDSAQVLKEVEECKKEYPNAFIRIIGFDNTRQVQCISFVAYKPPSFTG

SEQ ID NO: 17451 - protein, 394 aa, Chromobacterium violaceum ATCC 12472
MASDAPHLPLHPETLAIRAGLETSQFNEHSQGLFLTSSFTYESAAQAAAMFLGEIDGYTYSRFTNPTVAAFQHRLAQMEGGERAIATATGMAAIQAIMMTLLQAGDHIVSSQSLFGSTTNLFANQLAKFAVATDFVDARDLSAWREALRPNTKLLFLETPSNPLTEVADIAAIADIAHAHGALLVVDNSFCSPALQQPLKLGADLVMHSATKFIDGHGRVMGGAVVGSDKLVEQVYLHVRAAGPSLAPFNAWTLLSGLETLHLRMEKHSANALELARWLEAQPNVERVYYPGLESHPQHELALRQQKSGGAVVSFVVKGGRKAAWKVVDAVRVISRTANLGDVKTTLTHPASTTHARVTQEARERAGIVEGLLRVSVGLENVRDLQQDLLRGLD

SEQ ID NO: 17452 - protein, 91 aa, Triticum aestivum
  unsure (1)..(91): unsure at all Xaa locations
MDRRQELCRNFQRGSCKYGSHCRFVHASSQQQQQAKAXNPFGFGLRSRQQQQQHSKQQQQQEAQPFGFGVQGNAAAQSKKLLASKAIQNKW

SEQ ID NO: 17453 - protein, 491 aa, Malus x domestica
MTSILMGYDIGVMSGASIYIEKDLKVTDTQIEIMIGVIEIYSLIGSAMAGKTSDWVGRRYTIVISGAIFFIGAILMGFSTNYTFLMCGRFVAGIGVGYALTIAPVYSAEVSPTSSRGFLTSFPEVFVNIGILLGYLSNYAFSFCPLDLGWRLMLGVGAIPSVGLAVGVLAMPESPRWLVMQGRLGEAKRVLDRTSDSKEESMLRLADIKEAAGIPEECNDDIVQVSGHSHGEGVWKELLVHPTPTVRHILIAAIGFHFFQQASGIDALVLYSPRVFAKAGITSTNQLLLCTVGVGLSKTVFTLVATFFLDRVGRRPLLLTSMAGMVGALVCLGTSLTMVDQHEGVRMTWAVILCLCCVLAYVGFFSSGIGPIAWVYSSEIFPLRLRAQGCGMGVAVNRLMSGILSMTFISLYKAITMGGTFFLYAAIGTVGWIFFFTMLPETQGRTLEDMEVLFGKFHKWRKANKLLEKKKRVAHGDIGTSDPDNRAHLLA

SEQ ID NO: 17454 - protein, 581 aa, Saccharomyces cerevisiae
MSKQFSHTTNDRRSSIIYSTSVGKAGLFTPADYIPQESEENLIEGEEQEGSEEEPSYTGNDDETEREGEYHSLLDANNSRTLQQEAWQQGYDSHDRKRLLDEERDLLIDNKLLSQHGNGGGDIESHGHGQAIGPDEEERPAEIANTWESAIESGQKISTTFKRETQVITMNALPLIFTFILQNSLSLASIFSVSHLGTKELGGVTLGSMTANITGLAAIQGLCTCLDTLCAQAYGAKNYHLVGVLVQRCAVITILAFLPMMYVWFVWSEKILALMIPERELCALAANYLRVTAFGVPGFILFECGKRFLQCQGIFHASTIVLFVCAPLNALMNYLLVWNDKIGIGYLGAPLSVVINYWLMTLGLLIYAMTTKHKERPLKCWNGIIPKEQAFKNWRKMINLAIPGVVMVEAEFLGFEVLTIFASHLGTDALGAQSIVATIASLAYQVPFSISVSTSTRVANFIGASLYDSCMITCRVSLLLSFVCSSMNMFVICRYKEQIASLFSTESAVVKMVVDTLPLLAFMQLFDAFNASTAGCLRGQGRQKNRWVHQPSRILLPRCAHGICVSIPVSSGCRRLMVGYN

SEQ ID NO: 17455 - protein, 416 aa, Escherichia coli
MESKVVVPAQGKKITLQNGKLNVPENPIIPYIEGDGIGVDVTPAMLKVVDAAVEKAYKGERKISWMEIYTGEKSTQVYGQDVWLPAETLDLIREYRVAIKGPLTTPVGGGIRSLNVALRQELDLYICLRPVRYYQGTPSPVKHPELTDMVIFRENSEDIFAGIEWKADSADAEKVIKFLREEMGVKKIRFPEHCGIGIKPCSEEGTKRLVRAAIEYAIANDRDSVTLVHKGNIMKFTEGAFKDWGYQLAREEFGGELIDGGPWLKVKNPNTGKEIVIKDVIADAFLQQILLRPAEYDVIACMNLNGDYISDALAAQVGGIGIAPGANIGDECALFEATHGTAPKYAGQDKVNPGSIILSAEMMLRHMGWTEAADLIVKGMEGAINAKTVTYDFERLMDGAKLLKCSEFGDAIIENM

SEQ ID NO: 17456 - protein, 487 aa, Sinorhizobium meliloti
MRAQPKASHFIDGEYVEDAAGTVIESIYPATGEIIARLHAATPGIVEKAIAAAKRAQPEWAAMSPTARGRILKRAAELMRQLNRELSELETLDTGKPIQETIVADPTSGADSFEFFGGVAPAALNGDYIPLGGDFAYTKRVPLGVCVGIGAWNYPQQIACWKGAPALVAGNAMVFKPSENTPLGALKIAEILIEAGLPKGLFNVIQGDRATGPLLVNHPDVAKVSLTGSVPTGKKVAGAAAAELKHVTMELGGKSPLIVFDDADLESAIGGAMLGNFYSTGQVCSNGTRVFVQRKIKEPFLARLKERTEAIVIGDPLDEATQLGPMVSAAQRDKVFSYIGKGKAEGARLVTGGGIPNNVSGEGTYIQPTVFADDTDGMTIAREEIFGPVMCVLDFDDEVEVIARANATEFGLSAGVFTADLTRAHRVADRLEAGTLWINTYNLCPVEIPFGGSKQSGFGRENSVAALNHYTELKTVYVGMGPVEAPY

SEQ ID NO: 17457 - protein, 575 aa, Zea mays
  unsure (1)..(575): unsure at all Xaa locations
MKNVAKCDTWCELQNPANHRVFERKLRPKPSGGGHVCRGGPQFVTETPRPAPSTRSPPRPAAPLPSARPSSPHSRKRRASYPILISPPFFSAAAGQQHATRPTPASDPLLTRHPEMATAAAFSVSSPAASAVAARSKVFGGGVNQARTRTGCRVGITRKNFGRVMMALAVDVSRFEGVPMAPPDPILGVSEAFKADKSELKLNLGVGAYRTEELQPYVLNVVKKAENLMLEKGENKEYLPIEGLAAFNKATAELLLGADNPVINQGLVATLQSLSGTGSLRLAAAFIQRYFPEAKVLISSPTWGNHKNIFNDARVPWSEYRYYDPKTVGLDFEGMIADIEAAPXGSFVLLHGCAHNPTGIDPTPEQWEKIADVIQEKKHMPFFDVAYQGFASGSLDEDAFSVRLFVKRGMEVFVAQSYSKNLGLYSERVGAINVVCSAPEVADRVKSQLKRLARPMYSNPPIHGAKIVANVVGDPIMFGEWKQEMELMAGRIKNVRQKLYDSLSAKDKSGKDWSFILRQIGMFSYTGLNKAQSDNMTDKWHIYMTKDGRISLAGLSLAKCDYLADAIIDSFHNVN

SEQ ID NO: 17458 - protein, 837 aa, Dechloromonas aromatica RCB
MKLNRRDFIKANAAAAAISAAGLSVPGAAVAQGKDEIRWDKAACRFCGTGCGVLVGTQDGRVVATQGDPDAPVNRGLNCIKGYFLSKIMYGADRLKTPMLRMKDGKYDKNGEFTPISWTKAFDIMEEKAKATMKAKGPNGLAMFGSGQWTIWEGYAASKLMKAGFRTNNLDPNARHCMASAVAGFMRTFGIDEPMGCYDDIEHADAFVLWGSNMAEMHPILWTRITDRKLSNKGVKVAVLSTFEHRSYELADIPMIFTPQTDLAILNYIANYIIQNGKVNQAFVDKNVNFKKSATDIGYGLRPTHALEKNATSNGYPDADGKPKGDTGKSDPITFDEFKKFVSEYTVEKVSKLSGVAEKDLKALAELYADPKVKVISFWTMGFNQHTRGTWANNLCYNIHLLTGKISEPGNSPFSLTGQPSACGTAREVGTFSHRLPADMVVTNPEHRKHTEELWGLPEGTIPDKVGYHAVAMARALKDGKVNFYWQQCNNNMQAGPNINEELYPGWRKPENFIVVSDPYPTVSAMAADLILPTAMWVEKEGAYGNAERRTQFWRQQVKAPGEARSDLWQLMEFSKRFKVEEVWPAELVAKAPKLKGKTLFDVLYANGVVNKYKLNETAAGFDNDDSKLIGFYIQKGLFEEYASFGRGHGHDLAPFDSYHQARGLRWPVVGGKETLWRFREGYDPYVKKGEGVKFYGHKDGKAVIFALPYQPPAESPDKEFDMWLSTGRVLEHWHTGTMTRRVPELYKAFPDAVVFMHPDDAKARGLQRGMEVKVASRRGEIQLRVETRGRNKPPRGLVFIPFFDAGRLVNKLTLDATCPISKETDYKKCAVKVTKV

SEQ ID NO: 17459 - protein, 243 aa, Fusobacterium nucleatum subsp. nucleatum ATCC 25586
MERKTIIGISSSVIVDESGSFAGYKRAYVNKDYVDAVVRAGGVPLIIPFTTNKEVIISQAQLIDGLILSGGHDVSPYNYGQEPSQKLGETFPERDTYEMILLEESKKRNIPILGICRGSQLINVAAGGTLYQDLSLIPGNILKHNQVNKPTLKTHIIKIEENSIISSVFGKETMVNSFHHQAIDKVADDFKVVARANDGVVEAIEHKTYKFLVAVQWHPEMLAVECEKARELFAKFVEEAKNK

SEQ ID NO: 17460 - protein, 545 aa, Candida albicans SC5314
MSSKIERIFSGPALKINTYLDKLPKIYNVFFIASISTIAGMMFGFDISSMSAFIGAEHYMRYFNSPGSNIQGFITSSMALGSFFGSIASSFVSEPFGRRLSLLTCAFFWMVGAAIQSSVQNRAQLIIGRIISGIGVGFGSAVAPVYGAELAPRKIRGLIGGMFQFFVTLGIMIMFYLSFGLGHINGVASFRIAWGLQIVPGLCLFLGCFFIPESPRWLAKQGQWEAAEEIVAKIQAHGDRENPDVLIEISEIKDQLLLEESSKQIGYATLFTKKYIQRTFTAIFAQIWQQLTGMNVMMYYIVYIFQMAGYSGNSNLVASSIQYVINTCVTVPALYFIDKVGRRPLLIGGATMMMAFQFGLAGILGQYSIPWPDSGNDSVNIRIPEDNKSASKGAIACCYLFVASFAFTWGVGIWVYCAEIWGDNRVAQRGNAISTSANWILNFAIAMYTPTGFKNISWKTYIIYGVFCFAMATHVYFGFPETKGKRLEEIGQMWEERVPAWRSRSWQPTVPIASDAELARKMEVEHEEDKLMNEDSNSESRENQA

SEQ ID NO: 17461 - protein, 496 aa, Triticum aestivum
  unsure (1)..(496): unsure at all Xaa locations
MDPCKFRPSSSFDTKTTTTNAGQPVWNDNEALTVGPRGPILLEDYHLLEKIAHFARERIPERVVHARGASAKGFFECTHDVTGLTCADFLRAPGARTPVIVRFSTVIHERGSARDDPRTRAGSPVKFYTREGNWDLLGNNFPVFFIRDGIKFPDVIHAFKPNPKSHVQEYWRVFDFLSHHPESLHTFFFLFDDVGIPTDYRHMDGFGVNTYTFVSRAGKAHYVKFHWXRPTCGVSCLMDDEATLVGGKNHSHATQDLYDSIDAGNFPEWKLFVQVIDPDDEDRFDFDPLDDTKTWPEDLVPLQPVGRLVLDRNVDNFFNENEQLAFGPGLVVPGIYYSDDKMLQCRVFAYADTQRYRLGPNYLMLPVNAPKCGFKNNHYDGAMNFMHRDEEVDYYPSRHAPLRHAEPASFPVPTRPVVGKREKTRIKKENDFVQPGERYRSWAPDRQDRFVRRFADALARPKVSHELRVIWIDFLSKCDKSCGMKVANRLNVKPSM

SEQ ID NO: 17462 - protein, 446 aa, Zea mays
MASRVASGLLRRRAVATLGLLRSHTHVRNYSSQLSALIPATSQCSNLTRRRYYLPNPSLYQVWSRSFASDSGDKFEAVVPFMGESVTDGTLANFLKKPGDRVEADEPIAQIETDKVTIDVASPEAGVIEKLIASEGDTVTPGTKVAIISKSAQPAETHVAPSEEATSKGSSPPKVEEKSRVEEKAPKVEPPKMQAPKPTAPLKTSPSEPQLPPKERERRVPMPRLRKRIANRLKDSQNTFAMLSTFNEVDMTNLMKLRSDYKDEFVTKHGVKLGLMSCFVKAAVSALQNQPIVNAVIDGDDIIYRDYVDVSVAVGTSKGLVVPVIRDADTMNFADIEKGINNLAKKANEGALSIDDMAGGTFTISNGGVYGSLLSTPIINPPQSSILGMHSIVQRPVVVNGDILARPMMFLALTYDHRLIDGREAVFFLRRIKDVVEDPRRLLLDI

SEQ ID NO: 17463 - protein, 248 aa, Methylococcus capsulatus str. Bath
MSENTTHFGFRTVPEHEKANMVRAVFDSVAGKYDVMNDLMSIGIHRLWKRIAVDLAHVRSGEKVLDLAGGTGDLTALFRKRVGARGFVVLSDINAEMLRRGRDRIIDDGLAESVAYAQIDAEKLPFPHDSFDCISIGFGLRNVTHKDKALNSMYRALKPGGRLIVLEFSEVHNELLRKAYDLYSFKVLPFLGKLVANDAESYRYLAESIRMHPNQEKLKAMMEKAGFERCEYFDLMQGIVAVHRGYKF

SEQ ID NO: 17464 - protein, 491 aa, Helicobacter pylori J99
MAQKTLLIITDGIGYRKDSDHNAFFHAKKPTYDLMFKTLPYSLIDTHGLSVGLPKGQMGNSEVGHMCIGAGRVLYQDLVRISLSLQNDELKNNPAFLNTIQKSHVVHLMGLMSDGGVHSHIEHFIALALECEKSHKKVCLHLITDGRDVAPKSALTYLKQMQNICNENIQIATISGRFYAMDRDNRFERIELAYNSLMGLNHTPLSPSEYIQSQYDKNITDEFIIPACFKNYCGMQDDESFIFINFRNDRAREIVSALGQKEFNSFKRQAFKKLHIATMTPYDNSFPYPVLFPKESVQNTLAEVVSQHNLTQSHIAETEKYAHVTFFINGGVETPFKNENRVLIQSPKVTTYDLKPEMSAKGVTLAVLEQMRLGTDLIIVNFANGDMVGHTGNFEASIKAVEAVDACLGEILSLAKELDYAMLLTSDHGNCERMKDENQNPLTNHTAGSVYCFVLGNGVKSIKNGALNNIASSVLKLMGIKAPATMDEPLF

SEQ ID NO: 17465 - protein, 311 aa, Vibrio cholerae
MKVAVIGAAGGIGQALALLLKNRLPAGSDLALYDIAPVTPGVAADLSHIPTPVTIKGYAGEDPTPALEGADVVLVSAGVARKPGMDRADLFNVNAGIVKALAEKIAVVCPKACVGIITNPVNTTVPIAAEVLKKAGVYDKRKLFGVTTLDVIRSETFVAALKDKDPGQVRVPVIGGHSGVTILPLLSQVEGVSFTDEEVAALTNRIQNAGTEVVEAKAGGGSATLSMGQAACRFGLALVKALQGESDVVEYAYVEGEGEYAPFFAQPIKLGKNGVEALLDIGKLSAYEQAALDGMLDTLKGDIQIGVEFVK

SEQ ID NO: 17466 - protein, 596 aa, Glycine max
MSSSFSVRFLAPLPPSSSSCFPTSSLPKTWLCAAATPTVVRNHHLLLEVEASRLEPRVEERDGFWVLKEEYRGGISPQEKVKLEKDPMKLFMEGGIEELAKMSLEEIESSKHTKDDIDVRLKWLGLFHRRKQHHGRFMMRLKLKLPNGVTTSAQTRYLASVIRKYGKDGCADVTTRQNWQIRGVVHPECPEILKGLDEVGLTSLQSPMDNVRNPVGNPLAGIDPDEIVDTRPYNNLLSQFITANSRGNPAMSNLPRKWNVCVVGSHDLFEHPHINDLAYMPANKDGRFGFNLLVGGFFSAKRCAEAIPLDAWVSADDVIPLCKAVLEAYRDLGFRGNRQKTRMMWLIDELGIEVFRSEVEKRMPGKKLERASKEELVKKQWERRDYLGVHPQKQEGLSYVGIHIPVGRVQADDMDELARLADEYATGELRLTVEQNIIIPNLDNNKIDGLLNEPLLKGRFSPEPSLLMKTLVACTGNQFCGQAIIETKERALKVTEEVERQVAVTRPVRMHWTGCPNTCGQVQVADIGFMGCMARDDNGKATEGVDIFLGGRIGSDSHLAQVYKKGVPCKDLVPVVVDILVKHFGAVLRNREEGED

SEQ ID NO: 17467 - protein, 311 aa, Vibrio cholerae
MKVAVIGAAGGIGQALALLLKNRLPAGSDLALYDIAPVTPGVAADLSHIPTPVTIKGYAGEDPTPALEGADVVLVSAGVARKPGMDRADLFNVNAGIVKALAEKIAVVCPKACVGIITNPVNTTVPIAAEVLKKAGVYDKRKLFGVTTLDVIRSETFVAALKDKDPGQVRVPVIGGHSGVTILPLLSQVEGVSFTDEEVAALTKRIQNAGTEVVEAKAGGGSATLSMGQAACRFGLALVKALQGESDVVEYAYVEGEGEYAPFFAQPIKLGKNGVEELLDIGKLSAYEQAALDGMLDTLKGDIQIGVEFVK

SEQ ID NO: 17468 - protein, 157 aa, Oceanobacillus iheyensis HTE831
MSIYEYQVEKSNGEEISLSQYQDNVLLIVNTATKCGFANQFEGLEELHQKYQDEGLRVLGFPSNQFNEQEPVDDENMEEACKVNFGVTFPLFKKIDVKGPNAAPLFKYLTEEQKGLLGSNVKWNFTKFLVDRNGNVVKRFAPKDKPAKIEDDIKALL

SEQ ID NO: 17469 - protein, 311 aa, Vibrio cholerae
MKVAVIGAAGGIGQALALLLKNRLPAGSDLALYDIAPVTPGVAADLSHIPTPVTIKGYAGEDPTPALEGADVVLVSAGVARKPGMDRADLFNVNAGIVKALAEKIAVVCPKACVGIITNPVNTTVPIAAEVLKKAGVYDKRKLFGVTTLDVIRSETFVAALKDKDPGQVRLPVIGGHSGVTILPLLSQVEGVSFTDEEVAALTKRIQNAGTEVVEAKAGGGSATLSMGQAACRFGLALVKALQGESDVVEYAYVEGEGEYAPFFAQPIKLGKNGVEALLDIGKLSAYEQAALDGMLDTLKGDIQIGVEFVK

SEQ ID NO: 17470 - protein, 438 aa, Corynebacterium glutamicum ATCC 13032
MQAKEEEKRAFDNDRAHVFHSWSAQDKISPKVWAAAEGSTLYDFDGNAFIDMGSQLVSANLGHNNPRLVEAIQRQAARLTNINPAFGNDVRSDVAAKIVSMARGEFSHVFFTNGGADAIEHSIRMARLHTGRNKILSAYRSYHGATGSAMMLTGEHRRLGNPTTDPDIYHFWAPFLHHSSFFATTQEEECERALKHLEDVIAFEGAGMIAAIVLEPVVGSSGIILPPAGYLNGVRELCNKHGILFIADEVMVGFGRTGKLFAYEHAGDDFQPDMITFAKGVNAGYAPLGGIVMTQSIRDTFGSEAYSGGLTYSGHPLAVAPAKAALEIYAEGEIIPRVARLGAELIEPRLRELAEENVAIADVRGIGFFWAVEFNADATAMAAGAAEFKERGVWPMISGNRFHIAPPLTTTDDELVALLDAVEAAAQAVELTFAGALF

SEQ ID NO: 17471 - protein, 57 aa, Zea mays
LACLQEDESGLLRPVDTKTLVHAQYRRRLLLRSAAAAAARIQKGLIRYLYIVIDLSR

SEQ ID NO: 17472 - protein, 352 aa, Nostoc sp. PCC 7120
MKAQVFRGVNQLSYEEIPLPILEPDEVLVQVQVVGLCQSDIKKIRYPLYEPPRIFGHETAGTIAAVGSQVQGWQVGQRVAVMHHIPCMRCAYCMNENFSMCDVYKNISTTAGFNASGGGFAEYVKVPGHIVENGGLIPIPDGISFEEASFVEPTNCCLKAVKKAQIAPGQTVLVTGAGPIGLMFVMLVKYFGAKAIATDLLPSRIEKALNVGAEAAFDARDPDLPAKVHALTNGLGVDVTLLAVPSEKAFFQALECTRKGGKILFFAEFPDELEIPINPNILYRREIDLMGSYSSSYRLQNLSADIVFNRRIDVQALISDRYPLKDLSAAVDQAIAPTPETYKILIYPKIGD

SEQ ID NO: 17473 - protein, 234 aa, Glycine soja
MFTLNHSSDLYHVSPELSSSLDTSSPASEGSRGVAFSDEEVRLAVRHPKKRAGRKKFRETRHPVYRGVRRRNSDKWVCEVREPNKKTRIWLGTFPTPEMAARAHDVAAMALRGRYACLNFADSAWRLPVPATAEAKDIQKAAAEAAQAFRPDQTLKNANTRQECVEAVAVAVADTTTATAQGVFYMEEEEQVLDMPELLRNMVLMSPTHCLGYEYEDADLDAQDAEVSLWNFSI

SEQ ID NO: 17474 - protein, 488 aa, Listeria seeligeri
MTDRRNLTTNQGVPIGDNQNSMTAGLKGPTLLEDYVLIEKLAHFDRERVPERVVHARGAGAHGKFVTKKSMKKYTKAQFLQEEGTETEVFARFSTVIHGQHSPETLRDPRGFSVKFYTEEGNYDFVGNNLPVFFIRDAIKFPDVIHSLKPDPRTNIQDGNRYWDFFSLTPEATTMITYLFSDEGTPASYREIRGSSVHAFKWINEEGKTVYVKLRWVPKAGIVNLSTDQAAQIQAKEFNHASRDLYEAIENGDYPEWDLYVQVLDPKDLDNYDFNPLDATKDWFEDVFPYEHVGTMTLNRNPDNIFAETESVGFNPGVLVPGMLPSEDRVLQGRLFSYSDTQRHRVGPNYLQLPINSPKTPVDNNQRDGQMPFKQQTSSINYEPNSYDTEPKENPAYIEPEQEIRGDISGRLVAEKPNNFGHAKEVWKRYSDAERAALVKNIVDDWEGVREDIKIRNLRNFYQVEPEFAERVAAGTGINLAEHVIDLK

SEQ ID NO: 17475 - protein, 591 aa, Triticum aestivum
  unsure (1)..(591): unsure at all Xaa locations
MCGILAVLGCADWSQAKRARVLSCSRRLKHRGPDWSGLFQCEGNFLAQQRLSVVSPLSGDQPLYNEDRTVXVVVANGEIYNHKKIRKQFRXKHTFTTGSDCEVIIPLYEVYGENFVNMLDGVFSFVLYDTRNKTYMAARDAVGVNPLYFGRGSDGSVWIASEMKALHEDCPKFELFPPGNLYSSAAGGFRRWYNPQWFAEHVPATAYQPLVLREAFEKAVIKRLMTDVPFGVLLSGGLDSSLVASVTKRHLIETEAAKKFGTELHSFVVGLEGSPDLKAAREVADYLGTIHHEFHFTVQDGIDAIEEVIYHNETYDVTTIRASTPMFLMARKIKALGVKMVLSGEGSDELLGGYLYFHFAPNKEEFHKETCRKVKALHQYDCLRANKATSAWGLEVRVPFLDKEFIDVAMSMDPEWKLYDANLGRIEKWVLRKAFDDEKEPYLPKHILYRQKEQFSDGVGYNWIDGLKAFTEQQVTDEMMKNAAEEYPYNTPINKEAYYYRMIFERLYPQDSARETVPWGPSIACSTPAAIEWVAQWKASNDPSGRHIASHNDAAPAHAHANWNGAVANGKANGNGTANGNANANGTLVPC

SEQ ID NO: 17476 - protein, 178 aa, Glycine max
  unsure (1)..(178): unsure at all Xaa locations
MAASDRTVLQFSSSSSSSSQSLSAKVHPLVIFXNICDCYVRRPDQAXRVIGTLLGSVLPDGTVDIRNSYAVPHNESIEQVALDIEYHHNMLISHQKVNPKEIIVGWYSTGLGVTGGSALIHEFYSREVPNPIHLTVDTGFTNGAGTIKAYVSNNXSLGERQXAAQFQEXPLDLRMVEA

SEQ ID NO: 17477 - protein, 324 aa, Magnaporthe grisea 70-15
MSNSLDQLKSSGTTVVCDSGDFATIGKYKPQDATTNPSLILAASKKAEYAKLIDDAIAYAKKQGGSVDDQVDASLDRLLVEFGKEILKIIPGKVSTEVDARFSFDTKASVDKALHIIKLYEAEGISKDRVLIKIASTWEGIKAAEILQRDHGINCNLTLMFSLVQAIAAAEADAFLISPFVGRILDWYKAAHKKEYKKEEDPGVESVKNIFNYYKKFGYKTIVMGASFRNTGEITELAGCDYLTISPNLLEELLNSSEAVPKKLDAQGAAALDIQKKTYISDEPLFRFDFNEDQMAVEKLREGISKFAADADTLKGILKEKIQA

SEQ ID NO: 17478 - protein, 393 aa, Zea mays
MTMERSQPQHQQSPPSPSSSSSCVSADTVLVPPGKRRRRAATAKANKRARKDPSDPPPAAGERSSVYRGVTRHRWTGRFEAHLWDKHYLAALHNKKKGRQVYLGAYDGEEAAARAYDLAALKYWGPEALLNFPVEDYSSEMPEMEAASREEYLASLRRRSSGFSRGVSKYRGVARHHHDGRWEARIGRVLGNKYLYLGTFDTQEEAAKAYDLAAIEYRGANAVTNFDISCYLDHPLFLAQLQQEQPQVVPALDQEPQADQREPETTAQEPVSSQAKTPADDNAEPDDIAEPLITVDNSVEESLWSPCMDYELDTMSRSNFGSSINLSEWFTDADFDSDLGCLFDGRSAVDGGSKGGVGVADFSLFEAGDGQLKDVLSDMEEGIQPPTIISVCN

SEQ ID NO: 17479 - protein, 167 aa, Triticum aestivum
  unsure (1)..(167): unsure at all Xaa locations
MAPTVMASSATSVAPFQGLKSTAGLPVSRRSNGASLGSVSNGGRIRCMQVWPIEGIKKFETLSYLPPLSTEALLKQVDYLIRFKWVPCLEFSKVGFIFREHNAXPGYYNGRYWXTMWKLPMFGMHRPTQVIXQVEEVKKEYXDAYVRIIGFDNIVRCMRQLIASSNG

SEQ ID NO: 17480 - protein, 440 aa, Schizosaccharomyces pombe [sequence omitted]

SEQ ID NO: 17481 - protein, 311 aa, Vibrio cholerae
MKVAVIGAAGGIGQALALLLKNRLPAGSDLALYDIAPVTPGVAADLSHIPTPVTIKGYAGEDTTPALEGADVVLVSAGVARKPGMDRADLFNVNAGIVKALAEKIAVVCPKACVGIITNPVNTTVPIAAEVLKKAGVYDKRKLFGVTTLDVIRSETFVAALKDKDPGQVRVPVIGGHSGVTILPLLSQVEGVSFTDEEVAALTKRIQNAGTEVVEAKAGGGSATLSMGQAACRFGLALVKALQGESDVVEYAYVEGEGEYAPFFAQPIKLGKNGVEELLDIGKLSAYEQAALDGMLDTLKGDIQIGVEFVK

SEQ ID NO: 17482 - protein, 324 aa, Hypocrea jecorina
MASPTLKLNSGYDMPQVGFGLWKVDNAVCADTVYNAIKAGYRLFDGACDYGNEKECGEGVARAIKDGLVKREDLFIVSKLWQTFHDEDKVEPITRRQLADWQIDYFDLFLVHFPAALEYVDPSVRYPPGWFYDGKSEVRWSKTTTLQQTWGAMERLVDKGLARSIGVSNYQAQSVYDALIYARIKPATLQIEHHPYLQQPDLVSLAQTEGIVVTAYSSFGPTGFMELDMPRAKSVAPLMDSPVIKALADKHRRTPAQVLLRWATQRGIAVIPKTSRPEVMAQNLDNTSFDLDSEDLAKIADMDLNIRFNKPTNYFSANKLYLFG

SEQ ID NO: 17483 - protein, 402 aa, Ehrlichia ruminantium
MSEVQVRAENLGGESILEAPIRVSVKIGDSIKQGDVLFIIETDKTSLEIVSPVDGTVSKVFIADEEIIERDQLLCTINVGELSHIVQSQTQDPKTDNGDIINDDIQTFIQKKDAPSAVKIMAENSIDKNQINGSGIGGRITKSDVLDHINVVSKDHSVLSEQCSITSHEKREERVKMSKIRQVIAARLKESQNTAAILTTFNEVDMKNVMDLRVQYRETFEKKYGVKLGFMSFFIKAVVLALKELPVINAEISGNEIIYKHYYDIGIAVGTDKGLVVPVMRDADKMSCAELELTLASLGKKAREGKLEVSDMAGATFTITNGGVYGSLLSTPIINPPQSGILGMHSIQKRPVVVNDNSIEIRPMMYIALSYDHRIVDGQGAVTFLVRVKQYIEDPSRMFLEI

SEQ ID NO: 17484 - protein, 404 aa, Nostoc sp. PCC 7120
MQFSQRLHPLQSNVFADMDKAKSLALAAGKELIDLSLGSSDLPAEAHVIEAIAKSLYDPSTHGYLLFNGTRDFRQAAANWYEQKFGVKVDPETEVLPLIGSQEGTAHLPLALLNPGDFALLLDPGYPSHAGGVYLASGQIYPMPLKAENDFLPVFADIPTDVLAQSRMMVLSYPHNPTAAIAPLSFFKEAVAFCQEHNIALVHDFPYVDMVFENAGNLNTNLPQSPIPNHQSLVPSILQADPDKSVSIEFFTLSKSYNMGGFRIGYAIGNAQMIQALRQIKAAVDFNQYRGILNGAIAALTGPQAGVEAAVSTFCQRRDAFINALHHIGWYVPTPKATMYIWAKLPSSWSQNSIEFCTQLVRQTGVAASPGAGFGKSGEGYVRFALVHEPSILKIAVERMSNFL

SEQ ID NO: 17485 - protein, 507 aa, Glycine max
  unsure (1)..(507): unsure at all Xaa locations
MASNDSDSQMKIVHGDAGYILEDVPHFADYIPNLPTYPNPLRSNPAYSVVKQYFVHMDDTVPPTRPVHKDSPRGVHFRRAGPRQKVYFKSDEVHACIVTCGGLCPGLNTVIREIVCGLSYMYGVNKGLGIDGGYRGFYSKNTITLTPKVVNDIHKRGGTILGTSRGGHDTGKIVDSIQDRGINQVYIIGGDGTQRGATVIYEEVRRRGLKVAIAGIPKTXDNDNSSINKSFGFNNAVEVGXHAINAAHVEAESIENGIGVVKLMGRYSGFIAMYATLASRDVDCCLIPESPFYLEGKGGLFEFIEKRLKENGHMVIVIAEGAGQDLLTESMQAMDQKDASGNKLLXDVGLWISHKIKDHFARKDKMPINLKYIDPTYMIRAIPSNASDNVYCTLLAQSAVHGAMAGYTGFTVGLVNGRQTYIPFIRINERQNKVVITDRMWARLLSSTNQPSFLSPKDLEEAKKAESPTQLLEENNCNDVGDAEKEQPPKDEQESGNHTDNGIKTQN

SEQ ID NO: 17486 - protein, 287 aa, Oryza sativa
  unsure (1)..(287): unsure at all Xaa locations
MAVDLMGFSPRGGCRPSVETEQLAFQEAAAAGLRSLELLVSSLSAGGEHHHRRRPQEKQSSPPLGEIADQAVSRFRKRQLRRRLPRRRRRXPSSSPVSPPLPPVTTQPAAAVKSLTLDFTNPAKVAAASVTSTSFFSSVTAGGDGSVSKGRSLVSSGKPPLAGGVKRKHPHPPCAAAGDGHGHGAGHAHAHGGCHCSKKRKQRVRRTVRVAAASARVADIPADEYSWRKYGQKPIKGSPYPRGYYRCSTVKGCPARKHVERAADDPATLVVTYEGDHRHSPPPPPLV

SEQ ID NO: 17487 - protein, 64 aa, Zea mays
  unsure (1)..(64): unsure at all Xaa locations
SDFLLLHASDLPAQQVTSPVQWETTVKTLMGKGLEKTXELGPGKVIAGILKRINKGASIENIGA

SEQ ID NO: 17488 - protein, 542 aa, Shigella flexneri 2a str. 2457T
MIAVVKLLPTGEDFASHVYPCYTSHRKETIMTNNPPSAQIKPGEYGFPIKLKARYDNFIGGEWVAPADGEYYQNLTPVTGQLLCEVASSGKRDIDLALDAAHKVKDKWAHTSVQDRAAILFKIADRMEQNLELLATAETWDNGKPIRETSAADVPLAIDHFRYFASCIRAQEGGISEVDSETVAYHFHEPLGVVGQIIPWNFPLLMASWKMAPALAAGNCVVLKPARLTPLSVLLLMEIVGDLLPPGVVNVVNGAGGEIGEYLATSKRIAKVAFTGSTEVGQQIMQYATQNIIPVTLELGGKSPNIFFADVMDEEDAFFDKALEGFALFAFNQGEVCTCPSRALVQESIYERFMERAIRRVESIRSGNPLDSVTQMGAQVSHGQLETILNYIDIGKKEGADVLTGGRRKLLEGELKDGYYLEPTILFGQNNMRVFQEEIFGPVLAVTTFKTMEEALELANDTQYGLGAGVWSRNGNLAYKMGRGIQAGRVWTNCYHAYPAHAAFGGYKQSGIGRETHKMMLEHYQQTKCLLVSYSDKPLGLF

SEQ ID NO: 17489 - protein, 335 aa, Geobacter sulfurreducens PCA
MDTTTQFKALVVEKTADKQFVREVRQRSIDDLPPGDLVVRVHYSSLNYKDALSATGHPGVTRQFPHTPGIDAAGEVVACDSGAFAPGDRVIVTGYDLGMETDGGFGQYIRIPSAWAVPLPEGLSLRESMALGTAGLTAALSVLGLERAGVTPDRGEILVTGATGGVGSIAVAILAAAGYRVTASTGKEFEEEYLRELGATEVIGREELTAGAEKALLAERWAGAVDVVGGPTLAAVLKSVKYGGVVTCCGLVGSPDLPVNVYPFILRGVSLLGIDSVQASPGIRREVWQRLAGAWKPAGLAGMVTECSLQGLEVMIQTILHGGITGRVVVNLLES

SEQ ID NO: 17490 - protein, 429 aa, Nostoc sp. PCC 7120 [sequence omitted]

SEQ ID NO: 17491 - protein, 402 aa, Methanosarcina acetivorans C2A
MRWIEMAIVAADTVWVLISSALVLLMLPGLALFYGGLVQRKNVLSSMMHSFVAMGVMALEWVIIGYSLAFGSGNGFIGSLEHVFLKGIDPYSVTGTIPTYAFIAFQGMFAIITPALISGAIVGRVKFKSYIAFIALWGLIVYAPVCHWVWGGGFLTGEALDFAGGTVVHITSGISSLAILTFLGKRRGYGIDSIKPHNVTLTLLGTGLLWFGWFGFNAGSSLAANEIAALAFITTLVAPAAAGFVWMTLEWIHLGRPTALGFATGVLAGLVAITPAAGFVTPMAAIPIGVVTSFICYQAVMLKGRLGYDDSLDAFGVHGVGGISGAILTGVFASIGSSGLLLGNSEQLMLQVEGVIATLVYASVCTLIIGFVLHKTIGLKVSESEENIGLDRTQHGEAAYNI

SEQ ID NO: 17492 - protein, 404 aa, Methanosarcina acetivorans C2A
MINTGSTGFMLLATSLVMLMTPGLAFFYGGLACKRNILGIMMQSFVSLGLTTILWFFVGYSLCFSGGEGAILGNLDKMFLNGIAPTDMFGDAGFPELVFVAYQMMFAIITPALITGAFANRITFKAYIIFLVVWQLFVYYPFVHMVWGGGLLAEMGVIDFAGGIVVHATAGFAALASVFYVGSRKYKDSKPNNIPLMAVGTALLWFGWYGFNAGSELNVDGITALAFLNSDIAASFAAITWMIIEWLRETKPKFVGLMTGAVAGLATITPAAGLVSMHVAALMGILGAIACYFAVHIKNRMQWDDALDVWGVHGIGGVTGTILLGIFASTAINPVGADGLFYGGTAFFIKELSVVLGASIYAFIFTYIMLMLINVITPVKVSDEEELAGLDISMHGECAYDAIH

SEQ ID NO: 17493 - protein, 358 aa, Fusobacterium nucleatum subsp. nucleatum ATCC 25586
MKNEKINILNLTQEELTELLVSLGLKKFYGKEVFIWLHKKITRSFDEMTNLSLKDREILKEKTYIPFFNLLKYQVSKIDKTEKFLFELEDGGTIETVLLRHKDSKNKEIRNTLCVSSQVGCPVKCSFCATGQSGYMRNLSVSEILNQIYTVERRLRKKGENLNNLVFMGMGEPLLNIDNLSKALSIISNENGINISKRKITISTSGVVSGIEKILLDKIPIELAISLHSAINEKRDKIIPINKNFPLEDLSAVLIEYQKQTKRRITFEYILIDNFNISETDANALADFIHQFDHVVNLIPYNEVEGAEHTRPSVKKINKFYIYLKNVRKVNVTLRQEKGSDIDGACGQLRQRNKKGDN

SEQ ID NO: 17494 - protein, 336 aa, GIBBERELLA ZEAE PH-1
MFAASRIQRRAFSATARDLSKVTVLGAAGGIGQPLSLLLKMNPRVTDLALYDIRGGPGVAADISHVNTKSSVKGYEPNAAGLKEALSGAEVVLIPAGVPRKPGMTRDDLFNTNASIVRDLAKAAAEAAPKAKLLIISNPVNSTVPIVKEVYKAAGVYNPKTLFGVTTLDVVRASRFVSEIKGTDPKDENITVVGGHSGVTIVPLFSQSNHPDLSSNAELVKRVQFGGDEVVKAKDGAGSATLSMAMAGARMADSVLRAVQGEKGVKEPAFVESPLYKDQGIEFFSSQVELGPEGVEKIHPLGKLDANEEKLVDAALVDLKKNIEKGVAFVASNPPK

SEQ ID NO: 17495 - protein, 383 aa, Zea mays
MRFSALLLIVALLCLGGGGGGRVTASTEFNFPAVFNFGDSNSDTGGRVAAGFESIFPPYGSSFFGGPAGRFCDGRLVIDFLMEAMDMPLLNAYLDSLGTPSFRTGVNFAQAGCSITPAKPTSVSPFSFGLQIKQFFAFKNKVTKLLSEGDMHSRYIPQQDYFSEGLYTFDIGQNDLAGEFYSRTEDQVIASIPTILLEFENGLKKLYDQGARKFWIHNTGPLGCLPQNIALFGKDPSQLDELHCVAKHNRAAKPFNLQLHALCTKLRAEFDGASITYVDIHTIKYSLIANYSRYGFEHATQACCGYGGPPLNYDGNVPCGHTVSLDGKMVTAKGCSDTTEFVNWDGIHYTEAANFHIASQILTGKYSDPPFVDKMPFVIKPRF

SEQ ID NO: 17496 - protein, 138 aa, Shorea scaberrima
EKNIPVLLGLLSIWNVSFLGYPARAILPYSQALEKFAPHIQQVSMESNGKGVSIDGVRLPYEAGEIDFGEPGTNGQHSFYQLIHQGRVIPCDFIGSAKSQQPIHLKGEVVSNHDELMSNFFAQPDALAFGKTPEELHK

SEQ ID NO: 17497 - protein, 666 aa, Phaseolus vulgaris
MAAISCILSLLLSSLIAQVSAQFNTEYCDNNKGNYTINSTYHNNLNTLLSTLSSHTQINYGFYNFSHGQNNDKVNAIGLCRGDVKPDECRRCLNDSALTITQLCPNQKEALLWLNTSKCLLRYSHRTIFGVMESSPGFYLTNVNNVTEADKFNQALSNLMRNPTVVAASGDSRLKYAADSAIAANFQTVYGLVQCTPDLSETDCNRCLDGAISEIPSCCGNKMGGRVLRPSCNIRFESAIFYDSNAKLDPDVTPPSPPPSSFTNTSPKESNNTITIVIAVVVSIVVVAVVSLLGLCIYLRRKKARKSPTVNQDDDDDDIEISQSLQFDFDTIRVATEDFSNSNKLGQGGFGAVYRGRLPNGQMIAVKRLSSGSSQGDTEFKNEVLLMAKLQHRNLVRLLGFCLEGRERLLIYEFVPNKSLDYFIFDPVKKAQLDWEMRYKIIRGIARGLLYLHEDSLLRIIHRDLKASNILLDEEMNPKIADFGMARLVLLDETHANTNRVVGTYGYMAPEYIMQGQFSVKSDIFSFGVLLLEIVSGQKNSGFRHGENVEDLLSFTWRNWRDGTAVNIVDPSLENNSRNEVMRCIHIGLLCVQENLTDRPTMATIMLMLSSYSLGLPIPSEPAFYANSTARSLPATSSWGHSSRATANQSAQESENENSITEPYPR

SEQ ID NO: 17498 - protein, 334 aa, Capsella rubella
MAVDLMRFPKIDDQTAIQEAASQGLQSMEHLIRVLSNRPEQQHTVDCSEITDFTVSKFKTVISLLNRTGHARFRRGPVRSSPVVSPPLPQIVKTAPIVSQPLRTTTNLSQTAPPPSSFVLPRQPRRSHSDFSKPTIFGSKSKSSDLEFSKENFSVSLNSSYMSSAITGDGSVSNGKIFLASAPSQPVTSSGKPPLAGHPYRKRCLEHEHSESFSGRVSGSGHGKCHCKKSRKNKMKRTVRVPAISAKIADIPPDEYSWRKYGQKPIKGSPHPRGYYKCSTYRGCPARKHVERALDDPTMLIVTYEGEHRHNQSAGGMHETISSSGVNDLVFASA

SEQ ID NO: 17499 - protein, 292 aa, Escherichia coli
MKVAVLGAAGGIGQALALLLKTQLPSGSELSLYDIAPVTPGVAVDLSHIPTAVKIKGFSGEDATPALEGADVVLISAGVARKPGMDRSDLFNVNAGIVKNLVQQVAKNCPKACIGIITNPVNTTVAIAAEVLKKAGVYDKNKLFGVTTLDIIRSNTFVAELKGKQPGEVEVPVIGGHSGVTILPLLSQVPGVSFTEQEVADLTKRIQNAGTEVVEAKAGGGSATLSMGQAAARFGLSLVRALQGEQGVVECAYVEGDGQYARFFSQPLLLGKNGVEECKSIGTLSAFEQNAL

SEQ ID NO: 17500 - protein, 631 aa, Exiguobacterium sp.
MKKYRVNVQGMTCSGCEQHVAVALENMGAKAIEVDFRRGEAVFELPDDVKVEDAKNAIADANYHPGEAEEFQSEQKTNLLKKYRLNVEGMTCTGCEEHIAVALENAGAKGIEVDFRRGEALFELPYDVDIDIAKTAITDAQYQPGEAEEIQVQSEKRTDVSLNDEGNYDYDYIIIGSGGAAFSSAIEAVALNAKVAMIERGTVGGTCVNVGCVPSKTLLRAGEINHLAKNNPFVGLHTSASNVDLAPLVKQKNDLVTEMRNEKYVNLIDDYGFELIKGEAKFVNENTVEVNGNQITAKRFLIATGASSTAPNIPGLDEVDYLTSTSLLELKKVPNRLTVIGSGYIGMELGQLFHNLGSEVTLIQRSERLLKEYDPEISEAITKALTEQGINLVTGATYERVEQDGDIKKVHVEINGKKRIIEAEQLLIATGRKPNTESLNLHAAGVEVGSRGEIVIDDYLKTTNSRIYSAGDVTLGPQFVYVAAYEGGLAARNAIGGLNQKVNLEVVPGVTFTSPSIATVGLTEQQAKEKGYEVKTSVLPLDAVPRALVNRETTGVFKLVADAKTLKVLGAHVVAENAGDVIYAATLAVKFGLTVGDLRETMAPYLTMAEGLKLAVLTFDKDVSKLSCCAG

SEQ ID NO: 17501 - protein, 333 aa, Capsella rubella
MAVDLMRFPKIDDQTAIQEAASQGLQSMEHLIRVLSNRPEQQHTVDCSEITDFTVSKFKTVISLLNRTGHARFRRGPVRSSPVVSPPLPQIVKTAPIVSQPLRTTTNLSQTAPPPSSFVLPRQPRRSHSDFSKPTIFGSKSKSSDLEFSKENFSVSLNSSYMSSAITGDGSVSNGKIFLASAPSQPVTSSGKPPLAGHPYRKRCLEHEHSESFSGRVSGSGHGKCHCKKRKNKMKRTVRVPAISAKIADIPPDEYSWRKYGQKPIKGSPHPRGYYKCSTYRGCPARKHVERALDDPTMLIVTYEGEHRHNQSAGGMHETISSSGVNDLVFASA

SEQ ID NO: 17502 - protein, 525 aa, Sandersonia aurantiaca
MCGILAVLGCSDDSQAKRVRVLELSRRLKHRGPDWSGLDHHGDCYLAHQRLAIIDPASGDQPLYNEDKTIIVTVNGEIYNHEELRKGLPGHTFRTGSDCEVIAHLYEEHGESFIHMLDGIFSFVLLDSRNNSFVAARDAIGVTPLYIGWGLDGSVWISSEMKGLNDDCEHFKFFPPGHLYSSKEGSFKRWYNPPWFSEVIPSVPFDPLALRKAFEDAVIKRLMTDVPFGVLLSGGLDSSLVASVTARYLEGTKAAELWGTQLHSFCVGLEGSPDLKAAKEVANFLGTIHHEFHFTVQDGIDAIEDVIYHVETYDVTTIRASTPMFLMSRKIKSLGVKMVISGEGSDEIFGGYLYFHKAPNKEELHLETCHKIKALHQYDCLRANKATSAWGLEARVPFLDKEFVNVAMSIDPEWKMIKPDIGRIEKWILRRAFDDEENPYLPKHILYRQKEQFSDGVGYSWIDGLKAHSALHVTDKMMLNAAHIYPHNTPTTKEAYYYRMIFERFFPQIDSPWRSKCGLQHSKSY

SEQ ID NO: 17503 - protein, 292 aa, Escherichia coli
MKVAVLGAAGGIGQALALLLKTQLPSGSELSLYDIAPVTPGVAVDLSHIPTAVKIKGFSGEDATPALEGADVVLISAGVARKPGMDRSDLFNVNAGIVKNLVQQVAKNCPKACIGIITNPVNTTVAIAAEVLKKAGVYDKNKLFGVTTLDIIRSNTFVAELKGKQPGEVEVPVIGGHSGVTILPLLSQVPGVSFTEQEVADLTKRIQNAGTEVVEAKAGGGSATLSMGQAAARFGLSLVRALQGEQGVVECAYVEGDGQYARFFSQPLLLGKNGVEERKSIGTLSAFEQNAL

SEQ ID NO: 17504 - protein, 176 aa, Manihot esculenta
MASSMLSTATVASINRVSPAQATMVAPFTGLKSTPVFPTTRKTNSDITSITSNGGKVQCMKVWPTLGMKKFETLSYLPPLTREQLAKPSCIGPCLEFELEHGLVYREHARVPGYYDGRYWTMWKLPMFGCTDAAQVLKELDELIKHHPDGYARIIGFDNVRQVQCISFLAYKPPGA

SEQ ID NO: 17505 - protein, 182 aa, Manihot esculenta
MASSMLSTATVASINRVSPAQATMVAPFTGLKSTPVFPTTRKTNSDITSITSNGGKVQCMKVWPTLGMKKFETLSYLPPLTREQLASEVEYLLRSGWIPCLEFELEHGLVYREHARVPGYYDGRYWTMWKLPMFGCTDAAQVLKELDELIKHHPDGYARIIGFDNVRQVQCISFLAYKPPGA

SEQ ID NO: 17506 - protein, 341 aa, Streptomyces coelicolor A3(2)
MRIGVLTSGGDCPGLNAVIRSVVHRAVVDHGDEVIGFRDGWKGLLECDYLKLDLDAVGGILARGGTILGSSRVRPEHLRDGVERARGHVEELGLDAIIPIGGEGTLKAARLLSDNGLPIVGVPKTIDNDIAVTDVTFGFDTAVTVATEALDRLKTTAESHQRVLIVEVMGRHTGWIALHSGMAAGAHAVVVPERPFDIDELTAKVGERFSAGKRFAIVVAAEGAKPKAGTMDFDEGGKDVYGHERFAGIARQLSIELEERLGKEARPVILGHVQRGGTPTAYDRVLATRFGWHAVEAVHRGEFGKMTALRGTDIEMVSLADAVESLKTVPDARYAEAECVL

SEQ ID NO: 17507 - protein, 72 aa, Triticum aestivum
  unsure (1)..(72): unsure at all Xaa locations
QFFFWVCGQVAFQIFSGMRLGNLYCDPLMVHGGHKITARQRWTPTQMQLQILESIFDQGNGTPSKQKIKDIX

SEQ ID NO: 17508 - protein, 174 aa, Triticum aestivum
MAPAVMASSATTVAPFQGLKSTAGLPVSRRSRGSLGSVSNGGRIRCMQVWPIEGIKKFETLSYLPPLSTEALLKQVDYLIRSKWVPCLEFSKVGFVFREHNSSPGYYDGRYWTMWKLPMFGCTDATQVLNEVEEVKKEYPDAYVRVIGFDNLRQVQCVSFIAFRPPGCEESGKA

SEQ ID NO: 17509 - protein, 648 aa, Zea mays
MIHPLVLSLPSPAIISRPRRHRHHTTTPSLPSHSRSLHHYRLLRVTPLVASCGDRRRIVRGASATMGLFTVTKKATTPFEGQKPGTSGLRKKVTVFQQPHYLQNFVQSTFNALPADQVKGATIVVSGDGRYFSKDAVQIITKMAAANGVRRVWVGQNSLMSTPAVSAVIRERIGADGSKATGAFILTASHNPGGPTEDFGIKYNMGNGGPAPESVTDKIFSNTTTISEYLISEDLPDVDISVVGVTSFSGPEGPFDVDVFDSSVNYIKLMKTIFDFEAIKKLLTSPKFTFCYDALHGVAGAYAKHIFVEELGADESSLLNCVPKEDFGGGHPDPNLTYAKELVERMGLGKSSSNVEPPEFGAAADGDADRNMILGKRFFVTPSDSVAIIAANAVQSIPYFASGLKGVARSMPTSAALDVVAKNLNLKFFEVPTGWKFFGNLMDAGMCSICGEESFGTGSDHIREKDGIWAVLAWLSIIAFKNKDNLGGDKLVTVEDIVRQHWATYGRHYYTRYDYENVDAGAAKELMANLVSMQSSLSDVNKLIKEIRSDVSEVVAADEFEYKDPVDGSVSKHQGIRYLFGDGSRLVFRLSGTGSVGATIRVYIEQYEKDSSKTGRDSQEALAPLVDVALKLSKMQEYTGRSAPTVIT

SEQ ID NO: 17510 - protein, 1010 aa, Geobacter sulfurreducens PCA
  unsure (1)..(1010): unsure at all Xaa locations
MGISRRQFLQGGALAGAALALSGTPGEASADSPDLRTKGTKVTTTVCPFCSVGCGLIVHTKDGKVINAEGDPQHPINQGSLCPKGGALFQIANNDKRLQKVMYRAPGSDKWEEKSWDWALDRIALRMKETRDKSFKKTELNKKDNKEYVVNRTDGMAFFGGAGLDNEECYLWTKFARAMGVGQLEHQARLXHSSTVAGLAASFGRGAMTNHWIDLKNSDVIFAIGCNPAENHPISFKWIEAALDNGAKLISVDPRFTRTSSKADIYAQIRPGTDIAFLGGMINYAIQNRMIHEEYVREYTNATFIVSEQFDFQDGMFCAFDDQEKVYDLKSWAYSTGADGKPKRDMSMKDPKCVYQLMKNHYKRYDIDTVCAITGTPKEDYLKVVKAFCATGRPDKSGTILYAMGITQSTHGSQNVRAVALLQMLLGNIGIAGGGVNALRGESNVQGSTDYGLLFHILPGYLKSPEFDNVDLKAYVEKWTPKTKDPKSANWWGNTPKYTVSLLKAWYGDNATAENDFCYDYLPKRMGNYSYVKIMEKMAKGELEGLVCMGMNPAVGGPDSVAAREALGKLKWLVTADLWETETSIFWKRPGVDPKSIQTEVFMLPAASSIEKEGSISNSGRWAQWRYAAVHPLGDSRSDLHIIDEFYKRIKALYLKDGGAFPEPLTKLAWNYGTGHEPDVHLVAKEINGYFTKDVTIKEKDKVLEFKKGDQVPMFKYLQDDGSTVSGCWIYCGSYTNEGNQMARRDPSDPTGLGLFPKWTWCWPVNRRIIYNRASVNPAGEPFNPKRPVIAWDALEKKWKGDVPDGPWPPMKDDKEGKYPFIMLPEGHGRLYALDMKDGPFPEHYEPVESPAKNLLSKVQTNPVVKVPSNVSSDTSKFPLIGTTYRVTEHWQAGAMTRSLPWLVELVPDMFVEISETLAKQKGISQGDMVKVSTERGSIQAKALVTSRLKPFNVQGKLIEQVGMPWHFGYAGLATGDSGNVLTPTVGCANTGIPEFKAFLCNIEKGGKAA

SEQ ID NO: 17511 - protein, 110 aa, Glycine max
  unsure (1)..(110): unsure at all Xaa locations
MASSMIWDRAVTTVNRAGAGMVAPFTGLKSMAGFPTRKTNNDITYIASNGGRVQCMHVWPPIGKRKSRLFSTWQNLVNPNLPKEVXFLLRKGWIPCLEFELEHGFLYRGP

SEQ ID NO: 17512 - protein, 212 aa, Corynebacterium efficiens YS-314
MRTLEQRRCTLHMVNNVEMAGEKDFNVPTNPYGDDIESVLISENKLKERIREMAARVSEDYRDSEEDLILVCVLKGAFYFLSDFSRELTIPSQSEFMAVSSYGNSTSSSGVVRILKDLDKDIEGRDVLIVEDIIDSGLTLSWLMRNLKNRHPKSLNVITLLRKPERLTANIDMYDIGFDIPNEFVVGYGLDFAERYRDLPYVGTLEPRVYSD

SEQ ID NO: 17513 - protein, 173 aa, Lemna gibba
MMVSTAAVARVRPAQTNMVGAFNGCRSSVAFPATRKANNDLSTLPSSGGRVSCMQVWPPEGLKKFETLSYLPPLSVEDLAKEVDYLLRNDWVPCIEFSKEGFVYRENHASPGYYDGRYWTMWKLPMFGCTDASQVIAEVEEAKKAYPEYFVRIIGFDNKRQVQCISFIAYKPT

SEQ ID NO: 17514 - protein, 287 aa, Arabidopsis thaliana
MAMQERCESLCSDELISSSDAFYLKTRKPYTITKQREKWTEAEHEKFVEALKLYGRAWRRIEEHVGTKTAVQIRSHAQKFFTKVARDFGVSSESIEIPPPRPKRKPMHPYPRKLVIPDAKEMVYAELTGSKLIQDEDNRSPTSVLSAHGSDGLGSIGSNSPNSSSAELSSHTEESLSLEAETKQSLKLFGKTFVVGDYNSSMSCDDSEDGKKKLYSETQSLQCSSSTSENAETEVVVSEFKRSERSAFSQLKSSVTEMNNMRGFMPYKKRVKVEENIDNVKLSYPLW

SEQ ID NO: 17515 - protein, 138 aa, Shorea scaberrima
EKNIPVLLGLLSIWNVSFLGYPARAILPYSQALEKFAPHIQQVSMESNGKGVSIDGVPLPYEAGEIDFGEPGTNGQHSFYQLIHQGRVIPCDFIGSAKSQQPIHLKGEVVSNHDELMSNFFAQPDALAFGKTPEELQK

SEQ ID NO: 17516 - protein, 428 aa, Bacteroides thetaiotaomicron VPI-5482
MERKNLHFETLQVHVGQEQADPATDARAVPIYQTTSYVFHNSAHAAARFGLQDPGNIYGRLTNSTQGVFEERVAVLEGGVAGLAVASGAAAITYAFENITRAGDHIVAAKTIYGGSYNLLAHTLPNYGVTTTFVDPSDLSNFEKAIQENTKAVFIETLGNPNSNIIDIEAVSEIAHRHKIPLIIDNTFGTPYLIRPIEHGADIVVHSATKFIGGHGSSLGGVIVDSGKFDWVASGKFPQLTEPDPSYHGVRFVDAAGPAAYVTRIRATLLRDTGATISPFNAFILLQGLETLSLRVERHVENALKVVNFLNNHPKVKKVNHPSLSDHPDHALYQRYFPNGAGSIFTFEVKGGQEEAHRFIDSLEIFSLLANVADVKSLVIHPASTTHSQLNAQELAEQEIYPGTVRLSIGTEHINDLIADLEQALAKI

SEQ ID NO: 17517 - protein, 177 aa, Lemna gibba
MASSMMASTAAVARAGPAQTNMVAPFNACRSSVAFPATRKANNDLSTLPSNGGRVSCMQVWPPEGLKKFETLSYLPPLSVEDLAKEVDYLLRNDWVPCIEFSKEGFVYRENHASPGYYDGRYWTMWKLPMFGCTDASQVIAEVEEAKKAYPEYFVRIIGFDNKRQVQCISFIAYKPT

SEQ ID NO: 17518 - protein, 138 aa, Shorea smithiana
EKNIPVLLGLLSIWNVSFLGYPARAILPYCQALEKFAPHIQQVSMESNGKGVSIDGVPLPYEAGEIDFGEPGTNGQHSFYQLIHQGRVIPCDFIGSAKSQQPIHLKGEVVSNHDELMSNFFAQPDALAFGKTPEELHK

SEQ ID NO: 17519 - protein, 273 aa, Corynebacterium glutamicum ATCC 13032
MGTMTTIAVIGGGQIGEALVSGLIAANMNPQNIRVTNRSEERGQELRDRYGILNMTDNSQAADEADVVFLCVKPKFIVEVLSEITGTLDNNSAQSVVVSMAAGISIAAMEESASAGLPVVRVMPNTPMLVGKGMSTVTKGRYVDAEQLEQVKDLLSTVGDVLEVAESDIDAVTAMSGSSPAYLFLVTEALIEAGVNLGLPRATAKKLAVASFEGAATMMKETGKEPSELRAGVSSPAGTTVAAIRELEESGIRGAFYRAAQACADRSEELGKR

SEQ ID NO: 17520 - protein, 206 aa, Aspergillus niger
MAGTRNYDFLIKLLLIGDSGVGKSCCLLRFSEDSFTPSFITTIGIDFKIRTIELDGKRVKLQIWDTAGQERFRTITTAYYRGAMGILLVYDVTDERSFQNIRTWFSNVEQHASEGVHKILIGNKCDWEEKRAVSTEQGQQLANELGIPFLEVSAKNNINIEKAFYDLASDIKKGMDTSKSEQVGSQGVSIDQQGSGLNGSAGGKCC

SEQ ID NO: 17521 - protein, 446 aa, Zea mays
  unsure (1)..(446): unsure at all Xaa locations
MAVPMSAQIAAAVTPARSMLQRRPLTVSVVHNEAFEKVKRTPKANQLYQNSRRSGLPRIGSXLRFTWCARNPTEHHKKKHRSLESRGADFDAERRLYSHAFKKSSSLLSRLMKHKFGWVFNKPVDPVTLGLHDYFTIIKHPMDLGTIRGRLSRGQYRNPKEFAEDVRLTFHNAMTYNPKGQDVHFMAEQLLGIFEAQWPEIEAEVNYLASCPPLPKKFPPPPIDLRFLERSDSMRHHVALDTNSRPISHTPTYTRTPSMKKPRAKDPNKRDMTIDEKRKLSENLQNLPPVKLDAVVQVIKNKNLSVKQHDDEIEVEIDSMDAETLWELDRFVSNYKKNLSKQKRKAERAMLARQDAELRAQHPIQQPQPTPVPQEPFGEKSPKQVVKDSLEGEQLPASAPEQNGENRQNASSSSNSSSSSSGSGSSSSGSDSDSSSSDGSDAGNSS

SEQ ID NO: 17522 - protein, 392 aa, Streptomyces coelicolor A3(2)
MSDSATTDSAGTGGERSASAPGDGTRAVRAGLPEPVKHEPTLPGPVFAAHFHLPGDPTGPYTYGRDENPTWTRLESAIGELEAPGEAGVETLVFASGMAAISSVLFSQLRAGDTAVLPDDGYQALPLVRAQLEAYGIEVRTAPTGRDAQLDVLDGAKLLWIETPSNPGLDVCDVRRLVEAAHAGGALVAVDNTLATPLGQRPLELGADFSVASGTKQLTGHGDVLLGYVAGRDAGAMAAVRRWRKIVGAIPGPMEAWLAHRSIATLQLRVDRQDSTALKVAEALRTRPEITGLRYPGLPDDPSHKVASQQMLRYGCVVSFTLPSRARADRFLDALRLVEGATSFGGVRSTAERRGRWGGDAVPEGFIRLSVGAEDPDDLVADLLRALDETTE

SEQ ID NO: 17523 - protein, 201 aa, Aspergillus niger
MNPEYDYLFKLLLIGDSGVGKSCLLLRFADDTYTESYISTIGVDFKIRTIELDGKTVKLQIWDTAGQERFRTITSSYYRGAHGICVVYDVTDMDSFNNVKQWLQEIDRYATEGVNKLLVGNKSDMEDKKVVEYTVAKEFADSLGIPFLETSAKNASNVEQAFLTMARQIKERMGTATVNNKPTVQVGQGQGVQSGSAGGCC

SEQ ID NO: 17524 - protein, 184 aa, Manihot esculenta
MATSMLSTATVASINRASPAQASMVAPFTGLKSTSAFTATTKTSADITSLASNGGRVQCMQVWPTRGKKKFETLSYLPPLSREQLASEIDYLLRSGWIPCLEFELEHGFVYRAHGSLPGYYDGRYWTMWKLPMFGCTDSSQVLKELDELIKAHPDGFARIIGFDNVRQVQCISFIAYKPPGTDY

SEQ ID NO: 17525 - protein, 184 aa, Manihot esculenta
MATSMLSTATVASINRASPAQASMVAPFTGLKSTSAFPATTKTSADITSLASNGGRVQCMQVWPTRGKKKFETLSYLPPLSREQLASEIDYLLRSGWIPCLEFELEHGFVYRAHGSLPGYYDGRYWTMWKLPMFGCTDSSQVLKELDELIKAHPDGFARIIGFDNVRQVQCISFIAYKPPGTDY

SEQ ID NO: 17526 - protein, 292 aa, Escherichia coli
MKVAVLGAAGGIGQALALLLKTQLPSGSELSLYDIAPVTPGVAVDLSHIPTAVKIKGFSGEDATPALEGADVVLISAGVARKPGMDRSDLFNVNAGIVKNLVQQVAKTCPKACIGIITNPVNTTVAIAAEVLKKAGVYDKHKLFGVTTLDIIRSNTFVAELKGKQPGEVEVPVIGGHSGVTILPLLSQVPGVSFTEQEVADLTKRIQNAGTEVVEAKAGGGSATLSMGQAAARFGLSLVRALQGEQGVVECAYVEGDGQYARFFSQPLLLGKNGVEERKSIGTLSAFEQNAL

SEQ ID NO: 17527 - protein, 131 aa, Triticum aestivum
MAAVARAIVCEAAPPFFASLADYIESSRKSQDFETISGRLAMVAFAAAVAVEATTGDSLFKKLDTVQIEEATGLCLAVVASAATFAWVSSARGRIGQMLTLGCNSFVDGLIDNVVDVLFSDDQMQDWSDDV

SEQ ID NO: 17528 - protein, 281 aa, Oryza sativa
QVLKVFPYPINITTVQFAVGTVVALFMWITGILRRPKISGAQLFAILPLAVVHTMGNLFTNMSLGKVAVSFTHTIKAMEPFFSVLLSAIFLGELPTVWVILSLLPIVGGVALASLTEASFNWAGFWSAMASNVTFQSRNVLSKKLMVKKEESLDNINLFSIITVMAFFLLAPVAFLTEGIKITPTVLQSAGLNVKQVLTRSLLAALCFHAYQQVSYMILARVSPVTHSVGNCVKRVVVIVTSVLFFRTPVSPINSLGTAIALAGVFLYSQLKRLKPKPKAA

SEQ ID NO: 17529 - protein, 396 aa, Bacillus subtilis
MAVKVVMPKLGMAMKQGEVSIWNKKVGDPVEKGESIASIQSEKIEMEIEAPEKGTLIDIKVKEGEEVPPGTAICYIGDANESVQEEAGAPVAEDNMPQAVQPVKQENKPAASKKDRMKISPVARKIAEKAGLDLKQLKGTGPGGRIVKDDVTKALAEQKKDQAKPVSEQKAQEIPVTGMRKVIAARMQESLANSAQLTITMKADITKLATLQKQLSPTAEERYGTKTDDHSFLSQEPPVLALQAHPVLNSFYQNERIITHPHVHLGMAVALENGLVVPVIRHAEKLSLIELAQSISENAKKAREGRAGSEELQGSTFSITNLGAFGVEHFTPILNPPETGILGIGASYDTPVYQGEEIVRSTILPLSLTFDHRACDGAPAAAFLKAMKTYLEKPQH

SEQ ID NO: 17530 - protein, 406 aa, Zea mays
MERRQELCRNFQRGSCKYGSHCRFVHASSQQQQQQQQQQAKPNPFGFGLGSRQQQQQQSSFRAQFQQQQQQKPNPFGFGVQGGAAAQSRNAPGQAKPFQNKWVRDPSAPTKQQEAAQPPAAAHTSCTDPDSCRQQIAEDFKNETPLWKLTCYAHLRSGPCDITGDISFEELRANAYEQGRQGHPLQSIVEGEKKLKNAKLTDFNNFLNMPRLSVSQTPSFPTVASFPEVKNNSAFGVSQNNGPPVFSSFSQIGVTTNMGPGSRTTPGVPTNTLFGQSTQPSHPTFPAPTFGRSDMKFGVSGPFGSQISQQSSGSFQGSNMSSFGNFSKPHASYQQSPSSSSHHRDIDRQSQDLLSGIVVPTSATNEAPVEDNKNENQDDSIWLKEKWSIGEIPLGEPPQRHVSHVF

SEQ ID NO: 17531 - protein, 405 aa, Ralstonia eutropha JMP134
MGGYGNAAAANGGTAVANLTNSFNHSKAVAVSKLNGYVTSNSIAPVGNYASNSGNAQASGGTGGNGYGGTGGNGSGAVGGAGGAGGAGGAGGTATNGSATNGSATNYGAQAGDGGNGGRAVGWAGDGGNGRATGGGALSAAGTRGGSGGDASGRGGGALSASLGAGGGGGGAFSRGGSALGASAGFGGLAGSAGGATSANGAGNDSAGAGGAGGAATASGTAGAGSGTGGAATAGGGAGGAGTSTAGAATGGAGSGTGGAGGAGGTATATATTGATTGTGGAGGTQASVGGTGGAGGSATNGSATSSASNGSSTAGNGAVGAAGGAGGAGGAGAGGTGGVGNGAVGGAGGSGGYNAVSAGSFAMSNVMTSVGQTAAGIMIATQNNGAASLVQHSVNVQANLNVGH

SEQ ID NO: 17532 - protein, 207 aa, Campylobacter fetus
MVIVKKISAIEVLDSRGNPTIKTKVELCDGSIGEAIVPSGASTGKRERLELRDGGEAFGGKGVLKAIKNVNSMIAEEICGKDAYNQKAIDDAMLALDGTDNYSRIGANAVLGVSMAVARAAANSLNIPLYRYLGGANACTLPVPMFNIINGGAHANNSVDFQEFMIMPFGFSKFSNALRAATEVYQTLKKILNDLGHSTAVGDEGGF

SEQ ID NO: 17533 - protein, 473 aa, Claviceps purpurea
MASEVSVASSGSEHSGAQKCPFQDPGLSSMDQDSRLRDILSRFNREKIPERAVHARGAGAYGEFEVTHDVSDICDIDMLLGVGKKTPCVVRFSTTTLERGSAESVRDVKGMAIKHFTQDGNWDWVCLNIPMFFIRDPSKFPDMVHAQRPDPTTNVANPSRWWEFVCNNHETLHMVMFQFSDFGTMFDYRSMSGYAAHAYKWVMPDGSWKYVHWFLASDQGPNFETGHQAKQIGADDAESATRDLYQSLERGEYPSWTVKVQVVDPEDAPKLPFNILDVTKHWNLGNYPPDIDVIPGRTLGKLTLKKEPQDYFEEIEQLAFSPSRLVHGVEASEDPMLQARLFAYPDAQKHRLGPNNLDLPANRTKKFADGARPEKAEMAPQKVPSQEHADWVSQVKSSSWSEPNETDYKFPREFWKALPRLRGEAFQNSLVVNMAKSVSQVPVDMREKVYSTLALIADDLADRVRTMTEEIVE

SEQ ID NO: 17534 - protein, 473 aa, Thermoanaerobacter tengcongensis
MDEKVKIKEEIPEYITLEEALTLNKNQVKENYKEYINSVFVSMLSMLQFDKLFVRAKGVSVWDSEGNEYYDFLGGYGALNLGHNPDEVIEAVEKVKDMPNLLQASIGNLPGVLAHNLARVTPGNLKRSFFCNSGAEAVEGALKLAKIASGKKKIVYCENSFHGKSMGALSVTGRRKYQKYFEPLVPETVAVPFGDEKALEEALKEKDVAAFIVEPIQGEGGVIVPPEGYLRKARELCTKYEAYLIVDEIQTGFGRTGKMFACEHEEVVPDIMTLAKSLGGGVMPIGAYITTDEIWQKAYGTMEKALLHTSTFGGNTYACAAAIASIQAIIEKKLSEAAKEKGEYFLGRLKELKEKHPKLIKDVRGKGLLIGIEFNQPEGGLLDKLSGGAISKLSSEYIGSLIAAELQNKHRIITAYTLNNPNVIRLEPPLIVTKEQIDKVVDALDEILTRNSSFLGITVSGAKTVLGSLFKRQ

SEQ ID NO: 17535 - protein, 377 aa, Bacillus cereus ATCC 10987
MRAKTKLIHGIRIGEPSTGSVNVPIYQTSTYKQEAVGKHQGYEYSRTGNPTRAALEEMIAVLENGHAGFAFGSGMAAITATIMLFSKGDHVILTDDVYGGTYRVITKVLNRFGIEHTFVDTTNLEEVEEAIRPNTKAIYVETPTNPLLKITDIKKISTLAKEKDLLTIIDNTFMTPYWQSPISLGADIVLHSATKYLGGHSDVVAGLVVVNSPQLAEDLHFVQNSTGGILGPQDSFLLLRGLKTLGIRMEEHETNSRAIAEFLNNHPKVNKVYYPGLESHQNHELATEQANGFGAIISFDVDSEETLNKVLKKLQYFTLAESLGAVESLISIPSQMTHASIPADRRKELGITDTLIRISVGIEDGEDLIEDLAQALA

SEQ ID NO: 17536 - protein, 441 aa, Candida albicans SC5314
MLSRSIKSSLKRTTALARPTAAKSALKIANASSVRSLHIKNTSSYRPTPFLTFQRYASVSVKVPDMAESITEGTLAAFNKEVGDFVSQDETIATIETDKIDVEVNAPVSGTITEFLVDVDATVEVGQEIIKMEEGDAPAGGASASEAPAKKEEAPEKAKEESAPAAAPKKEETKKEEPKKESKPAPKKEESKKSTQSTTSAPTFTNFSRNEERVKMNRMRLRIAERLKESQNTAASLTTFNEVDMSNLMDFRKKYKDEFIEKTGIKLGFMGAFSKASALALKEIPAVNAAIENNDTLVFKDYADISIAVATPKGLVTPVVRNAESLSILGIEKEISNLGKKARDGKLTLEDMTGGTFTISNGGVFGSLYGTPIINMPQTAVLGLHGVKERPVTVNGQIVSRPMMYLALTYDHRVVDGREAVIFLRTIKELIEDPRKMLLLE

SEQ ID NO: 17537 - protein, 491 aa, Candida albicans SC5314
MLRSFKSIPANGKLAQFVRYASTKKYDVVVIGGGPGGYVAAIKAAQLGLNTACIEKRGALGGTCLNVGCIPSKSLLNNSHLLHQIQHEAKERGISIQGEVGVDFPKLMAAKEKAVKQLTGGIEMLFKKNKVDYLKGAGSFVNEKTVKVTPIDGSEAQEVEADHIIVATGSEPTPFPGIEIDEERIVTSTGILSLKEVPERLAIIGGGIIGLEMASVYARLGSKVTVIEFQNAIGAGMDAEVAKQSQKLLAKQGLDFKLGTKVVKGERDGEVVKIEVEDVKSGKKSDLEADVLLVAIGRRPFTEGLNFEAIGLEKDNKGRLIIDDQFKTKHDHIRVIGDVTFGPMLAHKAEEEGIAAAEYIKKGHGHVNYANIPSVMYTHPEVAWVGLNEEQLKEQGIKYKVGKFPFIANSRAKTNMDTDGFVKFIADAETQRVLGVHIIGPNAGEMIAEAGLALEYGASTEDISRTCHAHPTLSEAFKEAALATFDKPINF

SEQ ID NO: 17538 - protein, 373 aa, Saccharomyces kluyveri
MLRLSTRASLTARPFFQGSFRTMATASIPEKQKGIIFYENGGELKYEDIPVPKPKPNELLINVKYSGVCHTDLHAWKGDWPLPTKLPLVGGHEGAGVVVAMGENVKGWKIGDLAGIKWLNGSCLSCEYCEKSNESNCPHADLSGYTHDGSFQQYATADYVQAARIPEGTDLAEVSPILCAGVTVYKALKSANLKAGDWVAISGAAGGLGSLAVQYAKAMGYRVLGIDGGAEKGELVKKLGGEVFIDFTKHKNLVEAVQEATNGGPHGVINVSVSEAAMTASTQFVRPTGTVVLVGLPAGAVIKSEVFSHVVKSINIKGSYVGNRADTREAIDFFARGMVKSPIHVVGLSELPKVYELMEKGKILGRYVVDTAK

SEQ ID NO: 17539 - protein, 139 aa, Glycine max
MIPQQWASPCGNQCTNKYAALTKIPWRVFCKKGCDSDGETWEECLEDCNQICYKDPVLKDQQWSAYIDRSPGAASYSEECFHACVSGCGYKFEVKSEEADKVSPNRQLKPETKPKPQPKPKPQPVCPIDPPSDIPDTSA

SEQ ID NO: 17540 - protein, 292 aa, Escherichia coli
MKVAVLGAAGGIGQALALLLKTQLPSGSELSLYDIAPVTPGVAVDLSHIPTAVKIKGFSGEDATPALEGADVVLISAGVARKPGMDRSDLFNVNAGIVKNLVQQVAKTCPKACIGIITNPVNTTVAIAAEVLKKAGVYDKNKLFGVTTLDIIRSNTFVAELKGKQPGEVEVPVIGGHSGVTILPLLSQVLGVSFTEQEVADLTKRIQNAGTEVVEAKAGGGSATLSMGQAAARFGLSLVRALQGEQGVVECAYVEGDGQYARFFSQPLLLGKNGVEERKSIGTLSAFEQNAL

SEQ ID NO: 17541 - protein, 671 aa, Yersinia pestis CO92
MNPFIVADAESCIGCRSCEVACVVAHHEGQFPDKPEYFTPRVKVFKGDQCATAVFCHHCEDAPCASTCPNGAIVELNNRVQVIQEKCIGCKTCMIACPFGMMTVVTETVQPASHRLADVYRRTEAQKCDLCLDQPDGPACIKTCPTQALTLVDQQYLLHQQQQKRQHMALNEHNGRLFSRAVVQAASASSNKSIRDATPVNLLQRPRAPRLEPKKIPLAERKTGFAEIYLPFTESQIHEQAERCLECGDKTICQWTCPLHNAIPKWISLAHQGRIHEAAELSHQTSSLPEVCGRVCPQDRLCEQSCTLNDHDGAVTIGQIERHITETALATGWRPDLSQVKPSGKRVAIIGAGPAGLGCADILVRNGITPVVFDRYPEIGGLLTFGIPAFKLEKSVMTRRREIFTEMGVEFCLNTEIGRDITMENLLHDFDALFLGVGTYRSMRSGLENEDAQGVYDALPFLIGNTQHLMGYTANGAHPYVSMQDQRVVVLGGGDTAMDCVRTSLRQGASRVVCAYRRDEKNMPGSKREVKNAREEGAEFMFNLQPMSIVVDESGQVTGIKMVRTEMGQADAQGRRQALPITGSEHLIPADAVIMAFGFSPHRMSWLAEHNVVLDKHGRVVAPTISGYPYQTSNPKIFAGGDIVRGADLIVTAIAEGRKAAESIAYYLNVL

SEQ ID NO: 17542 - protein, 558 aa, Oryza sativa
MAETRRWELAAHRRLEKGKVVGVVVLDGWGEAAPDTFNCIHVADTPTLDALKKGGPERWRVIKAHGTAVGLPTDDDMGNSEVGHNALGAGQIYAQGAKLVDMALASGKIYEGEGFKYIQQSFENGTLHLIGLLSDGGVHSRIDQLQLLLKGASEHGAKRIRVHILTDGRDVLDGSSVKFVELIENDLAKLRDKGVDARIASGGGRMYVTMDRYENDWQVVKRGWDAQVLGEAPHKFQNALEAVKKLREDPKANDQYLPPFVIVDERGRPIGPIMDGDAVVTFNFRADRMVMLAKALEYESFDKFDRVRFPKIRYAGMLQYDGELKLPSHFLVAPPEIERTSGEYLARNGIRTYACSETVKFGHVTFFWNGNRSGYFHPNLEKYEEIPSDIGIPFNEQPKMKAVEIAKKTRDAILSRKFDQVRVNIANGDMVGHTGDIEATIVGCKAADEAVKIVLDAIEQVGGIFVVTADHGNAEDMVKRDKSGKPLRDKDGNVQPLTSHTLNPVPIAIGGPGLQPGVRFRSDLPSAGLANVAATVMNLHGFEAPDHYEPTLIEVVDK

SEQ ID NO: 17543 - protein, 781 aa, Magnaporthe grisea 70-15
MAPKKKIAVMTSGGDAPGMNAAVRAIVRMSIHLGCDAFCVYEGYEGLVQGGNFIRQMQAEDVRGWLSEGGTLIGTARCMAFYERPGRLTAAKNMVLNGIDALIICGGDGSLTGADKFRAEWPSLLEELVSKGELKEEQIAPYKHLNIVGLVGSIDNDLSGTDATIGCYSALSRICEMVDYIEATAASHSRAFVIEVMGRHCGWLALLAGVATGADFIFIPEHPQEGNWKEGMYAVVEKHRKLGKRKTIVIIAEGANDRNGKKITPEEVKDLLADKNGLALDTRITTLGHVQRGGRAVAYDRIIATQMGVEAVRAVIEATPETETCFIAVNENKIVRKPLMQAVKDTKKVATAIEAQDFDQAMSLRDSEFAEQYQSFQIMTTPEPALLLPKEKRMKIAFINVGAPAGGMNAAIRAGVLWCQSRGHEAIAIHNGFAGFARHHGDKPLGAVRPFDRLEVDGWASRGGSEIGTNREVPSQSGMELIAKLIGQYGFDALFVIGGFEAFQAVSELRRAQEEYPSLRIPMALLPATISNNVPGTEYSLGSDTALNALVDYSDMIKQSAAATRRRVFVIETQGGKCGYLATLAGMACGASAVYTPEEGISLDMLAADVAHLKEIFAHDKGQSRAGRLVLVNEKASNVYNAKLIADILREEAHGRFEARDSIPGHVQQGGVPSPMDRSRAVRLAIKCIQHLEQYGPKPHEKVKADPRSAGVIGIRGADVVMTPMKEVEDTETDWPNRRPLNAFWTEMKESVDILGSRGPYPRPEPTLKGLKAKDVKRGLE

SEQ ID NO: 17544 - protein, 246 aa, Daucus carota subsp. sativus
MGRGKVELKRIENKINRQVTFAKRRNGLLKKAYELSVLCDAEVALIIFSNRGKLYEFCSTSSMNKTLGRYHRCSYGALETGQTDRDTQSSYQEYIKLKAKVEALQQSQRHLLGEELGQLGTKELEELERQLDSTLRQVRSTKTQYMLDQLSDLQQKEQELVEINKALRNKLEENDVRIQSQWEAAERNNVAYRSHPAEHPPDHGVFESLECNNTMHMGYNSAMNDHQMASATPTQNASGVIPGWML

SEQ ID NO: 17545 - protein, 292 aa, Escherichia coli
MKVAVLGAAGGIGQALALLLKTQLPSGSELSLYDIAPVTPGVAVDLSHIPTAVKIKGFSGEDATPALEGADVVLISAGVARKPGMDRSDLFNVNAGIVKNLVQQVAKTCPKACIGIITNPVNTTVAIAAEVLKKAGVYDKNKLFGVTTLDIIRSNTFVAELKGKQLGEVEVPVIGGHSGVTILPLLSQVPGVSFTEQEVADLTKRIQNAGTEVVEAKAGGGSATLSMGQAAARFGLSLVRALQGEQGVVECAYVEGDGQYARFFSQPLLLGKNGVEERKSIGTLSAFEQNAL

SEQ ID NO: 17546 - protein, 671 aa, Triticum aestivum
MSSLVRLILTISLGLNLAALITTANDQFIYSGFSGSNLAVDDTATITPDGLLELTNGTAYQKGHAFHPAPFRLRDSTANGVGDGKVRSFSVAFVFGIVSAYPDFSAHGMAFVIAPRRNFSDALPAKYLGLTNVQNDGNASNSIFAVELDTIQSVEFKDINANHVGIDINGLQSLRSYNAGYYDDESGDFRGMKLISREAMQVWIDYHGERKEINVTLAPFDMAKPARPLLSASYDLSTVLTELVYLGFSAATGRVNSRHFVLGWSLGVSRQAPAIDMAKLPKLPRVGPKPRSKVLDIVLPIVTATFVLGLGGILVLVMRRRSRYAELREDWEVEFGPHRFLYKDLFRATDGFKDKHLLGAGGFGRVYRGVLETSKLEVAVKRVSHESRQGMREFIAEITSIGRIRHRNLVELLGYCRRKGELLLVYAYMPNGSLDKHLYNTREDQPTLNWALRFQTVKDVASGLLYLHERWEKVVIHRDIKASNVLLDKDMNAQLGDFGLARLYDHGADSQTTHVVGTMGYLAPELIRTGRASPLTDMFAFGIFLLEVACGQKPIKENAQGGQIALVDWVLEHWRDGTLMETVDARLQGEFDIDQAGLVLTLALMCSHLLASARPGIGQVMRYLTGVTPLPELTPTDVLTLMQNKGFDESAMSYPDLVSSFGTISTLSGGR

SEQ ID NO: 17547 - protein, 505 aa, Paracoccus denitrificans
MKVRAQIGMVLNLDKCIGCHTCSVTCKNVWTSREGVEYAWFNNVETKPGIGYPKDWENQRRWNGGWVRTRCGHLRPKQGGKWRILANIFANPDLPEIDDFYEPFDFDYDHLKSAPEMQAFPTARPRSKISGERMEKIEWGPNWEEILGGEFEKRSKDYNFEGIQKDIYGEYENTFMMYLPRLCEHCLNPACVASCPSGAIYKREEDGEELIDQDKCRGWRMCVSGCPYKKIYYNWSTGKSEKCILCYPRLESGQPTVCSETCVGRIRYLGLMLYDADKIAEAAASESEMDLYDAHVGVFLDPNDPEVIAAARAEGVPEDWIKGAQKSPIWKMAMEWKIAFPLHPEYRTLPMVWYVPPLSPIQNAAEGGKIAAQDDMPDVRSLRIPLRYLANMLTAGDEAPVAAALERMLAMRTNMRSKTLDGVVNLGVAKRVGLTPQQIDEMYQLLAIANYEDRFVIPTTHREIVEDAYDLRGGCGFTDGHGCSSGDTPSLFGGKKFRSPQEFIA

SEQ ID NO: 17548 - protein, 461 aa, Corynebacterium efficiens YS-314
MTETKHYDLIIIGTGSGNSIPGPEFEDKSIAIVEKGTFGGTCLNVGCIPTKMFVYTADIAREISDSSKYGIDATYNSVDWPSIVDRVFTRRIDLIAEGGEAYRRGPETPNIDVYDMHARFIGEKTIATGQAGEEKVISGDQIVIATGSRPFIPPVIKESGARYHTNEDIMRLPTLPSSLVIVGGGFIALEFAHVFSSLGTKVTLINRSEVLLRDADADISARIAKITRERVDVRMSTSVTGVTDNADGSVTVSLDSEDPITADVLLVATGRTPNGDQMDLDTAGIEMDGRRIKVDEYGRTTAPGVWALGDVSSPFKLKHVANAEMRAVRHNLLHPDALQTMPHDHVPSAVFTNPQIAQVGMTEAEARAAGHNLTIKVQNYGDVAYGWAMEDTTGFVKLIADRDSGRLLGAHLIGPQASTLIQQLITVMAFDLDVREVATRQYWIHPALPEVIENALLGLEF

SEQ ID NO: 17549 - protein, 142 aa, Triticum aestivum
  unsure (1)..(142): unsure at all Xaa locations
MAPTVMASSATSVAPFQGLKSTAGLPVSRRSNGASLGSVSNGGRIRCMQVWPIEGIKKFETLSYLPPLSTEALLKQVDYLIRSKWVPCLEFSKVGFIFREHNASPGYYDGRYWDKCWKXLPMFGCNERHNKLIKQGGGRSKE

SEQ ID NO: 17550 - protein, 359 aa, Arabidopsis thaliana
MATLVYFQFTFAAITTILVAGSVLGRMNIKAWMAFVPLWLIFSYTVGAYSIWGGGFLYQWGVIDYSGGYVIHLSSGVAGFVAAYWVGPRPKADRERFPPNNVLLMLAGAGLLWMGWSGFNGGAPYAANLTSSIAVLNTNLSAATSLLVWTTLDVIFFGKPSVIGAIQGMVTGLAGVTPGAGLIQTWAAIIIGVVSGTAPWASMMIIHKKSALLQKVDDTLAVFYTHAVAGLLGGIMTGLFAHPDLCVLVLPLPATRGAFYGGNGGKQLLKQLAGAAFIAVWNVVSTTIILLAIRVFIPLRMAEEELGIGDDAAHGEEAYALWGDGEKFDATRHVQQFERDQEAAHPSYVHGARGVTIVL

SEQ ID NO: 17551 - protein, 354 aa, Chromobacterium violaceum ATCC 12472
MKIAILPGDGIGPEIIAQAERVLEVLRRDGLKIETEHAPLGGAAYDQYGVPYPEATQKLAREADAVLLGAVGGPAYDKLDRPLRPERGLLAIRKDLNLFANLRPAILYPELANASTLKPEVVAGLDIMIVRELTGDIYFGQPRGIAVNELGEREAYNTMRYSESEVRRIAHVAFGIAMKRNRKLCSVDKANVLETTEFWKEIMIEVAKEYPQVELSHMYVDNAAMQLVRNPKQFDVMVTGNIFGDILSDEASMLTGSIGMLPSASLDQNNKGLYEPSHGSAPDIAGQNLANPLATILSAAMMLRYSFGQEAAARRVEDAVKKVLAQGYRTADIYEAGCEKVSCSGMGDAVVAAM

SEQ ID NO: 17552 - protein, 506 aa, Candida albicans SC5314
MLIDNKKLNLLETQTTNTEKELQEVDGEDEISYDTEDLSAPPTPSTIYNWRIVIIAITASFAAVIVGYDAGFIGGTVSLASFQGEFKMNELSPSQKTEINSNVVSVFQAGAFFGALFFYPIGEIWGRKLGLILSAFLLVFGAGISLEAKHSTGLASIYAGRVITGLGVGGCSGMAPIYISECSPAKIRGKLVGMWEMSWQIGGIVGYWINYGVLQNLPPSRKQWLIPFAIQLIPSGVFFIGTIFIPESPRFLVYKGQIDKAKVNLSQLRSIPTDHPYSVYEMENIIKDVEDKKSKLANDGFFAPILKLFLSKKLLYRLLLSTSLFPMQNGAGINAITYYSPAIFASFGITGSKAGLLSTGIFGILKAFAALVWMFCIVDRLGRRTALIYFSFPCSICMWYIGAYIKIAKPGLRVANGDTHQDAGGKAAQAMLYIWTIFYGSSWNGTPWVINSEIFSQEVRTLTQAINSMSNWFWAFIMGRFSGEAVKAIGYKFYFIFATCMAVFQL

SEQ ID NO: 17553 - protein, 404 aa, Nostoc sp. PCC 7120
MVYQPAAGARDLLPLDVAQKRWIEDKLQQVFHRWGYHRIITSTLERMDTLMAGEAIQRQMVIQLQNSEDEELGLRPELTASIARAVVTRMANLRHPQRLYYNANVFRRIWENRHNRQQEFYQAGVELLGVGGLLANAEVLLLAGNCLTALGLQDWHLILGEAGITRSLLDAFPINLRAKVRSAIAHLDRITIDTLPLTDELRERARIMLDLRGNSADVLQKVSSLNLDAEQQEAVNNLKSLVELLESGGKFPIILDLSLIQTIDYYTGLVFEIVNNTDSQARVLGRGGRYDQLLGLYHPQGENIPGIGFVLNIEDLYQVLLSTQQLPQETPASDWLVVPENPAAHSAAFAYAQKLRESPDLVRVELDLGSTDRATIKQYARDRSIAQIAWIKADGSPIIEKVSQ

SEQ ID NO: 17554 - protein, 444 aa, Arabidopsis thaliana
MATITVVKARQIFDSRGNPTVEVDIHTSNGIKVTAAVPSGASTGIYEALELRDGGSDYLGKGVSKAVGNVNNVIGPALIGKDPTQQTAIDNFMVHELDGTQNEWGWCKQKLGANAILAVSLAVCKAGAVVSGIPLYKHIANLAGNPKIVLPVPAFNVINGGSHAGNKLAMQEFMILPVGAASFKEAMKMGVEVYHHLKSVIKKKYGQDATNVGDEGGFAPNIQENKEGLELLKTAIEKAGYTGKVVIGMDVAASEFYSEDKTYDLNFKEENNNGSQKISGDALKDLYKSFVAEYPIVSIEDPFDQDDWEHYAKMTTECGTEVQIVGDDLLVTNPKRVAKAIAEKSCNALLLKVNQIGSVTESIEAVKMSKKAGWGVMTSHRSGETKDTFIADLAVGLSTGQIKTGAPCRSERLAKYNQLLRIEEELGSEAIYAGVNFRKPVEPY

SEQ ID NO: 17555 - protein, 422 aa, Escherichia coli CFT073
MTKDVALMFPGSGSQYVGMARWLYERYPQVRTLFDEASQITERDMAALCLSGTLVQLAEPTAMALAIYTTSVAHFVAWQQFLAQTGVHVNLRYMLGHSLGEYAALTCSGALSFSQALALVAMRSRLASEIAREMDASTTIIKQGNQALVAAACEVAERETRQQVGIACFNSPQQFMLSGQNSAIIAAEQYLLDHDRQVEVVPLIGGVPYHSPLLKPCGQQLRKALDRCEWRRPCCPVISNVNAQPYPDTVTPVQWLEQQLSQPVQWQRSLTYLTGHLSPIAIEIGPQSVLKNLLLENRYPAPVYAFDNRHDRAQLALVLGDNMAVKTDPEAVRRQRITLLTNALTATRHHRAADVAASAQLKELLSRFFERIQQIEQRGTSSEEDIAFLHELLEQGFQLKGSSQAEIDACHARLASDNGGQA

SEQ ID NO: 17556 - protein, 580 aa, Fusobacterium nucleatum subsp. nucleatum ATCC 25586
MEEYSKDNLNKYTNGDDNMFLDEYKKWLDSNMLSASEKEELKNIANDEKEIESRFYTDLSFGTAGMRGVRGIGRNRMNKYNIRKATQGLANYIIKATGEVGKQKGIAIAYDSRLDSVENALNTAMTLAGNGIKVYLFDGVRSTPELSFAVRELKAQAGIMITASHNPKEYNGYKVYWEDGAQIVDPQATGIVSSVEAVNIFNDIKLMEEKEAIDKGLLVYVGKKLDDRYIEEVKKSAINPNVENKDKVKFVYSPLHGVAARPVERVLKEMGYTNVYPVKEQEKPDGNFPTCDYANPEDTTVFKLSIELADKVGAKICIANDPDGDRVGLAVLDNDGKWFFPNGNQIGILFAEYILNYKKDIPKNGTMITTVVSTPLLDTIVKKNGKKALRVLTGFKYIGEKIRQFENKELDGTFLFGFEEAIGYLVGTHVRDKDAVVASMIIAEMATTFENNGSSIYNEIIKIYEKYGWRLETTVPITKKGKDGLEEIQKIMKSMRVKSHTEIAGVKVKEYRDYQKGVENLPKADVIQMVLEDETYLTVRPSGTEPKIKFYISVVDSDKKVAEEKLAKIKKEFINYAENL

SEQ ID NO: 17557 - protein, 241 aa, Prochlorococcus marinus subsp. pastoris str. CCMP1986
MLSKSLTKTKLIDPLILTLLQNIKVQRSKLNDLNCIEVDPKLSNIISNEEGKELYIENEFYKAKGFRKLHIEVAEFSKSLKILHCVFFPDPKYDIPIFGMDLVKVNELVSAAIVDLSPSSKNQNLKYDHLLSHIDKSVFKSKREIPIWGNIFSKNVFFASLKNESEKNAFCKIVDNYLSVLIQLSQSTSPDSDYEIIEERINYQKNYCVQQMKNEKTSLVLLKYFDKVWVDEYIKKVLFDF

SEQ ID NO: 17558 - protein, 568 aa, Glycine max
MASSALISDTQQWKDLKAHVEDVKKTHLRDLLSDDKRCQSMLVEFDDILLDYSRQQATPETIQKLFELAEAASLKEKINRMYSGEHINSTENRSVLHVALRASRDAVIQSDGKNVVPEVWKVLDKIQEFSERVRNGSWVGATGKALKDVVAVGIGGSFLGPLFVHTALQTDPEAVESARGRQLRFLANVDPIDVARNITGLNPETTLVVVVSKTFTTAETMLNARTLREWISSALGPSAVAKHMVAVSTNLTLVEKFGIDPKNAFAFWDWVGGRYSVCSAVGILPLSLQYGFSVIEKFLRGASSIDQHFYSQPFESNIPVLLGLLSIWNVTFLGYPARAILPYSQALEKFAPHIQQVSMESNGKGVSIDGVPLPFEAGEIDFGEPGTNGQHSFYQLIHQGRVIPCDFIGVVKSQQPVFLKGEVVSNHDELMSNYFAQSDALAYGKTAEQLQKENVSPHLIPHKTFSGNRPSLSLLLPSLNAYNIGQLLAIYEHRIAVEGFIWGINSFDQWGVELGKSLATQVRKQLNASRTKGEPVQGFNFSTTTMLTRYLQASSDVPADLPTVLPKI

SEQ ID NO: 17559 - protein, 367 aa, Psychrobacter sp. 273-4
MATILTLAGDGIGPEIMTQAIDVLNAVNNKFALGLTLESGLIGGVAVDATGEPLPEETLQRARAADAVLLGAVGGPKWDGIERSKRPERGLLKIRSELGLFANLRVAKLYPQLVNASSIKPEIISGLDLLIVRELTGGIYFGEPRGIRTLENGEQQGYNTMVYSTSEINRIGKVAFELAQTRAQAAGTPAKVCSIDKANVLEVTELWKQTMIELQQAEYSDVALSHMYADNACMQLIKDPKQFDVMVTGNLFGDILSDEAAMLTGSIGMLPSASLDEAGKGMYEPCHGSAPDIAGQDIANPLATILSVAMMLRYTFKQEVAAQAIEQAVSDVLDDGLRTVDILDRNEAGLIQVGCQQMGQAVLAKLL

SEQ ID NO: 17560 - protein, 155 aa, Glycine max
GWAGFNGGDPYAANTDSSMAVLNTNICAATSLLVWTWLDVIFFKKPSVIGAVQGMITGLVCITPGAGLVQGWAAIVMGVLSGSVPWFSMMVLGKKLKLFQMVDDTLAVFHTHAVAGLLGGILTGLFAEPRLCALFLPVTHSKRGVYGGPGGVQIP

SEQ ID NO: 17561 - protein, 166 aa, Sinorhizobium meliloti
MTGELTRREMLKAHAAGIAAATAGIALPAAAQPVPGGVEALQITWSKAPCRFCGTGCGVMVGVKEGQVVATHGDMQAEVNRGLNCIKGYFLSKIMYGTDRLKTPLLRKRNGAFAKDGEFEPVSWDEAFDVMAEQAKKVLKDKGPTAVGMFGSGQWTIFEGYAATKL

SEQ ID NO: 17562 - protein, 369 aa, Corynebacterium efficiens YS-314
MATPLPLVFSAPKRGMPPAHFADLSDEQRIEALSELGLPKFRLNQIARHYYGRLEADPMTMTDLPEAARAKVKDALFPTLMEPIRVVEADDENTQKTLWKLHDGTLLESVLMRYPDRATLCISSQAGCGMACPFCATGQGGLDRNLSVGEIVDQVRNAAATMQAEGGRLSNIVFMGMGEPLANYKRVVSAVRQITQPSPEGFGISQRSVTVSTVGLAPAIRKLADEDMSVTLAVSLHTPDDELRDELVPVNNRWSVAEVLDAARYYADKSGRRVSIEYALIRDVNDQGWRADMLGQKLHKALGSRVHVNLIPLNPTPGSKWDASPRERQDEFVRRVIAQGVPCTVRDTKGQEIAAACGQLAAEENSEEK

SEQ ID NO: 17563 - protein, 274 aa, Vigna unguiculata
MEIAPIPVDTYTLGFIGAGKMAESIARGAVRSGVLPPSRIRTAVHSNPARRTAFESFGVTVLSSNDEVVRQSNVVVLSVKPQLVKDVVSKLKPIITKDKLLVSVAAGVKLKDLQEWAGSDRFIRVMPNTPAAVGEAASVMSLGAAATEEDGNVIAKLFGSIGKIWRAEEKYFDGITGLSGSGPAYIYLAIEALADGGVAAGLPRDLSLSLASQTVLGAASMVTQSGKHPGQLKDDVTSPGGTTITGIHELENGGFRGTLMNAVVAAAKRSRELS

SEQ ID NO: 17564 - protein, 350 aa, Schizosaccharomyces pombe
MTIPDKQLAAVFHTHGGPENVKFEEVPVAEPGQDEVLVNIKYTGVCHTDLHALQGDWPLPAKMPLIGGHEGAGVVVKVGAGVTRLKIGDRVGVKWMNSSCGNCEYCMKAEETICPHIQLSGYTVDGTFQHYCIANATHATIIPESVPLEVAAPIMCAGITCYRALKESKVGPGEWICIPGAGGGLGHLAVQYAKAMAMRVVAIDTGDDKAELVKSFGAEVFLDFKKEADMIEAVKAATNGGAHGTLVLSTSPKSYEQAAGFARPGSTMVTVSMPAGAKLGADIFWLTVKMLKICGSHVGNRIDSIEALEYVSRGLVKPYYKVQPFSTLPDVYRLMHENKIAGRIVLDLSK

SEQ ID NO: 17565 - protein, 234 aa, Zea mays
  unsure (1)..(234): unsure at all Xaa locations
MASEAKDVGILAMDIYFPPNCVLQEELETHDGVSKGKYTIGLGQESMAFCTEVEDVISMSLTVVKSLLKNYNIDPKCIGRLEVGSETVIDKSKSIKTWLMQIFEESGNTDIEGVDSSNACYGGTAALFNCVNWVESKSWDGRYGLVVCTDSAVYAEGPARPTGGAAAIAMLIGPNAPICFESKYRGSHMAHVYDFYKPDLASEYPXVVDGKLSQTCYLMALDSCYNVFCKSMKN

SEQ ID NO: 17566 - protein, 380 aa, Schizosaccharomyces pombe
MQQSPTAGKIINCKAAVAWQPAAPLSIENVQVFPPRVHEVRIKIVNSGVCHTDAYTLSGKDPEGLFPVILGHEGAGIVESVGPQVTTVQVGDPVIALYTPECKTCKFCKSGKTNLCGRIRTTQGKGLMPDGTSRFSCNGNTLLHFMGCSTFSEYTVVADISVVAIERLAPLDSVCLLGCGITTGYGAATITADIKEGDSVAVFGLGSVGLAVIQGAVKKRAGRIFGIDVNPEKKNWAMSFGATDFINPNDLQSPIQDVLIHETDGGLDWTFDCTGNVHVMRSALEACHKGWGQSIVIGVAAAGQEISTRPFQLVTGRVWRGCAFGGVKGRSQLPDLVKEYLDHKLEIDKYITHRRPLKEINEAFTDMHNGNCIKTVLSIP

SEQ ID NO: 17567 - protein, 500 aa, Glycine max
MVVKFKDPRDACAAIVAESYRLWLQYETRTDDITVIIVHVNGLTESAVGQSASYGDVLRNPVPQVVEVTGSESPSTFGWSARNHRVRHDLSRARLRALENSLENGQSWVPPSSAHRKTWEEEAHIEQALHDHFLFRKLTDSQCHVLLDCMQRVEVQPGDIIVKQGGEGDCFYVVGSGEFEVSATQEEKDGEVPRVLQRYTAEKLSCFGELALMYNKPLQASVRAVTKGTLWALKREDFRGILMSSSACIPQVLCTCADRMYAGILLNTRLACPLSSILSSPFSESAAQFCAASVVIALEDLHKNGVLYRGVSPDVLMLEQTGHIQLVDFRFGKQLSGERTFTICGMADSLAPEIVLGKGHGFPADWWALGVLIYYMLRGEMPFGSWRENELDTVAKIAKRKLHLPETFSPEAVDLISKLLEVEESTRLGSQGPDSVKNHPWFNGIEWEGIRHHTFPVPQEIISRITQHLEVHSEDCSTGYLGSPLQEVKELNVPEWLEDW

SEQ ID NO: 17568 - protein, 168 aa, Oryza sativa
AAATAFRGRTRPEISVRRYAERIYRYAGCSPACFVVARVYLDRLAGRSPEEESSPSPSPPATAAAAVCVDSYSVHRLLITSVMVAAKFMDDIHYNNAYFARVGGVEVAEMNGLELELLFALRFRLNVTPATFATYCAALEGEMAADDGPLPSPSPSPEEEGNDRRQPP

SEQ ID NO: 17569 - protein, 558 aa, Mycobacterium tuberculosis CDC1551
MKVMAQMAMVMNLDKCIGCHTCSVTCKQAWTNRSGTEYVWFNNVETRPGVGYPRTYEDQERWRGGWVRDKKGRLRLRDGGRIHKLLRIFANPKLPTIGDYYEPWTYDYENLTSAPAGDTFPTAAPRSLISGNPMKVSWGSNWDDNLAGSPEIVPNDPVLKKVNQVNQEVKLKLEETFMFYLPRICEHCLNPSCVASCPSGAMYKRTEDGIVLVDQDRCRGWRMCVSGCPYKKVYFNHKTGKAEKCTLCYPRIEVGLPTVCSETCVGRLRYLGLVLYDVDQVLQAASVESDTDLYEAQRRILLDPHDPRVIAGARAEGIADEWIEAAQRSPVYALINTYRVALPLHPEYRTMPMVWYIPPLSPVVDAVSRDGHDGEDLGNLFGALDALRIPIAYLAELFTAGDTEVVAGVLRRLAAMRCYMRDINLGRETQPHIPESVGMTEEQIYQMYRLLAVAKYEERYVIPTSYVGELPAAAMTDDMGCSLSVDGGPGMYESGPFGQGSPTPVPIAVESFHALQHAGSAATGGAGRSRVNLLNWDPNGAAAGLFPEPQPSKDVVQR

SEQ ID NO: 17570 - protein, 410 aa, Sinorhizobium meliloti 1021
MTINATVKEAGFQPASRISSIGVSEILKIGARAAAMKREGKPVIILGAGEPDFDTPEHVKQAASDAIHRGETKYTALDGTPELKKAIREKFQRENGLAYELDEITVATGAKQILFNAMMASLDPGDEVIIPTPYWTSYSDIVHICEGKPVLIACDASSGFRLTAEKLEAAITPRTRWVLLNSPSNPSGAAYSAADYRPLLEVLLRHPHVWLLVDDMYEHIVYDGFRFVTPAQLEPGLKNRTLTVNGVSKAYAMTGWRIGYAGGPRELIKAMAVVQSQATSCPSSISQAASVAALNGPQDFLKERTESFQRRRDLVVNGLNAIDGLDCRVPEGAFYTFSGCAGVLGKVTPSGKRIKTDTDFCAYLLEDAHVAVVPGSAFGLSPFFRISYATSEAELKEALERIAAACDRLS

SEQ ID NO: 17571 - protein, 97 aa, Oryza sativa
MVSPPVIAVCFWEIIVPYLGTSIFIVFAIWFISGRCGGKLSKTPRPIVCSCAGKEYSKGDSRYVARDPATVTVEAITAVLEGPGLLLSVYGFSHLVF

SEQ ID NO: 17572 - protein, 1352 aa, Escherichia coli CFT073
MRRNCWYNPRCLSNVGPGNTLSTFIQGHNQYSDQPTLLTLRKANAAIDDEHMLHRTLAALWVRGENIDWRRFNQTALGKHIPLPDYPFEQTYYYRYGAALSGYRQYPNPLRRPQDEWLQRVLWRMHDTSLREAFYAPGELIIIISADGDKLQQTLMSSGVDSITMPLPISSEDDVWDNDRILTHFHDICALLAHKTYRQLHCLYAPGAEAGSSLTQSLSGLYRVARWCMHSTTPLASLTVLTHGAFRVQEEDNPEPTLAALSGAVNVFAQELHPTEVRLIDIDAQSSDENLNLLTQRLAPKQETVMALRQGMLYLRRFIPTRLLAHLPPQTGCIPGNVLWIIGGEKGIGRMIGEALAQREGVRVVLSSRTGYHHEAVQQDALDVIHCDVTQAEAVRACLATLLERYGRLDGVIFAADATTTLTLHQLSESALRDTLTVKERGTANVLHALAQRNLLDERLLLLFCNSLAAVNAEIGQTGYATASAYLDALAQQLRTRYKVNALSIGLDALREQGMLLDAINGSEYDVLRGLRPLMTGTLLQAYKQQGADTSYYARLSPESDWLLDEHRISGIATLPGTGYLALAYEALRHYFVQDQICIDELVFLAPLTVMDNCSVDVFVDISPNGQGVSVEVKSMTERFSGTLTTHARGRATRLMVDDNVVCDLTGLMREMHTITPPTKELSSTHFHYGPRWHSVQQLYGNTAQTQVFATLALPTVAANDTIALHPALLDIASSVVEQLPGFHTDSVPFLYQDLRLYRPLPNTLHVALTVNRHDEEGDSYAFTLYDMAGEMVARCAAMVKRKVQLHIQDVDDDTRLRVPSADNYQLRLAAEGEGAGKLALCPTPRLALGDSQVEIEVLATGLNFKDVLFTTGLLRQQPGEAPLQLGLECAGRITRVGKNVTEFAPGEDVMAVLNGGFVQYARVESDCVVRKPAHCRIEQAAALPIAYLTAYYALVVRANLQPGERVLIHSAAGGVGLAALHIAKRCGAQIFATAGSEQKRDYLLSLGVHAVADSHDEQFAATLLTASDGQGMDVILNSLTGRLLDASLALLAPLGRFLELGSKDIVEDKALPMRFFAQGGTFIPINFHAAHGAFSRYLQQIVAWIDDNTLPLLPCKSVPLPEVARAFATLTTPQHIGKVVVTHRTAAGMDRLNAMIAERRLGGYALSMSNAEVMRQLWPILNTRSPWAQLLLSPRAIDRLARGNRVDRGVPSAANDTITQQTVKKRPRPEIGVPYSPATREVERVLCQILEEYLGLDRVGIDDNYAELGATSLDMVQLSGQMARHYPQVSVVSLYNHATVRQLATFCQPPEGESNAPSPQPAVQTNTRANQIAKRALQIAKNTARSHTSLH

SEQ ID NO: 17573 - protein, 560 aa, Saccharomyces cerevisiae
MSEEAAYQEDTAVQNTPADALSPVESDSNSALSTPSNKAERDDMKDFDENHEESNNYVEIPKKPASAYVTVSICCLMVAFGGFVFGWDTGTISGFVAQTDFIRRFGMKHHDGTYYLSKVRTGLIVSIFNIGCAIGGIILAKLGDMYGRKMGLIVVVVIYIIGIIIQIASINKWYQYFIGRIISGLGVGGIAVLSPMLISEVSPKHIRGTLVSCYQLMITLGIFLGYCTNYGTKTYTNSVQWRVPLGLGFAWALFMIGGMTFVPESPRYLVEVGKIEEAKRSIALSNKVSADDPAVMAEVEVVQATVEAEKLAGNASWGEIFSTKTKVFQRLIMGAMIQSLQQLTGDNYFFYYGTTVFTAVGLEDSFETSIVLGIVNFASTFVGIFLVERYGRRRCLLWGAASMTACMVVFASVGVTRLWPNGKKNGSSKGAGNCMIVFTCFYLFCFATTWAPIPFVVNSETFPLRVKSKCMAIAQACNWIWGFLIGFFTPFISGAIDFYYGYVFMGCLVFSYFYVFFFVPETKGLTLEEVNTLWEEGVLPWKSPSWFHQTREVLTTTLMI

SEQ ID NO: 17574 - protein, 400 aa, Zea mays
LHHLFLKICLVSAAPAPTLLQSFKHQQPPPPPLPPRSSPGVVASSTTSYHSRAESGVKQGGGGRVAAGFESIFPPYGSSFFGGPAGRFCDGRLVIDFLMEAMDMPLLNAYLDSLGTPSFRTGVNFAQAGCSITPAKPTSVSPFSFGLQIKQFFAFKNKVTKLLSEGDMHSRYIPQQDYFSEGLYTFDIGQNDLAGEFYSRTEDQVIASIPTILLEFENGLKKLYDQGARKFWIHNTGPLGCLPQNIALFGKDPSQLDELHCVAKHNRAAKLFNLQLHALCTKLRAEFDGASITYVDIHTIKYSLIANYSRYGFEHATQACCGYGGPPLNYDGNVPCGHTVSLDGKMVTAKGCSDTTEFVNWDGIHYTEAANFHIASQILTGKYSDPPFVDKMPFVIKPRF

SEQ ID NO: 17575 - protein, 570 aa, Saccharomyces cerevisiae
MNSTPDLISPQKSNSSNSYELESGRSKAMNTPEGKNESFHDNLSESQVQPAVAPPNTGKGVYVTVSICCVMVAFGGFIFGWDTGTISGFVAQTDFLRRFGMKHHDGSHYLSKVRTGLIVSIFNIGCAIGGIVLAKLGDMYGRRIGLIVVVVIYTIGIIIQIASINKWYQYFIGRIISGLGVGGITVLSPMLISEVAPSEMRGTLVSCYQVMITLGIFLGYCTNFGTKNYSNSVQWRVPLGLCFAWALFMIGGMMFVPESPRYLVEAGRIDEARASLAKVNKCPPDHPYIQYELETIEASVEEMRAAGTASWGELFTGKPAMFQRTMMGIMIQSLQQLTGDNYFFYYGTIVFQAVGLSDSFETSIVFGVVNFFSTCCSLYTVDRFGRRNCLMWGAVGMVCCYVVYASVGVTRLWPNGQDQPSSKGAGNCMIVFACFYIFCFATTWAPIAYVVISECFPLRVKSKCMSIASAANWIWGFLISFFTPFITGAINFYYGYVFMGCMVFAYFYVFFFVPETKGLSLEEVNDMYAEGVLPWKSASWVPVSKRGADYNADDLMHDDQPFYKSLFSRK

SEQ ID NO: 17576 - protein, 592 aa, Saccharomyces cerevisiae
MSELENAHQGPLEGSATVSTNSNSYNEKSGNSTAPGTAGYNDNLAQAKPVSSYISHEGPPKDELEELQKEVDKQLEKKSKSDLLFVSVCCLMVAFGGFVFGWDTGTISGFVRQTDFIRRFGSTRANGTTYLSDVRTGLMVSIFNIGCAIGGIVLSKLGDMYGRKIGLMTVVVIYSIGIIIQIASIDKWYQYFIGRIISGLGVGGITVLAPMLISEVSPKQLRGTLVSCYQLMITFGIFLGYCTNFGTKNYSNSVQWRVPLGLCFAWSIFMIVGMTFVPESPRYLVEVGKIEEAKRSLARANKTTEDSPLVTLEMENYQSSIEAERLAGSASWGELVTGKPQMFRRTLMGMMIQSLQQLTGDNYFFYYGTTIFQAVGLEDSFETAIVLGVVNFVSTFFSLYTVDRFGRRNCLLWGCVGMICCYVVYASVGVTRLWPNGQDQPSSKGAGNCMIVFACFYIFCFATTWAPVAYVLISESYPLRVRGKAMSIASACNWIWGFLISFFTPFITSAINFYYGYVFMGCMVFAYFYVFFFVPETKGLTLEEVNEMYEENVLPWKSTKWIPPSRRTTDYDLDATRNDPRPFYKRMFTKEK

SEQ ID NO: 17577 - protein, 596 aa, Prochlorococcus marinus subsp. pastoris str. CCMP1986
MIKVEKVKKKKEIAKQEIVCLANGLEVSKFENFKKGSEFLKEPLASELKNESDHFTNDAVQLLKFHGSYQQDNRENRKPGKSKDWQMMLRLRSPGGEIPGNLFLSLDELSDKLGNGTLRVTTRQAFQMHGIRKDNLKEVIKSIVNSMGSTLAACGDINRNVMAPAAPFETAEYITARTLAVKVADLLTPMAGQGTFLELWADGDLEYTIKPDKEIEENRKLQFKENVFSGTKKEPLYGSTYLPRKFKCAVTVPGDNSVDLLTNDIGIVAFTSKEGSFEGCNFYIGGGMGRTHNNEETFARIADPLGYVENKDTYELIQSIVAIQRDYGDRKSRKNSRMKYLLHRKGIKWFKKILSDKYFRKEIKPLRKEPENKLIDYLGWHKQNEDYFFVGLPLLSGRLSGKKKSLIRDLVKENDLYLRLTPNQDILLCNIPNKNKSKIKKALKKIGYDNLNDINEIQRHALACPALPLCGLAMTEAERILPEVLTRIENLLTDMNIEKTILFRMTGCPNGCTRPYMAELALVGSGQNKYQLWLGGSKNLQRLAKPYLQRMELDDLERTIQPLLELWKKSSAEKDFGDFINNQTESFITNLLSEIN

SEQ ID NO: 17578 - protein, 272 aa, Bradyrhizobium japonicum USDA 110
MLFVEANGARIPAIGLGTWELSGRPCARVVEQALRLGYRHIDTAQVYDNEREVGDGVRASGVRRDDVFLTTKVWTNHFAPNDLERSVKESLARLRLPSVDLLLLHWPNSHVPLAETLGALSHARQMGLTRHIGVSNFTVALIEQAVALSPEPLVCNQVEFHPYLDQAKVRAACDQHGLALVAYSPIARGRIKTDQTLAGIGRAHRKTPAQVCLRWLVQQNVAAIPRTSRIERLSENIEIFDFELSDDEMARIAALANPKGRLTDFGFAPKWD

SEQ ID NO: 17579 - protein, 432 aa, Escherichia coli O157:H7 EDL933
  unsure (1)..(432): unsure at all Xaa locations
MSKIVKIIGREIIDSRGNPTVEAEVHLEGGFVGMAAAPSGASTGSREALELRDGDKSRFLGKGVTKAVAAVNGPIAQALIGKDAKDQAGIDKIMIDLDGTENKSKFGANAILAVSLANAKAAAAAKGMPLYEHIAELNGTPGKXSMPVPMMNIINGGEHADNNVDIQEFMIQPVGAKTVKEAIRMGSEVFHHLAKVLKAKGMNTAVGDEGGYAPNLGSNAEALAVIAEAVKAAGYELGKDITLAMDCAASEFYKDGKYVLAGEGNKAFTSEEFTHFLEELTKQYPIVSIEDGLDESDWDGFAYQTKVLGDKIQLVGDDLFVTNTKILKEGIEKGIANSILIKFNQIGSLTETLAAIKMAKDAGYTAVISHRSGETEDATIADLAVGTAAGQIKTGSMSRSDRVAKYNQLIRIEEALGEKAPYNGRKEIKGQA

SEQ ID NO: 17580 - protein, 271 aa, Staphylococcus aureus subsp. aureus MW2
MKLVFYGAGNMAQAIFTGIINSSNLDANDIYLTNKSNEQALKAFAEKLGVNYSYDDATLLKDADYVFLGTKPHDFDALATRIKPHITKDNCFISIMAGIPIDYIKQQLECQNPVARIMPNTNAQVGHSVTGISFSNNFDPKSKDEINDLVKAFGSVIEVSEDHLHQVTAITGSGPAFLYHVFEQYVKAGTKLGLEKEQVEESIRNLIIGTSKMIERSDLSMAQLRKNITSKGGTTQAGLDTLSQYDLVSIFEDCLNAAVDRSIELSNVEDQ

SEQ ID NO: 17581 - protein, 350 aa, Pseudomonas putida KT2440
MTMNTPLHGPAKALRLAAIGGVLLAAGAGFAYAAGWLGAPRLTPQRIIDTFEAQAGHYPGYRKNHAKGLCVSGYFQASGQAANLSTARAFSQQRVPVVGRFAIGGANPFAPDTGIPVRSLAIELSTDDGQVWRTGMNNPPVLAVSTPQAFYQQVLASAPDPATGKPDPGKLQAFFAAHPESAAFRQWAAGYKPSDSFANTQYHSINAFRLIDAAGAAHPVRWQLEPQTAFAALPAQVDDKQFLQHDLQQRLAQGPLRWTLRLVLAEPGDAVDDPARPWPAERRSVDAGTLVLEQVDAPEQGACRDLNFDPLILPRGIEASADPILAARSAAYSESFNRRSRESLSTGAKP

SEQ ID NO: 17582 - protein, 414 aa, Oryza sativa
MQAVAAATSRAWAASPRRRRHVASCSSPPPPTTTATTTTSSLNRCPVAGAGAPVLPLGIRGGRMLLAPPLLWNSGAAARKPAVATAAAASPPAEGGGKANGGAVAGGISRTVQLGAMILVWYLLNIYFNIFNKLVLKSVPFPYTITTFQFASGSFFITLMWLLNLHPKPRLSLGQYAKILPLALVHTMGNVFTNMSLGKVAVSFTHTIKAMEPFFSVLLSVLFLGETPSFLVLGSLVPIVGGDVLASMTEVSFNWIGFWSAMASNLTNQSRNVFSKKLLADKEETLDDINLFSIMTVMSFLLSAPLMLSVEGIKFSPSYLQSNGVNLQELCMKAALAGTCFHFYQQVSYSLLARVSPVTHSVANCVKRVVVIVSSVLFFRTPISPINALGTGVALAGVFLYSRFKKAKPKAKTA

SEQ ID NO: 17583 - protein, 473 aa, Psychrobacter sp. 273-4
MAKRLENSFQFLDVPRLEPIKKDIATRSTEFVEIYQPFESESVAQQSHRCLECGNPYCEWKCPVHNYIPNWLKLAAEGQIFQAAELCHQTNTLPEVCGRVCPQDRLCEGSCTLNDGFGAVTIGNVEKYINDTAFALGWRPDMSEVIWTDKKVAIIGAGPAGLGCADILVRNGVKPVIFDKRPEIGGLLTFGIPEFKMEKDVMRNRRVIFEGMGMEFRLETEIGTDVSIDELLGEYDAVFMGMGTYTYMRGGFAGEELEGVYDALDYLIANVNRCNDWEKDPAEYIDLKGKKVVVLGGGDTAMDCNRTSIRQGAHQVVCAYRRDEENMPGSRREVVNAREEGVEFLFNRQPTEIIGLNGKVNAVKVVTTQLGAPDENGRQYPEPIANSEEIIPCDAVIMAFGFSPSPADWFESQQISMDKSGRVLAAEKQTFKFQTNNPKIFAGGDMVRGSDLVVTAIWEGREAAEGILDYLEV

SEQ ID NO: 17584 - protein, 726 aa, Oryza sativa
MAAAAVAANGGGDGAQASNAPAPTRLASVYSEVQTSRLKHALPLPSVLRSPFALADGPASSAAGNPGEIAKLFPNLFGQPSVSLVPSPEPASTRPLKVGVVLSGGQAPGGHNVICGIFDYLQEYAKGSVMYGFKGGPAGVMKCKYVELTADYVYPYRNQGGFDMICSGRDKIETPEQFKQAEDTVNKLDLDGLVVIGGDDSNTNACLLAEYFRGKNMKTRVIGCPKTIDGDLKCKEVPTSFGFDTACKIYSEMIGNVMTDARSTGKYYHFVRLMGRAASHITLECALQTHPNVALIGEEVAAKKETLKSVTDYITDIVCKRAELGYNYGVILIPEGLIDFIPEVQKLIAELNEILAHDVVDEAGAWKSKLQPESRQLFDFLPKTIQEQLLLERDPHGNVQVAKIETEKMLIAMVETELEKRKAEGKYPAHFRGQSHFFGYEGRCGLPTIFDSNYCYALGYGSGALLQCGKTGLITSVGNLAAPVEEWTVGGTALTSLMDVERRHGKYKPVIKKAMVELDGAPFKKFASLRDEWSLKNHYISPVCVKLKANHSSILALSPIPKAAEGGGLGAEAAAAAEGGGGAAGSDAISARPRWSSATHTRRRYAAAEEGGAAKGEMRRERPRRRLGTVAWDTGRETATGIEGEKGRRRSVTALGDGGRGGTARELVRRPAAKAAGWGGSRELQEGGGARNRRGRPRRRTIERGGGEAEKKGKRRRTIERGDVER

SEQ ID NO: 17585 - protein, 439 aa, Klebsiella pneumoniae
MHDKYDVLIIGGGPGGYVAAIRAGQLGLRTVLVEKQHLGGICLNWGCIPTKALLHGAEVAHTITHASQLGISVGEVNVDLQKLVQFSRTVSQQLTAGVAYLLKKNGVRVIDGTARLRGKGQITVEDARGEARDYRADHVILATGARPRALPGIAPDGEHIWTYFEALRPKLLPKSLLIIGSGAIGVEFASLYNDLGCKVTLVELASQILPVEDAEVSAAVRKSFEKRGIQIHTQTLVTQVQLTDTGVRCTLNNTGGEYSQDVERVLLAVGVQPNIEDLGLETLGVELDRGFIKTDAACRTNVFGLYAIGDVAGPPCLAHKASHEGVLCVETLAGVEGAHPLDRDYVPGCTYARPQVASLGLTESTALARGRPIRIGKFSYQSNGKALVSGETEGFVKTIFDAETGELLGAHMVGAQVTEQIQGFASPVTWRPQTKASCR

SEQ ID NO: 17586 - protein, 441 aa, Schizosaccharomyces pombe
MFQRRSLLSVRSSGSQIAFRRFVSLTHKDPTPDTTSCNIIKKEGANIISVYARYPVVAAKGEGSYLFDKEGRKYIDFTSGVAVTSLGHAHPEVARLAADQCSKLVHSSNLFYNEPAIELSNVINNSLAKNSGIAGPTKIFFANCGTEANETALKFARKAAFEKYGEGKSQIVYFNNSFHGRSLGSLSITANPKYKRGFQPLLPDVVQAVYNDPASIEQFVNDKTAAVIVEPVQGEGGICPAKPEFLIALRKACDKVGASLIYDEIQCGLGRSGDLWAHSIVKDVASPDIITVAKPLANGLPIGATIVSSKIAAEIHPGEHGSTFGGNPVACRVGTFCVNELGSSKILQNVRKQHKALTSRFDDFVAKYPNLIRGYAGRGLLLGLQFTEPPAKFIELARQQGLLLLPGGNNNTRVLPSLNVKDEVIAKGLDIMESTLKALSK

SEQ ID NO: 17587 - protein, 122 aa, Nostoc sp. PCC 7120
MLSPVVTIAIFQKQPNPQVFSAGQVIFEEGQAGDYMYGIVEGTVDLLINGKVVETIEAGEIFGTGILVGVNHRNYTAIAKTDCQLAYLDEKRFLFAVQETPMFALNVLRNYSERLSRLQRLV

SEQ ID NO: 17588 - protein, 164 aa, Oryza sativa
  unsure (1)..(164): unsure at all Xaa locations
GIQVTKGEYVFGPDVGKLVFELANGSVLXLEMVDFSREKKRMAPSFARRLASLEIFFFMVPFGPANKDLAXLEGVPKFLKPFGAGFLWQKELDYFVEVVXGLNRQLVAMGGGSKVSSKMGVTDSFWEKCDILLLGGGMIFTFYKAQGLSVGSSLVEEDKLELAT

SEQ ID NO: 17589 - protein, 173 aa, Glycine max
MKKCELCKVPARIFCESDQASLCWDCDAKVHSANFLVARHVRTLLCRTCRSPTPWKASGASLAHAASVCDRCAAAEETEESEAGNDDEPDTEDDDDVDNQVVPWSSTPPPPPPSSSSGSECSECKNNVASFSASEQETTTSSLKRQREDDDDASSDPDPRVLRRVGRLNGGCV

SEQ ID NO: 17590 - protein, 459 aa, Mycobacterium avium subsp. paratuberculosis str. k10
METYDLAIIGTGSGNSLLDARFAGKRTAICEHGTFGGTCLNVGCIPTKMFVYAADVATTIREAARYGVDTHLDGVRWPDIVSRVFGRIDPIALSGEEYRRSSVNIDLYRSHTRFGPVQFDGRYLLRTDAGEQFTAEQVVIAAGSRPVIPPAILESGVTYHTSDTIMRIPALPEHLVIVGSGFVAAEFAHIFSALGVHVTVVIRSGRMLRQYDDMICERFTRLAAAKWELRTQRNVVGGSNRGSGVTLRLDDGSTLDADVLLVATGRISNADLLDAGQAGVDVENGRVVVDEYQRTSARGVFALGDVSSPYQLKHVANHEARVVRHNLLCDWDDTESMAVTDHRYVPSAVFTDPQLATVGLTENQAIARGFDISVAIQNYGDVAYGWAMEDTTGVVKLIAERTSGRLLGAHIMGPQASSIIQPLIQAMSFGLTAAQMARGQYWIHPALPEVVENALLGLY

SEQ ID NO: 17591 - protein, 504 aa, Sinorhizobium meliloti
MVMTVVVRPKALGDYDTREFRMLIDGQWVDGAEGRTIERVAPGHGVVVSRYQAAAKADAERAIAAARRAFDEGPWPRMTASERSLILLRAADMIAARADELAFLDAVESGKPISQAKGELAGAADIWRYAAALARELSGESYNTLGEGTLGVVLREPIGVVSIITPWNFPFLIVSQKLPFALAAGCTTVVKPSELTSASTLVLGEILEAAGVPQGVVNIIVGTGPEAGAPLTTHPHVDMVSFTGSTGIGQLTMANAAQTLKKVSLELGGKNPQIVFPDANLDEFIDAAVFGAYFNAGECCNAGSRLILHRDIAEEVTARIASLSAKVKVGDPLDPETQVGAIITPQHLQKIAGYVSSASNEGARIAHGGTTLDLGMGQFMAPTILSAVRPEMAVAREEVFGPVLSVLTFEKTEEAIRIANSIDYGLSAGVWSRDFDTCLTIGRRVRAGTVWMNTFMDGASELPFGGYRQSGLGRELGRHAVEDYTETKTLNMHIGRRSNWWMPR

SEQ ID NO: 17592 - protein, 327 aa, Saccharomyces cerevisiae
MSSLVTLNNGLKMPLVGLGCWKIDKKVCANQIYEAIKLGYRLFDGACDYGNEKEVGEGIRKAISEGLVSRKDIFVVSKLWNNFHHPDHVKLALKKTLSDMGLDYLDLYYIHFPIAFKYVPFEEKYPPGFYTGADDEKKGHITEAHVPIIDTYRALEECVDEGLIKSIGVSNFQGSLIQDLLRGCRIKPVALQIEHHPYLTQEHLVEFCKLHDIQVVAYSSFGPQSFIEMDLQLAKTTPTLFENDVIKKVSQNHPGSTTSQVLLRWATQRGIAVIPKSSKKERLLGNLEIEKKFTLTEQELKDISALNANIRFNDPWTWLDGKFPTFA

SEQ ID NO: 17593 - protein, 455 aa, Mycobacterium avium subsp. paratuberculosis str. k10
MSTARLINPATEEVLRSVEHADAAAVDDAVDRARAAQRRWARLAPADRAAGLRAFAAAVDAHRDELAALEVANSGHPIASAEWEAGQVRDVLTFYAGSPERLSGKQIPVAGGLDVTFHEPLGVVGVITPWNFPMPIASWGIAPALAAGNAVLVKPAEPTPVTTIRLAELAVQAGLDRDLLQVLPGPGTVVGERFVTHPDVRKIVFTGSTEVGKKVLAGAAAQVKRVTLELGGKSANIVFADCDLQRAAATAPAGVFDNAGQDCCARSRILVQRTVFDRFMELLEPAVTGIVVGDPASRDTQMGPLVSAAHRAKVASYVPDGAPVAFRGTAPTGPGFWFPPTVLTPSRTDRCVTEEIFGPVVTVLAFDDEQDAVALANDTSYGLSGSIWTNDLSRALRVSRAVEAGNLSVNSHSSVRYHTPFGGFKQSGLGRELGPDAPAQFTETKNVFIAIDEEP

SEQ ID NO: 17594 - protein, 254 aa, Mycobacterium avium subsp. paratuberculosis str. k10
MVLNGSEPLGGDPPRRPVVGLTAYLERVQTGIWDIPAGYLPADYFEGVTRAGGIAVLLPPQPMDTGIVGSLLDGLHALVITGGYDLDPAGYGQRPHPSTDAPRTDRDAWEFALLRGALQRGLPVLGICRGAQVLNVAFGGTLHQHLPDVLGHGGHRAGNGVFSTLPVRTVAGTRLAALLGETVDAPCYHHQAIDKVGDGLVVSAWDPDGVVEAVELPGDAFVLAVQWHPEQSLQDLRLFTAIVDAARSYAGVAR

SEQ ID NO: 17595 - protein, 431 aa, Prochlorococcus marinus subsp. pastoris str. CCMP1378
MKRVLAIILGGGKGSRLYPLTKMRAKPAVPLAGKYRLIDIPISNCINSGINKMYVLTQFNSASLNRHIGRTYNLSAPFGQGFVEVLAAQQTPDSPKWFEGTADAVRKYQWLFQEWDVDEYLILSGDQLYRMDYSLFVQHHRDNKADLTVAALPVDESQAEGFGLMRTDDLGNIKEFSEKPTGEKLKSMAVDTSKFGLTKESASEKPYLASMGIYVFSRKTLFDLLNKFPSYTDFGKDIIPEALSRGDTLKSYVFDDYWEDIGTIGAFFESNLALTQQPKPPFSFYDEKFPIYTRPRYLPPSKLVDAQITDSIVCEGTILKSCSILHCVLGVRSRIESDSVIEDTLVMGSDFFESLEERIELRKGGGTPLGVGEGSTIKRAILDKNARIGDNVVIVNKDRVEEADKPDVGFYIRNGIVVVVKNATIANGTII

SEQ ID NO: 17596 - protein, 516 aa, Clostridium perfringens str. 13
MNTLNDILSKEIEEFREKGHKFLNKEMTVGEFKKASGGMGVYAHRGGKEFMVRLRVPSGVAGLSLLEEAYNWAKKYNLEKIHLTTREAIQLHGISIDAVCDIMQEGLNKGIYTRGGGGNFPRNVALNPLSGVQIGETFDVTPYALASNAHYMSKIYTYNLPRKIKTAFSNTEEDSAHCTVTDLGFLAVENNGKRAFKLYIGGGLGRNPRTSVEFDELIDEKDVLYCLEAMTNLFVAEGDYKNHGKARIRYIVERMGEEEFKNCFRKHLEEVKAKGGLDLKVEDIKYSKKGEKTNIKHERLIPQKQEGLYTVLFHPVGGQLSLDVLKELIEKIEKIEEVEVRLGMDENLYVRNLNGKEAEAILDFTQGKGGETLAERSVACIGTPTCQMGVLESQKTLREFVELLKENSIKEGLLPRVRFSGCPNSCGMHEIGDIGFAGKKKKVGDVLSNVFELHFGGKLGIGETRLGDYYGDILQDKVPEFLIKVAKAVEAKNSTFEEWIKDNSEEFKAIVEEYNV

SEQ ID NO: 17597 - protein, 424 aa, Staphylococcus aureus subsp. aureus MW2
MEITMPKLGESVHEGTIEQWLVSVGDHIDEYEPLCEVITDKVTAEVPSTISGTITEILVEAGQTVAIDTIICKIETADEKTNETTEEIQAKVDEHTQKSTKKASATVEQTFTAKQNQPRNNGRFSPVVFKLASEHDIDLSQVVGSGFEGRVTKKDIMSVIENGGTTAQSDKQVQTKSTSVDTSSNQSSEDNSENSTIPVNGVRKAIAQNMVNSVTEIPHAWMMIEVDATNLVNTRNHYKNSFKNKEGYNLTFFAFFVKAVADALKAYPLLNSSWQGNEIVLHKDINISIAVADENKLYVPVIKHADEKSIKGIAREINTLATKARNKQLTAEDMQGGTFTVNNTGTFGSVSSMGIINHPQAAILQVESIVKKPVVINDMIAIRNMVNLCISIDHRILDGLQTGKFMNHIKQRIEQYTLENTNIY

SEQ ID NO: 17598 - protein, 143 aa, Eremothecium gossypii
MGSVFLPHLHSGWHVDQAIVTEEERLVVIRFGSDSDRSCMLMDEILYSIAEKVVNFAAIYVCDTTEVPDFNEMYELQDPMTVMFFYKNKHMRCDFGTGNNNKMNFVVDNKQEMIDIIETVFRGARRNKGLVVSPYDYNYKRIQ

SEQ ID NO: 17599 - protein, 244 aa, Oceanobacillus iheyensis HTE831
MGRLENKVAIITGGARGMGASHVRLFAKEGAKVVFTDLNEEGGLALANELGENVKFVKQDVTNADDWETVISETEEAFGPVNVLVNNAGISLSIPLMEMTEEQYRKIIDINQVSVFLGMKAVVPSMQKAGSGSIVNISSMNGIVAGAVGYTDSKFAVRGATKAAAVQLGGLGIRVNSVHPGVIETPMVTKGDAVEQIKEFAKQIPSKRMAQPEEVSNMVLFLASDEASYSTGSEFVIDGGLTAM

SEQ ID NO: 17600 - protein, 462 aa, Arabidopsis thaliana
MSEEQPHANLAVPAFKTEKDPVTQTQNGQSSVWRFGGSDKAAKASTVTLRGVIYMLFDNCGKDVNKTILPLGHGDPSVYPCFRTCIEAEDAVVDVLRSGKGNSYGPGAGILPARRAVADYMNRDLPHKLTPEDIFLTAGCNQGIEIVFESLARPNANILLPRPGFPHYDARAAYSGLEVRKFDLLPEKEWEIDLEGIEAIADEKTVAMVVINPNNPCGNVYSHDHLKKVAETARKLGIMVISDEVYDRTIFGDNPFVPMGKFASIVPVLTLAGISKGWVVPGWKIGWIALNDPEGVFETTKVLQSIKQNLDVTPDPATIIQAALPAILEKADKNFFAKKNKILKHNVDLVCDRLKDIPCVVCPKKPESCTYLLTKLELSLMDNIKDDIDFCVKLAREENLVFLPGYALGLKNWMRITIGVEAHMLEDALERLKGFCTRHAKKTETETESLQALKLSDNNLEM

SEQ ID NO: 17601 - protein, 349 aa, Azotobacter vinelandii
MVVKAYGAYAGDKPLEPLEITRRPPGPHDVQIDITYCGICHSDLHQVRAEWAGTRFPCVPGHEIVGRVSAVGAHVSDFRAGDLVGIGCIVDSCRHCEECDAGLENYCDGMVGTYNFPTPDEPGWTLGGYSQRIVVHEGYVLRIRHPEDQLAAVAPLLCAGITTYSPLRHWQAGPGKKVGIVGIGGLGHMGIKLAHAMGAHVVAFTTSASKREDAKALGADEVVVSRNPGEMAAHAKSFDLILNTVAAPHDLDAFLSLLKRDGTLTLVGAPASPHPSPDVFNLIFKRRSIAGSMIGGIPETQEMLDFCAEHGIVADIELIRAEQINEAYERMLRGDIKYRFVIDSATLAG

SEQ ID NO: 17602 - protein, 462 aa, Arabidopsis thaliana
MSEEQPHANLAVPAFKTEKDPITQTRNGQSSVWRFGGSDKAAKASTVTLRGVIYMLFDNCGKDVNKTILPLGHGDPSVYPCFRTCIEAEDAVVDVLRSGKGNSYGPGAGILPARRAVADYMNRDLPHKLTPEDIFLTAGCNQGIEIVFESLARPNANILLPRPGFPHYDARAAYSGLEVRKFDLLPEKEWEIDLEGIEAIADEKTVAMVVINPNNPCGNVYSHDHLKKVAETARKLGIMVISDEVYDRTIFGDNPFVPMGKFASIVPVLTLAGISKGWVVPGWKIGWIALNDPEGVFETTKVLQSIKQNLDVTPDPATIIQAALPAILEKADKNFFAKKNKILKHNVDLVCDRLKDIPCVVCPKKPESCTYLLTKLELSLMDNIKDDIDFCVKLAREENLVFLPGDALGLKNWMRITIGVEAHMLEDALERLKGFCTRHAKKTETETESLQALKLSDNNLEM

SEQ ID NO: 17603 - protein, 957 aa, Ralstonia metallidurans CH34
MNARDDFDYGTPASDAETQVTLEIDGVSVTVPAGTSVMRAAAEAGVGVPKLCATDSLKAFGSCRLCLVEIEGRRGYPASCTTPVEAGMKVRTQSEKLGDLRRGVMELYISDHPLDCLTCPTNGNCELQDMAGVVGLREVRYNDGAGTAPPIATHTHLAKDESNPYFTYDPSKCIVCNRCVRACEETQGTFALTISGRGFDSRVAAGTSQPFMESDCVSCGACVQACPTATLTETSVIQLGQASHSKITTCAYCGVGCSFKAEMKGNEVVRMVPYKDGAANEGHACVKGRFAWGYATHKDRILKPMIRARITDPWREVSWEEAIGYAASQFRRIQAEHGKDSIGGIVSSRCTNEEGYLVQKLVRAAFGNNNVDTCARVCHSPTGYGLKTTIGESAGTQTFRSVAKADVIMVIGANPTDGHPVFASRMKRRLRAGARLIVVDPRRIDLVESPHIRADYHLQLRPGTNVAVVTSIAHVIVTEGLLAEQFIAERCEDRAFQQWRDFVALPENSPEALEAETGVPAEQLRGAARLYATGGNAAIYYGLGVTEHAQGSTTVMAIANLAMATGNIGREGVGVNPLRGQNNVQGSCDIGSFPHELPGYRHVSDSTVRGSFEAAWNVEINPEPGLRIPNMFEAAITGSFRGLYCQGEDIVQSDPNTQHVAEALSSMECIVVQDIFLNETAKYAHVFLPGSSFLEKDGTFTNAERRISRVRKVMPPKAGYSDWEATILLSNALGYPMHYNHPSEIMDEIARLTPTFAGVSYKKLEELGSIQWPCNAEAPEGTPTMHVDTFVRGKGKFIITKYVPTSEKVNRKYPLILTTGRILSQYNVGAQTRRTHNVHWHDEDRLEIHPHDAEERGIKDGDWVGIQSRAGETVLRAIVSERMQPGVVYTTFHFPESGANVITTDNSDWATNCPEYKVTAVQVMPVAQPSTWQRNYHAFNEEQLAHLRAAGEPTPTR

SEQ ID NO: 17604 - protein, 431 aa, Nostoc sp. PCC 7120
MLSIPINQHLPYTPRLVTSLPGPRAKAIVERDRAVTSPSYTRDYPLVVNRGEGCMVEDVDGNVFLDMTAGIAVTSTGHAHPEVVRAIQEQSARLIHMSGTDFYYEPMVELAENLASQAPFVHDTKVFFTNSGAESNEGAIKLARYYTKRSLIIAFLGAFHGRTYGAMSLTGSKTVQRANFGPLVPGVTHIPYGTHASLDYLENNLLTTIIPAHEVAAIVVEPIQGEGGYIVPEDGFLQRIRNICDRYGILMVVDEVQSGMGRTGRLFAIEHWNVTPDIITTAKGIASGMPLGAILARAELMTWPPGSHATTFGGNPVACAAGIVTLKLLESGLMDNATQMGELLQTGLTQLHEQFPRMSLPRGKGLMVAVDLLDEDGNFDSTLRDRIIQEAFYHGLLLLGCGKAAIRFCPPLVINREQIQTSLDILAGILR

SEQ ID NO: 17605 - protein, 463 aa, Medicago sativa
MASSSLLSSVPSHSASLSILDTNIKGKLKLGTNGLRFNNEGINNFSNLRSSGRICMAVATNVSRFEGIPMAPPDPILGVSEAFKADTSDVKLNLGVGAYRTEELQPYVLNVVKKAENLMLERGENKEYLFIEGLAAFNKATAELLLGADNPAIKQGRVATVQGLSGTGSLRLGAALIERYFPGAKVLISNPTWGNHRNIFNDARVPWSEYRYYDPKTVGLDFEGMIEDIKSAPEGTFVLLHGCAHNPTGIDPTPEQWEKIADVIQQKNHFPFFDVAYQGFASGSLDEDAASVRLFVSRGMEVLVAQSYSKNLGLYAERVGVISSSPESATRVKSQLKRLARPMYSNPPVHGARIVANIVGTPALFDEWKAEMEMMAGRIKTVRQALYDSISSKDKSGKDWSFILKQIGMFSFTGLNKSQSDNMMTNKWHIYMTKDGRISLAGLSLAKCEYLADAIIDSYHNVS

SEQ ID NO: 17606 - protein, 453 aa, Medicago sativa
MASSSLLSSVPSHSASLSILDTNIKGKLKLGINNFSNLRSSGRICMAVATNVSRFEGIPMAPPDPILGVSEAFKADTSDVKLNLGVGAYRTEELQPYVLNVVKKAENLMLERGENKEYLFIEGLAAFNKATAELLLGADNPAIKQGRVATVQGLSGTGSLRLGAALIERYFPGAKVLISNPTWGNHKNIFNDARVPWSEYRYYDPKTVGLDFEGMIEDIKSAPEGTFVLLHGCAHNPTGIDPTPEQWEKIADVIQQKNHFPFFDVAYQGFASGSLDEDAASVRLFVSRGMEVLVAQSYSKNLGLYAERVGVISSSPESATRVKSQLKRLARPMYSNPPVHGARIVANIVGIPALFDEWKAEMEMMAGRIKTVRQALYDSISSKDKSGKDWSFILKQIGMFSFTGLNKSQSDNMMTNKWHIYMTKDGRISLAGLSLAKCEYLADAIIDSYHNVS

SEQ ID NO: 17607 - protein, 362 aa, Mycobacterium tuberculosis CDC1551
MSASLPVFPWDTLADAKALAGAHPDGIVDLSVGTPVDPVAPLIQEALAAASAAPDYPATAGTARLRESVVAALARRYGITRLTEAAVLPVIGTKELIAWLPTLLGLGGADLVVVPELAYPTYDVGARLAGTRVLRADALTQLGPQSPALLYLNSPSNPTGRVLGVDHLRKVVEWARGRGVLVVSDECYLGLGWDAEPVSVLHPSVCDGDHTGLLAVHSLSKSSSLAGYRAGFVVGDLEIVAELLAVRKHAGMMVPAPVQAAMVAALDDDAHERQQRERYAQRRAALLPALGSAGFAVDYSDAGLYLWATRGEPCRDSAAWLAQRGILVAPGDFYGPGGAQHVRVALTATDERVAAAVGRLTC

SEQ ID NO: 17608 - protein, 337 aa, Oryza sativa
  unsure (1)..(337): unsure at all Xaa locations
MAGAAATPPAMMRAVQYDACGGGAAGLKHVEVPVPSAKKNEVLLKLEAATINPVDWKIQKGMLRPLLPRRLPFIPVTDVAGVVAGVGPGVNDFAVGDQVVAMLNSMNGGGLAEYAVAAANLTVKRPPNVSAAEGAGLPIAAGTALQALRSIGAKFAGTGEPLNVLVTAASGGVGLYAVQLAKLANLHVTATCGARNAELVRGLGADEVLDYRTPEGAAMRSPSGRRYDGVVHCTVGVGWPAFEPLMAPRGKVIDITPNFSAMLTSALHAVTLRRKRLVPLLLSPNKADLEFLVGLXVGEGKLRTVVDSRFPLGDAAKAWQKSIDGHATGKIVVEMEG

SEQ ID NO: 17609 - protein, 191 aa, Sinorhizobium meliloti 1021
MFFLANGETRMPVVRGKNIEVLYSAETIAARNQEMAADIVRGPHKDLLVISILKGSFIFAADLIRAMHAAGLAPEVEFITLSSYGTGTESKGVRITKDIDSDVRDRDVLLIDDILESGRTLRFAKELLLERGARNVTIAVLLDKRVKRRVDLEADYVGFECPDHFVVGYGMDVAYAFRELPFVGVVTGDAT

SEQ ID NO: 17610 - protein, 370 aa, Sinorhizobium meliloti
MTVRNLFLLPGDGIGPEAMAEVRKIIAYMNAERDAGFVTDEGLVGGSAYDAHGAAISEGDMAKALAADAVLFGAVGGPKWDAVPYEVRPEAGLLRLRKDLELFANLRPAICYPALANASSLKPELVEGLDILIVRELTGGVYFGEPKEIVDLGNGQKRGIDTQVYDTYEIERIAGVAFELARTRNNRVCSMEKRNVMKSGVLWNQVVTETHKAKYSDVQLEHMLADAGGMQLVRQPKQFDVIVTDNLFGDMLSDVAAMLTGSLGMLPSASLGAPDAKTGKRKALYEPVHGSAPDIAGTGVANPIAMIASFAMCLRYSFNLVKEADDLEKAIANVLDQGIRTGDIMAEGCRKVGTAEMGDAILAEFKSLSA

SEQ ID NO: 17611 - protein, 696 aa, Oryza sativa
  unsure (1)..(696): unsure at all Xaa locations
MAQPLLLLLLAAAAAAAVAVVAVAQTNMADAEALMQLKKSFTNSSSLSSWLITNTDGDKSPCAPGSHEWHGVVCSRGKVTGLRLNGLRLGGTVDVGALVGFHNLRSVSFAGNNFSGPLPAVDRLTSIKSMFFSDNQFTGVLPDDFFSKLSHLKKLWLDHNELSGAIPASIAQATSLLELHLRAQXPFSGELPPLPPPALKXVRHSPGTTLEGRRPGGFPEVRRRQVRRQPGTSATCRPPTGRXKRVQAAAASSSKRSPMAFVTLLVSVVVVALVLCLCCNRSSRVHDFDPAHRGGDGLDERPPVYMVKQFSTTGKRSASWLGKRTGSSLRGHRRAASAAKADELGGGAGDLVIVNNCKGVFGLTDLMKAAAEVIGSGGHGSAYKAVMANGVAVVVKRARDMNRATKDAFEAEMKRLGAISHANLLPPLAYHYRRDEKLLVYEYIPKGSLLYVLHGDRGMDYAGLDWPTRLKVAVGVARGTAFLHGELAGHEVPHGNLKSANILLAPDFEPLLVDFGYSGLINHMQSPNSMIARRAPECAAGHPVGAKADVYCLGIVLLELLTGKFPSLYLQNAKGGTDLVMWATSAIADGYERDLFDKAITSAWKFALPDMARLMRVAVDCVETDADKRPDMKVAAARVEEVVAAAMATVRERHQAAGGESSRSSSHAQYVRDGSMQRITSVGERSSRRGSNDYSS

SEQ ID NO: 17612 - protein, 169 aa, Triticum aestivum
MAPTVMASSATAVAPFQGLKSTATLPVARRSTTSFAKVSNGGRIRCMQVWPADGNKKFETLSYLPPLTEEQLLKQVDYLLRNNWVPCLEFSKEGFVYRENSTSPCYYDGRYWTMWKLPMFGCTDASQVYKELQEAIASYPDAYVRILGFDNIKQTQCVSFIAYKPAGSE

SEQ ID NO: 17613 - protein, 239 aa, Ceratopteris richardii
MVRRKIKIKRIENATTRQVTFSKRRGGLLKKAHDLSVLCDADVGVIIFSSKGKLFQFANPSMKSVLERYYKAQGDAESADNVSSAENIEIDRITLFTEKLKALQRNVIGDDLERLSLRDLIHLEQQIHESLGRIRAKKEEMILDQLEDFKKKVTDARKTTNANSSLLDKLLDFCSSDMTSSHNFVDCEPLLISEAPQADASLAGRAATSEQSTDVRECSPPAKRLRITEDLNHSPVCME

SEQ ID NO: 17614 - protein, 521 aa, Fragaria x ananassa
MASSSMAANGVPTLRLSTSNIATNQTQKTNRGLSFSGSHLSGTKIPTPATCLRTCSPSPSTRRAPLVVSPKAVSDSKNSETCLDPDASRSVLGIILGGDGRTRLYPLTKKRAKPAVPLGANYRLIDIPVSNCLNSNVSKIYVLTQFNSASLNRHLSRAYASNMGGYKNEGFVEVLAAQQSPENPNWFQGTADAVRQCLWLFEEHNVLEFLVLAGDHLYRMDYEKFIQAHRETDADITVAALPMDEKRATAFGLMKIDDEGRIIEFAEKPKGEQLKAMKVDTTILGLDDERAKEMPYIASMGIYVVSKNVMLDLLREKFPGANDFGSEVIPGATSIGLRVQAYLYDGYWEDIGTIEAFYNANLGITKKPIPDFSFYDSSSPIYTQPRYLPPSKMLDADITDSVIGEGCVIKNCKIHHSVIGLRSCISEGAVIEDTLLMGADYYETDVDRRLMAKKGSVPIGIGKNSHIKRAIIDKNARIGDNVKIIKSDNVQETARETDGYFIKSGIVTVIKDAWIPSGTVI

SEQ ID NO: 17615 - protein, 424 aa, Yersinia pestis biovar Medievalis str. 91001
MAKNIQAIRGMNDYLPADTAIWQRIESILKQVLSGYGYSEIRMPIVEQTPLFKRAIGEVTDVVEKEMYTFDDRNGESLTLRPEGTAGCVRAGIEHGLLYNQEQRLWYIGPMFRYERPQKGRYRQFHQLGAEVFGLPGPDIDAELILLTARWWRALGIFEHVKLELNSIGSLAARADYREALVAFLEQHVEVLDEDCKRRMYSNPLRVLDSKNPDVQQLLDDAPKLSDYLDEESKQHFAGLCELLDKASIPYTVNERLVRGLDYYNRTVFEWVTHSLGAQGTVCAGGRYDGLVEQLGGRATPAVGFAMGLERLVLLVQAVNADFQVPATVDAYVISSGEGAQSAAMLLAESLRDALPTLKIMTNYGGGNVKKQFTRADKWGARVALMLGESEVAAQQVVVKDLRNGEQETLAQADVAARLALMLG

SEQ ID NO: 17616 - protein, 507 aa, Fragaria x ananassa
MDSWCVTLKPNTHLRQPTQAGLCCGANGFLGQRIRESFGNRGWVHGSEKTRPGVVSSVVTTKDFETTLKVPTYHRPRVDPKNVASIILGGGAFTQLFPLTRRAATPAVPVGGCYRLIDIPMSNCINSNINKIFVLTQFNSTSLNRHLARTYFGNGINFGDGFVEVLAATQTSGEAGMDWFQGTADAVRQFVWVFEDAKNRNVENILILSGDHLYRMDYMDFVQSHVDSNADITLSCAVVGDSRASDYGLVKIDSRGKIIQFAEKPRGAGLKAMQSDTTLLGFSPQDALKSPYVASMGVYVFKTDILLELLKKSYPNSNDFGSEIIPAAVEERNVQAYIFIDYWEDIGTIQSFYDANLALTEEFPKFQFYDPKTPFFTSPRFLPPTKIDNSRVVDAIISHGCFLQECFVQSSIVGERSRLDYGVELKDSIMMGADSYQTESEIAALLARGKVPIGIGRNTKIRLCIVDLNAKIGKDVIIMNKDGIQEADRPEEGFYIREESLSLWRRE

SEQ ID NO: 17617 - protein, 370 aa, Pseudomonas aeruginosa UCBPP-PA14
MKHFKLPDLGEGLQEAEIVEWHVKAGDSVRADQRLVSVETAKALVDIPAPYDGVVGKLFGAEGDILHVGEPLVGFEGEEADAGTVVGRLEGGGSALEDRFFIGAAPSTREHLAPRATPAVRQFARQQGVELAGLSGSGPDGLITRADVEAAAQGARERFGGERLRGVRRSMALNMARSHAEVVPVTIYGDADLHRWKTARDPLIRLAQALAEACRAEPTLNAWFDGASLSLKLHERLDLGIAVDTPDGLFVPVLRDVGARSAEDLRAGMRRLREDVQARSIPPAEMLGATLTLSNFGTLFGRYANPVVVPPQVAILGAGGIRDEVVAWRGEMAIHPILPLSLSFDHRAATGGEAARFLKVLVNALEQPDG

SEQ ID NO: 17618 - protein, 491 aa, Mycobacterium tuberculosis CDC1551
MTRRSVAAPRRGHRVLTRCQMSFVVTIPEALAAVATDLAGIGSTIGTANAAAAVPTTTVLAAAADEVSAAMAALFSGHAQAYQALSAQAALFHEQFVRALTAGAGSYAAAEAASAAPLEGVLDVINAPALALLGRPLIGNGANGAPGTGANGGDGGILIGNGGAGGSGAAGMPGGNGGAAGLFGNGGAGGAGGNVASGTAGFGGAGGAGGNGGLLFGAGGAGGVGGLAADAGDGGAGGDGGLFFGVGGAGGAGGTGTNVTGGAGGAGGNGGLLFGAGGVGGVGGDGVAFLGTAPGGPGGAGGAGGLFGVGGAGGAGGIGLVGNGGAGGSGGSALLWGDGGAGGAGGVGSTTGGAGGAGGNAGLLVGAGGAGGAGALGGGATGVGGAGGNGGTAGLLFGAGGAGGAGGFGFGGAGGAGGLGGKAGLIGDGGDGGAGGNGTGAKGGDGGAGGGAILVGNGGNGGNAGSGTPNGSAGTGGAGGLLGKNGMNGLP

SEQ ID NO: 17619 - protein, 353 aa, Fragaria x ananassa
VEVLAATQTPGESGKKWFQGTADAVRQFHWLFEDARSKDIEDVLILSGDHLYRMDYMDYIQNHRQSGADITISCLPMDDSRASDFGLMKIDKKGKVLSFSEKPKGNDLKAMAVDTTVLGLSVEEALKKPYIASMGVYVFKKEILLNLLRWRFPTANDFGSEIIPASANEFFMKAYLFNDYWEDIGTIRSFFEANLALTEHPNKFSFYDAAKPMYTSRRNLPPSKIDGSKIVDSIISHGSFLTDCLIEHSVVGIRSRINTNVHLKDTVMLGADYYETDSEVLSLLAEGRVPVGIGENTKIKDCIIDKNARIGNNVVIANTEGVQEADRSSEGFYIRSGVTVILKNSTIEDGLSI

SEQ ID NO: 17620 - protein, 486 aa, Comamonas sp. JS765
MLAKQILNFINGEFVATGKWFDNRTPISNAVIGQVAEAGQAEVDAAVAAARAALKGPWGSMTLAQRVELLEALVAEITRRFDEFLEAECADTGKPRSLASHIDIPRGAANFKVFADVVKNVPTEFFEMATPDGRGAINYGYRKPVGVVGVICPWNLPLLLMTWKVGPALACGNTVVVKPSEETPRTAALLGEVMNHVGIPKGVYNVVHGFGPGSAGEFVTSHPGIDAITFTGETRTGEVIMKAAAKGARPVSLEMGGKNAAIVFADCDFDAAIEGTLRSAFVNCGQVCLGTERVYVERPIFDKFVAALKQQVEGWKIGVPEGADTQLGPLISKEHQAKVLSYYQLAVQEGATVVTGGGVPDMPGELKDGCWVQPTIWTGLPETARVIKEEIFGPCCHIAPFDTEDEVLAKANDNEYGLATAIWTRDLSRAHRVAQRMEVGISWVNSWFLRDLRTPFGGSKQSGIGREGGVHSLEFYTELKNVCIKL

SEQ ID NO: 17621 - protein, 430 aa, Nostoc sp. PCC 7120
MSIHEIFMPALSSTMTEGKIVSWVKSPGDKVEKGETVVVVESDKADMDVETFYEGFLAHIIVEAGDSAPVGAAIAYVAETEAEIEAAKSLGSSGAAAATPPAAPQPVATTAAVGVPATSQNGSNHREGRLIASPRARKLAKELKVDLTSLKGSGPYGRIVADDIESAVGKVKQPATTPSAPTPTFTPAAPPAPRTPAPAPAPIAAAPGQVVPFNTLQNAVIRNMVASLDVPVFRVGYTITTDGLDKLYKQIKSKGVTMTALLAKAVAVTLQKHPLLNASYSDQGLVYHPDINVAVAVAMDGGGLITPVLKNADKIDIYSLSRTWKSLVDKARSKQLQPDEYTGGNFTLSNLGMFGVDTFDAILPPGQGSILAIGASRPQLVATGDGLFGVKQQMQVNITSDHRIIYGADAAAFLQDLAKLIETDAQSLTL

SEQ ID NO: 17622 - protein, 365 aa, Ralstonia metallidurans CH34
MKAAVMEKAGAPLVIHDVAIAEPGPREVRVRTAAVGLCHSDLHMMQGTYPLPLPAVLGHEVSGVVEAVGTQVSGLKAGDHVVGCLSVYCGHCSVCASGHQVLCQNPEVKLPPGKANRLRLAGNPLSQVFNLSGFAEEILVHENALVKIRDDMPLDRAALLGCAVITGTGAVFHSAKVPPGSTVVVVGCGGVGLSVINGAVIAGASRVIAVDMLPAKLELARKFGATDVVNAGDGDPVAQVMQLTGGGAEFAFECIGLKQTAEQCYAMLAPGGTATVIGLFRPDARIELPALDFLKEKRIQGSFMGSNRLSLDIPRLVELYMQGKLLLDDLISQRISLEDINEGFIAMQSGSVARSVITFPGVGGL

SEQ ID NO: 17623 - protein, 463 aa, Medicago sativa
MASSSLLSSVPSHSASLSILDTNIKGKLKLGTNGLRFNNEGINNFSNLRSSGRICMAVATNVSRFEGIPMAPPDPILGVSEAFKADTNDVKLNLGVGAYRTEELQPYVLNVVKKAENLMLERGENKEYLFIEGLAAFNKATAELLLGADNPAIKQGRVATVQGLSGTGSLRLGAALIERYFPGAKVLISNPTWGNHKNIFNDARVPWSEYRYYDPKTVGLDFEGMIEDIKSAPEGTFVLLHGCAHNPTGIDPTPEQWEKIADVIQQKNHFPFFDVAYQGFASGSLDEDAASVRLFESRGMEVLVAQSYSKNLGLYAERVGVISSSPESATRVKSQLKRLARPMYSNPPVHGARIFANIVGTPALFDEWKAEMEMMAGRIKTVRQALYDSISSKDKSGKDWSFILKQIGMFSFTGLNKSQSDNMMTNKWHIYMTKDGRISLAGLSLAKCEYLADAIIDSYHNVS

SEQ ID NO: 17624 - protein, 568 aa, Brassica juncea
MASTPKLTTTISSSPSLQILCRKLPIAINHLPSSSTSRSLPKTLSYLSSLHRLRVPSVSNHRYYSSSSSRRCFSVRAVQNADNGADSDRHYDFDLFTIGAGSGGVRASRFSTSFGASAAVCELPFSTISSDTTGGVGGTCVLRGCVPKKLLVYASKFTHEFEDSRGFGWKYDTEPSHDWSTLIANKNAELQRLTGIYKNILNNANVKLIEGRGKVIDPHTIDVDGKIYTSRNILIAVGGRPFIPDIPGREYAIDSDAALDLPSKPKKIAIVGGGYIALEFAGIFNGLNSEVHVFIRQKKVLRGFDEDVRDFVGEQMSLRGIEFHIEESPEAIIKAGDGSFSLKTSKGTVDGFSHVMFATGRKPNTKNLGLENVGVKLAKNGAIEVDEYSRTSVPSIWAVGDVTDRINLTPVALMEGMALAKTLFQNDPTKPDHSAVPCAVFSQPPIGTVGLTEEQAIEQYGDIDVFTSNFKPLKATLSGLPDRVFMKLIVCANTNKVLGVHMCGEDSPEIIQGFGVAVKAGLTKADFDATVGVHPTAAEEFVTMRTPTRKIRKESSEGKASLEAKTAV

SEQ ID NO: 17625 - protein, 503 aa, Micrococcus luteus
  unsure (1)..(503): unsure at all Xaa locations
MEHQKTTPHATGSTRQNGAPAVSDRQSLTVGSEGPIVLHDTHLLETHQHFNRXNIPERRPHAKGSGAFGEFEVTEDVSKYTKALVFQPGTKTETLLRFSTVAGELGSPDTWRDVRGFALRFYTEEGNYDLVGNNTPIFFLRDPXKFTHFIRSQKRLPDSGLRDATXQWDFWTNNPESAHQVTYLXGPRGLPRTWREMNGYGSHTYLWVNAQGEKHWVKYHFISQQGVHNLSNDEATKIAGENADFHRQDLFESIAKGDHPKWDLYIQAIPYEEGKTYRFNPFDLTKTISQKDYPRIKVGTLTLNRNPENHFAQIESAAFSPSNTVPGIGLSPDRMLLGRAFAYHDAQLYRVGAHVNQLPVNRPKNAVHNYAFEGQXWYDHTGDRSTYVPNSNGDSWSDETGPVDDGWEADGTLTREAQALRADDDDFGQAGTLVREVFSDQERDDFVETVAGALKGVRQDVQARAFEYWKNVDATIGQRIEDEVKRHEGDGIPGVEAGGEARI

SEQ ID NO: 17626 - protein, 453 aa, Medicago sativa
MASSSLLSSVPSHSASLSILDTNIKGKLKLGINNFSNLRSSGRICMAVATNVSRFEGIPMAPPDPILGVSEAFKADTNDVKLNLGVGAYRTEELQPYVLNVVKKAENLMLERGENKEYLFIEGLAAFNKATAELLLGADNPAIKQGRVATVQGLSGTGSLRLGAALIERYFPGAKVLISNPTWGNHKNIFNDARVPWSEYRYYDPKTVGLDFEGMIEDIKSAPEGTFVLLHGCAHNPTGIDPTPEQWEKIADVIQQKNHFPFFDVAYQGFASGSLDEDAASVRLFESRGMEVLVAQSYSKNLGLYAERVGVISSSPESATRVKSQLKRLARPMYSNPPVHGARIVANIVGTPALFDEWKAEMEMMAGRIKTVRQALYDSISSKDKSGKDWSFILKQIGMFSFTGLNKSQSDNMMTNKWHIYMTKDGRISLAGLSLAKCEYLADAIIDSYHNVS

SEQ ID NO: 17627 - protein, 477 aa, Brucella melitensis 16M
MTFHQNLIAGEWVGGDDIANINPSDTNDVVGTYARATAEDTKAAIAAAKAAFPAWSRSGILERHAILRKTADEILARKEELGRLLSREEGKTLVEGIGETIRASQIFDFFAGECLRLAGEVLPSARPGIGVEVTREPVGVVGIITPWNFPIAIPAWKIAPALCYGNTIVFKPAELVPGCSWAIADILHRAGLPKGVLNLVMGKGSVVGQTILDSADVNAATFTGSTGTGKRVAAASIEHNRRFQLEMGGKNPVVVLDDADLNVAVESVVNSAFFSTGQRCTASSRIIVTEGIHDKFVAAAIEKLKTVVVDNALKPGTHIGPVVDETQLQQDMDYIELGRKEGAKLAFGGERLNRETPGFYLQPALFTEATNQMRISREEIFGPVASVIRVKDYEEALATANDTSFGLSSGICTTSLKYATHFKRNSEAGMVMVNLPTAGVDFHVPFGGRKGSSFGPREQGRYAAEFYTTVKTAYTLA

SEQ ID NO: 17628 - protein, 400 aa, Bacillus amyloliquefaciens
MNNLAFLFPGQGSQFVGMGKQFWNDFVLAKRLFEEASDAISLDVKKLCFNGDMNELTKTMNAQPAILTVSVIAFQVYMQEIGVKPRFLAGHSLGEYSALVCAGALSFRDAVTLVRERGILMQNADPQQQGAMAAVTHLSLQTLQEICSKISTEDFPAGVACMNSEQQHVISGHRQAVERVIKMAEEKGAAYTYLNVSAPFHSSMIRSASEQFQTVLHQYSFRDAAWPIISNVTARPYSSGNSISEHLKQHMTMPVRWTESMHYLLLHGVTEVIEMGPNNVLAGLLRKTTNHIVPYPLGQTSDVPPLSNSAERKKHIVHLRKKQLNKLMIQSVIARNYNKDSAAYSNMTTPLFTQIQELKERMKRHEDVLSEQELEHSIHLCKLICEAKQLPAWEELRILK

SEQ ID NO: 17629 - protein, 261 aa, Bacillus amyloliquefaciens
MHSLLIEKTAVVTGAAGGIGLEIAKEFAREGAAVIISDVNEQAGKEAAAKLTDEGCEAVSITCDVTNEKQVADMLQTVEKQFGRLDVLVNNAGIQHVAPIEEFPTEQFERLIRLMLTAPFIAMKHAFPIMKKQQFGRIINMASVNGLIGFHGKAAYNSAKHGVIGLTKVGALEGAADGITVNALCPGYVDTQLVRNQLKDISATRNVPYERVLEDVIFPLVPQKRLLSVKEIADYAVFLASDKAKGVTGQAVVMDGGYTAQ

SEQ ID NO: 17630 - protein, 163 aa, Zea mays
MAAAAAAAKDAAVTLSSGHRMPAVGLGVWRMDKPDVRGLIHAALRLGYRHLDCAADYQNEAEVGDALAEAFQTGLVKREDLFITTKLWNSDHGHVLEACKDSLKKLQLDYLDLYLIHFPVATRHTGVGTTSSALGDDGVLDIDTTISLETTWHAMERTLVPWG

SEQ ID NO: 17631 - protein, 373 aa, Brucella melitensis 16M
MWQPAVSSPASLMLVSSHSPGTMQVRQRRSNSMAKTMKAAVVRAFGKPLTIDEVPIPQPGPGQIQVAIQASGVCHTDLHAAEGDWPVKPNPPFIPGHEGVGFVSAVGSGVKHVKEGDRVGIPWLYTACGHCLGGWETLCEEQLNTGYSVNGGFAEYVVADPNFVGHLPKNIDFNEIAPVLCAGVTVYKGLKVTDTKPGDWVVISGIGGLGHMAVQYARAMGLNVAAVDIDDRKLDLARRLGATVTVNAKTVADPAAYIRKETDGGAQGVLVTAVSPKAFEQALGMVARGGTVSLNGLPPGDFPLSIFNMVLNGVTVRGSIVGTRLDLQESLDFAADGKVKATIQTGKLEDINAIFDDMRQGNIEGRIVMDLTQ

SEQ ID NO: 17632 - protein, 318 aa, Oryza sativa
MLLLHLSHKAKAKLSMLKSKVICCKLYISESQNAKVVDAITRIGQKDPEVVLLSKFEDDHYNRVRYTLASYIINENSTGEVKFSPMRRVLLEMIEKAFSTINLETHTGTHPRIGVIDDMSFHPLNQATMEDAAQLAKTVASDIGNFLQVPVFLYGAAHPTGKPVTAVRRELGYFQPNYMGIQWMGQVLPDILPVKPDEGPDHVSRERGAIMIGAAPLPLNYNVPVLSKDIPTIRRITRRVTGRGGGLPTVQALALSHGDDCTEIACFLDPDHVSADQVQQQVEQIAAEQGLEVEKGYFTDFSKDAMLEKYFKIVLSVD

SEQ ID NO: 17633 - protein, 238 aa, Ceratopteris richardii
MVRRKIKIKRIENATTRQVTFSKRRGGLLKKAHDLSVLCDAEVAVIIFSSKGKLFQFANPSMETVLGRYVKASRDPEAGDNGSSTDNVEADRLTVFTEKLKMLQSNVIGDDLERLSLRDLIHLEQQVHESLGHIRAKKDELILEQIDEFKQKMADTRRTTNANTSMLDRLVDFCSSGITGSQNIVASEPGYVVGVPRTDTLRAGWIATSDQSNDGPEYVPCAKRFRITEGLNESPASE

SEQ ID NO: 17634 - protein, 181 aa, Thermoanaerobacter tengcongensis
MPSPMEDIEEILITEEQLKAKVKELGEMITRDYEGKDLVLIGVLKGAIMFMSDLSRAIDLPLSIDFMAVSSYGSSTKSSGIVKIIKDHDIDIEGKDVLIVEDIIDSGLTLAYLRETLLGRKPRSLKICTILDKPERREADVKVDYCGFKIPDKFVVGYGLDYAEKYRNLPFIGVLKPELYK

SEQ ID NO: 17635 - protein, 204 aa, Zea mays
  unsure (1)..(204): unsure at all Xaa locations
MAHRVDNEYDYLFKIVLIGDSGVGKSNILSRFTRNEFCLESKSTIGVEFATRTLQIEGKTIKAQIWDTAGQERYRAITSAYYRGAVGALLVYDITKKQTFENIQRWLRELRDHADSNIVIMMVGNKSDLNHLRSVPEEDGQALAEKEGLSFLETSALEALNVERAFQTVLXDIHQIISKEXALQPQEPAGSGPPSPGNHHPRLR

SEQ ID NO: 17636 - protein, 57 aa, Glycine max
  unsure (1)..(57): unsure at all Xaa locations
GKQIVPVKSVIYALSPFQQXIXPXXWKDXPTKIHHKVSXNWISATXLLLGPLVGTYT

SEQ ID NO: 17637 - protein, 255 aa, Zea mays
  unsure (1)..(255): unsure at all Xaa locations
GGLAILVEERLHVFGVCPKRAEIHALXQWVRGQGKGVVHSHQLSVDFPPAAAYQAHASGLLAFCLPKPVDNAMMWFRPEVKSTVEWSGQPVKHQEPGSTTLSPRLSFDLWKQQVDGKALYWSLSELLAVESLRRNALEHDLARQVQREHEAVRARDELVAVVSHDLRSPLTILLMQCGMMRSLVPADGSKANRRLATAIETMQNATSRMNTLLEDLMDISRIEAGRYSVSLQSLDVAATQEQICSMWQPLAAAKG

SEQ ID NO: 17638 - protein, 364 aa, Mycobacterium avium subsp. paratuberculosis str. k10
MVQQLVFSEPRPGKPPRHLADLDADGRASAVAELGLPAFRAKQLAHQYYGRLIADPRQMTDLPAGLRDAIADTMFPILLTAASEVTCDAGQTRKTLWRALDGVTVESVLMRYPHRNTVCISSQAGCGMACPFCATGQGGLSRNLSTAEILEQVRAGAAALRDDFGDRLSNVVFMGMGEPLANYARVVAAVRRIVAAPPQGFGISARSVTVSTVGLAPAIRKLADERLGVTLALSLHAPDDELRDTLVPVNNRWKIAEALDAARYYADVTGRRVSVEYALIRDVNDQPWRADLLGRRLHRALGPLVHVNLIPLNPTPGSQWDASPKPVEREFVRRVRAAGVSCTVRDTRGREISAACGQLAAEGG

SEQ ID NO: 17639 - protein, 1016 aa, Escherichia coli O157:H7; identical to SEQ ID NO: 9824
  unsure (1)..(1016): unsure at all Xaa locations

SEQ ID NO: 17640 - protein, 267 aa, Glycine max
MDPKLKEVSQLFDRFKASFLRNDFDNCSNLLSQLKVLLTGFRSLPPLFADTPNAVHELTIARDIYEHAVVLSVKIEDQDAFERDFFQLKPYYTDACNRLPPSPQEYPILGLNLSGLLVQNRIAEFHTELELLSSAALENPCIKHAVELEQSFMEGAYNRVLSARQTVPHDTYVYFMDLLAKTVRDEIAGCSEKAYDYLSIKDAKQMLLFSSDQELLEYIKEEHPEWEIKNDSVFFQKAKESAPCKEIPSLQLINQTLSYARELERIV

SEQ ID NO: 17641 - protein, 280 aa, Arabidopsis thaliana
MGRPPCCDKIGIKKGPWTPEEDIILVSYIQEHGPGNWRSVPTNTGLLRCSKSCRLRWTNYLRPGIKRGNFTPHEEGMIIHLQALLGNKWASIASYLPQRTDNDIKNYWNTHLKKKLNKSDSDERSRSENIALQTSSTRNTINHRSTYASSTENISRLVEGWMRASPKSSTSTTFLEHKMQNRTNNFIDHHSDQFPYEQLQGSREEGHSKGINGDDDQGIKNSENNNGDDVHHEDGDHEDDDDHNATPPLTFIEKWLLEETSTTGGQMEEMSHLMELSNML

SEQ ID NO: 17642 - protein, 268 aa, Bouteloua dimorpha
ASYAAAAMPALDVLPDKPHHAWESNGAAPVAPTPAPRRLDGKVAIVTGGARGIGEDIVRLFVKHGARVVIADIDAAAGDALAAALGPQVSCVRCDVSVEDDVKRAVEWAVARHGRLDVLCNNAGLLGRQTRAAKSILSFDAGEFDRVLRVNALGAALGMKHAALAMAPRRAGSIVSVASVAGVLGGLGPHAYTASKHAIVGLTKNAACELGAHGIRVNCVSPFGVATPMLINAWRQGHAAAAPSGEEVEKMEEVVRGFATLKGPTLRP

SEQ ID NO: 17643 - protein, 486 aa, Rhodospirillum rubrum
MTQHDPNPPSDPSLCHRAVAARDKRFDGRFFTCVRTTGIFCRPICPARTPAMENCLFVATAAQALAAGFRPCLRCRPEAAPGLGGWLGTAASVNRALALIGEGALDEGSVAALAERLGLGERHLRRLFLHHLGISPGAVAQAQRLLFAKTLISDTALPMTEIALAAGYGSLRRFNHALRTAYGCPPTALRRAKGAAIVGEGGPVLRLAARQPFDWPGLLAFFRQRAVPGLERVEGDTYVRAIAIGAARGVVTIRGSAEGLVVTPSLDRPEGLAALVARLRRVFDLDADIGAIGAHLGADPLLAPLVAARPGLRVPGAWDGFELAVRAILGQQVSVAAATTLAGRLVGAFGEPLTNAPPAGPSRLFPTAARLAEADLGGLGLTTARAKAISGLARAVVETPGLLDPGPDLDSAVARLCRLPGIGPWTAQYIALRALGEADALPVGDIGVLRALAEDGVRPTPAALLARAEDWRPWRSYAVLHLWSMP

SEQ ID NO: 17644 - protein, 392 aa, Glycine max
  unsure (1)..(392): unsure at all Xaa locations
MNNVAERPLNGDVEDDDEDDGGGLEAWERIYAEDRSWVALQXDESGLLRPRGXIRYLHFPVSQSKSDSXRDIRPCRMVVMGNQVPAFICESFHHSSLRRVSLVTISDEIAHCXTDHGGSPESHIKALMGKLECSGDASLQNALELVLGYLNQIPSYGHREVLILYSALSTCDPGDLMETIHKCKKSKIRCSVIGLAAEMFVCKHLCEETGGTYSVALDESHFKELILEHAPPPPAIAEYSTANLIKMGPPQRADARACTICTSHEEAKTGGGYTCPRCKVRVCELPTECRVCGLTLISSPHLARSYHHLFPIVMFDEVTPSSQNDSNHSFPNTCFGCQQSLLSQGNKPGLSVICPKCKQQFCLDCDIYVHESLHNCPGCESSRHSKSVTASQ

SEQ ID NO: 17645 - protein, 505 aa, Brucella melitensis 16M
MNKVEFSRTVKPAFAKRYGNFIGGKWVEPRSGRYFENTSPVNGQVLCEVARSDAADVEAALDAAHAARELWGRTSVAERALILNRIADRIEENLPALAAAETWDNGKPIRETTNADLPLAVDHFRYFAGVIRAQEGGISEIDHDTVAYHFHEPLGVVGQIIPWNFPLLMATWKLAPALAAGNCVVLKPAEQTPASILVLMELIADILPPGVVNIVNGFGLEAGKPLASSPRIAKIAFTGETTTGRLIMQYASQNLIPVTLELGGKSPNIFFKDVAAEDDDFLDKAIEGFVMFALNQGEVCTCPSRALIQESIYDRFMEKALKRVEAIVQGDPLDPATMIGAQASSEQLEKILSYLDIGRQEGAEVLAGNERNMLPGDLAGGYYVKPTVFKGHNKMRIFQEEIFGPVVSVATFKDDAEALSIANDTLYGLGAGIWTRDGTRAYRFGRAIKAGRVWTNCYHAYPAHAAFGGYKQSGIGRENHLKMLDHYQNTKNMLVSYSPKKLGFF

SEQ ID NO: 17646 - protein, 411 aa, Solenostemon scutellarioides
MELQNSAQEMEAPTTITIKGILGLLMANTDAKENGKRVISLGIGDPTAYSCFHASNAAQEGVVECLRSAKFNGYAPTAGLPQTRQAIAEYLSRDLPYKLPAESVYVTAGCTQAIEIALSVLARPGANILLPRPCFPIYGLCASFRNIEVRYFDLHPEKGWEVDLQAVEDLADHNTVAMVIINPGNPCGNVYSYQHLKKVAETAKRLGIVVIADEVYGHLAFGANPFVPMGNFGSIAPVVTLGSLSKRWLVPGWRLGWLVINDPDGTLMSPKFVERIKKYCDICGGPATFIQAAVPEIVEQTQEVFFRKTINILRQTSDICCQKIEEIDGITCPTKPKGAMAFMVKLNISRMKDISDDIDFCFKLAKEESVIILPGIAVGLNNWLRITFAVEPSALEEAMERLKSFCIRHSY

SEQ ID NO: 17647 - protein, 181 aa, Bacillus amyloliquefaciens
MCGAFIGDEPFAVLLGDDIMVSDTPALSQLIDVYNQHATETVGVQPVDPADVSKYGIIQTGRQGGHVYQVEDLIEKPAVEKAPSHIAVMGRYILTPAIFKTLKTIGRGAGNEIQLTDALREVCRTRSIYARELEGSRFDIGDKFGCFKAGTEIGLLREEMRPKLLAYLEEVLKRESEEIVR

SEQ ID NO: 17648 - protein, 341 aa, Mycobacterium vanbaalenii
MEAIVLNGTNDVGLTSVPDPAPQDGEVIIEVAATGLCGTDLHEYVAGPTFSQPPVVLGHEVSGRIVEVGAGVDQSRIGQGAAVIPMDFCGSCHYCHRSLYHLCQRPGWIGFTRNGGLANYVAVPSRLAVRVPDVVDLEEAALTEPTAVAFHAVRRAELLLGETVMVLGAGALGLTVIQCARAAGAARIFVTEPSGVRASLARDLGATLVLDPHDPGTTACILEETRGVGVDVVFHVAGSAEAFTQGLDCLRKQGRFMEMSSWAGAASLDVNRHLLKEIQLRMVFGYDMFDDFPAVLALIADGKLALAPQITARVPLDRAVKEGLGGLLEGREGLVKVLVKP

SEQ ID NO: 17649 - protein, 72 aa, Arabidopsis thaliana
MGKQPVKLKAVVYALSPFQQKIMTGLWKDLPEKIHHKVSENWISATLLVTPVVGTYWYAQYFKEQEKLEHRF

SEQ ID NO: 17650 - protein, 336 aa, Oryza sativa
MSPAPRVLVLVVATVVALQVSPAAGRIPGAYGGGEWQSAHATFYGGSDASGTMGGACGYGNLYSQGYGVNNAALSTALFNSGQSCGACFEIKCVNQPGWEWCHPGSPSILITATNFCPPNYALPSDNGGWCNPPRPHFDLAMPMFLHIAEYRAGIVPVSYRRVPCRKKGGVRFTINGFRYFNLVLITNVAGAGDIVRASVKGTSTGWMPMSRNWGQNWQSNSVLVGQALSFRVTGSDRRTSTSWNAAPAGWHFGQTFEGKNFRGFGLELGVMGRICAQRVAEVAAKLQLNLGVCWNDDSCRLLSVNAFSVFSVSCSMGECRNYVKGIKVKAKVRCE

SEQ ID NO: 17651 - protein, 430 aa, Xylella fastidiosa
MTAIAKIYAREILDSRGNPTLEAEVTLENAVCGRAAVPSGASTGTKEAVELRDGDKTRYLGKGVRAAVDNVNGVIAAALVGFDGADQTGLDHRLINLDGTENKGRLGANALLGVSLATAHAVAAARKQPLWMYLSTLGESKVSLPVPMMNIINGGAHADNNVDFQEFMVLPVGFASFSEALRAGTEIFHALKSVLKGQGLSTAVGDEGGFAPDLRSNVEALDAILEAIGRAGYIAGEDVLLGLDVASSEFRDNGKYNLVGENKRLTSEQFVDFLDDWVTQYPIISIEDGLAEDDWAGWKQLTERIGHKVQLVGDDLFVTNPKVFQEGITSGIANAILIKLNQIGTLTETLESIAMAHRAQYAAIVSHRSGETEDTSIADIAVATTATQIKTGSLCRSDRVAKYNQLLRIEQALGVGARYAGRDAFVSLKS

SEQ ID NO: 17652 - protein, 268 aa, Bouteloua dimorpha
ASYAAAAMPALDVLPDKPHHGWESNGGGAVAPTPAPRRLGGKVAIVTGGARGIGEAIVRLFAKHGARVVIADIDAAAGDALAAALGPQVSCVRCDVSVEDDVKRAVEWAVARHGRLDVLCNNAGVLGRQTRAAKSILSFDAGEFDRVLRVNALGAALGMKHAALAMAPRRAGSIVSVASVAGVLGGLGPHAYTASKHAFAGLTKNAACELGAHGIRVNCVSPFGVATPMLINSWRQGHAAAVPSDEEVEKMEEVVRGFATLKGPTLRP

SEQ ID NO: 17653 - protein, 496 aa, Zea mays
MGSSSGAPLLVAHPSRGKEDLGDQRRLRWCCGVSSEGRWAEATAEAGRLAALAAPMIAVALLQLMMQVISTIMVGHLGEVPLAGAAIAGSLTNVSGFSVLMGLACGLETICGQAFGAEQYHKVALYTYRSIVVLLIASVPMAILWVFLPDVLPLICQDPQIAIEAGRYALWLIPGLFAFSVAQCLSKFLQSQSLIFPLVLSSLTTLAVFIPLCWFMVYKVGMGNAGAAFAVSICDWVEVTVLGLYIKFSPSCEKTRAPFTWEAFQGIGSFMRLAVPSALMVCLEWWSYELLVLLSGMLPNAALETSVLSICISTVILVYNLPYGIGTAASVRVSNELGAGNPDSARLVVVVALSIIIFTAVLVSVTLLSLRHFIGIAFSNEEEVVNYVTRMVPLLSISVITDNLQGVLSGISRGCGWQHLGAYVNLGAFYLVGIPVALVAGFALHLGGAGFWIGMIAGGATQVTLLTIITAMTNWRKMADKARDRVYEGSLPIQAN

SEQ ID NO: 17654 - protein, 268 aa, Bouteloua dimorpha
ASYAAAAMPALDVLPEKPHHGWESNGGAAVAPTPAPRRLDGKVAIVTGGARGIGEAIVRLFVKHGARVVIADIDAAAGDALAAALGPQVSCVRCDVSVEEDVKRAVEWAVARHGRLDVLCNNAGVLGRQTRAAKSILSFDAGEFDRVLRVNALGAALGMKHAAQAMAPRRAGSIVSVASVAGVLGGLGPHAYTASKHAIVGLTKNAACELGAHGIRVNCVSPFGVATPMLVNAWRQGHAAAVPSDEEVERMEEVVRGFATLKGPTLRP

SEQ ID NO: 17655 - protein, 152 aa, Oryza sativa
  unsure (1)..(152): unsure at all Xaa locations
RSLQXVPIVSIEXRXXXRWEAXXXFSKTQDIQIVADDLTVTNPLRIKKAIDQKAANALLLKVNQIGTLTESIQAAKDSFADGWGVMVSHRSGETEDVTIADIAVGLRAGQIKTGAPARSERLAKLNQILRIEEELGSNAVFAGESFRKAINM

SEQ ID NO: 17656 - protein, 809 aa, Escherichia coli O6
MTLTRREFIKHSGIAAGTLVVTSAAPLPAWAEEKGGKILTAGRWGAMNVEVKDGKIVSSTGALAKTIPNSLQSTAADQVHTTARIQHPMVRKSYLDNPLQPVKGRGEDTYVQVSWEQALKLIHEQHDRIRKANGPSAIFAGSYGWRSSGVLHKAQTLLQRYMNLAGGYSGHSGDYSTGAAQVIMPHVVGSVEVYEQQTSWPLILENSQVVVLWGMNPLNTLKIAWSSTDEQGLEYFHQLKKSGKPVIAIDPIRSETIEFFGDNATWIAPNMGTDVALMLGIAHTLMTQGKHDKVFLEKYTTGYPQFEEYLTGKSDNTPKSAAWAAEITGVPEAQIVKLAELMAANRTMLMAGWGIQRQQYGEQKHWMLVTLAAMLGQIGTPGGGFGFSYHYSNGGNPTRVGGVLPEMSAAIAGQASEAADDGGMTAIPVARIVDALENPGGKYQHNGKEQTYPNIKMIWWAGGGNFTHHQDTNRLIKAWQKPEMIVVSECYWTAAAKHADIVLPITTSFERNDLTMTGDYSNQHIVLMKQAVAPQFEARNDFDVFADLAELLKPGGKEIYTEGKDEMAWLKFFYDAAQKGARAQRVTMPMFNAFWQQNKLIEMRRSEKNEQYIRYGDFRADPVKNALGTPSGKIEIYSRTLEKFGYKDCPAHPTWLAPDEWKGTADEKQLQLLTAHPAHRLHSQLNYAELRKKYAVADREPITIHTEDAARFGIANGDLVRVWNKRGQILTGAVVTDGIKKGVVCVHEGAWPDLENGLCKNGSANVLTADIPSSQLANACAGNSALVYIEKYTGNALKLTAFDQPAVQA

SEQ ID NO: 17657 - protein, 490 aa, Zymomonas mobilis
MAQNKMLSFVHLKQAYPEKRSAQERDKDFNEIYRSFSDEQASCQASRCSQCGVPYCSAYCPLHNNIPDWLKMTAEGRLQDAYALSSATSTMPEICGRICPQDRLCEGNCVIENSGHGAVTIGSVEKYITDTAWKEGWVEPLQPITELGISVGIIGSGPAGLTAAEKLRQQGYQVHVYDRHVRAGGLLTYCIPGFRLDKDIVARRVKRLADWGCHLPYQFARRVKMPALKNCVTHAAILIATGVYKARGLATPGKELNGIVDALDFLISSNRKSFGDKVEAFDNGTLDAKGKKVVVIGGGDTAMDCVRTAIRQGAESVRCLYRRDRVNMPGSAREVKNAEDEGAEFVWLSAPESFVGKDHVQSVKVRGMRLGAPDGSGRRSPEPDPARLFDMDADLVICALGFSPEDLPTLFNAPELSVTPWGTVEADPVTLQTSIEGVFAAGDIVRGASLVVWAIRDGLVASEQMHQWLATRQQDKQDAPTKAKKKAVFA

SEQ ID NO: 17658 - protein, 533 aa, Corynebacterium efficiens YS-314
MKVMAQIAMIMNLDKCIGCHTCSVTCKQAWTNREGTEYIWFNNVETRPGVGYPRGWEDQDKWEGGWVRTNSGKLKPKAGGRLKKLATIFHNPKLPTIDDYYVPWSYDYDKLLSAPAGQATQPTARPISQLDGRPIDKIEWSSNWDDNLGGSHATMDEDPVLEKMNLQVAKEIEDSFMFYLPRICEHCLNPTCVSSCPSGAMYKRAEDGIVLVDQDHCRGWRMCVSGCPYKKVYFNHKSGKAEKCTLCYPRLEVGQPTVCSETCVGRLRYLGVLLYDADRVAEVAATPNEQDLFEAQKTLFLDPHDPEIIAAAEREGIPHTWIEAAQQSPIYDLIFTYELALPLHPEYRTLPMVWYIPPLSPIVDEVTASGNDGEDHRILLTALSTMRIPLEYLAGLFTAGDTRPVEKSLRRLAAMRSYMRDINLGNEPQEEIAQAVGMDGKKMQQMYRLLAIAKYDDRYVIPTASPETPRGIQGLDPFGNVDPIGAAESLNVGLGEGAPEACESGVPAAAGRVSLASWNPGERPDSMFPNRQG

SEQ ID NO: 17659 - protein, 353 aa, Escherichia coli K12
MLYTSQTTPEKDQKMSMIKSYAAKEAGGELEVYEYDPGELRPQDVEVQVDYCGICHSDLSMIDNEWGFSQYPLVAGHEVIGRVVALGSAAQDKGLQVGQRVGIGWTARSCGHCDACISGNQINCEQGAVPTIMNRGGFAEKLRADWQWVIPLPENIDIESAGPLLCGGITVFKPLLMHHITATSRVGVIGIGGLGHIAIKLLHAMGCEVTAFSSNPAKEQEVLAMGADKVVNSRDPQALKALAGQFDLIINTVNVSLDWQPYFEALTYGGNFHTVGAVLTPLSVPAFTLIAGDRSVSGSATGTPYELRKLMRFAARSKVAPTTELFPMSKINDAIQHVRDGKARYRVVLKADF

SEQ ID NO: 17660 - protein, 397 aa, Zymomonas mobilis
MKPKLPLNRRQNPVRIMFLRLLSEQPQVKRRPLSRPMISQQQWPNWMLPRRLWQPMMINMLSVLSVMIELKSKGVDIITLGAGEPDFETPEFIKEAAIQAIHDGKTRYTNVDGTAELKEAIVGKFRRDNHLEYRTDQISVGSGGKHVLFNALTATIDQGDEVIIPAPYWVSYPDIVRFCGGTPVFIQATIDQDYKITAEQLEKAITQKTRWFIFNSPSNPTGAAYSADEIKSLAEVLRRHPHVWILSDDIYEHIVFDNFRFATIAEVAPDLFDRTLTANGCSKAYAMTGWRIGFAGGPTPLIKAMAKLQSQSTSNPCSISQAAAVAALNGPQDFLQGWSDDFARRRNLVVDGLNAIEGISCPKPQVPSMSIRAFPSLLARKPHQVKSLKKTWISQAI

SEQ ID NO: 17661 - protein, 424 aa, Shigella flexneri 2a str. 2457T
MAKNIQAIRGMNDYLPGETAIWQRIEGTLKNVLGSYGYSEIRLPIVEQTPLFKRAIGEVTDVVEKEMYTFEDRNGDSLTLRPEGTAGCVRAGIEHGLLYNQEQRLWYIGPMFRHERPQKGRYRQFHQLGCEVFGLQGPDIDAELIMLTARWWRALGIFEHVTLELNSIGSLEARANYRDALVAFLEQHKEKLDEDCKRRMYTNPLRVLDSKNPEVQALLNDAPALGDYLDEESREHFAGLCKLLESAGIAYTVNQRLVRGLDYYNRTVFEWVTNSLGSQGTVCAGGRYDGLVEQLGGRATPAVGFAMGLERLVLLVQAVNPEFKADPVVDIYLVASGADTQSAAMALAERLRDELLGVKLMTNHGGGNFKKQFARADKWGARVAVVLGESEVANGTAVVKDLRSGEQTAVAQDSVAAHLRTLLG

SEQ ID NO: 17662 - protein, 67 aa, Glycine max
NPPQSAILGKHSIVQRPVVVDGNILARPIMYLALTYDHRLIDGKETVYFLRRIKDVVEDPRRLLLDI

SEQ ID NO: 17663 - protein, 482 aa, Neisseria meningitidis
GSADAEYDVVVLGGGPGGYSAAFAAADEGLKVAIVERYKTLGGVCLNVGCIPSKALLHNAAVIDEVRHLAANGIKYPEPELDIDMLRAYKDGVVSRLTGGLAGMAKSRKVDVIQGDGQFLDPHHLEVSLTAGDAYEQAAPTGEKKIVAFKNCIIAAGSRVTKLPFIPEDPRIIDSSGALALKEVPGKLLIIGGGIIGLEMGTVYSTLGSRLDVVEMMDGLMQGADRDLVKVWQKQNEYRFDNIMVNTKTVAVEPKEDGVYVTFEGANAPKEPQRYDAVLVAAGRAPNGKLISAEKAGVAVTDRGFIEVDKQMRTNVPHIYAIGDIVGQPMLAHKAVHEGHVAAENCAGHKAYFDARVIPGVAYTSPEVAWVGETELSAKASARKITKANFPWAASGRAIANGCDKPFTKLIFDAETGRIIGGGIVGPNGGDMIGEVYLAIEMGCDAADIGKTIHPHPTLGESIGMAAEVALGTCTDLPPQKK

SEQ ID NO: 17664 - protein, 312 aa, Shigella flexneri 2a str. 2457T
MKVAVLGAAGGIGQALALLLKTQLPSGSELSLYDIAPVTPGVAVDLSHIPTAVKIKGFSGEDATPALEGADVVLISAGVARKPGMDRSDLFNVNAGIVKNLVQQVAKNCPKACIGIITNPVNTTVAIAAEVLKKAGVYDKNKLFGVTTLDIIRSNTFVAELKGKQPGEVEVPVIGGHSGVTILPLLSQVPGVSFTEQEVADLTKRIQNAGTEVVEAKAGGGSATLSMGQAAARFGLSLVRALQGEQGVVECAYVEGDGQYARFFSQPLLLGKNGVEERKSIGTLSAFEQNALEGMLDTLKKDIALGKEFVNK

SEQ ID NO: 17665 - protein, 161 aa, Zea mays
  unsure (1)..(161): unsure at all Xaa locations
SAGTPGEAEQKGKKEDXRADHNDPPDDFYIITHHSGMXASIPTINFLLHKGAKVILPIHLGRPKGVTPNYSLKPLVPRLTELLGVELVMANDCIAXEFQKLAAALPQRLVLLLXNVRFYNEKEKNEPEFPKNLTXVPHLYLNYAQGTTHISYASTERLTNY

SEQ ID NO: 17666 - protein, 190 aa, Zea mays
  unsure (1)..(190): unsure at all Xaa locations
MMRETARLWTAAENKQFERALAGLDLCRPDWEKVARAIPGRTVREVVSHFKSLQVDVQQIESGLVPMPVYGAGAGSFTLQWDGCYGPADSRHNGGXRHHGRTPEQDRKKGVPWTEEEHRLFLLGLKKYGKGDWRNISRNYVQTRTPTQVASHAQKYFIRLNSGGKDKRRSSIHDITTVNLTDDERAPSPS

SEQ ID NO: 17667 - protein, 498 aa, Zea mays
MMIARRLLRSNAPAQASSLLKHVTGTASLQGHADSPLDASVRHFSSAPSAQSDTTEENGFKGHGMLAPFTAGWQSNDLHPLIIERSEGSYVYDINGNKYLDSLAGLWCTALGGSEPRLVKAATEQLNKLPFYHSFWNRTTRPSLDLAQEILSMFTAREMGKVFFTNSGSEANDSQVKLVWYYDNALGRPDKKKFIARSKAYHGSTLISASLTGLPALHQKFDLPAPFVLHTDCPHYWRYHLPGETEEEFATRLATNLENLILKEGPETIAAFIAEPVMGAGGVIPPPKTYFDKVITAFGRLGTMFGCDYYNIKPDLVSLAKALSNAYVPIGATLVSPEISEVIHSQSNKLGSFAHGFTYSGHPVACAVAIEALKLYRERDIPGHVKQIAPKFQDGIRALADSPIIGEIRGLGMIMGTEFTNNKSPADLFPAEWGVGAIFGEECQKRGMLVRVAGDAIMMSPTLIMTPGEVDELVSIYGEALRATEERVSDLKMKSEKN

SEQ ID NO: 17668 - protein, 268 aa, Bouteloua dimorpha
ASYAAAAMPALDVLPEKPHHGWESNGGAAVAPTPAPRRLDGKVAIVTGGARGIGEAIVRLFVKHGARVVIADIDAAVGDALAAALGPQVSCVRCDVSVEDDVKRAVEWAVARHGRLDVLCNNAGVLGRQTRAAKSILSFDAGEFDRVLRVNALGAALGMKHAALAMAPRRAGSIVSVASVAGVLGGLGPHAYTASKHAIVGLTKNAACELGAHGIRVNCVSPFGVATPMLVNAWRQGHAAAVPSDEEVEKMEEVVRGFATLKGPTLRP

SEQ ID NO: 17669 - protein, 388 aa, Mycobacterium avium subsp. paratuberculosis str. k10
MSDERVKPFLVPDLGEGLEEVTVTHWNVAVGDDVELNQVLCTVETAKAEVELPSPYAGRIVEMNGAEGDVLKVGAVLVRLDTAPESGEPPAAETAPTLVGYGADAGIDTSRRTGRPLAAPPVRKLAKELMVDLGSLRPRSGAVITREDVLSAAHGTGNGAEVRPVQGVQARMADKMTLSHKEIPAATVSVQVDCTALVRLSERLGPAEQRITPFVLTLRLLVIALRRNEIMNSTWVDTPQGPQVRIEHRVHLGVAVATERGLLVPVIADAHTKTTRELASRAAELISGARAGSLTPGELRGSTFTVSNFGALGVDDGVPVINHPEAAILGMGAIKPRPVAIGTEVVVRPTMSLSAVFDHRIADGAQAARFVCELRDLIESPETALLDL

SEQ ID NO: 17670 - protein, 715 aa, Salmonella typhimurium LT2
  unsure (1)..(715): unsure at all Xaa locations
MKKVVTVCPYCASGCKINLVVDNGKIVRAEAAQGKTNQGTLCLKGYYGWDFINDTQILTPRLKTPMIRRQRGGKLESVSWDEALNYVAERLSAIKAKYGPDAIQTTGSSRGTGNETNYVMQKFARAVIGTNNVDCCARVXHGPSVAGLHQSVGNGAMSNAINEIDNTDLVFVFGYNPADSHPIVANHVINAKRNGAKIIVCDPRKIETARIADMHIALKNGSNIALLNAMGHVIIEENLYDKAFVASRTEGFEEYSKIVESYTPESVEEITGVSAQEIRQAARMYASAKSAAILWGMGVTQFYQGVETVRSLTSLAMLTGNLGKPSAGVNPVRGQNNVQGACDMGALPDTYPGYQYVKFPENREKFAKAWGVESLPAHTGYRISELPHRAAHGEVRAAYIMGEDPLQTDAELSAVRKAFEDLELVIVQDIFMTKTASAADVILPSTSWGEHEGVFSAADRGFQRFFKAVEPKWDLKTDWQIISEIATRMGYPMHYNNTQEIWDELRHLCPDFYGATYEKMGELGYIQWPCRDTSDADQGTSYLFKEKFDTPNGLAQFFTCDWVAPIDKLTEEYPMVLSTVREVGHYSCRSMTGNCAALAALADEPGYAQINTADAARLGIEDEALVWVHSRKGKIITRAQVSDRPNKGAIYMTYQWWIGACNELVTENLSPITKTPEYKYCAVRVEPIADQRAAEQYVIDEYNKLKTRLRESAMG

SEQ ID NO: 17671 - protein, 622 aa, ASPERGILLUS NIDULANS FGSC A4
MARDGVALSAPVDRSYSRGSSPLAERAIARDLEQYADGTDSASTADDEASENSTIRPVRSQPGTAPHSLAGSYQRPSFFTTVSHATVVPYPYQPENSERLTWREREQAIEDERELLTDNHFLDPATSTRSRRGSRAPADETTSLLARRRSSGHSAANAEDIDRKWEEAVIAGLIHTTWRREAIVIGKNAAPLVVTFLLQYSLTVASIFTLGHLGKTELGAVSLASMSASITGYAVYQGLATSLDTLCAQAYGSGKKKLVGLQMQRMIFFLWVITIPIALLWFFADKILLKIVPEREVAELAGLYLKVVILGAPGYAAFESGKRYVQAQGIFSASLYVLLICAPLNAFMNWLFVWQFGWGFIGAPIAVAITDNLMPLFLFLYVYLVDGSECWNGLTRRALNNWGPMIRLALPGLLMVEAECLAFEVLTLGSSYLGTTPLAAQSVLATVSSITFQIPFTLSISSSTRVANLIGATLVDAAKTTAKVAMCGAVLVGLLNMVLISSLRYYIPRLFTSEVEVIELVAHVLPFCAAFQLFDALATNCNGILRGLGRQEIGGYVQLFCYYAIAMPISFGTAFGLHWGLFGLWSGVAIALCLVSGIEAVFLTQTDWNRSVEDAVRRNAAA

SEQ ID NO: 17672 - protein, 268 aa, Bouteloua dimorpha
ASYAAAAMPALDVLPEKAHHGWESNGGAAVAPTPAPRRLDGKVAIVTGGARGIGEAIVRLFAKHGARVVIADIDAAAGDALATALGPQVSCVRCDVSVEDDVKRAVEWAVARHGRLDVLCNNAGVLGRQTRAAKSILSFDAGEFDRVLRVNALGAALGMKHAAQAMAPRRAGSIVSVASVAGVLGGLGPHAYTASKHAIVGLTKNAACELGAHGIRVNCVSPFGVATPMLVNAWRQGHAAAVPSDEEVEKMEEVVRGFATLKGPTLRP

SEQ ID NO: 17673 - protein, 404 aa, Mycobacterium tuberculosis CDC1551
MREVPHVLGIVLAGGEGKRLYPLTADRAKPAVPFGGAYRLIDFVLSNLVNARYLRICVLTQYKSHSLDRHISQNWRLSGLAGEYITPVPAQQRLGPRWYTGSADAIYQSLNLIYDEDPDYIVVFGADHVYRMDPEQMVRFHIDSGAGATVAGIRVPRENATAFGCIDADDSGRIRSFVEKPLEPPGTPDDPDTTFVSMGNYIFTTKVLIDAIRADADDDHSDHDMGGDIVPRLVADGMAAVYDFSDNEVPGATDRDRAYWRDVGTLDAFYDAHMDLVSVHPVFNLYNKRWPIRGESENLAPAKFVNGGSAQESVVGAGSIISAASVRNSVLSSNVVVDDGAIVEGSVIMPGTRVGRGAVVRHAILDKNVVVGPGEMVGVDLEKDRERFAISAGGVVAVGKGVWI

SEQ ID NO: 17674 - protein, 428 aa, Pyrococcus abyssi [sequence omitted]

SEQ ID NO: 17675 - protein, 268 aa, Bouteloua dimorpha
ASYAAAAMPALDVLPEKAHHGWESNGGAAVAPTPAPRRLDGKVAIVTGGARGIGEAIVRLFVKHGARVVIADIDAAAGDALAAALGPQVSCVRCDVSVEEDVKRAVEWAVARHGRLDVLCNNAGVLGRQTRAARSILSFDAGEFDRVLRVNALGAALGMKHAAQAMAPRRAGSIVSVASVAGVLGGLGPHAYTASKHAIVGLTKNAACELGAHGIRVNCVSPFGVATPMLVNAWRQGHAAAVPSDEEVEKMEEVVRGFATLKGPTLRP

SEQ ID NO: 17676 - protein, 408 aa, Psychrobacter sp. 273-4
MNHNLTTLHPYPFAKMATLLADSTPAHSYDEIKLGIGEPKHAPPAFVLDVLRENLDKISHYPTTNGLFELRQTIAHWLEKRFFLNHVNPNTQVLPVMGTREAIFSIVQAVINHQTETISQTATLNQSPVVVMPNPFYQIYEGAAILAQATPYFIPCTADNGFKGDFRSVPKDVWMRTQLLFVCSPNNPTGSVMTMDDWEQLLRLSDQYGFIIASDECYSELYFDKAPIGLLQACAALGRHDFKNCLVFHSLSKRSNLPGLRSGFVAGDATILDSYLQYRTYQGCAMPIPHQLASIAAWEDEKHVAHNRALYQEKFALWMSELGALLDLRMPEAGFYFWIKAPEQFDGDDELFVKALYEHANIHALAGRYLSREVNGKNPGQGYVRIALVASVEESREAIRRIRQLLGA

SEQ ID NO: 17677 - protein, 268 aa, Bouteloua dimorpha
ASYAAAAMPALDVLPEKPHHGWESNGGAAVAPTPAPRRLDGKVAIVTGGARGIGEAIVRLFAKHGARVVIADIDAAAGDALAAALGPQVSCVRCDVSVEDDVKRAVEWAVARHGRLDVLCNNAGVLGRQTRAAKSILSFDAGEFDRVLRVNALGAALGMKHAALAMAPRRAGSIVSVASVAGVLGGLGPHAYTASKHAIVGLTKNAACELGAHGIRVNCVSPFGVATPMLVNAWRQGHAAAVPSDEEVEKMEEVVRGFATLKGPTLRP

SEQ ID NO: 17678 - protein, 405 aa, Oryza sativa
MALAVDVSRFEGVPMAPPDPILGVSEAFKADQNDLKLNLGVGAYRTEELQPYVLNVVKKAETLMLEKGENKEYLPIEGLAAFNKATAELLFGADNPVLKQGRVCAVAYAALAVATLQSLSGTGSLRLAAAFIQRYFPEAKVLISSPTWGNHKNIFNDAKVPWSEYRYYDPKTVGLDFEGMIADIQGFASGSLDEDASSVRLFVQRGLEVFVAQSYSKNLGLYAERIGAINVVCSTPEVANRVKSQLKRLARPMYSNPPIHGARIVANVVGDPTMFGEWKQEMEEMAGRIKNVRQKLYDSLSAKDDSGKDWSFILRQIGMFSYTGLNKTQSDNMTDKWHIYMTKDGRISLAGLSLAKCEYLADAIIDSFHNRVRISSGAEERGQRGASRRKKPSSCRCGAAAAAWG

SEQ ID NO: 17679 - protein, 491 aa, Solanum tuberosum
DPSKYRPSSAYDTPFLTTNAGGPVYNNVSSLTVGPRGPVLLEDYYLIEKLATFDREKIPERVVHARGASAKGFFEVTHDISHLTCADFLRAPGAQTPVICRFSTVVHERGSPESIRDIRGFAVKFYTREGNFDLVGNNVPVFFNRDAKSFPDTIRALKPNPKSHIQENWRILDFFSFLPESLHTFAFFYDDVCLPTDYRHMEGFGVHAYQLINKEGKAHYVKFHWKPTCGVKSMSEEEAIRVGGTNHSHATKDLYDSIAAGNYPEWKLFIQTMDPEDVDKFDFDPLDVTKTWPEDLLPLIPVGRLVLNRNIDNFFAENEQLAFNPGHIVPGIYYSEDKLLQTRIFAYADTQRHRIGPNYMQLPVNAPKCGHHNNHRDGAMNMTHRDEEVDYLPSRFDPCRPAEQYPIPACVLNGRRTNCVIPKENNFKQAGERYRSWESDRQDRYITKWVESLSDPRVTHEIRSIWISYLSQADKSCGQKVASRLTVKPTM

SEQ ID NO: 17680 - protein, 251 aa, Lactobacillus plantarum WCFS1
MFNFTDKVVIVTGARTGIGLSAATLFAKAGAHVILAGHHEPKDEAQQLVDHGYSAVSFKCNVADPKNVAGMVKFAVAQFGHLDYAYNDAGIQSPVTDTADLSVEEYDHVMDTNLKGMFLSMKYELRQMRAQGTPAAIVNCSSMGGLVGIADRTAYHASKHGVLGLTKSSALEYADRNVRINAVCPGIIDTPMVARMDDTERQEMDDLVREIPMGRLAKPEEVAQVVLFLCSDAASYMVGQAVAVDGGYTIH

SEQ ID NO: 17681 - protein, 347 aa, Halobacterium sp. NRC-1
MRAAVYQGPGEIAVEEVPKPDIESPEDAVIRVTHTAVCGSDLWFYRGDSDREAGSRVGHEPMGIVEEVGDDVTSVAPGDRVIAPFAISCGECEFCRQGLYTSCVEDESWGSEANGGGQGEYVKCPFADGTLVRVPDRYADDEDVLESLLPLTDVMGTGHHAAVSAGVGEGDTAVVVGDGAVGLCGVLAAQRLGAERIIAMGHHEDRLELAAEFGATDTISARGDDAIERARDLTHGGANHVMECVGAASAMDSAIAIARPGGTVGYVGVPYGVEDGGLDVFTMFSDNITIRGGVAPVRAYAEELMADVLQGTLDPSPIFTKTVDLDGVPEGYAAMDDREAIKVLVKA

SEQ ID NO: 17682 - protein, 292 aa, Escherichia coli
MKVAVLGAAGGIGQALALLLKTQLPSGSELSLYDIAPVTPGVAVDLSHIPTAVKIKGFSGEDATPALEGADVVLISAGVARKPGMDRSDLFNVNAGIVKNLVQQVAKTCPKACIGIITNPVNTTVAIAAEVLKKAGVYDKNKLFGVTTLDIIRSNTFVAELKGKQPGEVEVPVIGGHSGVTILPLLSQVPGVSFTEQEVADLTKRIQNAGTEVVEAKAGGGSATLSMGLAAARFGLSLVRALQGEQGVVECAYVEGDGQYARFFSQPLLLGKNGVEERKSIGTLSAFEQNAL

SEQ ID NO: 17683 - protein, 127 aa, Chloroflexus aurantiacus
MAANRPIRFKGEAPFHARFMIEAAEGMAQAIAHATVRNLSIPLIANVTAEPLYDADDVRREIVAQVVAPVRWIASVQRMVDLGVETFIEIGPGKVLTGLIRRIAPTARLINVATFEDVRALTAMQPV

SEQ ID NO: 17684 - protein, 292 aa, Escherichia coli
MKVAVLGAAGGIGQALALLLKTQLPSGSELSLYDIAPVTPGVAVDLSHIPTAVKIKGFSGEDATPALEGADVVLISAGVARKPGMDRSDLFNVNAGIVKNLVQQVAKTCPKACIGIITNPVNTTVAIAAEVLKKAGVYDKNKLFGVTTLDIIRSNTFVAELKGKQPGEVEVPVIGGHSGVTILPLLSQVLGVSFTEQEVADLTKRIQNAGTEVVEAKAGGGSATLSMGQAAARFGLSLVRALQGEQGVVECAYVEGDGQYARFFSQPLLLGKSGVEERKSIGTLSAFEQNAL

SEQ ID NO: 17685 - protein, 428 aa, Zea mays
MYGVGGGFNAPSTAASRRRNPGDEEEDEEDEGGEGRVLEAWERAYADERSWESLQEDESGLLRPVDTKTLVHAQYRRRLLLRSAAAAAARIQKGLIRYLYIVIDLSRAASEMDYRPSRMAVVAKHAEAFIREFFDQNPLSHVGLVTIKDGIAHRLTEIGGSPESQIKALMGKLECSGDSSLQNALDLVHGYLDQVPSYGHKEVLILYSALNTFDPGDITETIAKCKKSKIRCSVIGLAAEIFICKHLCEETGGSYTVALDESHFKELLLEHAPPPPAIAEYAAANLIKMGFPQRGAEELISICSCHKKIKSGAEGYICPRCKVNVCELPTECRTCGLTLVSSPHLARSYHHLFPVPPFDEVTPVPNRIQRGGQICFSCQQSLYNPDGQSNLHVRCPKCNQHFCLDCDIYIHESLHNCPGCESQRSIAS

SEQ ID NO: 17686 - protein, 424 aa, Staphylococcus epidermidis ATCC 12228
MIKMPRGTQDILPQDSAKWRYIENRLHTLMELYNYKEIRTPIFESTELFARGVGDSTDVVQKEMYTFKDKGDRSLTLRPEGTAAVVRSYIEHKMQGEPNQPIKLYYNGPMFRYERKQKGRYRQFNQFGVEAIGAENPSIDAEILAMVMHIYESFGLKHLKLVINSIGDSESRKEYNEALVKHFEPVIDTFCSDCQSRLHTNPMRILDCKIDRDKEAVKNAPRITDYLNNDSKSYYEQVKLHLDNLNISYVEDPNLVRGLDYYTHTAFELMIDNPEYDGAITTLCGGGRYNGLLQLLDGPDETGIGFALSIERLLMALDEEGISLDVSEDFDLFVVTMGEDADRYAVKLINDLRRNGIKVDKDYLNRKIKGQMKQADRLNAKYTVVIGDQELENNEIGVKNMISGESENVQLDELVNYFKSRKEV

SEQ ID NO: 17687 - protein, 284 aa, Zea mays
MAGAEVANGVHDGALDLEEGRGGGVDGAGCESSEQDGAGRRPMFSVPFVQKILAEALGTYFLIFAGCAAVAVNLRTGGTVTFPGICAVWGLAVMVMVYSVGHISGAHLNPAVSLAFATCGRFPWRQVPAYAAAQVTGATAASLTLRLLFGSAREHFFATVPAGSAAQAHVLLFTISRQPPARIPSFNIISSSRRVPAQHAVEATVFRRALLARPISGASMNPARTLGPALVVGRYAGIWVYFAGPICGTVAGAWAYNLIRFTDKPLREITQTSSFLRSVRRSSS

SEQ ID NO: 17688 - protein, 279 aa, Rhodospirillum rubrum
MSSQVGCTLTCRFCHTGTQLLVRNLTAHEIVGQFMAARDAYGEWPSPTDESRQLSNIVLMGMGEPLYNYDNVAKAIGILLDNEGIAVSRRRITLSTSGVVPMIRRCGAELGVNLAVSLHAARDEIRDEIMPINRKYPLAELMAACREYPGASNARRITFEYVMLKGVNDSEADARALIKLVEGVPCKFNLIPFNPWPGSGFECPPIRHIERFANILFEAGYTAPIRMPRGRDILAACGQLRSDSLRERASLHKARLAAGVADDHAPAAAPLADTPGAVA

SEQ ID NO: 17689 - protein, 224 aa, Brucella melitensis 16M
MELKMRMLEKGKLIVASHNAGKLREFDGLIGPFGFEVSSVAALGLPEPDETGTTFEENAYIKALAAAKATGFPALSDDSGLMVDALDGEPGVYTANWAETEDGKRDFDMAMQKVENLLQEKGATTPDKRKARFVSVICLAWPDGEAEYFRGEVEGTLVWPPRGNIGFGYDPVFLPDGYGKTFGEMTAEEKHGWKPGDASALSHRARAFKLFAEKALNVVSAPAE

SEQ ID NO: 17690 - protein, 407 aa, Streptococcus dysgalactiae subsp. equisimilis
WQYVEGVARETFKQYHYGEIRTPMFEHYEVISRSVGDTTDIVTKEMYDFYDKGDRHITLRPEGTAPVVRSYVENKLFAPEVQKPVKLYYIGSMFRYERPQAGRLREFHQIGVECFGSANPATDVETIAMAYHLFERLGIKGVTLHLNSLGNAASRAAYRQALIDYLSPMRDTLSKDSQRRLDENPLRVLDSKEKEDKIAVANAPSILDYQDEESQAHFDAVRSMLEALAIPYVIDTNMVRGLDYYNHTIFEFITEVDQSELTICAGGRYDGLVEYFGGPATPGFGFGLGLERLLLILDKQGVELPVEEGLDVYIAVLGADANVAALALTQAIRRQGFTVERDYLGRKIKAQFKSADTFKAKVVITLGESEIKAGQAVLKHNQTRQEMTVSFDQIQTDFASIFAECVQ

SEQ ID NO: 17691 - protein, 431 aa, Triticum aestivum
  unsure (1)..(431): unsure at all Xaa locations
MYGVGVGGGGGGFNAPSTASGRRKNQEDDDDEEEEETGDGRVLEAWERAYADDRSWEALQEDESGLLRPIDTKNLVHSQYRRRLLLRSAAAAARIQKGLIRYLYIVIDLSKAASEMDYRPSRMAVVAKCAEAFIREFFDQNPLSHVGLVTIKDGISHRLTEIGGSPESQINALMGKLECSGDSSLQNALELVNGYLNQIPSYGHKEVLFLYSALNTCDPGDIMETIEKCKKSKVRCSVIGLAAEIFICKHLCEETGGSYTVALDESHFKELLLEHAPPPPAIAEYAAANLIKMGFPQRGAEDLISICSCHKKIKSGAEGYICPRCKVNVCELPTECRTCGLTLVSSPHLARSYHHLXFPVAPFDEVTFKLGQKGGQNCFGCQQSLINTGGQSNIHVCCPKCKHHFCFDCDIYIHESLHNCPGCESQCSSSR

SEQ ID NO: 17692 - protein, 1140 aa, Oryza sativa
MKSGKSKFAVANITSTAWRGRRQGGQRAPPSLNMPSTTPPPPQSSLPPSTGEKQDGNSDVEGNLEAVSPLAQTTHATGFGAKINDNDGHPAASREGEGRRGRRPPVASAREAAILKTKWCCEEGGARRGLDAAWGSRGRNYGLFGFTMNDYLSVGTVISFTTIINFGRVMMALAVDVSRFEGVPMAPPDPILGVSEAFKADQNDLKLNLGVGAYRTEELQPYVLNVVKKAETLMLEKGENKEYLPIEGLAAFNKATAELLFGADNPVLKQGRVATLQSLSGTGSLRLAAAFIQRYFPEAKVLISSPTWGNHKNIFNDAKVPWSEYRYYDPKTVGLDFEGMIADIQAAPDGSFVLLHGCAHNPTGIDPTPEQWEKIADVIQEKKHMPFFDVAYQGFASGSLDEDASSVRLFVQRGLEVFVAQSYSKNLGLYAERIGAINVVCSTPEVANRVKSQLKRLARPMYSNPPIHGARIVANVVGDPTMFGEWKQEMEEMAGRIKNVRQKLYDSLSAKDDSGKDWSFILRQIGMFSYTGLNKTQSDNMTDKWHIYMTKDGRISLAGLSLAKCEYLADAIIDSFHNGPSSHVYVNKDSNTEKVKLPEKIGCQKTSWYQSRPAGGRRRLNPSWPEAWRLEQGRECASAAARKSGASAARRGGRSRAAAGAELLLLLGAELAGRSGSCSVVAGSQHSEDFASLVENQGIEQVMGKLVDMLAKKFSEASTTSNAIIPHTESILKIELMQNEIKLEGVKNYLSWSRRALLILKTKGLEGYVTGEVKEPENTSSVEWKTWSTTNSLVVAWLLTSLIPAIATTVETISSAREMWKTLTKLYSGEGNVMLMVEAQEKISALRQGERSVAEYVVELKSLWSDLDHYDPLGLEHSDCIAKMKKWVERRRVIEFLKGLNPEFEGRRDAMFHQTTLPTLDEAIAAMAQEELKKKVLPSAAPCSPSPTYAIVQGKETRECFNCGEMGHLMRDCHAPRKPTYGRGRGVDRGGTRGGRGYAGRSNRGRGYGYRGDYKANAVTLEEGSSGTTPDNVANFAHSTSGSFNQAFMSMNTSHSSWILDSGASRHVTGMSGEFTSYKPYSFAHKETIQTADGTSCQERRTGKKLGISIRRDGLWYLDRRGTNEDVCALMASTSKEVTE

SEQ ID NO: 17693 - protein, 157 aa, Leuconostoc mesenteroides subsp. mesenteroides ATCC 8293
MSIYDYFATLENGETYSLNKLANHPVVIVNTATKCGYAPQFGELEKLYKKYKDKGLVILGFPSNQFKQELETASQAAQACQLTYGVTFPMHQLVAVNGKNTDPLFKYLKENSKGMLGSSTIKWNFTKFLVDKEGNVVKRYAPKTEPKDLEEDIEDVL

SEQ ID NO: 17694 - protein, 434 aa, Streptococcus intermedius
MSIITDVYAREVLDSRGNPTLEVEVYTESGAFGRGMVPSGASTGEHEAVELRDGDKSRYGGLGTQKAVDNVNNIIAEAVIGYDVRDQQAIDRAMIALDGTPNKGKLGANAILGVSIAVARAAADYLEIPLYSYLGGFNTKVLPTPMMNIINGGSHSDAPIAFQEFMIVPAGAPTFKEALRWGAEIFHALKKILKSRGLATAVGDEGGFAPRFDGTEDGVETILAAIEAAGYVPGKDVFLGFDCASSEFYDKERKVYDYTKFEGEGAAVRTADEQIDYLEELVNKYPIITIEDGMDENDWDGWKKLTERLGKKVQPVGDDFFVTNTSYLEKGINEACANSILIKVNQIGTLTETFDAIEMAKEAGYTAVVSHRSGETEDSTIADIAVAANAGQIKTGSLSRTDRIAKYNQLLRIEDQLGEVAEYRGLKSFYNLSK

SEQ ID NO: 17695 - protein, 347 aa, Sinorhizobium meliloti 1021
MAIARGYAATDASKPLAPFTFERREPRDDDVVIDIKYCGVCHSDIHQARDEWGNSTFPMVPGHEIVGIVRAVGSQVTRFKIGDRVGVGCFVDSCTTCAKRDLDLEQYLPGLVVTYNGVEADGTPTQGGYSDHIVVKEGYVLSIPENLPLDAAAPLLCAGITLYSPLRHWKAGPGKKVAIVGLGGLGHMGVKLAHAMGAEVTVLSQTLSKKEDGLKLGADHYYATKDPETFTKLAGSFDLIICTVAAEIDWNAYLNLLKVDGELVLVGIPENPVPVHAFSLVPARRSISGSMIGSIKETQEMLDFCGEHGIVSEIETIRMEQINEAYERVVRSDVRYRFVIDMESIKA

SEQ ID NO: 17696 - protein, 268 aa, Bouteloua dimorpha
ASYAAAAMPALDVLPEKPHHGWESNGGAAVAPTPAPRRLDGKVAIVTGGARGIGEAIVRLFVKHGARVVIADIDAAAGDALAAALGPQVSCVRCDVSVEDDVKRAVEWAVARHGRLDVLCNNAGVLGRQTRAAKSILSFDAGEFDRVLRVNALGAALGMKHAALAMAPRRAGSIVSVASVAGVLGGLGPHAYTASKHAIVGLTKNAACELGAHGIRVNCVSPFGVATPMLVNAWRQGHAAAVPSDEEVEKMEEVVRGFATLKGPTLRP

SEQ ID NO: 17697 - protein, 299 aa, Acinetobacter sp. ADP1
MTASKQRKGIILAGGSGTRLYPITMGTSKQLLPIYDKPMIYYPLSVLMLAGIQDILIISTPEDLPNFEKLLGTGEELGIRLSYKVQPSPDGLAQAFILGEEFIGQDNVTLILGDNIFYGQSFGQQLKRAAEQQTGATVFGYYVNDPERFGVVDFDENGKALSIEEKPEQPKSNYAVTGLYFYDNTVVEIAKNIKPSHRGELEITDVNNVYLQQNNLNVEVLGRGFAWLDTGTHDSLLEASQFVQTIEHRQGLKVASLEEISFNNGWINADQLKARGEFFKKTGYGQYLLKLYKDQSNKA

SEQ ID NO: 17698 - protein, 268 aa, Bouteloua dimorpha
ASYAAAAMPALDVLPEKAHHGWESNGGAAVAPTPVPRRLDGKVAIVTGGARGIGEAIVRLFVKHGARVVIADIGAAAGDALATALGPQVSCVRCDVSAEDDVKRAVEWAVARHGRLDVLCNNAGVLGRQTRAAKSILSFDAGEFDRVLRVNALGAALGMKHAAQAMAPRRAGSIVSVASVAGVLGGLGPHAYTASKRAIVGLTKNAACELGAHGIRVNCVSPFGVATPMLVNAWRHGHAAAVPSDEEVEKMEEVVRGFATLKGPTLRP

SEQ ID NO: 17699 - protein, 579 aa, Chlamydomonas reinhardtii
MASPAPSGSPPLVIYSCTDEQMLEVTELVGDSATAAIVCSQYDCSFTAVSCVLKYLAAQQADLSEQMDGTAKAEVALSLDVAFLLFSAYLVFGPMQLGFALLCAGAIRSKNSMNVLMKNILDACTGAIGFYLFGYAFAFGHHANQTSNAFIGDHNFALSYTTQVSSLDSNVSYDGFATQGWHVFFFQWSFCAAATTIVSGAVAERCTFQAYLAYAFFISSFVYPVVVHWVWSASGWLSAFNTSRDGYALLLQTGAIDFAGGGVVHLTGGMAALMGAWIIGPRIGRFDASGKVNEMKGHSATLVVMGTFLLWFGFYGFNPGSNLTIATTASAIVVSRVAVTTTLSAGAAGLTGLFWRYMRTSTWDTVLVCNCCLAGLVGITCSCSVVEPWAALICGFVAAFVFIGFEYVVLYKMKIDDPVSAVALHLFCGVWGLLFPGLLAQPTYVADVYGAYGFGPDVKGSKKFGILYGGHGQVLLCQVIEALSICAWVGVMMGAFFGLLKVAKRLRVPVDQELAGLDVSKHTNEAYNGAIMPTAGGGAGGGGGYGSNGGERGSGFYTGAGPAGDTSTGGGHAANGGYD

SEQ ID NO: 17700 - protein, 268 aa, Bouteloua dimorpha
ASYAAAAMPALDVLPEKAHHGWESNGGAAVAPTPVPRRLDGKVAIVTGGARGIGEAIVRLFVKHGARVVIADIDAAAGDALAAALGPQVSCVRCDVSVEEDVKRAVEWAVARHGRLDVLCNNAGVLGRQTRAARSILSFDAGEFDRVLRVNALGAALGMKHAAQAMAPRRAGSIVSVASVAGVLGGLGPHAYTASKHAIVGLTKNAACELGAHGIRVNCVSPFGVATPMLVNAWRQGHAAAVPSDEEVEKMEEVVRGFATLKGPTLRP

SEQ ID NO: 17701 - protein, 579 aa, Chlamydomonas reinhardtii
MASPAPSGSPPLVIYSCTDEQMLEVTELVGDSATAAIVCSQYDCSFTAVSCVLKYLAAQQADLSEQMDGTAKAEVALSLDVAFLLFSAYLVFGPMQLGFALLCAGAIRSKNSMNVLMKNILDACTGAIGFYLFGYAFAFGHHANQTSNAFIGDHNFALSYTTQVSSLDSNVSYDGFATQGWHVFFFQWSFCAAATTIVSGAVAERCTFQAYLAYAFFISSFVYPVVVHWVWSASGWLSAFNTSRDGYALLLQTGAIDFAGGGVVHLTGGMAALMGAWIIGPRIGRFDASGKVNEMKGHSATLVVMGTFLLWFGFYGFNPGSNLTIATTASAIVVSRVAVTTTLSAGAAGLTGLFWRYMRTSTWDTVLVCNCCLAGLVGITCSCSVVEPWAALICGFVAAFVFIGFEYVVLYKMKIDDPVSAVALHLFCGVWGLLFPGLLAQPTYVADVYGAYGFGPDVKGSKKFGILYGGHGQVLLCQVIEALSICAWVGVMMGAFFGLLKVAKRLRVPVDQELAGLDVSKHTKEAYNGAIMPTAGGGAGGGGGYGSNGGERGSGFYTGAGPAGDTSTGGGHAANGGYD

SEQ ID NO: 17702 - protein, 268 aa, Bouteloua dimorpha
ASYAAAAMPALDVLPEKAHHGWESNGGAAVAPTPAPRRLDGKVAIVTGGARGIGEAIVRLFAKHGARVVIADIDAAAGDALATALGPQVSCVRCDVSVEDDVKRAVEWAVARHGRLDVLCNNAGVLGRQTRAAKSNLSFDAGEFDRVLRVNALGAALGMKHAAQAMAPRRAGSIVSVASVAGVLGGLGPHAYTASKHAIVGLTKNAACELGAHGIRVNCVSPFGVATPMLVNAWRQGHAAAVPSDEEVEKMEEVVRGFATLKGPTLRP

SEQ ID NO: 17703 - protein, 474 aa, Escherichia coli CFT073
MQHKLLINGELVSGEGEKQPVYNPATGDVLLEIAEASAEQVNAAVRAADAAFAEWGQTTPKARAECLLKLADVIEENGQVFAELESRNCGKPLHSAFNDEIPAIVDVFRFFAGAARCLNGLAAGEYLEGHTSMIRRDPLGVVASIAPWNYPLMMAAWKLAPALAAGNCVVLKPSEITPLTALKLAELAKDIFPAGVINVLFGRGKTVGDPLTGHPKVRMVSLTGSIATGEHIISHTAPSIKRTHMELGGKAPVIVFDDADIEAVVEGVRTFGYYNAGQDCTAACRIYAQKGIYDTLVEKLGAAVATLKSGSPDDESTELGPLSSLAHLERVSKAVEEAKATGHIKVITGGEKRKGNGYYYAPTLLAGALQDDAIVQKEVFGPVVSVTLFDNEEQVVNWANDSQYGLASSVWTKDVGRAHRVSARLQYGCTWVNTHFMLVSEMPHGGQKLSGYGKDMSLYGLEDYTVVRHVMVKH

SEQ ID NO: 17704 - protein, 268 aa, Bouteloua dimorpha
ASYAAAAMPALDVLPEKAHHGWESNGGAAVAPTPAPRRLDGKVAIVTGGARGIGEAIVRLFVKHGARVVIADIDAAAGDALAAALGPQVSCVRCDVSVEEDMKRAVEWAVARHGRLDVLCNNAGVLGRQTRAARSILSFDAGEFDRVLRVNALGAALGMKHAALAMAPRRAGSIVSVASVAGVLGGLGPHAYTASKHAIVGLTKNAACELGAHGIRVNCVSPFGVATPMLVNAWRQGHAAAVPSDEEVEKMEEVVRGFATLKGPTLRP

SEQ ID NO: 17705 - protein, 412 aa, Escherichia coli O157:H7 EDL933
MPQQNYLDELTPAFTPLLAIKEASRCLLCHDAPCSQACPAQTDPGKFIRSIYFRNFKGAAETIRENNALGAVCARVCPTEKLCQSGCTRAGVDAPIDIGRLQRFVTDFEQQTGMEIYQPGTKTLGKVAIIGAGPAGLQASVTLTNQGYDVTIYEKEAHPGGWLRNGIPQFRLPQSVLDAEIARIEKMGVTIKCNNEIGKTLTLEQLKAENRAVLVTVGLSSGSGLPLFEHSDVEIAVDFLLRARQAQGDISIPQSALIIGGGDVAMDVASTLKVLGCQAVTCVAREELDEFPASEKEFASARELGVSIIDGFTPVAVEGNKVTFKHVRLSGELTMAADKIILAVGQHARLDDFAKLEPQRNTIKTQNYQTRDPQVFAAGDIVEGDKTVVYAVKTGKEAAEAIHHYLEGACSC

SEQ ID NO: 17706 - protein, 472 aa, Escherichia coli O157:H7 EDL933
MVTINTESALTPRSLRDTRRMNMFVSVAAAVAGLLFGLDIGVIAGALPFITDHFVLTSRLQEWVVSSMMLGAAIGALFNGWLSFRLGRKYSLMAGAILFVLGSIGSAFATSVEMLIAARVVLGIAVGIASYTAPLYLSEMASENVRGKMISMYQLMVTLGIVLAFLSDTAFSYSGNWRAMLGVLALPAVLLIILVVFLPNSPRWLAEKGRHIEAEEVLRMLRDTSEKAREELNEIRESLKLKQGGWALFKINRNVRRAVFLGMLLQAMQQFTGMNIIMYYAPRIFKMAGFTTTEQQMIATLVVGLTFMFATFIAVFTVDKAGRKPALKIGFSVMALGTLVLGYCLMQFDNGTASSGLSWLSVGMTMMCIAGYAMSAAPVVWILCSEIQPLKCRDFGITCSTTTNWVSNMIIGATFLTLLDSIGAAGTFWLYTALNIAFVGITFWLIPETKNVTLEHIERKLMAGEKLRNIGV

SEQ ID NO: 17707 - protein, 420 aa, Arabidopsis thaliana
MGENGAKRWNFGANEVVERSNSLTIRDYLNTLINCLDGGDVRPVIPLGHGDPSPFPSFRTDQAAVEAICDAVRSTKFNNYSSSSGVPVARKAVAEYLSSDLSYQISPNDVHITAGCVQAIEILISALAIPGANILLPRPTYPMYDSRAAFCQLEVRYFDLLPENGWDVDLDGVEALADDKTVAILVINPCNPCGNVFSRQHLQKIAETACKLGILVIADEVYDHFAFGDKPFVSMAEFAELVPVIVLGAISKRWFVPGWRLGWMVTLDPHGIMKDSGFVQTLINVVNMSTDPATFIQGAMPDIIGNTKEEFFSSKLEMVKKCAEICYEELMKIPCITCPCKPEGSMFTMVKLNFSLLEDISDDLDFCSKLAKEESMIILPGQAVGLKNWLRITFAVELELLIEGFSRLKNFTERHSKNQP

SEQ ID NO: 17708 - protein, 359 aa, Agrobacterium rhizogenes
MFVRSDALSRIKPSATIVVSQKFRELKAEGRDVVRLNIGEPDFDTPDNIKTAAIDAINRGETKYTPVSGIPELRKAIASKFKRENGLEYSWEQTIVGTGGKQILFNAFMATLNPGDEVVIPAPYWVSYPEMVALCGGTPVFVSATQEHDFKLQPADLEKAITPKTKWFIFNSPSNPTGAAYTHAELKALTNVLMQHPHVWVLTDDMYEHLTYSDFKFVTPVEVEPSLYDRTLTMNGVSKAYAMTGWRRLCRRPAPAHQGHGHDPGAADLGCDVDRPVGGCRSAERHPGLHPGEQEDLRRPPRPRRLHAEPGQGHRLPGAGRRLLRLSVLRRPDRQDGAVGQGHRDGRGFRFRASGIGRR

SEQ ID NO: 17709 - protein, 439 aa, Rhodospirillum rubrum
MTNPARARTLPAGASLPALALLVLAGLGLGAPAIAQESLASPLPGPLTDPALWPVPLPLLMQGLLVMGLLAGLTLFQSGLVRPGASGAQAIKGICGSALAVLAFFFIGSNVLMVGVNGGFHGTFAFFPLPVEGATPDAMAEWFLRAPFAALPVLIVAGALAERLRLWPFMIFAVVLAAVLGPIAGSWSWGGGWLDRLGFVDIGGATVLHSAAGWAALVGAVLLGARKGKFTSNGAIHALPTNSLALATFGTFAGWIGWFGLTGGAVLLAVPEAGPAILVPTYVNTLLAGAAGLAVALIVSLIVGRNGVMARGLQGALAGLVSISAAPHLPMPLVALAIGAIGGLLVVIAVPLIERLRIDDATGAISVHLICGLWATLVVSVIDPTVPLTTQALGAAAVGGAMVLASFVVWLAIKLTLGLRIAFEDESGAQEHRDLGLDV

SEQ ID NO: 17710 - protein, 598 aa, Ralstonia metallidurans CH34
MAAIEVKVPQLSESVSEATLMQWKKQAGEAVKRDEILVELETDKVTLEVPSPADGVLAKIVQPDGATVHTDDVIAVVDTEGKAVAAASPVAAAAPASAPAPAPAPAPVAAVASGGAGAPASAKADFDVIVIGSGPGGYIAAIRAAQLGKTVACIEEWKDDAGKPRLGGTCLNVGCIPSKALLASSEYFEQAKHGLAEHGVQVKGVTLDLAQMIQRKAAIVDKFTGGVEFLFRKNKVTWIKGHGKFKGRAADGVITVEASNGGETTSHTARNVIIATGSKARHLSGVPVDNKIVSDNEGALSFDSVPKKLAVIGAGVIGLELGSVWRRLGSEVTLLEALPTFLGALDEAVAREAAKQFGKQGLTIHLGVDIGNIEATAKGVSIAYKDKDGAEQKLVADRLIVSIGRVPNTDNLGLDAVGLAADARGFIPVDDQCRTPVAGIYAIGDVVRGPMLAHKAEDEGVMAAEVIDGQKPHIDYNCIPWVIYTEPEIAWVGKSEAQLKAEGREFRSGQFPMMANGRALGIGHPDGFIKMIADAKTDEILGVHIISANASDLIAEAVVAMEFKAASEDIGMICHPHPSLSEVMREAALAVRKRALNM

SEQ ID NO: 17711 - protein, 436 aa, Streptomyces avermitilis MA-4680
MTLAAARIDTGDTAWLLAATALVLLMTPGLALFYGGMVRTKSVLNMLMMSFVSIALVTVVWLAAGYSLAFGDDLAGGLIGGLDHAGLADLGPADVHGTVPTLLFATFQLTFAIITAALISGAIADRAKFAAWLVFVPLWALLVYVPVAHWVWGPGGWILDRLGALDFAGGLPVEITSGASGLALCLVLGPRLGFKKDAMRPHNLPMVMLGAGLLWFGWFGFNAGSALGANGLAAAAFLNTLAAGCTGLLGWLFVEQKRDGHPTTLGAASGAVAGLVAITPSCGAVSLLGALVVGLAAGVVCSYAVGWKFKLNYDDSLDVVGVHLVGGIIGTLLIGVFAAKEMTGGTEGLLYGGGLGQLGKQLVAVVAVGAYAFAVTYGLGKLIDKVMGLRAAEDDEHQGLDLTVHAETAYDHGILGHGAPSSASVVPTAQKVKSQA

SEQ ID NO: 17712 - protein, 360 aa, Heliobacillus mobilis
MHPLTEKTELRGLLPEEMAQTLQEWGHPAYRGKQIFKWVQSRAVREAAEMTDLPQALRSKIEAERWLRPLALSCCRVSKDGTEKYLWQLADGELIETVLMPYRRSQTRDRVTVCLSTQAGCPLGCKFCATGQQGFRRNLTAGEIVSQVLDITHRKGQSDPDFKVTNLVFMGMGEPFLNYEQVRRAIELFTHPEGQNIGQRRITVSTSGIVPGIERFARENWEINLALSLHAADDQLRSQWMPVNRQYPIEKVLNACRRYWEQGRRRLSVEYALIEGVNDRLEDARQLGKLFTRWPIHLNVIPVNPVTESGARRPDKARMVQFLDELKRQGIDAVIREERGVDIEAACGQLRGAAHGEGET

SEQ ID NO: 17713 - protein, 282 aa, Zymomonas mobilis
MMSPISIPSIRLNDGNDLPAVGFGTYKLNGSAGVSDIVSAIKVGYRLLDSAFNYENEGAVGEVFREAGIARDKLRIVSKLPGRHHHFEEAIATVEESLYRAQLDYYDLYLIHWPNPSKDLYVEAWQALIEARKKGLIRSIGVCNFLPEHLERLIKETGVTPVVNQVELHPYFPQEEQRAWDKAHGIVTESWSPLGRASKLLQDDTIKKIADRLGKSIPQVILRWHVQLGAIPIPKASSKERQIENLSLFDFELSPQDVEIIATLARPDGRLADQDPARYEEF

SEQ ID NO: 17714 - protein, 270 aa, Escherichia coli O157:H7
MKSLFKVTLLATTMAVALHAPITFAAEAAKPATTADSKAAFKNDDQKSAYALGASLGRYMENSLKEQEKLGIKLDKDQLIAGVQDAFADKSKLSDQEIEQTLQAFEARVKSSAQAKMEKDAADNEAKGKEYREKFAKEKGVKTSSTGLVYQVVEAGKGEAPKDSDTVVVNYKGTLIDGKEFDNSYTRGEPLSFRLDGVIPGWTEGLKNIKKGGKIKLVIPPELAYGKAGVPGIPPNSTLVFDVELLDVKPAPKADAKPEADAKAADSAKK

SEQ ID NO: 17715 - protein, 448 aa, Glycine max
  unsure (1)..(448): unsure at all Xaa locations
IHTSFAPSPRLSLKTVATHSRCRKWSSTRLLLGVLQPALSNSVFNHLVRAHADAILGEIVTHTKAPSPVTRQLWEWVLSRSEEGTPLVLKVVXGCDWKLINXDALRNXAIWFPIVGLADFNXLSTXCLIFGADSPVIQDNRVTTVQCLSGTGSLRVGGEFLAKHYHQRTIYLPTPTWGNHPKVFNLAGLSVKTYRYYAPATRGLDFQGLLEDLGSAPSGSIVLLHACAHNPTGVDPTLEQWEQIRQLIRSKALLPFFDSAYQGFASGSLNADAQPVRLFVADGGELLVAQSYAKNLGLYGERVGALSIVCKSADVASRVESQLKLVIRPMYSSPPIHGASIVAAILKDRNLFNDWTIELKAMADRIISMRQELFDALCSRGTPGDWSHIIKQIGMFTFTGLNAEQVSFMTKEFHIYMTSDGRISMAGLSSKTVPLLADAIHAAVTRVV

SEQ ID NO: 17716 - protein, 419 aa, Bacillus cereus ATCC 14579
MIEIKVPELAESITEGTISQWLINVGDKVEKGGSVVELETDKVNVEIIAEDSGIVSKLLGEPGDTVEVGATIAILDANGAPVAVSTPAPAAEQPKQETAETPKAAAPSAEQTATLQGLPNTNRPIASPAARKMARELGIDLNDVRSTDPLGRVRPHDVQAHAAAPKEAPAAPKSPAPAPVAKTEFEKPVERVKMSRRRQTIAKRLVEVQQTSAMLTTFNEVDMSAIMELRKERKDAFEKKHDVRLGFMSFFTKAVVAALKQFPLLNAEIQGDELIIKKFYDIGIAVAAPDGLVVPVVRDANQLNFAEIESEIRELGKKARDNKLSLKELQGGTFTITNGGVFGSLMSTPILNSPQVGILGMHKIQVRPVAIDNERMENRPMMYIALSYDHRIVDGKEAVSFLVAVKDMLEDPKSLLLEG

SEQ ID NO: 17717 - protein, 548 aa, Mesembryanthemum crystallinum
MAAITSSCCARVLPPFECRPEPADFSTAAAKQEKNIPKSFFGGANGRLFSSSSSSLILRFPPNFVRQLSTKARRNCSNIGVAQVVAASWSNNSDAGATSCGGVPAATAVDAAAIAAVDHVEIDGGAVVEDSNDGGVKELSSNNSNTLGLGDFRPPFLSSDGSVAIHAGERLGRGIVTDAITTPVVNTSAYFFKKTADLIDFKEGRQTSFEYGRYGNPTSVVLEDKISALEGAESTILLASGMCASIVLMLALVPAGGHIVTTTDCYRKTRIFIETFLPKMGITATVIDPADVEGLKSALDENNVTLFFTESPTNPFLRCVDIKLVSELCHKKGALVCIDGTFATPLNQKALALGADFVVHSMTKFIGGHNDVLGGCISGSKNLISTIRTFHHVLGGTLNPNAAYLMIRGMKTLHLRVQQQNTTALRMAEILEAHPKVKHVYYPGLPSHPEHKLAKRQMTGFGGVVSFEVDGDLLTTAKFVDSLKIAYIAPSFGGCESIVDQPAIMSYWDLSPSDRLKYGIKDNLVRFSFGVEDFEDLKADVLQALEAI

SEQ ID NO: 17718 - protein, 311 aa, Bordetella parapertussis 12822
MKLAFVFPGQGSQSVGMLDAWAGNAAVADVVARASAALGQDLGALMAQGPAEQLNLTTNTQPAMLTAGAACFAAWRAAGGPMPEVMAGHSLGEYAALTAAGALALEDAVRLVRVRADAMQAAVPVGAGAMAAVLGLDDDAVRAACQQAAQGEVVEVVNFNAPAQVVIAGHKAAVERACEAAKAAGAKRALLLPVSAPFHSSLLKPAAEVLQGALAGVAVSAPQVPVLNNVDVATPAEPAAIRDALVRQAWHPVRWVETLRAMKELGVTHVIECGPGKVLTGLTKRIDADLTGIAITDPASLEAALAAVNGN

SEQ ID NO: 17719 - protein, 268 aa, Bouteloua dimorpha
ASYAAAAMPALDVLPEKAHHGWESNGGAAVAPTPVPRRLDGKVAIVTGGARGIGEAIVRLFVKHGARVVIADIDAAAGDALAAALGPQVSCVRCDVSVEEDVKRAVEWAVARHGRLEVLCNNAGVLGRQTRAARSILSFDAGEFDRVLRVNALGAALGMKHAAQAMAPRRAGSIVSVASVAGVLGGLGPHAYTASKHAIVGLTKNAACELGAHGIRVNCVSPFGVATPMLVNAWRQGHAAAVPSDEEVEKMEEVVRGFATLKGPTLRP

SEQ ID NO: 17720 - protein, 268 aa, Bouteloua dimorpha
ASYAAAAMPALDVLPEKAHHGWESNGGAAVAPTPAPRRLDGKVAIVTGGARGIGEAIVRLFAKHGARVVIADIDAAAGDALAAALGPQVSCVRCDVSVEDDVKRAVEWAVARHGRLDVLCNNAGVLGRQTRAARSILSFDAGEFDRVLRVNALGAALGMKHAAQAMAPRRAGSIVSVASVAGVLGGLGPHAYTASKHAIVGLTKNAACELGAHGIRVNCVSPFGVATPMLVNAWRQGHADAVPSDEEVEKMEEVVRGFATLKGPTLRP

SEQ ID NO: 17721 - protein, 268 aa, Bouteloua dimorpha
ASYAAAAMPALDVLPEKPHHGWESNGGAAVAPTPAPRRLDGKVAIVTGGARGIGEAIVRLFVKHGARVVIADIDAAAGDALAAALGPQVSCVRCDVSVEDDVKRAVEWAVARHGRLDVLCNNAGVLGRQTRAAKSILSFDAGEFDRVLRVNALGAALGMKHAAQAMAPRRAGSIVSVASVAGVLGGLGPHAYTASKHAIVGLTKNAACELGAHGIRVNCVSPFGVATPMLVNAWRQGHAAAVPSDEEVEKMEEVVRGFATLKGPTLRP

SEQ ID NO: 17722 - protein, 479 aa, Mycobacterium avium subsp. paratuberculosis str. k10
MRVTYPILGQPNTGDTAWMLASSALVLLMTPGLAFFYGGMVRARSVLNMLMMSISAMGVVTVLWVLYGYSVAFGDDVGNFMGKPTSYWGLKGLIGVNAVAADPSKGTAATDIPLAGTLPATVFVAFQLMFAIITVALISGAVSDRLKFAAWLVFAGLWATFVYFPVAHWVFAFDGFASEHGGWIANKLHAIDFAGGTAVHINSGVAGLMLAIVLGKRRGWPTTLFRPHNLPFVMLGAGLLWFGWYGFNAGSATSSNGAAGSTFMTTTIATATAMLAWMLTERIRDGKATTLGAASGIVAGLVAITPSCSSVNVLGALVVGLVAGVVCALAVGLKFKLGFDDSLDVVGVHLVGGLAGTLLVGLLAAPESPAISGVTGVSKGLFYGGGWAQLERQAVGAFSVLIYSGVVTLILALILKYTMGLRLNPEAEASGIDEAEHAESGYDFAVATGSVLPPRVAVADTRNGLEEQRVGDKVEAEQS

SEQ ID NO: 17723 - protein, 284 aa, Streptomyces coelicolor A3(2)
MTPDHAHTPEGTEPMTQKVAVLGTGKIGEALLSGMIGAGWAPADLLVTARRRERADELRARHGVTPVTNAEAAKAADTLILTVKPQDMGTLLDELAPHVPADRLVISGAAGVPTSFFEERLAPGTPVVRVMTNTPALVDEAMSVISAGTHATAAHLTHTEEIFGAVGKTLRVPESQQDACTALSGSGPAYFFYLVEAMTDAGILLGLPRDKAHDLIVQSAIGAAKMLRDSGEHPVKLRENVTSPAGTTINAIRELENHGVRAALIAALEAARDRSRELATGTKD

SEQ ID NO: 17724 - protein, 258 aa, Bordetella parapertussis 12822
MQTPHSQPESAPQGEQSTHFGFQSVPEADKARKVAEVFHSVASRYDVMNDLMSAGLHRVWKAFTIGRAAVRPGMKVLDIAGGTGDLARAFAKRAGPSGEVWLTDINESMLRVGRDRLTDSGLLVPTAVCDAERLPFPSQYFDRVSVAFGLRNMTHKDRALAEMTRVLKPGGKLLVLEFSRVAKPLAPAYDWYSFNVLPWMGKKVANDEASYRYLAESIRMHPDQETLAGMLRDAGLDRVQYFNLTAGVAALHEGVRLG

SEQ ID NO: 17725 - protein, 295 aa, Acinetobacter sp. ADP1
MVDKMIKKAILPVAGLGTRFLPASKSIPKEMVTVVDRPAIEYVVREAVEAGITQIILVTHSSKASIENYFDRNFELETTLEQKKKHDLLAEISNIVPAGVTIVSVRQPQPLGLGHAVLCAKDVVGDDDFAVLLPDVLVKAKQATHDLTQMIARFDAAQAAQIMVEAVPDHLVDQYGIVDVAQIPAEGQSEVMKGIVEKPKQDQAPSNLSVVGRYILPAKIMQLLEQTPKGAGNEIQLTDAIALLQKTNVVEAYRMQGQTFDCGSKLGYLKAVLHYGLEHPKLGHDFKQLINELDL

SEQ ID NO: 17726 - protein, 454 aa, Staphylococcus xylosus
PSGPLLMQDIYFLEQMAHFDREVIPERRMHAKGSGAFGTFTVTNDITKYTCASIFAEVGKQTEMFARFSTVAGERGAGDAERDIRGFALKFYTDEGNWDLVGNNTPVFFFRDPKLFPSLNHVVKRNPKTNMKDPQANWDFWTLLPEALHQITILMTDRGIPKGFRNMHGFGSHTYSMYNDKGERFWVKFHHRTQQGIENYSAEEAEQVMAKDRDSSQRDLFNNIEQGNFPKWKMYIQVMTEEQARNHKDNPFDLTKVWYKDEYPLIEVGEFELNRNPENYFQDVEQAAFAPTNIVPGLDFSPDKMLQGRLFSYGDTQRYRLGVNHWQIPVNQPKGVGMENICPFSRDGQMRILDNNQGASTHYYPNSNGAFEDQPQYKKPALDIQGQAYEYDFREDDDNYFEQPGKLFRLLSSEEQQILFNNTANEMSPVTDALKHRHIRHCYKADPAYGQGVA

SEQ ID NO: 17727 - protein, 270 aa, Dechloromonas aromatica RCB
MDMAGTVVGIGQDVAGFSVGDDVFGFTGGIAGIQGSLAEYAAVDARLLARKPANLSMREAAALPLIFITAWEGLVDRAGVEADDYVLVHGGVGGVGHVAVQIAQSVGAKTFATVRSGDFEAASAFGAIPIDYARESVEQYVAERTAGEGFDIVFDTVGGDVLDASFRAAKNYRGHVVSALGWGTHALAPLSFRSATYSGVFTLLPLLTGKERAHHGDILRQAARLVDAGKLRVRMDAHRFGLEDVEAAHQLVASGKSEGKVVIDVFGATK

SEQ ID NO: 17728 - protein, 443 aa, Staphylococcus xylosus
GPLLMQDIYFLEQMAHFDREVIPERRMHAKGSGAFGTFTVTNDITKYTCASIFAEVGKQTEMFARFSTVAGERGAGDAERDIRGFALKFYTDEGNWDLVGNNTPVFFFRDPKLFPSLNHVVKRNPKTNMKDPQANWDFWTLLPEALHQITILMTDRGIPKGFRNMHGFGSHTYSMYNDKGERFWVKFHHRTQQGIENYSAEKAEQVMAKDRDSSQRDLFNNIEQGNFPKWKMYIQVMTEEQARNHKDNPFDLTKVWYKDEYPLIEVGEFELNRNPENYFQDVEQAAFAPTNIVPGLDFSPDKMLQGRLFSYGDTQRYRLGVNHWQIPVNQPKGVGMENICPFSRDGQMRILDNNQGASTHYYPNSNGAFEDQPQYKKPALDIQGQAYEYDFREDDDNYFEQPGKLFRLLSSEEQQILFNNTANEMSPVTDALKHRHIRHCYKA

SEQ ID NO: 17729 - protein, 405 aa, Zea mays
IGSRPPSLQSDMASTVTFSPVSTQAGLIHKPRNLGATSYAGLKVPSFGSESSFLGRNASLRAAVTTRIVPKAKSGSQISPQASYKVALLGAAGGIGQPLGLLIKMSPLVSELHLYDIANVKGVAADLSHCNTPAQVLDFTGPSELASCLKGVDVVVIPAGVPRKPGMTRDDLFNINASIVKSLVEAVADNCPEAFIHIISNPVNSTVPIAAEVLKQKGVYNPKKLFGVTTLDVVRANTFVAQKKNLNLIDVDVPVVGGHAGITILPLLSKTRPSVTFTDEEAEELTKRIQNAGTEVVEAKAGAGSATLSMAYAAARFVESSLRALAGDPDVYECTFIQSEATDLPFFASRVKLGKSGVESIVSADLEGVTECEAKALDALKAELKGSIEKGVAFASKQQEAAASV

SEQ ID NO: 17730 - protein, 447 aa, Staphylococcus xylosus
PLLMQDIYFLEQMAHFDREVIPERRMHAKGSGAFGTFTVTNDITKYTCASIFAEVGKQTEMFARFSTVAGERGAGDAERDIRGFALKFYTDEGNWDLVGNNTPVFFFRDPKLFPSLNHVVKRNPKTNMKDPQANWDFWTLLPEALHQITILMTDRGIPKGFRNMHGFGSHTYSMYNDKGERFWVKFHHRTQQGIENYSAEEAEQVMAKDRDSSQRDLFNNIEQGNFPKWKMYIQVKTEEQARNHKDNPFDLTKVWYKDEYPLIEVGEFELNRNPENYFQDVEQAAFAPTNIVPGLDFSPDKMLQGRLFSYGDTQRYRLGVNHWQIPVNQPKGVGMENICPFSRDGQMRILDNNQGASTHYYPNSNGAFEDQPQYKKPALDIQGQAYEYDFREDDDNYFEQPGKLFRLLSSEEQQILFNNTANEMSPVTDALKHRHIRHCYKADPAHG

SEQ ID NO: 17731 - protein, 473 aa, Glycine max
MSVQDYLDKHMLSRKLEDAVNAAVRAKTSDPVLFISNHMRKAVQSVITKIKARQILDSRGIPTVEVDLHTNKGVFRASVPSGNSTSMYEAVELRDGDKGVYLGNGVAKAVKNINDKISEALIGMDPTLQSQIDQAMIDLDKTEKKGELGANAILAVSIAACKAGAAEKEVPLYKHIADLSGKTSPTLPVPAFTVISGGKHAGSNLAIQEIMILPIGASKFEEALRMGTETYHHLKAVITEKYGAHNCNVGEDGGFAPNISSFREALDLVKEAISRAGYDEKIKIALDVAATDFCIGKRYDLDFQSPQKSGQNFKSAEDMIDLYKELCSEYPIVSIEDPFDKEDWEHIKHISSLGICQVVGDDLLMSNAKRIERAITESACNALLLKVNQVGTITEVIEVVKLAKEAHWGVVTSHRCGETIDSFIADLSVGLASGVIKAGAPCRGERLEKYNQLLRIEEELGDQAVYAGEDWRQ

SEQ ID NO: 17732 - protein, 454 aa, Staphylococcus xylosus
GPLLMQDIYFLEQMAHFDREVIPERRMHAKGSGAFGTFTVTNDITKYTCASIFAEVGKQTEMFARFSTVAGERGAGDAERDIRGFALKFYTDEGNWDLVGNNTPVFFFRDPKLFPSLNHVVKRNPKTNMKDPQANWDFWTLLPEALHQITILMTDRGIPKGFRNMHGFGSHTYSMYNDKGERFWVKFHHRTQQGIENYSAEKAEQVMAKDKDSSQRDLFNNIEQGNFPKWKMYIQVMTEEQARNHKDNPFDLTKVWYKDEYPLIEVGEFELNRNPENYFQDVEQAAFAPTNIVPGLDFSPDKMLQGRLFSYGDTQRYRLGVNHWQIPVNQPKGVGMENICPFSRDGQMRILDNNQGASTHYYPNSNGAFEDQPQYKKPALDIQGQAYEYDFREDDDNYFEQPGKLFRLLSSEEQQILFNNTANEMSPVTDALKHRHIRHCYKADPAYGQGVAEA

SEQ ID NO: 17733 - protein, 314 aa, Bacillus cereus ATCC 10987
MGKLAFLFPGQGSQAVGMGKQLAENNKEVANVFAKADEVLQDSLSEVIFEGPQEKLTLTTNAQPALLTTSFAILTALKEYDITPDFVAGHSLGEYSALVAAGALTFEDAVYAVRKRGEYMEEAVPGGEGAMAAILGADPHMLKQVTEEVTSEGHAVQIANMNSTKQIVISGTKQGVEIASQRAKENGAKRAIPLKVSGPFHSALMKPAAEKFQSVLNEITIQDTNIPVIANVTADVITSGAHIQEKLIEQLYSPVLWYPSIEYMVSQGVDTFIEIGPGKVLAGLMKSIDSSVKAYAIYDEETLQDTISNLRGES

SEQ ID NO: 17734 - protein, 352 aa, Haemophilus somnus 2336
MSINFVKEGNIMSKYVRSVCLVEPKKVDIKTVLYPKKGECDVLIKVESIGICGSDIGAFRGTNPLVTYPRILGHEIVGTVIEAGVGMPKNINIGDRVILEPYIYCGHCYPCSISRTNCCEALKVLGVHIDGAMQEIVRHPAHMLIKAPDIPIHELALAEPLTISLHAIRRTKVKAGEHVAIIGAGAIGLMAALVAKAYGATPILIDILDKRLDYAKSIGIPNIINPAKENDLEAIKSITNGRMAEVVIEASGANIAVQNTLKYTSFAGRIALTGWPKNETPLPTNLITFKELNIYGARTSKGEFEEALKLLESRKIEPKNIISKVITFDEIPHYIEELSENPDDYLKIIAVF

SEQ ID NO: 17735 - protein, 557 aa, Acinetobacter sp. ADP1
MNKNIEQFPRKTTLTPQQKLEQLMEQHKTVHLTELFDKEQDRFAKYCVGCEDLVFDFSKQRINQPILDALVQLAESKQLNKWIDTLFSQNKINYTEQREAMHWALRLPADNQVYPELAKQVSDQLERMYQLVNKIHEGQYRGATGEVIQDVVNIGVGGSDLGPLMVSHALSDFKVKTAKPLNIRFVSTMDGSQLSDILHQLRPETTLFIVSSKSFSTIDTLSNAHTARKWLEKALGRESSILKSHFIGVSTKPDKMTEWGIHPDNQFLLWDWVGGRYSLWSCIGLPIALTIGVEGFKAFLAGAHGIDEHFRTTEFHQNIPVLMGLMGIWNTNYLNLKTHAVLPYDGRLKYFTSYLQQLEMESNGKSTQRNGQKVENTTCPIVWGEVGPNAQHAFYQLLHQGTQKVSCDFIAPMHRYNANHFTYVENADALIDQHLLALSNCLAQSRLLAFGNDALKVDQREQLPAYKQYEGNQPSTTMLLKELSPRTMGKLIALYEHKVFVQSVIWDINPFDQWGVEKGKEIANDLLPILNGESSDLSHLDDSTQGLIQFLLGKSNG

SEQ ID NO: 17736 - protein, 586 aa, Mycobacterium tuberculosis CDC1551
MHRQATGHASCRPVGQSRRERGPAMEYLIAAQDVLVAAAADLEGIGSALAAANRAAEAPTTGLLAAGADEVSAAIASLFSGNAQAYQALSAQAAAFHQQFVRALSSAAGSYAAAEAANASPMQAVLDVVNGPTQLLLGRPLIGDGANGGPGQNGGDGGLLYGNGGNGGSSSTPGQPGGRGGAAGLIGNGGAGGAGGPGANGGAGGNGGWLYGNGGLGGNGGAATQIGGNGGNGGHGGNAGLWGNGGAGGAGAAGAAGANGQNPVSHQVTHATDGADGTTGPDGNGTDAGSGSNAVNPGVGGGAGGIGGDGTNLGQTDVSGGAGGDGGDGANFASGGAGGNGGAAQSGFGDAVGGNGGAGGNGGAGGGGGLGGAGGSANVANAGNSIGGNGGAGGNGGIGAPGGAGGAGGNANQDNPPGGNSTGGNGGAGGDGGVGASADVGGAGGFGGSGGRGGLLLGTGGAGGDGGVGGDGGIGAQGGSGGNGGNGGIGADGMANQDGDGGDGGNGGDGGAGGAGGVGGNGGTGGAGGLFGQSGSPGSGAAGGLGGAGGNGGAGGGGGTGFNPGAPGDPGTQGATGANGQHGLNG

SEQ ID NO: 17737 - protein, 109 aa, Zea mays
MRALLADGGMALAVSPEANESSGGAAVSLGPLSWASECHGVLYNLALMLPSLAFVGFLAWQARRSFRRLSYGRSHVVVVAYYALLWAVAVLNLLWCFLQVRIGCRLAAV

SEQ ID NO: 17738 - protein, 345 aa, Triticum aestivum
MGKKKKRVEKVFCYYCDREFDDEKILVQHQKAKHFKCHVCHKKLSTAGGMAIHVLQVHKESVTKVPNAKPERDSTEIEIFGMQGIPSDVLAAHYGEEEDPSSKVAKVEVPTIRPPIMPNYPLGMPFPPRPYGAARPMYNPAMMVRPPIWPLQQPQPWFAQQPPVSVPPMMAGQAPQQPLFPIQNMPNPMMTSAPANLLQTSYAMPTTGVPSPVAPQASQLLFPVNTSGNGAANSSFSSSISPATIAANSPASVGTAGYGYVANNHGTGGPAIGQPPAPATNSKTSATQPATSEVYLVWDDEAMSMEERRLALPMYQVHDETSQMSSVDAAFDRRISDITFSRQLT

SEQ ID NO: 17739 - protein, 293 aa, Clostridium perfringens str. 13
MKGIILAGGSGTRLYPVTKAMSKQMVPIYDKPMIYYPMSVLMLAGIREVLIISTERDLPNFKELFKDGSELGLNIEYKVQEAPNGLAEAFIIGEEFIGDDNVAMILGDNIFYGQNFSSNLKEAAALEKGAMVFGYYVQDPKAFGVVEFDENGKVISLEEKPEHPKSKYAVPGLYFYDNTVIEKAKGLKPSARGELEITDLNRLYMEEGTLKVNLFGRGMAWLDTGTHASMLQASNFVEAVQNTQGTYIACLEEIAYRKGWISSEKVLNLAKPLMKTGYGKYLVDIVEELEQKK

SEQ ID NO: 17740 - protein, 165 aa, Glycine max
  unsure (1)..(165): unsure at all Xaa locations
DTILQENEEREKSEWLSSLQLIYIYTLVVQYFSIFCASTLYLQTRSIVVFVINSHIVSTAAFSSSRWNYERWGGFDXPISSRNAKPPGVELWAVLDVPVHXVGASWKNLSHSLSGLFCASINFMESSTTYSTPELAFQSALGSLRYGTLPREIDKVWVPLPDEIL

SEQ ID NO: 17741 - protein, 181 aa, Solanum tuberosum
MASSIVSSAAVATRSNVAQASMVAPFTGLKSAASFPVTKKNNNVDITSLASNGGRVRCMQVWPPINMKKYETLSYLPDLSDEQLLKEVEYLLKNGWVPCLEFETEHGFVYREHNSSPGYYDGRYWTMWKLPMFGCTDGTQVLAEVQEAKNAYPQAWIRIIGFDNVRQVQCISFIAYKPEGY

SEQ ID NO: 17742 - protein, 388 aa, Paracoccus zeaxanthinifaciens
MKVPKMTVTGIEAISFYTPQNYVGLDILAAHHGIDPEKFSKGIGQEKIALPGHDEDIVTMAAEAALPIIERAGTQGIDTVLFATESGIDQSKAAAIYLRRLLDLSPNCRCVELKQACYSATAALQMACAHVARKPDRKVLVIASDVARYDRESSGEATQGAGAVAILVSADPKVAEIGTVSGLFTEDIMDFWRPNHRRTPLFDGKASTLRYLNALVEAWNDYRANGGHEFADFAHFCYHVPFSRMGEKANSHLAKANKTPVDMGQVQTGLIYNRQVGNCYTGSIYLAFASLLENAQEDLTGALVGLFSYGSGATGEFFDARIAPGYRDHLFAERHRELLQDRTPVTYDEYVALWDEIDLTQGAPDKARGRFRLAGIEDEKRIYVDRQA

SEQ ID NO: 17743 - protein, 197 aa, Zea mays
  unsure (1)..(197): unsure at all Xaa locations
MEFGSGPWLLFRGRSPXHLTEDNGFDVFVNGRRGGGGGVGMRRANIADYFVGPGLDDLIEQLTQNDRRGPPPAAQSSIDAMPTVKITQRHLSGDSHCPICKEKFEMGSEEAREMPCKHLYHSDCIVPWLEQHNSCPVCRYELPPQGSATGASCSRARSTDQSQSSSSSSSSGRTSGRQRRRNPFSFLWPFRSSSSSR

SEQ ID NO: 17744 - protein, 439 aa, Staphylococcus xylosus
FLEQMAHFDREVIPERRMHAKGSGAFGTFTVTNDITKYTCASIFAEVGKQTEMFARFSTVAGERGAGDAERDIRGFALKFYTDEGNWDLVGNNTPVFFFRDPKLFPSLNHVVKRNPKTNMKDPQANWDFWTLLPEALHQITILMTDRGIPKGFRNMHGFGSHTYSMYNDKGERFWVKFHHRTQQGIENYSAEEAEQVMAKDRDSSQRDLFNNIEQGNFPKWKMYIQVMTEEQARNHKDNPFDLTKVWYKDEYPLIEVGEFELNRNPENYFQDVEQAAFAPTNIVPGLDFSPDKMLQGRLFSYGDTQRYRLGVNHWQIPVNQPKGVGMENICPFSRDGQMRILDNNQGASTHYYPNSNGAFEDQPQYKKPALDIQGQAYEYDFREDDDNYFEQPGKLFRLLSSEEQQILFNNTANEMSPVTDALKHRHIRHCYKADPAHG

SEQ ID NO: 17745 - protein, 448 aa, Staphylococcus xylosus
GPLLMQDIYFLEQMAHFDREVIPERRMHAKGSGAFGTFTVTNDITKYTCASIFAEVGKQTEMFARFSTVAGERGAGDAERDIRGFALKFYTDEGNWDLVGNNTPVFFFRDPKLFPSLNHVVKRNPKTNIKDPQANWDFWTLLPEALHQITILMTDRGIPKGFRNMHGFGSHTYSMYNDKGERFWVKFHHRTQQGIENYSAEQAEQVMAKDRDSSQRDLFNNIEQGNFPKWKMYIQVMTEEQARNHKDNPFDLTKVWYKDEYPLIEVGEFELNRNPENYFQDVEQAAFAPTNIVPGLDFSPDKMLQGRLFSYGDTQRYRLGVNHWQIPVNQPKGVGMENICPFSRDGQMRILDNNQGASTHYYPNSNGAFEDQPQYKKPALDIQGQAYEYDFREDDDNYFEQPGKLFRLLSSEEQQILFNNTANEMSPVTDALKHRHIRHCYKADPAYG

SEQ ID NO: 17746 - protein, 450 aa, Staphylococcus xylosus
PRGPLLMQDIYFLEQMAHFDREVIPERRMHAKGSGAFGTFTVTNDITKYTCASIFAEVGKQTEMFARFSTVAGERGAGDAERDIRGFALKFYTDEGNWDLVGNNTPVFFFRDPKLFPSLNHVVKRNPKTNIKDPQANWDFWTLLPEALHQITILMTDRGIPKGFRNMHGFGSHTYSMYNDKGERFWVKFHHRTQQGIENYSAEKAEQVMAKDRDSSQRDLFNNIEQGNFPKWKMYIQVMTEEQARNHKDNPFDLTKVWYKDEYPLIEVGEFELNRNPENYFQDVEQAAFAPTNIVPGLDFSPDKMLQGRLFSYGDTQRYRLGVNHWQIPVNQPKGVGMENICPFSRDGQMRILDNNQGASTHYYPNSNGAFEDQPQYKKPALDIQGQAYEYDFREDDDNYFEQPGKLFRLLSSEEQQILFNNTANEMSPVTDALKHRHIRHCYKADPAYG

SEQ ID NO: 17747 - protein, 426 aa, Staphylococcus xylosus
REVIPERRMHATGSGAFGTFTVTNDITKYTCASIFAEVGKQTEMFARFSTVAGERGAGDAERDIRGFALKFYTDEGNWDLVGNNTPVFFFRDPKLFPSLNHVVKRNPKTNMKDPQANWDFWTLLPEALHQITILMTDRGIPKGFRNMHGFGSHTYSMYNDKGERFWVKFHHRTQQGIENYSAEEAEQVMAKDRDSSQRDLFNNIEQGNFPKWKMYIQVMTEEQARNHKDNPFDLTKVWYKDEYPLIEVGEFELNRNPENYFQDVEQAAFAPTNIVPGLDFSPDKMLQGRLFSYGDTQRYRLGVNHWQIPVNQPKGVGMENICPFSRDGQMRILDNNQGASTHYYPNSNGAFEDQPQYKKPALDIQGQAYEYDFREDDDNYFEQPGKLFRLLSSEEQQILFNNTANEMSPVTDALKHCHIRQCYIAD

SEQ ID NO: 17748 - protein, 440 aa, Cladosporium herbarum
MPISKIHSRYVYDSRGNPTVEVDIVTETGLHRAIVPSGASTGSHEACELRDGDKSKWAGKGVTKAVANVNEIIAPALIKENLDVKDQAAVDAFLNKLDGTTNKTKIGANAILGVSMAVAKAAAAEKRVPLYAHISDLSGTKKPFVLPVPFMNVVNGGSHAGGRLAFQEFMIVPSGAPSFTEAMRQGAEVYQKLKSLTKKRYGQSAGNVGDEGGVAPDIQTAEEALDLITDAIEEAGYTGQIKIAMDVASSEFYKADEKKYDLDFKNPDSDKSKWITYEQLADQYKQLAAKYPIVSIEDPFAEDDWEAWSYFYKTSGSDFQIVGDDLTVTNPEFIKKAIETKACNALLLKVNQIGTITEAINAAKDSFAAGWGVMVSHRSGETEDVTIADIVVGLRAGQIKTGAPARSERLAKLNQILRIEEELGDKAVYAGDNFRTAINL

SEQ ID NO: 17749 - protein, 465 aa, Staphylococcus xylosus
ENSMTAGPRGPLLMQDIYFLEQMAHFDREVIPERRMHAKGSGAFGTFTVTNDITKYTCASIFAEIGKQTEMFARFSTVAGERGAGDAERDIRGFALKFYTEEGNWDLVGNNTPVFFFRDPKLFPSLNHVVKRNPKTNMKDPQANWDFWTLLPEALHQITILMTDRGIPKGFRNMHGFGSHTYSMYNDKGERFWVKFHHRTQQGIENYTAEEAEQVIAKDRDSSQRDLFNTIEQGNFPKWKMYIQVMTEEQARNHKDNPFDLTKVWYKDEYPLIEVGEFELNRNPENYFQDVEQRAFAPTNIVPGLDFSPDKMLQGRLFSYGDTQRYRLGVNHWQIPVNQPKGVGMENICPFSRDGQMRILDNNQGASTHYYPNSNGAFEDQPQYKKPALDIQGQAYEYDFREDDDNYFEQPGKLFRLLSYEEQQTLFKNTANEMSPVTDALKHRHIRHCYKADPAYGQGVAEAMG

SEQ ID NO: 17750 - protein, 555 aa, Cryptococcus curvatus
MSASTKQASTTVAQPSGKPVTNVIDPERDDFIVPDNYVTRTVENMKMLPPVTWRNLHKNIQWISFLALTIPPAMAIYGLCTVPVQTKTFIWSVVYYFITGLGITAGYHRLWAHRSYNASKPLQYFLALCGAGSVQGSIRWWSRGHRAHHRYTDTKLDPYSAHEGFWHAHMGWMLIKPRGKIGVADISDLSKNPVVKWQHNNYVALLFFMGLAFPTLVAGLGWGDWWGGLFFAGAARLVFVHHSTFCVNSLAHWLGETPFDNKHTPKDHFITALVTVGEGYHNFHHQFPMDFRNAIKWYQYDPTKWFIWTMAQLGLASHLKKFPDNEIKKGQYTMKLMQLQEQSEKLEWPKHSNDLPVISWEDFQAESKTRALIAVHGFIHDCSSFIEDHPGGAHLIKRAIGTDSTTAFFGGVYDHSNAAHNLLAMMRVGVLDGGMEVEHLKVGRLTRSNSADSLVSDAPSSASSTVSASSILSEVEDMDKPERKPSTSRSPRCPTPGRSPCLLRRSIASSARPPRSAQDSSRASRAPPRPASHGQRALTLLSRLRAFSVEHPGFH

SEQ ID NO: 17751 - protein, 160 aa, Bacillus subtilis subsp. subtilis str. 168
MSIYHMKVRTITGKDMTLQPFAGKVLMIVNTASKCGFTSQLKQLQELYDTYQQEGLEILGFPCNQFMNQEPGEEADIQEFCETNYGVTFPMFSKVDVNGKNAHPLFVYLTEHAKGMLGTKAIKWNFTKFIVDRNGEIVGRYSPNTNPKELEDDIVKLLEQ

SEQ ID NO: 17752 - protein, 434 aa, Staphylococcus aureus
MPIITDVYAREVLDSRGNPTVEVEVLTESGAFGRALVPSGASTGEHEAVELRDGDKSRYLGKGVTKAVENVNEIIAPEIIEGEFSVLDQVSIDKMMIALDGTPNKGKLGANAILGVSIAVARAAADLLGQPLYKYLGGFNGKQLPVPMMNIVNGGSHSDAPIAFQEFMILPVGATTFKESLRWGTEIFHNLKSILSQRGLETAVGDEGGFAPKFEGTEDAVETIIQAIEAAGYKPGEEVFLGFDCASSEFYENGVYDYSKFEGEHGAKRTAAEQVDYLEQLVDKYPIITIEDGMDENDWDGWKQLTERIGDRVQLVGDDLFVTNTEILAKGIENGIGNSILIKVNQIGTLTETFDAIEMAQKAGYTAVVSHRSGETEDTTIADIAVATNAGQIKTGSLSRTDRIAKYNQLLRIEDELFETAKYDGIKSFYNLDK

SEQ ID NO: 17753 - protein, 363 aa, Oryza sativa
  unsure (1)..(363): unsure at all Xaa locations
MAALTSYEMAASILLCAEDSSSVLGFGGEEEEEEEDVVAGKRARCAGPPPPPCVDVAGVDFAVPSEECVARLVETEADHMPREDYAERLRAGGGDGDLDLRVRMDAIDWIWKVHSYYSFAPLTACLAVNYLDRFLSLYQLPDGKDWMTQLLAVACLSLAAKMEETDVPQSLDLQVGEERYVFEAKTIQRMELLVLSTLKWRMQAVTPFSYVDYFLRELNGGDPPSGRSALLSSELILCIARGTECLGFRPSEIAAAVAAAVVGEEHAAFSHSLSPWFFLXQERMSHCQEVIQAMELIHPKPSSPSRVFVSSSIPRSPTGVLDAAGCLSYRSDDSAVASHYAASSWGYEHDSSPVSSKRRKISR

SEQ ID NO: 17754 - protein, 493 aa, Cryptococcus curvatus
MSASTATAPPATAPAVANPTPAAASAAAAAPAATKDKAETIDPESEHFVVSQNYVTRTVENMTMLPPVTWSNLLQNIQWISFTALTVPPAMAIYGLCTLELQRKTVIWAIVYYFMTGLGITAGYHRLWAHRAYNASAPLQYFLALCGAGSVQGSIKWWSRGHRAHHRYTDTKLDPYSAHEGFWWAHVGWMLVKPRGKIGVADISDLSRNPVVKWQHNNYVMLMVLMGLVFPTLVAGLGWGDWKGGLLFAGAARLVFVHHSTFCVNSLAHWLGETPFDNKHTPKDHFITALVTVGEGYHNFHHQFPMDFRNAIKWYQYDPTKWFIWTMSNVGLASHLKKFPDNEIKKGQYTMKLQMLQEQSGSIQWPKHSNDLPVISWEDFQAEAKERSLVAIHGFIHDCSSFLEDHPGGIHLIKKAIGTDATTAFFGGVYDHSNAAHNLLAMMRVGILDGGMEVESLKLENLQRSMSVSSMESDAASSASSVSVSSISPRWPH

SEQ ID NO: 17755 - protein, 638 aa, Nostoc punctiforme PCC 73102
MVKSAPSPIASRKPSKVEGIKENSNFLREPVATEILQDTTHFTENAVQLLKFHGSYQQDNRDNRTKGQEKDYQFMLRTKNPGGLVPPQLYLALDKIADEYGNHTLRATTRQGFQLHGILKKNLKSAIATIVKNLGSTLGACGDINRNVMAPPAPFKNRPEYQYAWEYAQNIADLLTAQTGAYYEIWLDGEKAISAEENPEVKAARQRNGNGTIIHDNEEPIYGTYYMPRKFKICVTVPGDNSIDLYSQDLTLVVITNKKKQLEGFNIFAGGGLGRTHGKEETFARLADPIGYVAKDDVYDIVKAIVATQRDYGDRTDRRHARLKYLINDWGLDKFRAQVEEYFGKSVEAFKPLPEFKYYDFLGWNEQGDGKLFLGISIDNGRIKDEGSFQLKTALREIVEQFNLHIRLTANHNLIFYDIEPDSKQAIQDILSRHGIVDDPSKIEPLVRYAMACPALPTCGLAITESERAIPGILERVRALLDKVGLQNEHFVVRMTGCPNGCARPYLAELGFVGSAPESYQLWLGGSPNQTRLAQPYTEKLHHNDLEIFLEPIFVYFKKSRKSKEKFGDFCDRVGFDAIREFAASYDPNTANGANKSRHRVNLKEEVYSKLKEVAESQGKPMTQLVTEALEAYFQNLS

SEQ ID NO: 17756 - protein, 297 aa, Oenococcus oeni PSU-1
MEIKANKLTDTYTLNNNVQIPVIGFGTWQSADGEEAYNAVKWALEAGYRHIDTAAAYGNEESVGQAIKDSGVKREDLFVTTKLWNYQRDNYENSLRGFHDSITRLGLDYVDLYLIHWPEPIEYRDHWQSLNADSWRAMEKIYKDGKTRAIGVSNFREKHIDELMKTAEIAPMVNQIFLNPGDQEKDLVTYNKNHNILTEAYSPLGTGNLLDNPELKKLADKHGVDVAQILIRWNLEKGYLPLPKSTHQKYIESNKKVFSFQLDYDDHKTLDALDGQGKQHTDPHEHNFQKVVPFLNN

SEQ ID NO: 17757 - protein, 1231 aa, Mycobacterium tuberculosis CDC1551
MANISSPFGQNEWLVEEMYRKFRDDPSSVDPSWHEFLVDYSPEPTSQPAAEPTRVTSPLVAERAAAAAPQAPPKPADTAAAGNGVVAALAAKTAVPPPAEGDEVAVLRGAAAAVVKNMSASLEVPTATSVRAVPAKLLIDNRIVINNQLKRTRGGKISFTHLLGYALVQAVKKFPNMNRHYTEVDGKPTAVTPAHTNLGLAIDLQGKDGKRSLVVAGIKRCETMRFAQFVTAYEDIVRRARDGKLTTEDFAGVTISLTNPGTIGTVHSVPRLMPGQGAIIGVGAMEYPAEFQGASEERIAELGIGKLITLTSTYDHRIIQGAESGDFLRTIHELLLSDGFWDEVFRELSIPYLPVRWSTDNPDSIVDKNARVMNLIAAYRNRGHLMADTDPLRLDKARFRSHPDLEVLTHGLTLWDLDRVFKVDGFAGAQYKKLRDVLGLLRDAYCRHIGVEYAHILDPEQKEWLEQRVETKHVKPTVAQQKYILSKLNAAEAFETFLQTKYVGQKRFSLEGAESVIPMMDAAIDQCAEHGLDEVVIGMPHRGRLNVLANIVGKPYSQIFTEFEGNLNPSQAHGSGDVKYHLGATGLYLQMFGDNDIQVSLTANPSHLEAVDPVLEGLVRAKQDLLDHGSIDSDGQRAFSVVPLMLHGDAAFAGQGVVAETLNLANLPGYRVGGTIHIIVNNQIGFTTAPEYSRSSEYCTDVAKMIGAPIFHVNGDDPEACVWVARLAVDFRQRFKKDVVIDMLCYRRRGHNEGDDPSMTNPYVYDVVDTKRGARKSYTEALIGRGDISMKEAEDALRDYQGQLERVFNEVRELEKHGVQPSESVESDQMIPAGLATAVDKSLLARIGDAFLALPNGFTAHPRVQPVLEKRREMAYEGKIDWAFGELLALGSLVAEGKLVRLSGQDSRRGTFSQRHSVLIDRHTGEEFTPLQLLATNSDGSPTGGKFLVYDSPLSEYAAVGFEYGYTVGNPDAVVLWEAQFGDFVNGAQSIIDEFISSGEAKWGQLSNVVLLLPHGHEGQGPDHTSARIERFLQLWAEGSMTIAMPSTPSNYFHLLRRHALDGIQRPLIVFTPKSMLRHKAAVSEIKDFTEIKFRSVLEEPTYEDGIGDRNKVSRILLTSGKLYYELAARKAKDNRNDLAIVRLEQLAPLPRRRLRETLDRYENVKEFFWVQEEPANQGAWPRFGLELPELLPDKLAGIKRISRRAMSAPSSGSSKVHAVEQQEILDEAFG

SEQ ID NO: 17758 - protein, 351 aa, Staphylococcus aureus subsp. aureus MW2
MKALVKTREGHGNLELLDKEVATPLDDKVKIKVHYAGICGTDIHTYEGHYKVNFPVTLGHEFSGEIVEVGADVKDFKVGDRVTSETTFYVCNECEYCKSKDYNLCNHRKGIGTQVDGAFTNYVIAREESLHHIPDEVSYQSAAMTEPLACAHHGVSKIQVNSGDVAVVMGPGPIGLLVAQVLKSKGATVVVTGLDNDKVRLDKAEALHMDYVVNLQQTDLKTYINGITDGYGADVVVECSGAVPAARQGLDILRKKGFYSQIGIFKDAEIPFDMEKVIQKEITVVGSRSQKPADWEPSLQLMADGLVNAEALVTKIYDISKWDEAYQHLKSGEGIKALLKPLDLDENEGEN

SEQ ID NO: 17759 - protein, 347 aa, Staphylococcus aureus subsp. aureus MW2
MKALKLYGVEDLRYEDNEKPVIESANDVIVKVRATGICGSDTSRYKKMGPYIKGMPFGHEFSGVVDAIGSDVTHVNVGDKVTGCPAIPCYQCEYCLKGEYARCEKLFVIGSYEPGSFAEYVKLPAQNVLKVPDNVDYIEAAMVEPSAVVAHGFYKSNIQPGMTVAVMGCGSIGLLAIQWARIFGAAHIIAIDIDAHKLDIATSLGAHQTINSKEENLEKFIENHYANQIDLAIESSGAKVTIGQILTLPKKGGEVVLLGIPYDDIEIDRVHFEKILRNELTVCGSWNCLSSNFPGKEWTATLHYMKTKDINVKPIISHFLPLEKGPETFDKLVNKKERFDKVMFTIY

SEQ ID NO: 17760 - protein, 572 aa, Zea mays
  unsure (1)..(572): unsure at all Xaa locations
MGSSGFSWTLPDHPKLPKGKPVAVVVLDGWGEANPDQYNCIHVAQTPVMDSLKNXGAPEKWRLVKAHGTAVGLPSDDDMGNSEVGHNALGAGRIFAQGAKLVDQALASGKXIYDGDGFNYIKESFESGTLHLIGLLSGMVVSTSRLDQLQLLLKGVSERGAXKKIRVHILTDGRDVLDGSSIGFXVETLENDLLELRXRKGVDAQIASGGXERMYVTMDRYEXNDWDVVKXVGWDAQVLGEAXPYKFKSALEAVKTLRAQPKANDQYLPPFVIVDDSGNXAVGPVLDGDAVVTINFRADRMVMLAKALEYADFDNFDRVRVPKIRYAGMLQYDGELKLPSRYLVSPPEIDRTSGEYLVKNGIRXTFACSETVKFGHVTFFWNGNRSGYFDATKEEYVEVPSDSGITFNVAPNMKALEIAEKARDALLSGKFDQVRVNLPNGDMVGHTGDIEATVVACKAADEAVKIILDAVEQVGGIYLVTADHGNAEDMVKRNKSXGKPLLDKNDRIQILTSHTLQPVPVAIGGPGLHPGVKFRNDIQTPGLANVAATVMNLHGFEAPADYEQTLIEVADN

SEQ ID NO: 17761 - protein, 137 aa, Glycine max
  unsure (1)..(137): unsure at all Xaa locations
ARSMISFPAVTTVNRAGAGMVVPFTGLKPMAGSPTINTNNDITFIASRGGRVQCLHVCPPADKNNLETLSYLPDLDXAQSSKREEYLLTTGWLRCXGIRIKHGFVIREHTTLPGFYNGLLGTMWILPIDSCSHASNV

SEQ ID NO: 17762 - protein, 196 aa, Vigna radiata var. radiata
MESRVVFESDLNLKATELRLGLPGTEEKEDNNLRTHAVLRNNKRQVRETSQDSVSISKASHHQQHVETVSAPPPKAKIVGWPPIRSYRKNSVQEGEGDGIFVKVSMDGAPYLRKVDLKVYGGYPELLKALETMFKLAIGEYSEREGYKGSEYAPTYEDKDGDWMLVGDVPWDMFVTSCKRLRIMKGSEARGLGCVV

SEQ ID NO: 17763 - protein, 253 aa, Helianthus annuus
MGKGRLELKRIENKINRQVTFAKRRNGLLKKAYELSVLCDAEVALIIFSTRGKLYEFSSTSSMLKTLERYEKCSFGPPEQRKPAKEDLQEQSSYQEYMRLKERYDALKQLERNYYGEEIDSLTTNELESLERQLHCSLKQIRTIRTQSLIDKLYEQQKMEHQLYEYNKTLRLRLDEESQAEALQWDVHAHAHANGMVYGHHHQHQVSHPAHGAFYHPTGCETTLQIGYQTEQISGATSSSMSHHHHQMQGWPA

SEQ ID NO: 17764 - protein, 450 aa, Staphylococcus xylosus
PRGPLLMQDIYFLEQMAHFDREVIPERRMHAKGSGAFGTFTVTNDITKYTCASIFAEVGKQTEMFARFSTVAGERGAGDAERDIRGFALKFYTDEGNWDLVGNNTPVFFFRDPKLFPSLNHVVKRNPKTNIKDPQANWDFWTLLPEALHQITILMTDRGIPKGFRNMHGFGSHTYSMYNDKGERFWVKFHHRTQQGIENYSAEEAEQVMAKDRDSSQRDLFNNIEQGNFPKWKMYIQVMTEEQARNHKDNPFDLTKVWYKDEYPLIEVGEFELNRNPENYFQDVEQAAFAPTNIVPGLDFSPDKMLQGRLFSYGDTQRYRLGVNHWQIPVNQPKGVGMENICPFSRDGQMRILDNNQGASTHYYPNSNGAFEDQPQYKKPALDIQGQAYEYDFREDDDNYFEQPGKLFRLLSSEEQQILFNNTANEMSPVTDALKHRHIRHCYKADPAYG

SEQ ID NO: 17765 - protein, 458 aa, Staphylococcus xylosus
TAGPRGPLLMQDIYFLEQMAHFDREVIPERRMHAKGSGAFGTFTVTNDITKYTCASIFAEVGKQTEMFARFSTVAGERGAGDAERDIRGFALKFYTDEGNWDLVGNNTPVFFFRDPKLFPSLNHVVKRNPKTNMKDPQANWDFWTLLPEALHQITILMTDRGIPKGFRNMHGFGSHTYSMYNDKGERFWVKFHHRTQQGIENYSAEEAEQVMAKDRDSSQRDLFNNIEQGNFPKWKMYIQVMTEEQARNHKDNPFDLTKVWYKDEYPLIEVGEFELNRNPENYFQDVEQAAFAPTNIVPGLDFSPDKMLQGRLFSYGDTQRYRLGVNHWQIPVNQPKGVGMENICPFSRDGQMRILDNNQGASTHYYPNSNGAFEDQPQYKKPALDIQGQAYEYDFREDDDNYFEQPGKLFRLLSSEEQQILFNNTANEMSPVTDALKHRHIRHCYKADPAYGQGVAE

SEQ ID NO: 17766 - protein, 174 aa, Triticum aestivum
MAPAVMASSATTVAPFQGLKSTAGLPVSRRSRGSLGSVSNGGRIRCMQVWPIEGIKKFETLSYLPPLSTEALSKQVDYLIRSKWVPCLEFSKVGFVFREHNSSPGYYDGRYWTMWKLPMFGCTDATQVLNEVEEVKKEYPDAYVRVIGFDNLRQVQCVSFIAFRPPGCEESGKA

SEQ ID NO: 17767 - protein, 450 aa, Staphylococcus xylosus
GPLLMQDIYFLEQMAHFDREVIPERRMHAKGSGAFGTFTVTNDITKYTCASIFAEVGKQTEMFARFSTVAGERGAGDAERDIRGFALKFYTDEGNWDLVGNNTPVFFFRDPKLFPSLNHVVKRNPKTNMKDPQANWDFWTLLPEALHQITILMTDRGIPKGFRNMHGFGSHTYSMYNDKGERFWVKFHHRTQQGIENYSAEKAEQVMAKDRDSSQRDLFNNIEQGNFPKWKMYIQVMTEEQARNHKNNPFDLTKVWYKDEYPLIEVGEFELNRNPENYFQDVEQAAFATTNIVPGLDFSPDKMLQGRLFSYGDTQRYRLGVNHWQIPVNQPKGVGMENICPFSRDGQMRILDNNQGASTHYYPNSNGAFEDQPQYKKPALDIQGQAYEYDFREDDDNYFEQPGKLFRLLSSEEQQILFNNTANEMSPVTDALKHRHIRHCYKADPAYGQG

SEQ ID NO: 17768 - protein, 268 aa, Bouteloua trifida
ASYAAAAMPALDLLSEKSHHGWDGTGAAAVAPTPAPRRLDGKVAIVTGGARGIGEAIVRLFVKHGARVVIADIDDAAGDALAAALGPQVSCVRCDVSVEEDVKRAVEWAVARHGRLDVLCNNAGVLGRQTRAAKSILSFDAGEFDRVLRVNALGTALGMKHAALAMAPRRAGSIVSVASVAGVLGGLGPHAYTASKHAIVGLTKNAACELGAHGIRVNCVSPFGVATPMLINAWRQGHADAVPSDEEVEKMEEVVRGFATLKGPTLRP

SEQ ID NO: 17769 - protein, 164 aa, Methanothermobacter thermautotrophicus str. Delta H
MKRKYSLVAVGGTFDRFHKGHRRLLDEAFRVGETVMIGVTSDEFAAAKGEGIEPCSVRMKNLEEYLRDKDADYHVMRLDDPYGTTVTDEAFEAIVVSRETEPVAREINAIRRNRGFRELDIITIDMVNADDGIPISSTRIRRGEIDPMGHIIKRIRGALRRRRE

SEQ ID NO: 17770 - protein, 628 aa, Francisella tularensis subsp. tularensis
MCGVVGFYSFNKEEGFDSIINQSLLSIKHRGSDDSGYWCDNQVTLGHTRLSIHDITNAGHQPMLSNSGNTAIVFNGEIYNYLSIKNQLLSEYSNLKFKSNSDTEVLVNAIELWGIDKTLEKCIGMFAFGVYSRKTSCLILARDRFGEKPLYFGIQNGILGFASELKALKPLKECGWRFDIDRDALATYMRYAYVPTPYSIYKNISKLNVGSYIKFDAKGNSKEYKYWDSKKVLDSEKYKDSYDQAILDLEIKLKSTLSIQMQSDVPLGAFLSGGIDSTTVVALMQSMSKDKINTFSIGFNQKEYNEAEHARAVAKHIGTNHTDMYVTERDALDVIPKLAGIYDEPFADSSQIPTYLVSKIAKSKVTVALSGDAGDELFGGYNRYFLAPNIAKKIKFAKLLKYAPDAWIKKAEILNFGKFALLADKLLKLKRVLEKAKTNKELYVLLCSQINDTSFVLGAKEYDILRDKNIYDIPQLSFQEWMMFVDSNTYMIDDILVKVDRAAMANSLETRVPFLDHNIYEFAYSLPIDYKIQRGNGKRILKDLLYKYVPESLVNRSKMGFGIPLAKWLREDLREWADNLLDYSKIDKQGYLSPEVVQKYWQEHLSGKRNWQAILWNILIFQEWLDNE

SEQ ID NO: 17771 - protein, 193 aa, Lactococcus garvieae
MKRIAVLTSGGDAPGMNAAIRAVVRKAISEGIEVYGINHGYAGMVAGDIFPLTSASVGDKVGRGGTFLYSARFPEFAQLEGQLAGIEQLKKHGIEGVVVIGGDGSYHGAMRLTEHGFPAVGLPGTIDNDIVGTDFTIGFDTAVSTVVDAIDKIRDTSSSHHRTFVVEVMGRNAGDIALWSGIAAGADDIAIPE

SEQ ID NO: 17772 - protein, 379 aa, Oenococcus oeni PSU-1
MKFNTKLIHGGISEDSSTGAVSIPIYRSSTFHQNKVAGNAKWEYGRSGNPTRAALEKLIADLEEGKAGFAFASGSAAIHAVFSLFSSGDHIVVGDDVYGGTFRLIDQVLKRFGLEFTVVDTRDLSAVENAIQKNTRAIYLETPTNPLLRITDIKKIAEISKHYQLHTIVDNTFATPYNQNPLVLGADIVVHSATKYLAGHSDLVAGLAVTNDPEVADKLAFLQNSIGSVLGPDDSWLLQRGIKTLAARMEIHHKNTQLIYDYFSRNDKVARIYYPGDPASQGYEIAKRQMCGFGGIISFELEKGLDPKKFVESLRIIDLAESLGGVESLIEIPALMTHASIPRDIRLKNGIKDELIRLSVGLEDGQDLLDDLKQSFSKI

SEQ ID NO: 17773 - protein, 445 aa, Glycine max
MATIKAVKARQIFDSRGNPTVEVDVILSDGSFHRAAVPSGASTGVYEALELRDGGSDYLGKGVLKAVENVNSIIAPALLGKDPTKQTEIDNFMVQQLDGTVNEWGWCKQKLGANAILAVSLAVCKAGAAVKKIPLYKHIANLAGNKTLVLPVPSFNVINGGSHAGNKLAMQEFMILPVGASSFKEAMKMGVEVYHHLKAVIKKKYGQDATNVGDEGGFAPNIQENQEGLELLKTAIAKAGYTGKVVIGMDVAASEFYDNKDKTYDLNFKEENNDGSQKISGDSLKNVYKSYVTDYPIVSIEDPFDQDDWEHYAKLTAEVGQQVQIVGDDLLVTNPKRVEKAIKEKACNALLLKVNQIGSVTESIEAVRMSKQAGWGVMASHRSGETEDTFIADLSVGLATGQIKTGAPCRSERLAKYNQLLRIEEELGSAAVYAGAKFRAPVEPY

SEQ ID NO: 17774 - protein, 233 aa, Sinorhizobium meliloti 1021
MKRINRSIFRTFFILSTATIGAVIVTTDADAVQRQRMTARQCSPLSEDNFAACCVAINRTKILTPAQIKMCPPLTTASIGAGTGRHDRSDSTASGPMRGGGKGGGSKGGGGVGGGGGGGGGGGGGGGGGGGGGGGGGGDNGGGGQDPGKGDQDNGKGNQDGGKGHQDNGKGGQDGGKGHQDNDKGNQDGGKGHQDNDKGNQDGGKGHQDNNKGDQDGRGKGGKDKGGKAKGDK

SEQ ID NO: 17775 - protein, 1015 aa, Escherichia coli CFT073
  unsure (1)..(1015): unsure at all Xaa locations
MDVSRRQFFKICAGGMAGTTVAALGFAPKQALAQARNYKLLRAKEIRNTCTYCSVGCGLLMYSLGDGAKNAREAIYHIEGDPDHPVSRGALCPKGAGLLDYVNSENRLRYPEYRAPGSDKWQRISWEEAFSRIAKLMKADRDANFIEKNEQGVTVNRWLSTGMLCASGASNETGMLTQKFARSLGMLAVDNQARVXHGPTVASLAPTFGRGAMTNHWVDIKNANVVMVMGGNAAEAHPVGFRWAMEAKNNNDATLIVVDPRFTRTASVADIYAPIRSGTDITFLSGVLRYLIENNKINAEYVKHYTNASLLVRDDFAFEDGLFSGYDAEKRQYDKSSWNYQFDENGYAKRDDTLTHPRCVWNLLKAHVSRYTPDVVENICGTPKADFLKVCEVLASTSAPDRTTTFLYALGWTQHTVGAQNIRTMAMIQLLLGNMGMAGGGVNALRGHSNIQGLTDLGLLSTSLPGYLTLPSEKQVDLQSYLEANTPKATLADQVNYWSNYPKFFVSLMKSFYGDAAQKENNWGYDWLPKWDQTYDVIKYFNMMDEGKVTGYFCQGFNPVASFPDKNKVVSCLSKLKYMVVIDPLVTETSTFWQNHGESNDVDPASIQTEVFRLPSTCFAEEDGSIANSGRWLQWHWKGQDAPGEARNDGEILAGIYHHLRELYQAEGGKGVEPLIKMSWNYKQPHEPQSDEVAKENNGYALEDLYDANGVLIAKKGQLLSSFAHLRDDGTTASSCWIYTGSWTEQGNQMANRDNSDPSGLGNTLGWAWAWPLNRRVLYNRASADINGKPWDPKRMLIQWNGSKWTGNDIPDFGNAAPGTPTGPFIMQPEGMGRLFAINKMAEGPFPEHYEPIETPLGTNPLHPNVVSNPVVRLYEQDALRMGKKEQFPYVGTTYRLTEHFHTWTKHALLNAIAQPEQFVEISETLAAAKGINNGDRVTVSSKRGFIRAVAVVTRRLKPLNVNGQQVETVGIPIHWGFEGVARKGYIANTLTPNVGDANSQTPEYKAFLVNIEKA

SEQ ID NO: 17776 - protein, 351 aa, Streptomyces peucetius
MKALVLSGGSGTRLRPFTHTSPKQLVPVANKPVLYYVLEDIAQASITEVGIVVGETSNEIRKAVGSGDRFGLRVTYLPQEAPLGLAHAVLIARDYLGEEDFVMYLGDNFVVGGIAGNSSTFRAERPDAQILLTRVSDPSSFGVAEIGCDGRVVALEEKPRHPRSDLAVVGIYLFTPVVHEAVRALTPSRRGELEITDALQWLLDGPYDVRYTTISGYWKDTGNVADMLEVNRAVLDGIEPGMEGQADAASELVGRVRIEAGAQIRASRIVARRHRAGRVTDRTSALHVDRGDCSIETARSSLHHAGRLPAHGTRRVQHSLLGRNVTVAPAPRVPAGSRLILGDDSRVEISS

SEQ ID NO: 17777 - protein, 287 aa, Glycine max
FGSRQDGIDAIEDVIYHIETYDVTTIRASIPMFLMSRKIKSLGVKMVISGEGSDEIFGGYLYFHKAPNKEEFHQETCRKIKALHKYDCLRANKSTFAWGLEARVPFLDKEFIRVAMNIDPECKMIKKEEGRIEKWALRRAFDDEEHPYLPKHILYRQKEQFSDGVGYGWIDGLKAHAEKHVTDRMMLNAANIFPFNTPTTKEAYHYRMIFERFFPQNSARLTVPGGPSVACSTAKAVEWDAAWSNNLDPSGRAALGVHASAYGNQVKAVEPEKIIPKMEVSPLGVAI

SEQ ID NO: 17778 - protein, 402 aa, Prochlorococcus marinus subsp. pastoris str. CCMP1986
MSKLSLSSLDKSKLEGKKVLVRVDFNVPLNDSGQITDDTRIRAAIPTIKYLINNSAKVILAAHFGRPKGKVNEKMRLTPVAARLSDILEQKVNLTESCIGEEALAKSNSLNNGEVLLLENVRFYEEEEKNDLDFAKNLASHADMYVNDAFGAAHRAHASTQGVTKFLEPAVAGFLLEKELKYLQGAIDAPKRPLAAIVGGSKVSSKIGVLDSLLDKCDKIIIGGGMIFTFYKARGLDVGKSLVEEDKLELARNLEAKAKNKGVELLLPSDVLLANEFSPDAESKVSQIDAISGDWMGLDIGPQSIKVFQNALAECKTIIWNGPMGVFEFDKFAEGTNAIATTLADLSSFSEVCTIIGGGDSVAAVEKAGLAEKMSHISTGGGASLELLEGKTLPGVAALKDA

SEQ ID NO: 17779 - protein, 453 aa, Xylella fastidiosa Dixon
MAVSFVISRFGSEVRPTLLLALPLVLGHVSTGLIGFVLNVIAGHHSTVTLAASTIGTALLWLPMLVPMGTLISLTVLVSQLHGAERERDIGPLFRQALWLAMLLGLVMFTFLSVVPALLPLFGIVPDIVPGAAKFLHVVRWGSLAFPLYFCMRYFCEGMHCTFPTMLLGFGGLLVLVPLSYALTYGRFGFAEYGVEGLGIATVTVMWLQAVVFALYLWRSRRFAHLQLFAHLELPCWARIRDLLNIGLPIGISILMEGGLFIVTTLLIGRFGTDEIAAHQIALSVAQLCFMIPMGVAEATTVRIGHAVGRCDLLVMRRVAWAGYAIVIGTQTLSASVLLLGYDVIVAAYTDDLVVASLASKLLLFAAIFQFPDGLQMLSSGVLRGMKDTRVPMLLAMISYWGLGMPLGLGLGFALEWNSRGMWIGLIIGLTAASVLLGWRFRVVSERMFAGIP

SEQ ID NO: 17780 - protein, 350 aa, Escherichia coli O157:H7 EDL933
  unsure (1)..(350): unsure at all Xaa locations
MRFLLGVLMLMISGSALATIDVLQFKDEAQEQQFRQLTEELRCPKCQNNSIADSNSMIATDLRQKVYELMQEGKSKKEIVDYMVARYGNFVTYDPPLTPLTVLLWVLPVVAIGIGGWVIYARSRRRVRVVPEAFPEQSVPEGKRAGYVVYLPGIVVALIVAGVSYYQTGNYQQVKIWQQATAQAPALLDRALDPKADPLNEEXMSRLALGMRTQLQKNPGDIEGWIMLGRVGMALGNASIATDAYATAYRLDPKNSDATLGYAEALTRSSDPNDNRLGGELLRQLVRTDHSNIRVLSMYAFNAFEQQRFGEAVAAWEMMLKLLPANDTRRAVIERSIAQAMQHLSPQESK

SEQ ID NO: 17781 - protein, 424 aa, Staphylococcus xylosus
FGTFTVTNDITKYTCASIFAEIGKQTEMFARFSTVAGERGAGDAERDIRGFALKFYTEEGNWDLVGNNTPVFFFRDPKLFPSLNHVVKRNPKTNMKDPQANWDFWTLLPEALHQITILMTDRGIPKGFRNMHGFGSHTYSMYNDKGERFWVKFHHRTQQGIENYTAEEAEQVIAKDRDSSQRDLFNNIEQGNFPKWKMYIQVMTEEQARNHKDNPFDLTKVWYKDEYPLIEVGEFELNRNPENYFQDVEQAAFAPTNIVPGLDFSPDKMLQGRLFSYGDTQRYRLGVNHWQIPVNQPKGVGMENICPFSRDGQMRILDNNQGASTHYYPNSNGAFEDQPQYKKPALDIQGQAYEYDFREDDDNYFEQPGKLFRLLSYEEQQTLFKNTANEMSPVTDALKHRHIRHCYKADSAYGQGVAEAMGID

SEQ ID NO: 17782 - protein, 158 aa, Pyrococcus horikoshii
MKRFKKVVVGGTFDRLHLGHKALLRKAFEVGKIVYIGLTSDEMVKEKPYAEKILPYERRLKDLIEFLEVNNFKGYRIIKINNAIGFTTEIRSLEAIVVSEETYKGALIVNRAREEVGLKPLEIIVIPIIKSKLGCKISSSLIRAGLIDPFGNPMKPRS

SEQ ID NO: 17783 - protein, 461 aa, Staphylococcus xylosus
TAGPRGPLLMQDIYFLEQMAHFDREVIPERRMHAKGSGAFGTFTVTNDITKYTCASIFAEVGKQTEMFARFSTVAGERGAGDAERDIRGFALKFYTDEGNWDLVGNNTPVFFFRDPKLFPSLNHVVKRNPKTNMKDPQANWDFWTLLPEALHQITILMTDRGIPKGFRNMHGFGSHTYSMYNDKGERFWVKFHHRTQQGIENYSAEEAEQVMAKDRDSSQRDLFNNIEQGNFPKWKMYIQVMTEEQARNHKDNPFDLTKVWYKDEYPLIEVGEFELNRNPENYFQDVEQAAFAPTNIVPGLDFSPDKMLQGRLFSYGDTQRYRLGVNHWQIPVNQPKGVGMENICPFSRDGQMRILDNNQGASTHYYPNSNGAFEDQPQYKKPALDIQGQAYEYDFREDDDNYFEQPGKLFRLLSSEEQQILFNNTANEMSPVTDALKHRHIRHCYKADPAYGQGVAEAMG

SEQ ID NO: 17784 - protein, 175 aa, Oryza sativa
MAPTVMASSATSVAPFQGLKSTAGLPVSRRSTNSGFGNVSNGGRIKFMQVWPIEGIKKFETLSYLPPLTVEDLLKQIEYLLRSKWVPCLEFSKVGFVYRENHRSPGYYDGRYWTMWKLPMFGCTDATQVLKELEEAKKAYPDAFIRIIGFDNVRQVQLISFIAYKPPGCEESGGN

SEQ ID NO: 17785 - protein, 178 aa, Aquifex aeolicus VF5
MKEIRGKKLKLLLKEEDIKRRVKELAKEIESSYSWEEPIVVVGLLKGAFIFLADLVRAFDRFVFVEFMQVSSYGKGMKSSGTIKIVKDLDMDIEGKEVLLVDDILDTGLTMKEIHDYLLMKKPKVLKTCVFLDKKERRKVDFNADFVGFEVPDKFLVGYGLDWGEYGRNLPEVYMVED

SEQ ID NO: 17786 - protein, 175 aa, Triticum aestivum
MAPAVMASSATTVAPFQGLKSTAGLPISCRSGSTGLSSVSNGGRIRCMQVWPIEGIKKFETLSYLPPLSTEALLKQVDYLIRSKWVPCLEFSKVGFVFREHNSSPGYYDGRYWTMWKLPMFGCTDATQVLNEVEEVKKEYPDAYVRVIGFDNMRQVQCVSFIAFRPPGCEESGKA

SEQ ID NO: 17787 - protein, 461 aa, Staphylococcus xylosus
TAGPRGPLLMQDIYFLEQMAHFDREVIPERRMHAKGSGAFGTFTVTNDITKYTCASIFAEVGKQTEMFARFSTVAGERGAGDAERDIRGFALKFYTDEGNWDLVGNNTPVFFFRDPKLFPSLNHVVKRNPKTNMKDPQANWDFWTLLPEALHQITILMTDRGIPKGFRNMHGFGSHTYSMYNDKGERFWVKFHHRTHQGIENYSAEEAEQVMAKDRDSSQRDLFNNIEQGNFPKWKMYIQVMTEEQARNHKDNPFDLTKVWYKDEYPLIEVGEFELNRNPENYFQDVEQAAFAPTNIVPGLDFSPDKMLQGRLFSYGDTQRYRLGVNHWQIPVNQPKGVGMENICPFSRDGQMRILDNNQGASTHYYPNSNGAFEDQPQYKKPALDIQGQAYEYDFREDDDNYFEQPGKLFRLLSSEEQQILFNNTANEMSPVTDALKHRHIRHCYKADPAYGQGVAEAMG

SEQ ID NO: 17788 - protein, 459 aa, Staphylococcus xylosus
MTAGPRGPLLMQDIYFLEQMAHFDREVIPERRMHAKGSGAFGTFTVTNDITKYTCASIFAEVGKQTEMFARFSTVAGERGAGDAERDIRGFALKFYTDEGNWDLVGNNTPVFFFRDPKLFPSLNHVVKRNPKTNMKDPQANWDFWTLLPEALHQITILMTDRGIPKGFRNMHGFGSHTYSMYNDKGERFWVKFHHRTQQGIENYSAEEAEQVMAKDRDSSQRDLFNNIEQGNFPKWKMYIQVMTEEQARNHKDNPFDLTKVWYKDEYPLIEVGEFELNRNPENYFQDVEQAAFAPTNIVPGLDFSPDKMLQGRLFSYGDTQRYRLGVNHWQIPVNQPKGVGMENICPFSRDGQMRILDNNQGASTHYYPNSNGAFEDQPQYKKPALDIQGQAYEYDFREDDDNYFEQPGKLFRLLSSEEQQILFNNTANEMSPVTDALKHRHIRHCYKADPAYGQGVAE

SEQ ID NO: 17789 - protein, 777 aa, Salmonella typhimurium LT2
MTHAPSRHSVLTAAHWGPVRVETDGERIFASYGELPTAHQNSLQTVVHDQVHSKTRVRFPMVRKGFLASPDKPQGIRGQDEFVRVSWDDALDLIHAQHKRIRESYGPSSIFAGSYGWRSNGVLHKAATLLQRYMALAGGYTGHLGDYSTGAAQAIMPYVVGGNEVYQQQTSWPVVLEHSEVVVLWSANPLNTLKIAWNASDEQGLDYFAALRQSGKRLICIDPMRSESVDFFGDKMEWIAPHMGTDVALMLGIAHTLVENGWQDEAFLARCTTGYDRFADYLLGTTDGTAKTAEWAAEICGVSAVKIRELAEIFHHNTTMLMAGWGMQRQQFGEQKHWMIVTLAAMLGQIGTPGGGFGFSYHFANGGNPTRRAAVLASMQGSIPGGVDAVDKIPVARIVEALENPGGFYQHNGMDRRFPDIRFIWWAGGANFTHHQDTNRLIRAWQKPELVVISECFWTAAAKHADIVLPATTSYERNDLTMTGDYSNQHLAPMKQVVSPRWEARNDFDVFAELSERWEAGGYARFTEGKSELAWLETFYNIAAQRGASQGVTLPPFAAFWQANRLLEMPENPANAQFVRFADFRRDPDNHPLKTASGKIEIYSARIASYGYADCPGHPMWLAPDEWHGNADAGQVQLLSAHPAHRLHSQLNYSSLRERYAVAGREPVTIHPQDATTRGIVDGDTVRVWNHRGQVLAGAVVTDGIRPGVICIHEGAWPDPEPTAGGICKNGAVNVLTKDLPSSRLGNGCAGNTALVWFEKYTGPALPLTAFDPPANS

SEQ ID NO: 17790 - protein, 422 aa, Staphylococcus epidermidis ATCC 12228
MSAEKITQSKDGLNVPNEPIIPFIIGDGIGPDIWKAASRVIDAAVEKAYNGEKRIEWKEVLAGQKAYDETGEWLPQETLETIKEYLIAVKGPLTTPIGGGIRSLNVALRQELDLFTCLRPVRWFKGVPSPVKRPEDVDMVIFRENTEDIYAGIEFKQGTSEVKKVIDFLQNEMGATNIRFPETSGIGIKPVSKEGTERLVRAAIQYALDNNRKSVTLVHKGNIMKFTEGSFKQWGYDLAHNEFGDKVFTWQQYDEIVEQKGKDAANEAQSKAEQEGKIIIKDSIADIFLQQILTRPAEHDVVATMNLNGDYISDALAAQVGGIGIAPGANINYETGHAIFEATHGTAPKYAGLNKVNPSSEILSSVLMLEHLGWQEAADKITDSIEATIASKIVTYDFARLMDGAKEVSTSDFADELIKNIR

SEQ ID NO: 17791 - protein, 346 aa, Methanothermobacter thermautotrophicus
MAGIVGYGVYIPSYRIKVEEIARVWGDDPQAISRGLVVEEKSVPGPDEDTATISVEAARNALRRSQIDPSEIGAVYVGSESHPYAVKPTATIVAEAVEATPEMTAADLEFACKAGTAGIQACMGLVDSGIIKYGLAVGADTAQGAPGDALEYTASAGGAAYVIGGKNCLADIKETYSFTTDTPDFYRREGMPYPRHGGRFTGEPAYFKHVLGAARGMMEKTGLSADDFDYAVFHQPNGKFYLKAARKLGFESEQVKPGLLTPVIGNTYSGATPVGLAATLDVAEPGARILAVSYGSGAGSDAFIIEVNDLIEERRDLAPSVAEIIKNKRYVDYALYAKFKGKLRMA

SEQ ID NO: 17792 - protein, 472 aa, Geobacter sulfurreducens PCA
MHRITFGTSGWRGILCEDFTFENVKVVSQAIADHVKAIGEQDKGIIVAYDTRFMGERFAKETVRVLAGAGVKAYFCRRDTPTPVISFEILRRGTAGAVNFTASHNPPEYNGIKFSPSWGGPALPETTGDIERRANEMMGEVCYREMALDEAVKAGLLEEIDPREEYLKALESKVDFDAIGRVGSVAVNALYGTGRGYLEEPLITRGLDVKAINMHRDPYFGGFPPEPSEKYIQDFIRLVKDDPAIRLGIATDGDADRFGIVDGDGTFIEPNYIIALLFDYLVRVRKMTGAVARSVATSHLVDAVAKKHGIEVIETPVGFKYIGELISQDRIIIGGEESAGLSIKGHVPEKDGILACFLVAEMVAREGLSVKALLARLYEEVGTFVTKRENITLSPAVEEGYAEKQRQAPDSFAGLKVTQKVTVDGSKFILEDDSWLLFRKSGTEPVVRLYAEASSEEKLAAVMAAGKQFILG

SEQ ID NO: 17793 - protein, 195 aa, Zea mays
  unsure (1)..(195): unsure at all Xaa locations
MLAKGRKVAGRREEMSANYAFGPQDDDAIIKHRLLTRTTTTRGEPPLKKLQKKXFMSFATEIEKDADNISDCERLYKAFLHEINTFELPLLKSKAVVDANIREKESFNELQVEIERQILHAKTDIEDLKKQLEQSKIERQHKEECEAIRKLISLQPPRSETEKLIADLEKGDTDLRXDVACIRTLELXKKAVALS

SEQ ID NO: 17794 - protein, 560 aa, Leavenworthia crassa
MTSSTALICDTEAWKDLKKHVEDIKKTHLRDLMNDANRCESMMLEFDGLLLDYSRQRATVETMNKLLKLAKDAQLPEKISRMFNGEHINSTENRSVLHVALRAPKDAVIMADGKNVVPEVWNVLDKIKEFSEKIRSGSWVGATGKPLEDVVPIGIGGTFLGPLFVHTAPQTDPESVECAKGRQLRFLPNIDPVDVARNIKGLNPETTLVVVVSKTFTTAETMLNARTLREWITAALGASAVAKHMVAVSTNLALVEKFGIDPNNAFAFWDWVGGRYSVCSAVGVLPLSLQYGFSVVEKFLKGASSIDQHFKSTSLEENIPVLLGLLSVWNVSFLGYPARAILPYSQALEKFAPHIQQVSMESNGKGVSIDGLPLPFETGEIDFGEPGTNGQHSFYQLIHQGRVIPCDFIGVVKSQQPVYLKGEIVSNHDELMSNFFAQPDALAYGKTPEQLHKENVSENLIPHKTFSGNRPSLSLLLPELSAYNVGQLLAIYEHRVAVQGFVWGINSFDQWGVELGKVLASQVRKQLHSSRTQGTELDGFNYSTTTLLKRYLETSSEPQM

SEQ ID NO: 17795 - protein, 202 aa, Lactobacillus plantarum WCFS1
MTKPQTLIIATNNANKAREFSAMLAPYDITIKTLADFPNIPEIKENGITFEENATKKATVVVEATGLPAIADDSGLMVKALHGDPGVFSARYAGDHDDAANNAKLLANLGGVPEAERTATFHTTLVALKPSGEKLVVNGELAGRILIAPRGDNGFGYDPLFWSSKFQKSLAELTPAQKNQISHRGAALRQLMTKFDEWWAKA

SEQ ID NO: 17796 - protein, 314 aa, Triticum aestivum
ITAIRWPRNPRPLPLITFVLLCSPAIVHKCMSADVIRKAFQATEDAFLSVVSKEWSMKPQIAAVGSCCLVGVICSGTLYIANAGDSRAVLGRLVKATGQVVAMQLSAEHNACYEEVRQELQSSHPHDPQIVVLKHNVWRVKGLIQISRSIGDVYLKRPEYNRSPLHSKFRLRETFKKPILSSEPAIAVHQIQPSDQFVIFASDGLWEHLSNQEAVDLVQSNPRNGIARKLVKAAMQEAAKKREMRYSDLKKIERGVRRHFHDDITVVVVFLDASAVSRAGWSKSPPVSVRGGGVSVPANSLAPFSAPAMVSSTY

SEQ ID NO: 17797 - protein, 289 aa, Streptococcus agalactiae 2603V/R
MKGIILAGGSGTRLYPLTRAASKQLMPIYDKPMIYYPLSVLMLAGIKEILIISTPQDLPRFEDMLGDGSELGISLSYAEQPSPDGLAQAFIIGEDFIGDDHVALVLGDNIYHGPGLSAMLQRAASKESGATVFGYQVKDPERFGVVEFDTDMNAISIEEKPAQPKSNYAVTGLYFYDNDVVEIAKNIKPSPRGELEITDVNKAYLDRGDLSVELMGRGFAWLDTGTHESLLEAAQYIETVQRMQNVQVANLEEIAYRMGYITREQVLELAQPLKKNEYGQYLLRLIGEA

SEQ ID NO: 17798 - protein, 338 aa, Bacteroides thetaiotaomicron VPI-5482
MKAVQIVNPSEMKVVELEKPTVGAGEVLVRIKYVGFCGSDLNTFLGRNPMVKLPVIPGHEVGAVIEEIGPDVPAGFEKGMNVTLNPYTNCGKCASCRNGRVNACEHNETLGVQRNGVMCEYAVLPWTKIIPAGNISSRDCALIEPMSVGFHAVSRAQVIDNEYVMVIGCGMIGIGAIVRAALRGATVIAVDLDDEKLVLAKRVGASYAVNSKTENVHERIQEITAGFGADVVIEAVGSPVTYVMAVDEVGFTGRVVCIGYAKKEVAFQTKYFVQKELDIRGSRNALPADFRAVINYMKEGKCPVEELISKIAKPEDALEAMKEWAADPGKVFRILVEM

SEQ ID NO: 17799 - protein, 430 aa, Prochlorococcus marinus subsp. pastoris str. CCMP1378
MKETIDFLIDTIEARQVLDSRGNPTVEAEVFLECGAIGRAIVPSGASTGAHEAHELRDGGTKYMGKGVLNAVNKIHETISPALCGLSALDQTSIDNLMIEIDGTPNKSSLGANSILAVSLANARAASNALDLPLYRYLGDPLSNLLPVPLMNVINGGAHAPNGLDCQEFMLVPHGVKTFSEALRIGTEIFHSLKSLLEKKGLSTAVGDEGGFAPELSSSEAAGDLLLEAIQKAGFIPGEQVSLALDVASTEFYKDGFYKYEGKSLTSSQMISYLSNLVSNYPIVSIEDGLAEDDWEGWSALNKEIGNKVQLVGDDLFVTNTERLRKGILEKSANSILIKVNQIGTLTETLEAMDLAKSAGFTSVISHRSGETEDTTIADLSVATRAGQIKTGSLSRSERIAKYNRLLRIEEELGDQARFAGDLGLGPKNI

SEQ ID NO: 17800 - protein, 510 aa, Photorhabdus luminescens subsp. laumondii TTO1
MCGIGGVFNTENRLIDDIENKLQTIMSKIAHRGDPSRFNEKVVRNNFSIATNRLAIVERDSAYQPISNQEHDLHLVLNGQIYNYKSLRNELIKQGYQFKNGGDAEVALIAYICYGKSFIKKLDGMFSFILFDNKNNKFLLGRDHVGIKPLYYTQKEGNWYVASEIKSLIEFNSEIKPVEPGSIFDGLTSEKYISYDTTIPASSDNVEQAKEKIYSLLDNAVRKRVDTDLPVSIMFSGGIDSTIVLYLAKKYHHDITAISFGLPGSKDIEIAQRYCTENNIKHIIYTFTQEELINNIQDAIYYGEFFEQIDAIDSTIAHFGYYIANRLGFKIALCGEGSDEIFAGYDLFKTYPDPHHLSLYRLNNLHRTDLQRVDRASMRNTVEARVPFMDSALVPYVLSLDFSYKLNNGIEKYILREAFRGKIPEYIIDRPKIRMPDGSGVKNTIIDYVKDIKCNLPRNMVDSLNSIGLTHQSSLYFAEKYLSLGYPLPKERFKESGKDFSESGYFNFIS

SEQ ID NO: 17801 - protein, 257 aa, Hevea brasiliensis
MAFAHFVLIHTICHGAWIWHKLKPLLEALGHKVTALDLAASGVDPRQIEEIGSFDEYSEPLLTFLEALPPGEKVILVGESCGGLNIAIAADKYCEKIAAAVFHNSVLPDTEHCPSYVVDKLMEVFPDWKDTTYFTYTKDGKEITGLKLGFTLLRENLYTLCGPEEYELAKMLTRKGSLFQNILAKRPFFTKEGYGSIKKIYVWTDQDEIFLPEFQLWQIENYKPDKVYKVEGGDHLLQLTKTKEIAEILQEVADTYN

SEQ ID NO: 17802 - protein, 465 aa, Staphylococcus xylosus
NSMTAGPRGPLLMQDIYFLEQMAHFDREVIPERRMHAKGSGAFGTFTVTNDITKYTCASIFAEVGKQTEMFARFSTVAGERGAGDAERDIRGFALKFYTDEGNWDLVGNNTPVFFFRDPKLFPSLNHVVKRNPKTNMKDPQANWDFWTLLPEALHQITILMTDRGIPKGFRNMHGFGSHTYSMYNDKGERFWVKFHHRTQQGIENYSAEEAEQVMAKDRDSSQRDLFNNIEQGNFPKWKMYIQVMTEEQARNHKDNPFDLTKVWYKDEYPLIEVGEFELNRNPENYFQDVEQAAFAPTNIVPGLDFSPDKMLQGRLFSYGDTQRYRLGVNHWQIPVNQPKGVGMENICPFSRDGQMRILDNNQGASTHYYPNSNGAFEDQPQYKKPALDIQGQAYEYDFREDDDNYFEQPGKLFRLLSSEEQQILFNNTANEMSPVTDALKHRHIRHCYKADPAYGQGVAEAMGI

SEQ ID NO: 17803 - protein, 380 aa, Thermobifida fusca
MKAVVYKEPFTVAVEEVADPRIEDPNDVIIRVTTSAICGSDLHMYEGRTGATPGMVFGHENMGIVEEVGSGVASIRKGDRVVLPFNVACGFCKNCLAGKTGFCLTVNPGFAGGAYGYVAMGPYQGGQSEYLRVPFADFNCLKLPPGTEFEDDFALLADIFPTGYHATELAQVSPGETVSVFGAGPVGLMAAYSAILRGASRVFVVDRVPSRLSLAERIGAIPIDYSKGDPVAQIKEHTNGEGTDKGIDAVGYQATAPEGEEQPALVLNTLVDTVRPTGALGVVGLYVTEDPGAPSESAKQGELLFAMGKLFEKGQRMGTGQANVKAYNRQLRDLIIAGRAKPSFVVSQRIPLQRAPEAYEKFDKREEGWTKVLLKPQQES

SEQ ID NO: 17804 - protein, 134 aa, Triticum aestivum
  unsure (1)..(134): unsure at all Xaa locations
MATKRSVGTLGEADLKGKKVFVRADLNVPLDDAQKITDDTRIRASIPTIKYLLEKGAKVILASHLGRPKGVTPKFXSLKPLVPRLSELLGLEVVMAPDCIGXEVEKLAAALPDGGVLLLKNVXRFYKEEEKKRF

SEQ ID NO: 17805 - protein, 828 aa, Escherichia coli O157:H7 EDL933
  unsure (1)..(828): unsure at all Xaa locations
MKLSRRSFMKANAVAAAAAAAGLSVPGVARAVVGQQEAIKWDKAPCRFCGTGCGVLVGTQQGRVVACQGDPDAPVNRGLNCIKGYFLPKIMYGKDRLTQPLLRMKNGKYDKEGEFTPITWDQAFDVMEEKFKTALKEKGPESIGMFGSGQWTIWEGYAASKLFKAGFRSNNIDPNARHCMASAVXGFMRTFGMDEPMGCYDDIEQADAFVLWGANMAEMHPILWSRITNRRLSNQDVTVAVLSTYQHRSFELADNGIIFTPQSDLVILNYIANYIIQNNAINQDFFSKHVNLRKGATDIGYGLRPTHPLEKAAKNPGSDASEPMSFEDYKAFVAEYTLEKTAEMTGVPKDQLEQLAQLYADPNKKVISYWTMGFNQHTRGVWANNLVYNLHLLTGKISQPGCGPFSLTGQPSACGTAREVGTFAHRLPADMVVTNEKHRDICEKKWNIPSGTIPAKIGLHAVAQDRALKDGKLNVYWTMCTNNMQAGPNINEERMPGWRDPRNFIIVSDPYPTVSALAADLILPTAMWVEKEGAYGNAERRTQFWRQQVQAPGEAKSDLWQLVQFSRRFKTEEVWPEELLAKKPELRGKTLYEVLYATPEVSKFPVSELAEDQLNDESRELGFYLQKGLFEEYAWFGRGHGHDLAPFDDYHKARGLRWPVVNGKETQWRYSEGNDPYVKAGEGYKFYGKPDGKAVIFALPFEPAAEAPDEEYDLWLSTGRVLEHWHTGSMTRRVPELHRAFPEAVLFIHPLDAKARDLRRGDKVKVVSRRGEVISIVETRGRNRPPQGLVYMPFFDAAQLVNKLTLDATDPLSKETDFKKCAVKLEKV

SEQ ID NO: 17806 - protein, 457 aa, Staphylococcus xylosus
AGPRGPLLMQDIYFLEQMAHFDREVIPERRMHAKGSGAFGTFTVTNDITKYTCASIFAEVGKQTEMFARFSTVAGERGAGDAERDIRGFALKFYTDEGNWDLVGNNTPVFFFRDPKLFPSLNHVVKRNPKTNMKDPQANWDFWTLLPEALHQITILMTDRGIPKGFRNMHGFGSHTYSMYNDKGERFWVKFHHRTQQGIENYSAEEAEQVMAKDRDSSQRDLFNNIEQGNFPKWKMYIQVMTEEQARNHKDNPFDLTKVWYKDEYPLIEVGEFELNRNPENYFQDVEQAAFAPTNIVPGLDFSPDKMLQGRLFSYGDTQRYRLGVNHWQIPVNQPKGVGMENICPFSRDGQMRILDNNQGASTHYYPNSNGAFEDQPQYKKPALDIQGQAYEYDFREDDDNYFEQPGKLFRLLSSEEQQILFNNTANEMSPVTDALKHRHIRHCYKADPAYGQGVAE

SEQ ID NO: 17807 - protein, 366 aa, Clostridium perfringens str. 13
MMQPIKKIAILTGGGDCPGLNAVIRAVTRTAILKYGYEVIGYKFGYRGLYNNDFVKLDLDSVSGILHRGGTILHSSNKDNLFDYQVEDENGKIVKKDVSDVGVENLKKEGVDALVVIGGDGTLTSARDFSRKGVNVIGVPKTIDNDLLATDVTFGFNTATEIATEALDRLHTTAESHHRIMLLEVMGRNAGWIALESGIAGSADVILLPEIPYDINKIVEKVKEREEAGKQFTIIVVAEGAKPKDGEVVVSKIVDDSPDPIRLGGIANKLAIDLEGLIKNHEIRSTVLGHIQRGGNTSTYDRILSTKYGVKAVELINSNLFGNMVALKGNKVSYESLENVIGHTKNVDPEGELVNTAKSIGISFAD

SEQ ID NO: 17808 - protein, 455 aa, Staphylococcus xylosus
GPRGPLLMQDIYFLEQMAHFDREVIPERRMHAKGSGAFGTFTVTNDITKYTCASIFAEVGKQTEMFARFSTVAGERGAGDAERDIRGFALKFYTDEGNWDLVGNNTPVFFFRDPKLFPSLNHVVKRNPKTNIKDPQANWDFWTLLPEALHQITILMTDRGIPKGFRNMHGFGSHTYSMYNDKGERFWVKFHHRTQQGIENYSAEEAEQVMAKDRDSSQRDLFNNIEQGNFPKWKMYIQVMTEEQARNHKDNPFDLTKVWYKDEYPLIEVGEFELNRNPENYFQDVEQAAFAPTNIVPGLDFSPDKMLQGRLFSYGDTQRYRLGVNHWQIPVNQPKGVGMENICPFSRDGQMRILDNNQGASTHYYPNSNGAFEDQPQYKKPALDIQGQAYEYDFREDDDNYFEQPGKLFRLLSSEEQQILFNNTANEMSPVTDALKHRHIRHCYKADPAYGQGVA

SEQ ID NO: 17809 - protein, 156 aa, Pyrococcus abyssi
MKFKKVVVGGTFDRLHLGHKALLRKAFEVGKIVYIGLTSDDMVKNKPYAEKILPYERRLKDLIEFLEVNNFRRYRIIKINNAIGFTTRIRSLEAIVVSEETYKGALLVNRAREEVGLRPLEIIVIPIIKSKLGDKISSSLIRAGLIDPFGNPIKRE

SEQ ID NO: 17810 - protein, 452 aa, Staphylococcus xylosus
GPLLMQDIYFLEQMAHFDREVIPERRMHAKGSGAFGTFTVTNDITKYTCASIFAEVGKQTEMFARFSTVAGERGAGDAERDIRGFALKFYTDEGNWDLVGNNTPVFFFRDPKLFPSLNHVVKRNPKTNIKDPQANWDFWTLLPEALHQITILMTDRGIPKGFRNMHGFGSHTYSMYNDKGERFWVKFHHRTQQGIENYSAEEAEQVMAKDRDSSQRDLFNNIEQGNFPKWKMYIQVMTEEQARNHKDNPFDLTKVWYKDEYPLIEVGEFELNRNPENYFQDVEQAAFAPTNIVPGLDFSPDKMLQGRLFSYGDTQRYRLGVNHWQIPVNQPKGVGMENICPFSRDGQMRILDNNQGASTHYYPNSNGAFEDQPQYKKPALDIQGQAYEYDFREDDDNYFEQPGKLFRLLSSEEQQILFNNTANEMSPVTDALKHRHIRHCYKADPAYGQGVA

SEQ ID NO: 17811 - protein, 307 aa, Staphylococcus epidermidis ATCC 12228
MNAAVRAVTRTAIYNNIEVYGVYQGYQGLLDDDIHKLELGSVGDTIQRGGTFLFSARCPQFKEEDVRKKAIENLRKRGIEGLVVIGGDGSYRGAQRISEECKEIQTIGIPGTIDNDINGTDFTIGFDTALNTIIESVDKIRDTASSHARTFIVEVMGRDCGDLALWAGLSVGAETIVLPEVNTDIKDVAEKIEQGIKRGKKHSIVMVAEGCMSGQECADELTKYINIDTRVSVLGHIQRGGSPSGADRVLASRLGGYAVELLKQGETAKGVGIRNNQLTSTPFDEIFAESDRKFNSQMYELAKELSI

SEQ ID NO: 17812 - protein, 360 aa, Nostoc punctiforme PCC 73102
MGEPKRIGILTSGGDCSGLNAVIRAVVNCAVDTYGWEVLGIRQATLGLMARPPQFTKLEIDQVDSLLTAGGTMLGTTNKGDPFAFPMTDGSLCDRSEEIIAGYHELGLDALIGIGGDGSLAILRRLAQQGGINLVGIPKTIDNDIGVTEHAIGFDTAVNIATEALDRLHFTAASHSRVMILEVMGRDAGHIAIAAGIAGGANVILIPEIPYTVEHICHKIKERQEKGKNYCLIIVSEAVRTHDGENVTITNRLGQSRYGGIGEYLADKIIEHIGVETRVTVLGHIQRGGTASPLDRLVATAFGVAAVNLIAEDKYDRMVTWQNRQVLSVPITEAIAQYSAVDPNGTLVKTAHGMGIYLGD

SEQ ID NO: 17813 - protein, 462 aa, Staphylococcus xylosus
TAGPRGPLLMQDIYFLEQMAHFDREVIPERRMHAKGSGAFGTFTVTNDITKYTCASIFAEVGKQTEMFARFSTVAGERGAGDAERDIRGFALKFYTDEGNWDLVGNNTPVFFFRDPKLFPSLNHVVKRNPKTNIKDPQANWDFWTLLPEALHQITILMTDRGIPKGFRNMHGFGSHTYSMYNDKGERFWVKFHHRTHQGIENYSAEEAEQVMAKDRDSSQRDLFNNIEQGNFPKWKMYIQVMTEEQARNHKDNPFDLTKVWYKDEYPLIEVGEFELNRNPENYFQDVEQAAFAPTNIVPGLDFSPDKMLQGRLFSYGDTQRYRLGVNHWQIPVNQPKGVGMENICPFSRDGQMRILDNNQGASTHYYPNSNGAFEDQPQYKKPALDIQGQAYEYDFREDDDNYFEQPGKLFRLLSSEEQQILFNNTANEMSPVTDALKHRHIRHCYKADPAYGQGVAEAMGI

SEQ ID NO: 17814 - protein, 960 aa, Oryza sativa
MGPGASPAQFPVPRALMWAPSFKLPTATSPARRRRRRRGGGGGAAISPSTVCHITGGSYVYDSKGNKYLDTLAGLWCTALGGSEPRLVKAATDQLNKLPFYHSFWNSTAKPPLDLAEELISMFTAKEMGKVFFTNSGSEANDSQVKLVWYYNNALGRPNKKKIIAQSQALPAMHLKFDLPAPFVLHTDCPHYWRFGLPGEAEEEFATRLADNLENLILKEGPETVAAFIAEPVIGAGGVIPPPKTYFEKIQAVLQKYDVLFIADEVITGFGRLGTMFGSDLYNIKPDLVSLAKALSSAYVPIGATLVSPEISDVVHSQSNKIGFFAHGFTYSGHPVSCAVALEALKIYRERNIPAHVKQISPRFQEGIKAFAGSSIIGETRGVGLLLATEFANNKSPNDPFPVEWGVAQIFGAECKKRGMLVKVVGDEIAMSPPLIMSQREVDGLVSIYGEALKATEERVAELRRLNVDIEATTSLELEWRLQTSPQLLRFKGHGMLAPFTAGWQSTDVHPLVIERSEGSYVYDIDGKKYLDSLAGLWCTALGGSEPRLVKAATEQLHKLPFYHSFWNRTTKPSLDLAKELLSMFTAREMGKVFFTNSGSEANDSQVKLVWYYNNALGRPDKKKFIARSKSYHGSTLISASLSGLPALHQKFDLPAPFVLHTDCPHYWRFHLPGETEEEFATRLANNLEELILKEGPETVQSSFHRNLYCAKRSKIAAFIAEPVMGAGGVIPPPKTYFEKVQAIVKKYDILFIADEVITAFGRLGTMFGSDMYNIKPDLVSMAKALSSAYVPIGAIMVSPEISDVIHSQSNKLGSFAHGFTYSGHPVACAVAIEALKIYQERNIPDHVKQISPRFQEGVKAFAGSPIVGEIRGVGLILGTEFADNKSPNDPFPAEWGVGAIFGAECQKRGMLVRVAGDNIMMSPPLIMTPDEVEELVSIYGDALKATEERVAELKSKKNN

SEQ ID NO: 17815 - protein, 120 aa, Triticum aestivum
  unsure (1)..(120): unsure at all Xaa locations
MAKPRGGGGLXDLEGHYAFYGAYHSNPVNVGIHELFVWPIFLTALMLLHLTXPSXHAAXISXAVYAAYYXLLDRRAGXLAXLLXYLCWAASGALSARLGFSXGXKVVXVXQLFCWLSIHW

SEQ ID NO: 17816 - protein, 481 aa, Haemophilus somnus 2336
MNIQHLLKTQAYINGEFISAKNHRTFPVINPANQQVICEITCCGKEETELAIKSAKQAQVHWKKYTAKERSKILKKWFELIMQHQESLAYLLSLEQGKPLSESRAEIAYGASFVEWFSEEAKRAYGEIIPQVREENRLLVIKQPVGVVAAITPWNFPNAMITRKAAPALAAGCAIIIKPAPETPLSALALAALAEQAGIPKGIFNVLPTVYAEEVGSVLTRSTDVRKLTFTGSTKIGKILMQQCADTVKKISLELGGNAPSLIFNDADLDRTVDSVIASKFRNSGQTCICTNRIYVQSEIYRAFADKLKQKVRSFIVGDFQQEAVNIGPLINESAVRKIERHIEDALSKGAILTLGGQRHSLGGTFFEPTILENVSQDMLVCHEETFSPLAALIPFDTEEQAISMANDSEFGLAAYVYTQDFSRIWRLSEELECGLVGVNEGIISNEVSPFGGVKQSGLGREGSRHGLDEFLEMKYLCMKV

SEQ ID NO: 17817 - protein, 999 aa, Malus x domestica
MLLFLPLLLLLLLPPLPTTLSLNQEGLYLRHFKLSLDDPDSALSSWNYADSTPCNWLGVTCDDASSSSPVVRSLDLPSANLAGPFPTVLCRLPNLTHLSLYNNSINSTLPPSLSTCQTLEDLDLAQNLLTGALPATLPDLPNLKYLDLSGNNFSGAIPDSFGRFQKLEVLSLVYNLIENTIPPFLGNISTLKMLNLSYNPFHPGRIPAELGNLTNLEVLRLTECNLVGEIPDSLGRLKNLKDLDLAINGLTGRIPPSLSELTSVVQIELYNNSLTGELPPGMSKLTRLRLLDASMNQLSGQIPDELCRLPLESLNLYENNLEGSVPASIANSPNLYEVRLFRNKLSGELPQNLGKNSPLKWFDVSSNQFTGTIPASLCEKGQMEEILMLHNEFSGEIPARLGECQSLARVRLGHNRLSGEVPVGFWGLPRVYLMELAENELSGPIAKSIARATNLSLLILAKNKFSGPIPEEIGWVENLMEFSGGDNKFSGPLPESIVRLGQLGTLDLHSNEVSGELPVGIQSWTNLNELNLASNQLSGKIPDGIGNLSVLNYLDLSGNRFSGKIPFGLQNMKLNVFNLSYNQLSGELPPLFAKEIYRNSFLGNPGLCGDLDGLCDSRAEVKSQGYIWLLRCMFILSGLVFVVGVVWFYLKYKNFKKVNRTIDKSKWTLMSFHKLGFSEYEILDCLDEDNVIGSGASGKVYKVVLNSGEVVAVKKLWRRKVKECEVEDVEKGWVQDDGFEAEVDTLGKIRHKNIVKLWCCCTARDCKLLVYEYMQNGSLGDLLHSSKGGLLDWPTRFKIALDAAEGLSYLHHDCVPAIVHRDVKSNNILLDGDFGARVADFGVAKEVDATGKGLKSMSIIAGSCGYIAPEYAYTLRVNEKSDIYSFGVVILELVTGRLPVDPEFGEKDLVKWVCTTLDQKGVDNVVDPKLESCYKEEVCKVLNIGLLCTSPLPINRPSMRRVVKLLQEVGTEKHPQAAKKEGKLTPYYYEDTSDHGSVA

SEQ ID NO: 17818 - protein, 489 aa, Oenococcus oeni PSU-1
MPVKNKAMLITYSDSMGKNIKELQYILDKYIGDAIGGVHLLPFFPSTGDRGFAPSDYTRVNPDFGDWEDVEELGKKYYLMFDFMINHISRESIMYQDFKEKKDASSYKDFFIRWEKFWPKGRPTKADIDLIYKRKDKAPIQGITFADGSQEHLWNTFGDEQIDINVKSKVAQEFFKDTLQSMVKHGADLIRLDAFAYAIKKIDTNDFFIEPEIWDLLESVRKILDPLHAEILPEIYEHYTIPAKINEYGYFTYDFVLPLVILYTLYSGNPKQLAKWLKMSPKKQFTTLDTHDGIGVVDARDILTDEEIDYTSSELYKVGANVKRTYSSAAYNNLDIYQINSTYYSALGNDDKAYLLARAIQIFAPGIPQIYYAGLLAGENDLDLLEKTKEGRNINRHYYSEEEVANEVQRPIVACLLKLLAWRNRSAAFDLQGDIQVSATDKNEIKIIRTSTNGQDTAELTANVALKTFTIKENDKIILIEDQTDTKDI

SEQ ID NO: 17819 - protein, 425 aa, Haemophilus somnus 2336
MAKTIQAIRGMNDCSPTESLLWQWVEEKVRSVLQTYGYSEVRMPIVESTPLFARAIGEVTDVVSKEMYTFWDNDEQLTLRPEGTAGCVRAAIEHGWIYNNEQRLWYMGPMFRHERPQKGRYRQFHQVGVEVFGIANPEIDAELILLTARLWKQLGIFDHVTLQLNSIGSLESRQNYRSALVEFLQQHMDLLSEEEKERLVKNPLRILDTKNQVLQEVLNDAPKLLDYLDQESREHFSQLCDLLDAVGIQYEINPKLVRGLDYYNKTVFEWVTSALGAQGTVCGGGRYDGLVEQLGGHATCSVGFAMGLERLVLLVQEVNKQIVLPSAVDIYVVYFGEKTTLPAFQLAEKIRTELPHLRTMTHCGGGNFKKQFKRADKVGAKFALVIGETEVKTQQVVVKDLLGGAEQLSLALTDVVIYLKQAITQ

SEQ ID NO: 17820 - protein, 353 aa, Triticum aestivum
MVPSGYDCAASVLLCAEDNAAILGLDDDEEDCSWAAAAATPPRIAADAAAAAEGFLVDHPVQSDECVAALVETEKEHMPADGYPQMLLRRPGALDLAAVRRDAIDWIWEVIEHFNFAPLTAVLSVNYLDRFLSVYPLPEGKAWVTQLLAVACLSLASKMEETYVPLPVDLQVVEANSAFEGRTIKRMELLVLSTLKWRMQAVTACSFIDYFLRKFNDHDAPSMLAFSRSTDLILSTAKGADFLVFRPSEIAASVALAAFGERNTSVVERATTTCKFINKERVLRCYELIQDKVAMGTIVLKSAGSSMFSVPQSPIGVSDAAACLSQQSDDTAVGSPATCYQASSASKRRRIGR

SEQ ID NO: 17821 - protein, 483 aa, Arabidopsis thaliana
MIARRIWRSHRFLRPFSSSSVCSPPFRVPEYLSQSSSSPASRPFFVHPPTLMKWGGGSRSWFSNEAMATDSNSGLIDVPLAQTGEGIAECELLKWFVKEGDSVEEFQPLCEVQSDKATIEITSRFKGKVALISHSPGDIIKVGETLVRLAVEDSQDSLLTTDSSEIVTLGGSKQGTENLLGALSTPAVRNLAKDLGIDINVITGTGKDGRVLKEDVLRFSDQKGFVTDSVSSEHAVIGGDSVSTKASSNFEDKTVPLRGFSRAMVKTMTMATSVPHFHFVEEINCDSLVELKQFFKENNTDSTIKHTFLPTLIKSLSMALTKYPFVNSCFNAESLEIILKGSHNIGVAMATEHGLVVPNIKNVQSLSLLEITKELSRLQHLAANNKLNPEDVTGGTITLSNIGAIGGKFGSPLLNLPEVAIIALGRIEKVPKFSKEGTVYPASIMMVNIAADHRVLDGATVARFCCQWKEYVEKPELLMLQMR

SEQ ID NO: 17822 - protein, 469 aa, Enterococcus faecalis
MAEQTDLLILGGGTGGYVAAIRAAQKGLNVTIVEKYKLGGTCLHKGCIPTKALLRSAEVFDTLKQAASFGIETEAASIDFSKIQQRKEGIIEQLHKGVEGLCKKNKIKILAGEGAILGPSIFSPVSGAVAVTFNDPTREEEIIVPKNVIIATGSSPKTLPNLPLDEEFILSSDGMLELEELPESIAIIGGGVIGVEWASLLNSLGVNVTIIEFLDRLLINESATISKELKKRLEQRGINILLGSKVQEAKVTGQKVQVEVAGQESLTVDKVMVAIGRQPNINKLGLQNTSVKYTDKGIEVNEFYQTTEGHIYAIGDCIDTLQLAHVAMKEGELAVQHLLDETVEPLNYTNVPRGVYTNPEIASVGYTRETLPADKEVVIGTFNFNGNGKSLVYGETDGFIEVIRDKKTDDLLGVSMIGPHVTDLIAEASTAMYLDAAPIEIGEAIHAHPTMTEVLQEAALDTYGLAIHK

SEQ ID NO: 17823 - protein, 354 aa, Glycine max
MCAHVRQTLADLSSQEVADATRIQYGGSVKPNNIKEYMAQSDIDGALVGGASLKVEDFVQLLEDGFANRESEHGNAVKQAHKPNFDRYYEKYPTTQIEASGLDVGLPEGQMGNSEVGHMNIGAGRIVYQSLTRINKSIEDGEFFDNTVLNNAVKHVKDNGSALHVFGLLSDGGVHSHYKHLFAILELAKKQGIDKVYVHAFLDGRDVDQKSALKYIEETEDKFKELGVGQFASVSGRYYAMDRDKRWDREERAYNAIRNFEGPTFTSAKAGVEANYKNDVTDEFVEPFIVEGQNDGVNDGDAVIFYNFRPDRAAQLSEIFTNKAFDGFTVEQVDNLFYATFTKYNDDELLYHLI

SEQ ID NO: 17824 - protein, 432 aa, Enterococcus faecalis
MATKEIKMPHLGESVTEAAIVQWLVKPGDSVKRYDPLMEVVSDKVTTEVPSDFEWCSKRISDFSRYRVPIGTAVMTLETEETTEKTEVATLAPVKEASAEQAQEHETVATTSTATSHQKNNGRYSPAVLKIAQEKKIDLTQVTGTGRDGRITRKDVTNFTPTQARTPEKTVSPGTSPSISEEPVASQNESAATASPTETSPDKIVSADPVRKAIAKKMVQSVNEIPHAWLMVEADVTNLVQLRNSLKDEFKQQEGLSLSFFPFFAKAVIQALKKNPKINTSWDDGSIIYHKDVNLSIAVTTDEHLYVPVIQQADNYSIAGLAKEINRLAQEVRQGTLASKEMQGGTFTLNNTGTLGSVQSMGIINHPQAAILQVESINKRLVPTADGGFKVADMVNLCLSIDHRILDGQQAGKFLRDVKDNLAKYNADTDVY

SEQ ID NO: 17825 - protein, 139 aa, Geitlerinema sp. PCC 9228
VYKFNHEEHGVVVGEDCGQDIPSYLGLHYPSTDIPPQARALYLKNWLRIIPDANYAAVSVVPERHAHTGQPLDLSYSVLRSVSPRHVRYLQNMGVSASMSISIIKDGQLWGLVACHHYQRKYIPYEIRTACEFLAQVLS

SEQ ID NO: 17826 - protein, 388 aa, Nostoc punctiforme PCC 73102
MKLAARVSQVTPSLTLAIAAKAKALKAEGIDVCSFSAGEPDFDTPAHIKAAAVKALDEGKTKYGAAAGEPKLREAIAHKLKNDNGLDYKSENVIVTNGGKHSLYNLIVALIDLGDEVIIPAPYWLSYPEMVTLVGGVAVIVPTDATTGYKITPEQLRKAITPKTKLFILNSPSNPTGMVYTPDEIKALAQVVVDADIFVVSDEIYEKILYDGAEHISIGSLGKEIFDRTLISNGFAKAYSMTGWRIGYLAGPVEIIKAASTIQGHSTSNVCTFAQYGAIAALQSSQDCVEEMRQAFAKRRQVMLDRLNAIPGLSTAKPDGAFYLFPDISKTGLKSLEFCDALLEKHQVAVIPGIAFGADDNIRLSYATDMATIEKGMDRLEKFVKSRI

SEQ ID NO: 17827 - protein, 947 aa, Methylococcus capsulatus str. Bath
MALLKDKDFGTPPSTSDKMVTLEIDGFTATVPEGTSVMRAAASIGIDIPRLCATDSLEPFGSCRLCVVQIEGGRGLPASCTTPVFEGMKVVTQNDRLAQIRRGIMELYISDHPLDCLTCSANGNCELQDMAGVVGLREVRYGYEGANHFDAKKDLSNPYFQFEPSKCIVCSRCVRACEQTQGTFALTIDGRGFDSKISPGQNQAFMDSECVSCGACVQACPTATLIEKSVVEKGQADHSIITTCAYCGVGCSFKAEMKGSEVVRMVPDKNGQANHGHSCVKGRFAFGYATHPDRITSPMIRKSIHDPWQKVSWEEAINYAASEFKRIQAKYGKDSVGGLTSSRCTNEEAYLVQKLVRAAFGNNNVDTCARVCHSPTGYGLKQTLGESAGTQTFDSVMKSDVIMVIGANPTDGHPVFGSLMKKRVRQGARLIVVDPRDIDMVRSPHIEADYHLKLKPGTNVAVVNALAHVIVREGLVDEAFVNARCEAESFSKWKDFVAQERNSPEAMESVTGVPAQTLREAARLYATGGNAAIYYGLGVTEHSQGSTTVIAIANLAMATGNVGREGVGVNPLRGQNNVQGSCDMGSFPHELPGYRHVSDSTVRAQFEAAWNTRLDPEPGLRIPNMFAAALEGSFKGLYCEGEDIAQSDPDTQHVFAALEAMECVVVQDLFLNETAKFAHVFLPGASFLEKSGTFTNAERRISPVRRVMPPLAGYEDWQVTQMLANALGYPMNYSHASEILDEIASLVPTFSKVSFKRLDEVGSLQWPCNEEAPNGTPTMHVDHFVRGKGRFMLTEYVPTEERTSSKFPLILTTGRILSQYNVGAQTRRTANTAWHSEDRLEIHPHDAENRGIKDGDWVGIKSRQGETVLRAVVSERMQPGVVYTTFHFPESGANVITTDNSDWATNCPEYKVTAVQVTKVNAPSEWQQKFRSFTEEQLSFLEKATAG

SEQ ID NO: 17828 - protein, 331 aa, GIBBERELLA ZEAE PH-1
MSYQTLTTEAQAATIPLRHPDSIIERPPPVPATDPQLIADESHSAPKPADHDLFQMAPSEALALLIAGVEVLVRITGDVPPTPPPKSPTVPHMSGMQAEKENIVRSYSDRSLARLRKQAELEAKRLAAKEAKPEFKEPEDIDGVRLKPHPGLMSPPPQSEPYVVVGADSQPVNLQHSAITRKFYSKNEPPITINQYLQRLHQFCPMSTAVYLATSLYIHRLAVEERAIPVTRRNAHRLVLAGLRVAMKALEDLSYPHAKMAKVGGVSEAELARLEISFCFLVGFELVVGESRLQKHYELLKDKTSRYRLDNMDVPILTLKPRPRGAVQPAA

SEQ ID NO: 17829 - protein, 203 aa, Cucumis sativus
VLTGDSGVGKSNLLSRFSKNEFRFDSRPTIGVEFAYRNIKVADKLVKTQIWDTAGQERFRAITSSYYRGALGALLVYDITRVATFDNIKKWLRELREFGNPEMVIILVGNKCDLHQSREVQEEEARHLAELENLFFMETSAKDNLNVEEAFLEMVRRIHAIASQKTLDLHKKFEKLVAFPNGKEIISIHEVTPTKPNSNCCSL

SEQ ID NO: 17830 - protein, 397 aa, Pirellula sp. 1
MSSSNSNHKFRTRAIHVGNEVDPQTGAVVPPIHFASTFRQPGAGEWGQYDYSRSGNPTRTGLQDTLSSLENGCGSLAFSSGMAAIHAVTMLLESGDHVVAGSDIYGGAYRLLHQICNRSGIEVTLVDVTDLQAIENAITDRTKLIWTESIGNPRMTISDLPAIARLAKSKGILSGVDNTFGTPALLRPLDFGIDIVMHSATKYLGGHSDCLGGTLAVADSELYDQLYFVQNATGAVLDPMSSFLIARGLKTLDLRVREQSRTALRLAKWLEAHPMVRSVLYPGLPSHNQHELARQLFGQHQSDSEETHFGAMITFELDATLDQVREVCQSTELFHLAVSLGAVESLIEQPATMSHASYAPEARAAHGITDSLIRLSVGLESPSDLEADLERAIAIIG

SEQ ID NO: 17831 - protein, 330 aa, Arabidopsis thaliana
MADTSPRTDVSTDDDTDHPDLGSEGALVNTAASDSSDRSKGKMDQKTLRRLAQNREAARKSRLRKKAYVQQLENSRLKLTQLEQELQRARQQGVFISGTGDQAHSTGGNGALAFDAEHSRWLEEKNKQMNELRSALNAHAGDSELRIIVDGVMAHYEELFRIKSNAAKNDVFHLLSGMWKTPAERCFLWLGGFRSSELLKLLANQLEPMTERQLMGINNLQQTSQQAEDALSQGMESLQQSLADTLSSGTLGSSSSGNVASYMGQMAMAMGKLGTLEGFIRQADNLRLQTLQQMIRVLTTRQSARALLAIHDYFSRLRALSSLWLARPRE

SEQ ID NO: 17832 - protein, 323 aa, Oryza sativa
MGRPPCCDKVGVKKGPWTPEEDLMLVSYIQEHGAGNWRAVPTNTGLMRCSKSCRLRWTNYLRPGIKRGNFTEQEEKLIVHLQALLGNRWAAIASYLPERTDNDIKNYWNTHLKKKLKKMQAAEGGEDSGAASEGGGGRGDGDGGGKSVKAAAPKGQWERRLQTDIHTARQALRDALSLDHPDPSPATAAAAATPAGSSAAYASSADNIARLLQGWMRPGGGGGGNGKGPEASGSTSTTATTQQQPQCSGEGAASASASASQSGAAAAATAQTPECSTETSKMATGGGAGGPAPAFSMLESWLLDDGGMGLMDVVPLGDPSEFF

SEQ ID NO: 17833 - protein, 422 aa, Halobacterium sp. NRC-1
MSYDKIEVPEGGAKVSYDEAADELDVPDTPIIPIIHGDGIGKDVGPIAQDVLSAAAEATGHDIEWMEVYAGESAREMYDENLPEETVEAIREHRVAIKGPLTTPVGAGFRSLNVALRQTLDLYANVRPTYYLDGVPSPMKAPEEMDMVTFRENTEDVYAGIEWEAGTDEAEQVRSFVEDEMDFDDVMHDGDIGIGLKPISEKGSKRLVREAIDYAIENDRDTVTLVHKGNIMKFTEGQFGDWGMEVAEEEYPDDEVFAAPDSLWEEQDEVDIPEDAVMVEERLADAMLQWMQLRTDEFDVLAMPNLNGDYLSDAAGAQIGGLGIAPGANFGAGRCLAEPVHGSAPKRAGQDKANPTALILSGRLLFEYIGWDDASTLVRDAVEDTIESGTVTYDLARQRDDAEEVSSTTYAEAVIDRIEDLA

SEQ ID NO: 17834 - protein, 451 aa, Staphylococcus xylosus
GPLLMQDIYFLEQMAHFDREVIPERRMHAKGSGAFGTFTVTNDITKYTCASIFAEVGKQTEMFARFSTVAGERGAGDAERDIRGFALKFYTDEGNWDLVGNNTPVFFFRDPKLFPSLNHVVKRNPKTNMKDPQANWDFWTLLPEALHQITILMTDRGIPKGFRNMHGFGSHTYSMYNDKGERFWVKFHHRTQQGIENYSAEEAEQVMAKDRDSSQRDLFNNIEQGNFPKWKMYIQVMTEEQARNHKDNPFDLTKVWYKDEYPLIEVGEFELNRNPENYFQDVEQAAFAPTNIVPGLDFSPDKMLQGRLFSYGDTQRYRLGVNHWQIPVNQPKGVGMENICPFSRDGQMRILDNNQGASTHYYPNSNGAFEDQPQYKKPALDIQGQAYEYDFREDDDNYFEQPGKLFRLLSSEEQQILFNNTANEMSPVTDALKHRHIRHCYKADPAYGQGV

SEQ ID NO: 17835 - protein, 415 aa, Pseudomonas syringae pv. syringae B728a
MSEHISESISFVHNITLSHGRNAEVWDTAGKRYIDFVGGIGVLNLGHCNPQVVTAIQDQAAKLTHYCFNATPHDPYIRFMQQLTQFVPVSYPLSGMLTNSGAEAAENALKIVRGATGRTAVIAFDGGFHGRTLATLNLNGKVAPYKQKVGVLPGPVFHVPFPSKDNGVSTEQALKAMDRLFSVEIDVNDVGCIIFEPVQGEGGFLAMQPDFAQALRAFCDKHGIVLIADEIQSGFGRTGQRFAFSRLGIEPDLILLGKSIAGGIPLGAVVGRKPLLDNLPKGGLGGTYSGNPIGCAAGLASLAQMTDANLSSWGEQQERAIVSRYEAWRASGLSPYLGRLTGVGCMRGIELITPEGEPGTRPLAELLSSARDAGLLLMPSGKARHIIRLLIPLTIEPDVLHEGLDIFERCLAALA

SEQ ID NO: 17836 - protein, 340 aa, Acinetobacter sp. M-1
MSNHQIRAYAAMQAGEQVVPYQFDAGELKAHQVEVKVEYCGLCHSDLSVINNEWQSSVYPAVAGHEIIGTIIALGSEAKGLKLGQRVGIGWTAETCQACDPCIGGNQVLCTGEKKATIIGHAGGFADKVRAGWQWVIPLPDDLDPESAGPLLCGGITVLDPLLKHKIQATHHVGVIGIGGLGHIAIKLLKAWGCEITAFSSNPDKTEELKANGADQVVNSRDAQAIKGTRWKLIILSTANGTLNVKAYLNTLAPKGSLHFLGVTLEPIPVSVGAIMGGAKSVTSSPTGSPLALRQLLQFAARKNIAPQVELFPMSQLNEAIERLHSGQARYRIVLKADFD

SEQ ID NO: 17837 - protein, 461 aa, Brassica juncea
MAKNVGILAMDIYFPPTCVQQEALEAHDGASKGKYTIGLGQDCLAFCTELEDVISMSFNAVTSLLEKYKIDPKQIGRLEVGSETVIDKSKSIKTFLMQLFEKCGNTDVEGVDSTNACYGGTAALLNCVNWVESNSWDGRYGLVICTDSAVYAEGPARPTGGAAAIAMLIGPDAPIVFESKLRGSHMAHVYDFYKPNLASEYPVVDGKLSQTCYLMALDSCYKHLCNKFEKLEGKEFSINDADYFVFHSPYNKLVQKSFARLLYNDFLRNASSIDEAAKEKFTPYSSLSLDESYQSRDLEKVSQQLAKTYYDAKVQPTTLVPKQVGNMYTASLYAAFASLVHNKHSDLAGKRVVMFSYGSGSTATMFSLRLCENQSPFSLSNIASVMDVGGKLKARHEYAPEKFVETMKLMEHRYGAKEFVTSKEGILDLLAPGTYYLKEVDSLYRRFYGKKGDDGSITNGH

SEQ ID NO: 17838 - protein, 409 aa, Haemophilus influenzae R2866
MTIEILVPDLPESVADATVATWHKKLGDTVKRDEVIVEIETDKVVLEVPALSDGVLAEVVQAEGETVVSKQLLGKISTAQEGDVSSATLKATNEPTPSDRQNAAIENSHNHNADQSPAIRRLLAEHDLQADQIQGSGVGGRLTREDIEREIAKRQAQQVKQEAATEQNTISTVAYSARSEKRVPMTRLRKRIAERLLEAKNSTAMLTTFNEVDMQPIMTLRKTYGEKFEKQHSVRLGFMSFYIKAVVEALKRYPEVNASIDGDDVVYHNYFDISIAVSTPRGLVTPVLRDCDKLSMAEIEKQIKALAEKGRDGKLTVEDLTGGNFTITNGGVFGSLMSTPIINPPQSAILGMHAIKERPIALNGQVVIRPMMYLALSYDHRLIDGRESVGFLVAIKELLEDPTRLLLEI

SEQ ID NO: 17839 - protein, 268 aa, Acinetobacter sp. M-1
MRIPQFGLGTFRLKDQAVIDSVKTALEVGYRAIDTAQVYENEAAVGQAIAESGVARQDLFLTTKIWVDNFAEDKFIPSLKDSLQKLRTDAVDLTLIHWPAPALGVSIPSVMQLLLEAKQQGLTKQIGISNFNIALTQQAIDSIGIEHIATNQIELSPYLQNRNLVNYLREQNIDVTSYMTLAYGKVLQDPTLIEIAAQHQATTAQVALAWALQNGFAVIPSSTKRENLISNLKAQDLTLSAEEMQLIAQLERNGREVSPEPFAPEWDK

SEQ ID NO: 17840 - protein, 416 aa, Arabidopsis thaliana
MSSTFRAPAGAATVFTADQKIRLGRLDALRSSHSVFLGRYGRGGVPVPPSASSSSSSPIQAVSTPAKPETATKRSKVEIIKEKSNFIRYPLNEELLTEAPNVNESAVQLIKFHGSYQQYNREERGGRSYSFMLRTKNPSGKVPNQLYLTMDDLADEFGIGTLRLTTRQTFQLHGVLKQNLKTVMSSIIKNMGSTLGACGDLNKNVLAPAAPYVKKDYLFAQETADNIAALLSPQSGFYYDMWVDGEQFMTAEPPEVVKARNDNSHGTNFVDSPEPIYGTQFLPRKFKVAVTVPTDNSVDLLTNDIGVVVVSDENGEPQGFNIYVGGGMGRTHRMESTFARLAEPIGYVPKEDILYAVKAIVVTQREHGRRDDRKYSRMKYLISSWGIEKFRDVVEQYYGKKFEPSRELPEWEFKSY

SEQ ID NO: 17841 - protein, 271 aa, Clostridium thermocellum ATCC 27405
MSNRIGFIGAGNMGGAMITSIAQSGIIPAENILVFDVDRDKLSVLREKTGITITDSALETVRKSDIIILAVKPNMVKAVLNDIKPAVDNNKILVSVAVGIPIKFYKEMLGENIKFIRTMPNTPALVGEGMTLMCCDKNVDEKEAEQVKKIFECFGKVEFLEEKLMSEVTAVTSSSPAYVFMFIEAMADAAVLSGIPRNLAYKLSAQAVLGAAKMVLETGKHPGELKDQVCSPAGTTIEAVRSLEKNRFRYAIIEAMSECTKKALEIGKMYD

SEQ ID NO: 17842 - protein, 386 aa, Medicago sativa
MAIHHHHHNHQQLQQHTSSLFDALYCDEEEKWEDDDEGEVVDEGAQSDVTTTNYDILDSTSLLPLLLLEQNLFNEDEELNTLFSKEITQQETYYEDLKNVINFDSLSQPRREAVEWMLKVNAHYGFSALTATLAVNYLDRFLLSFHFQKEKPWMIQLVAVTCISLAAKVEETQVPLLLDLQVQDTKYVFEAKTIQRMELLILSTLKWKMHPVTTHSFLDHIIRRLGLKTNLHWEFLRRCENLLLSVLLDSRFVGCVPSVLATATMLHVIDQIEQSDDNGVDYKNQLLNVLKISKEKVDECYNAILHLTNANNYGHKRKYEEIPGSPSGVIDAVFSSDGSNDSWTVGASSYSTSEPVFKKTKNQGQNMNLSPINRVIVGILATATSP

SEQ ID NO: 17843 - protein, 482 aa, Neurospora crassa
MADNTKDTKEDIKAPKPAANLQIKTPKGTRDWHGPDMLLREQLFQTVSDVFKRHGGTPLDTPVFELREILAGKYGEDSKLIYDLQDQGGELCSLRYDLTVPFARWLAMTSTQQVKRYHIAKVYRRDQPAIARGRMREFHQCDFDIAGVYDPMIPDAEILRIIVEVFDALKLGITIKLNHRKILDGLFAVAGVPAEKIRTISSAVDKLDKMPWADVKKEMVEEKGLPEEVADKIGVYVQNAGNITDIINYIKADADLPTNDDIKAGIHDMELLAAYLDALEVTDKVSFDLSLARGLDYYTGLIFEVINKPEPVADGDKKKKSKKDDPASQVGSIAAGGRYDNLVGMYGKKQIPCVGISFGIDRIFTILKARGENDIKKREVDVFVMAFGGGKDFDGLLVERMKIARQLWNAGIRAEYMAKAKPKLQAQFKAAEGTPLGVILGEEELKAGQVRLKKLDQGQGQKDEGNLVPIDDLADEVKKLLL

SEQ ID NO: 17844 - protein, 412 aa, Escherichia coli K12
MKALTYHGPHHVQVENVPDPGVEQADDIILRITATAICGSDLHLYRGKIPQVKHGDIFGHEFMGEVVETGKDVKNLQKGDRVVIPFVIACGDCFFCRLQQYAACENTNAGKGAALNKKQIPAPAALFGYSHLYGGVPGGQAEYVRVPKGNVGPFKVPPLLSDDKALFLSDILPTAWQAAKNAQIQQGSSVAVYGAGPVGLLTIACARLLGAEQIFVVDHHPYRLHFAADRYGAIPINFDEDSDPAQSIIEQTAGHRGVDAVIDAVGFEAKGSTTETVLTNLKLEGSSGKALRQCIAAVRRGGIVSVPGVYAGFIHGFLFGDAFDKGLSFKMGQTHVHAWLGELLPLIEKGLLKPEEIVTHYMPFEEAARGYEIFEKREEECRKVILVPGAQSAEAAQKAVSGLVNAMPGGTI

SEQ ID NO: 17845 - protein, 809 aa, Escherichia coli
MPVSACRAVARAVVGQQEAIKWDKAPCRFCGTGCGVLVGTQQGRVVACQGDPDAPVNRGLNCIKGYFLPKIMYGKDRLRQPLLRMKNGKYDKEGEFTPITWDQAFDVMEEKFKTALKEKGPESIGMFGSGQWTIWEGYAASKLFKAGFRSNNIDPNARHCMASAVVGFMRTFGMDEPMGCYDDIEQADAFVLWGANMAEMHPILWSRITNRRLSNQNVTVAVLSTYQHRSFELADNGIIFTPQSDLVILNYIANYIIQNNAINQDFFSKHVNLRKGATDIGYGLRPTHPLEKAAKNPGSDASEPMSFEDYKAFVAEYTLEKTAEMTGVPKDQLEQLAQLYADPNKKVISYWTMGFNQHTRGVWANNLVYNLHLLTGKISQPGCGPFSLTGQPSACGTAREVGTFAHRLPADMVVTNEKHRDICEKKWNIPSGTIPAKIGLHAVAQDRALKDGKLNVYWTMCTNNMQAGPNINEERMPGWRDPRNFIIVSDPYPTVSALAADLILPTAMWVEKEGAYGNAERRTQFWRQQVQAPGEAKSDLWQLVQFSRRFKTEEVWPEDLLAKKPELRGKTLYEVLYATPEVSKFPVSELAEDQLNDESRELGFYLQKGLFEEYAWFGRGHGHDLAPFDDYHKARGLRWPVVNGKETQWRYSEGNDPYVKAGEGYKFYGKPDGKAVIFALPFEPAAEAPDEEYDLWLSTGRVLEHWHTGSMTRRVPELHRAFPEAVLFIHPLDAKARDLRRGDKVKVVSRRGEVISIVETRGRNRPPQGLVYMPFFDAAQLVNKLTLDATDPLSKETDFKKCAVKLEKV

SEQ ID NO: 17846 - protein, 252 aa, Caulobacter crescentus CB15
MSNTSASFGFKDVDASLKAGLVRGVFDRVAKNYDIMNDLMSGGVHRLWKDAVAARLNPQPGEVIIDCAGGTGDMARRFAKMARKAQERRGGPDATINIVDYNAEMIMAGIERGGEPEITWTVGDAQRLPLPDAYADAYVISFGIRNVTDINAALREARRVLKPGGRFLCLEFSRPVTEPLAKAYDAYSFKVIPQVGEWVAKDRDAYQYLVESIRRFPDQRTFAGMIEAAGFKRVTFTNFTGGVAALHQGWAI

SEQ ID NO: 17847 - protein, 377 aa, Thermoplasma acidophilum
MQYINESATVSASNNVEKLRKQGLKIYNFGIGEPDFTTPEGIIDYAFEMAKQGKTHYTPSAGIMELREKIASKLKTRNRIDANAENVLVTPTKFGINLAMMVILNPGDEVIIPDPYYVSYPDIVKLAGGKPVPVRTTDDYDIDLDEMRKFVTPRTRAIILNNPNNPTGKVLSEKEIRDLVDFALENDIYIVSDEIYEDLIYEGSLYSPASMGKEAFEHTITLNGFSKGYAMTGWRIGYFVATEEIVEAANIIQQQTITCASSISQYAALRALDDNESPARMRSEFRKRRDLAYGILSESTDMKVHKPEGAFYMFPGYSKDIPSEKIAEMLLNQEHVVVTPGSAFGDRGRHHFRISFATSEDIIKEGLERLVKFMHTL

SEQ ID NO: 17848 - protein, 508 aa, Halobacterium sp. NRC-1
MQAALVILDGWGLGDHDRRDAVRAADTPTFDEYAERGAFGTLTTSGRDVGLPDGQMGNSEVGHLTIGAGRVVKQAYTRIEDAIAAGDLCGNDAISGALDHVADTGGTLHVMGLVSDGGVHADQQHIHALVECAAGRGVEAAVHAFTDGRDTSPTGGEDYLADLEAVADEHGTGDVASVSGRYYAMDRDQNWARTKRAYDAITRSDGVAHHAAAAVDAVTDSYERGDTDEFVEPTTIEGGAALSDGDAVVFANFRADRARQLTRLLADIHPADWDADGIETNPPAVPVVTMTEYDETFDCPVAFPAAEPTDTLGAVLAAHDHTQLRVAESEKYAHVTYFLNGGREVAFDGETRTIVDSPDVPTYDEQPAMSAPAVTDTVLDALAGDDPDVLVLNYANPDMVGHTGDFDAAIEAVEAVDRELGRLVPALNDAGAHAFLTADHGNADDLGTPADPHTAHTFNPVPFVSLPPASGDTAAVRDGGALRDIAPTLLDVLGIDRPTVMTGASLLE

SEQ ID NO: 17849 - protein, 534 aa, Parachlorella kessleri
MAGGAIVASGGASRSSEYQGGLTAYVLLVALVAACGGMLLGYDNGVTGGVASMEQFERKFFPDVYEKKQQIVETSPYCTYDNPKLQLFVSSLFLAGLISCIFSAWITRNWGRKASMGIGGIFFIAAGGLVNAFAQDIAMLIVGRVLLGFGVGLGSQVVPQYLSEVAPFSHRGMLNIGYQLFVTIGILIAGLVNYGVRNWDNGWRLSLGLAAVPGLILLLGAIVLPESPNFLVEKGRTDQGRRILEKLRGTSHVEAEFADIVAAVEIARPITMRQSWRSLFTRRYMPQLLTSFVIQFFQQFTGINAIIFYVPVLFSSLGSASSAALLNTVVVGAVNVGSTMIAVLLSDKFGRRFLLIEGGITCCLAMLAAGITLGVEFGQYGTEDLPHPVSAGVLAVICIFIAGFAWSWGPMGWLIPSEIFTLETRPAGTAVAVMGNFLFSFVIGQAFVSMLCAMKFGVFLFFAGWLVIMVLCAIFLLPETKGVPIERVQALYARHWFWKKVMGPAAQEIIAEDEKRVAASQAIMKEERISQTMK

SEQ ID NO: 17850 - protein, 423 aa, Prunus persica
SAKGFFEVTHDISQLTCADFLRAPGVQTPVIVRFSTVIHERGSPETLRDPRGFAVKFYTREGNFDLVGNNFPVFFVRDAMKFPDAIRAFKPNPKSHIQETWRILDFFSHLPESLHTFAFFYDDLGVPQDYRHMEGSSVHAYTLISKAGKVHYVKFHWKPTCGVKCLLEDEAIKVGGANHSHATKDLYDSIAAGNYPEWKLYIQTMDPDHEDRFDFDPLDLTKTWPEDILPLQPVGRLVLNKNIDNFFAENEQLAFNPAHVVPGIYYSDDKMLQTRIFAYSDTQRHRLGPNYLQLPVNAPKCPHHNNHHEGFMNFMHRDEEVNYFPSRHDPVRHAERYPIPSNILSGKREKCVIEKENNFKQPGERYRSWAPDRQERFIHRWVDALSDPRVTHEIRSVWISYWSQADKSLGQKLASRLNVRPSI

SEQ ID NO: 17851 - protein, 240 aa, Glycine max
  unsure (1)..(240): unsure at all Xaa locations
MVEQSVLVLEKQGPNPVLSEGIHDWVFECHGLLHNAVLIIASFLFVLYLALQAKKSFLRLSHGRSYIIISYYASLWLVSILNLLWCFSQAWECSPGKEFAWNLLSLFTTSGMLFLEVSLLAFLLQGNSTSGLEALTRTFGISGIIVGFXYLVEARPAYYKYVTIMFILNAIALFACGITGNGAAFGFWLYHFTVVCYHAAYLPLLYITFLADFFQEEDLHLENVYYSEMKDAGFFEADWN

SEQ ID NO: 17852 - protein, 1131 aa, Lycopersicon esculentum
MASGSRTKHSYHNSSQGQAQSSGTSNMNYKDSISKAIAQYTADARLHAVFEQSGESGKSFDYSQSVKTTTQSVPERQITAYLTKIQRGGHIQPFGCMIAVDEASFRIIAYSENACEMLSLTPQSVPSLDKSEILTVGTDVRTLFTPSSSVLLERAFGAREITLLNPIWIHSKNSGKPFYAILHRVDVGIVIDLEPARTEDPALSIAGAVQSQKLAVRAISHLQSLPGGDIKLLCDTVVESVRELTGYDRVMVYKFHEDEHGEVVAESKRSDLEPYIGLHYPATDIPQASRFLFKQNRVRMIVDCHATPVRVTQDESLMQPLCLVGSTLRAPHGCHAQYMANMGSIASLTLAVIINGNDEEAVGGGRNSMRLWGLVVGHHTSVRSIPFPLRYACEFLMQAFGLQLNMELQLASQLSEKHVLRTQTLLCDMLLRDSPPGIVTQSPSIMDLVKCDGAALYYQRKYYPLGVTPTEAQIKDIVEWLLAYHGDSTGLSTDSLADAGYPGAASLGDAVCGMAVAYITSKDFLFWFRSHTAKEIKWGGAKHHPEDKDDGQRMHPRSSFKAFLEVVKSRSSPWENAEMDAIHSLQLILRDSFKDAEASNSKAIVHALGEMELQGIDELSSVAREMVRLIETATAPIFGVDVNGRINGWNEKVVELTGLSAEEAKGKSLVHDLLYKESQESAEKLLYNALRGVEGKNVEIKLRTFGAEQVEKAVFLVVNACSSRDYTNSIVGVSFVGQDVTGEKIVMDKFIHIQGDYKAIVHSPNPLIPPIFASDENTSCSEWNTAMEKLSGWSREEIVGKMLVGEIFGSCCRLKGPDAMTKFMIVLHNAIGGQDTDKFPFSFFDRNGKYVQALLTANKRVNMEGDTIGAFCFIQIASPELQQALRVQRQQEKKCYSQMKELAYICQEVKSPLNGIRFTNSLLEATNLTEYQKQYLETSAACERQMSKIIRDVDLENIEDGSLTLEKEDFFLGSVIDAVVSQVMLLLREKGVQLIRDIPEEIKTLTVHGDQVRIQQVLADFLLNMVRYAPSPDGWVEIQLRPSMMPISDGATVVHIELRIICPGEGLPPELVQDMFHSSRWVTQEGLGLSMCRKMLKLMNGEIQYIRESERCYFMIILDLPMTRKGPKSVG

SEQ ID NO: 17853 - protein, 489 aa, Oryza sativa (japonica cultivar-group)
MPAQKRRLSSSPSSRPRDHVETNGMTGASKAAAGSGGGGGGGSGGGVPLPPRGGSAAAAAAKRAADPQPQREGDSDAEFGGGVDGDSESSQSDGDMDEFIIVKLAEIRKEVQCPICLGIIRKTRTVMECLHRFCRDCIDKSMRLGNNECPACRTHCASRRSLRDDPNYDALIAALYPDIDKYEEEELAFSEEERSRNKKIQATIEETIRRQSEAVGKKRSTAKATATVFARKYRRNMRTRGRGKTIAPDIAPTGSDNEDREEGNAIDTTKESSSADDRSSDLMPKRGRKRPASRASPARTIGSSDHVFEENDELIGGKESFTTSPLRGEMLAWGKNGTRSQTRHGSVGGSNGRMAKGGRVAKLVDHLRTTDDMDKEFNLYLVLLPLDEQSMPNLDKPYISCRPTLSIRHLVQFIALQLSRQVEELDIFMRIDHCNGSVTTQDCTTGVAKMRLSDGLERIREDKLLSELHPSFTSHHGDLELLYALKTQG

SEQ ID NO: 17854 - protein, 935 aa, Photorhabdus luminescens subsp. laumondii TTO1
MKNTIILEKLSANDETMLISEWLVEEGDYVTVGQMIARVEASKAIVEIHSPMSGYLLKRYQAGDEVAVGNVIAEIVQEPTSTPTKEDPDASMFQVDRSNATARFSKAATAYLEHHRINPSKLGFSGLITLDYLRQHFAVEKHIQKPFTTTLLADPHESDKILSLVENITTTEPIEVSKQAEIRILSDAQNGSLPSSITVQFNSINLREKLRNDTNSSGQIFPYLLWILGITLQDWPQLRSYYEKQRIHRYSTVNIGVAIDMNHGLRVPVIRQINQLALPNVEAAVADYVCRYHENKLSLEDVTGATFTVSDLSGQNVLHFQPMLNKQQCAILGIGGDKDLEGYPMSLTLVFDHRVITGAIAAQFLNDFKRRLLTSNATKLHLSDTEAQQPTPVHNRFSPTNLKLADDISNIWQSQLECQGVNPSDNFFKLGGDSMKAAHTISQVAAHIAVAVPLRLLFENPTLQKFTQKITQLINETPRNIDDLLPASPDNYATLSLQQERLLKLCADGDPSDYNLFRAYRLIGHLDREALRQALHHLTKRHEILRSRFDWTTASLIGYFEEDADLPIEIIDLSAITKEGQDEQLMSALQRNSQCIWHAGDWLFHVSLILLKTDEQVLTLCLHHLIADGESIRILAAELSTFYAHACGDKSVALPKDLQRQYRHYANWQQQYIRDVSVKRQISYWKHKMEGAPSLLALPICNQSEIYQTRCSASEVFQIPQEIGVLEFSRHIGATPYTVLMSAWAIVLSHYSSQQEVVIGTAADNRQPEYGNNLGFFANNWAARIFVEDTQAFTLLTKSIRRITLDAKDNIDWSFGTIADALAPYEKHKVRSRIFQVMLIMLPNAKLTLRNIETIPMNLDIGRGREPFDGTVLDMTLWISVEHENIYAKLVYNVDLFQQKTVKSIVRSFTAVLRKACSESSITLLKLKDTCETIE

SEQ ID NO: 17855 - protein, 159 aa, Listeria monocytogenes EGD-e
MNVHDFSEKAMNGKEIALSDYKGKVLLIVNTASKCGLTPQLEGLEAMYKKLGGDNFEILGFPCNQFLRQDPGSDEEILEFCQMNYGVTFQMFSKIKVKGKDASPLYKYLTEQTGGKKVEWNFAKFLIDENGEVIERFPSKMKPEDFEDKVEALVAKVNN

SEQ ID NO: 17856 - protein, 456 aa, Vibrio parahaemolyticus
MHRYKEEASSLIKLATPVLIASVAQTGMGFVDTVMAGGVTQTDMAAVSVASSIWLPSILFGIGLLMALVPVVAQLNGSARREKIPFEIQQGVVLALLISIPIIGVLLQTQFILQLMDVEAVMADKTVGYIHAVIFAVPAFLLFQTLRSFTDGMSLTKPAMVIGFIGLLLNIPLNWIFVYGKFGAPELGGVGCGVATTIVYWVMFALLLAYVMTSSRLKSINVFGEYHKPQWKAQVRLFKLGFPVAAALFFEVTLFAVVALLVSPLGPIIVAAHQVAINFSSLVFMLPMSVGAAVSIRVGHRLGEENVDGARVASRVGIMVGLALATITAIITVLSRELIAELYTNNPEVITLAMQLLLFAAVYQCTDAVQVIAAGALRGYKDMRAIFNRTFIAYWILGLPTGYILGRTDWIVEPMGAQGFWLGFIIGLTAAALMLGVRLRWMHRQEPDVQLNFSLQ

SEQ ID NO: 17857 - protein, 363 aa, Bacillus subtilis subsp. subtilis str. 168
MAELNKTKVRKELRTERPSIYSFELDEIKQWLTDNGEKPFRAAQIFEWLYEKRVSSFEDMTNLSKDLREKLNTRFVLTTLKTAVKQTSQDGTMKFLFELHDGYTIETVLMRHEYGNSVCVTTQVGCRIGCTFCASTLGGLKRNLEAGEIVAQVVKVQKALDETDERVSSVVIMGIGEPFDNFNEMLAFLKIINHDKGLNIGARHITVSTSGIIPKIYEFADQQMQINFAISLHAPNTEIRSRLMPINRAYKLPDLMEAVKYYINKTGRRISFEYGLFGGVNDQVEHAEELADLLEGVKCHVNLIPVNYVPERDYVRTPRDQIFAFEKTLKSRGVNVTIRREQGHDIDAACGQLRAKERQDETR

SEQ ID NO: 17858 - protein, 468 aa, Azoarcus sp. BH72
MKKLFAILLTALTVGFAGGVIAQENTAAPTAPAAVEAPAATDAAPAAAEAPAAAEEVVATVNKGDVAWIMTATLLVLFMALPGLALFYGGLVRTKNMLSVLMQVMVVFSLIAVLWAFYGYSLAFTEASPFIGSLDKLFLSGVSNSTLADTFSADAKLPEYAFIAFQATFAGITCALIVGSFAERIKFSAVLLFSVIWFTFCYLPICHMVWGPGGFLLGDGALDFAGGTVVHINAGVAGLVGAYMVGKRIGFGRESMAPHFVTLTMVGASMLWVGWFGFNAGSNLEATAGAALAFINTLLATAAAVLAWSLGEAMFKGKPSMLGAASGAVAGLVAITPACGSVGPMGAIIIGLLAGFVCLWGVNGLKRMLGADDSLDVFGVHGLGGILGAILTGVFTAPSLGGTGAEDFAMGHQVWVQTYSVLITIVWSAVVAFIGYKIADMFVGLRVPEEEEREGLDVTAHGETAYHY

SEQ ID NO: 17859 - protein, 429 aa, Pseudomonas fluorescens PfO-1
MAKIVDIKGREVLDSRGNPTVEADVLLDNGIIGSACAPSGASTGSREALELRDGDKSRYLGKGVLKAVANINGPIRDLLLGTDPSDQKALDQAMIKLDGTENKATLGANAILAVSLAAAKAAAQDQDLPLYAHIANLNGTPGVYSMPVPMMNIINGGEHADNNVDIQEFMVQPVGAKSFSEGLRMGTEIFHHLKAVLKARGLSTAVGDEGGFAPNLASNEDALKVISEAVANAGYKLGTDVTLALDCAASEFFEDGKYNLSGEGQVFTAEGFADYLKGLTERYPIISIEDGLDESDWAGWKILTDKIGEKTQLVGDDLFVTNTKILKEGIDKKIANSILIKFNQIGTLTETLEAIQMAKAAGYTAVISHRSGETEDSTIADLAVGTSAGQIKTGSLCRSDRVSKYNQLLRIEEQLNGKAKYNGRSEFRG

SEQ ID NO: 17860 - protein, 454 aa, Azoarcus sp. BH72
MNDVQFPTAAAARPHPRGTAATAALLMLGLSGTALAQEAAPATLNSGDTAWMMVSSVLVLMMLVPGLALFYGGMVRAKNVLSVFTQCFGVAGVIGMLWVIYGYSIFSDTTAMEAGVVNLHSFIGGFKQAISPTSTAPASPASIPESVFATFQMTFALITPVIIAGSFAERMKFSAVLLFTALWFTFWYAPLAHMAWSAPGGPAWDWGILEFAGGTVVHINAGVAGLVAALVLGRRRGYPHVAMPPHNLGFALAGAALLWVGWFGFNVGSAVAANENAGMAMLTTQIAACAGVVGWLVVEWLKAGKPSALGAASGALAGLVAITPACGFVGPSGALYMGLITGAVCFFAIGWLKRKLGYDDSLGPFGLHGIGGIVGSLLTGVFASKSLGGFQDIEIASQVQIQAQSVLFTVLYCAIVTWVLLKLTGLVTRGLRVSADDEQEGLDQSQHNERAYNV

SEQ ID NO: 17861 - protein, 64 aa, Streptococcus pneumoniae
EREAASVKIATLLDKPEGRVVEIEADYTCFTIPNEFVVGYGLDYKENYRNLPYIGVLKEEVYSN

SEQ ID NO: 17862 - protein, 370 aa, Pseudomonas fluorescens PfO-1
MIKSRAAVAFEAKKPLEIVEVDVAMPKAGEVLLRVVASGVCHTDAYTLSGADPEGIFPSILGHEGGAIVEAIGEGVTSVAVGDHVIPLYTPECGQCKFCKSGKTNLCQAIRATQGKGLMPDGTSRFSYKGQTIFHYMGTSTFSEYTVLPEISVAKISKDAPLEKVCLLGCGVTTGIGAVINTAKVKPGDTVAIFGLGGIGLSAVIGAVKAKASRIIAIDINPAKFEIAKQLGATDCVNPKDFDRPIQEVIVDMTDGGVDFSFECIGNVQLMRAALECCHKGWGESVIIGVAGAGQEISTRPFQLVTGRVWRGSAFGGVRGRTELPSYVDMAQSGEIPLDTFITHTMGLEDINKAFDLMHEGKSIRTVIHF

SEQ ID NO: 17863 - protein, 500 aa, Triticum aestivum
RASPPSESRAPLRAPQRSATRQHQARQGPRRMCNGGRGPPYWTAGVTSAPARQTPLFSGRPSGGLSDPNEVAAVILGGGTGTQLFPLTSTRATPAVPIGGCYRLIDIPMSNCFNSGINKIFVMTQFNSASLNRHIHRTYLGGGINFTDGSVEVLAATQMPGEAAGWFRGTADAWRKIIWVLEDYYKNKSIEHILILSGDQLYRMDYMELVQKHVDDNADITLSCAPVGESRASEYGLVKFDSSGRVVQFSEQPKGDDLEAMKVDTSFLNFAIDDPAKYPYIASMGVYVFKRDVLLNLLKSRYAELHDFGSEILPRALHDHNVQAYVFTDYWEDIGTIRSFFDANRALCEQPPKFEFYDPKTPFFTSPRYLPPTKSDKCRIKEAIILHGCFLRECKIEHTAFSRLNSGSELKNAMMMGADSYETEDEMSRLMSEGKVPIGVGENTKISNCIIDMNARIGRDVVISNKEGVQEADRPEEGYYIRSGIVVIQKNATIKDGTVV

SEQ ID NO: 17864 - protein, 457 aa, Yersinia pestis biovar Medievalis str. 91001
MQKYIVEARSLLALAIPVVIAQLSQTAMGVVDTIMAGSVSATDMAAVAVGTSIWLPAILFGHGLLLALTPTVAQLNGSGRRSQIAHQVRQGFWLALCVSVLIMLVLYNSDHVIKQMDNIDPVLAQKAVGFLHAIMWGVPGYLFFQVLRNQCEGLSKTKPGMVIGFVGLLVNIPINYIFIYGKFGAPALGGVGCGVATASVYWVMFLMMRWYVTRARSQQDIKLEKGFAAPDWQVMKRLSGLGLPVALALFFEVTLFAVVALLVSPLGIVAVAGHQIALNFSSLMFMLPMSLSVAATIRVGFRLGQGAVEQAQVAAYTSMAVGLLLASVTAVFTIVFREHIALLYNKTPEVVTMASHLMLLAALYQLSDAVQVIGSGVLRGYKDTRSIFFITFTAYWLLGLPSGYLLGLTDYILPAMGPAGFWIGFIIGLTAAAILMVLRIRWLQKQPTAFILQRAAH

SEQ ID NO: 17865 - protein, 512 aa, Salmonella typhimurium LT2
MTNNPPSTRIQPGEYGYPLKLKARYDNFIGGDWVAPADGEYYQNLTPVTGQPLCEVASSGKKDIDLALDAAHKAKDKWAHTSVQDRAAILFKIADRMEQNLELLATAETWDNGKPIRETSAADVPLAIDHFRYFASCIRAQEGGISEVDSETVAYHFHEPLGVVGQIIPWNFPLLMASWKMAPALAAGNCVVLKPARLTPLSVLLLMEIIGDLLPPGVVNVVNGAGGEIGEYLATSKRIAKVAFTGSTEVGQQIMQYATQNIIPVTLELGGKSPNIFFADVMDEEDAFFDKALEGFALFAFNQGEVCTCPSRALVQESIYERFMERAIRRVESIRSGNPLDSGTQMGAQVSHGQLETILNYIDIGKKEGADILTGGRRKELDGELKEGYYLEPTILFGKNNMRVFQEEIFGPVLAVTTFKTMEEALEIANDTQYGLGAGVWSRNGNLAYKMGRGIQAGRVWTNCYHAYPAHAAFGGYKQSGIGRETHKMMLEHYQQTKCLLVSYSDKPLGLF

SEQ ID NO: 17866 - protein, 446 aa, Streptococcus agalactiae 2603V/R
MYQTQTNKEKFVLFLKLFIPVLIYQFANFSATFIDSVMTGQYSQLHLAGVSTASNLWTPFFALLVGMISALVPVVGQHLGRGNKEQIRTEFHQFLYLGLILSLILFLIMQFIAQPVLGSLGLEDEVLAVGRGYLNYMLIGIMPLVLFSICRSFFDALGLTRLSMYLMLLILPFNSFFNYMLIYGKFGMPRLGGAGAGLGTSLTYWAIFIVIIIVMSLHPQIKTYHIWTLERIKAPLIIEDIRLGLPIGLQIFAEVAIFAVVGLFMAKFSSIIIAAHQAAMNFSSLMYAFPLSISTALAITISFEVGAERFQDANTYSRIGRLTAVGITSGTLLFLFLFRENVAAMYNSDPHFVAITAQFLTYSLFFQFADAYAAPVQGILRGYKDTTKPFMIGAGSYWLCALPLAVILEKNSQLGPFAYWIGLITGIFVCGLFLNQRLQKIKKLYY

SEQ ID NO: 17867 - protein, 356 aa, Eucalyptus saligna
MGSLEKERTTTGWAARDPSGVLSPYTYSLRNTGPEDLYIKVLSCGICHSDIHQIKNDLGMSHYPMVPGHEVVGEVLEVGSEVTKYRVGDRVGTGIVVGCCRSCGPCNSDQEQYCNKKIWNYNDVYTDGKPTQGGFAGEIVVGQRFVVKIPDGLESEQAAPLMCAGVTVYSPLVRFGLKQSGLRGGILGLGGVGHMGVKIAKAMGHHVTVISSSDKKRTEALEHLGRDAYLVSSDENGMKEATDSLDYIFDTIPVVHPLEPYLALLKLDGKLILTGVINAPLQFISPMVMLGRKSITGSFIGSMKETEEMLEFCKEKGLTSQIEVIKMDYVNTALERLEKNDVRYRFVVDVAGSKLD

SEQ ID NO: 17868 - protein, 324 aa, ASPERGILLUS NIDULANS FGSC A4
MSSSLEQLKATGTVVVCDSGDFATIDKYKPQDATTNPSLILAASKKPEYASLIDAAVEKGKKQGGSVDDQVDATLDYLLVEFGKKILDIIPGKVSTEVDARFSFDTKASVDKALHIIKLYEEAGISKDRILIKIASTWEGIQAAHILQSQHGINCNLTLMFSLVQAIAAAEAGAFLISPFVGRILDWYKAAHKRDFSKEEDPGVKSVQSIFNYYKKFGYKTIVMGASFRNVGEITELAGCDYLTISPGLLEELYNSKDAVPKKLDAASATTLDITKRSYLNDEALFRFDFNEEAMAVEKLREGISKFAADAVTLKDILKQKVQA

SEQ ID NO: 17869 - protein, 510 aa, Ricinus communis
  unsure (1)..(510): unsure at all Xaa locations
MAAGLAITSEGGQYNGRMTSFVALSCMMAAMGGVIFGYDIGVSGGVTSMDPFLKKFFPDVYRKMKEDTEISNYCKFDSQLLTSFTSSLYVAGLVASFFASSVTRAFGRKPSILLGGXVFLAXAALGGAAVNVYMLIFGRVLLGVGVGFANQAVPLYLSEMAPPRYRGAINNGFQFSVGIGALSANLINYGTEKIEGGWGWRISLAMAAVPAAILTFGALFLPETPNSLIQRSNDHERAKLMLQRVRGTTDVQAELDDLIKASIISRTIQHPFKNIMRRKYRPQLVMAVAIPFFQQVTGINVIAFYAPILFRTIGLEESASLLSSIVTGLVGSASTFISMLIVDKLGRRALFIFGGVQMFVAQIMVGSIMAAELGDHGGIGKGYAYIVLILICIYVAGFGWSWGPLGWLVPSEIFPLEIRSAGQSIVVAVSFLFTFVVAQTFLSMLCHFKSGIFFFFGGWVVVMTAFVHFLLPETKKVPIEKMDIVWRDHWFWKKIIGEEAAEENNKMEAA

SEQ ID NO: 17870 - protein, 559 aa, Glycine max
MGSSGFSWKLADHPKLPKGKTVAVVVLDGWGEATPNEYNCIHKAETPCMDSLKKGAPERWRLVRAHGTAVGLPTEDDMGNSEVGHNALGAGRIFAQGAKLVDLALASGKIFEGEGFKYIKECFENGTLHLIGLLSDGGVHSRLDQLQLLLKGVSERGVKRVRVHILTDGRDVLDGSSVGFVETLENDLANLRAKGVDARIASGGGRMNVTMDRYENDWSVVKRGWDAQVLGEAPYKFTNALEAVKKLRAEPKANDQYLPPFVIVDESGKPVGPIVDGDAVVTFNFRADRMTMIAKALEYENFDKFDRVRYPKIRYAGMLEYDGELKLPSHYLVSPPEIDRTSGEYLVYNGIRTFACSETVKFGHVTFFWNGNRSGYFNAELEEYVEIPSDSGITFNEQPLMKALQIAEKARDAILSGKFDQVRVNLPNGDMVGHTGDIEATVVACKAADAAVKMILDAIEQVGGIYVVTADHGNAEDMVKRDKSGKPLLGKDGKIQILTSHTLEPVPIAIGGPGLAPGVRFRNNVPTGGLANVAATVMNLHGFEAPSDYETTLIEVVDN

SEQ ID NO: 17871 - protein, 303 aa, Populus tremula
DVYFWEAKGQTPLYPRIYGHEAGGIVESVGPGVTDLQPGDHVLPVFTGECGDCRHCKSEESNMCDLLRINTDRGVMLTDGKSRFSINGKPIYHFLGGSTFSEYTVCHIGTVAKINPAAPLDKVCILSCGISTGLGAALNVAKPQKGHTVAVFGLGAVGLAAAEGARLSGASRIIGVDLNPSRFKEAKKFGVTELINPKDHDKPVQQVIIEMTDGGVDRSIECTGNVQAMISAFECVHDGWGVAVLVGVPSKDDEFKTHPMNLLNERTLKGTFFGNYKPRTDLPGVVEKYMNKELEVEKFITHS

SEQ ID NO: 17872 - protein, 303 aa, Populus tremula
DVYFWEAKGQTPLYPRIYGHEAGGIVESVGPGVTDLQPGDHVLPVFTGECGDCRHCKSEESNMCDLLRINTDRGVMLTDGKSRFSINGKPIYHFLGGSTFSEYTVCHIGTVAKINPAAPLDKVCILSCGISTGLGAALNVAKPQKGHTVAVFGLGAVGLAAAEGARLSGASRIIGVDLNPSRFKEAKKFGVTELINPKDHDKPVQQVLIEMTDGGVDRSIECTGNVQAMISAFECGHVGWGVAVLVGVPSKDDEFKTHPMNLLNERTLKGAFFGNYKPRTDLPGVVEKYMNKELEVEKFITHS

SEQ ID NO: 17873 - protein, 574 aa, Saccharomyces cerevisiae
MAVEENNMPVVSQQPQAGEDVISSLSKDSHLSAQSQKYSNDELKAGESGSEGSQSVPIEIPKKPMSEYVTVSLLCLCVAFGGFMFGWDTGTISGFVVQTDFLRRFGMKHKDGTHYLSNVRTGLIVAIFNIGCAFGGIILSKGGDMYGRKKGLSIVVSVYIVGIIIQIASINKWYQYFIGRIISGLGVGGIAVLCPMLISEIAPKHLRGTLVSCYQLMITAGIFLGYCTNYGTKSYSNSVQWRVPLGLCFAWSLFMIGALTLVPESPRYLCEVNKVEDAKRSIAKSNKVSPEDPAVQAELDLIMAGIEAEKLAGNASWGELFSTKTKVFQRLLMGVFVQMFQQLTGNNYFFYYGTVIFKSVGLDDSFETSIVIGVVNFASTFFSLWTVENLGHRKCLLLGAATMMACMVIYASVGVTRLYPHGKSQPSSKGAGNCMIVFTCFYIFCYATTWAPVAWVITAESFPLRVKSKCMALASASNWVWGFLIAFFTPFITSAINFYYGYVFMGCLVAMFFYVFFFVPETKGLSLEEIQELWEEGVLPWKSEGWIPSSRRGNNYDLEDLQHDDKPWYKAMLE

SEQ ID NO: 17874 - protein, 216 aa, Glycine max
MAHRVDHEYDYLFKIVLIGDSGVGKSNILSRFTRNEFCLESKSTIGVEFATRTLQVEGKTVKAQIWDTAGQERYRAITSAYYRGAVGALLVYDITKRQTFDNVQRWLRELRDHADSNIVIMMAGNKSDLSHLRAVSEDDGQALAEREGLSFLETSALEATNIEKAFQTILTEIYHIVSKKALAAQEAAVGTILPGQGTTINVGDASGNTKRGCCSA

SEQ ID NO: 17875 - protein, 562 aa, Xanthomonas citri
MSLNGGAGASRAGGRSDHRGGVRQHERRRSQDLQAQSGICERAQRDLPHQPQHPHPGRMTQTNGFDALHAHAQRLRGAAIPALLAAEPERPTQYARQVGPLYFNFARQKYDRAALDALFAIARERDLSGAFQRLFRGEQVNVTEQRAALHTALRGDLTDAPVASEAYATAEEVRQRMGSLIQQLEATDVTDIVSVGIGGSDLGPRLVADALRAPSGARFRVHFVSNVDGAAMQRTLATLDPARTAGILISKTFGTQETLLNGSILHAWLGGSERLYAVSANPERAAKAFDIAPGRVLPMWDWVGGRYSLWSAVGFPIALAIGFERFEQLLEGAAQFDAHVLNTPLEENVAVLHGLTAVWNRNLLGSATHAVMTYDQRLALLPAYLQQLVMESLGKRVKLDGSAVDSDTVSVWWGGAGTDVQHSFFQALHQGTSVVPADFIGTVHNDDPYAENHTALMANVLAQTEALANGQDSSDPHRSYPGGRPSTVILLDALTPQALGALISMYEHSVYVQSVMWGINAFDQFGVELGKQLASQLLPALKGESVDVADPVTRELLNKLRG

SEQ ID NO: 17876 - protein, 417 aa, Photorhabdus luminescens subsp. laumondii TTO1
MESKVVIPAEGKKITVDAKGKLVVPNNPVIPYIEGDGIGVDVTPAMLKVVDAAVQKAYQGERKISWMEIYTGEKSTHVYGKDVWLPDETLDLIREYRVAIKGPLTTPVGGGIRSLNVALRQQLDLYVCLRPVRYYQGTPSPVKQPELTDMVIFRENAEDIYAGIEWKAGSVEADKVIKFLQEEMGVNKIRFPQQCGIGVKPCSEEGTKRLVRAAIEYAIDNDRESVTLVHKGNIMKFTEGAFKDWGYQLAREEFGGELLDGGPWVKIKNPKNGKEIIVKDVIADAFLQQILLRPAEYDVIACMNLNGDYISDALAAQVGGIGIAPGANIGDECALFEATHGTAPKYAGQDKVNPGSVILSAEMMLRHMGWTEAADLIVKGMEGAIAAKTVTYDFERLMEGAKLLKCSEFGDAIIQHM

SEQ ID NO: 17877 - protein, 299 aa, Thermobifida fusca
MTKAVIPVAGLGTRFLPATKSTPKEMLPIVDKPAIQYVVEEAVSAGLNDILMITGRNKRSIEDHFDRAYELEEALRAKGDIERLNAVRHPSDLAQLHYVRQGEPRGLGHAVLCGAAHVGNEPFAVLLGDDLIGARETLLQRMIEVRQTYGGSVIALMEVEPDQVSLYGCAAIEPTDEPDVVTVTDLVEKPPADQAPSRWAIIGRYICDPEIFEVLRKTPPGRGGEIQLTDALRELAQRSSNGGGRVHGVLFRGQRFDTGNKLDYLRTVVEFACESPDLAKEFVPWLRDFLTRYATDSTR

SEQ ID NO: 17878 - protein, 592 aa, Saccharomyces cerevisiae
MLSLSAKNHFTVSNSITHVIKSYHIRTLTSSAEKMPHITTPFSTSASSTKLKAFRKVRPVLQRHSSSWIVAQNHRRSLSGQSSLNDLRHLNRFPHHTLKTSNNEFYPAEQLTLEDVNENVLKAKYAVRGAIPMRAEELKAQLEKDPQSLPFDRIINANIGNPQQLQQKPLTYYRQVLSLLQYPELLNQNEQQLVDSKLFKLDAIKRAKSLMEDIGGSVGAYSSSQGVEGIRKSVAEFITKRDEGEISYPEDIFLTAGASAAVNYLLSIFCRGPETGVLIPIPQYPLYTATLALNNSQALPYYLDENSGWSTNPEEIETVVKEAIQNEIKPTVLVVINPGNPTGAVLSPESIAQIFEVAAKYGTVVIADEVYQENIFPGTKFHSMKKILRHLQREHPGKFDNVQLASLHSTSKGVSGECGQRGGYMELTGFSHEMRQVILKLASISLCPVVTGQALVDLMVRPPVEGEESFESDQAERNSIHEKLITRAMTLYETFNSLEGIECQKPQGAMYLFPKIDLPFKAVQEARHLELTPDEFYCKKLLESTGICTVPGSGFGQEPGTYHLRTTFLAPGLEWIKKWESFHKEFFDQYRD

SEQ ID NO: 17879 - protein, 394 aa, Staphylococcus epidermidis ATCC 12228
MKLSLNSSSKFLRAPSIRQFSNRIKAIDDCVNLTIGQPDFPMPDVVKNAYIKAIKNDKTSYSHNKGLFETREAISQYFKRKYNFLYSEEEIIVTNGASEALDTSLRSIIEPGDDILIPGPIYAGYIPLVETLGGNPVYIDTTQSDFKVTPELIESHLTHKTKAILLNYPTNPTGVILERSEVKNIVDTLVNKHIFIISDEIYAENTFKEQHTSFAEFPEIRDQLLLIGGLSKSHSATGIRIGFLLGPEYLIEKLTFMHAYNCICANVPAQIACTTALNEGINAPLYMNRDYIERRNYLKEKLESLGFELTAQPEGAFYIFPSIKRFTENDFEFCVDVLEKAHLAMVPGSSFTDIGKGYIRISYAYDMETLKKGMHRLENYLQQHYPEQMTTPTK

SEQ ID NO: 17880 - protein, 446 aa, Zea mays
MAVTITWVKARQIFDSRGNPTVEVDVGLSDGSYARGAVPSGASTGIYEALELRDGGSDYLGKGVLKAVSNVNNIIGPAIVGKDPTEQVEIDNFMVQQLDGTSNEWGWCKQKLGANAILAVSLAVCKAGAMVKKIPLYQHIANLAGNKTLVLPVPAFNVINGGSHAGNKLAMQEFMILPTGASSFKEAMKMGVEVYHNLKSIIKKKYGQDATNVGDEGGFAPNIQENKEGLELLKAAIEKAGYTGKVVIGMDVAASEFFGEKDKTYDLNFKEENNDGSNKISGDSLKDLYKSFVYEYPIESIEDPFDQDDWSTYAKLTDEIGQKVQIVGDDLLVTNPTRVAKAINEKTCNALLLKVNQIGSVTESIEAVRMSKRAGWGVMASHRSGETEDTFIADLSVGLSTGQIKTGAPCRSERLAKYNQLLRIEEELGDAAVYAGAKFRAPVEPY

SEQ ID NO: 17881 - protein, 649 aa, Lactobacillus johnsonii NCC 533
MCGICAFFDPELKDKDCAIQGMMDTIKHRGPSSDGKYTNDKVALGFRRLSIIDLRGGSQPIFNEDKSRAIIFNGEIYNFKPLRKELIDAGHTFTTKADTEVLLHGYEEWGMDGLLKKVRGMFAFVIWDDNTKTLYGARDFFGIKPMYYSDQNGKLIVGSELKSFLAYPGFKKELNTEAVKPYLMNQYNDLKETFFKGVYRFPAGHWFEYKDGKMKTHQYWDAKYVENSLSFEETLDKINEDLKETVDLYRNADVPVGAFLSEGIDSSYLTSLLDPEDVFSVSFDDSTYNEASKAKALSDLHGWKFFADKVDADEAMRDFPEMQYHMDEPDANPSIIPLWYLCKLARKHVTVALSGEGADELFAGYVNYGMHTHNDVIKVFTAGLKKLPKKSRVRLAHKIKKMPNFPGKVHMYTNLAEPSEFYVGQSVIYDMDYPTIFTSKDANGILRDKYKNDLTVNGIYQEDFKKVKNIDEVKQMQYIDLHHFMLNDIEQKADKISMAHSLELRVPYLDKKIAELANSIPTKYLVNRHDTKYALRKASEKVLPEEWAQRPKLGFPTPIKQWLKEPRFYKQVRALFTEDFVDDIFDQKKIVKLLDDNYKGDGSARRQIWAIYTFLVWYKLFFVDYDETVKKYQHVQPEVAELIESGRLV

SEQ ID NO: 17882 - protein, 262 aa, Novosphingobium aromaticivorans
MTDANGRFADKIAVVTGAAQGIGFATAQRLGREGATVVVADRAEQATLDAVARLMAESVDAHPAIHDLEQQTGAAALYNAVSDKFGRIDVAVHNVGGTIWAKPYWEYTTEEIVAEINRSLWPTLWCCHAVLPHMRAAGRGAIVNIGSVATRGVNRVPYAAAKGGVAALTAALSLELEDCGIRVNCVAPGGVNVTRVTPRNTAPHSDADRKGFGEVMEQTLRDTPLGRFGEPEELAAAICFLAADEASYITGQTLYVAGGGIG

SEQ ID NO: 17883 - protein, 822 aa, Haemophilus somnus 2336
MKTQNKVNTSRRDFLKNSSLGVAGVSLSGGVVGTLASKAVAAEQHTVVTAAHWGALGVVVENGKVVKSGSAMPISVENELQSVVADQLYSETRVKYPMVRKGFLEGNKDTSLRGRDEWVRVSWDKAFELVAGEMKRVRDAYGAGGIFAGSYGWYSSGALHASRTLLQRYMNVTGGFVGVKGDYSTGAAQVIMPHVLGTIEVYEQQTSWETVLENSDIVVLWAANPLTTLRIAWTSTDQQGIEYFKKLKESGKRIICIDPVRSESCEFLNAEWLPVHTGTDVPLMLGIAHTLVTTDKHDKAFLKKYTTGYDKFEQYLLGKTDGQPKDANWASKICGLPADIIKQLAADFSSKRTMLMGGWGMQRQRHGEQTHWTLVTLAAMLGQIGLPGGGFGFSYHYSNGGAPSAVGGIIGSITANPSLQAGEKTWLDDTSKFSFPLARIADVLLNPGKTIDYNGSKVTYPDIKLIYWAGGNPFVHHQDTNTLVKAWQKPETVIVNEVNWTPTARMADIVLPATTSYERNDLTMSGDYAMMNIFPMKQVVPPQFEAKNDYDIFAELAKRAGVEDKFTEGKTEMEWLQDFYNVAFNAARKNRVLMPKFEKFWQENKPVNFKPTEKSKKWVRYEAFRNDPLLNPLGTPSGKIEIYSDVVAKMNYDDCKGHPYWFVPEEFAGNTTTEAPLALVTPHPYYRLHSQLAHTSLRKKYAVNDREPVLIHKEDAMARGIMDGDIVRIFNKRGQVLAGAVVTEGIIKGTVALHEGAWYDPADLGQSEQPLCKNGCANVLTRDEGTSKLAQGNSPNTCIVQVEKYTEAAPKVTVFDQPKRSV

SEQ ID NO: 17884 - protein, 446 aa, Zea mays
MASRVASGLLRRRAGATLGLLRSYAHVRSYNSQLSALVSATSECSNLPRRCYYLPNPSPYQVWSRSFASDNGDKFEAVVPFMGESVTDGTLANFLKKPGDRVEADEPIAQIETDKVTIDVASPEAGVIEKLIASEGDTVTPGTKVAIISKSAQPAETHVAPSEEATSKESSPPKVEDKPKVEEKAPKVDPPKMQAPKPTAPSKTSPSEPQLPPKERERRVPMPRLRKRIANRLKDSQNTFAMLSTFNEVDMTNLMKLRSDYKDEFVTKHGVKLGLMSCFVKAAVSALQNQPIVNAVIDGDDIIYRDYVDISVAVGTSKGLVVPVIRDADTMNFADIEKGINNLAKKANEGALSIDDMAGGTFTISNGGVYGSLLSTPIINPPQSSILGMHSIVQRPVVVNGDILARPMMFLALTYDHRLIDGREAVFFLRRIKDVVEDPRRLLLDI

SEQ ID NO: 17885 - protein, 246 aa, Oryza sativa
MFPGLIHHHRLLDADVGGGGGGSSAGLVLTADPKPRLRWTADLHDRFVDAVAQLGGPDKATPKTIMRTMGVKGLTLFHLKSHLQKYRLGKQSGKEMAEQSKDASYILGAQSGTNLSPTVPTPDLKESQELKEALRAQMEVQRKLHEQVEVQRHVQIRMEAYQNYIDTLLEKACNIVSEQLNGFSISDHDLTSAGVMLSSSDTLSPSIFHQLSVSSISLHSPGGKSSPFAADADLFFQKAPEKRKSY

SEQ ID NO: 17886 - protein, 464 aa, Haemophilus somnus 2336
MKLTRFQQYHTEAKKLIAIATPILLAQVAQNSMGLVDTIMAGRVSAADMAAVAVGASIWLPLVLFGHGLLLALPPTISYLNGSGQRDHIAHQIRQGLWIVFISCIPLGLLIYNSDFVIQYMKMEEKLANITIGYLRAMLWGLPGYLLLINFRCLNDGIAKTKPAMVITFFGLLCNIPLNYIFIYGKLGIPAFGAVGCGIATAIVNWIMCLMMIVYSKHARNQRDLKVFEHLFEKPDTKTLAKLFRLGLPIAVSLCCEVALFALTSLLLSPLGTQVVASHQIALNTSSFAFMLPMSLGMATTILVGQRLGEGKIDNAKQISFSALTVGLSIAFLTASIIFFFRYEIAAIFVNDKEVIAISSSLLMLVALYQFSDTAQVVSSGALRGYKDTQAILYITLFCYWGMGMPLGFSLSRTDWIIPSIGAAGFWVSFVVSLTIAAILLLWRMYKIQQQPAPILLAKLDKLK

SEQ ID NO: 17887 - protein, 539 aa, Zea mays
MSAAQLLRHSRKLRSLQNAVGCENFSFVRHFSSGSGSFIARENGIGKRTRGTRFSQHNQPAKQLETFSAGVNGSCTWRIASNSLTPSAASWLSGSFSCGQVVSARPFSSSADLPPHQEIGMPSLSPTMTEGNIAKWLKKEGDKVSPGEVLCEVETDKATVEMECMEEGYLAKIIHGDGAKEIKVGEVIAITVEEEGDIEKFKDYKPSSSAEPVAPAEPKAEPEPSQPKAEEKKLTQAPEAKAPKIEEASQSGDRIFASPLARKLAEDNNVPLSSVKGTGPDGRILKADIEDYLAKGGLREAFADPGLGYVDIPNAQIRKVTANRLLASKQTIPHYYLTVDARVDKLVQLRGELNPLQDASGGKKISINDLVIKAAALALRKVPQCNSSWMNDFIRQYHNVNINVAVQTEHGLFVPVIRDADKKGLGAIAEEVKQLAQKARDNSLKPADYEGGTFTVSNLGGPFGIKQFCAIINPPQSAILAIGSAEKRVIPGSADGQFEFGSFMSATLSCDHRVIDGAIGAEFLKAFKGYIENPTSMLL

SEQ ID NO: 17888 - protein, 208 aa, Zea mays
  unsure (1)..(208): unsure at all Xaa locations
MAHRVDNEYDYLFKIVLIGDSGVGKSNILSRFTRNEFCLEFATRTLQIEGKTIKAQIWDTAGQERFXSITSAYYRGAVGALLVYDITKKQTFENIQRWLRELRDHADSNIVIMMVGNKSDLNHLRSVPEEDGQALAEKXEGLSFLETSALEALNVEKAFQTVLSDIHQIISKKALAAQEAAGSGPPGQGTTINVADSSANTKGGCCSS

SEQ ID NO: 17889 - protein, 341 aa, Neurospora crassa
MVARPALRRAIPSSRTLLHAESRILRSSFSTTLQSQQKPNNNNNSVPEYAIPDPARPTHFGFETVTEAEKRERVAGVFTSVAESYDRMNDLMSFGWHRVWKDHFVASLNPGFSPLTSSSDPRAPQHILDIAGGTGDIAFRMLHTAHILNGNPDVRVTISDINPAMLSVGKQRSASLPASQQAALSFLEANAEDLTQTKPLGANQVGYSPTTGVPDESVDLYTVAFGIRNFSNIPAALREAYRVLKPGGVFACLEFSKADKHPLFNTIYKQWSFSAIPLIGQLVAGDRDSYQYLVESIERFPSQEDFRDMIVDAGFVVGGQGYEDLTGGVAAIHKGMKPRRK

SEQ ID NO: 17890 - protein, 396 aa, Pirellula sp.
MLCTLKTSLKRDSKLSVITRSVSKRWSCPELHATALGLSDVPTQPFYRQSTGNPMQSAAVVNYAPEPGSVEIREIDRPEIGSQDVLLEVSHVGVCGSDLHQWTAHHSWPVNYPVVLGHEFGGHIVQLGSDVEGWKEGDRVVSETAAIIDSNNPMSRRGLYNLDPTRKGFGYGVNGAMTRYVRVPSRILHEVPHSLAFEHACLTEPCCVAYNAVVRNARIEPGDRVIVMGPGTIGILCAAMARLCGAEVALVGLESDRHRLNIAEENYGCQGIVGDPTDWANQRDGLGCDGVIDAAGSSVTLEIAMQVVRPAGWISKVGWGPQPLGYNLDPLVQKNVTLQGSFSHNWPIWERVLALLTSGQLNVAPIIGGIWPIDQWQTAFDKMHRGEVVKSVLQPI

SEQ ID NO: 17891 - protein, 450 aa, Acinetobacter sp. M-1
MTKHYDYIAIGGGSGGIASVNRAAMYGKKCALIEKSEIGGTCVNVGCVPKKVMWYAAHVAESIQKYGPDYGFNTKVEVFDWQVLIKNRQAYIDRIHQSYQNSLSKNNVDLIQGAAYFIDQHTIEVNGERFTADHILIATGTQPSLPKIDGVEYGIDSNGFFELSALPKTTAVIGSGYIAVELAGVLNALGSQVGLFIRKDLPVRRFDSFLSETLVEVMQTDGITVHTQAVPLKVTKNADGSVVLHLENGERHTVDCLIWATGREPNTASLNLEKTNVQLDERGYIQVDKFQNTSQQGIYAVGDIIGKMELTPVAVAAGRRLSERLFNHKSDEHLDYDNIPTVVFSHPPIGTVGITEQEAIEKYGQKEVKVYNSSFTAMYSAITQHRQPTKMKLVCVGENEKIVGIHGIGFGMDEILQGFAVALKMGATKKDFDNTVAIHPTSAEEFVTMR

SEQ ID NO: 17892 - protein, 426 aa, Thermus aquaticus
MAYQRIQIPQEGEKITIQEGVLKVPDQPIIGFIEGDGTGPDIWRAAQPVLDAAVAKAYGGQRRIVWVELYAGEKANQVYGEPIWLPEETLEFIREYLVAIKGPLTTPVGGGIRSINVALRQELDLYACVRPVRWFQGVPSPVKHPELVNMVIFRENTEDIYAGIEWPAGSEEVKKVLDFLKREFPKAYAKIRFPETSGLGLKPISKEGTERLVEAAIEYAIKEDLPSVTLVHKGNIMKFTEGAFREWGYALAREKYGATPLDGGPWHVLKNPRTGREIVIKDMIADNFLQQILLRPDEYSVIATMNLNGDYISDALAAQVGGIGIAPGANINYKTGHAVFEATHGTAPKYAGQDKVNPSSVILSGEMMLRYLGWNEAADLIIRAMERTISKGLVTYDFHRLLVAEGKPATLLKTSEFGQALIQHMD

SEQ ID NO: 17893 - protein, 332 aa, Gonyaulax polyedra
MAGPQLDDFTLVKVLGKGSYGKVMLVRGAQDNRLYAMKMLRKENVIKRNQVEHTKTERSVLETVSHPFIVTLHYAFQTPKKLYMVMEYCPGGELFFHLSRAGRFSEGRTRFYVAETSSAVAYLHQLNVIYRDLKPENLLIDGEGHAKITDFGLRKEGIQDNHSAMTMCGTPEYLAPEILDKKGHGKAVDWYSVGALTYEMLTGLPPFYTKDLQKLFDRIRRGELTYPDYVSVLAKEFLRALLQRNPDARLAGGVPGGDEVKGHEFFGGLDWVALEKRAIPPPFKPTFGGQKEDDVVKYFEKDFVGQPVVNSEVGEGGRDLGHLEASTLTGKR

SEQ ID NO: 17894 - protein, 455 aa, Streptomyces avermitilis MA-4680
MAQVLEFKLPDLGEGLTEAEIVRWLVQVGDVVAIDQPVVEVETAKAMVEVPCPYGGVVTARFGEEGTELPVGSPLLTVAVGAPSSVPAASSLSGATSASSASSVSSDDGESSGNVLVGYGTSAAPARRRRVRPGQAAPVVTATAAAAATRVAAPERSDGPVPVISPLVRRLARENGLDLRALAGSGPDGLILRSDVEQALRAAPTPAPTPTMPPAPTPAPTPAAAPRGTRIPLRGVRGAVADKLSRSRREIPDATCWVDADATALMHARVAMNATGGPKISLIALLARICTAALARFPELNSTVDMDAREVVRLDQVHLGFAAQTERGLVVPVVRDAHARDAESLSAEFARLTEAARTGTLTPGELTGGTFTLNNYGVFGVDGSTPIINHPEAAMLGVGRIIPKPWVHEGELAVRQVVQLSLTFDHRVCDGGTAGGFLRYVADCVEQPAVLLRTL

SEQ ID NO: 17895 - protein, 459 aa, Rickettsia rickettsii
MQEFDLVVIGSGPAGYTGSIRAAQLGMKVACIEKSDTLGGTCLNIGCIPSKALLNSSEKYEAALKHFENIGITADVKLDLQKMLANKDKVVLDLTKGIESLFAKNKVTRIKGEAKISSSNIVEVNKEQIKAKNILITTGSSVIEIPNIKIDEEFIVSSTGALKLSKVPENLIVVGGGYIGLELGSVWRRLGAKVTVIEYAPSIVPMLDKEIATQFMKLQQKQGIEFKLNTKVLSAEVKSGKVNLTIEEDDKSSVVTSDVVLMAVGRKAYTQNLGLESVGIITDKQGSIEINDQFQTAVSNIYAVGDVVKGAMLAHKAEEEAVAAVEIMAGQAGHVNYNLIPSVIYTYPEVASVGETEEQLKEKGINYKVGKFPFLANSRARAIGSTEGMVKILADSKTDRVLGAHIIGADAGTLIAALTAYMEFGAASEDIARTCHAHPTLSEAIKEAALSVDKRTINI

SEQ ID NO: 17896 - protein, 254 aa, Fusobacterium nucleatum subsp. nucleatum ATCC 25586
MIYFLYKRRFYMSNMSLYIGEFVGTTLLLLLGNGVNMTCSLKHSYGKGGGWIVTTFGWGFAVMIPAYVTGWVSGAHMNPALTIALAVTGKFSWDLVFGYIIAQMLGGIFGATLAYLTYKAQMDAEPEPAVKLGVFSTGPSIDAPIWNIVTEIIGTALLLIGVLAIGYGEVGIQPGNGAFFVGLLIVIIGMATGGATGYAINPARDLGPRIAHAILPIKGKGDSNWKYSWIPVVGPIIGGILGAVIFDAFLSAVL

SEQ ID NO: 17897 - protein, 627 aa, Oryza sativa (japonica cultivar-group)
MASSASLQRFLPPYPHAAASRCRPPGVRARPVQSSTVSAPSSSTPAADEAVSAERLEPRVEQREGRYWVLKEKYRTGLNPQEKVKLGKEPMSLFMEGGIKELAKMPMEEIEADKLSKEDIDVRLKWLGLFHRRKHQYGRFMMRLKLPNGVTTSEQTRYLASVIEAYGKEGCADVTTRQNWQIRGVTLPDVPAILDGLNAVGLTSLQSGMDNVRNPVGNPLAGIDPDEIVDTRSYTNLLSSYITSNFQGNPTITNLPRKWNVCVIGSHDLYEHPHINDLAYMPAVKGGKFGFNLLVGGFISPKRWEEALPLDAWVPGDDIIPVCKAVLEAYRDLGTRGNRQKTRMMWLIDELVNHFFLHSSTPLTELRMSQCSYQLIAVLALQGMEAFRSEVEKRMPNGVLERAAPEDLIDKKWQRRDYLGVHPQKQEGMSYVGLHVPVGRVQAADMFELARLADEYGSGELRLTVEQNIVIPNVKNEKVEALLSEPLLQKFSPQPSLLLKGLVACTGNQFCGQAIIETKQRALLVTSQVEKLVSVPRAVRMHWTGCPNSCGQVQVADIGFMGCLTKDSAGKIVEAADIFVGGRVGSDSHLAGAYKKSVPCDELAPIVADILVERFGAVRREREEDEE

SEQ ID NO: 17898 - protein, 317 aa, Bacillus subtilis subsp. subtilis str. 168
MSKIAFLFPGQGSQFIGMGKELYEQVPAAKRLFDEADETLETKLSSLIFEGDAEELTLTYNAQPALLTTSIAVLEKFKESGITPDFTAGHSLGEYSALVAAGALSFKDAVYTVRKRGEFMNEAVPAGEGAMAAILGMDAEALKQVTDKVTEEGNLVQLANLNCPGQIVISGTAKGVELASELAKENGAKRAIPLEVSGPFHSELMKPAAEKLKEVLDACDIKDADVPVISNVSADVMTEKADIKEKLIEQLYSPVRFEESINKLIAEGVTTFIEIGPGKVLSGLVKKVNRRLKTIAVSDPETIELAIQTLKEENDNA

SEQ ID NO: 17899 - protein, 545 aa, Pseudomonas putida KT2440
MTLSPLAGKPAPASVLVDIPRLLTAYYTGRPDATVAAQRVAFGTSGHRGSSLELSFNEYHVLAISQAICLYRQEKGIDGPLFIGADTHALSAPATASALEVLAANGVQVMLSKDDEYTPTPAVSHAILCHNRGRTQGLADGIVITPSHNPPQSGGFKYNPPNGGPADSDVTKWIEGKANELLAANLAGVKRMDHAQALQAPTTHRHDYVSNYVADLENVIDFDVIRGAGLRLGVDPLGGAGVRYWSAIAKHYQLDLEVVNTEVDPTFRFMTVDWDGQIRMDPSSPYAMQGLIGLRERFDVAFACDPDHDRHGIVTPDGLLQPNNYLAVAIDYLFRHRPQWRSDAAVGKTVVSSGLIDRVTQRLGRDLYEVPVGFKFFAQGLFDGSLGFGGEESAGASFLRRDGSVWATDKDGLIPALLAAEMTARTGRNPSQAYADLTEALGKPFATRVEAKADARQKALLSKLAPEQVKSTELAGEPIVQILSHAPGNGQAIGGLKVMTANGWFAARPSGTEDIYKIYAESFIDEAHLQRLVEEAQVLVDEAIA

SEQ ID NO: 17900 - protein, 391 aa, Streptococcus salivarius
MAEKIVMKNGQLQVSDRPIIPFIEGDGVGHDIWKNAQAIFDKAVEVAYEGKRHIEWQELLAGKKAYDKTGEWLPKETLEAIRESLVAIKGPLETPVGGGIRSLNVALRQELDLYACVRPVRYFDGVASPLKEPEKTNITIFRENTEDIYAGIEWEAGTADVKRVIEFLQTEMNVNKIRFPESSSIGIKPISIEGSKRLIRSAIDYALKNNLKKVTLVHKGNIQKFTEGGFRKWGYEVAQEDYKEELLAGRLEINDIIADNFLQQILLNPEKFDVVALTNLNGDYASDALAAQVGGIGISPGANINYQTGHAIFEATHGTAPDIADQDKANPCSVLLSGCMLLDYIGWTEAAQLITSAIEKTFKADIFTADLAFGKQAYSTSAFSNQILSIM

SEQ ID NO: 17901 - protein, 181 aa, Glycine max
MAYSMLSSAAVVTSPAQATMVAPFTGLKSSSAFPVTRKANNDITSIVSNGGRVSCMKVWPPVGKKKFETLSYLPDLTEVELGKEVDYLLRNKWIPCVEFELEHGFVYREHGSTPGYYDGRYWTMWKLPLFGCTDSAQVLKEVQECKTEYPNAFIRIIGFDNNRQVQCISFIAYKPPSFTGA

SEQ ID NO: 17902 - protein, 631 aa, Bacillus megaterium
MKKYRVNVQGMTCSGCEQHVAVALENMGAKEIEVDFRRGEAVFELPDDVEVEVAKNAIADANYHPGEAEEFQSEQKTNLLKKYRLNVEGMTCTGCEEHVAVALENAGAKGIEVNFRRGEAVFELPDDVDIDIAKIAITDAKYQPGEAEEIEVQSDKRTDVSLNDEGNYDYDYIIIGSGGAAFSSAIEAVALNAKVAMIERGTVGGTCVNVGCVPSKTLLRAGEINHLAKNNPFVGLHTSASNVDLAPLIKQKNDLVTEMRNEKYVNLIDDYGFELIKGEAKFVNENTVEVNGNQITAKRFLIATGASSTAPNIPGLDEVDYLTSTSLLELKKVPNRLTVIGSGYIGMELGQLFHNLGSEVTLIQRSERLLKEYDPEISEAITKALTEQGINLVTGATYERVEQDGDIKKVHIEINGKKRIIEAEQLLIATGRKPNTESLNLHAADVEVGSRGEIIIDDYLKTTNSRIYAAGDVTLGPQFVYVAAYEGRLVARNAIGGLNQKVNLEVVPGVTFTSPSIATVGLTEQQAKEKGYEVKTSVLPLDAVPRALVNRETTGVFKLVADAKTLKVLGAHIVTENAGDVIYAATLAVKFGLTVEDLRGTMAPYLTMAEGLKLAALTFDKDVSKLSCCAG

SEQ ID NO: 17903 - protein, 514 aa, Salmonella typhimurium LT2
MSVSKKPMVLVILDGYGYREEQQDNAILNAKTPVMDALWAKRPHTLIDASGLEVGLPDRQMGNSEVGHVNLGAGRIVYQDLTRLDVEIKERTFFANPVLTNAVDQAKNAGKAVHIMGLLSAGGVHSHEDHIMAMVELAAERGAEKIYLHAFLDGRDTPPRSAEASLKKFEDKFAALGKGRVASIVGRYYAMDRDNRWDRVEKAYDLMTLAQGEFQADTAVAGLQAAYARDENDEFVKATVIRAEGQADAAMEDGDTLIFMNFRADRAREITRAFVNADFDGFARKKVVNLNFVMLTEYAADIKTAVAYPPASLANTFGEWMAKNDKTQLRISETEKYAHVTFFFNGGVEEPFAGEERILINSPKVATYDLQPEMSSAELTEKLVAAIESGKYDTIICNYPNGDMVGHTGVMEAAIKAVEALDNCIEQVTKAVESVGGQLLITADHGNAEQMRDPATGQAHTAHTNLPVPLIYVGEKNVKAVEGGKLSDIAPTMLSLMGMEIPQEMTGKPLFIVE

SEQ ID NO: 17904 - protein, 319 aa, Geobacter sulfurreducens PCA
MKKIGILTSGGDCSGMNAAIRAAVRTAIRMNIEVVGFRKGYLGLMKGDAIPLDTKAVSGILHRGGTFLQSARSPEFKTPEGQRTALNNLKALGVEGMVVMGGDGSLTGALALNRLGLPVVGIPASIDNDIPFTDMALGVDTALNNIIYAVDCIKDTASSHARAFVIEVMGRHSGYLASISAIATGAEYALVPEREYDLAEICQQLRARYEEGRDNAIIILAEGAGHGHEIANSIKDAIGFETRVTVLGHYQRGGAPTVFDRLLASRLGKKSVELLVTGTWGVMVGLSCNAILATPLEDVIKGEKRPQDEVLRLAEVLGV

SEQ ID NO: 17905 - protein, 382 aa, Vibrio parahaemolyticus RIMD 2210633
MTLEIKPGQTHIKSKAMVAWAAGEPLKMEEVDVQLPKAGEVLVRIVATGVCHTDAFTLSGDDPEGIFPSILGHEGGGIVEMVGEGVTSVEVGDHVIPLYTAECGECKFCKSGKTNLCQAVRETQGKGLMPDGTSRFSINGETIFHYMGCSTFSEYTVLPEISLAKVNKQAPLEEVCLLGCGVTTGMGAVLNTAKVEKGDTVAIFGLGGIGLSAIIGARMAGASRIIGIDINESKFDLAKQLGATDVINPQKFDKPIQEVIVEMTDGGVDYSFECIGNVNVMRQALECCHKGWGESVIIGVAGAGQEISTRPFQLVTGRVWRGSAFGGVKGRSELPEIVNRYMAGEFGLQEFITHTMGLEDVNKAFDLMHEGKSIRTVIHMDK

SEQ ID NO: 17906 - protein, 317 aa, Candida albicans SC5314
MVELSDYQRQEKVGEGTYGVVYKALDTKHNNRVVALKKIRLESEDEGVPSTAIREISLLKEMKDDNIVRLYDIIHSDSHKLYLVFEFLDLDLKKYMESIPQGVGLGANMIKRFMNQLIRGIKHCHSHRVLHRDLKPQNLLIDKEGNLKLADFGLARAFGVPLRAYTHEVVTLWYRAPEILLGGKQYSTGVDMWSVGCIFAEMCNRKPLFPGDSEIDEIFRIFRILGTPNEEIWPDVNYLPDFKSSFPQWKKKPLSEAVPSLDANGIDLLDQMLVYDPSRRISAKRALIHPYFNDNDDRDHNNYNEDNIGIDKHQNMQ

SEQ ID NO: 17907 - protein, 385 aa, Methanococcoides burtonii DSM 6242
MYADRINSLPPYLFATIDEAKAVVKAKGVDVIDLGVGDPDMPTPEHIVESMCEAVRDPATHRYPSYTGMIEFREAVANWCKDTRGLELDAATETLTLIGSKEGVAHIPLAFVNPGDVALIPDPGYPVYKIGTQFAGGEPHVMPLLEENGFLPDFDAIPADKLAKAKLMFLNYPNNPTSATADVKFFKEVVEFAKNNDITVVHDNAYSEMVYDDYTAPSFLSVDGAMDVGMELYSMSKTYNMTGWRLAFAVGNKDLIAGFGKVKSNIDSGAFDAVQRAGITAVSSSQQCVTDMNSIYQKRRDALLKGLRGIGLDAKAPKATFYMWVPTPDGYDSMGFSKLLLEESGIVATPGVGFGEYGEGYIRFALTQSVERIEEAVARMDKLTI

SEQ ID NO: 17908 - protein, 384 aa, Nicotiana tabacum
MCVQESEEVSEEMENLDISKSDENIKIGSLQVEDELGNTQKENCEKNTSSSFSVIRNSFPMESISEDTTIADRKQILSNKFLPTLRSGEWSDIGGRLDMEDTHICIADLAKNFGQSILGEEEAVSFYGVFDGHGGKGAALFVRDFLPRIIVEDADFPLKLEKVVSKSFLETDAAFAKSCSADSDLSSGTTALTAMIFGRSLLVANAGDCRAVLSRGGLAIEMSKDHRPCCVSERTRVESLGGFVDDGYLNGQLGVTRALGDWHIKGLKEVEKGGPLSAEPELKLLTLTKEDEFLIIGSDGIWDVFRSQNAVDFARRRLQEHNNAKLCCKEVVDEAKKRGAIDNLTVVMVCFHSEPPPTIVFQRSRIRKCISAEGLQNLRSLLDG

SEQ ID NO: 17909 - protein, 189 aa, Legionella pneumophila
MTIPDKIKAVYEKSTCLYTSNEVEAALDRMAIKIHETLQDKNPVIICVMVGGLVPLGNLLHRLDFPLEVDYVHATRYRGDLTGGDILWKVRPSSNLAGRTVLVVDDILDGGITLAAIINEIKAMGAAEVYSAVLVDKYRKRVPNGLQKADFVGLQVEDHYIFGYGMDYHKYLRNAPGIFIVHPDHEANK

SEQ ID NO: 17910 - protein, 520 aa, Arabidopsis thaliana
MASVSAIGVLKVPPASTSNSTGKATEAVPTRTLSFSSSVTSSDDKISLKSTVSRLCKSVVRRNPIIVSPKAVSDSQNSQTCLDPDASSSVLGIILGGGAGTRLYPLTKKRAKPAVPLGANYRLIDIPVSNCLNSNISKIYVLTQFNSASLNRHLSRAYASNMGGYKNEGFVEVLAAQQSPENPNWFQGTADAVRQYLWLFEEHNVLEYLILAGDHLYRMDYEKFIQAHRETDADITVAALPMDEQRATAFGLMKIDEEGRIIEFAEKPKGEHLKAMKVDTTILGLDDQRAKEMPFIASMGIYVVSRDVMLDLLRNQFPGANDFGSEVIPGATSLGLRVQAYLYDGYWEDIGTIEAFYNANLGITKKPVPDFSFYDRSAPIYTQPRYLPPSKMLDADVTDSVIGEGCVIKNCKIHHSVVGLRSCISEGAIIEDSLLMGADYYETATEKSLLSAKGSVPIGIGKNSHIKRAIIDKNARIGDNVKIINSDNVQEAARETDGYFIKSGIVTVIKDALIPTGTVI

SEQ ID NO: 17911 - protein, 125 aa, Pseudomonas syringae pv. tomato str. DC3000
MNSNADNQRPAQRVLLVEDETMLAMLMEMMLEDLGFATAYHASTLDDGIEYARHGDYDLAILDVNIIGGNSFPIAAAIAHRGIPFMFCSGYGRLGIPDVWIDQRCVAKPFSAEQLDKALSELLNV

SEQ ID NO: 17912 - protein, 993 aa, Pseudomonas syringae pv. tomato str. DC3000
MIEHTLDANPDAALEAALAECAREPIRIPGAIQPHGVLLSVAGDPLCIEQVSANCAKSLGLESAELLGQPLSILLSAAHSMLINQAYSQPAMPNSDPIRLTVRAVDYNASLSRAGDVLIIELEPFVEAAHEQSRIITRVLRNLQAATTLETLFDIGVHEIQALTGYDRVMIYRFEPEGHGKVVAQALTGPLPSYSGLNFPGSDIPAQARELYRLNWIRLIPDATYVPVALIPTLRPATGQPLDLSLSTLRSVSPVHCEYLKNMGVRSSMSISLLDGGELWGLITCSHPEPLLVSRELRDACAMIGQLLSVKISAIVATHIQREREEKVVLLGQLADAMNRADHEILHGLVSRPQLLQALTQADGAAVLIDDQVHLFGQCPTSEEVRALYQWIRDTGLTRQRSKERATGLQGLGVFHTDSMQRERPESAAYRETASGVIAFTLPKPVDNAVMWFRSQLASTMNWSGNPAHHVSTRAAGSASHGLRPRQSFDVWKQEVTGIARPWSRADLYGAEDIRRSALESDLERQVQREQEAVRLRDELVAVVSHDLRNPMSIIIMQCGMMQRWAVDDTNFENRNIRRALGTIEKATTRMNSLLEDLLDTAQIEAGRYQLSRLALSVTSLLEEACSLLVMLTTEKNIELNCTSAQGLVIDADPERIFQVLSNLVGNAIKFTPKGGRINIDAVADGDDVLFRVSDDGIGIPAQHLPYIFQRYWSVKEGNPRGNGLGLYICQGIITAHGGRLWADSSLDSGSVFSFTLPMHQGQDTIGESTFLKQSGTTHRLAQSISSKLERQQLEDRLTRAGLLNELNHRVKNTLATVQAIASLTVNSSTSLDSFRKSFDARLFALSQARAEWMSTELADLLAQLQDVNGGQHRITFTGDPVRLEPRISLTLSMVLHKLMANALQHGALSSPAGQVTVASTLNSHHNPPTLSIDWLETEGPPVVASNVKGFGLRLIRRSIERELKGKVDIKFASTGVSWSMLIPWPEKPESSL

SEQ ID NO: 17913 - protein, 228 aa, Oryza sativa (japonica cultivar-group)
MPFVRTLAFPTLANQIEGEIKSRTERDHGEVDLSSPEEAMSRAECGGGEEEERCRYRGVRRRRWGKWVSEIRVPGTRERLWLGSYATPEAAAVAHDTAVYFLRGGAGDGGGGGATLNFPERAAATYGGGAAVARLSPRSVQRVASDAGMAADAQLVAARDAAPAPAPATAYARPDHCAGATTARHDELARRGMYGAHAHAAGANARTSGERQLVCAEEISVDDMEILM

SEQ ID NO: 17914 - protein, 503 aa, Micrococcus luteus
MEHQKTTPHATGSTRQNGAPAVSDRQSLTVGSEGPIVLHDTHLLETHQHFNRMNIPERRPHAKGSGAFGEFEVTEDVSKYTKALVFQPGTKTETLLRFSTVAGELGSPDTWRDVRGFALRFYTEEGNYDLVGNNTPIFFLRDPMKFTHFIRSQKRLPDSGLRDATMQWDFWTNNPESAHQVTYLMGPRGLPRTWREMNGYGSHTYLWVNAQGEKHWVKYHFISQQGVHNLSNDEATKIAGENADFHRQDLFESIAKGDHPKWDLYIQAIPYEEGKTYRFNPFDLTKTISQKDYPRIKVGTLTLNRNPENHFAQIESAAFSPSNTVPGIGLSPDRMLLGRAFAYHDAQLYRVGAHVNQLPVNRPKNAVHNYAFEGQMWYDHTGDRSTYVPNSNGDSWSDETGPVDDGWEADGTLTREAQALRADDDDFGQAGTLVREVFSDQERDDFVETVAGALKGVRQDVQARAFEYWKNVDATIGQRIEDEVKRHEGDGIPGVEAGGEARI

SEQ ID NO: 17915 - protein, 291 aa, Gloeobacter violaceus PCC 7421
MKGIILAGGKGTRLYPLTLGVSKQLLPVYDKPMIYYPLATLMLAGIREVLLISTPRDLPAYQELLGDGSRYGIEIRYCVQPSPDGLAQAFVLGREFLEGGPACLILGDNIFYGYGLGEMLQKAATRTFGSTIFAYRVSDPERYGVVEYDEQGRVLSIDEKPKAPKSNYAVVGLYFYDAQISEIAAGVKPSARGELEITDVNNAYLERGLLRVERLGRGMAWLDTGTHESLLQASNFIETIEKRQGLKVACLEEIAYQMGHIGVEAVLEQAGRLGKTEYGQYLRNLVERGNR

SEQ ID NO: 17916 - protein, 396 aa, Haemophilus somnus 2336
MFENINAAPADPILGLGEAFKSEMRANKINLGIGVYKDANGNTPIMKAVKEAENRLFELETTKNYLTIDGIAEFNSYTKELLFGTNSKIIKQGRAKTVQSLGGTGALRIAAEFIKRQTTSQNVWISSPTWPNHNAIFNAVGMTIREYRYYDAEKKALDWDNLIADLSNASEGDVVLLHGCCHNPTGIDPTPEQWKILAEMSEKNGWLPLFDFAYQGLANGLEEDAIGLRTFAENHKELLVASSYSKNFGLYNERVGAFTLVAETEEISAIALTQVKSIIRTLYSNPASHGATAVSIILGDDLLRQQWESELTEMRNRIKRMRYQFVELLKEYGAKQDFSFIIEQNGMFSFSGLNAEQVDRLKEEFAIYAVRSGRINLAGVTEDNIRYLCESIVKVL

SEQ ID NO: 17917 - protein, 187 aa, Oenococcus oeni PSU-1
MNALVSHPAIKGVLATETDISAVVQRIADQLDAKFSQSSQRPLFISVLKGAAIFTTDLLRKMTLDVDLDYIDVKSYNHAQSTGNIRVTHDVDTDLTDRDVVIVDEIVDTGRTMKWLTDYFKLKGARSITTVVLTDKKDARILDVEIDFTGIQVPNEFLVGYGMDYNSYFRNLPVIAVIDTNKLDTIK

SEQ ID NO: 17918 - protein, 162 aa, Solanum commersonii
MAAEVEYSCFVGGLAWATTDRTLSDAFSTYGEVVDSKIINDRETGRSRGFGFVTFKDEKSMKEAISGMNGSELDGRNITVNEAQARGSGGGGGGGGGFGGGRRREGGGGGYGGGGGYRGGGGGGYGGGRREGGGGGGYGGGRREGGGGGGYGGGGYGGGDRY

SEQ ID NO: 17919 - protein, 215 aa, Bacillus cereus ATCC 14579
MKFFIDTANINEIKEANELGVLAGVTTNPSLVAKEGVDFHERIREICNVVEGPVSAEVISLEADKMIEEGKELAKIAPNVVVKVPMTTEGLKAVKAFSDLGIRTNVTLVFSAVQALLAARAGATYVSPFLGRLDDIGHNGMDLIRQIAEIFAIHGIETEIIAASVRHSVHVTDAALNGAHIATIPANVIASLVKHPLTDQGIEKFLADWEKTQEK

SEQ ID NO: 17920 - protein, 422 aa, ASPERGILLUS NIDULANS FGSC A4
MGKKRRSPTLEEVLARPWCYYCERDFDDLKILISHQKAKHFKCERCGRRLNTAGGLSVHMSQVHKEQLTAVDNALSNRSSLDVEIFGMEGVPEDAIQSHNQRVIAQFQQSEAERQAITGNPPSGASSSSGQPAKKPKVENISDLKKRLAEHKAKKAEARAGGSSGEATPVGAGQTPNVPGFAQQPTTVAPTQTFSYPQPYGGAGSPYQATASPVYPNYSPGQPQFPTPTQYSTPAGYSPQPVPVFGNTPPQLQQQPPPAVNSPQTTFAPRSGSLPTAPSLPQRPAVGAPQVNAYQLQQMHMGHPLPGTAVPGPANGEKPEATAISSSIDDLISGAAKQADQAAAATAKPAESAEEKPSKKDKSKQSRLVYSDNETSPEEKMARLPRYAFNPDHRTETTLQELPASVVVGQVPMSEATVMPTP

SEQ ID NO: 17921 - protein, 303 aa, Populus tremula
DVYFWEAKGQTPLFPRIYGHEAGGIVESVGPGVTDLQPGDHVLPVFTGECGDCRHCKSEESNMCDLLRINTDRGVMLTDGKSRFSINGKPIYHFLGGSTFSEYTVCHIGTVAKINPAAPLDKVCILSCGISTGLGAALNVAKPQKGHTVAVFGLGAVGLAAAEGARLSGASRIIGVDLNPSRFKEAKKFGVAELINPKDHDKPVQQVIIEMTDGGVDRSIECTGNVQAMISAFECVHDGWDVAVLVGVPSKDDEFKTHPMNLLNERTLKGTFFGNYKPRTDLPGVVEKYMNKDLEVEKFITHS

SEQ ID NO: 17922 - protein, 546 aa, Bacillus cereus
MKKYRVDVQGMTCTGCEEHVAVALENMGATGIEVDFRRGEAVFELPNALGVETAKKAISDAKYQPGKAEEVQSQEMVQLGNEGDYDYIIIGSGGAAFSSAIEAVKYGAKVAMIERGTIGGTCVNIGCVPSKTLLRAGEINHLAKNNPFVGLHTSAGEVDLAPLIKQKNELVTELRNSKYVDLIDDYGFELIEGEAKFVDEKTVEVNGAPISAKRFLIATGASPAKPNIPGLNEVDYLTSTSLLELKKVPKRLVVIGSGYIGMELGQLFHNLGSEVTLIQRSERLLKEYDPEISESVEKSLVEQGINLVKGATYERIEQNGDIKKVHVEVNGKKRIIEADQLLVATGRTPNTATLNLRAAGVEIGSRGEIIIDDYSRTTNTRIYAAGDVTLGPQFVYVAAYQGGVAAPNAIGGLNKKLNLEVVPGVTFTAPAIATVGLTEQQAKENGYEVKTSVLPLDAVPRALVNRETTGVFKLVADSKTMKVLGAHVVAENAGDVIYAATLAVKFGLTVDDIRETLAPYLTMAEGLKLAALTFDKDISKLSCCAG

SEQ ID NO: 17923 - protein, 182 aa, Cichorium intybus
  unsure (1)..(182): unsure at all Xaa locations
MDPYKQRPSSAYNSPFWTTNAGLPVYNNTASLTVGNRGPILLEDYHLIEKLANFTRERIPERIVHARGASAKGFFEVTHDITHLTCADFLRAPGVQTPTIVRFSTVIHERGSPETIRDPRGFATKFYTREGNFDIVGNNFPVFFTRDAMAFPDVIHAFKPNPKSHIQEXWRILDFLSHHPES

SEQ ID NO: 17924 - protein, 473 aa, Cunninghamella elegans
MNNFIFKRLNVKEFYEAETKKLVENGHEFHLRLERTGYVIHTCNPQAIKEILLKGDKFPKYDYNTSNNEDGSFFHEFVGFENVLMTNGSTWKKHRMIVNPAFKTALPSRLFGDCTRDLFKLWDNEYANEPFDSDIHNITERLTLQIIGKAAFDFDFNAILDEKSIWKQTYDGINKAASDPLFILFPILEEKFLWLFPKRQQSFKLLNEWKKMLLSIIEKKREAIQNNVDHGVEEAEKDLLTLMIESEHRGEGALSNEELLSDLIIFFIAGHDTTAFALSAAIYYLAKHPDIQEKARQEAISVLCPNGEVDEDIFPTTEDTKHFVYINQIMKETLRINGSVLFLLSPRLVTQDVNLSGVFIPKGSQINVNIHEVHHNPNVWHDPETFDPDRWASNGEAEQLAGKGMAWVPFSNGNRQCIGMNFSLLEQRVILGSLLRKYEWTLPEDSIHQDYMVNKFNLIPKPIDLKIRFKRRY

SEQ ID NO: 17925 - protein, 303 aa, Populus tremula
DVYFWEAKGQTPLFPRIYGHEAGGIVESVGPGVTDLQPGDHVLPVFTGECGDCRHCKSEESNMCDLLRINTDRGVMLTDGKSRFSINGKPIYHFLGGSTFSEYTVCHIGTVAKINPAAPLDKVCILSCGISTGLGAALNVAKPQKGHTVAVFGLGAVGLAAAEGARLSGASRIIGVDLNPSRFKEAKKFGVTELINPKDHDKPVQQVIIEMTDGGVDRSIECTGNVQAMISAFECVHDGWGVAVLVGVPSKDDEFKTHPMNLLNEGTLKGTFFGNYKPRTDLPGVVEKYMNKELEVEKFITHS

SEQ ID NO: 17926 - protein, 526 aa, Candida albicans SC5314
MSANIQALMKSYVNFDEHTSGSAARGILIGMFAAFGGFLFGYDTGTISGVLSMDYVKARFPNNKTDFTSGESSLIVSILSVGTFVGSLIAPLFSDRIGRRWTLILSTLIVFNLGVLLQTVATEKKLLIAGRAIAGTGVGLISSVIPNYISETTPKWARGAVTASYQWMITWGLLIAACANKGSQGRKDSGSYRIPIGIQFLWALILGIGFLFLPETPRYWVSKSEETKAKDSLRRIRNLPVDHPDLVSEYDDIKANFDFESKYATSSWTQVFKNVNKQHHRLFTGVAIQALQQLTGINFIFYYGTQFFKRSGIEDPFLIQLATNIVNVGMTVPGIILVETWGRRPLLMAGSVVMAVSQLIVAIVGVAASSHAANQCLVAFSCIFIAGFAATWGPLCWAICGESFALNVRSKSISLCTASNWLWNFGIGYATPYMVDSGKGNADLGSKVFFIWGGCNVIGGLFAYFMVYETKSLTLEQVDELYLKVDHAWQSKGFVPSVHAFRDDGDIEHISSDGKAEMVEVDENSV

SEQ ID NO: 17927 - protein, 88 aa, Vibrio harveyi
EFNAPQLPVINNVDVAAETDPAKIKDALVRQLHSPVRWTESVQLMNEQGVENLLELGPGKVLTGLTKRIVKTLSTAAVNDVASLEAAK

SEQ ID NO: 17928 - protein, 462 aa, Streptomyces avermitilis MA-4680
MTEASVREFKMPDVGEGLTEAEILKWYVQPGDTVTDGQVVCEVETAKAAVELPIPYDGVVRELRFPEGTTVDVGQVIIAVDVAGDAPVAEIPVPAQEAPVQEEPKPEGRKPVLVGYGVAESSTKRRPRKSAPASEPAAEGTYFAATVLQGIQGELNGHGAVKQRPLAKPPVRKLAKDLGVDLATITPSGPDGVITREDVHAAVAPPPPAPQPVQTPAAPAPAPVAAYDTARETRVPVKGVRKATAAAMVGSAFTAPHVTEFVTVDVTRTMKLVEELKQDKEFTGLRVNPLLLIAKALLVAIKRNPDINASWDEANQEIVLKHYVNLGIAAATPRGLIVPNIKDAHAKTLPQLAESLGELVSTAREGKTSPTAMQGGTVTITNVGVFGVDTGTPILNPGESAILAVGAIKLQPWVHKGKVKPRQVTTLALSFDHRLVDGELGSKVLADVAAILEQPKRLITWA

SEQ ID NO: 17929 - protein, 364 aa, Arabidopsis thaliana
MGKGGMSQGEGSKVEEENMAAWLVGINTLKIQPFLLPSVGPHDVRVRMKAVGICGSDVHYLKTMRCADFVVKEPMVIGHECAGIIEEVGEEVKHLVVGDRVALEPGISCWRCNLCREGRYNLCPEMKFFATPPVHGSLANQVVHPADLCFKLPENVSLEEGAMCEPLSVGVHACRRAEVGPETNVLVMGAGPIGLVTMLAAQAFSVPRIVIVDVDENRLAVAKQLGADEIVQVTTNLEDVGSEVEQIQKAMGSNIDVTFDCAGFNKTMSTALAATRCGGKVCLVGMGHGIMTVPLTPAAAREVDVVGVFRYKNTWPLCLEFLTSGKIDVKPLITHRFGFSQKEVEDAFETSARGSNAIKVMFNL

SEQ ID NO: 17930 - protein, 303 aa, Populus tremula
DVYFWEAKGQTPLFPRIYGHEAGGIVESVGPGVTDLQPGDHVLPVFTGECGDCRHCKSEESNMCDLLRINTDRGVMLTDGKSRFSINGKPIYHFLGGSTFSEYTVCHIGTVAKINPAAPLDKVCILSCGISTGLGAALNVAKPQKGHTVAVFGLGAVGLAAAEGARLSGASRIIGVDLNPSRFKEAKKFGVTELINPKDHGKPVQQVIIEMTDGGVDRSIECTGNVQAMISAFECVHDGWGVAVLVGVPSKDDEFKTHPMNLLNERTLKGTFFGNYKPRTDLPGVVEKYMNKELEVEKFITHS

SEQ ID NO: 17931 - protein, 418 aa, Oryza sativa
MAATIQSVKARQIFDSRGNPTVEVDICCSDGTFARAAVPSGASTGVYEALELRDGGSDYLGKGVLKAVDNVNSIIGPALIGKDPTEQTVIDNFMVQQLDGTKNEWGWCKQKLGANAILAVSLALCKAGAIIKKIPLYQHIANLAGNKQLVLPVPAFNEFMILPTGASSFKEAMKMGVESVIKKKYGQDATNVGDEGGFAPNIQENKEGLELLKTAIEKAGYTGKVVIGMDVAASEFYTEDQTYDLNFKEENNDGSQKISGDSLKNVYKSFVSEYPIVSIEDPFDQDDWVHYAKMTEEIGDQVQIVGDDLLVTNPTRVAKAIKDKACNALLLKVNQIGSVTESIEAVKMSKRAGWGVMTSHRSGETEDTFIADLAVGLSTGQIKTGAPCRSERLAKIEEELGAAAVYAGAKFRAPVEPY

SEQ ID NO: 17932 - protein, 112 aa, Zea mays
  unsure (1)..(112): unsure at all Xaa locations
VAWDDLLMSDPERIKRAVSEYTCNALVLKANQVGTVTEAIEVVKQANDAHWGVMVSHRSGDTEDSFIADLAVGAAAGQIKASVPCRGEXTKYNQLLRIEEELGSEGVYAGEN

SEQ ID NO: 17933 - protein, 226 aa, Triticum aestivum
RLACPTWTYIFGARRATPACTPSFRACRASSVLGPAFPTYPAWSLPGPAAAPGPAPGPALAAPISRLLDGAAPTGPLYPVRGLAGAADILHAFGGPRKFKYIYLVATLYVFTLTLPSASTMYWAFGDALLTHSNAFSLLPKSGWRDAAVILMLIHQFITFGFACTPLYFVWEKAIGMHHTGRVLRRALARLPLVLPIWFLAIIFPFFGPINSAVGALLVSFTVYVI

SEQ ID NO: 17934 - protein, 295 aa, Methylococcus capsulatus str. Bath
MRGIRGIILAGGSGTRLYPLTHVVSKQLLPVYDKPMIYYPLSVLMLAGIRDILVITTPHDAALFQALLGDGGQWGISISYAAQPKPEGLAQAFVIGRHFVEGRRSCLILGDNIFYGHDFQAFLAGATARENGATVFGYWVRDPERYGVAEFDEAGRVIGVEEKPVRPRSNYAITGLYFYDEQVVDMAVTLKPSARGELEITDINRLYLDQGQLHIQKMGRGVAWLDTGTHDSLLQASNFIQTIEERQGLKICCPEEIALNKGWIDAEEVARLADGLGKSGYGAYLRRLIEGGMPV

SEQ ID NO: 17935 - protein, 398 aa, Pisum sativum
MATAASAATFSIGTAQTGRSLSPSNPFGFKSNSQVNFSGLKAMSSFSGNETCAALRATFAPKAVKENQNRNHILQPQASYKVALLGAAGGIGQPLALLIKMSPLVSDLHLYDIANVKGVAADISHCNTPSKVADFTGAAELANCLKGVDVVVIPAGVPRKPGMTRDDLFNINAGIVRDLVSAVADNCPGAFIHIISNPVNSTVPIAAEILKQKGVYDPKKLFGVSTLDVVRANTFVAQRKNLRLIDVDVPVVGGHAGITILPLLSKTKPSASFTDEEIEELTVRIQNAGTEVVEAKAGAGSATLSMAYAAARFVESSLRALDGDADVYECSYVQSDLTDLPFFASRVKIGRKGVEAFIPTDLQGLSEYEQKALEALKPELKASIEKGVAFAQKQTVVA

SEQ ID NO: 17936 - protein, 236 aa, Zea mays
MTVPDAESRFHVLAVDDSLVDRKLIEMLLKTSSYQVTTVDSGSKALELLGLRDASSPSPSSPDHQEIDVNLIITDYCMPGMTGYDLLKRVKGSSSLKDIPVVIMSSENVPARISRCLQDGAEEFFLKPVKLADMKKLKSHLLKRKQPKEAQAQQGQAVELEPEQQLDPRTQPAHDAEETAAEPPPAASNGTADGGNKRKAAAMEEEGMLAVMTVAAPESSTKPRLATTSSSLAVET

SEQ ID NO: 17937 - protein, 350 aa, Bacillus cereus ATCC 14579
MKALLWHNQRDVRVEEVPEPTVKPGTVKIKVKWCGICGTDLHEYLAGPIFIPTEEHPLTHVKAPVILGHEFSGEVIEIGEGVTSHKVGDRVVVEPIYSCGKCEACKHGHYNVCEQLVFHGLGGEGGGFSEYTVVPEDMVHHIPDEMTYEQGALVEPAAVAVHAVRQSKLKEGEAVAVFGCGPIGLLVIQAAKAAGATPVIAVELSKERQELAKLAGADYVLNPATQDVLAEIRNLTNGLGVNVSFEVTGVEVVLRQAIESTSFEGQTVIVSVWEKDATITPNNLVLKEKEVIGILGYRHIFPAVIKLISSGQIQAEKLITKKITVDQVVEEGFEALVKDKTQVKILVSPK

SEQ ID NO: 17938 - protein, 551 aa, Rhodopseudomonas palustris CGA009
MYAYDDIDRAIVHERVEEFRDQVSRRLSGELTEDEFKPLRLMNGVYLQLHAYMFRVAIPYGTLSSAQLRKLAHVARTYDRGYGHFTTRQNIQFNWIALKDLPDALADLAEVGIHAMQTSGNCTRNVTADQWAGVAPGEVEDPRVWAEILRQHTALHPEFSFLPRKFKFAITASDHDRAAIKIHDIGLKLVKNDAGETGFEVLVGGGLGRSPFIGRTIKSFVAGRDILSYIEAVLRVYNQYGRRDNIYKARIKILVHELGIEKFAAEVEQAWAEIADGPLTLDHEMIEDIRSRFIYPAYEKLPAEPDELRAAAGDARFEAWRNNSVAPHRHDGYAIVTLSLKPAGGPPGDATAEQMDAVADLADKYSFGEIRVGHEQNLVLPHVARRDLPALWAALDKLGLATPNVGLVSDIIACPGLDYCSLANARSIPIAQELSRRFASPETAALIGRLHINISGCINACGHHHVGHIGILGVEKNGEEFYQITIGGRADEGAELGELIGPAVPYGEVADVIEDIVEAYLSLRQRPDELFVDAVKRLGVEPFKERVYATR

SEQ ID NO: 17939 - protein, 309 aa, Ralstonia eutropha JMP134
MKFAFVFPGQGSQSVGMLNAFADNAVVRATLEEASTALGQDIGRLIAEGPAEELNLTTNTQPVMLTAAVAVYRAWLDAGGPAPAMVAGHSLGEYSALVAAGVIPFAEAVPLVRFRAQAMQEAVPVGQGGMAAILGLSDDDVRAACAEASAAGVVEAVNFNAPSQVVIAGSKAGVEKACEVAKAKGAKRALPLPVSAPFHSSLLKPASDRLRERMAGLTFSAPTIPLVNNVDVAIVNDPEAIKDALVRQAAAPVRWVECVQKMAAEGVTHVIECGPGKVLAGMTKRIDGSLTGGAVFDPASLQETLALLK

SEQ ID NO: 17940 - protein, 300 aa, Geobacter sulfurreducens PCA
MAISKGIILAGGAGSRLYPLTLVASKQLQPVYDKPMIYYPLATLMMAGIKDILIISTPHDTPRFQALLGDGSRWGITLTYKVQPEPKGIAQAFLVGEEFIAGDPVCLILGDNIFYGKMGLDRLVQDFTTGAWIFGYYVNDPERYGVVQFDGNGKAIGIEEKPAQPKSNYAVPGLYLYDGRVVDVARNLAPSPRGELEITDVNLDYLRRGELMVERLGRGIAWLDTGTHQSLLEASHFIGTLEARQGLKIACLEEIALRMGFIDCRRMAEVIAETPKSSYRDYLARIYNETELCGGVVHER

SEQ ID NO: 17941 - protein, 383 aa, Xanthomonas campestris pv. campestris str. ATCC 33913
MWGMLAVLLVFTQLTIFAVTLYLHRSQAHRGVDFHPVIAHFFRFWTWLTTSMITREWVAIHRKHHAKVETEEDPHSPQTKGIGQVFWRGVELYREARAQRADIEQYGKGAPNDWIERHLYTPHANAGPIALLVVNSVLFGLPGIALWAIQMAWIPFWAAGVVNGLGHWWGYRNFESADTSTNLTPWALWIGGEELHNNHHAFPSSARFSMRRWELDIGWIAIRCLQALGLAKVLRVAPSLDIRPNIAVPDADTLKALLSHRFQAMTDYQRNVLKPALREEAAATGAKLRQLLPRRLRKGLVDDGRWLKPDAREQLQHWVAQRPRMRTLVEYRARLTAVLEARSHDASERLKQLQQWCHEAEASGNAALQAYAARLKGYALSGT

SEQ ID NO: 17942 - protein, 303 aa, Populus tremula
DVYFWEAKGQTPLFPRIYGHEAGGIVESVGPGVTDLQPGDHVLPVFTGECGDCRHCKSEESNMCDLLRINTDRGVMLTDGKSRFSINGKPIYHFLGGSTFSEYTVCHIGTVAKINPAAPLDKVCILSCGISTGLGAALNVAKPQKGHTVAVFGLGAVGLAAAEGARLSGASRIIGVDLNPSRFKEAKKFGVTELINPKDHDKPVQQVIIEMTDGGVDRSIECTGNVQAMISAFECVHDGWGVAVLVGVPSKDDEFKTHPMNLLNERTLKGTFFGNYKPRTDLPGVVEKYMNKDLEVEKFITHS

SEQ ID NO: 17943 - protein, 181 aa, Zea mays
  unsure (1)..(181): unsure at all Xaa locations
MAATNEHTGLQFIAPSSTASTTTQVLTARIHPLVIFNVCDCFVRRPDSAERVIGTLLGSILPDGTVDIRNSYAGPHNESSDQVAGDIDYHHNMGASHLKVNPKEGIVGWYSTGSGGNGGXALIHDFFAREATNPIHLTGDTGFTNGEGTIKAYVSSNLSLGDRHLLLKFKRFPRIPRMVEG

SEQ ID NO: 17944 - protein, 303 aa, Populus tremula
DVYFWEAKGQTPLFPRIYGHEAGGIVESVGPGVTDLQPGDHVLPVFTGECGDYRHCKSEESNMCDLLRINTDRGVMLTDGKSRFSINGKPIYHFLGGSTFSEYTVCHIGTVAKINPAAPLDKVCILSCGISTGLGAALNVAKPQKGHTVAVFGLGAVGLAAAEGARLSGASRIIGVDLNPSRFKEAKKFGVTELINPKDHDKPVQQVLIEMTDGGVDRSIECTGNVQAMISAFECVHDGWGVAVLVGVPSKDDEFKTHPMNLLNERTLKGTFFGNYKPRTDLPGVVEKYMNKELEVEKFITHS

SEQ ID NO: 17945 - protein, 303 aa, Populus tremula
DVYFWEAKGQTPLFPRIYGHEAGGIVESVGPGVTDLQPGDHVLPVFTGECGDCRHCKSEESNMCDLLRINTDRGVMLTDGKSRFSINGKPIYHFLGGSTFSEYTVCHIGTVAKINPAAPLDKVCILSCGISTGLGAALNVAKPQKGHTVAVFGLGAVGLAAAEGARLSGASRIIGVDLNPSRFKEAKKFGVTELINPKDHDKPVQQVLIEMTDGGVDRSIECTGNVQAMISAFECVHDGWGVAVLVGVPSKDDEFKTHPMNLLNERTLKGTFFGNYKPRTDLPGVVEKYMNKELEVEKFITHS

SEQ ID NO: 17946 - protein, 303 aa, Populus tremula
DVYFWEAKGQTPLFPRIYGHEAGGIVESVGPGVTDLQPGDHVLPVFTGECGDCRHCKSEESNMCDLLRINTDRGVMLTDGKSRFSINGKPIYHFLGGSTFSEYTVCHIGTVAKINPAAPLDKVCILSCGISTGLGAALNVAKPQKGHTVAVFGLGAVGLAAAEGARLSGASRIIGVDLNPSRFKEAKKFGVTGLINPKDHDKPVQQVIIEMTDGGVDRSIECTGNVQAMISAFECVHDGWGVAVLVGVPSKDDEFKAHPMNLLNERTLKGTFFGNYKPRTDLPGVVEKYMNKELEVEKFITHS

SEQ ID NO: 17947 - protein, 339 aa, Geobacillus stearothermophilus
MKAAVVEQFKEPLKIKEVEKPTISYGEVLVRIKACGVCHTDLHAAHGDWPVKPKLPLIPGHEGVGIVEEVGPGVTHLKVGDRVGIPWLYSACGHCDYCLSGQETLCEHQKNAGYSVDGGYAEYCRAAADYVVKIPDNLSFEEAAPIFCAGVTTYKALKVTGAKPGEWVAIYGIGGLGHVAVQYAKAMGLNVVAVDIGDEKLELAKELGADLVVNPLKEDAAKFMKEKVGGVHAAVVTAVSKPAFQSAYNSIRRGGACVLVGLPPEEMPIPIFDTVLNGIKIIGSIVGTRKDLQEALQFAAEGKVKTIIEVQPLEKINEVFDRMLKGQINGRVVLTLEDK

SEQ ID NO: 17948 - protein, 217 aa, Nicotiana tabacum
MAGGYRAEDDYDYLFKLVLIGDSGVGKSNLLSRFSRNEFNLESKSTIGVEFATRSIRVDDKIVKAQIWDTAGQERYRAITSAYYRGAVGALVVYDITRHVTFENVERWLKELRDHTDQNIVIMLVGNKADLRHLRAVSTEDAKAFAERENTFFMETSALESLNVENAFTEVLTEIYKVVCRKALEVGDDPAALPKGQTINVGKDDVSAVKKVGCCSS

SEQ ID NO: 17949 - protein, 153 aa, Zea mays
  unsure (1)..(153): unsure at all Xaa locations
MASSMLSSAAVVTSPAQATMXRXPFTGLKSSSAFPVTRKANNDITSIVSNGGRVSCMKVWPPVGKKKFETLSYPXLTXTEXELGKEVDYLLRHXWIPXCVEFELXHGXVYREHGSTPXYYDGRYWNNGGSFPLVRMALPLPGLKGSRGQNGVP

SEQ ID NO: 17950 - protein, 216 aa, Nicotiana tabacum
MANRVDHEYDYLFKMVLIGDSGVGKSNILSRFTRNEFCLESKSTIGVEFATRTLQVEGKTVKAQIWDTAGQERYRAITSAYYRGAVGALLFYDITKRQTFDNVQRWLRELRDHRDSNIVIILAGNKSDLKHLRAVSEQDDQALVKKEGLSFLETSALEALNVDKAFQTILTDIYHIISKKALAAQEAAASTALPGQGTTINVSDNSANVKRGCCST

SEQ ID NO: 17951 - protein, 271 aa, Triticum aestivum
MEMPRVSEETVAAVVPIAVYWAYASVHTALGHSRLMDKYRLNTKDEEDRKNMVSKRAVILNVLMQHLMQLAALAVLAMVTGGRGATASKAAGGSRAAAYLTAAARIAVAVLVFDAYRYAWHRLAHINRFIYRHLHSWHHRIVVPYAFGAIYGHPIEVLIADTAGASLAVLVTGLSPSSPRATAVFLTLCTVKAIDNHCGVCLLPRRLQSVWNGAAYHGVHHMPRGVRYNFSDLFFVTWDHVFGTHMPYAVEERPGGDGLVLKPLPPPKATN

SEQ ID NO: 17952 - protein, 456 aa, GIBBERELLA ZEAE PH-1
MLSAALRRRVLAPTHSALRTGFAAHVVRHYASFPEHQVIKMPALSPTMQAGNIGAWQKKIGDSIAPGDVLVEIETDKAQMDFEFQEEGVIAKILKDAGEKDIPVGSPIAVLVEEGTDVAAFEKFSVEDAGGAAKPAAPKEEKSESKSESASTPEPSSEPQQYESQGRLQTALDREPNIAAPAKRLAREKGISIDGIKGTGKNGQITEADVKKAVSSPAASAASSAASYEDIPISGMRKTIANRLVESTQTNPHFYVTSSLSVSKLLKLRQALNASADGKYKLSVNDFLIKAIAVASRKVPQVNSSWRDGNIRQFNTVDVSVAVSTPTGLITPIVTGVEGRGLEAISAQVKSLAKKARDGKLKPEEYQGGTISISNMGMNPAVDHFTAVINPPQAAILAVGTTKKVAIPSDNEAGVEFDDQITLTASFDHKVVDGAVGAEWLKEVKKVIENPLELLL

SEQ ID NO: 17953 - protein, 117 aa, Triticum aestivum
  unsure (1)..(117): unsure at all Xaa locations
VGEALPAEDGSMDAVIGTLVLCSVKDXDMALREIKRVLKPGGLYLFIEHVAAADGSFLQLVQGALDPLQQFVADGCHLTRKTADNIKEAGFSSLSLNDVRLSSAYIVSPHVYGVAYK

SEQ ID NO: 17954 - protein, 309 aa, Arabidopsis thaliana
MEITLNSGFKMPIVGLGVWRMEKEGIRDLILNAIKIGYRHLDCAADYRNETEVGDALTEAFKTGLVKREDLFITTKLWNSDHGHVIEACKDSLKKLQLDYLDLFLVHFPVATKHTGVGTTDSALGDDGVLDIDTTISLETTWHDMEKLVSMGLVRSIGISNYDVFLTRDCLAYSKIKPAVNQIETHPYFQRDSLVKFCQKHGICVTAHTPLGGATANAEWFGTVSCLDDPVLKDVAEKYKKTVAQVVLRWGIQRKTVVIPKTSKPARLEENFQVFDFELSKEDMEVIKSMERKYRTNQPAKFWNIDLYA

SEQ ID NO: 17955 - protein, 490 aa, Leuconostoc mesenteroides
MEIQNKAMLITYADSLGKNLKDVHQVLKEDIGDAIGGVHLLPFFPSTGDRGFAPADYTRVDAAFGDWKDVEALGEEYYLMFDFMINHISRESVMYQDFKKNHDDSKYKDFFIRWEKFWAKAGENRPTQADVDLIYKRKDKAPTQEITFDDGTTENLWNTFGEEQIDIDVNSAIAKEFIKTTLEDMVKHGANLIRLDAFAYAVKKVDTNDFFVEPEIWDTLNEVREILTPLKAEILPEIHEHYSIPKKINDHGYFTYDFALPMTTLYTLYSGKTNQLAKWLKMSPMKQFTTLDTHDGIGVVDARDILTDDEIDYASEQLYKVGANVKKTYSSASYNNLDIYQINSTYYSALGNDDAAYLLSRVFQVFAPGIPQIYYVGLLAGENDIALLESTKEGRNINRHYYTREEVKSEVKRPVVANLLKLLSWRNESPAFDLAGSITVDTPTDTTIVVTRQDENGQNKAVLTADAANKTFEIVENDQTVMSSDNLTQN

SEQ ID NO: 17956 - protein, 493 aa, Pseudomonas syringae pv. tomato str. DC3000
MSLTRFQMCIDGQWVDALSGKTFDSLNPALAEPWAQLPDAGEADVERAVQAAQKAFESQEWRGLTATARGKLLRRLGDLIAENKEHLAQLESRDNGKLIRETRGQVSYLPEFFHYTAGLADKLEGGTLPLDKPDLFAYTVHEPMGVVAGIIPWNSPLYLTAIKLAPALAAGNTIVLKPSEHASATVLELARLALEAGIAPGVVNVITGYGPTTGAALTRHPLVRKIAFTGGAATARHVVRSSAENFAKLSLELGGKSPNIIFADADLDSAINGAVAGIYAASGQSCVSGSRLLVQDEIYDEFVERLAERASRIRIGNPLDESTEMGPMATAQQLAVVEGLVADALAEGARLRLGGKRPELDSKGWFYEPTLFECDHNSMKIMQEEVFGPVASVIRFKDEAEALAIANDSQFGLAAGIWTRDLGRAHRLARDIRSGIIWVNTYRAVSAMAPIGGFKNSGYGRESGIDSVLAYTELKTVWINLSQAPMPDPFVMR

SEQ ID NO: 17957 - protein, 379 aa, Pseudomonas syringae pv. tomato str. DC3000
MKAIVYNGPRDVSVKNVPDAKIEKPTDALVRVTTTNICGSDLHMYEGRTSFETGRIFGHENMGEVIEVGAGVDRVKVGDRVCLPFNIGCGFCENCEKGLTGYCLTANPGSAGAAYGFAEMGSHEGGQAELLRVPYADFNCLLLPEDAAEREDDYVMLSDIFPTGWHATELAGLLPGESVAIYGAGPVGLMAVHSAMIKGASQVFVVDNHPDRLALAAKMGATPINSLEQGAVDQILNLTDGRGTDRGCECVGYQCCDRHGHEANHVTMNNLVASTKATGGIGVVGVFVPQDPGAHSDLAKEGKMAFDFGSFWFKGQQIRTGQANVKAYNRRLAELIHHDRAKPSQIISHRLKLEEGPAAYQHFDARDDGWTKVVLKPNG

SEQ ID NO: 17958 - protein, 447 aa, Zea mays
MASSLLAGRGGGHHHNWGETRAPLEPIPPNPSPSQPHPRADGSKSKPRAAAGYVKFRPASLGHREARALRDRLAVELGQVRALLSRIDTWQQQGPPPRAVLRGAMRKRCGQILSRLRKDKRSVWFNAPVEVERLGLHDYHAVIKRPMDLGTVKEGLAAGRYASHDDFAADVRLTFTNALRYNPVGHEVHTFAGALLAYFERMYKEALVCLEEERKRLEPPRPVAAELPPPPAVEPVEAKAKTRAGNVRMRKPKAREPNKREMSLEEKNMLRLGLVSLPEEKMHNVLQIVRKRNNNPEMLGDEIELDIDEMDVETQWELDRFVTNFNKALKKSQRAAMLNGGVADVTSTAVAEDDTAPVGDVPTLVGNDDAESEEPVKSTTVAEQVDEYVDIGDEMPAATNQSMEIEKDAEGTTGSGGSGSGSSSSSGSESRSSGDSASGAGNAHSLT

SEQ ID NO: 17959 - protein, 588 aa, Rhodopseudomonas palustris CGA009
MSCAQVDASSWWGRYRYVEYGRRSPPRTPSKSVVRLGFIIGLIAIIGVVLSGFSASRVYEQEAAIQRIALGRAIDVHASQVQDRLTERELLGRVASGLFRKPSVIKADMLQPLRSSIYTFKTDFVLATWVARLKPEEVPAAEAELTKAGFPDPTVRDYDGKPLDLSSPVPLDVVMDVEPRNAETMALTGRMLDHDPVLGRTFAQALAEGQPHVSDPVPLTGSGPVGVVLAAPVMNTDSSDIVGFVTFSYRLATLMLTNDDLSLFSVVLKDPSREGYELVADESGEITSRVAPEGANPMIVRTVTFGNRDWSLAYYPKIDPYDRAQKMALIIGLAGLALTLIVCGLFGYVSYSNIRLRREIQMRIGFERRLTAVIDELNHRVKNILAVIQSIVTRTLRHGSDLDVARELLIGRIHAMSNVVSLLSDSQWQGVMLKGLFEGRAIPHADRIEVDGPDIAVSARAAQSLSLLFFELASHSDEGLAVVGKHPRVVANWTVTGDGKDATFHFRWEEFNTSAATRRPDSEFGIILLDRVAPEALGGTSKRYFTDISYVYELTAPLDTVVDVYERDRTGQITAPVRPPRKSPKQPR

SEQ ID NO: 17960 - protein, 173 aa, Haemophilus somnus 2336
DKRKLFGVTTLDVLRSETFVAELKGLNVSRIAVPVIGGHSGVTILPLLSQVQYTEWKEDEIAPLTKRIQNAGTEVVEAKAGGGSATLSMAQAAARFALSLVQGLSGETVVECTYVEGDGKYARFFAQPVRLGKEGVEEILPVGTLSAFEQKALEDMLPTLRADIELGEKFVNN

SEQ ID NO: 17961 - protein, 398 aa, Glycine max
MSLTLQTPPSTTLSSASPIHRTITRYTTFSFSLRPPTTLHFNPHRSLPLIRASNSSINAASTTELDAVSAFSEIVPDTVVFDDFEKFPPTAATVSSSLLLGICGLPDTIFRNAVEMALADSECYGLENPNARLSCFVNKAFANIGSDMAKLVPGRVSTEVDARLAYDTHAIIRKVHDLLKLYNDSNVPPQRLLFKIPSTWQGIEAARLLESEGIQTHLTFVYSFAQAAAAAQAGASVIQIFVGRIRDWARNHSGDTEIESAQLRGEDPGLALVTKAYNYIHKYGHKSKLMAAAVRNKQDLFSLLGVDYIIAPLKVLQSLKESVASPDEKYSFVRRLSPQSAAKYTFSDEELVRWDEDSLSKAMGPAAVQLLAAGLDGHADQAKRVEELFGKIWPPPNV

SEQ ID NO: 17962 - protein, 175 aa, Zea mays
MSLPPGPADSGAGTGDDWFLDCGILDDLPAAACGAFPWDASPSSSNPSVEVGSYVNANDAFKEPNDVFKEPGSSKRERMRRNKLNDRFLELGSALEPGKPVKADKAAILSDATRMVIQLRSESQQLKETNGSLEEKIKELKAEVIQPFLLNTVNPQIIPCTSMVRTCPCVIQESG

SEQ ID NO: 17963 - protein, 703 aa, Rhodopseudomonas palustris CGA009
MNQRAAIDIRHSTCPHDCPSACALDVEVIDGGTIGRLRGSKRQTYTAGVVCAKVARYAERIHHPDRLTYPMRRTGPKGSGQFARISWDEALDEIAARFDAAEAEFGAESVWPYYYAGTMGLVMRDGINRLANVKKYSRFYSTICANVAWAGFAAGAGKVAGVDPREMAKSDLIVIWGTNPVSTQVNVMTHAARARKERGAKIAAVDIYDNETMQQADIRIILRPGTDGAFACGVMHVLFRDGLADRAYLARYTDCPDDLEAHLKTRTPAWASSICGVPEAQIEAFAHAVGHTKRSFFRLGYGFTRSRNGAAQMHAALCIPAVTGAWQHEGGGAFFNNGAIFGFDKTLIEGLDQLDPATRVLDQSKIGRVLTGDAEALDGGAPVKAMLIQNTNPMTVAPEQELVRAGFAREDLFVAVHEQFMTETALMADLVLPATMFLEHDDLYYGGGHQHISVGARLVEPPGECRSNHEVLQGLAQRLGVDHPAFAMTPREVIDTTLKASGHGGIEQLEADLWRDLQPDFRASHFLDGFGHPDGKFHFKVDWGNVNLARKLRLGPWQEMPRLPDHWAVTEQADAEHPFRLATSPARSFLNTTFNETPSSQAREGEPNVMMHPADAAEVGVGEGDLVMLGNVRGETMLTVRLSSGLRRGVLIAESVFPNRAHRGGRGINVLTSAESIAPHGGAAFHDNKVWVKKADAPLAKRD

SEQ ID NO: 17964 - protein, 303 aa, Populus tremula
DVYFWEAKGQTPLFPRIYGHEAGGIVESVGPGVTDLQPGDHVLPVFTGECGDCRHCKSEESNMCDLLRINTDRGVMLTDGKSRFSINGKPIYHFLGGSTFSEYTVCHIGTVAKINPAAPLDKVCILSCGISTGLGAALNVAKPQKGHTVAVFGLGAVGLAAAEGARLSGASRIIGVDLNPSRFKEAKKFGVTELINPKDHDKPVQQVIIEMTDGGVDRSIECTGNVQAMISAFECVHDGWGVAVLVGVPSKDDEFKTHPMNLLNERTLKGTFFGNYKPRTDLPGVVEKYMNKELEVEKFITHS

SEQ ID NO: 17965 - protein, 303 aa, Populus tremula
DVNFWEAKGQTPLFPRIYGHEAGGIVESVGPGVTDLQPGDHVLPVFTGECGDCRHCKSEESNMCDLLRINTDRGVMLTDGKSRFSINGKPIYHFLGGSTFSEYTVCHIGTVAKINPAAPLDKVCILSCGISTGLGAALNVAKPQKGHTVAVFGLGAVGLAAAEGARLSGASRIIGVDLNPSRFKEAKKFGVTELINPKDHDKPVQQVIIEMTDGGVDRSIECTGNVQAMISAFECVHDGWGVAVLVGVPSKDDEFKTHPMNLLNERTLKGTFFGNYKPRTDLPGVVEKYMNKELEVEKFITHS

SEQ ID NO: 17966 - protein, 322 aa, Crocosphaera watsonii WH 8501
MTSLKTLPKSEKVNVWVFPGQGSQKLGMGIDLLKLPLGKLRLKQAENILGWSISDVWQSQTKKLSNTQYTQPCLYVFMTVLADLMKKSGYHPDVVAGYSFGEYTALYTAGAYDFETGLQLIQKRAEIMSRLPQGSMVTLIGFEGDKLRDEVLKTEDVWFANDDPKYAVISGTSQGVASILSNVPVERVIPLEVSAAFHTPLVEPAAKEFQPVLETTAFEPLSIPIFCSTDFVFSLRVNQVKDNLIRQISRSVKWQMISQRLINQGINKAIQLGCGQGLLKPMKNIDPGLEISNVGSSADIDSIVIRDQLKKLANINPAVIRV

SEQ ID NO: 17967 - protein, 550 aa, Candida albicans SC5314
MASFKLATDLPEWKKLEETYKSVGEKFSVRDAFAKDPKRFEEFSWIYKNYDDSKILFDFSKNLVNKEILDQLVTLAKEAGVEKLRDAMFAGDHINTTEDRAVYHVALRNRALRKMPVDGKDTAQEVDDVLKHMKEFSDSIRDGSWTGYTGKSITDVVNIGIGGSDLGPVMVTEALKAYSKPGLNVHFISNIDGTHTAETLKNLNPETTLFLIASKTFTTAETITNATSAKNWFLATAKDSKHIAKHFAALSTNEKEVVAFGIDAKNMFGFESWVGGRYSVWSAIGLSVAIYIGFENFNDFLKGAEAMDQHFLTTPLENNIPVIGGLLSVWYNNFFGAQTHLVVPFDQYLHRFPAYLQQLSMESNGKSVTRANVFTNYQTGTILFGEPATNAQHSFFQLVHQGTKLIPADFILAAQSHNPIEKNLHQRMLASNFFAQSEALMVGKDEAKVKAEGATGGLVPHKEFSGNRPTTSILAQKITPATLGSLIAYYEHLTFTEGAIWNINSFDQWGVELGKVLAKVIGKELDDKKAVATHDASTNGLINQFKEWEE

SEQ ID NO: 17968 - protein, 115 aa, Triticum aestivum
MERRDNSYYARFTEPRCTMQCIGKCTEICYKDPVLEDRQWSAYIDRSPGEDSYSLECFNACISGCGYRFDIPAEKVGLIKPNRPSKPPPPPVVERAKPGSGPPAAAGEDVPGTSA

SEQ ID NO: 17969 - protein, 165 aa, Aegilops speltoides
VMASSATTVTPFHGLKSTAGLPVSRRSSGSLGRVSNGGRIRCMQVWPIEGIKKFETLSYLPPLSTEALLKQVDYLIRSKWVPCLEFSKVGFVFREHNSSPGYYDGRYWTMWKLPMFGCTDATQVLNEVEEVKKEYPDAYVRVIGFDNLRQVQCVSFSAFRPPGCE

SEQ ID NO: 17970 - protein, 165 aa, Aegilops speltoides
VMASSATTVTPFHGLKSTAGLPVSRRSSGSLGRVSNGGRIRCMQVWPIEGIKKFETLSYLPPLSTEALLKQVDYLIRSKWVPCLEFSKVGFVFREHNSSPGYYDGRYWTMWKLPMFGCTDATQVLSEVEEVKKEYSDAYVRVIGFDNLRQVQCVSFIAFRPPGCE

SEQ ID NO: 17971 - protein, 584 aa, Clostridium thermocellum ATCC 27405
MNTTMIVDTLWVVFAALLVFFMNLGFAAVESGFARSKNTVNILSKNFIVFAVSSLGFMLLGWGLMFGGDNPIIGTKELFILGGSDLGFYKDTLTSTVPFWGKFFFQLVFCGTAATIVSGAVAERIKYISFIVFSFILTLFIYPVVGHWIWGGGWLANLGFMDFAGDTVVHSVGGWAALTGAIILGPRHGKYDKDGKPKAIPGHSLALAVIGLFVLWLGWFGFNPGSTMSFQNPEDVVHIIVTTNTAAIAAILTATATSWIFIGKPDLGMTINGCLAGLVGITGSCAYVSVGSSLIIGAIAGIIVVFSVIFFDRIKVDDPVGATSVHLVCGVFGTLCVGLFAQEGVTSLSTVNGLFFGGGFSLLGAEIIGIIAVGAFVVASSALVWFILKKTIGIRVSLEEEIQGLDIGEHGNSAYPDFAIVAPITASGNGNGDSIVAISQVETIKPSSVKVTPEAAIPVVNRSHPGAKMTKVTVITNQDKYTQLQNALDKIGITGLTVTNVLGYGMQKGHTEYFRGLPVKTRLLPKVQVDIVVCKIPVETVVDTVKKALYTGNMGDGKIFIYDVENVIKIRTGEEGYDALQDEE

SEQ ID NO: 17972 - protein, 165 aa, Aegilops speltoides
VMASSATTVTPFHGLKSTAGLPVSRRSSGSLGRVSNGGRIRCMQVWPIEGIKKFETLSYLPPLSTEALLKQVDYLIRSKWVPCLEFSKVGFVFREHNSSPGYYDGRYWTMWKLPMFGCTDATQVLSEVEEVKKEYPDAYVRVIGFDNLRQVQCVSFIAFRPPGCE

SEQ ID NO: 17973 - protein, 165 aa, Aegilops speltoides
VMASSATTVTPFHGLKSTAGLPVSRRSSGSLGRVSNGGRIRCMQVWPIEGIKKFETLSYLPPLSTEALLKQVDYLIRSKWVPCLEFSKVGFVFREHNSSPGYYDGRYWTMWKLPMFGCTDATQVLSEVEEVKKEYPDAYVRVIGFDNLRQVQCVSFIAFRPPGWE

SEQ ID NO: 17974 - protein, 431 aa, Burkholderia fungorum LB400
MLPVAVAGEGIEIIDSTGKRYIDASGGAAVSCLGHSNQRVIDAIKRQSQQLPYAHTSFFTTEPAEALADRLVASAPQGLEHVYFVSGGSEAIEAALKLARQYFVEKGEPRRRHFIARRQSYHGNTLGALAIGGNAWRREPFLPILIEAHHVSPCYAYREQRADETEEAFAQRLADELERKILELGADTVAAFIAETVVGATAGAVPPVREYFRKIRAVCDRYGVLLILDEIMSGMGRTGYLYACEEDGVAPDILTIAKGLGAGYQPIGATLVSERIYQAIVGGSGFFQHGHTYIGHATACAAALEVQRVIEEDNLLPNVLARGEQLRVRLREHYAQHPHIGDVRGRGLFVGVELVRDRAGKTPFDAALKLHAAIRREAFARGLMVYPMGGTVDGKIGDHVLLAPPFICTARDIDEIVSRLTDAIDGALAAV

SEQ ID NO: 17975 - protein, 344 aa, Triticum aestivum
  unsure (1)..(344): unsure at all Xaa locations
MCGILAVLGVGDVSLAKRSRIIELSRRLRHRGPDWSGIHSFEDCYLAHQRLAIVDPTSGDQPLYNEDKTVVVTVNGEIYNHEELKAKLKSHQFQTGSDCEVIAHLYEEYGEEFVDMLDGMFSFVLLDTRDKSFIAARDAIGICPLYMGWGLDGSVWFSSEMKALSDDCERFISFPPGHLYSSKTGGLRRWYNPPWFSESIPSAPYDPLLIRESFEKAVIKRLMTDVPFGVLLSGGLDSSLVASVVSRYLAETKVARQWGNKLHTFCIGLKGXPDLKAAKEVADYLCTVHHEIHFTVQEGIDAXLEEVLYHIQTYDVTTIRASPPIVSNVSGKINSWGVKNGLFR

SEQ ID NO: 17976 - protein, 256 aa, Thermotoga maritima
MLEGKVAVVTGGGQGIGAAIAQLFAENGMKVVIAEIDEEAGVEREEMLRERGLDVTFVKTDVADENSVKNMVRKTVEIYGGVDVLVNNAAVMSVKSIFERPLEEWERVIRVNLTGPYICSRYCAEEMIKTRWRSDHNIASTRAFQSEPDTEPYSASKGGLVALTHSLAVSLSRYHIRVVSISPGWIETSEWKKKSLRKKPDLRPIDHEQHPAGRVGNPLDIAHLCVFLADDEKAGFITGTNFIVDGGMTVKMIYEE

SEQ ID NO: 17977 - protein, 249 aa, Zea mays
  unsure (1)..(249): unsure at all Xaa locations
MDGGGGAGGAEGELTAQETALYDRQIRVWGVDAQXEFCKNIVLAGVGSLSLMDDNVVTEEDLNANFLIPPDESIYGGRSRAQVCCESLIDFNPMVRVSVEKGDPSLIDGEFLDKFDIVVLSRASLKTKLLINENWRKRSKHIAFYTIDCKDSCGEIFVDLQKHSYVQKKPGGATEQQELTYSSLQEAISEPWNSLPKKTGKLYFAMRVLEDYELSEGRSPGETTLSDIDAVLARRKDMCDKMVLKFFLS

SEQ ID NO: 17978 - protein, 532 aa, Crocosphaera watsonii WH 8501
MAQAPVSPVVLVILDGWGYRPTEEDNAVVMANTPVMDCLWTTYPRTLIKTSGKEVGLPQGQMGNSEVGHLNLGAGRIVPQELVRISDAVEEGAIYENKALVSLCEEVASRKGKLHLIGLCSEGGVHSHLDHLFGLLNLAQKQNLQDVCVHAITDGRDTNTTDGVKAIARIEDHIEKLGIGRIATVSGRYYAMDRDRRWDRVKLAYDVITQDGDGDGRSALELLKDFYSQDKTDEFIPPTRIAPGAIEAGDGVIFFNFRPDRARQLCSALTVPNFDGFERELITPLSFVTFTQYDPKLPVKVAFEPQNLNNILGEVVAREGLKQFRVAETEKYPHVTYFFNGGLEEPLEGEDRELIQSPMVATYDLSPAMSAEAVTKAACNAVDKAVYSLVVINYANPDMVGHTGNTEAAIEAIETVDNCLGKLLSSVSKLGGTVIITADHGNAETMKDENGNPWTAHTTNPVPLIFVEGEQRKIPGHGGLVELRDDGKLADIAPTILQILQLDKPSEMTGESLIKPAEIEIRANRTPVRIGR

SEQ ID NO: 17979 - protein, 491 aa, Xanthomonas campestris pv. campestris str. ATCC 33913
MRSDPTHPGVPMKTGLVAGWKARFYSVCMLMLFSALVVGGLGNAQAQSGAQVTPLPTEPVTTEPLPTAQPAAAPVAAAEAAPVVEKGDVAWMLTSTLLVLLMVVPGLALFYGGMVRAKNVLSVLIQVAVVFSLLVVLWVFYGYSLAFSGEGPWIGNLDKALLKGVTIETLSATFTKGVSLPEYVFVAFQATFAGITGALIVGAFAERAKFAAVLLFSVIWFTFGYLPLAHMVWATGGYLFGLGALDFAGGTVVHINAGVAGLVGAYFVGKRAGLGREAIKPHNVTLTFVGASLLWVGWFGFNAGSNLEANAGAALAFLNTLLATAAAVLGWSLTEKIIKGKSSALGVASGMVAGLVGITPACGTVGPFGAIIIGLAAGVLCVWGVTGLKRLLGADDSLDVFGVHGLGGIIGAILTGVFSAASLGGQKGGDYDMLHQVGIQALGVGITVGWIGVVSVVGFVVAKLVFGLRVTEEAEREGLDITSHGEAAYES

SEQ ID NO: 17980 - protein, 412 aa, GIBBERELLA ZEAE PH-1
MSETQTQEVGVPVVKETENVIVDKRKPFSWLEPHPTFVIVLVGPQEAPFGIQKDFLCSRSEFYEKHFSAANPEEKVEHVVKLPDTTKEVFGLAQHFLYTDKVISDESSVPSYEALVGLWKLGHKLGIQGLCDKALNAMIDCRRITETIPATPLLIQVWKDTPEGSSIRKLLLSWTAEYMRSSDARAEFAKSLPQEVLSELVVTMSSFDTVPSPEAPPATVTLPSVTPRKNVHYLEDEPENEAKRSRRVSGISVGTPVSADRSIKARGSLPKPGPRRRTSAGFAEGRDFTTAQKLEFCADLLTRMLSGPGFWTRLVGPFKDAVEPVEDGVPDYFEKVKRPMDLTTIKFKMDHKEYNNEEEFLADMRQIFDNCFTYWKKGDPMWTAGEKLQKTFEDKFSHMNKWISKMGGDEVE

SEQ ID NO: 17981 - protein, 318 aa, Methylococcus capsulatus str. Bath
MPNIDNSLAFLFPGQGSQSIGMLADLAAVHPVVGETFAEASEVLGFDLWCLVQEGPEEELNQTVNTQPAMLAAGVATWRIWCSLTDRRPAWMAGHSLGEYSALVAAGALGFADAVKLVAQRGRLMQEAVPPGAGSMAAILGLEDPQVVAACKEASTRDSVVTPANFNAPGQVVIAGASQAVERAIVAAKALGAKRAVLLPVSVPSHCALMAPASEKFAALLSETSFESPRDRIGVIHNVDVAMHPSPEVIRAVLAQQISQPVRWSETIRFLSDQGVRRFVECGPGKVLAGLNKRIVSSEATLAIVDQDSLNTALESIQ

SEQ ID NO: 17982 - protein, 296 aa, Candida albicans SC5314
MGTSTSEALKNIKNKQRRQKVFAEIKHEKNKQRHKQRAERAKEERENPELREERIAANIPDTIDSKRIYDETIAAEVEGDDEFQSYFTNLLEEPKILLTTSANAKKPAYEFADMIMDFLPNVTFIKRKKEYTMQDMAKYCSNRDFTALLVINEDKKKVNGITLINLPEGPTFYFSITSIVDGKRIKGHGKAGDYLPEIVLNNFNSRLGKTVGRLFQSIFPHKPELQGRQVITLHNQRDYIFFRRHRYIFRNEEKVGLQELGPQFTLKLRRMQKGVRGDVVWEHRPDMERDKKKFYL

SEQ ID NO: 17983 - protein, 153 aa, Nitrosomonas europaea ATCC 19718
MINVKKLLSLALSGWLFLSMSAQATEEQATSHHTNAADVTTLEKIDTQVGTGEEADIGKTAKVHYTGWLYDAAAEGHKGRKFDSSYDRGSHFSFLLGAGRVIKGWDQGVMGMKVGGKRTLIIPSSMAYGSQGAGRVIPPNSALVFDVELVGLE

SEQ ID NO: 17984 - protein, 486 aa, Lotus japonicus
MATPTAYQENLPASPEWLNKGDNAWQMTAATLVGLQSMPGLVILYASIVKKKWAVNSAFMALYAFAAVLLCWVLLCYRMAFGDKLFPFWGKGAPALGQKFLINQASVPESTHYFNNGSIETQTQRPFYPMATLVYFQFNFAAITMILLAGSVLGRMNIKAWMAFVPLWLIFSYTVGAFSIWGGGFLYHWGVIDFSGGYVIHLSSGIAGFTAAYWVGPRLKSDRERFPPNNVLLMLAGAGLLWMGWSGFNGGAPYAANIDASIAVLNTNICAATSLLVWTSLDVAFFGKPSVIGAVQGMMTGLVCITPGAGLVQSWAAIVMGILSGSIPWVSMMILHKKSSLLQKVDDTLGVFHTHAVAGLLGGLLTGLLAEPELCRLVLPVSNSRGAFYGGTGGAQFLKQLVAALFVIGWNLVSTTLILLAIQLFIPLRMPDYQLEIGDDAVHGEEAYALWGDGEKYDPTKHGSTIVDETLASAYSVGARGVTVNL

SEQ ID NO: 17985 - protein, 74 aa, Zea mays
FEDGLKLVKLRGEAMQDASDAANSAMVSVIGLDSEKVQELCDAANDEGNYAVSGGVKGIEVVEAKAKSFKARMT

SEQ ID NO: 17986 - protein, 356 aa, Oryza sativa
PTRPASRVVNKKPPRRSLNVSGPVQPYNPSLKNFWYPVAFSSDLKDDTMVPIDCFEEQWVIFRGKDGRPGCVMNTCAHRACPLHLGSVNEGRIQCPYHGWEYSTDGKCEKMPSTKMLNVRIRSLPCFEQEGMVWIWPGNDPPKSTIPSLLPPSGFTIHAEIVMELPVEHGLLLDNLLDLAHAPFTHTSTFAKGWSVPSLVKFLTPSSGLQGYWDPYPIDMEFRPPCMVLSTIGISKPGKLEGKSTKQCSTHLHQLHICLPSSRNKTRLLYRMSLDFAPWIKHVPFMHILWSHFAEKVLNEDLRLVLGQQERMINGANVWNWPVSYDKLGIRYRLWRDAIERGVDRLPFSNQSESGS

SEQ ID NO: 17987 - protein, 115 aa, Zea mays
  unsure (1)..(115): unsure at all Xaa locations
MAARTQNPQGKKLKTWYEQHGSYLNLRRLFEGDRDRFNRFILNLNTNHGHILVDYSKNLLTETVMHILVDVANSMGVEAARERMXTVEKINFTEDRAVLHVAXLLNRSNTPILVD

SEQ ID NO: 17988 - protein, 282 aa, Marchantia polymorpha
QLTESDIMIPIESFEEPWVLFRGKDGRAGCVRDECAHRACPLSLGTVVDGRIQCPYHGWEYNTGGKCEKMPSTRPLKTGIRALPCIEQDGMVWIWPGDETPAATLPSLLPPENYTIHAEIVLELPVEHGLLMENLLDLAHAPFTHTSTFAKGWSVPNMVKFKTPMQALSGNWDPYPIDMAFQPPCMVLSTIGLVKPGKLDGSSTASCSKHLHQLHVCMPSSRGKTRLMYRWLWTLPNGRSMPYIDRVWTHLANQVLNEDLRLVEGQQDRMKRGANVWQTPVG

SEQ ID NO: 17989 - protein, 351 aa, Clostridium beijerinckii
MKGFAMLGINKLGWIEKERPVAGSYDAIVRPLAVSPCTSDIHTVFEGALGDRKNMILGHEAVGEVVEVGSEVKDFKPGDRVIVPCTTPDWRSLEVQAGFQQHSNGMLAGWKFSNFKDGVFGEYFHVNDADMNLAILPKDMPLENAVMITDMMTTGFHGAELADIEMGSSVVVIGIGAVGLMGIAGAKLRGAGRIIGVGSRPICVEAAKFYGATDILNYKNGHIEDQVMKLTNGKGVDRVIMAGGGSETLSQAVKMVKPGGIISNINYHGSGDALLIPRVEWGCGMAHKTIKGGLCPGGRLRAERLRDMVVYNRVDLSKLVTHVYHGFDHIEEALLLMKDKPKDLIKAVVIL

SEQ ID NO: 17990 - protein, 581 aa, Triticum aestivum
MVFSVTKKETKPYEGQKPGTSGLRKKVTVFQQPHYLANFVQSTFNALPADQVKGATIVVSGDGRYFSKDAVQIIAKMAAANGVRRVWVGQDSLLSTPAVSAIIRERISADGAKATGAFILTASHNPGGPTEDFGIKYNMGNGGPAPESVTDKIFSNTKTVTEYLIAEDLPNVDISVIGVTSFTGPEGPFDVDVFDSATDYIKLMKTIFDFESIKKLLASPKFSFCFDGLHGVAGAYAKRMFVDELGASESSLLNCVPKEDFGGGHPDPNLTYAKELVDRMGLGKTSNVEPPEFGAAADGDADRNMVLGKRFFVTPSDSVAIIAANAVQSIPYFASGLKGVARSMPTSAALDVVAKNLNLKFFEVPTGWKFFGNLMDAGMCSVCGEESFGTGSDHIREKDGIWAVLAWLSILAYKNKDNLGGDKLVTVEDIVLQHWATYGRHYYTRYDYENVDAEAAKELMANLVKMQSSLSDVNKSIKEIQPTVADVVSADEFEYKDPVDGSVSKHQGIRYLFGDGSRLVFRLSGTGSVGATIRIYIEQYEKDSSKTGRASSDALSPLVDVALKFSKIKEYTGRSAPTVIT

SEQ ID NO: 17991 - protein, 544 aa, Listeria monocytogenes EGD-e
MAYSFKLPDIGEGIHEGEIVKWFVQPGDKIEEDESLFEVQNDKSVEEITSPVSGTIKEIKVAEGTVATVGQVLVTFDGVEGHEDDAEEESAAPKAESTESTPAPAQASGKGIFEFKLPDIGEGIHEGEIVKWFIQPGDKVEEDQSIFEVQNDKSVEEITSPVDGTVKDILVSEGTVATVGQVLVTFEGDFEGEASHESTPESPAEDAALANNDATSAPATGGNGTPSSKKDPNGLVIAMPSVRKYAREKGVNIAEVAGSGKNNRVVKADIDAFLNGEQPAAATTTAQTEEKAAAPKAEKAAGKQPVASSDAYPETREKLTPTRRAIAKAMVNSKHTAPHVTLMDEIEVTALMAHRKRFKEVAAEKGIKLTFLPYMVKALVATLRDFPVLNTTLDDATEELVYKHYFNVGIAADTDHGLYVPVIKNADKKSVFQISDEINELAGKARDGKLTADEMRHGSATISNIGSAGGQWFTPVINYPEVAILGVGRIAQKPIVKDGEIVAAPVLALSLSFDHRVIDGATAQKAMNNIKRLLNDPELLLMEV

SEQ ID NO: 17992 - protein, 191 aa, Paracoccidioides brasiliensis
MAEIRRKLVIVGDGACGKTCLLIVFSKGTFPEVYVPTVFENYVADVEVDGKHVELALWDTAGQEDYDRLRPLSYPDSHVILICFAIDSPDSLDNVQEKWISEVLHFCQGHPIILVGCKKDLRDDPRTIEELRKTSQKPVTTEQGEEVRKKIGAYKYLECSARTNDGVREVFESATRAALLAKKEKKKCKIL

SEQ ID NO: 17993 - protein, 467 aa, Listeria monocytogenes EGD-e
MVVGDFPEERDTIVIGAGPGGYVAAIRAAQLGQKVTIIEKEYYGGVCLNVGCIPSKALITIGHRFKEAGHSDNMGITADNVNLDFTKAQEWKGGVVNKLTSGVKGLLKKNKVEMLEGEAFFVDDHSLRVIHPDSAQTYTFNNVIIATGSRPIEIPGFKYGKRVLSSTGALALTEVPKKLVVIGGGYIGTELGGAFANLGTELTILEGGPEILPTYEKDMVSLVKRNLKSKNVEMVTKALAKSAEETENGVKVTYEANGETKTIEADYVLVTVGRRPNTDEIGLEQAGVKVTERGLVEVDKQGRSNVSNIFAIGDIVPGVPLAHKASYEAKIAAEAIAGEKSENDYTALPAVVFSDPELATVGLTEKEAKEKGFDVKAAKFPFGGNGRALSLDAPEGFVRLVTRKEDGLVIGAQVAGMNASDIISEIGLAIESGITAEDIALTIHAHPSLGELTMEAAELALGRPIHM

SEQ ID NO: 17994 - protein, 235 aa, Bdellovibrio bacteriovorus HD100
MSNHSPNPEIIRNMFSKVAANYDKGNNVLSMGIHHLWRKKLVKYSGAKAGDQVLDCATGTGDLAIEFKKTVGTGAVTGTDFCAEMLIPAPGKAKERGLDITFEQADVTQLQYADNSFDVCSISFGIRNVGDPVKALKEMARVTRPGGKVMVLEFGQVNIPVFGALYNFYSQNILPKIGGIVTGQKEAYEYLQKSSAAFPCREGFLDLMKESGAYSKMEYITLTGGIAYIYKGTVK

SEQ ID NO: 17995 - protein, 358 aa, Pseudomonas syringae pv. tomato str. DC3000
MVKAYSYAAQSAQDVLQPYQFERRTPGDDDVQIDILYCGVCHSDLHTARNEWHNTLYPSVPGHEIVGRVTAVGANVKQFKVGDLAGVGCMVDSCQQCASCTEGDEQYCESGFTGTYNGPVFGGENTLGGYSDKIVVKEKFVLRISHDDNLAAVAPLLCAGITTYSPLRHWKVGPGTKVGIVGLGGLGHMGVKIAHAMGAHVVLFTTSPDKREDGLRLGADEVIVSRDPAQMATQVNSLDFILNTVAAPHDLDAFLSLLKRDGTMTLVGAPAEPHPSPAVFNLIFKRRSLAGSLIGGIQETQEMLDFCAEHGIVSDIEVIDMQYINEAYERMLKGDVKYRFVIDMASLKQEVSADSNAA

SEQ ID NO: 17996 - protein, 177 aa, Lemna gibba
MASSMMASTAAVARAGPAQSSMVAPFNACRSSVAFPATRKANNNLSTLPGNGGRVSCMQVWPPEGLKKFETLSYLPPLSVEDLAKEVDYLLRNDWVPCIEFSKEGFVYRENHASPGYYDGRYWTMWKLPMFGCTDASQVIAEVEEAKKAYPEYFVRIIGFDNKRQVQCISFIAYKPT

SEQ ID NO: 17997 - protein, 169 aa, Triticum aestivum
TTFCTPTPWPGAAMLSWATIRAPCQGLKSTDGLTVRRRYISPSLSSVSNGGRIRCMQVWPIEGIKKLETLSYLPPLYTEALLKQVDYLIRCKWVPCLQLSKVDLVFREHNNYGGFYDGRYWTMWKLPMFGCTDTTQVLNEVEEVKKEYPDRYVRGIGLDNLRQVQCVSF

SEQ ID NO: 17998 - protein, 380 aa, Lactobacillus reuteri
MKFNTQLIHGGNSEDPTTGAVSTPIYRSSTFHQHVLGGEPKWEYSRTGNPTRVSLEKLIAELEHGTVGFAFASGSAAIHATFSLFSQGDHFVVGSDVYGGTFRLINKVLKRFGFEFTVVDMQDLEAVENAIQDNTVAVYFETPTNPLLQIADIKAIADIAKKHGVKTIVDNTFATPYNQQPLTLGADIVVHSATKYLGGHSDVVAGLAVTNDDEIAEQLAFLQNSIGSTLGPDDSWLLQRGMKTLGARMRVHQENANEVINFLQNDDHIGKIYYPGLKDFPGHEVAAKQMRNFGAMISFELKDSLDAKKFVESLQLIDLAESLGGIESLIEVPAVMTHGSIPREIRLENGIKDELIRLSVGIEDPEDIIADLQQALKKLD

SEQ ID NO: 17999 - protein, 1535 aa, GIBBERELLA ZEAE PH-1
MDAATQHQVKTPEEAVARIAYLSSDVIVSVQPAIGTDSEFSSHLNRYAGRKDSSLVAQSADTVPEIIPVRHNTDPLLSVYTPTRAGKLVSVTTTSTILLPSVSHLYKLANYPVVLHVSLQPRTFPDYSVITAIRNSGFTFVQSETLQEAQDLALTAHALAIRTGKGVIHFFAPSTSANDKPIGVEDASVVRDVLDIESVRRYQAGSAPSSQTGIYADDGHIAVSSDHDAPATTGAASGNLTVPPSANASKAPSAGTSVKSSQDSESSTPVAPSSVATTVESAPPQVTSEDIYKSAGRIWAHLKTAVGREYSAFEYSGPPNAENCLFIFGSDAGAFAQAIDEANTQEIFANTAILTPRLYRPWLGSRLVEAIPRSVKRIAVLEQIHRKTTKWGPLLIDVLTSVKSGPGGVEAIVGHQLGYIAPEVVVQALRGVLQNLTAEKPIQNLEVGKKEAWKEPTGYDLKAPQLETAYTKILDQLFGQRAYVANAIKSSTTGISPTVSASPEFGFGSLLARKQRRGQFVSQVKDAATNGSFTTEAPKSWLARWAMNADDASKSTEIADDVIARLETDGSPLAAQLLTAKGLFRKESLWLTGSDAWSYDLGNSGVHHVLASGENVNMLIIDSTPYSERAAADANRRKKDIGLYAMNFGNVYVASTAVYSSYTQVLQALLEADKFEGPSVVLAYLPYFGETDSPLTVLQETKKAVDTGYWPLYRWNPENEKKGEPNFSLDSELIKQELKTFLARDNQLTQLASKEPKFAAALVKDFGSEVRAQQKRKAKDAYNQLLEGLLGAPLTVLYASDNGNSTTLAKRLASRGRARGLKTTVLAMEDYPLEDLPTEENIVFITSTAGQGEFPQNGLPFWDAIKDNTDLDLAAVNYSIFGLGDSHYWPRKEDKIYYNKPAKDLDRVLTNLGGKHLIDIGLGDDQDPDSFQTGYKEWEPKLWAALGVDKVDGLPDEPPPITNEDIKVASNYLRGTIVEGLNDTSTLAISAADQQLTKFHGTYMQDDRDIRDERKAQGLEPAYSFMIRCRLPGGISTPQQWVQMDDIANELGNETMKLTTRQTFQFHGVVKSKLKPAMQAINRALMTTIAACGDVNRNVMCSSLPTQSKYHREVFACSQLISDHLLPSTSAYHEIWLTDDDNKKTQVAGDAVQDFEPLYGPTYLPRKFKITIAIPPHNDTDVYAHDIGLIAIKGEDGKLAGFNVLAGGGMGATHNNKKTYPQTGRMFGFCKTEDVHIVCEKIMLVQRDNGDRKNRKHARLKYTIDDMTVPVFRSKVEELWGKKFENERPFEFKSNVDTFGWQKDEHGLNHFTFFIENGRIEDTPEFQMKTGLREIAKSLKGESEFRLTGNQHLILSNVADEHLDDVKELMKKYKLDNVQFSALRLSSSACVAFPTCGLAMAESERYLPVLISKLEGCLEENGLRQDSIVMRMTGCPNGCARPWLAEVAFVGKAYGAYNMYLGGGYHGQRLNKLYRQSIKEDEILDIMKPLLKRYALERNEGERFGDFCVRSGVIVATTDGQNFHDNVADEEEDDE

SEQ ID NO: 18000 - protein, 473 aa, Eremothecium gossypii
MPCNPRKEESVACPICFKDLSVLHLYEREAHCDICLGRATGGTSGAARKRSIPLPDVKKVRFRDTTLVVDGFMYMDDPTVDAYFLSHFHADHYQGLCPSWKQGPLYCSAITARLAMHKFKIPQELITVLYPGVPHKISPILRCIPLDANHCPGSLILLFEEFDDQGHVRQSILHTGDFRATPSMATELSQLTGSRPIDTVYLDTTYLHPYYHFPLQESVIATTADFAAKLSDVGLRAYFADKQKSILTFTKRRESHKHIIKFRYLYLIGSYSIGKERLAVAISERLRTKLYVRSDTVKRKLIDRYKEWFPDGLITHVASESCVHLVPFEVISSKDSISNYMKVLPPIYEDVIAFSPTGWAYANRLRYIPEQAIRERFACPDKRYKFVTDLLHDATVDSFTTDSLKTQYNQSKRYQLFRIPYSEHSSFKDLSIFATTIQMNAIRSTVNLASLEMHRMWFDTWSRIRNEKYLRKL

SEQ ID NO: 18001 - protein, 197 aa, Saccharomyces cerevisiae
MSNNEIVFVTGNANKLKEVQSILTQEVDNNNKTIHLINEALDLEELQDTDLNAIALAKGKQAVAALGKGKPVFVEDTALRFDEFNGLPGAYIKWFLKSMGLEKIVKMLEPFENKNAEAVTTICFADSRGEYHFFQGITRGKIVPSRGPTTFGWDSIFEPFDSHGLTYAEMSKDAKNAISHRGKAFAQFKEYLYQNDF

SEQ ID NO: 18002 - protein, 485 aa, Eremothecium gossypii
MARVTVLGAAGGIGQPLSLLLKTCSLVSELNLYDLRNAPGVAADVSHVNTDCRVAGFEGPAELGRALRGADLVVIPAGVPRKPGMTRDDLFGINAGIVQSLVTAVAKHCPAARLLIISNPVNSTVPIAVETLKRLGKLNAARVFGVTTLDLVRAQSFLADALGRDAHRVADLASHVTVVGGHAGRTIVPLLADAQLRELQRRGLYDSYVHRVQFGGDEVVKAKAGAGSATLSMALAGFHFAELLLRSLAGEAVAPEPAFVYLPGLPGGADLARALAATEPVDYFAAPVRLAAGDAAVVDTAFVADLAPEQRALVDAALPELAASIRKGVDFVHAPRPAFSRRLYIAPVSSAPPSHIRVVLTAFFAGRTTRARPRSPLFRPPFARPNGTAWARGLQADTQGMRLAPQAVIIVNQSAPRYRYSLTIKRVVVHTHTTGRLLLFTFAYYTPKRALPAQDGPRQARITSSRRPTTARLRLLGGHRVYTAL

SEQ ID NO: 18003 - protein, 535 aa, Candida albicans SC5314
MNISILLVSLFLSLACADEIKPSGEFHEHLHLKPLSRNRLLTNFEFDVESSPFQIDYYNSSSPVEASRRSHYNYFPNSLGLIIESTNTKELQLRFTQGWWDASSWGQLPFNGKYSGGTGVEVSAVIEAPNVEVAKRNWLKLTKTLSGFFCASLNFIDDHITTYPKHAVKEINLAEYAPEKGNKLYLLRAALPSEPVCTENLTPFLKLLPTRGKSGISSLLDGHKVFDSLWHGMSIDVTTNCDTNNQCTLKLHQTVNQIVDIIRSLRKRKEGAIPKPTPGDQLRCDTEKTYNSWQCFPLSDPVNLEWNLETIYGRGINGPALADDPQVSKVTIDIDPSSWNIMLLREKENSIEGSSLTNQEETNQIVQYLHENVKFDFQFIAQNSSIVLPIDTPPLYASRSLTGYSLDKGGLRTVFTNNNDEPVKFVYFESTPWFMRLYLHTLRLTLKNSTGLFDIFDHEQYIKDVYFRPAVDRERPSHMELIMEVPAKSTLAISYDFDKSLLLYREYPPDANHGFDVEPAVISVFDKDSEKVYEF

SEQ ID NO: 18004 - protein, 266 aa, Listeria monocytogenes EGD-e
MNRIGFIGAGNMGTAMIRGLAQANLVKREEIIVGGRNLEKLKPLEAEFTGLQITTDTEKLVEQADIIILAVKPYTIPEILTSVKEKLTPDKIIISVAAGVTIQDLEELTSAKTKIVRVMPNTPALVGEAMSSVSPNTNVTSEELKEVTAIFTSFGEAEVVSENLMDAVIGVSGSSPAYVYMFIEALADGAVLSGMPRDKAYKFAAQAVLGAAKTVLETGEHPGKLKDMVTSPGGTTIEAVKSLENDGFRSAVINAVQAAAKKNSSM

SEQ ID NO: 18005 - protein, 255 aa, GIBBERELLA ZEAE PH-1
MTAFELHLYRGLEPTEPNFIMGHEFTGTVVELGSAVKSVEIGDKIVSPFTASCGLCYYCENGGSARCVNSQPLGSPNLDGAQAEYVRVPFADGTVAKASADIHDQALILMADIFPTGYFGVKSGVEMMPNLDVHDSTIVVIGCGPVGLCAVVAAAALKPKHLFAVDSVSSRLDQAAKLGAEPLNFMSDKTGMHDRIKAATNGRGADIVVEVVGLSPALRTAFDLVRPFGAISSIGVHNAEIPWSGNDAYKWGDAQ

SEQ ID NO: 18006 - protein, 288 aa, Oryza sativa
  unsure (1)..(288): unsure at all Xaa locations
MAPLPAAGAAGRIILAHGACHGGWCWYKVAALLRAAGHRVDAPDLGAAGQRGLGVGGAPASSFADHARPLLDAVRALPDGERAVLVGHSFGGMSVALAAETFPDKVAAAVFVAAFLPDCANPPSHPIDTVINSYHDDKITLSFPLIFAMNFCHCQYQESDWMDTVIDPSHVPPSIPVRDGVPERKVWQLSSPEHXEYTLVKSLVRASSLYVDELRRRAAFREDRYGAVRKVYVVVENDMAIVQEHQRWMVANAEVAEVRVMDAGDHMAMLSAPEELAGHLADVANTYI

SEQ ID NO: 18007 - protein, 165 aa, Triticum timopheevii subsp. armeniacum
VMASSATTVAPFQGLKSTAGLPVSRRSSGSLGRVSNGGRIRCMQVWPIEGIKKFETLSYLPPLSTEALLKQVDYLIRSKWVPCLEFSKVGFVFREHNSSPGYYDGRYWTMWKLPMFGCTDATQVLSEVEEVKKEYPDAYVRVIGFDNLRQVQCVSFIAFRPPGCE

SEQ ID NO: 18008 - protein, 424 aa, Triticum aestivum
  unsure (1)..(424): unsure at all Xaa locations
NELVHQNRWREALDRLLETNNFPEFTGRVCPAPCEGSCVLGIIHPPASIKSIECSIIDKGFEEGWMVPRPPLQRTGKKIAIVGSGPAGLAAADQLNKMGHFVTVFERSDRIGGLMMYGVPNMKTDKIGVVQRRVNLMAEEGVTFVVNANVGSDPLYSIERLHSENNAVILACGATKPRDLSIPGRELAGVHFAMEFLHANTKSLLDSNLEDGRYISAQGKKVVVIGGGDTGTDCIGTSVRHGCSSIVNLELLTKPPSKRAADNPWPQWPRVFRVDYGHQEASTKFGNDPRTYEVLTKRFIGDENGKLKALEVVRVKWEKVXGRFQFKEIEGSQEIIEADLVLLAMGFLGPEEDIADKLGLEKDNRSNFKAQFGHFGTSVDGVFAAGDCRRGQSLVVWAITEGREAAAAVDKYLSRDEQNVAGLT

SEQ ID NO: 18009 - protein, 513 aa, Glycine max
MHTLLRSTLRTKTASSLAYAVVSRSAHENLLQAPLLSRSNSTEASLAKDNSSNDVKNGQGYKGHSMLAPFTAGWQSSDLHPLIIEKSEGSYVYDINGKKYLDALAGLWATSLGGSEPRLVDAAVAQLKKLPFYHSFWNRTTLPSLDLAKELLEMFTARKMGKAFFVNSGSEANDTQVKLVWYYNNALGRPDKKKFIARAKSYHGSTLIAASLSGLPALHQKFDLPAPFVLHTDCPHYWRYHLPGETEEEFSTRLANNLEQLILKEGPETIAAFIAEPVMGAGGVIPPPSTYFEKVQAVVKKYDILFIADEVICAFGRLGTMFGCDKYNIKPDLVSLAKALSSAYLPIGAVLVSPEISEVIHDQSNKLGSFSHGFTYSGHPAACAVAIEALKIYKERNIVDQVNKIAPRFQDGIKAFSDSPIIGEIRGTGLILGTEFTDNKSPNDPFPPEWGIGAYFGAQCEKHGMLVRVAGDNIMMSPPYIISPGEVEELISIYGKALKETEKKVQELKSQRK

SEQ ID NO: 18010 - protein, 165 aa, Triticum aestivum
VMASSATTVAPFQGLKSTAGLPVSRRSSGSLGRVSNGGRIRCMQVWPIEGIKKFETLSYLPPLSTEALLKQVDYLIRSKWVPCLEFSKVGFVFREHNSSPGYYDGRYWTMWKLPMFGCTDATQVLNEVEEVKKEYPDAYVRVIGFDNLRQVQCVSFIAFRPPGCE

SEQ ID NO: 18011 - protein, 165 aa, Secale cereale
MMASSATTVAPFQGLKSTAGLPVSRRSSGSLGNVSNGGRIRCMQVWPIEGIKKFETLSYLPPLSTEALLKQVDYLIRSKWVPCLEFSKVGFVFREHNSSPGYYDGRYWTMWKLPMFGCTDATQVLNEVEEVKKEYPDAYVRVIGFDNLRQVQCVSFIAFRPPGCE

SEQ ID NO: 18012 - protein, 485 aa, Zea mays
MANIRALLVGLSRARGSLAEAGRCASTRPSILASLGAHYKIPMPARWFSSTGLPPHLVVGMPALSPTMNQGNIAKWRKQEGDKIEVGDVICEIETDKATLEFESLEEGYLAKILAPEGSKDVQVGQPIAVTVEDVEDIKSIPADTSSFGGEQKEEQSTESAPQNKVVNVSEQSSTVSRISPAAKLLIKEHGLDTSSLRASGPRGTLLKGDVLAALKSGINSSSTKEKKSPAQPSSQPTRDSQSQASSISQKDDTYEDIPNSQIRKVIAKRLLESKQTTPHLYLSKDVVLDPLLAFRNELKELHGIKVSVNDIIIKAVAIALRNVPEANAYWNNDKEETQKCDSVDISIAVATEKGLMTPIIRNADQKTISAISAEVKQLAEKARAGKLAPNEFQGGTFSISNLGMYPVDHFCAIINPPQSGILAVGRGNKVVEPVVDSDGTEKAAAVTKMSLTLSADHRVFDGQVGGKFFTELALNFSDIRRLLL

SEQ ID NO: 18013 - protein, 365 aa, Ustilago maydis 521
MSSTDALFEGWVGHDKSCIGNMKWETYTPKQWRETDIEIKIECCGVCASDLHTARSGWGPTRYPCVVGHEIVGTVARVGKQVSGFNIGDRVGVGAQSDSCKSCEACKNGDEPWCEKGIVGTYNGDYSSTDGSGFSMGGYAKYSRVPAHFAVHIPDSLPSTVAAPLMCGGVTVYNPLKTNGCGNEGVKRVGVVGIGGLGHFALIFAKALGAEKIVAISHTHSKEDLARKLGATNFIASGDEDPWSAHKRSLDLLILTNNNADMPITDYLTLVRPHGKVVAVGVPEEPCMPTPLPALAFSGVFLGGSLIGGPAIIKEMLELAAKQNLKPMIEQRDMKDANQVVKDMDAGKPRFRYVMVNKDYEPVKA

SEQ ID NO: 18014 - protein, 207 aa, Magnaporthe grisea 70-15
MTVMAGGALASRHLPASPRPAGRRAAPSSRRPHSTFVTWRESQLTPAAAEKGEETPLADYKGKVVLVVNTASKCGFTPQYAGLEALYKKITEKHPEDFTILGFPCNQFGGQEPGTDDDIQNFCQVNYGVTFPIMKKVDVNGDNADPLFKWLKEEMPGIMGLKRVKWNFEKFLIGRDGKVKGRWASTTKPESLEKDILKEIEAPKPSI

SEQ ID NO: 18015 - protein, 553 aa, uncultured bacterium
MLRLKERPAWKALEAHAFEMREARIADLFTNDPARAQEFSVAACGLLLDYSKNPLSRQTRRLLMTLAEEASLPAQIVAMFEGKRINVTEKRAVLHTALRNRSGRPLLLDGKDVMPEVRAVLSRVRDFSERVRGGIARGYSGLPFTDVVNIGIGGSDLGPLMVCSALRPYGSHDLLVHFVSNIDGAHLAATLSGLNPETTLFVVSSKTFTTQETLTNARSAREWLLTLLRPSGATEVAVQQHFAAVSSNLEATSKFGIAPDRVFGFWDWVGGRYSLWSAIGLPIALGIGFNRFDELLAGAYDMDEHFRTAPLESSMPVIAALTGIWNINFLGHRSQAVLPYAQDLAHFPAFLQQLDMESNGKRVDRSGAEVEYATGPVIWGAPGTNGQHAFFQHLHQGTQVTPADFIVAANGADRLPEHQEILLANCIAQSEALLRGKNADEVRAELKARGIVGDEAERLIPHRTFPGNRPSNTIVMRHLDPRSLGALIALYEHKVFVQGAIWSINSFDQWGVELGKQLASGVLEDLKAGKARSGHDASTARLIEYVLGNKEDK

SEQ ID NO: 18016 - protein, 236 aa, Zea mays
MMDCAGGRDPVEDFLLGGAGAGDDGDLIAVFCDGVAGDGGLGIEGIHGDACGFEQSNLGKRGRDEPCSSGPTSKACREKMRRDKLNDRFLELSSVMSHGKEAKLDKANILSDAARMVAQLRGEAEKLKESNEKLRENIKDLKEEKNELREEKVRLKVEKDRLEQQVKAMSVAPTGYVPHLPHPASYHPAAFTPFAPPPANKSAPIPAPFPGMAMWQWLPPTIVDTTQDPKLWPPNA

SEQ ID NO: 18017 - protein, 292 aa, Streptomyces narbonensis
MKGIVLAGGSGTRLHPATSVISKQILPVYNKPMIYYPLSVLMLGGIREIQIISTPQHIELFQSLLGNGRHLGIELDYAVQKEPAGIADALLVGAGHIGDDTCALILGDNIFHGPGLYSLLRDSIARLDGCVLFGYPVKDPERYGVAEVDATGRLTGLVEKPEKPRSHLAVTGLYLYDNDVVDIAKNIRPSPRGELEITDVNRVYLERGRAELVDLGRGFAWLDTGTHDSLLRAAQYVQVLEERQGVWIAGLEEIAFRMGFIDAEACHSLGEGLSRTEYGSYLMEIAGREGAP

SEQ ID NO: 18018 - protein, 406 aa, Bordetella bronchiseptica RB50
MAITDVLVPQLSESVSEATLLTWKKQAGAAVEADEILIEIETDKVVLEVPAPSSGVLSEIVMGDGSTVTSGEVIARIDTAAKAAAAPAAAAEAPAAAAAAAPAAAAPAAASSTASGVASPAAAKILAEKGVDAASVAGTGRDGRVTKGDALAAGNAPAAKAAAPVAPPTLSLDGRPEQRVPMSRLRARIAERLLQSQAENAILTTFNEVNMQAVMDLRARYKDKFEKEHGVKLGFMSFFVKAAVAALKKYPVLNASVDGKDIIYHGYFDIGIAVGTPRGLVVPILRNADQLTIAEIEKTIADFGKRAADGKLGIEEMTGGTFSISNGGVFGSMLSTPIINPPQAAILGIHATKERPVVENGQIVIRPINYLAMSYDHRIIDGREAVLGLVAMKEALEDPQRLLLDL

SEQ ID NO: 18019 - protein, 486 aa, Zea mays
  unsure (1)..(486): unsure at all Xaa locations
MAAWSSPPSLRHLLMLRPCLPLSPTCLAGSLRRHIHSRCRLFSSAASSSTLTHGDIASTHGDADGVVEVNPPRGTRDFPPEDMRLRTWLFDQFREVSRLMAFEEVDFPVLESEALFIRKAXGEEITQQLYNFEDKGGRRVVLRPEITPSLARLVIKQGKSVSLPLKWFTIGQCWRYERMTRGRRREHYQWNMDIFGVPKVRAEAELLHAIVLLFQRLGITSSDVGIRVSSRKVLQAVLNMYSIPEHLFTQVCVIVDKLGKMTXKEIEKELVSTGLSSEAVQGIIDVLSIKSLSKLEEVLGSDVEAVADLKKLFSFAEQYGYADWICFDASVVRGLAYYTGIVFEAFDREGKLRAICGGGRYDRLLSTFGSEDIPACGFGFGDAVIVELLKEKGLLPDMSRQIDDIVFPLDEELEGPASSIASSLRKKGRSVDLVEDKRLKWVFKHAERINASRLILVGNSEWERGMVRVKVLSTREEFEVKTSELE

SEQ ID NO: 18020 - protein, 414 aa, GIBBERELLA ZEAE PH-1
MVSTTNFPAEVVPQAPEDPLFGLAREYKADDSPNKIDLGIGAYRDENAKPWVLPVVKKADEILRNDPELNHEYAPIAGIASFTSKAAELVFGPDSSAIQDKRSTTLQTISGTGAVHLGALFLAKFYKGNQTVYLSNPTWANHHQIFKNVGMSIDTYPYFHKETKGLDFEGFKKTLQSAPEGSVFVLHACAHNPTGVDPTQDQWTEIASIMKEKNHFPFFDTAYQGFASGDLVKDAWAIRYFVDQGFELVVAQSFAKNFGLYGERAGCFHAVTSPAPEASNTITRIGSQLAILQRSEISNPPLYGARIVSTVLNDRDLFAEWEENLRTMSGRIISMRDVLRAKLEELETPGTWNHITDQIGMFSFTGLSEKQVLQLREEFHVYMTKNGRISMAGLNENNVEYFAKAVDKVVRDAA

SEQ ID NO: 18021 - protein, 325 aa, Streptomyces sp. JP95
MRIVRHYEHGAPSVLRLEEVEKPQPGPGQVLIRAEAIGVTFAEVQRRQGIPIGGHAGLPGAPGGDVAGTVEALGEGVTGFAVGDRVVGDVDRDAYADYVVTGTDWLIKIPQDLDAAAATLLPSPAQTAYHAIKEAGRLRPGQSIVIDAASGGVGHLAVQIAKALGAGKVIATASTQAKLDFARELGADVTVNYTDEDWTDQVLAATDGRGADIVLETVGGDVLLKSLGITAQFGTLVFYGSASGDIPDLPTLALSRMKNVAGFSLYAMLYNKQDAVAEGQRHLLDLIASGEVKPVVHDRLPLDEAVKAHELLEARAQLGKIVLVP

SEQ ID NO: 18022 - protein, 165 aa, Hordeum vulgare subsp. vulgare
VMASSATTVAPFQGLKSTAGLPVSRRSSASLGSVSNGGRIRCMQVWPIEGIKKFETLSYLPPLTTEALLKQVDYLIRSKWVPCLEFSKVGFVFREHNSSPGYYDGRYWTMWKLPMFGCTDATQVLNEVEEVKKEYPDAYVRIIGFDNLRQVQCVSFIAFRPPGCE

SEQ ID NO: 18023 - protein, 165 aa, Avena sativa
VTASSATSVAPFQGLKSTAGLPVGRRSNAGLGNVSNGGRIRCMQVWPIEGIKKFETLSYLPPLSEEALLKQIDFLIRSKWVPCLEFSKVGFIFREHGSTPGYYDGRYWTMWKLPMFGCTDASQVIKEVEEVKKEYPDAYVRIIGFDNIRQVQCVSFIAFKPPGCE

SEQ ID NO: 18024 - protein, 405 aa, Streptococcus pneumoniae
MNCIESYQKWLNVPDLPAYLKDELLSMDDKTKEDAFYTNLEFGTAGMRGYIGAGTNRINIYVVRQAHRSLAKLVESKGETAKKAGVAIAYDSRHFSPEFAFESAQVLAAHGIKSYVFESLRPTPELSFAVRHLGAFAGIMVTASHTPAPFNGYKVYGSDGGQMLPADADALTDYIRAIDNPFAVVLADLEEAKSTGLIEVIGETLDAAYLEEVKSVNINQDLIDQYGRDMQIVYTPLHGTGEMLARRALAQAGFESVQVVEAQAKPDPDFSTVASPNPESQAAFALAEELGRQVDADVLVATDPDADRLGVEIRQADGSYWNLSGNQIGALIAKYILEAHKQAGTLPKNAALAKSIVSTELVTKIAESYGATMFNVLTGFKFIAEKIQEFEEKHNHTYMFGFEES

SEQ ID NO: 18025 - protein, 216 aa, Oryza sativa
MAHRVDNEYDYLFKIVLIGDSGVGKSNILSRFTRNEFFLESKSTIGVEFATRTLQIEGKTIKAQIWDTAGQERYRAITSAYYRGAVGALLVFDITKRQTFDNVQRWLRELRDHADANIVVMMVGNKSDLNHLRSVPEEDGHAFSEKEGLSFLETSALEAINVEKAFHTVLSEIHQIVSKKALAAQESASTNGRSMQGTTINVAEAPAATKGSCCSS

SEQ ID NO: 18026 - protein, 584 aa, Glycine max
  unsure (1)..(584): unsure at all Xaa locations
MCGILAVLGCSDDSRAKRVRVLEXLSRRLKHRGPDWSGLHQHGDCFLAHQRLAIVDPASGDQPLFNEDKSVIVTVNGEIYNHEELRKQLPNHKFRTGCDCDVIAHLYEEHGEDFVDMLDGIFSFVLLDTRDNSFIVARDAIGVTSLYIGWGLDGSVWISSEMKGLNDDCEHFECFPPGHLYSSKERGFRRWYNPPWFSEATPSTPYDPLVLRHTFEQAVIKRLMTDVPFGVLLSGGLDSSLVASVTSRYLANTKAAEQWGXKLHSFCVGLEGSPDLKAAKEVADYLGTVHHEFTFTVQDGIDAIEDVIYHVETYDVTTIRASTPMFLMSRKIKSLGVKWVISGEGSDEIFGGYLYFHKAPNKEEFHRETCRKIKALHQYDCLRANKSTFAWGLEARVPFLDKAFINTAMSIDPESKMIKRDEGRIEKWILRRAFDDEEHPYLPKHILYRQKEQFSDGVGYSWIDGLKAHAAKHVTDKMMLNAGNIYPHNTPTTKEAYYYRMIFERFFPQNSARLTVPGGASVACSTAXKAVEWDAAWSNNLDPSGRAALGVHISAYENQNNNKGVEIEKIIPMDAAPLGVAIQG

SEQ ID NO: 18027 - protein, 165 aa, Aegilops speltoides
VMASSATTVAPFQGLKSTAGLPVSRRSSASLGSVSNGGRIRCMQVWPIEGIKKFETLSYLPPLSTEALLKQVDYLIRSKWVPCLEFSKVGFVFREHNSSPGYYDGRYWTMWKLPMFGCTDATQVLSEVEEVKKEYPDAYVRVIGFDNLRQVQCVSFIAFRPPGCE

SEQ ID NO: 18028 - protein, 154 aa, Aegilops speltoides
VMASSATTVAPFQGLKSTAGLPVGRRSSGSLGSVSNGGRIRCMQVWPIEGIKKFETLSYLPPLSTEALLKQVDYLIRSKWVPCLEFSKVGFVFREHNSSPGYYDGRYWTMWKLPMFGCTDATQVLSEVEEVKKEYPDAYVRVIGFDNLRQVQCV

SEQ ID NO: 18029 - protein, 392 aa, Burkholderia fungorum LB400
MKYSNLVERLQGRRTSAWEIHRVAQQAAANGEDVIVLSVGDPDFATPAPIVERAVEALRGGDTHYSAVSGREPVRAAIAEEHARTTGCAVSAANVILTAGAQNGVFASSLCLLEAGDEVIVPEPMYLTYEACVRAAGATLVAVPVDRARAFHVDCEALEAAVTSRTKAIFFATPCNPTGVVMPRADLERIARIACEHDLWVLSDEVYAELTFERGHLSIAALPGMAERTVTLGSLSKSHAMAGWRVGWAIGPAELIEHMGRLALAMLYGLPGFIQQAALTALQNKAQIAAGMREIYRRRRDVVFERLQRVPGLRCVLPEAGMFMMVDVSGTGLDTVDFTWQLFRAQGVSLLDASAFGETANGFVRLGFVVEEARLIDACERIAAFVRALPAR

SEQ ID NO: 18030 - protein, 506 aa, Yersinia pseudotuberculosis
MRYAHPGTPEALVSFKAIYGNYIGGEFIEPLGGQYFMNTSPVNGSDIAQFPRSDARDIDAALDAAHQAADAWGKTSVQHRSNLLLQMADRIEANLEYLAVAESWDNGKPIRETLNADLPLAVDHFRYFAGCLRAQEGGVAEIDEKTVAYHFHEPLGVVGQIIPWNFPLLMAAWKLAPALAAGNCVVLKPAEQTPLGITLLLELVGDIFPAGVINVVQGYGREAGEALARSKRIAKIAFTGSTPVGRHIMACAAENIIPCTVELGGKSPNIYFADVMEAEPEFIDKAVEGLVLGFFNQGEVCTCPSRALIHESIYAPFMARVMTKVANIRRGDPLDTETMIGAQASRQQFDKILSYIDIARKEGGEILTGGARATITPALDSGFYIQPTLIKGDNLMRCFQEEIFGPVIGVTTFKDEAEALAIANQTQFGLGAGIWTRDAHLAYRMGRGIKAGRVWTNCYHVYPAHAAFGGYKQSGVGRETHKMALNQYQQTKNLLVSYDTAPLGLF

SEQ ID NO: 18031 - protein, 369 aa, Triticum aestivum
MITLGVPTIVQAVILIVLAVLICWRLRKAKQDDEWEIKCGLAAFTYKDLVTATEGFSNKMLLGKGGFGRVYKGVLPTTTQHVAIKRVSPESKQGKKEFMAEIAILGHVRHRNLVQLLGYCRYKQELLLVYDYMANGSLDRYLYDKTTPTLDWAQRLRIIKGVASGLYYLHEDWEQVIIHRDIKASNVLLDDDMNGRLGDFGLARLHDHGVDAHTTLVAGTWGYIAPELARLGKATKATDVFAFGVFTIEVVCGRKPIGPANTSGGLLALADWVRGTWQGGSIVDAVDPELKDYDRAEVELVLKLGLLCSHSLPRSRPCMRLVMLYLEGGARLPNFHPASLVADGHEDEETDHKALSTSAATTVTILSGR

SEQ ID NO: 18032 - protein, 397 aa, Bacteroides thetaiotaomicron VPI-5482
MNQLSDRLNSLSPSATLAMSQKSNELKAQGIDVINLSVGEPDFNTPDHIKEAAKKAIDDNFSRYSPVPGYPALRNAIVEKLKKENGLEYTAAQISCANGAKQSVCNAILVLVNPGDEVIVPAPYWVSYPEMVKMAEGTPVIVSAGIEQDFKITPKQLEAAITPKTKALILCSPSNPTGSVYSKEELAGLAAVLAKYPQVVVIADEIYEHINYIGAHQSIAQFPEMKERTVIVNGVSKAYAMTGWRIGFIAGPEWIVKACNKLQGQYTSGPCSVSQKAAEAAYVGTQEPVKEMQKAFERRRDLIVKLAKEVPGFEVNVPQGAFYLFPKCSYFFGKSNGERKIENSDDLAMYLLEDAHVACVGGTSFGAPECIRMSYATSDENIVEAIRRIKEALAKLK

SEQ ID NO: 18033 - protein, 138 aa, Shorea macroptera
EKNIPVLLGLLSIWNVSFLGYPARAILPYSQALEKFAPHIQQVSMESNGKGVSIDGMPLPYEAGEIDFGEPGTNGQHSFYQLIHQGRVIPCDFIGSAKSQQPIHLKGEVVSNHDELMSNFFAQPDALAFGKTPEELHR

SEQ ID NO: 18034 - protein, 429 aa, Synechocystis sp. WH 8501
MKKVLAIILGGGAGTRLYPLTKLRAKPAVPLAGKYRLIDIPISNCINAEILKIYVLTQFNSASLNRHLTRTYNFTGFSDGFVEVLAAQQTAENPSWFQGTADAVRQYLWLFDEWDVDQYLILSGDHLYRMDYSDFVRRHQETGADITLSVVPIDERRASSFGLMKIDDSGRVVDFSEKPKGDALKQMQVDTSILGLNPEQAKESPYIASMGIYVFNKKALTDLLRNNPEQTDFGKEIIPGSAKDYNLQAYLFKGYWEDIGTIEAFYEANLALNRQPLPRFSFYNEKAPIYTRARNLPPTKVLNCNITESMISEGCMIKDCRINNSVLGIRSRIESDCVVEDSLLMGADFYESLDTRQSLLDQGKIPVGIGKGSTIRRAIVDKNARIGTNVNIVNKENIEESNREDDGFYIRNGIVVVIKNAVIPDGTVI

SEQ ID NO: 18035 - protein, 184 aa, Zea mays
  unsure (1)..(184): unsure at all Xaa locations
MASSMLSSATVVSSPAQAAMVAPFTGLKSSAAFPVTRKTDTDITSMASNGGRVNCMKVWPPVGKKKFETLSYLPDLTDVELSKEXVDYLXFRNKWIPCVXEFELEHGFVYREHGNPPGYYDGRYWNNVXNFPWFRCTDSAXQVLKEVXEGKKEYPKRFLXILGFQKKRQGPGFFFFPQKPPNFR

SEQ ID NO: 18036 - protein, 163 aa, Zea mays
  unsure (1)..(163): unsure at all Xaa locations
ITMDPTKFRPSSSHDTTXVTTTNAGAPVGNDNEALTVGPRGAILLEDYHLIEKVAHFARERMPQRVGHARGAYDKGLYECTHDETALTCADLLRALGVRTXVIVRLSTAIHERGCPETIRDPRGFPVRLYTREDNWDLVGNNFPVFFIRDGIKFPDVIHAVKP

SEQ ID NO: 18037 - protein, 625 aa, Streptomyces sp. JP95
MSAIAGWVDFERDLSPQAATVETMAAALAHRGPDGRGVWAEGHAALAHRRLALLDLTETGAQPAVHTTEGGAAVAVLTLDGALTNHTELRARLAAKGHRFTGRGDGETALHAYLEWGADFLTRLEGLFAIAVWDVRRQELLLARDRLGVKPLSYHPTPTGVLFGSEPKAILAHPDVDAVVDADGLRELFAHSRKPGTGVFRGMREVVPGHALIVRRPGSREQRYWSLPAREHTDSLDTTVATVRGLLADAVASHTRADAPVGAMLSGGIDSSALSALAHRDLTAAGSGPLRTFSVNFTGYTENFEPHPTMRSTPDAPFAALASRHIGSRHTEFLLDTAALTDPGVHTAALRSQDAPSPLGDMDVSLLRFFARLREEGFAAVLSGETADEVFNGYFWAYDPKHSNSQTFPWVSFERGHDAAAGGLGTSMIDRELRKRLDFLGYADQHYRDALTEVPHVDGDTAAERRAREVTYLALTRWAPTHLDRADRMSMAHGVQLRPPFCDRALVEYVYNVPAAMKRVDGVEKSLLRSAVADLLPDEVLHRRKSAYPTTQEAAYGDFVRQRFAELAADRDAAVAELLDTTATAEAVAADGSPQGAFAWVERAGMEMALQLDTWLTDYRVDLRL

SEQ ID NO: 18038 - protein, 229 aa, Zea mays
MCGGAIILDYIPARRRVSAADFWPDSEADAEDSDSHAPDPERAPRPRGKAKRGRKNQYRGIRQRPWGKWAAEIRDPVKGVRVWLGTYPTAEAAARAYDRAARRIRGAKAKVNFPNETSSSSVTAPTAASGAAAAAQAPAVFLPAPKVEARAQVSDEVKELSEELMAYENYMNFLGVPYMEGGNAAVSATTAAAAAAAVPEEAQVPAPAPAGLWSFEDYYYPPSLSLFTE

SEQ ID NO: 18039 - protein, 67 aa, Glycine max
MASSVISAPAGTTVNRAGAGMVAPFTGLKSMAGCPSRRTKNDVSSIASSGGRVQCMQVWPPVGREEV

SEQ ID NO: 18040 - protein, 100 aa, Zea mays
AVFLDHRKEKSLGLLTQHFLKLFLTMEVVETISLDEAARLLLGEGHAESNMRTKVRRLYDIANVLSSLNFIEKTQQVDTRKPVFRWLGQAKRKQENNAAG

SEQ ID NO: 18041 - protein, 427 aa, Bradyrhizobium japonicum USDA 110
MVKPFPSKTHIGNHMLHPETLMLTYGYDPQLSEGAIKPPVFLTSTFVFRTAEDGQDFFDFVAGRREPPEGMGAGLVYSRFNHPNSEIVEDRLAVYERTESCALFSSGMAAIATTILAFVRPGDVILHSQPLYGGTETLLTNTLARLSIGAVGFADGIDEAAVKQASEEAMGKGRVSMILIETPANPTNGLVDVAMIRRIADAIGKAQGHTPIIACDNTLLGPVFQRPIEHGADLSLYSLTKYVGGHSDLIAGAALGAKAIMKGIKALRGAIGTQLDPHSCWMINRSLETLSLRMEKADANARLVAAYLRDHPKVAKVHYLGHHEEASPAGRVFARQCLGAGSTFSFDIAGGKEAAVKFLNALQILKLAVSLGGTESLASLPATMTHSGVPADIRQKIGVLDSTIRLSIGIENPSDLIADLAQALNAA

SEQ ID NO: 18042 - protein, 267 aa, Zea mays
MDPKMTEVTQMFARFKAAYTRNDLDACVTLLSQLKVHLTKFPSLPPSFEQTPNAVEELKLARDIYEHAVVLSVKLEDQDAFERDFCQLKPYYMDTCGIIPPSPEEYPILGLNLLRLLVQNRIAEFHTELELLPVKALEHPCIKHAVELEQSFMEGAYNRVLSARQAVPHETYVYFMDLLAKTVRDEIAGCSEKGYDSLSVSDAKQMLMFSSDQDLHEYITEEHPEWEFKNGAVFFQKAKESQPYKEIPSLQLINQTLSYARELERIV

SEQ ID NO: 18043 - protein, 146 aa, Oryza sativa
  unsure (1)..(146): unsure at all Xaa locations
MRGVGGPLLTIGDLLSDLAVDGAPTSPAGRCPXPSSPSSAGQQAEEADPSELNRLFGEHYDNLMKALQENDPSWPSLMLKLCTALKTADKLVSCASIDAEQLLQKVELLERLLVRGDRAVTAIVEELQRSRPSEDSHSSKSKPSGK

SEQ ID NO: 18044 - protein, 174 aa, Arabidopsis thaliana
MAYEKVNELNLKDTELCLGLPGRTEKIKEEQEVSCVKINNKRLFEETRDEEESTPPTKTQIVGWPPVRSSRKNNNSVSYVKVSMDGAPYLRKIDLKTYKNYPELLKALENMFKVMIGEYCEREGYKGSGFVPTYEDKDGDWMLVGDVPWDMFSSSCKRLRIMKGSDAPALDSSL

SEQ ID NO: 18045 - protein, 347 aa, Rhodopseudomonas palustris CGA009
MPAFPLNAWYAAAWDADIKHALFPRTICGKHVVMYRKADGTVAALEDACWHRLVPLSKGRLEGDTVVCGYHGLKFNPQGRCTYMPSQETINPSACVRSYPVVERHRFVWLWMGDPVLADPALVPDMHWNDDPAWAGDGKTIYAKCDWRLVVDNLMDLTHETYVHGSSIGNEAVAEAPFDVTHGDRTVTVTRWMKGIEPPPFWAAQLGKPGLVDRWQIIRFEAPGTVTIDVGVAPAGTRAPEGDRSQGVNGFVLNTMTPETDTTCHYFWAFVRNYRLSEQRLTTEIREGVSGIFREDEIILEAQQRAMLENPDRVFYNLNIDAGAMWSRKLIDRMVAQESAPKLQAAE

SEQ ID NO: 18046 - protein, 567 aa, Zea mays
MASAALICGTEQWKALQAHVGAIQKTHLRDLMADADRCKAMTAEYEGIFLDYSRQQATGETMEKLLKLADAAKLKEKIEKMFKGEKINSTENRSVLHVALRAPRDAVINSDGVNVVPEVWSVKDKIKQFSETFRSGSWVGATGKPLTNVVSVGIGGSFLGPLFVHTALQTDPEAAECAKGRQLRFLANVDPVDVARSIKDLDPETTLVVVVSKTFTTAETMLNARTLKEWIVSSLGPQAVAKHMIAVSTNLKLVKEFGIDPNNAFAFWDWVGGRYSVCSAVGVLPLSLQYGFPIVQKFLEGASSIDNHFYSSSFEKNIPVLLGLLSVWNVSFLGYPARAILPYSQALEKLAPHIQQLSMESNGKGVSIDGAQLSFETGEIDFGEPGTNGQHSFYQLIHQGRVIPCDFIGVVKSQQPVYLKGETVSNHDELMSNFFAQPDALAYGKTPEQLHSEKVPENLIPHKTFKGNRPSLSLLLPTLSAYEVGQLLSIYEHRIAVQGFIWGINSFDQWGVELGKSLASQVRKQLHGTRMEGKPVEGFNHSTSSLLARYLAVKPSTPYDTTVLPKV

SEQ ID NO: 18047 - protein, 492 aa, Oryza sativa (japonica cultivar-group)
MDPYKHRPSSGSNSTFWTTNSGAPVWNNNSALTVGERGPILLEDYHLIEKLAQFDRERIPERVVHARGASAKGFFEVTHDISHLTCADFLRAPGVQTPVIVRFSTVVHERGSPETLREPRGFAVKFYTREGNFDLVGNNMPVFFIRDGMKFPDMVHAFKPSPKTNMQENWRIVDFFSHHPESLHMFSFLFDDVGIPLNHRHMEGFGVNTYTLINKDGKPHLVKFHWKPTCGVKCLLDDEAVTVGGTCHSHATKDLTDSIAAGNYPEWKLYIQTIDPDHEDRFDFDPLDVTKTWPEDIIPLQPVGRMVLNKNIDNFFAENEQLAFCPAIIVPGIHYSDDKLLQTRIFSYADTQRHRLGPNYLMLPVNAPKCAYHNNHHDGSMNFMHRDEEVNYFPSRFDAARHAEKVPIPPRVLTGCREKCVIDKENNFQQAGERYRSFDPARQDRFLQRWVDALSDPRITHELRGIWISYWSQCDASLGQKLASRLNLKPNM

SEQ ID NO: 18048 - protein, 356 aa, Oryza sativa
MGVLCFGASNILLCAEDSSSVLGLGGFGGGGGEVAAELGCGGGGGFDFFGFGGGAVFPIDSDEFVALLVEKEMDHQPQRGYLEKLELGGLECSWRKDAIDWICKVHSYYNFGPLSLYLAVNYLDRFLSSFNLPHDESWMQQLLSVSCLSLATKMEETVVPLPMDLQVFDAEYVFEARHIKRMELIVMKTLKWRLQAVTPFSFIGYFLDKFNEGKPPSYTLASWCSDLTVGTLKDSRFLSFRPSEIAAAVVLAVLAENQFLVFNSALGESEIPVNKEMVMRCYELMVEKALVKKIRNSNASSSVPHSPITVLDAACFSFRSDDTTLGSSQSNSNNKDYNSQDSAPASKRRRLNTTPI

SEQ ID NO: 18049 - protein, 187 aa, Methylococcus capsulatus str. Bath
MNRLEEIRQVETAAERLYSEAEVENAIVRLAAEITEAIADRNPIVMTILTGGIVFAGKLLTHLRFPLELDAIGATRYRGRTAGGVTHWRLEPGLSLQGRTVLLVDDILDEGVTLAEVREHCLDRGAERVLIAVLVDKDLGREKPCRADFVGLVTENRYLFGYGLDYKGYLRNAAGIYACPQIESQGT

SEQ ID NO: 18050 - protein, 529 aa, Zea mays
GTPPRSAGHSHGRARKKIQAGSTRPRAGGDPPPLFPRPHRSRLARRLRLRPFVGRNRKTTERAAAPALPPVSIPPKARKGGPRTSAFSCPLAIAAAHEPPAPCCPALYGSAPTSPRGARKRSRQKPPPRRARRSGMASTVTFNPVSAQAALIQKPRNLGAISYAGLKMPSFGSESSFLGWNASLRAAVTPRIVPKAKSGSQISPQASYKVAVLGAAGGIGQPLGLLIKMSPLVSELHLYDIANVKGVAADLSHCNTPAQVLDFTGPSELANCLKGVDVVVIPAGVPRKPGMTRDDLFNINASIVKSLVEAVADSCPEAFIHIISNPVNSTVPIAAEVLKQKGVYNPKKLFGVTTLDVVRANTFVAQKKNLKLIDVDVPVVGGHAGITILPLLSKTRPSVTFTDEEAEELTKRIQNAGTEVVEAKAGAGSATLSMAYAAARFVESSLRALAGDPDVYECTFIQSEATDLPFFASRVKLGKSGVESIVSADLEGVTECEAKALDALKAELKGSIEKGVAFASKQQEAAASV

SEQ ID NO: 18051 - protein, 408 aa, Streptomyces coelicolor A3(2)
MSAAIPPTERRVSARVGAISESATLAVDAKAKALKAAGRPVIGFGAGEPDFPTPDYIVEAAVEACKNPKFHRYTPAGGLPELKAAIAAKTLRDSGYEVDPSQILVTNGGKQAIYEAFAAILDPGDEVIVPAPYWTTYPESIRLAGGVPVEVVADETTGYRVTVEQLEAARTEKTKVVLFVSPSNPTGAVYGEAETEAIGRWAVEHGLWVLTDEIYEHLVYGDAVSVSLPALLPELRDKCIVVNGVAKTYAMTGWRVGWVIGPKDVVKAATNLQSHATSNVANVSQAAALAAVSGNLDAVAKMREAFDRRRQTIVRMLNEIDGVLCPEPEGAFYAYPSVKALLGKEIRGKRPQDSVELAALILEEAEVAVVPGEAFGTPGYLRLSYALGDEDLVEGVSRIQKLLAEARD

SEQ ID NO: 18052 - protein, 158 aa, Glycine max
  unsure (1)..(158): unsure at all Xaa locations
MDSSLISFPAVTTVNRAGAGMVAPFTGLKYMAGFPTIKTNNDITSIASNGGRVQCMHVWPPLGKKKLETLYYLADLDDAQLLEEVEYLLRKGWIPCLXIXLEHGFLYREHNRLPXYYDGRYCTMCKLPMXCCTDASQVSEELQEATTAYSSCFMRIIA

SEQ ID NO: 18053 - protein, 181 aa, Exiguobacterium sp. 255-15
MGIHPVMEIVIKEKLVSESELAAKVKELAVAIERDAAGRQIVLVVVLKGSMVFAADLMREIKGSVQIDTVACSSYGAKTVSSGRVQLKKDLDLDVEGKYVVVIEDIIDTGHTLSFLCEHMKLHKPGVLKICTLLDKPARREVPLDADYVGFEIPDYFVVGYGIDCAEEYRNLPYVGWVETD

SEQ ID NO: 18054 - protein, 300 aa, Petunia x hybrida
MEKHKSCKLCFRKFANGRALGGHMRSHMMNLYVQKQQMTDEMEYSIPSSSWSSGEVAAGDADDSGIVLPDKESETESSRNQAPFRKSKRSRKSRIVKVKEYSSLVDTEPVSSISENSPEEDVAHCLMMLSRDKWIKQEYDDYSDDDEEEEKSEDSGELVKVTNSTKIKGSRGKYRCETCNKVFRSYQALGGHRASHKKIKVSSSSTNQVENVVEEKIHECPVCFRVFSSGQALGGHKRTHVIGAAASVNVPVFEKPEFSRTGGSLIDLNLPPPMEDDDEIISHVEVSTVSEAELVNPIKY

SEQ ID NO: 18055 - protein, 172 aa, Ralstonia eutropha JMP134
MADKAKRKDSDKEKKAVKSASDRIEVRQSGVHGKGVYAIAPIAEGERVIEYKGEHISWKKALDRHPHDPNDPNHTFYFSLDDGSVIDAKFGGNRARWINHACTPNCEAREKKGRVFIHALRDIATGEELFYDYGLVIDARYTKKLKKEFECRCGSPDCRGTMLAPKGKTSSK

SEQ ID NO: 18056 - protein, 253 aa, Oceanobacillus iheyensis HTE831
MKLKDKVAIVTGAASGMGKAIATLYASEGAKVIVADLNEEGAQSVVEEITSNNGVATAIKVNIAQKEDIDKMIDTAVDTYGTLDILVNNAGIMDGFEAVGDVEDDRWDLIFDINTKGVMRAMRKAIPIFLEKESGVIVNTASTGGLNGAHAGAAYGASKHAVIGLTKNTGYMYANSGIRCNAIAPGGVATNITSSLKGFNEFGFGRTKAVQGVMPRVGQPEEIAQVALFLASDDASFVNGTVVTADGGWTAAF

SEQ ID NO: 18057 - protein, 425 aa, Shewanella oneidensis MR-1
MAKQIQAIRGMNDILPTQSPLWQKVEAVLRSSVAAYGYSEIRTPIVENTDLFKRSIGEVTDIVEKEMYTFEDRNGDSLTLRPEGTASTVRAGNEHGLLYNQEQRLWYMGPMFRHERPQKGRYRQFHQFGVEIYGIGSADIDAEVLMLSARLWEKLGITEHVTLELNTLGDPAERAAYREALIAFLEQHKDKLDEDSQRRMYSNPLRVLDSKDPQVQSILADAPALMDYLGEESSQHFAQLRELLDAVGIQYRVNSRLVRGLDYYNRTVFEWVTNSLGSQGTVLAGGRYDGLVAQLGGKETPAVGFAMGLERIVLLLETLALTQDIPAEVDVYVAAMGDNCLVEAIKVAQELRSALPTLRVMSHCGGGNLKKQMKRADKSGAQVALLIGEEELAEGVVTVKYLRNDNEQQRVARNALSAFLAELTK

SEQ ID NO: 18058 - protein, 158 aa, Rhodopseudomonas palustris CGA009
MASIYDFTAKSLVGKDVSLKQFEGKVLLIVNTASACGFTPQYKGLEALQEKYGPRGFSVLGFPCNQFGAQEPGDEAQIAQFCSTNYGVTFPMFAKIDVNGAGAHPLYKFLKDEKGGLLGSAIKWNFTKFLVDRSGRVVSRHAPTTTPEALSKEIETLL

SEQ ID NO: 18059 - protein, 200 aa, Vibrio harveyi
DPRETVTAQQADLHLPIKNDGDVSLFNGLLKFLIEQQCIDSEYIHSYTDGFDALTEEVSDLRYDVTNLTSSIGISEEKLTTFFQWFAQSSTAITLFCQGVNQAENGVDKGNAIINAHLASGKIAKSGCGPFSITGQPNAMGGREVGGLANQLAVHRAFDAGSIKQVQAFWDSPEIATQPGLKAVDLFEAVERSEIKVLWI

SEQ ID NO: 18060 - protein, 257 aa, Rhodopseudomonas palustris CGA009
MRLSGKTALITGGNSGIGLATAKLFVTEGARVTITGRDRARLDAAARELGAQALAVEADVTDVAAIENAVARAAERFGKLDIVFANAGIPGATPLGGTSLAAFEQVIRTNLTAVFFTVQAALPYLNDGASIILNGSVISVLGNPGFAAYAASKAGLRGMARVMASELSPRNIRVNVVAPGGARTPIWKDTAPTDQAMAVLEKRIAAATPLGRIAEPEHIAKTVLFLASDDAAHIQSAEIFVDGGATGSPAGVPAFRS

SEQ ID NO: 18061 - protein, 81 aa, Oryza longistaminata
YVKFHWKPTCGVSCLMDDEATLVGGKNHSHATQDLYDSIAAGNFPEWKLFVQVIDPEEEERFDFDPLDDTKTWPEEEVPLR

SEQ ID NO: 18062 - protein, 473 aa, Staphylococcus aureus subsp. aureus MW2
MSEKQYDLVVLGGGTAGYVAAIRASQLGKKVAIVERQLLGGTCLHKGCIPTKSLLKSAEVFQTVKQAAMFGVDVKDANVNFENMLARKEDIINQMYQGVKHLMQHNHIDIYNGTGRILGTSIFSPQSGTISVEYEDGESDLLPNQFVLIATGSSPAELPFLSFDHDKILSSDDILSLKTLPSSIGIIGGGVIGMEFASLMIDLGVDVTVIEAGERILPTESKQASQLLKKSLSARGVKFYEGIKLSENDINVNEDGVTFEISSDIIKVDKVLLSIGRKPNTSDIGLNNTKIKLSTSGHILTNEFQQTEDKHIYAAGDCIGKLQLAHVGSKEGVVAVDHMFEGNPIPVNYNMMPKCIYSQPEIASIGLNIEQAKAEGMKVKSFKVPFKAIGKAVIDSHDTNEGYSEMVIDQSTEEIVGINMIGPHVTELINEASLLQFMNGSALELGLTTHAHPSISEVLMELGLKAESRAIHV

SEQ ID NO: 18063 - protein, 90 aa, Oryza longistaminata
DAKARYVKFHWKPTCGVSCLMDDEATLVGGKNHSHATQDLYDSIAAGNFPEWKLFVQVIDPEEEERFDFDPLDDTKTWPEEEVPLRPVGR

SEQ ID NO: 18064 - protein, 89 aa, Oryza longistaminata
DAKARYVKFHWKPTCGVSCLMDDEATLVGGKNHSHATQDLYDSIAAGNFPEWKLFVQVIDPEEEERFDFDPLDDTKTWPEEEVPLRPVG

SEQ ID NO: 18065 - protein, 179 aa, Eremothecium gossypii
MSEQNQTVVLVSVEGERFTVERKIAERSLLLKNYLNDMHDNAFRDESDDEADAADDDDRIVMPVPNVRSSVLQKVIEWAEHHRDSNFPDEEDDDSRKSAPVDAWDREFLKVDQEMLYEIILAANYLNIKPLLDAGCKVVAEMIRNRSPEEIRRTFNIVNDFTPEEEAAIRRENEWAEDR

SEQ ID NO: 18066 - protein, 615 aa, Zea mays
MRPRGGPARTRPLPRTAASFSFARRHPIRSSPPLRRSLSPRVVTRPRPPPSLSSFPLLKPPVRQPQWIFAPHLHPLAMAPPPASPADSAPDPRPTASAPVPITVPSPRDHAHHHHLVDRRDTPRGRAWEPERNRRGEAMDGAAAVKLVPGEAGYVLEDVPHVSDYLPDLPTYSNPLQDNPAYSVVKQYFVNPDDTVCQKIVVHKDGPRGNHFRRAGPRQKVYFEPDEVHACIVTCGGLCPGLNTVIREIVCGLSDMYGVTKILGIQGGYRGFYARNTITLTPKSVNDIHKRGGTILGSSRGGHDTVKIVDSIQDRDINQVYVIGGDGTQRGAGVIFEEVRRRGLKVSVAGIPKTIDNDIPVIDKSFGFDTAVEEAQRAINAAHVEAVSAENGIGLVKLMGRHSGFIAHYATLASRDVDCCLIPESPFYLEGEGGLFRYIEKRLKDNGHMVIVVAEGAGQKLIAETMQSIGKDASGNELLLDVGLWLSQKINEHFKKNKMTINLKYIDPTYMIRAIPSNASDNVYCTLLAHSVVHGAMAGYTGFTIGQVNGRHCYIPFYRITEKQNRVSITDRMWARLLSSTNQPSFLCNKVVEEAKKEHERATRLLDGSPSHRKG

SEQ ID NO: 18067 - protein, 462 aa, Zea mays
  unsure (1)..(462): unsure at all Xaa locations
MATAAAFSVSSPAASAVAARSKVFGGGVNQARTRTGCRVGITRKNFGRVMMALAVDVSRFEGVPMAPPDPILGVSEAFKADKSELKLNLGVGAYRTEELQPYVLNVVKKAENLMLEKGENKEYLPIEGLAAFNKATAELLLGADNPVINQGLVATLQSLSGTGSLRLAAAFIQRYFPEAKVLISSPTWGNHKNIFNDARVPWSEYRYYDPKTVGLDFEGMIADIEAAPEGSFVLLHGCAHNPTGIDPTPEQWEKIADVIQEKKHMPFFDVAYQGFASGXSLMKNAFSVRLFVXKRGMEVFVAQSYSKNLGLYSERVGAINVVCSAPEVADRVKSQLKRLARPMYSNPPIHGAKIVANVVGDPIMFGEWKQEMELMAGRIKNVRQKLYDSLSAKDKSGKDWSFILRQIGMFSYTGLNKAQSDNMTDKWHIYMTKDGRISLAGLSLAKCDYLADAIIDSFHNVN

SEQ ID NO: 18068 - protein, 461 aa, Nitrosomonas europaea ATCC 19718
MKIQDFIQNRSKENFALHDKYLNSQMVKVLKTIDFDRHYVRAEGAYLFDEQDNRYLDLLSGFGVFALGRNHAEIVEALKSTLEADLPNLVQLDVSLLAGLLAERLVKLTPDGLKRVFFANSGTETVEAAIKFSRYATGKSKIIFCHGCYHGLSLGSLSATGDDHYKKGFGPMVPDFIEIPFNDLEALEQVLAQGDVAAFITEPIQGHGVWIPDDNYLPEAARLTRKYGALFITDEIQTGLGRTGKWWAVEHWSVEPDILCMSKTLSGGFIPVGALVCKEWIFDRVFNRMDRAVVHGSTFGKNNLAMAAGLATLEVLESGNLIEHSARTGAAIMDALTPLTEKYECFKEVRGKGMMIALEFTEPKSPMLKLSWKMLESANKGLFSQLITVPLFRQHRVLSQVAGHGMNIVKFIPPLILTESDVQWIVTAVSDVVANAHRGPSAVWDFGKTLAFSALRAKLHA

SEQ ID NO: 18069 - protein, 974 aa, Rhodopseudomonas palustris CGA009
MTSLDPRTEMRARPSSHRTSRQGTMNPVKALEKHGQAIWLDFLARGFIAKGDLKKLIETDGVKGVTSNPSIFEKAIGASDEYDGAIGEALKKGDRSVGDLYETLAVEDIQNAADVLRPVYDKLEHRDGFVSLEVSPYLAIDTKGTLAEAERLWRAVNRENLMIKVPATREGLPAIKQLVSKGISVNVTLLFSQKVYVQVAEAYIAGLEALIASGGDPAHVASVASFFISRIDSAVDAALDDKIAKANDPSEKERLEELKGKVAIANAKLAYQDYKRLFSGDRWAKLEACGAKPQRLLWASTGTKNKAYSDVMYIEELIGQNTVNTVPPATLDAFRDHGEPRNSLEKDLDEARAVIKGLASTGVSLDAITDKLVTEGVQLFADAFDKLLGAVAFKRETVLAGRVGKQTLSLPGELANSVKQHTEAWRSAGKIRKIWSRDESVWTDHDEGKWLGWLHAPSVAKTKLTEYQDFAKWVKSQGFTDAVVLGMGGSSLGPEVIAETFPQQDGFPKLHVLDSTDPAQVRALEASVKLASTLFIVSSKSGGTTEPNVMKAYFFARVTEAIGADQAGRHFVAVTDPGSSMEKVATEQKFAKIFHGDPTIGGRYSVLSPFGLVPAAAAGIDLAKLLDSALAMVRSCGTDVPPQQNPAVQLGLVMGCAGLEGRDKVTITSSKAIADFGAWAEQLIAESTGKEGKGLIPIDGEPLADPSAYGNDRLFIDLRTEAETDAAHEAKLAALEAAGHPVVRIVLKSTEAIGQEFFRFELATAVAGAVLGINPFDQPDVESAKIKTRELTAAFEKSGALPAETPALSTAEADLYTDAGNAAALRKAGADGTVASWLKAHLSRVSAGDYVALLAYIERNAAHIEALQDIRLKVRDHRKVATCAEFGPRFLHSTGQAYKGGPDSGVFLQITADDAADLPVPGQSASFGVIKAAQARGDFDVLTERGRRALRVHLKGDLGAGLKSLGTAIKQALE

SEQ ID NO: 18070 - protein, 1136 aa, Tuber borchii
MADKLLQDVYRKIEREKVLINGARAMRQSTDNAAVQQKLDNQIRESQRNLSYLEGRYGELQNMVITSGVGDMHVNDGGGYGGGYQNPQMLPPNKPFAQGSGGSAQPKTRPNYSKLDLIKYDTPHLGPRIQLMLSQLEFKLSVEKQYKEGIEKMIKLYQMEGDRKSRQDAESKHTDIGQKIQLLKQALKRYEDLHVDMDFGDEDSINSPNIRRPLTGRLAIRVLAVKDVDHATTSRFARGPETFVIIKVEDVARVRTKFTRNDKWLDEAHDIDVDKANEIEMTVYDKPGDNHMPIGLLWIRISDIAEELRRKKIEQEISSSGWVSADKMANSGAGRPGEGAYNYSQGFGGPAAAGGGNTGMYVNNSGQAQAQGGSAGIDAWFALEPVGQIHLNLNFVKYNRNKRPLDLGLGRKGAVRARKEEVHEMYGHKFVQQQFYNIMRCALCSDFLKYSAGMQCSDCKYTCHKKCYPKVVTKCISKSNAETDPEEEKLNHRIPHRFEPMTNMGANWCCHCGYMLPVGKKNARKCTECGLTCHSQCAHLVPDFCGMSMEVANQILGEIKKTKKRGPSMTDRNLRTNVPPVPSSPLSGRPTSDPYVSALDPRNSVQGEPAQLSQRTHSYTPSSPTAVNAANVAYGTASSPARPQQPAPYSPEQRPNRVPEPTAVAAAAHAGQRPPSTVQSQTGYPPRQSADFYQGAPTSPTQPNHPTELPSSPSPYQQGQGYDNPYQQHHAPTPQQPPAAPPKASPAPSGYGQPQATQYDQRQSYGQPPPAPAKVAPPAHTPAAEKQPPPPPVLEPQHVVSRPTKIGLDHFNFLAVLGKGNFGKVMLAETKASKKLYAIKVLKKEFIIENDEVESTRSEKRVFLIANKERHPFLLNLHACFQTETRVYFVMEYISGGDLMLHIQRGPFGSRRAQFYAAEVCLALKYFHENGVIYRDLKLDNILLTLDGHIKIADYGLCKEEMWYGSTTSTFCGTPEFMAPEILMDKRYGRAVDWWAFGVLIYQMLLQQSPFRGEDEDEIYDAILADEALYPIHMPRDSVSILQKLLTKEPELRLGSGPTDAQEIMSHPFFANINWEDIYHKRIPPPFKPSIQSATDTSNFDQEFTSVTPVLTPVQSVLTQAMQEEFRGFSYVQDFS

SEQ ID NO: 18071 - protein, 136 aa, Oryza sativa
  unsure (1)..(136): unsure at all Xaa locations
GAGLRPSVLXGILVTGXYYSDXXXGQTTIFSYSEXQRXRLGPNYLLLXPIAPXXAHHNYHYDGFMNFMRRDXEVDYXPSXYXPAXXAPRYXIPSATLXXXRXXVVXXNENNXPQPGERYRXWDPARQDRFIXKWID

SEQ ID NO: 18072 - protein, 198 aa, Triticum aestivum
LAGRVDAPRLDRPLLPSPRAPPSPSSSSIPMQQRRGRPSGTDGSDFSYRMVVDSRYQRVADGRSRLARLMLVQTLHQVAGGALLLLSLSKGTEINKFAVLSLAAGLLAILLGEFGRRRTVAVFLPLYTSLSSIAIAFSVTCIIRSDLFVKITKQNTADITSYEMFDVVRVALGILLQLVVITTSTRLLLILSALNGTP

SEQ ID NO: 18073 - protein, 453 aa, Dechloromonas sp. RCB
MSLSSNQDWLARSQAAVWHPCTQMQHHAQTASAAHLPLVPIARGSGAWLYDFDGKRYLDGISSWWTNLFGHANPRINAALKDQLENLEHVMLAGFTHQPVVELSERLSALTGGSLGHAFYASDGASATEIALKMSFHYWRNTGRPEKAEFLCLAGSYHGETVGALAVTDVAIFKDAYAPLVRAATVIPSPDSRLAEAGESPADVARRAAAALEAHLEKHGENIAALIVEPLVQGAAGMVMYDPEYLRLARQLCDRYEVHLICDEIAVGCGRTGTFFAHEQAANDGNPIRPDLMCLSKGISGGYLPLSIVLCSDTIYEAFLDDSVARAFLHSHSYTGNPLACRAALATLNIFESDDILAANRLKSAKISTALAPLADHPQVRHLRQRGMITAFDVETDDPYFSRRFYRATLGREALIRPIGNTVYLMPPYIISDDEIAHLGQSIAGSLQEALAK

SEQ ID NO: 18074 - protein, 237 aa, Chlamydophila pneumoniae AR39
MKNSGNIMEPSTNKPDCKKIFDSIASKYDRTNTILSLGMHHFWNRSLIQILGSGYSLLDLCAGTGKVAKRYIAAHPQASVTLVDFSSAMLDIAKQHLPQGSCSFIHSDINQLPLENHSYPLAAMAYGLRNLSDPHKALQEISRVLMPSGKLGILELTPPKKTHPTYSAHKLYLRAVVPWIGKSVSKDPDAYSYLSKSIQQLPKDHDLEDLFSKSGFYIAKKKKLFLGAATIWLLEKQ

SEQ ID NO: 18075 - protein, 89 aa, Oryza longistaminata
DAKARYVKFHWKPTCGVSCLMDDEATLVGGKNHSHATQDLYDSIAAGNFPEWKLFVQVIDPEEEERFDFDPLDDTKTWPEDEVPLRPVG

SEQ ID NO: 18076 - protein, 138 aa, Shorea leprosula
EKNIPVLLGLLSIWNVSFLGYPARAILPYSQALEKFAPHIQQVSMESNGKGVSIDGVPLPYEAGEIDFGEPGTNGQHSFYQLIHQGRVIPCDFIGSAKSQQPIHLKGEVVSNHDELMSHFFAQPDALAFGKTPEELHK

SEQ ID NO: 18077 - protein, 708 aa, Yersinia pestis KIM
MVYSDKRIRKPAIRRSWLKRREKSDRTLRGQEDFVEVDWDVALDLVAEENRRVRDQYGPAGLFTGSYGWSSAGRLHHARSLVRRFYFSGGGGVDQLGNYSWGAAQFFLPYVIGTFSPLTGRVTSWPSVVEHCELFIAFGGLALKNAQVSSGGSAEHSLKLWLEKLAQKGTPVINISPMRDDCPAFVNAEWIPIRPNTDVALMLALAYEIQRLDGHDEAFLATHCVGYGQLADYIRGANDGIAKTPDWASSITGIPAARIAQLAQQLIGVRSFMTCSYSVQRAHRGEQPYWMVIALSAMLGQVGLPGGGFSFGHGSMNGVGNPRIDTPGPAMPVGKNPAGLAIPVARICDMLLQPGQPYQFQGETHTYPDIHLVHWAGGNPFHHHQQLNRLVEGWQKPDTVIVQDIWWTPVAKMADIVLPVTSSLERNDIGGSSRDRYVLAMHQAIAPQHQARHDFDIFADLADRLGYRETFTEGRDEMAWIRHIYQECGAAQRSHDVEWPDFETFWQQGYVGLPAPSKAFVFFDSFREDPQANPLQTPSGKIELFSEKIASYQYNDFAPHAEWKPPVEWLGAPLAEQWPLHLISIQPGDRLHSQLDPAPLAQSNKTAGRETLYMHPLDAASRDITEGSQVQVSNLRGHCLAGVSITDGVTRGVVLMATGAWFDPGFGGTQHKIEQSGNPNVLTLDIGTSRLTQGPNAMSCLVEVALYE

SEQ ID NO: 18078 - protein, 91 aa, Oryza longistaminata
RDAKARYVKFHWKPTCGVSCLMDDEATLVGGKNHSHATQDLYDSIAAGNFPEWKLFVQVIDPEEEERFDFDPLDDTKTWPEEEVPLRPVGR

SEQ ID NO: 18079 - protein, 230 aa, Corynebacterium glutamicum ATCC 13032
MAKADLDKDPFDVASMFDDVGKNYDLTNTVLSFGQDRVWRKRTRQRLDLKPGEKVLDLAAGTAVSTVELAKSGAFCVACDFSQGMLAAGKDRDVSKVVGDGMQLPFADNSFDAVTISYGLRNIHDFRAGLKEMARVTKPGGRLTVAEFSTPVIPVFGTVYKEYLMRLLPQAARAVSSNPEAYIYLADSIRAWPSQAELAREINQNGWSDCGWQNLTFGIVALHSAIKPEN

SEQ ID NO: 18080 - protein, 90 aa, Oryza longistaminata
RDAKARYVKFHWKPTCGVSCLMDDEATLVGGKNHSHATQDLYDSIAAGNFPEWKLFVQVIDPEEEERFDFDPLDDTKTWPEEEVPLRPVG

SEQ ID NO: 18081 - protein, 138 aa, Shorea leprosula
EKNIPVLLGLLSIWNVLFLGYPARAILPYSQALEKFAPHIQQLSMESNGKGVSIDGVPLPYEAGEIDFGEPGTNGQHSFYQLIHQGRVIPCDFIGSAKSQQPIHLKGEVVSNHDELMSNFFAQPDALAFGKTPEELHK

SEQ ID NO: 18082 - protein, 480 aa, Methylococcus capsulatus str. Bath
MKNIPTSLVTLACLGFSAAAQAEGATEIVETVVETVQQAATPAVPTPDKGDTAWMIVATVLVTLMVIPGLALFYGGMVRAKNMLSVLMQVFVIFSLMAVLWAVYGYSIAFTEGGVFFGSLDKAFLAGVTPDSTAATFSKGVVIPELIYVAFQLTFACITPALIVGAFAERMKFSAVLLFMVLWFTFSYLPIAHMVWYWAGPDAYTDAAAGEKATATAGFLFQKGALDFAGGTVVHINAGIAGLVGCLLVGKRIGYKKESMAPHSVPMTMIGASLLWVGWFGFNAGSNLEATGTAALAFVNTMLATAAATLAWSAVEWIARGKPSMLGGASGAVAGLVAITPACGFIGPMGSIVLGLAAGAVCFWSVTTLKNALGYDDSLDVFGVHGVGGIIGALGTGIFASPALGGAGVYDYVANAVAEYDMVSQVISQSWGVGVTIVWSGVVSLIAYKIVDLLVGLRVSEETEREGLDIREHGETAYHP

SEQ ID NO: 18083 - protein, 123 aa, Bradyrhizobium japonicum USDA 110
MTATGLSGRSVFLVEDEVMIRMMVADMLEELGYKVAAEAGDIPEAMRLAEATQFDIAILDVNVNGKVISPVADLIKAKGCPFIFATGYGSSGLPEQYRDRPALQKPFQLDALGRTIEAALRGD

SEQ ID NO: 18084 - protein, 464 aa, Eremothecium gossypii
MTDPNQAKKQKIEAQPPRPQNIGIKAIELYIPSQCVNQEALEAYDGVSQGKYTIGLGQTNMSFVNDREDIYSMCLTACSNLMKNYDIKPESIGRLEVGTETLLDKSKSVKSILMQLFGENTDLEGVDTVNACYGGTNALFNSLNWIESSSWDGRDAIVVCGDIAIYDKGAARPTGGAGTVALLIGPDAPIVFDSVRGSYMEHVYDFYKPDFRSEYPYVDGHFSLTCYVKAVDQAYRAYSRKAIAKGLAENPAGPEAVNVATFFDYNVFHVPTCKLVTKSYGRLLYNDFRANPELYPEVSADLATLDYEASLADKNIEKTFVGLAKPLHKARVEPSLVVPTNTGNMYTGSVYAALASLLYYVGNDALQGKRIGLFSYGSGLAASLFSVRVLGDIKHITHNLALDTKLQNRKTETPEDYEKALALREAAHLQKAYTPQGSLDLLQPGTYYLTAVDDRYRRSYAVKE

SEQ ID NO: 18085 - protein, 364 aa, Glycine max
MGKGGMSIDEHGEGKEENMAAWLVGMNTLKIQPFKLPTLGPHDVRVRMKAVGICGSDVHYLKTLRCAHFIVKEPMVIGHECAGIIEEVGSQVKSLVPGDRVAIEPGISCWHCNHCKHGRYNLCDDMKFFATPPVHGSLANQIVHPADLCFKLPDNVSLEEGAMCEPLSVGVHACRRANIGPETNVLIMGAGPIGLVTMLAARAFGAPKTVIVDVDDHRLSVAKSLGADDIIKVSTNIKDVAEEVVQIQKVMGAGIDVTFDCAGFDKTMSTALSATQPGGKVCLVGMGHSEMTVPLTPAAAREVDVVGVFRYMNTWPLCLEFLRSGKIDVKPLITHRFGFSQKEVEEAFETSARGGNAIKVMFNL

SEQ ID NO: 18086 - protein, 490 aa, Pseudomonas syringae pv. syringae B728a
MARFELQKLYIDGGYVDASNPETFDAINPANGEVLAQIQRAGKDDVERAVVAAEKGQKIWAAMTAVERSRILRRAVDILRERNDELAALETLDTGKAISETRYVDIVTGADVLEYYAGLVPAIEGEQIPLRDSSFVYTRREPLGVVAGIGAWNYPIQIALWKSAPALAAGNAMIFKPSEVTSLTTLKLAEIYTEAGVPNGVFNVLTGSGREVGTWITEHPRIEKVSFTGGTDTGKKVMASASSSSLKEVTMELGGKSPLIVFDDADLDRAADIAMMANFYSSGQVCTNGTRVFVPNALKAEFEAKILERVKRIRAGNPEDENINFGPLVSFEHMESVLGYIAKGKEQGARLLCGGDRLTGGVFDKGAFVAPTVFTDCTDEMTIVREEIFGPVMSILGYDTEDEVVRRANDTDFGLAAGIVTRDLNRAHRVIHLLEAGICWINAWGESAAQMPVGGYKQSGVGRENGISSLAQYTRIKSVQIELGDYASVF

SEQ ID NO: 18087 - protein, 631 aa, Bordetella bronchiseptica RB50
MIHLDGAAVDPAVLQGMTDAIAHRGPDGEGHWIDGNVGLGHRRLAIIDLSPAGHQPMISADSRYVLSYNGEIYNFRELRAELQGEGCQFRSQTDSEVLLHALIVWGVERTLSRLNGMFAFAWWDTRERKLLLARDRYGVKPLYFSMQGTTLAFGSEQKAILASAAFRRNLNKAALLEYFTFQNIFTDQTLLEDVHLLPAGHYAYLDCAKERPQLRLTQYWDFNFHEPAVPGTDTEYREELSRLFRQAVQRQLVSDVELGSYLSGGMDSGSITAVAAASHPYIKTFTCGFDLNSASGIELAFDERSKAEYMSYFFKTEHYEMVLKSGDMERVLPALAWHLEEPRVGQSYPNYYAAKLASKFVRVVLSGAGGDELFGGYPWRYYRAVVNNDFEHYVDKYYLFWQRLIPNSTLKQVFRPVWSDVSHVWTRNIFRDVFNSHADQLYSPEDYINHSLYFEAKTFMHGLLVVEDKLSMAHGLESRVPFLDNDLVDFATRCPVRLKLNNLADVIKLNENEPGHKTNKYFEKTRDGKQILRDVMRDYIPSDIAQAEKQGFSAPDASWFKGESMDFVKRTLFSKHARIYEIMDADTVRSLVAEHLSGERNRRLLIWSLLNVESWLAQYLDHGGVAGKGLA

SEQ ID NO: 18088 - protein, 249 aa, Vitis vinifera
MPKIAFGRFDDSFSLASFKAYLAEFHPTILFVFAGVGSVMAYNKLTSDAALDPAGLVAVAVAHGFALFVAVAISANISGGHVNPAVTFGLVVGGQITILTGILYWIAQLVGSILACFLLKLVTGGLTTPVHSLGAGVGVIDAIVFEIVITFALVYTVYATAVDPKKGSLGIIAPIAIGLVVGANILAAGPFSGGSMNPARSFGPAVVSGDFKDNWIYWVGPLIGGGMGGSVYAIMYMGSDHQPLASSEF

SEQ ID NO: 18089 - protein, 152 aa, Hordeum vulgare subsp. vulgare
HMGVKIAKAMGHHVTVISSSDKKRQEALEHLGADDYLVSSDSTRMQEVADSLDYIIDTVPVFHPLEPYLSLLRLDGKLILMGVINTPLQFLTPVVMLGRKTITGSFVGSIKETEEMLEFCKEKGLSSMIEVVKMDYVNKALERLEKNDVRYR

SEQ ID NO: 18090 - protein, 167 aa, Glycine max
MVPQSVITQVSDSSGVNAISNVSSGHGFYDWLFECHGFWHNATLNIPSFLFVFYLALQARHSLLKLSLARSYIIISYNLCLWLITLLNLAWCFLQAWECTSGRKLTWNLLSLFTTSGMLFLEVSLLAFLFQGNNAGGLDAMKRTFGISTLVVGLDILLKAIYLFVFG

SEQ ID NO: 18091 - protein, 410 aa, Nitrosomonas europaea ATCC 19718
MNDILPDESGLWAFFEDTIRTWLAAYGYRNLRTPIVEQTDLFVRSIGEVTDIVEKEMYTFVDHLNGENLTLRPEGTASCVRAVIEHNLLYAGPQRLYYSGPMFRHERPQKGRYRQFHQVGVEALGFAGPDIDAELIVMCARLWRLLGISDVRLEISTLGSTESRSVYRARLISYLEKFCDDLDEDARRRLKTNPLRILDSKNPAMREILAGAPRLFDDLDEDSLAHFEALQRILRNQDISFEINNRLVRGLDYYNRTVFEWVTDKLGAQGTICAGGRYDGLIAQIGGKPAPACGFAMGIERILALMGENGAVGAHAIPDIYVVHQGEAAAEFSWKVAESLRDDGLKVVLHSGGGNFKAQMKKADASGARFAAIIGEDEVVAGQISIKPLREAAEQIRVDLAGAAALLGNI

SEQ ID NO: 18092 - protein, 395 aa, Clostridium thermocellum ATCC 27405
MVVSKKALSISPSSTLAIDAKAKKMRSEGIDIIGFGAGEPDFDTPDHIKKAAIDAINAGFTKYTPASGTLELKQAICRKFKRDNGLDYNPSNIVISNGAKHSLVNALQAICNPGDEVIIPTPAWVSYPEMVKLADGVPVYIHCSEEEGFKFTIDKLEKAITDKTRAIIINSPSNPTGMIYSEEELRAVADLAVSKGIYIISDEIYEKLIYDGYKHVSIASFNDKIKDLTIVVNGVSKSYAMTGWRIGYTASNEQIAKIMANVQSHATSNPNSIAQKAALAALEGPQEIIDEMSAEFVKRRDYMVDRINSMNGVSCIKPNGAFYVMMNISKLIGKEIAGMKITGSDSFAEALLEKANVALVPGSGFGTDIHVRLSYATSMENIVEGLNRIEKFLSM

SEQ ID NO: 18093 - protein, 450 aa, Shigella flexneri 2a str. 2457T
MTKHYDYIAIGGGSGGIASINRAAMYGQKCALIEAKELGGTCVNVGCVPKKVMWHAAQIREAIHMYGPDYGFDTTINKFNWETLIASRTAYIDRIHTSYENVLGKNNVDVIKGFARFVDAKTLEVNGETITADHILIATGGRPSHPDIPGVEYGIDSDGFFALPALPERVAVVGAGYIAVELAGVINGLGAKTHLFVRKHAPLRSFDPMISETLVEVMNAEGPQLHTNAIPKAVVKNADGSLTLELEDGRSETVDCLIWAIGREPANDNINLEAAGVKTNEKGYIVVDKYQNTNIEGIYAVGDNTGAVELTPVAVAAGRRLSERLFNNKPDEHLDYSNIPTVVFSHPPIGTVGLTEPQAREQYGDDQVKVYKSSFTAMYTAVTTHRQPCRMKLVCVGPEEKIVGIHGIGFGMDEMLQGFAVALKMGATKKDFDNTVAIHPTAAEEFVTMR

SEQ ID NO: 18094 - protein, 207 aa, Methanococcoides burtonii DSM 6242
MAFQIVFAAIALAILTSGVAERIKLSSFIVFGLLWTTLVYDPLAYWAWGDGWVGSMGALDFAGGTVVHISSGFGALALSFVIGKRIGFGKYSMEPENITTTLLGGALLWFGWFAFNAGNALAANAFVVTLISASSGALTWMGASWIKGKSSSLGMNSGAIAGLVAITPACGFVGPLAAIIIGGSAGILCYGTLLFCIYKKFDESLDA

SEQ ID NO: 18095 - protein, 138 aa, Shorea leprosula
EKNIPVLLGLLSIWNVSFLGYPARAILPYSQALEKFAPHIQQLSMESNGKGVSIDGVPLPYEAGEIDFGEPGTNGQHSFYQLIHQGRVIPCDFIGSAKSQQPIHLKGEVVSNHDELMSNFFAQPDALAFGKTPEELHK

SEQ ID NO: 18096 - protein, 138 aa, Shorea leprosula
EKNIPVLLGLLSIWNVSFLGYPARGILPYSQALEKFAPHIQQLSMESNGKGVSIDGVPLPYEAGEIDFGEPGTNGQHSFYQLIHQGRVIPCDFIGSAKSQQPIHLKGEVVSNHDELMSNFFAQPDALAFGKTPEELHK

SEQ ID NO: 18097 - protein, 372 aa, Streptococcus ratti
MNIQPFGVEEWLNVWENDAIYDIAGSSISSMTLKEILSIGDKPQEVLIDELLKKKMNYGWIEGSPDFKEEVAKLYDHAKPNQILQTNGATGANFLALYALIERGDHIISLYPTYQQLYDIPRSFGAEVDFWEIKEENNWLPSLDDLQHLIKPNTKMICINNANNPTGAVMDRSFLEKLVELARAADIYILSDEVYRPLEEELDVPAIYDLYDKGISTHSLSKTYSVPGVRVGWIVANDELSDLFRKYRDYTMICAGVFDDYIATHILKNKDRVIERNKKIVSENLQIVKDWVAKEPRVSLVVPKKVSTSFIKLDIPEETEPFCIRLLKEKGVLLVPGNRFDLPGYARLGYCTDKATLIKGLSELSEFLRQFD

SEQ ID NO: 18098 - protein, 515 aa, Mycobacterium tuberculosis CDC1551
MSFVVAAPEVVVAAASDLAGIGSAIGAANAAAAVPTMGVLAAGADEVSAAVADLFGAHAQAYQALSAQAALFHEQFVHAMTAGAGAYAGAEAADAAALDVLNGPFQALFGRPLIGDGANGAPGQPGGPGGLLYGNGGNGGNGGIGQPGGAGGDAGLIGNGGNGGIGGPGATGLAGGAGGVGGLLFGDGGNGGAGGLGTGPVGATGGIGGPGGAAVGLFGHGGAGGAGGLGKAGFAGGAGGTGGTGGLLYGNGGNGGNVPSGAADGGAGGDARLIGNGGDGGSVGAAPTGIGNGGNGGNGGWLYGDGGSGGSTLQGFSDGGTGGNAGMFGDGGNGGFSFFDGNGGDGGTGGTLIGNGGDGGNSVQTDGFLRGHGGDGGNAVGLIGNGGAGGAGSAGTGVFAPGGGSGGNGGNGALLVGNGGAGGSGGPTQIPSVAVPVTGAGGTGGNGGTAGLIGNGGNGGAAGVSGDGTPGTGGNGGYAQLIGDGGDGGPGDSGGPGGSGGTGGTLAGQNGSPGG

SEQ ID NO: 18099 - protein, 193 aa, Triticum aestivum
NCSFEGKVRAAQRAGFDAALVHDDEDKASLYSMVGDPEGIHIPAVFVSKMAGETLKKFARGEDGECCINSSMDETAGTVLVMSFVSLVVIISVVASFLFARNCRLLRHGVDNRPPYIKKHVVEKLPSVVYKAPCSSGNNCEEACAICLEDYDNGDMLRLLPCKHEFHVECIDPWLTKWGTFCPVCKLEVLTGE

SEQ ID NO: 18100 - protein, 439 aa, Glycine max
MKFTPSSKFLGFSNHFHSLLAPSFSPTPKFSSSFSATMSTLSTQNDTVTHKTQQPLQIAKRLEKFQTTIFTQMSLLAIKHGAINLGQGFPNFDGPEFVKEAAIQAIRDGKNQYARGYGVPDLNIAIAERFKKDTGLVVDPEKEITVTSGCTEAIAATMIGLINPGDEVIMFAPFYDSYEATLSMAGAKVKGITLRPPDFAVPLEELKSTISKNTRAILINTPHNPTGKMFTREELNCIASLCIENDVLVFTDEVYDKLAFDMEHISMASLPGMFERTVTLNSLGKTFSLTGWKIGWAIAPPHLSWGVRQAHAFLTFATAHPFQCAAAAALRAPDSYYVELKRDYMAKRAILIEGLKAVGFKVFPSSGTYFVVVDHTPFGLENDVAFCEYLVKEVGVVAIPTSVFYLNPEEGKNLVRFTFCKDEETIRSAVERMKAKLRK

SEQ ID NO: 18101 - protein, 350 aa, Rhodopseudomonas palustris CGA009
MRSFRVTDFGKPLSEDNRPTPELTGTQVLVRVKAAGICHSDLHIWEGGYELGHGRKKLSLADRGVALPLTMGHETVGEIVAAGPDAKDAKIGQVALVYPWIGCGECDVCKAGDENMCLKPRFLGVYCDGGYSDELIVPHPRYLLSLDGLDPVTAAPYACSGITTYSALKKLDFCLDSPIVIFGAGGLGLMALELLKAMGGKGAIMVDIDAAKREAAQKAGALGAVDGAAPDALAQIAASAKGPVRGALDLVGNPQTAQLGFDCLTKGGKLVIVGLFGGGAPWALPFIPMRAITIQGSYVGNLAETQELLDLVRAKKVSPIPVTKVALPQAYDALIDLQKGKLVGRAVLTP

SEQ ID NO: 18102 - protein, 433 aa, Caldococcus noboribetus
MVSHPCTADEAKPPSEGQLARFENGKLIVPDNLIVAYFKGDGIGPEIVESAKKVLDAAVDKAYGGTRRIVWWEVTAGEEAQKECGSLLPDGTLQAFKLARVNLKGPLTTPVGGGFRSLNVTLRMVLDLYSNVRPVKWYGQPTPHCHPENIDWVIFRENTEDVYAGIEWPFDSPEAQKIRDFLKKEFGIELTPDTGIGIKPISKWRTQRHVRRAMEWAIRNGYKHVTIMHKGNIMKYTEGAFRQWAYDLILSEFRDYVVTEEEVNTKYGGKAPEGKIIVNDRIADNMLQQIITRPGEYNVIVTPNLNGDYISDEANPLVGGIGMAAGLDMGDGIAVAEPVHGSAPKYAGKNVINPTAEILSGMYLLSDFVGWPEVKLLVEYAVKQAIAHKQVTYDLAREMGGVTPISTTEYTDVLVDYIRHADLKPSRASEGLP

SEQ ID NO: 18103 - protein, 289 aa, Geobacter sulfurreducens PCA
MQVKKAVFPVAGLGTRFLPATKSSPKEMLPLIDKPLVQYVVEEAVASGIEQLLFVTGRSKRAIEDHFDISFELEALLQEKGKDDMLQEVREIADMVKIFYVRQKQALGLGHAILCAREFVGDEPFAVLLGDDIIDAEQPCLGQLLDVYRKYRGPVVALEKVPIEAISSYGCVKATGITDRIFEVTDLVEKPRREEAPSDMAIIGRYVLTPDIFPILERQTPGKGGEIQLTDALLTLSREEAIYGCLFKGKRHDCGDKLGFLKATVDMALKREEFNEEFRDYLREVLARG

SEQ ID NO: 18104 - protein, 85 aa, Glycine max
VNRAQARMYVICTGHKYMVGFPTRKTNNDITCIVSNGGRVQCMQVWPPFGKKKFETLSYLGDADDAQSLEELQFRFRNEGSLAWI

SEQ ID NO: 18105 - protein, 521 aa, Methanosarcina acetivorans C2A
MWNSLHMTQARRPLMLMILDGWGYREASEGNAILAAETPNLNSLLNEFPWCFLECSGEAVGLPEGQMGNSEVGHLNIGAGRVVYQDLTRINLSVRNGDFFENPVLLDAISNVKLNDSSLHLMGLVSYGGVHSYMTHLYALIKLARDKGLKKVYIHAFLDGRDVPPKAALADIRELDAFCKENGSARIATVQGRYYAMDRDKRWERSKLAYDALTLGVAPYTTSDAETAVSDAYARGETDEFVKPTVVTGSDGKPEAVVQDNDSIIFFNFRPDRARQLTWAFENDDFDGFPREKRPKVHYVCMAQYDETLDLPIAFPPEELENVLGEVLSKQGLVQLRIAETEKYAHVTFFLNGGQEKCYDGEDRCLIPSPKVATYDLKPEMSAYEVTDEVIRRIQSGKYDVIVLNFANMDMVGHTGIFEAAVQAVEAVDTCVGRIIEALKKAGGVALITADHGNAEQMENQHTGEPHTAHTSNPVRCIYAGKGEVKALENGKLSDLAPTLLDLLGVPKPEEMKGKSLILNE

SEQ ID NO: 18106 - protein, 413 aa, Methanococcoides burtonii DSM 6242
MNTLTAKDFLTIDDFDIGDRTILVRVDLNSPMSPGGGILDDMRIKSHIPTLMDLEDAKVVLLAHQSRPGKNDFTTMQLHADVMSSSLGRKVTYIDDIFGTHARDSIASMEKGDVILLENVRFYSEESLRRPVDEHQGTHMVRKLAPLFDIFLNDAFAVSHRSHLSITGFSGVLPSGAGRLMEREITSLDVSLKGSESPCIFVLGGAKVDDSLKVAEHVLSSGGADRVLVTGVVANVVLAASGVDIGGPNMKFIESQGYLDQIDKAKNILERFDGKLGFPRDVALNDNGERIEANIDDVASSNLPINDIGLETIVAYSSEIENAKTVVLNGPAGVSEIEGFEIGTSEIIKAATNAGYSIAGGGHITAEVRNMGYEKMFSHISTGGGACIDYLAGDLLPGIEALKVAAKRYREFE

SEQ ID NO: 18107 - protein, 296 aa, Zea luxurians
RPEIAHAHQPVMSPSHHGWDGNGAAAVPTPMPKRLDGKVAIVTGGARGIGEAIVRLFAKHGARVVTADIDDAAGEALASALGPQVSFVRCDVSVEDDVRRAVDWALSRHGGRLDVYCNNAGVLGRQTRAARSILSFDASEFDRVLRVNALGAALGMKHAARAMAPRRAGSIVSVASVAAVLGGLGPHAYTASKHAIVGLTKNAACELGAHGVRVNCVSPFGVATPMLINAWRQGHDDATADADRDLDLDVTVPSDQEVEKMEEVVRGLATLKGPTLRPRDIAEAVLFLASDEARYI

SEQ ID NO: 18108 - protein, 138 aa, Shorea parvifolia
EKNIPVLLGLLSIWNVSFLGYPARAILPYSQALEKFAPHIQQVSMESNGKGVSIDGMPLPYEAGEIDFGEPGTNGQHSFYQLIHQGRVIPCDFIGSAKSQQPIHLKGEVVSNHDELMSNFFAQPDALAFGKTPEELHK

SEQ ID NO: 18109 - protein, 296 aa, Zea luxurians
RPEIAHAHQPVMSPSHHGWDGNGAAAVPTPMPKRLDGKVAIVTGGARGIGEAIVRLFAKHGARVVIADIDDAAGEALASALGPQVSFVRCDVSVEDDVRRAVDWALSRHGGRLDVYCNNAGVLGRQTRAARSILSFDAAEFDRVLRVNALGAALRMKHAARAMAPRRAGSIVSVASVAAVLGGLGPHAYTASKHAIVGLTKNAACELGAHGVRVNCVSPFGVATPMLINAWRQGHDDATADADRDLDLDVTVPSDQEVEKMEEVVRGLATLKGPTLRPRDIAEAVLFLASDEARYI

SEQ ID NO: 18110 - protein, 450 aa, Methanosarcina acetivorans C2A
MEKEYDIIILGTGTAGRTLAGRAKSSGLKFAIIDSREYGGTCPLRGCDPKKVLAGASEATDWNNRLIGKGAGTEKPLEINWSSLIEFKRTFTRDYPRETEKMFADMGIDMYHGRANFENENTILVGKDKLKGKYIFLATGSKPRKLNIPGEEYLITSEEFMETEKFPEKIIFVGGGYVSFEFAHIALRAGAEVLILHRSEKPLRDFDSEMADLLVRASEAAGMRILTDRPVVAVEREGDRFLVRAEYKTETGSETQTFNADMVVNGAGRTPDIEDLRLENAGITAEKKGIIVDKHMQTSNPRVYAGGDCTAEGMQLTPVATLQGEIAAANIFDENRAEIDYTGIPSAVFTIPVLASVGITEAKVNDKHRVIFRDRSKWSTTRRAGLEFAASKIIVDETNDHIVGAHILGPNAEEAINIFATAMQLGLRASSIKKMAFTYPTTCSDIRYML

SEQ ID NO: 18111 - protein, 154 aa, Zea mays
HVDYDVQAERRPSCRFPAPRTRSPATFEQILEMDEDEDEREFSKSIVYDFFGQADQTFKKMDKELEKKEGKYLKELSELGHFLKGSSATLGLTKVKDSCEKIQHYGQLKDDAGTKDITEEQAQENLGKIIKQAKKEFADVKDILKEFYKDDNEA

SEQ ID NO: 18112 - protein, 628 aa, Bordetella bronchiseptica RB50
MCGVLGAWWRHHDEHEDARFAAGLRKLAHRGPDDRGSEHFAAPHGRLSLGHTRLAVIDLSAAGHQPMHADADRLAVVFNGEIYNYRELRSELRQIGAIFRGDSDTEVLLAAWQHWGVAALRRFKGMFAFALYDRRQQTLTLARDAFGIKPMYYHAAPERLLFGSELPAVQALLPHPPRLNWQRAYDYLAYGQYDQPPDTFIAGIRQLPAGHLLTLDLRTGRAGEPMAWDDPASQECRPIGFQEAAEELRARFLDNVRLHLRSDVPIGAALSGGIDSSAIVCAMRWLEPDLPIQTFSFISDDTHRSEERWVDLVNQHCGATGHKIHIAPHELLDDLDDLIRVQGEPVGSTSIYAQYRVFKLAREHGVVVTLDGQGADELLGGYGGYPTERLASLLETGRLGAAARLLRQQGRGAPARLLQAAALAAGGRHLANLRHATGRQHAPAWLDAQVLRDQGVTMREPAHAWAAATPLRGRRLVNELAHALYHRGLGALLRHGDRNSMRFSVESRVPFLTQDLAEFALSLPERYLVSDAGQTKHIFRKAMRGIVPDSILDRDDKIGFATPEQQWMQATAPQMRQWLVDAADIPFLRNAEVTAQFDAMIAGATPFSWQAWRWVNFQRWMQHATVLP

SEQ ID NO: 18113 - protein, 177 aa, Triticum aestivum
  unsure (1)..(177): unsure at all Xaa locations
MASSATSVAPFQGLKSTAGLPVSRRSNGASLGSVSNGGRIRCMQVWPIEGIKKFETLSYLPPLSTEALLKQVDYLIRSKVGALASKFNKVGFIFREXHNASPGVLRIGRVLDNVESCPMFRVATDATQVINEVEEVKKXEYPDAYVRIXIGFDNMRQVQCVSFIAFKPPGCEESGKA

SEQ ID NO: 18114 - protein, 332 aa, Anabaena variabilis
MTKNLLEQLREMTVVVADTGDIQAIEKFTPRDATTNPSLITAAAKMPEYQEIVDQTLLQAKKDAGAGASKGQIVSLAFDRLAVSFGLKILQIIPGRVSTEVDARLSYDTEATITKARELIAQYKAAGIGPERVLIKIASTWEGIKAAEILEKEGIHCNLTLLFGLHQAIACAEAGITLISPFVGRILDWYKKETGRDSYPSAEYPGVISVTTIYNYYKKFGYTTEVMGASFRNIGEITELAGSDLLTISPGLLGELQATIGELPRKLDPAKAATLDIEKISIDKATFDKMHAADRMAYDKLDEGIKGFSKALEELETLLAERLARLEVVASH

SEQ ID NO: 18115 - protein, 441 aa, Corynebacterium efficiens YS-314
MPSMTADQIVATSGHAAWMLISASLVLLMTPALALFYGGMSRQKSVLNMMMMSFGTLGVVSVIYVLWGWSMSYGTQSWGGIVANPLEFFGLRNSITDAGGNYLEGASGYANIIDIGFQLTFAVISTALISGALAERVKFSTWLTFTALWSTFVYFPLAHMVWGGGLLAHGETGFAAWLFGVTDGEATIAPIDFAGGTVVHISAGTAALVLALIIGARRTFPMVAARPHNLPLVMLGAALLWFGWFGFNGGSAFAADGLAGLAWLNTTAATAAAILGWLATERLRDGHATSLGAASGVVAGLVTVTPAAGALTPLTALILGVIGGILACLGVGLKYRFGFDDSLDVVGVHLVAGLWGTVGVGLLATDAGWFTGGGMDGFRLFIIQIVIAVVAMIFAAVITAVIAYLLKATMGWRIDEDKEQHGIDTAEHGESAYDTAGPEIR

SEQ ID NO: 18116 - protein, 249 aa, Zea mays
  unsure (1)..(249): unsure at all Xaa locations
MTPSLQDAKITFLGGGNMAAAIIGGLLAKNTNKQNIYVSEPWDVNRNKMADLGVRTTADNKEAAADADVVILAVKPQVAKGVCEELSSAWAGRDSLPVVISIAAGITLASIAQWFKGDSGKAPHIVRVMPNTPALXGEGASGLYGXRMSLAAEKELTSALLXSVSXATEWVDKEELLDVVTGXSGSGPAYFFAFVEHLISSGVSLGLSEEQATRLAAQTCLGAGKMLVESSDEPFSLRKNXTSPNGTTH

SEQ ID NO: 18117 - protein, 177 aa, Shewanella oneidensis MR-1
MMKFPLFILTSLMSTSVFAATCPSYLDVEVRKLHSEQSVNLCELTQGKPVLLINTASNCGYTSQFKALEALHKEYKDKGLVVIGFPSDDFFQEENDEKDTAKVCYINYGVTFTMLATSPVRGSDVNSVFKYLGDKAGAPKWNFYKYVVSGDGNTVMQFNSKVKPDSTELKQAIESVL

SEQ ID NO: 18118 - protein, 561 aa, Corynebacterium efficiens YS-314
MCPLSQRLIRCHLAHNTDPWWGTVTLRSSLLSPPAVARDPLCGRLICDFPSEGDTMTVYANPGTEGSIVNYEKRYDNYIGGQWVPPVEGQYMDNITPVTGEVFCEVARSTAADVEAALDAAHKAAPAWGRTSVAERALILHRIADRMEEHLEEIAVAETWENGKAVRETLAADIPLAIDHFRYFAGAIRAQEDRSSQIDHNTVAYHYNEPIGVVGQIIPWNFPILMATWKIAPALAAGNAIVMKPAEQTPASILYLMNIVGDLIPDGVLNIVNGLGEEAGTALSSSDRIGKIAFTGSTQVGKIINRAASDKIIPVTLELGGKSPSIFFADVMAQDDAFREKAVEGFAMFALNQGEVCTCPSRALVHESIADEFLELGVKRVQNIKLGNPLDTETMMGAQASQEQMDKISSYLKIGPDEGAETLTGGKVNKIDGLDNGYYIEPTVFRGTNDMRIFREEIFGPVLSVATFSDFDEAIQIANDTNYGLGAGVWSRDQNTVYRAGRAIQAGRVWVNQYHNYPAHSAFGGYKESGIGRENHLMMLAHYQQTKNLLVSYDPNPTGLF

SEQ ID NO: 18119 - protein, 367 aa, Arabidopsis thaliana
MGKKKKRATEKVWCYYCDREFDDEKILVQHQKAKHFKCHVCHKKLSTASGMVIHVLQVHKENVTKVPNAKDGRDSTDIEIYGMQGIPPHVLTAHYGEEEDEPPAKVAKVEIPSAPLGGVVPRPYGMVYPPQQVPGAVPARPMYYPGPPMRHPAPVWQMPPPRPQQWYPQNPALSVPPAAHLGYRPQPLFPVQNMGMTPTPTSAPAIQPSPVTGVTPPGIPTSSPAMPVPQPLFPVVNNSIPSQAPPFSAPLPVGGAQQPSHADALGSADAYPPNNSIPGGTNAHSYASGPNTSGPSIGPPPVIANKAPSNQPNEVYLVWDDEAMSMEERRMSLPKYKVHDETSQMNSINAAIDRRISESRLAGRMAF

SEQ ID NO: 18120 - protein, 272 aa, Shewanella oneidensis MR-1
MSQQKICFIGAGNMTRSIISGLIRSGYPASQVQATNPSQGKLDALATDFGVRVSQDNVSAAQDADVIILSVKPQLMEQVCQALQGIDMSNKLLITIAAGIKASRYSEYLAQPITLIRTMPNTPMQIGVGMTGLYAPQSLSDAQKAIAERLMSSGGEIVWVNEESDINQVIALAGSSPAYFFLLMESMIDAGKQMGMDEAKARSLVQQAALGAAMMAKQNPELTLGNLRENVTSKGGTTAQAIATFEAADLRGVVKKAMENCINRAEEMAKTF

SEQ ID NO: 18121 - protein, 256 aa, Geobacter sulfurreducens PCA
MKNLNLYHFFDCKDRKITMYRLTEKGERIRDMFSDIAPRYDFLNRLLSFGVDRRWRRNAVKCIRWSEGGRVLDVATGTGDVALEIARQTPPSVAIVGVDFSEGMVALGRDKVAGSPYAGRITMEIAPCEAIPFPDDTFDSVTIAFGIRNVVDRSQGLSEMLRVLKPGGRAVILEFSTPRSRLFKRIYSFYFLRVLPVIGGLFSQFGAYKYLPDSVLEFPSQEEFKALMASVGFRDTAHRDQTFGIATIYTGEKGLK

SEQ ID NO: 18122 - protein, 296 aa, Zea luxurians
RPEIAHAHQPVMSPSHHGWDGNGAAAVPTPMPKRLDGKVAIVTGGARGIGEAIVRLFAKHGARVVIADIDDAAGEALASALGPQVSFVRCDVSVEDDVRRAVDWALSRHGGRLDVYCNNAGVLGRQTRAARSILSFDASEFDRVLRVNALGAALGMKHAARAMAPRRAGSIVSVASVAAVLGGLGPHAYTASKHAIVGLTKNAACELGAHGVRVNCVSPFGVATPMLINAWRQGHDAATADADRDLDLDVTVPSDQEVEKMEEVVRGLATLKGPTLRPRDIAEAVLFLASDEARYI

SEQ ID NO: 18123 - protein, 296 aa, Zea luxurians
RPEIAHAHQPVMSPSHHGWDGNGAAAVPTPMPKRLDGKVAIVTGGARGIGEAIVRLFAKHGARVVIADIDDAAGEALASALGPQVSFVRCDVSVEDDVRRAVDWALSRHGGRLDVYCNNAGVLGRQTRAARSILSFGASEFDRVLRVNALGAALGMKHAARAMAPRRAGSIVSVASVAAVLGGLGPHAYTASKHAIVGLTKNAACELGAHGVRVNCVSPFGVATPMLINAWRQGHDAATADADRDLDLDVTVPSDQEVEKMEEVVRGLATLKGPTLRPRDIAEAVLFLASDEARYI

SEQ ID NO: 18124 - protein, 568 aa, Clarkia xantiana
MASPALISETEAWKDLKAHLEGIKMIHLRELMGDTERCQSMMVEFDNIFLDYSRQQASPDTISKLYKLADAAHLKQKIDRMYNGDHINSTENRSVLHVALRAPRNSAICSDGKNVVPDVWNVLDKIKDFSDRVRNGSWIGATGKELKDVIAVGIGGSFLGPLFVHTALQTDPEASKNARGRELRFLANVDPIDVARNISGLNPETTLVVVVSKTFTTAETMLNARTLREWISSALGPSAVAKHMVAVSTNLPLVEKFGIDPNNAFAFWDWVGGRYSVCSAVGVLPLSLQYGFAVVEKFLQGAHSIDQHFSSAPFEKNIPVLLGLLSVWNVSFLGYPARAILPYSQALEKLAPHIQQVSMESNGKGVSIDGLPLPFESGEIDFGEPGTNGQHSFYQLIHQGRVIPCDFIGIVKSQQPVYLKGEVVNNHDELMSNFFAQPDALAYGKTPEQLKNENVSEHLIPHKTFTGNRPSISILLPTLDAYRIGQLLAIYEHRVAVQGFVWGINSFDQWGVELGKSLATQVRKQLHASRVKGEPVEGFNFSTKTLLTRYLEATSDVPADPSTLLPNI

SEQ ID NO: 18125 - protein, 362 aa, Zea mays
MRFSALLLIVALLCLGGGRVAAGFESIFPPYGSSFFGGPAGRFCDGRLVIDFLMEAMDMPLLNAYLDSLGTPSFRTGVNFAQAGCSITPAKPTSVSPFSFGLQIKQFFAFKNKVTKLLSEGDMHSRYIPQQDYFSEGLYTFDIGQNDLAGEFYSRTEDQVIASIPTILLEFENGLKGSYSDVNKLYDQGARKFWIHNTGPLGCLPQNIALFGKDPSQLDELHCVAKHNRAAKLFNLQLHALCTKLRAEFDGASITYVDIHTIKYSLIANYSRYGFEHATQACCGYGGPPLNYDGNVPCGHTVSLDGKMVTAKGCSDTTEFVNWDGIHYTEAANFHIASQILTGKYSDPPFVDKMPFVIKPRF

SEQ ID NO: 18126 - protein, 569 aa, Clarkia xantiana
MATPSLISETEAWKDLKAHLEGIKRTHLRELMGDTERCQSMMVEFDNIFLDYSRQQASPDTINKLYKLAEAAHLKQKIDRMYNGDHINSTENRSVLHVALRAPRNSAICSDGKNVVPDVWNVLDKIKDFSERVRNGSWVGATGKELKDVIAVGIGGSFLGPLFVHTALQTDPEASKNARGRELRFLANVDPIDAARNISGLNPETTLVVVVSKTFTTAETMLNARTLREWISSALGVSAVAKHMVAVSTNLPLVEKFGIDPNNAFAFWDWVGGRYSVCSAVGVLPLSLQYGFAVVEKFLQGAHSIDQHFSSAPFEKNIPVLLGLLSVWNVSFLGYPARAILPYSQALEKLAPHIQQVSMESNGKGVSIDGLPLPFESGEIDFGEPGTNGQHSFYQLIHQGRVIPCDFIGVVKSQQPVYLKGEVVNNHDELMSNFFAQPDALAYGKTPEQLKKENVSEHLIPHKTFTGNRPSLSILLPTLDAYRIGQLLAIYEHRVAVQGFVWGINSFDQWGVELGKSLATQVRKQLHASRVKGEPVEEGFNFSTKTLLTRYLEATSDVPADPSTLLPKI

SEQ ID NO: 18127 - protein, 95 aa, Glycine max
  unsure (1)..(95): unsure at all Xaa locations
MEMFSSMISFPAVATVNRAGAGMVAPFTGLKSMAGFRTRKTYYVITSIASVGVRVQCMHVWPLIGWKTFATFHYLPDLDDALFAXVVAFLVRKGW

SEQ ID NO: 18128 - protein, 488 aa, Prunus dulcis
LPTEDDMGNSEVGHNALGAGRIFAQGAKLVDSALETGKLYEGEGFKYIKESFPTNTLHLIGLLSDGGVHSRLDQLLLLVKGASERGAKRIRVHILTDGRDVLDGSSVGFAETLENYLAQLREKGVDAQIASGGGRMYVTMDRYENDWGVVKRGWDAQVLGEAPHKFKNAVEAIKTLRQEPNTSDQYLPPFVIVDENGKPVGPIVDGDAVVTFNFRADRMVMIAKALEYADFDKFDRVRFPKIRYAGMLQYDGELKLPSKYLVEPPEIDRTSGEYLTYNGVRTFACSETVKFGHVTFFWNGNRSGYFNPQMEEYVEIPSDSGITFNVQPKMKAVEIAEKGRGAILSKKFEQVRVNLPNSDMVGHTSSIEATVVACKAADEAVKIIIDAIEQVGGIYVVTADHGNAEDMVKRNKKGQPLLDKNGNIQILTSHTLQPVPIAIGGPGLAPGVQFRKDVPNGGLANVAATVMNLHGFEAPADYETTLIEVVDN

SEQ ID NO: 18129 - protein, 473 aa, Bradyrhizobium japonicum USDA 110
MADTSFDIIIIGSGPGGYVTAIRAAQLGFKVAIVEKSYLGGICLNWGCIPTKALLRSAEIYHYMQHAKDYGLSAEKVSFDPKAVVQRSRGVSKRLNDGVGFLMKKNKVTVIWGAASIDAPGKVTVKKSDVEAPKGALGEGTYQAKHIIVATGARPRVLPGLEPDKKLIWTYFEAMVPERMPKSLLVVGSGAIGIEFASFFHTMGSDVTVVEVLPQILPVEDAEIAGLARKRFEKQGIKILSSTKVTKLEKKADSVVATIDDGKGKPVTTEFERVISAVGVVGNIESLGLEKLGVKTDRGCIVIDGYGKTNVPGIYAIGDVAGPPMLAHKAEHEGVICVEAIKGLHPHPMDKNLIPGCTYCQPQVASVGLTEAKAKENGREIRVGRFPFVGNGKAIALGEDQGLVKVIFDKKTGQLLGAHMVGAEVTELIQGYVVAMNLETTEEELMHTVFPHPTLSEMMKEAVLDAYGRVLNI

SEQ ID NO: 18130 - protein, 547 aa, Psychrobacter sp. 273-4
MGSKTIGDATNDTGKDTETEVSNKESGRVLNPEHTEGKNKKERVEQTHEQVNDDIMHHPDLVNPLDDTRIDVKSGFTKDSQRLKSDKHEFEYDAVVLGAGPAGEAAAMKLAKSGKKVVVIDPREQVGGNCTHVGTIPSKALRQSVFNLINFRRDQMFTKAMDYHQVPLNIVLAKARKVILQQVQTHTRFYERNQIEVIHGWANFIDKNTIRIEIDENTFETITFNKAIITVGSRPYRPDILDFDHPRVFDSDKILQMDYVVKKIIIYGAGVIGCEYASIFTGLGYKVDLINNQNQLLSYLDSEISDAIAHDFRQFGVVIRSNEEIDHLETHDDCVILHLKSGKKIKSDAILWSNGRSGNTEGLNLECLGLKANSRGQLKVDDTYCTEVENIYAAGDVIGWPSLASAAYDQGRCAAAFMVGDRDAEPVSSVPTGIYTIPEISCIGKTEQELTDAKVPYEVGQAFFKHLARAQIIGERSGVLKILFHRETLEILGIHCYGNHASEIIHIGQAVMKCNATLEYFVNTTFNYPTMAEAYRVAALNGLNRVF

SEQ ID NO: 18131 - protein, 348 aa, Prochlorococcus marinus subsp. pastoris str. CCMP1986
MKNLLGCSVKDLEKIALNYGQAAFRGRQIYNWLYNYKNRSKSIDEINVLPLKFRDQLKNEAFLFGELTLKEKYLATDGTLKLLLNTRDNESVECVGIPTEKRLTACLSSQVGCPMDCKFCATGKEGLKRSLKVSEILDQILFIENQMNQKVSNIVFMGMGEPLLNIDELLLSIRSINEDFAISQRKITVSTVAIPKMISKLSELSFQVLGKCQFTLAISLHASNQKIREAIIPSAKNYHIKNIIDDCREYVRETGRRVSFEYLMLHGVNDKLEHADELSNLIKGFQCHVNLIQYNHIEEVEFKQTPIKNAQLFQTRLSNSGINVSFRKSRGSDRNAACGQLRQNDKIK

SEQ ID NO: 18132 - protein, 197 aa, Medicago sativa
MSGSRFIKCVTVGDGAVGKTCLLISYTSNTFPTDYVPTVFDNFSANVVVDGSTINLGLWDTAGQEDYNRLRPLSYRGADVFLLAFSLISKASYENIAKKWIPELRHYAPGVPIILVGTKLDLRDDSQFFQDHPGAAPITTAQGEELRKLIGAPVYIECSSKTQKNVKAVFDSAIKVVLQPPKQKKTKRKGQKACSIM

SEQ ID NO: 18133 - protein, 395 aa, Chlamydophila caviae GPIC
MQRNNNFSKLETSYLFSSIRQKIRAFREAHPDVSIIDLSIGDTTQPLHTAVMDTFTKSVQKLGNPETYRGYGPELGLSTLREKLSEVFYQGKVSPEEIFISDGAKMDIFRLLSLFGPGKTIAVQDPSYPVYIDTALLAGAKKVIKLPCRKETDFFPVIPQGEEIDIFCLCSPNNPTGTVLTKEQLEELITYANSHGSIILFDAAYSAFISDPSLPKSIFEIPEARSCAIEINSFSKSLGFSGVRLGWNVVPKDLRYSNGLPIIDDWKRFLHTTFNGASLPVQEAAITGASLFPNLEAIAHYRHNSSLLREALQKAEFSVYGGEHAPYLWVEVPKILPDEDFFDFFLTQYHIAITPGKGFGACGKGYVRFSSLGKIEDIMAACQRLTLTSVYDRMV

SEQ ID NO: 18134 - protein, 523 aa, Datisca glomerata
MPAVGGIVVGGSKKEYPGNLTPYVTITCIVAAMGGLIFGYDIGISGGVTSMDSFLKKFFPAVYRKKELDSTTNQYCQYDSQTLTMFTSSLYLAALLASIVASTITRKFGRRLSMLFGGILFCAGAIINGFAQAVWMLILGRMFLGFGIGFSNQSVPLYLSEMAPYKYRGALNIGFQLSITIGILVANVLNYFFAKIRGGWGWRLSLGGAMVPALIITVGSLLLPDTPNSLIERGNRDEARSKLQRVRGVDDVDEEFNDLVAASEESKQVEHPWTNLLRRKYRPHLAMAILIPFFQQLTGINVIMFYAPVLFNTIGFGSDASLMSAVITGCVNVAGTLVSIYGVDKWGRRFLFLEGGFQMLICQAVVAAAIGAKFGVNGNPGELPKWYAIVVVLFICIYVAGFSWSWGPLGWLVPSESFPLEIRSAAQSINVSVNMIFTFAIAQIFLTMLCHLKFGLFIFFAFFVVVMSIFVYFFLPETKGIPIEEMGRVWKSHWYWSRFVTDADYTIGSGVEMGKGAQELKNI

SEQ ID NO: 18135 - protein, 296 aa, Zea mays subsp. mexicana
RPEIAHAHQPVMSPSHHGWDGNGAAAVPTPMPKRLDGKVAIVTGGARGIGEAIVRLFAKHGARVVTADIDDAAGEALASALGPQVSFVRCDVSVEDDVRRAVDWALSRHGGRLDVYCNNAGVLGRQTRAARSILSFDAAEFDRVLRVNALGAALGMKHAARAMAPRRAGSIVSVASVAAVLGGLGPHAYTASKHAIVGLTKNAACELGAHGVRVNCVSPFGVATPMLINAWRQGHDDATADADRDLDLDVTVPSDQEVEKMEEVVRGLATLKGPTLRPRDIAEAVLFLASDEARYI

SEQ ID NO: 18136 - protein, 359 aa, Hordeum vulgare subsp. vulgare
MIEGAGSIVDAHTVEVTQPDGSKQRHTTKHILIATGSRATLVNIPGKELAITSDEALSLEELPKRAVILGGGYIAVEFASIWKGLGAQVDLFYRKELPLRGFDDEMRTVVASNLEGRGIRLHPGTNLTELSKTADGIKVVTDKGDEFIADVVLFATGRAPNSNRLNLEAVGVEVDQIGAIKVDEYSRTSVPNIWAVGDVTNRINLTPVALMEATCFAKTVFGGQTVKPDYKDVPCAVFCIPPLSVVGLSEQEALAEAKNDLLVYTSSFNPMKNSISKRQEKSIMKLVVDAETDKVLGAAMCGPDAAEIMQGIAVALKAGATKATFDSTVGIHPSAAEEFVTMRTLTRRVSPASKPKTNL

SEQ ID NO: 18137 - protein, 671 aa, Geobacter sulfurreducens PCA
MPELKRSVCPYDCPDTCGLLVEVENGRAVRVTGDPDHPFTRGTLCPKMLHYEKTVHSSRRLTTPLVRTGPKGSGSFRPASWDETVAAIASRWREIIAVHGAEAILPYSYAGTMGLVQRNAGHPFFHRLGASRLERTICSPAKEAGWKAVMGDTPAPHPDEVAESDLVILWGINAAATNIHFLHGVREARRRGAPVWVIDTYRTPTAAAADRVILPRPGSDGALALGMMHVLARDGLVDRAFLAERVQGYDELAERILPDYPPERVAALTGIPAAEIEELARRYGRARAPFIRLGSGLSRYGNGAMTVRCIAALPALTGAYAVRGGGCLASTSTGPAFALGEVLREDFMARPTRVVNMNRLGHALTGLADPPVMSLYVYHSNPAAVTPDQNEVIRGLCRDDLFTVVHERFLTDTARYADIVLPATSSLEHADVYRAYGTYCIQRAHPAIPPVGESRSNWDTFALLAGAMGFEEEFFRRSAGEMIDRLLSVPTAMRAGIDQVRFDAGLAVELPLAPDAPRIFATPSGKVEILNPREPEPLPRHIPCHEDAGELPLRLMTAPTPYALNASFYEQEELRQKQGGAMSLLLNPAEATARNLAEGQRVTAVNDRGRVAFILRITDRVPPGVAVAEGVWWLEHAPGDRTVNALTSQRLTDRGNGSTFYDTRIEVLPAP

SEQ ID NO: 18138 - protein, 138 aa, Shorea singkawang
EKNIPVLLGLLSIWNVSFLGYPARAILPYSQALEKFAPHIQQVSMESNGKGVSIDGVPLPYEAGEIDFGEPGTNGQHSFYQLIHQGRVIPCDFIGSAKSQQPIHLEGEVVSNHDELMSNFFAQPDALAFGKTPEELHK

SEQ ID NO: 18139 - protein, 333 aa, Craterostigma plantagineum
MNQQQVKVSKNNKQVNNCEDDDDSSDLRRGPWTVDEDFTLINYIAHHGEGRWNSLARFAGLKRTGKSCRLRWLNYLRPDVRRGNITLEEQLLILELHSRWGNRWSKIAQHLPGRTDNEIKNYWRTRVQKHAKQLKCDVNSKQFKDTMRYLWMPRLVERIQASATTDDGAPPAVASSPSSAMNTACYSAAMAAGDHRRQFMLMPQYYATTTTTHNNSMIAQENSSTVASSESFGSLSSELTAEANYANYHRVINGADHQQIDSSTTSYDWQNCAVGNNGNSDQLGMGFADDRRSNEQWMMMTDDVVDNGGSSDQDNNLWNVDDVWFLQQFSSCF

SEQ ID NO: 18140 - protein, 347 aa, Mycobacterium tuberculosis CDC1551
MMVSPATTATMSAWQVRRPGPMDTGPLERVTTRVPRPAPSELLVAVHACGVCRTDLHVTEGDLPVHRERVIPGHEVVGEVIEVGSAVGAAAGGEFDRGDRVGIAWLRHTCGVCKYCRRGSENLCPQSRYTGWDADGGYAEFTTVPAAFAHHLPSGYSDSELAPLLCAGIIGYRSLLRTELPPGGRLGLYGFGGSAHITAQVALAQGAEIHVMTRGARARKLALQLGAASAQDAADRPPVPLDAAILFAPVGDLVLPALEALDRGGILAIAGIHLTDIPDLNYQQHLFQERQIRSVTSNTRADARAFFDFAAQHHIEVTTPEYPLGQADRALGDLSAGRIAGAAVLLI

SEQ ID NO: 18141 - protein, 298 aa, Zea mays subsp. mexicana
RPEIAHAHQPVMSPSHHGWDGNGAAAVPTPMPKRLDGKVAIVTGGARGIGEAIVRLFAKHGARVVIADIDDAAGEALASALGPQVSFVRCDVSVEDDVRRAVDWALSRHGGRLDVYCNNAGVLGRQTRAARSILSFDAAEFDRVLRVNALGAALGMKHAARAMAPRRAGSIVSVASVAAVLGGLGPHAYTASKHAIVGLTKNAACELGAHGVRVNCVSPFGVATPMLINAWRQGHDDATANADRDLDLDLDVTVPSDQEVEKMEEVVRGLATLKGPTLRPRDIAEAVLFLASDEARYI

SEQ ID NO: 18142 - protein, 451 aa, Bradyrhizobium japonicum USDA 110
MPINILMPALSPTMEKGNLAKWLKKEGDKVKSGDVIAEIETDKATMEVEAIDEGTIAKILVPEGTQDVPVNDVIAVLAGEGEDVKAAGAAKPSASAAPPKATDAPAAAPAPATAPAAPKAAPPPAAAPAPQAAAPAAQSNGHGGRVFSSPLARRLAKDAGIDVSMVTGTGPHGRVVARDVEQAKSGKGLKAPAAAPSSAPSIAPTMSDKQILSLFEPGSYDIVPHDGMRRTIAQRLTASIQNVPHFYLTIDCDIGKLLAAREEINAAAPKDKEKKPLYKISVNDFVIKAMAVALQKIPNCNVSWTESGMVKHHHSDVGVAVAMPGGLITPIIRKAETKTLSTISNEMKDFAARARSRKLKPEEYQGGTTAVSNLGMYGISHFTAVINPPHATILAVGTSEERPVVRNGKIEIAHMMSVTLSCDHRAIDGALGAELIGAFKQLIENPVMMMV

SEQ ID NO: 18143 - protein, 276 aa, Zea mays subsp. mexicana
RPEIAHAHQPVMSPSHHGWDGNGAAAVPTPMPKRLDGKVAIVTGGARGIGEAIVRLFAKHGARVVIADIDDAAGEALASALGPQVSFVRCDVSVEDDVRRAVDWALSRHGGRLDVYCNNAGVLGRQTRAARSILSFDAAEFDRVLRVNALGAALGMKHAARAMAPRRAGSIVSVASVAAVLGGLGPHAYTASKHAIVGLTKNAACELGAHGVRVNCVATPMLINAWRQGHDDATADADRDLDLDLDVTVPSDQEVEKMEEVVRGLATLKGPTLRYI

SEQ ID NO: 18144 - protein, 138 aa, Shorea ovalis
EKNIPVLLGLLSIWNVSFLGYPARAILPYSQALEKFAPHIQQVSMESNGKGVSIDGVPLPYEAGEIDFGEPGTNGQHSFYQLIHQGRVIPCDFIGSAKSQQPIHLKGEVVSNHDELMSNFFAQPDALAFGKTPEELHK

SEQ ID NO: 18145 - protein, 160 aa, Zea mays
MESKHTDQANVKAKLSTMHSKVICCKLYISESQNAAVVDAISRIGQKDPEVVLLNKFEDEYYNRVRYTLVSYITNESSTGGAVFSPIRKVLLAMIEAAFSAINLEVHCGTHPRIGVVDDISFHPLNQADTIEDAAQLAKLVASDIGNGLQGVSSDKIFYN

SEQ ID NO: 18146 - protein, 298 aa, Zea mays subsp. mexicana
RPEIAHAHQPVMSPSHHGWDGNGAAAVPTPMPKRLDGKVAIVTGGARGIGEAIVRLFAKHGARVVIADIDDAAGEALASALGPQVSFVRCDVSVEDDVRRAVDWALSRHGGRLDVYCNNAGVLGRQTRAARSILSFDAAEFDRVLRVNALGAALGMKHAARAMAPRRAGSIVSVASVAAVLGGLGPHAYTASKHTIVGLTKNAACELGAHGVRVNCVSPFGVATPMLINAWRQGHDDATADADRDRDLDLDVTVPSDQEVEKMEEVVRGLATLKGPTLRPRDIAEAVLFLASDEARYI

SEQ ID NO: 18147 - protein, 138 aa, Shorea ovalis
EKNIPVLLGLLSLWNVSFLGYPARAILPYSQALEKFAPHIQQVSMESNGKGVSIDGVPLPYEAGEIDFGEPGTNGQHSFYQLIHQGRVIPCDFIGSAKSQQPIHLKGEVVSNHDELMSNFFAQPDALAFGKTPEELHK

SEQ ID NO: 18148 - protein, 125 aa, Triticum aestivum
  unsure (1)..(125): unsure at all Xaa locations
SVAFKAAASVYSRFIALSAEQLRQIGVYARKASYLHDLARKYASGILSDDNIVAMDDRSLAAMLTMVNGIGAWSVHMFMIFSLARPDVLPSADLGIRKGVQMLYGLEXCPRPSQMEKLXCGRWRP

SEQ ID NO: 18149 - protein, 428 aa, Escherichia coli CFT073
MRMSSNKELMQRRSQAIPRGVGQIHPIFADRAENCRVWDVEGREYLDFAGGIAVLNTGHLHPKVVAAVEAQLKKLSHTCFQVLAYEPYLELCEIMNQKVPGDFAKKTLLVTTGSEAVENAVKIARAATKRSGTIAFSGAYHGRTHYTLALTGKVNPYSAGMGLMPGHVYRALYPCPLHGISEDDAIASIHRIFKNDAAPEDIAAIVIEPVQGEGGFYAATPAFMQRLRALCDEHGIMLIADEVQSGAGRTGTLFAMEQMGVAPDLTTFAKSIAGGFPLAGVTGRAEVMDAVAPGGLGGTYAGNPIACVAALEVLKVFEQENLLQKANVLGQKLKDGLLAIAEKHPEIGDVRGLGAMIAIELFEDGEHSKPDVKLTAEIVARARDKGLILLSCGPYYNVLRILVPLTIEDAQIRQGLEIISQCFAEAKQ

SEQ ID NO: 18150 - protein, 253 aa, Oryza sativa
MEVKCRRLEGKVAVVTASTQGIGLAIAERLGLEGAAVVISSRKKKNVDEAVVGLRAKGITVVGVVCHVSIPEQRKNLIDTAVKNFGHIDIVVSNAAANPSVDNILEMKEPILDKLWDINVKASILLLQDAAAYLRKGSSVILISSITGYNPEPALSMYAVTKTALLGLTKALAAEMGPNTRVNCIAPGFVPTNFARFLTTNDTIKNELIDRSTLKRLGTVEDMAAAAAFLASDDASFITAETIVVAGGTRSRL

SEQ ID NO: 18151 - protein, 578 aa, Psychrobacter sp. 273-4
MEIKAPDLGVDSAEVSEIMVAVGDVIAKDDNIILLESDKASVEVPSSAAGKVTKISVAVGDQVSEGMVLIELESETENQDDSQSTEAAVADTQDKSRDTEQEETQKEEQSDKVTAESNTAQPAQQAATATTHALPDLGVDEAQVSEIMVSVGDMVTADQSILLIESDKASVEVPAPQAGKVEKILVQTGDMVANGQDFIVIIGQSSDNTNITSEAKAEDAQSQDPKPAATDEKADASQKADKQVTTAPKQAANATTSASNKLTEAQVNEKMVDVYAGPAVRKLARQLGVDISEVAGSALNARILKEDLFAHVKQSLTTQQASPATATGASRASLPSLPDMSNVEIWGETETQDLTRLQKVSIPQLNYNTYLPQVTQFDLSDITETEQLRSELKGGMKAEGIGLTILAFIVKATAYALTQHPRFNSHLSDDNTQVILRKSVNMGIAVATDDGLIVPVIKNAHEKGIKQIAIEIGELAIKARDKKLSTKDLQGASFTISSQGILGGTAFTPLVNWPQVGILGASEATMQPKWNAAKQAFEPRLMLPLSLSYDHRVINGADAAVFTRYVATLLADPRRILL

SEQ ID NO: 18152 - protein, 304 aa, Zea mays
MCGGAILAELIPTTPARRGGAAWPAGKCKRRKADDFEAAFREFDEDSEEEEEEDEGVVESKPAFVVRASSAATQPRARQEQRSRRRAPDQQYRGVRRRPWGKWAAEIRDPVKGVRVWLGTFPSAEAAARAYDHAARHIRGPRAKLNFPSSSASAAGAPASRKRARAADAVIDLEEQEQRPAAAALKHEAAECSGSDALPDFSWQGVSAAYDEPPAPRPAFDFEARPESAADEASPRASDSESDALFDSLLFGDQFAFFDAGAYESLDSLFSADAVQSNAAAAADQDMPLWSFDDGCLVEDNLSF

SEQ ID NO: 18153 - protein, 236 aa, Zea mays
MPSQSTHTSSSLSSSTAPILPCSSAAALFRSVMAAVATETPFHVLAVDDSLPDRKLIERLLKTSSFQVTTVDSGSKALQFLGLHDQDSTVPPVHTHQLDVAANQDVAVNLIITDYCMPGMTGYDLLKKIKESSSLRDIPVVIMSSENIPSRINRCLEEGADEFFLKPVRLSDMNKLKPHILKSRCNQEQHQQSDSHSGERRNPTIGSSSDSINNRKRKGAGTEEILPQLANRSRHS

SEQ ID NO: 18154 - protein, 305 aa, Zea mays
MAMQAARRLASLKLQRRLLLPSQAESPSISIPTAAAAAAFLHSHATSFGYKQVREEDKSKLVGNVFSSVASSYDLMNDLMSVGLHRLWKDRLISKLNPFPGMKHLDVAGGTGDVAFRVLEIVKSVGHRAMQGTLTETEEGTHIYVCDINPNMLNVGKKRAAERGYSEEHCLSWIQGDAEALSFEDGSMDGYTIAFGIRNVTHIEKALSEAYRVLKQGGRFLCLELSHVDVPIFKEIYDVYSFSMVPAIGELVAGDRQSYQYLVESIRRFPNQEKFAQMIQEAGFQRVEYENLVGGVVAIHSGLKL

SEQ ID NO: 18155 - protein, 511 aa, Bruguiera gymnorrhiza
MAMASFARRKAYLLTRNLSNNSCSDALSCSFCLSSFSRGFASAGSDDNDVVVIGGGPGGYVAAIKAAQLGLKTTCIEKRGALGGTCLNVGCIPSKALLHSSHMFHEAKHSFASHGVKFSSVEIDLPAMMAQKEKAVSTLTKGIEGLFKKNKVTYVKGYGKFVSPSEVSVDTLEGGNIVVKGKNIIIATGSDVKSLPGITIDEKKIVSSTGALALSEIPRKLVVIGAGYIGLEMGSVWGRLGSEVTVVEFAPDIVPSMDGEIRKQFQRTLEKQKMKFILKTKVVGVDTSGDGVKLTLEPASGGNQTTLEADVVLASAGRIPFTAGLGLDKIGVETDKVGRVLVNDRFQTNASGVYAIGDVIPGPMLAHKAEEDGVACVEFIAGTHGHVDYDKVPGVVYTHPEVASVGKTEEQVKSLGIDYRVGKFPFLANSRAKAIDDAEGIVKILAEKETDKVLGVHIMSPNAGELIHEAVLALTYDASSEDIARVCHAHPTMSEALKEAAMATYDKPIHI

SEQ ID NO: 18156 - protein, 252 aa, Oryza sativa
MPSLELHKLPTLAGAAIPNPIARHPLYHPSPSFFISPTDVVLRDILFDASPASAAGERRRRHVAAYHRAGPRREVAFDPATVRAAIFTCGGLCPGTNTVVRELVVGLSELYGVRGGVFGVRNGYRGFYSDEVVPLDPAAVEHWHKAGGAALGTSRGGFDLARIVDAIERHGFNQVYAVGGDGTMRGAARIHREVRRRGRLAVAVAGIPKTVDNDVGVVDRSFGFHTAVEAAQQAIAAGHVEAESAANGVGAA

SEQ ID NO: 18157 - protein, 434 aa, Euglena gracilis
MLPRRLLVPLFQAARTRGYAEKILMPALSPTMEAGTIATWKKKVGDKLRPGDVLCSVETDKATLDFEWAGDEGIVAQLALEPGHEPVPVGTPIAVLADDESDLPAAKAMDLSQGTSKAAKSSPAAPAAAAPPSEAPAVKAPSSSPKSEGVKPEPYTSAKVRASPAAMAVFAKHIQGTGPNGRIVEADVEAFLKDAGSGKVAGAAATPAPSAAGTLPAQYEDTPASLMRKSIASRLTASKVEIPHFYLTVDVAVEKMKEMVAALNAGAKDKEYKITVNDFLVKACALACKKVPAANSQWHGDKIRRFHSVDISVAVATPTGLITPVVYNADLKGLKEISNDIRTLAALAREGKLTPEQYIGGTFTISNLGSYGVKHFTAIINPPQACILAVGAAQENGLMSVTLSCDHRVVDGAVGATWLQAFKGYVETPSSLLL

SEQ ID NO: 18158 - protein, 215 aa, Zea mays
MAHRVDNEYDYLFKIVLIGDSGVGKSNILSRFTRNEFCLESKSTIGVEFATRTLQIEGKTIKAQIWDTAGQERYRAITSAYYRGAVGALLVYDITKKQTFENIQRWLRELRDHADSNIVIMMVGNKSDLNHLRSVPEEDGQALAEKEGLSFLETSALEALNVEKAFQTVLSDIHQIISKKALAAQEAAGSGPPGQGTTINVADSSANMKGGCCSS

SEQ ID NO: 18159 - protein, 636 aa, Triticum aestivum
  unsure (1)..(636): unsure at all Xaa locations
MVAELRRDDMAEEAGIVRDAVAFRLVEHVLQSVRMEPFLVDPRDLEQYEKMLKTLDTSKRKSADDEALYMTCLKALSDAVSKIDIMYHHSLLNNIFSVRIWYLQRDTMVALLDLITRLAAVADQYLRECLQMLVNNFTPPIVGERNEVPPWAVSRKKDIFSYLCGSLKTISDTVPLAPRMLRDIIDRSMPKLFDNKAKMISFVECMLGLDTDRMGDLIGAILLAKVVDLLTELDVNITWEDILQEEHDKGIFEMELEDLDADDDGDGFGQAGTKVCFGGNACAEKLDGLMVVVCEHLKSLDRQCLYKEFVILKTIFRASLLRVHRSKFAQFIIFYTCSLDPKTLGEDFAVFLTDIVTEKKEDPISRMSAVSYVGSYLSRARFISADTVVTILKKLLDWCDEYCGLTDSKSSQXEATPIPNHQLFYATCQAVMYVLCFRLRSIMDYPNLKSDLFHMPFGFLFRHRLEPLKVCLPSIVNEFLRQAKDAGLVAAFVDPAAEDAIESDLSRTFGGINRLDMFFPFDPYLLKESDRYIRPNFEFWSMVKTTYSDDTDDDDDELEDLDAPEMNVGSLDDHVEIDINSDDDDLEYTMNKMSITPHHSFLHQMAMDSDGGLSMPARIRPSTSPPSRWAMSGESP

SEQ ID NO: 18160 - protein, 424 aa, Atriplex prostrata
YLRAIAAKITERKDHFVKLETLDSGKPFDEALLDIDDVAGCFEYYADQAEALDAKQKAPIALPMDTFKSHVLRQPIGVVGLISPWNYPLLMATWKVAPALAAGCAAILKPSEMASVTCLELADVCKEVGLPPGVLNILSGYGPEAGGPLASHPDVDKVAFTGSTATGSKIMSSAAQLVKPVTLELGGKSPIILFEDVDLDQAAEWAAFGCFWTNGQICSATSRLLVHESIAAEYLDKLVKWCKNIKISDPFEDGCRLGPVVSKGQYEKVLKFISTAKSEGATILCGGSRPEHLKKGYFIEPTIISDVSTSMQIWKEEVFGPVLCVKTFSSDEEAIELANDTQYGLGAAVLSKNLERCEKVTKALEVGIVWVNCSQPCFCQAPWGGAKRSGFGRELGEWGIENYLNIKQVTSDISDEPWGWYKSP

SEQ ID NO: 18161 - protein, 450 aa, Escherichia coli O157:H7 EDL933
  unsure (1)..(450): unsure at all Xaa locations
MTKHYDYIAIGGGSGGIASINRAAMYGQKCALIEAKELGGTCVNVGCVPKKVMWHAAQIREAIHMYGPDYGFDTTINKFNWETLIASRTAYIDRIHTSYENVLGKNNVDVIKGFARFVDAKTLEVNGETITADHILIATGGRPSHPDIPGVEYGIDSDGFFALPALPERVAVVGAGYIAVELAGVINGLGAKTHLFVRKHAPLRSFDPMISETLVEVMNAEGPQLHTNAIPKAVVKNADGSLTLELEDGRSETVDCLIWAIGREPANDNINLEAAGVKTNEKGYIVVDKYQNTNVEGIYAVGDNTGAVELTPVAVAAGRRLSERLFNNKPDEHLDYSNIPTVVFSHPPIGTVGLTEPQAREQYGDDQVKVYKSSFTAMYTAVTTHRQPCRMKXVCVGPEEKIVGIHGIGFGMDEMLQGFAVALKMGATKKDFDNTVAIHPTAAEEFVTMR

SEQ ID NO: 18162 - protein, 474 aa, Euglena gracilis
MFRQSFIQLAKHDLIVIGGGPGGYVAAIKAAQLGLNVACVEKRGTLGGTCLNVGCIPSKALLNASHHYHDAKHKFAGYGIDIPSVSMDIPKMQGTKAKSVTRLTGGIELLFKKNKVTYYKGFASLEGDKKVKVVGETTEVHEADKILIATGSEPIELPFLKFDEKVVCSSTGALDFQEVPAHLVVIGAGVIGLELGSVWSRLGSKVTVVEFMDRICPFMDADVGKEFHRILKKQGLQIKTSTKVVAGKVEGGQVILELESVDGAKKETLQANAVLVSVGRRPFTDGLGLDKVGVELNAKKFIVVDDHFKTNKDGIYAVGDVIHRGPMLAHKAEDEGICVAEMFAGKAGHINYDTIPNVIYTHPEVAWVGKTEEDLKKEGRKLKTSKFPFQANSRAVTNVDTEGFVKVVTDADTDRLLSMSIINSNAGEAIAEAVLAMEYSGSAEDIGRTCHAHPTLSEAIKEACMAAYDKPIHV

SEQ ID NO: 18163 - protein, 500 aa, Atriplex prostrata
MAFPIPVRQLFIDGEWREPLLKNRIPIINPSTEEIIGDIPAATAEDVEVAVVAARKAFKRNKGRDWAATSGAHRAKYLRAIAAKITERKDHFVKLETLDSGKPFDEAVLDIDDVASCFEYFAGQAEALDAKQKAPVTLPMDRFKSHVLRQPIGVVGLISPWNYPLLMATWKIAPALAAGCTAVLKPSELASVTCLEFGEVCNEVGLPPGVLNILTGLGPDAGAPIVSHPDIDKIAFTGSSATGSKIMASAAQLVKPVTLELGGKSPVIMFEDIDIETAVEWTLFGVFWTNGQICSATSRLLLHESIAAEFVDRMVKWTKNIKISDPFEEGCRLGPVISKGQYDKIMKFISTAKSEGATILCGGSRPEHLKKGYYIEPTIITDITTSMQIWKEEVFGPVICVKTFKTEDEAIELANDTEYGLAGAVFSKDLERCERVTKALEVGAVWVNCSQPCFVHAPWGGVKRSGFGRELGEWGIENYLNIKQVTSDISDEPWGWYKSP

SEQ ID NO: 18164 - protein, 266 aa, Triticum aestivum
  unsure (1)..(266): unsure at all Xaa locations
MDRELEEANCKFAWLKLACAEDELDSCATLLSELKVLLTKFPSMPPSFERTPNAVAELRLARAIYEFAVIFSIKVKDQDAFERNFFQLKVFYMDTRGILPPSPEEYRILGLNLMRLLAENRVSEFHTELELLPPRALDHPCIKYAVELEQSFMEGTYNRLTNGRQAVPHETYLYFMDLLAETVRDEIADCSGQAYDHLPVDDTRKMLMFSSEQKLLEYISEIXHEWEVQNHSVLFHMAKVQPRVGIQAHQMIKRXXCYARELERXV

SEQ ID NO: 18165 - protein, 229 aa, Chromobacterium violaceum ATCC 12472
MKSYGAEFLGTFWLVLGGCGSAVLAAGFPNLGIGFAGVALAFGLTVVTMAYAIGHISGCHLNPAVSIGLWAGGRFPAGQLAPYIVAQVLGAIAAGAVLYVIASGGAGFDVAKGFASNGYAEHSPGGYSLLAALVCEVVMTMFFLLVIMGATDKRAPAGFAPLAIGLALTLIHLISIPVTNTSVNPARSTGVALFVGGWAVQQLWLFWLAPIIGAVLGAKVYRLIAGESE

SEQ ID NO: 18166 - protein, 300 aa, Zea mays subsp. mexicana
RPEIAHAHQPVMSPSHHGWDGNGATAVPTPMPKRLDGKVAIVTGGARGIGEAIVRLFAKHGARVVIADIDDAAGEALASALGPQVSFVRCDVSVEDDVRRAVDWALSRHGGRLDVYCNNAGVLGRQTRAARSILSFDAAEFDRVLRVNALGAALGMKHAARAMAPRRAGSIVSVASVAAVLGGLGPHAYTASKHAIVGLTKNAACELGAHGVRVNCVSPFGVATPMLINAWRQGHDDATADADRDRDLDLDLDVTVPSDQEVEKMEEVVRGLATLKGPTLRPRDIAEAVLFLASDEARYI

SEQ ID NO: 18167 - protein, 296 aa, Zea mays subsp. parviglumis
RPEIAHAHQPVMSPSHHGWDGNGAAAVPTPMPKRLDGKVAIVTGGARGIGEAIVRLFAKHGARVVIADIDDAAGEALASALGPQVSFVRCDVSVEDDVRRAVDWALSRHGGRLDVYCNNAGVLGRQTRAARSILSFDASEFDRVLRVNALGAALGMKHAARAMAPRRAGSIVSVASVAAVLGGLGPHAYTASKHAIVGLTKNAACELGAHGVRVNCVSPFGVATPMLINAWRQGHDDATADADRDLDLDVTVPSDQEVEKMEEVVRGLATLKGPTLRPRDIAEAVLFLASDEARYI

SEQ ID NO: 18168 - protein, 199 aa, Magnaporthe grisea 70-15
MAAPGVQSLKCVVTGDGAVGKTCLLISYTTNAFPGEYIPTVFDNYSASVMVDGKPISLGLWDTAGQEDYDRLRPLSYPQTDVFLICFSIVSPPSFDNVKAKWYPEIDHHAPNVPIILVGTKLDLREDPSTLESLRSKRMEPVSYDQALICAKEIRAHKYLECSALTQRNLKSVFDEAIRAVLNPRPQPAKVKKSKCTIL

SEQ ID NO: 18169 - protein, 431 aa, Methanopyrus kandleri AV19
MAAESIAKAVHDVLATWGAQGPGAIFFLVWAAVLVVGMQLGFMFLEAGQVRTKNVVSVLMKNLLDLSLGGIVFIFFGFALAFPDYAQSIGKWIATMFTANPWSADPMKAADPYNLAYCFFQFAFCATAATIVSGAVAERINFKACLVMTVLITGLLYPIFVLWTWGGGWMGGDTGLFAKVFGQPYHDFAGSTVVHAIGGFLAMAAAYLLGPRIGRFKNGKPVPIPGHNIPQAFLGALFLAITWYGFNVGSSAVLYDPTNESWISSLVATLAMCGGAAAAAFTTRFDPLWAANGLIAGLVAICAGCDIMSPFGALLTGIVAGLIIKPAFRLLEKLEIDDVVAACPVHGFAGVWGAIAAGIFGAEALGGAGGVSLAAQIVGALVCIAWALGSGFATFYVIDKVIGLRATEEEEKGLDETEFGVSAYPYMETRD

SEQ ID NO: 18170 - protein, 437 aa, Saccharomyces cerevisiae
MAVSKVYARSVYDSRGNPTVEVELTTEKGVFRSIVPSGASTGVHEALEMRDEDKSKWMGKGVMNAVNNVNNVIAAAFVKANLDVKDQKAVDDFLLSLDGTANKSKLGANAILGVSMAAARAAAAEKNVPLYQHLADLSKSKTSPYVLPVPFLNVLNGGSHAGGALALQEFMIAPTGAKTFAEAMRIGSEVYHNLKSLTKKRYGASAGNVGDEGGVAPNIQTAEEALDLIVDAIKAAGHDGKVKIGLDCASSEFFKDGKYDLDFKNPESDKSKWLTGVELADMYHSLMKRYPIVSIEDPFAEDDWEAWSHFFKTAGIQIVADDLTVTNPARIATAIEKKAADALLLKVNQIGTLSESIKAAQDSFAANWGVMVSHRSGETEDTFIADLVVGLRTGQIKTGAPARSERLAKLNQLLRIEEELGDKAVYAGENFHHGDKL

SEQ ID NO: 18171 - protein, 273 aa, Yersinia pestis biovar Medievalis str. 91001
MQHRNITFIGAGNMARAIIAGLVAGGYPAKMISVCAPSAKNRDALATEFGVISSDDNIRESQKAEVVVLAVKPQLMADVCQQLQKQVDFSDKLVLSIAAGVQVARFYALLGNKLNLVRIMPNTPSLVGKGMSGLYAPEQVSAADRDFTTELMSAIGKVCWVDNEDGINSIIAAAGSSPAYFFLFMEAMQQETERLGFDSETARQLVQQAASGACALVEANPHVPLSALREQVTSKGGTTAEAIRVFNEQHLPEMVANAMRAAIARAKEMEKLF

SEQ ID NO: 18172 - protein, 398 aa, Fusobacterium nucleatum subsp. nucleatum ATCC 25586
MKKIITDLDLNNKKVLMRVDFNVPMKDGKITDENRIVQALPTIKYVLEHNAKLILFSHLGKVKIEEDKATKSLKAVAEKLSELLGKNVTFIPETRGEKLESAINNLKSGEVLMFENTRFEDLDGKKESKNDSELGKYWASLGDVFVNDAFGTAHRAHASNVGIAENIGNGNSAVGFLVEKELKFIGEAVNNPKRPLIAILGGAKVSDKIGVIENLLTKADKILIGGAMMFTFLKAEGKNIGTSLVEDDKLDLAKDLLAKSNGKIVLPVDTVIASEFKNDIEFSTVDVDNIPNNKMGLDIGEKTVTLFDSYIKTAKTVVWNGPMGVFEMSNFAKGTIGVCESIANLTDAVTIIGGGDSAAAAISLGYADKFTHISTGGGASLEFLEGKVLPGVEAISNK

SEQ ID NO: 18173 - protein, 288 aa, Glycine max
IRLEGSHAGNKLAMQEFMVLPVGASSFKEAMKMGVEVYHNLKSVIKKKYGQDAINVGDEGGFAPNIQENKEGLELLKTAIAKAGYTGKVVIGMDVAASEFYKEDKTYDLNFKEDNNDGSQRISGDALKDLYKSFVSEYPIVSIEDPFDQDDWEHYAKLTAEVGANVQIVGDDLLVTNPKRVQKAIDTKACNALLLKVNQIGSVTESIEAVRMSKKAGWGVMASHRSGETEDTFIADLSVGLATGQIKTGAPCRSERLAKYNQLLRIEEELGAEAVYAGANFRTPVEPY

SEQ ID NO: 18174 - protein, 408 aa, Prochlorococcus marinus subsp. pastoris str. CCMP1378
MVKVNENYLKLKAGYLFPEISKRVNNYTQANSSSKVIKLGIGDVTEPLPKACVKAMGEALNEMGTNNGFKGYGPEQGYGWLREKISVNDFISRGCQISSEEIFVSDGSKCDSSNILDILGSDNLIAVTDPVYPVYVDTNVMTGRTGETLQNGTYQGLVYLAINEENKFQPEIPKKKVDIVYLCFPNNPTGATITKQELKKWVDYAIENKSLILFDAAYEAFIQDKNIPHSIYEIEGAKNCAIEFRSFSKNAGFTGVRCAYTVIPKNLSGQNSKGDKIDLWSLWNRRQCTKFNGVSYIVQRGAEAVYSSQGKKEVNSLIDFYMKNAEIMQNKLRSAGFKVYGGDNAPYVWIKVPDRMTSWDFFDYLLEKADVVGTPGSGFGLAGEGYFRLSAFNSRMNVNNAMERIINI

SEQ ID NO: 18175 - protein, 181 aa, Triticum aestivum
  unsure (1)..(181): unsure at all Xaa locations
MAPTVMASSATSVAPFQGLKSTAGLPVSXRRFSNGASLGSVSNGGRIRCMQVWPIEGIKKFETLSYLPPLSTEGPLLKQGSXPLIRSQWVPCLEFSKGGVHSSREHNAFSGYYDGXRYWDNVELPMFGCTDATXVINXVEESRRIPDPYVRIXXSTTCSRECVNLTLQATGARSGKAKSHH

SEQ ID NO: 18176 - protein, 187 aa, Triticum aestivum
  unsure (1)..(187): unsure at all Xaa locations
MAPTVMASSATSVAPFQGLKSTAGLPVSRRSNGASLGSVSNGGRIRCMQVWPIEGIKKFETLSYLPPLSTEALLKQVDYLIRSKWVPCLEFSKVGFIFREHNASPGYYDGRYWTMWKLPMFGCTDATQVINEVEEVKKEYPDAYVRIIGFDNMRQVQXCVSFIAFKPPGCEESGKGLKQAQLTTGQI

SEQ ID NO: 18177 - protein, 298 aa, Zea mays subsp. parviglumis
RPEIAHAHQPVMSPSHHGWDGNGAAAVPTPMPKRLDGKVAIVTGGARGIGEAIVRLFAKHGARVVIADIDDAAGEALASALGPQVSFVRCDVSVEDDVRRAVDWALSRHGGRLDVYCNNAGVLGRQTRAARSILSFDAAEFDRVLRVNALGAALGMKHAARAMALRRAGSIVSVASVAAVLGGLGPHAYTASKHAIVGLTKNAACELGAHGVRVNCVSPFGVATPMLINAWRQGHDDATADADRDLDLDLDVTVPSDQEVEKMEEVVRGLATLKGPTLRPRDIAEAVLFLASDEARYI

SEQ ID NO: 18178 - protein, 298 aa, Zea mays subsp. parviglumis
RPEIAHAPQPVMSPSHHGWDGNGAAAVPTPMPKRLDGKVAIVTGGARGIGEAIVRLFAKHGARVVIADIDDAAGEALASALGPQVSFVRCDVSVEDDVRRAVDWALSRHGGRLDVYCNNAGVLGRQTRAARSILSFDASEFDRVLRVNALGAALGMKHAARAMAPRRAGSIVSVASVAAVLGGLGPHAYTASKHAIVGLTKNAACELGAHGVRVNCVSPFGVATPMLINAWRQGHDDATADADRDRDLDLDVTVPSDQEVEKMEEVVRGLATLKGPTLRPRDIAEAVLFLASDEARYI

SEQ ID NO: 18179 - protein, 296 aa, Zea mays subsp. parviglumis
RPEIAHAHQPVMSPSHHGWDGNGAAAVPTPMPKRLDGKVAIVTGGARGIGEAIVRLFAKHGARVVIADIDDAAGEALASALGPQVSFVRCDVSVEDDVRRAVDWALSRHGGRLDVYCNNAGVLGRQTRAARSILSFDAAEFDRVLRVNALGAALGMKHAARAMAPRRAGSIVSVASVAAVLGGLGPHAYTASKHAIVGLTKNAACELGAHGVRVNCVSPFGVATPMLINAWRQGHDDATADADRDLDLDVTVPSDQEVEKMEEVVRGLATLKGPTLRPRDIAEAVLFLASDEARYI

SEQ ID NO: 18180 - protein, 298 aa, Zea mays subsp. parviglumis
RPEIAHAHQPVMSPSHHGWDGNGAAAVPTPMPKRLDGKVAIVTGGARGIGEAIVRLFAKHGARVVIADIDDAAGEALASALGPQVSFVRCDVSVEDDVRRAVDWALSRHGGRLDVYCNNAGVLGRQTRAARSILSFDAAEFDRVLRVNALGAALGMKHAARAMAPRRAGSIVSVASVAAVLGGLGPHAYTASKHAIVGLTKNAACELGAHGVRVNCVSPFGVATPMLINAWRQGHDDATADADRDRDLDLDVTVPSDQEVEKMEEVVRGLATLKGPTLRPRDIAEAVLFLASDEARYI

SEQ ID NO: 18181 - protein, 404 aa, Acinetobacter sp. ADP1
MFQHIPPYAGDPILSLMEQFNADSREAKVNLSIGLYYNEDSIVPQLDSVIEAQKRIEPRQNKVKPYLPMEGFKPYRDAIQTLLFGHNSPAVKAGRAVTIQTLGGSGALKVGADFLKNYFPDSEVWVSQPTWDNHIAIFNGAGFKTHFYPYFDAETRGLDFEGMLATLKQLPKHSIVLLHPCCHNPTGVDLVPAQWDQVIDVLKAGHLIPFLDIAYQGFGDGMEQDAYAIRALDQSGLNFIVSNSFSKIFSLYGERVGGLTFVCDDAEAAQCTFGQLKATVRRIYSSPPTTGAWLVDQVLNDAELSQQWQNEVKEMRERILKMRIILRDELTKALPDRDFNYLVDQKGMFSYTGLTADQVDTLREDYAIYLVRSGRICVAGLNMNNVYIVAKAMAEVLATEVTPA

SEQ ID NO: 18182 - protein, 301 aa, Escherichia coli CFT073
MDEIMTNLKAVIPVAGLGMHMLPATKAIPKEMLPIVDKPMIQYIVDEIVAAGIKEILLVTHASKNAVENHFDTSYELESLLEQRVKRQLLAEVQSICPPGVTIMNVRQGEPLGLGHSILCARPAIGDNPFVVVLPDVVIDDASADPLRYTLAAMIARFNETGRSQVLAKRMPGDLSEYSVIQTKEPLDREGKVSRIVEFIEKPDQPQTLDSDIMAVGRYVLSADIWPELERTQPGAWGRIQLTDAIAELAKKQSVDAMLMTGDSYDCGKKMGYMQAFVKYGLRNLKEGAKFRKGIEKLLSE

SEQ ID NO: 18183 - protein, 849 aa, Azoarcus sp. CIB
MEAVQTSEIRWWKASKPVGMAEFGAPVKLSIDGVEVEAPAGASVLNAATAAGLYIPALCAHPDLPPAGQRGAGEGGCNLCMVEIEGTDGLSKACSTTVTAGMVVTTQSAAIQTVRQANLAKVLGPHPHVCLTCPQRDGCSRSQCSYGNPQETRCCTIFSSCELRKVSDYIGIPNTTPPYKPAQLPIIKDEPFFDRDYNLCIDCRRCLVACNDVRGVGCLEVKEVETPQGKRTYVGTIAPTLLESGCTFCQACVTVCPTGALMDRTLDPAKREESMVPCKSACPAGIDVPRYVQLAAEGKYGEAIAVVRERLPFPGILGRACFAMCESACRRKDLDDPLSIRNLKRIAADNDTGLWREHAKKLPATGKKAAVIGAGPAGLTVAYYLAKQGHGVTIFDAQPAAGGMARYGIPSYRVPAEVIDNEVAEVSALGVEFRYGAKVESVDTLFNDGYGAVFVGIGAQGGDNLGIPGDDLPGVVDSPTYLKAVTMGLVNTPEGIQTGRKVAVIGGGNVATDNARSSRRFGAEVDMVYRRTREEMPARLEEFEGCVEEGVNIRYLLAPKKIEPGTNGFRLQITYAKMALGEADASGRRRPVETGEEVVEGVDLVIAAIGQFPNRFGGFGVETDRKGRITVREDSMLTSRPKVYAGGDCVLGPSTLIESVAQGRTAASAMDIVLGGDGDISEVLLRSGWETNPRIGRKDGFNTTRKFHPIMLAPEQRTGWDEVELGFDDATARAEAARCFKCNLAPKIAEAILPPESSLKFDEATIASVPTESGVFQLLDGDKNVLMIKGVENLRDGLMEQLERGGDATNFVFEEAALFTSRESQMIQAYLQQYGKMPGGGSDELDDLF

SEQ ID NO: 18184 - protein, 123 aa, Streptomyces chrysomallus
SIEKPEVDFPGGEPPADLAIKDIWEGDGPVAQAGQTVSVHYVGVAFSTGEEFDASWNRGTPLQFQLGAGQVISGWDQGVQGMKVGGRRELIIPAHLAYGDRGAGGGKIAPGETLIFVCDLVAV

SEQ ID NO: 18185 - protein, 633 aa, Lactobacillus plantarum WCFS1
MCGLVGCLTDRRKVDNAAYDQVVREMTKMIVHRGPDDEGYFADDNITMGFRRLSIIDLAGGHQPLSYDNERYWLTFNGEIYNYVELREQLIQEGYTFKTDSDSEVILGMYAKYQAKLTTYLRGMFAFVIWDKQEKTLFAARDQFGIKPFYYAIAGDDFYYASESKAIYKILKDKHFDQEALQDYLTFQYVPETETLTKEIKMLAPGCSLTKQLGHAPQIKRYYHWEFHPVVRSEQDYATRLKETLIDSVKIHMRSDVPVGTFLSGGIDSSIVVAIAKQFNPNLKTISVGFERPGYSELDVAQETAAKLNVDNVQMTITPEAFMAAFPHFVWSMDDPLADPAAVPQYFLTKEAVKHVKVCLTGEGADELFGGYTIYHEPESLKAFRYTKPINGALQRIAAMMPAGMRGRSLLMRGTTPLEKRYVGNAFIFNETEKQQFMKHYNRDHSFQQTTRVFYDEAKHYDLISKMQFIDMHTWLNGDLLHNADRTALAHSLELRTPFVDREVFNLAAEIPANLRISHGTTKYILRKAVEDIVPAHVLYRKKLGFPVPIRLWLKDEMYDWAKNIIVTSQTDQYFDKTYFLKLLDDHRAGIRDNSRQLWTVLTFMMWHKLYVEADMLMDSVTANHLAEQVEIG

SEQ ID NO: 18186 - protein, 308 aa, Brassica rapa subsp. chinensis
MDCSSSLDISLNLNTNAFDRSFPAKLPKEEEVKVSTSAGVERKWLVKDKSASELREELNRVYSENKKIKEMLETVCEKYYALHHHLEKLQSRKSPGIDHIEQPTKKRKQDPEDFLGFPNGKTENSSSNQDHHHQQYEQKNQLLSCKRPVTDSFNKVKVSTVYFPADFSDTSLTVKDGYQWRKYGQKVTRDNPSARAYFRCSFAPSCPVKKKVQRSAEDSSILVATYEGTHNHLGPNASEGDATSQGGSSTVTLDMVHVGQRLDLEKNERGTMQEVLVQQMASSLTNDSNFTAALAAAITGRLMEQSRT

SEQ ID NO: 18187 - protein, 385 aa, Oceanobacillus iheyensis HTE831
MSECIGMLLAGGEGKRLGMLTKQGAKPAVPFGGKYRIIDFTLSNCTNSGIQTVGILTQYAPLELNKHIGNGKPWDMNHQHGGVSILPPYTGTKGGDWYSGTADAIYQNMNFIHQYEPEYVLIISGDHIYQMDYQQMLEQHKRTNADVTISVIEVPWAEAGRFGILHANDEQIIYEFEEKPKNPSSNLASMGIYIFNWKTLKKYLIEDANKPNSSRDFGKDIIPSMLNNQHRLYAFKFNGYWKDVGTIQSYWEANMDVLKDNNGYFSLHDRNWRIYTHDSNLPPHFIGTNGKAVNSYINSGSIIYGHIKNSIVFRNVSVQQGSYINQSIIHPNVKIGKDCVLDRVIVMENTTIPEGTIFRSDKEIEPFIINNEILNSMLAPAGGDV

SEQ ID NO: 18188 - protein, 450 aa, Triticum aestivum
MSTCAASLAPLLGTAAANATDYLCNQFADTTTAIDSTYLLFSAYLVFAMQLGFAMLCAGSVRAKNTMNIMLTNVLDAAAGALFYYLFGFAFAFGTPSNGFIGKHFFGLRDVPQVGFDYSFFLFQWAFAIAAAGITSGSIAERTQFVAYLIYSAFLTGFVYPVVSHWIWSADGWASASRTSGPLLFNSGVIDFAGSGVVHMVGGVAGLWGALIEGPRIGRFDHAGRAVALRGHSASLVVLGTFLLWFGWYGFNPGSFLTILKSYGPPGSIHGQWSAVGRAAVTTTLAGSTAALTTLFGKRLQTGHWNVLDVCNGLLGGFAAVTAGCSVVDPWAAIICGFVSAWVLIGLNKLAARFKFDDPLEAAQLHGGCGAWGVIFTALFARREYVEQIYGAPGRPYGLFMGGGGRLLGAHVVLILVIAAWVSCTMGPLFLALNKLGLLRISAEDQMAGM

SEQ ID NO: 18189 - protein, 258 aa, Triticum aestivum
MSATCAADLAPLLGAAAMNATDYLCNRFADTTSAVDSTYLLFSAYLVFAMQLGFAMLCAGSVRAKNTMNIMLTNVLDAAAGALFYYLFGFAFAFGTPSNGFIGKHFFGLKDMPQTGFDYSFFLFQWAFAIAAAGITSGSIAERTQFVAYLIYSAFLTGFVYPVVSHWIWSVDGWASAARTSGPLLFKSGVIDFAGSGVVHMVGGIAGFWGALIEGPRIGRFDHAGRSVALKGHSASLVVLGTSCSGSAGTVQPGSFVT

SEQ ID NO: 18190 - protein, 141 aa, Triticum aestivum
  unsure (1)..(141): unsure at all Xaa locations
GALPPACCLAARTRAISPPQAATPDLPPVRAGDXSESSVAAMGEDALFAQLTXVKGIGEWTVHMFMIFSLHRPDVLPSGDLGVRKGVQELYKLKALPKPEEMAALCERWRPYRSVGAWYMWRLLESKGAAVKKAKKGNASS

SEQ ID NO: 18191 - protein, 422 aa, Streptococcus thermophilus
MTVTIENIHAREIFDSRGNPTVEVDVRLTDGTLGRAAVPSGASTGDREAVELRDGGARLQGKGVSKAVANVNGEIYEALKGQSPFNQAKLDHLMIELDGTENKSCLGANAILGVSMAIFRAAANSEKIPLYRYFGGVDLELPQPFFNVINGGVHADSGIDVQEFLITPVKRDSFRDGLKKIANIYHTLKKILSDKGLKTPVGDEGGFAPKLGTTENAIAILYQPIDSAGYFPGEKIAIAIDSSSIEFYDDKKKFYRFEGKNLTSKELLTYYDNLVEKYPALISIEDGFSEHDWEGFAAQTKARGQKIQLVGDDIFVTNPTIFKEGIKKNVANAILIKLNQIGTVTETIETISLARKAGYKTMISHRSGETVDSYIADFSVAMHAGQIKSGSMARSERVEKYNQLLRIEEDLGKDVALAQFPG

SEQ ID NO: 18192 - protein, 346 aa, Corynebacterium efficiens YS-314
MGAMRIATLTSGGDCPGLNAVIRGIVRTASNEFGSTVVGYQDGWEGLLADRRVQLYDDEDIDRILLRGGTILGTGRLHPDKFRAGIDQVKANLADAGIDALIPIGGEGTLKGAKWLADNGIPVVGVPKTIDNDVNGTDFTFGFDSAVSVATDAIDRLHTTAESHNRVMIVEVMGRHVGWIALHAGMAGGAHYTVIPEVPFDISEICKRMERRFQMGEKYGIIVVAEGALPKEGTMELREGEVDQFGHKTFTGIGQQIADEVHRRLGHDVRTTVLGHIQRGGTPTAFDRVLATRYGVRAARACHEGQFNTVVALKGERIRMISFDEAVGTLKKVPMERWVTAQAMFG

SEQ ID NO: 18193 - protein, 397 aa, Zymomonas mobilis
MAFRTLDDIGDVKGKRVLVREDLNVPMDGDRVTDDTRLRAAIPTVNELAEKGAKVLILAHFGRPKGQPNPEMSLARIKDALAGVLGRPVHFINDIKGEAAAKAVDALNPGAVALLENTRFYAGEEKNDPALAAEVAKLGDFYVNDAFSAAHRAHVSTEGLAHKLPAFAGRAMQKELEALEAALGKPTHPVAAVVGGAKVSTKLDVLTNLVSKVDHLIIGGGMANTFLAAQGVDVGKSLCEHELKDTVKGIFAAAEKTGCKIHLPSDVVVAKEFKANPPIRTIPVSDVAADEMILDVGPKAVAALTEVLKASKTLVWNGPLGAFEIEPFDKATVALAKEAAALTKAGSLISVAGGGDTVAALNHAGVAKDFSFVSTAGGAFLEWMEGKELPGVKALEA

SEQ ID NO: 18194 - protein, 549 aa, Shigella flexneri 2a str. 2457T
MKNINPTQTAAWQALQKHFDEMKDVTIADLFAKDGDRFSKFSATFDDQMLVDYSKNRITEETLAKLQDLAKECDLAGAIKSMFSGEKINRTENRAVLHVALRNRSNTPILVDGKDVMPEVNAVLEKMKTFSEAIISGEWKGYTGKAITDVVNIGIGGSDLGPYMVTEALRPYKNHLNMHFVSNVDGTHISEVLKKVNPETTLFLVASKTFTTQETMTNAHSARDWFLKAAGDEKHVAKHFAALSTNAKAVGEFGIDTANMFEFWDWVGGRYSLWSAIGLSIVLSIGFDNFVELLSGAHAMDKHFSTTPAEKNLPVLLALIGIWYNNFFGAETEAILPYDQYMHRFAAYFQQGNMESNGKYVDRNGNVVDYQTGPIIWGEPGTNGQHAFYQLIHQGTKMVPCDFIAPAITHNPLSDHHQKLLSNFFAQTEALAFGKSREVVEQEYRDQGKDPATLDYVVPFKVFEGNRPTNSILLREITPFSLGALIALYEHKIFTQGVILNIFTFDQWGVELGKQLANRILPELKDDKEISSHDSSTNGLINRYKAWRG

SEQ ID NO: 18195 - protein, 391 aa, Glycine max
  unsure (1)..(391): unsure at all Xaa locations
MEDKLATTSEGQPIRCKAAICRKPGSPLSIEEIIVAPPMPREARIRVICTSLCHSDVTFWKMEVPPAICPRILGHEAVGXSEWXVESVGEDVTEVTKGDVVVPIFLPDCGECIDCKSSKSNLCSKFPFEVSPWMPRHATSRFTDLKGDIIHHFLFVSSFSEYTVVDIAHLTKIDPAIPPNRACLLSCGVSTGVGAAWRTAGVEPGSTVVIFGLGSIGLAVAEGARLCGATRIIGVDVNPEKYETGKKFGLTDFVHAGESENKSVSQVIIKMTGGGADYCFECVGMATLVQEAYASCRKGWGKAIVLGVEKPGSMLSLSCNEVLHSGKSLVGCLFGGLKPKSDVPILLKRYMDKELNLDEFVTHEVEFKDINKAFDLLIEGQCLRCVIWMDR

SEQ ID NO: 18196 - protein, 823 aa, Rhodobacter capsulatus
MTKFSGNELRAELYRRAFLSYSVAPGALGMFGRSLLAKGARAEALANGTVMSGSHWGVFTATVENGRATAFTPWEKDPHPSPMLAGVLDSIYSPTRIKYPMVRREFLEKGVNADRSTRGNGDFVRVSWDQALDLVAAEVKRVEETYGPEGVFGGSYGWKSPGRLHNCTTLLRRMLTLAGGYVNGAGDYSTGAAQVIMPHVVGTLEVYEQQTAWPVLAENTEVMVFWAADPIKTSQIGWVIPEHGAYPGLEALKAKGTKVIVIDPVRTKTVEFFGAEHITPKPQTDVAIMLGMAHTLVAEDLYDKDFIANYTSGFDKFLPYLDGETDSTPKTAEWAEGISGVPAETIKELARLFESKRTMLAAGWSMQRMHHGEQAHWMLVTLASMLGQIGLPGGGFGLSYHYSGGGTPSTSGPALAGITDGGAATKGPEWLAASGASVIPVARVVDMLENPGAEFDFNGTRSKFPDVKMAYWVGGNPFVHHQDRNRMVKAWEKLETFVVHDFQWTPTARHADIVLPATTSYERNDIETIGDYSNTGILAMKKIVEPLYEARSDYDIFAAVAERLGKGAEFTEGKDEMGWIKSFYDDAAKQGKAAGVQMPAFDAFWAEGIVEFPVTDGADFVRYASFREDPLLNPLGTPTGLIEIYSKNIEKMGYDDCPAHPTWMEPLERLDGPGAKYPLHIAASHPFNRLHSQLNGTVLREGYAVQGHEPCLMHPDDAAARGIADGDVVRVHNDRGQILTGVKVTDAVMKGVIQIYEGGWYDPSDVTEPGTLDKYGDVNVLSADIGTSKLAQGNCGQTVLAEVEKYTGPAVTLTGFVAPKAAE

SEQ ID NO: 18197 - protein, 902 aa, Chromobacterium violaceum ATCC 12472
MDKTETRTTCCYCGVGCGVLISSENGRIVGVRGDPDHPANYGRLCGKGLSLAASAASDSGRALHPEMRMARDVPRLRVGWDQALDAAADRFADIIRRHGPDAVAFYASGQLLTEDYYLFNKLAKGVAGTNNIDTNSRLCMSSAVTAYKMAFGADGPPACYEDLESAGCVLFAGSNMAYAHPVLFRRLEDARRDWSDARWIVVDPRRTDTAAMADLHLQIQPGTDVALFHGMLHHLIWEGLTDAGYIAAHTEGFDALKRMVRDYTPKMAAEICGVRAEDIATAAEWFGRSPASLSLYCMGLNQSSQGTAKNLALINLHLATGQIGRPGSGPFSLTGQPNAMGGREVGGMATMLAAHRDIANPDHRREVAAHWGVPEARLSSRPGLPAVAMFEALARGEIKAVWIVCTNPAHSLPDLALARQALSRAELVVVQDAFAATDTTAFADILLPAASWGEKEGTVTNSERRVSRVRAAVPPPGEARPDGWIAAEFGRRLAARLHPGEADHFAYADAGQVFDEHRALTVGRDLDMGGLDYRLLEEKGPQQWPLPAGQAEGQARRYVDGVFATDNGKARFHAIDYQPPVDKISAHYPFRLITGRLRDQWHGMSRTGRVPGLFSHSPEPELCMHPEDAERRNLCDGDLVRVASKRGQWVLPLKTDGDLMRGCVFAAMHWSRQFLSSGGCNEATIPAVDGLSFQPELKHAAVRVEKAELPWRALAALRHPDLPALQARLAPLLGDMDYAAMALAGRDTLLLRAAGASPRLDWLMRVLDALALFPGPDVLEYRDDGRGALKRVAWDGDRLAWLVFAGGAQDDRDAGERLLQSLLDGEPWRGPRLAAFSPAAAGAARRDRIVCQCKQVGEAAILARLAQGGGVAELQAELGCGMVCGTCAPELARMASGYRQHA

SEQ ID NO: 18198 - protein, 298 aa, Zea mays subsp. parviglumis
RPEIAHAHQPVMSPSHHGWDGNGAAAVPTPMPKRLDGKVAIVTGGARGIGEAIVRLFAKHGARVVIADIDDAAGEALASALGPQVSFVRCDVSVEDDVRRAVDWALSRHGGRLDVYCNNAGVLGRQTRAARSILSFDAAEFDRVLRVNALGAALGMKHAARAMAPRRAGSIVSVASVAAVLGGLGPHAYTASKHAIVGLTKNAACELGAHGVRVNCVSPFGVATPMLINAWRQGHDDATADADRDLDLDLDVTVPSDQEVEKMEEVVRGLATLKGPTLRPRDIAEAVLFLASDEARYI

SEQ ID NO: 18199 - protein, 289 aa, Zea mays subsp. parviglumis
RPEIAHAHQPVMSPSHHGWDGNGAAAVPTPMPKRLDGKVAIVTGGARGIGEAIVRLFAKHGARVVIADIDDAAGEALASALGPQVSFVRCDVSVEDDVRRAVDWALSRHGGRLDVYCNNAGVLGRQTRAARSILSFDASEFDRVLRVNALGAALGMKHAARAMAPRRAGSIVSVASVAAVLGGLGPHAYTASKQAIVGLTKNAACELGAHGVRVNCVSPFGVATPMLINAWRQGHDDATADADRDLDLDVTVPSDQEVEKMEEVVRGLATLKGPTLRPRDIAEAVLFLA

SEQ ID NO: 18200 - protein, 497 aa, Corynebacterium glutamicum ATCC 13032
MNAATRRASLQLPYTHVDDFYINGSWVKAEGTQRNPVVDPAVGQEWGSVPEATASELDSAVGAARTALKSWSALTGAERTGYLLKIATEIESRSEALALTNTRENGSPISETRGAASNAAGIFRYFATLAPWLDGEDIRPFPAGSAESIVDKDPIGVCALIAPWNFPINLVVIKLAPALLAGCTVIIKPASPTPLSIRFIIEAIEAAGVPAGVVNLLTGSGRFGDALVRHPGVDKVAFTGSTPVGKKIAAACGELLRPVTLELGGKSSAIILPDADMSVLSTRLIRSCMRNTGQTCYISTRIIAPSSRYAEVVQTVASTIAAGRQGDPYDEETVFGPVASASQYSTVMSYIDSAREEGARVVAGGTRSISLSEGLESGEFIQPTVFADVTPDMRISREEIFGPVISILKYDDTNGVSEAIALANNTKFGLGGLVFGADEEQALEVARQVDSGSVGINFFGSNHSAPFGGRHESGMGVEYGIEGLSAYLTYKSIHRTI

SEQ ID NO: 18201 - protein, 610 aa, Saccharomyces cerevisiae
MILTLAYFMLGTLLLGVFAEDTVSQIGINDSLWYPYDEALVLKPLPNNDLLLSFAFQLQSEPFDPAVSSMSYDAYEHYTTFPRAIPPLLESTATRQFHLRFTRGFWDALSWGQLPHAGKEAGASGVELWSQVQAMDQEQAFHNWKKLSNSLSGLFCSSLNFIDESRTTFPRRSYASDIGAPLFNSTEKLYLMRASLPNEPICTENLTPFIKLLPTRGKSGLTSLLDGHKLFDSLWNSISLDIATICSEDEDALCHYEMDARIEMVTHVPSALARGERPIPKPLDGNTLRCDTDKPFDSYQCFPLPEPSQTHFKLSQLFARPINNGNLFANRPTRICAEVDRSTWTAFLSVDDTIFSTHDNCFDLSNDQNEGGSGYDFILESTDTTKVTPIVPVPIHVSRSLTGNGQDRGGMRIVFHNDNDTPVKLIYFESLPWFMRVYLSSLQITSTTSPQLQENDIILDKYYLQAADRKRPGHLEFTMLIPANTDIVMTYQFDKALLQFAEYPPDANHGFEIDAAVITVLSLESSSSLYEMRTSTLLLSLSTPDFSMPYNVIILTSTIMGLIFGMLYNLMVKRMVTVEEADKITLQSGLKYKLLKLKEKFLGKKKTKTD

SEQ ID NO: 18202 - protein, 431 aa, Bacillus cereus ATCC 10987
MSTIIDVYAREVLDSRGNPTVEVEVYTESGAFGRAIVPSGASTGEHEAVELRDGDKSRYLGKGVVNAVNNVNEIIAPEIVGFDVTDQAGIDRAMIELDGTPNKGKLGANAILGVSMAVAHAAADFVGLPLYRYLGGFNAKQLPTPMMNIINGGSHADNNVDFQEFMILPVGAPTFKESIRMGAEVFHALKAVLHDKGLNTAVGDEGGFAPNLGSNREALEVIIEAIEKAGYKAGENVFLGMDVASSEFYNKETGKYDLAGEGRTGLTSAEMVDFYEELCKDFPIISIEDGLDENDWDGHKLLTERLGSKVQLVGDDLFVTNTQKLAEGIEKGISNSILIKVNQIGTLTETFEAIEMAKRAGYTAVVSHRSGETEDATIADIAVATNAGQIKTGSMSRTDRIAKYNQLLRIEDELGEIAVYDGIKSFYNIKR

SEQ ID NO: 18203 - protein, 509 aa, Bacillus cereus ATCC 10987
  unsure (1)..(509): unsure at all Xaa locations
MRKPTALIILDGFGLREETYGNAVAQAKKPNFDGYWNKFPHTTLTACGEAVGLPEGQMGNSEVGHLNIGAGRIVYQSLTRVNVAIREGEFDKNETFQSAIKSVKEKGTALHLFGLLSDGGVHSHMNHMFALLRLAAKEGVEKVYIHAFLDGRDVGPKTAQSYIDATNEVIKETGVGQFATISGRYYSMDRDKRWDRVEKCYRAMVNGEGPTYKSAEECVEDSYANGIYDEFVLPSVIVNEDNTPVATINDDDAVIFYNFRPDRAIQIARVFTNEDFREFDRGEKVPHIPEFVCMTHFSETVDGYVAFKPMNLDNTLGEVVAQAGLKQLRIAETEKYPHVTFFFSGGREAEFPGEERILINSPKVATYDLKPEMSIYEVTDALVNEIENDKHDVIILNFANCDMVGHSGMMEPTIKAVEATDECLGKVVEAILAKDGVALITADHGNADEELTSDGEPMTAHTTNPVPFIVTKNDVELREGGILGDIAPXMLTLLGVEQPKEMTGKTIIK

SEQ ID NO: 18204 - protein, 405 aa, Chlamydia trachomatis
MSMDKLSIRDLSLEGKKVLVRVDFNVPIKDGKILDDVRIRSAMPTIHYLLKQDAAVILVSHLGRPKGGVFEEAYSLAPIVPVLEGYLGHHVPLSPDCIGEVARQAVAQLSPGRVLLLENVRFHKGEEHPDEDPSFAIELAAYADFYVNDAFGTSHRKHASVYRVPQLFPDRAAAGFLMEKELEFLGQHLLVEPKRPFTAILGGAKMSSKIGVIEALLSCVDHLVLAGGMGYTFLRAMNRQVGNSLVEESGIPLAKKVLEKAQALGVKIHLPVDAKVAKQCDSGEDWRELSIQEGIPEGLAGFDIGAQTIELFSKVIQESATIFWNGPVGVYEVPPFDQGSKAIAQCLASHSSAVTVVGGGDAAAVVALAGCTSQISHVSTGGGASLEFLEKGSLPGTEILSPAQS

SEQ ID NO: 18205 - protein, 317 aa, Yersinia pestis CO92
MTDKLTSLRQITTVVADTGDIAAMKLYQPQDATTNPSIILNAAQIPEYRKLIDEAIAWAREQSSDHAQQIVDATDKLAVNIGLEILKLIPGRISTEVDARLSYDTVASVAKAKRLIKLYNEAGISNDRILIKLASTWQGIRAAEQLEKEGINCNLTLLFSFAQARACAEAGVFLISPFVGRILDWYKANGDQKEFAPSEDPGVVSVTEIYQYYKKHGYKTVVMGASFRNLGEIIELAGCDRLTIAPSLLKELAESEGPVERKLAYTGEIQAKPAPLTEAEFYWQHNQDPMAVDKLADGIRKFAIDQGKLEKMISDLL

SEQ ID NO: 18206 - protein, 394 aa, Bacillus cereus ATCC 10987
MNKKSIRDVDLKGKRVFCRVDFNVPMKEGKITDETRIRAALPTIQYLVEQGAKVILASHLGRPKGQVVEEMRLTPVAARLGELLGKDVKKADEAFGPAVQEMVAAMNEGDVLVLENVRFYAGEEKNDAELAKEFAALADIFVNDAFGAAHRAHASTAGIADYLPAVSGLLMEKELDVLGKALSNPDRPFTAIIGGAKVKDKIGVIRHLLDKVDNLIIGGGLAYTFVKALGHEIGLSLCEDDKIELAKEFMQLAKEKGVNFYMPVDVVITEEFSETATTKIVNIDSIPSNWEGVDIGPKTREIYADVIKNSKLVVWNGPMGVFEMTPFAEGTKAVGQALADAEGTYSVIGGGDSAAAVEKFGMADKMSHISTGGGASLEFMEGKELPGVVCLNDK

SEQ ID NO: 18207 - protein, 384 aa, Mycobacterium tuberculosis CDC1551
MRAVVIDGAGSVRVNTQPDPALPGPDGVVVAVTAAGICGSDLHFYEGEYPFTEPVALGHEAVGTIVEAGPQVRTVGVGDLVMVSSVAGCGVCPGCETHDPVMCFSGPMIFGAGVLGGAQADLLAVPAADFQVLKIPEGITTEQALLLTDNLATGWAAAQRADISFGSAVAVIGLGAVGLCALRSAFIHGAATVFAVDRVKGRLQRAATWGATPIPSPAAETILAATRGRGADSVIDAVGTDASMSDALNAVRPGGTVSVVGVHDLQPFPLPALTCLLRSITLRMTMAPVQRTWPELIPLLQSGRLDVDGIFTTTLPLDEAAKGYATARARSGEELRFCLRPDSRDVLGAHETVDLYVHVRRCQSVADLQLEGAADGVDGPSMLN

SEQ ID NO: 18208 - protein, 387 aa, Yersinia pestis biovar Medievalis str. 91001
MSVIKMTDLDLAGKRVLIRADLNVPVKEGKVTSDARIRASLPTIEAALKQGAKVMVTSHLGRPTEGEYNEEFSLLPVVNYLKEKLSSPVRLAKDYLDGVEIAAGELVVLENVRFNKGEKKDDEALSKKYAALCDVYVMDAFGTAHRAQASTHGVGKFAPIACAGPLLSAELEALGKALGNPARPMVAIVGGSKVSTKLTVLGALSKIADKLIVGGGIANTFVAAQGHNVGKSLYEADLIPEAKRLLETCDIPVPTDVRVATEFSETAAATLKPANEIKDDEQILDLGDESAERLAEILKNAKTILWNGPVGVFEFPNFRKGTEIVARAIAESEAFSIAGGGDTLAAIDLFGIADQISYISTGGGAFLEFVEGKKLPAVVMLEERAKQ

SEQ ID NO: 18209 - protein, 377 aa, Streptomyces coelicolor A3(2)
MKAVVYKGPFSVAVEDVEKPDIRHPNDVIVRVTSTAICGSDLHMYEGRTAAEPGIVFGHENMGIVDQVGQGVTGLKKGDRVVMPFNVACGFCTNCAAGYTGYCTTVNPGFAGGAYGYVSMGPWQGGQAEYLRVPYADFNCLKLPEGDAHETDFILLADIFPTGYHGCELADVRPGESVAVYGAGPVGLMAAYSALLRGAKKVFVVDRVPERLQKAEEIGAVPVDFSAGDPVEQIKEQTEGAGTDKGVDAVGYQATAGGTGKEEPATVLNSLVNTVRPTGALGVPGLYVPADPGGPDEQAKQGMLLVAIGKLFEKGLRVGTGQCNVKRYNRQLRDMIIEGRAEPSFVVSHELPLDQAPSGYDKFDKRIEGYTKVVLHP

SEQ ID NO: 18210 - protein, 338 aa, Pseudomonas putida KT2440
MMNSRIMQALTFKRYGKSPDIGLADVPRPTPKADELLVQVHAAGLNPIDNMIPTGMFKPVLHFQLPATLGSDLAGIVTEVGSNVTRFKPGDAVFASLFDLGTGAIAEFAVVPESAAALKPANLSFEQAASIPMVGLTSWQALKERLKLQAGQKVFIPAGSGGIGTFAIQLAKHLGAKVGTTTSTGNVDLVRALGADEVVDYKTQDFETVLRDYDAVLGTVRGDAIEKSLSILRPGSQIVSLVGPLDAAFARAKRLNLLLTFVFGLMSRKIMRLAKRRNVQYSFLFVQPDGAQLAEIGKLLDAQQIQPVIDRVFPFEDAKGALEYLAQGRSKGKVVIKM

SEQ ID NO: 18211 - protein, 387 aa, Oceanobacillus iheyensis HTE831
MKQSNRLKQLPPQFFASLVQKVNQAISEGRDVINLGQGNPDQPTPAHIIKALQSAVEDPITHKYSPFRGTDDFRKAAATFYKREYQVDLDPDTEIAVLFGSKIGLVELPLALMNPNEWMMLPNPGYPDYLSSIPLADIQYDTMPLLEENNFLPNYEQLTLSQKERTKLLYLNYPNNPTGATANNAFFNETVALGKNHDIGIVHDFAYGAIGFNEEKPISFLQTKGAKEVGIELYTLSKTYNMAGWRIGFAAGNKEMIEAINILQDHLFVSVFPAIQRAASEALLSDQSSVQDLVTLYQKRRDALITECKRIGWDINAPQGSFFAWLPVPNGFTSETFADYLLNEVDVAVAAGNGFGTFGEGYIRVGLLVDEQRIVEAIKRIEGLKLF

SEQ ID NO: 18212 - protein, 254 aa, Shigella boydii
IVAAGIKEILLVTHASKNAVENHFDTSYELESLLEQRVKRQLLAEVQSICPPGVTIMNVRQGEPLGLGHSILCARPAIGDNPFVVVLPDVVIDDASADPLRYNLAAMIARFNETGRSQVLAKRMPGDLSEYSVIQTKEPLDREGKVSRIVEFIEKPDQPQTLDSDIMAVGRYVLSADIWPELEHTQPGAWGRIQLTDAIAELAKKQSVDAMLMTGDSYDCGKKMGYMQAFVKYGLRNLKEGAKFRKGIEKLLSE

SEQ ID NO: 18213 - protein, 481 aa, Campylobacter jejuni subsp. jejuni NCTC 11168
MGNARGFLDFKRMDFKKIAPKERILNYKEFTIPLDKKEQEVQGGRCMDCGVAFCHTGVMSEGKDVGCPLNNLIPEWNDLVYRSLWKEAYERLDLTNPFPEFTGRVCPAPCEDSCVCAINGVSVSIKNNELSIIENAFKENLVRVNKPKQYNGKKIAVIGSGPAGLACANTLNSLGYKVSVFERSDKIGGLLMYGIPDMKLDKSIVQRRVDLLKKSGIEFKVNENIDSKDKVSKLLKEFDALVLCTGASKPIDLDIEGRKLKGVEFALDFLTQNTKTLLKTGKGADMAKGKNVLVIGSGDTSVDCIAVATRQGAKSIVRFERSPKRPLQRSQNNPWPLKADIFTTDYGLEEAIAVYGKDPREYQKMTKKFLGKTHVEGVEANDLKREFKEGKAINVEISNSKKTYKADLVLLAMGFSGCEEAISKNFGVKLDEKNNISTENFQTTHKKIFACGDARKGQSLVVWAIKDGIECALSLHQNLAK

SEQ ID NO: 18214 - protein, 370 aa, Brucella melitensis 16M
MKSRAAVAWEAKKPLTIETVEIGGPKAGEVLVEIMATGVCHTDAYTLSGLDSEGKFPAILGHEGAGIVREVGADVTSVKPGDHVIPLYTPECRQCKTCLSQRSNLCTAIRATQGQGLMPDKTSRFSCDGGEVFHYMGCSTFSNFTVLPEIAVAKVREDAPFDKICYIGCGVTTGIGAVIYTAKVRPGSNVVVFGLGGIGLNVIQGARMVGADKIIGVDINPAKVEMARKFGMTDFINPREIGNDKVVQAIQDLTDGGADYSFDATGNTDVMRQALECCHRGWGESIIIGVAEAGKEIATRPFQLVTGRVWKGTAFGGARGRTDVPKIVDWYMEGKINIDDLITHTMPLDEINTAFDLMHEGKSIRSVVIY

SEQ ID NO: 18215 - protein, 292 aa, Shigella boydii
MKTRKGIILAGGSGTRLYPVTMAVSKQLLPIYDKPMIYYPLSTLMLAGIRDILIISTPQDTPRFQQLLGDGSQWGLNLQYKVQPTPDGLAQAFIIGEEFIGGDDCALVLGDNIFYGHDLPKLMDVAVNKESGATVFAYHVNDPERYGVVEFDKNGTAISLEEKPLQPKSNYAVTGLYFYDNDVVEMAKNLKPSSRGELEITDINRIYMEQGRLSVAMMGRGYAWLDTGTHQSLIEASNFIATIEERQGLKVSCPEEIAYRKGFIDAEQVKVLAEPLKKNAYGQYLLKMIKGY

SEQ ID NO: 18216 - protein, 586 aa, Arabidopsis thaliana
MTSFSLTFTSPLLPSSSTKPKRSVLVAAAQTTAPAESTASVDADRLEPRVELKDGFFILKEKFRKGINPQEKVKIEREPMKLFMENGIEELAKKSMEELDSEKSSKDDIDVRLKWLGLFHRRKHQYGKFMMRLKLPNGVTTSAQTRYLASVIRKYGEDGCADVTTRQNWQIRGVVLPDVPEILKGLASVGLTSLQSGMDNVRNPVGNPIAGIDPEEIVDTRPYTNLLSQFITANSQGNPDFTNLPRKWNVCVVGTHDLYEHPHINDLAYMPANKDGRFGFNLLVGGFFSPKRCEEAIPLDAWVPADDVLPLCKAVLEAYRDLGTRGNRQKTRMMWLIDELGVEGFRTEVEKRMPNGKLERGSSEDLVNKQWERRDYFGVNPQKQEGLSFVGLHVPVGRLQADDMDELARLADTYGSGELRLTVEQNIIIPNVETSKTEALLQEPFLKNRFSPEPSILMKGLVACTGSQFCGQAIIETKLRALKVTEEVERLVSVPRPIRMHWTGCPNTCGQVQVADIGFMGCLTRGEEGKPVEGADVYVGGRIGSDSHIGEIYKKGVRVTELVPLVAEILIKEFGAVPREREENED

SEQ ID NO: 18217 - protein, 202 aa, Bacillus cereus ATCC 10987
MKQVVVATKNMGKVREFAELFERFDLEVKSLHDFPHIEEVEETGETFEENAILKADSLSRQLNAIVIADDSGLIVDALNGKPGVYSARFAGEPKDDQANIDKVLQELNDVAFEKRKARFYCALAVAFPEGDKKPVIVNGTCEGFILEQRRGENGFGYDPIFYVEEYKKAMAELSSDEKNAISHRGRALRKLEEKIPEWFLGE

SEQ ID NO: 18218 - protein, 370 aa, Schizosaccharomyces pombe
MGQTLSEPVLDKHSSSGGDRWLHFGVSHMQGWRISMEDAHCALLNFTDSNSSNPPTSFFGVFDGHGGDRVAKYCRQHLPDIIKSQPSFWKGNYDEALKSGFLAADNALMQDRDMQEDPSGCTATTALIVDHQVIYCANAGDSRTVLGRKGTAEPLSFDHKPNNDVEKARITAAGGFIDFGRVNGSLALSRAIGDFEYKKDSSLPPEKQIVTAFPDVVIHNIDPDDEFLILACDGIWDCKSSQQVVEFVRRGIVARQSLEVICENLMDRCIASNSESCGIGCDNMTICIVAFLHGRGLEDWYNWITQRVNSGEGPCAPPSYAELRGPNTIADARNLQLEYDHIASHEYGSGDTYDSDSDDETIAYDRYYLH

SEQ ID NO: 18219 - protein, 431 aa, Shigella flexneri 2a str. 2457T
MVSLEKNDHLMLARQLPLKSVALILAGGRGTRLKDLTNKRAKPAVHFGGKFRIIDFALSNCINSGIRRMGVITQYQSHTLVQHIQRGWSFFNEEMNEFVDLLPAQQRMKGENWYRGTADAVTQNLDIIRRYKAEYVVILAGDHIYKQDYSRMLIDHVEKGARCTVACMPVPIEEASAFGVMAVDENDKIIEFVEKPANPPSMPNDPSKSLASMGIYVFDADYLYELLEEDDRDENSSHDFGKDLIPKITEAGLAYAHPFPLSCVQSDPDAEPYWRDVGTLEAYWKANLDLASVVPELDMYDRNWPIRTYNESLPPAKFVQDRSGSHGMTLNSLVSGGCVISGSVVVQSVLFSRVRVNSFCNIDSAVLLPEVWVGRSCRLRRCVIDRACVIPEGMVIGENAEEDARRFYRSEEGIVLVTREMLRKLGHKQER

SEQ ID NO: 18220 - protein, 264 aa, Oryza sativa (japonica cultivar-group)
MAFAVSDELLGTFVPIAVYWLYSGLYIVLDAMGMDDYRLHPKGEEATKNVVSKWTVVKGVLVQQSFQIAVSLLLFTIIGDESGTVRKQPPALVIALQFIIAMFVMDTWQYFMHRYMHVNKFLYKHVHSKHHTLVVPYAFGALYNHPLEGLILDTIGGALSFLIAGMTPKTAIFFFSFATIKTVDDHCGLWLPGNILHVFFSNNSAYHDIHHQLYGNKYNFSQPFFVMWDKILGTYMPYTLENRKGGGFEARPIKLNVAEQSKTD

SEQ ID NO: 18221 - protein, 1198 aa, Oryza sativa
MVLAIAAAAAAALVWISNSKMSPCVRTSPFQAVGCIGGVHALGEDSAPSTREGKESRATTSGESGADFCLTAASDDAIAPCRRSSIPDDDDIELIGAPPHILLGAAAELTSAPPPATVHGIPLESGYVGLLAYGPTSRNRVETRQGEQPPRSKSSSAAADAAMDPKLVEVTQLFSRFKAAFARNDFDTCVDLLSQLKVRLTKFPSLPPSFQQTPNAVEELKIARDIYEHAVVLSVKIEDQDAFERDFCQLKPYYMDTWLLVQNRIAEFHTELELLPVTALENPCIKHAVELEQSFMEGAYNRVLSARQAVPHETYVYFMDLLAKTVRDELAGCSEKGYDYMSIAEARQVLMFSSDKELHQYIAEEHPEWEVKDGSVFFQKAKETQPCKEIPSLQVINQTLSYARELERIKMCPSFCCRRNQRPSTCKHHLRWRIWVAGTTTHATIKWIRNAIQVSDFFTGPSHAIVNEVILEREELDLSTSRFVVCRTGTVPSGHDSSSFVHAIGNTTSSSAASPCAAAAPPTLGLSSGSGSTCTRTQLSQTRSINVQRHAVDDITVGALNATMHNTTSNHLESLVRWRPVLRRRLPPPPLPTAAATAPAKSARQRVNDAMSDETASQTTKGGDLLWFSEKKEALYPVFQLRDVIHANARDEGAGKGRRNPSSAAHEPTPKFAASDPPPPKLKLFNCVSIDYAIGSGEGSEFAVDAYAIAAAGGDVCVLDLLHLLARQGGTLTSTESIGVGPLPMALGLPHAVSRRPPGIAPCSTCLPLLASLTTSSAVHTSTCACRILAVTGSSELATSNGIVGEFGALALASAVAPSLPLPSPPRYTGSKKIVDSKATQEDLQPQLHDCESIARMRAACELTARVLEYAGTLVKPLATTDEIDRAVHQMIIDAGAYPSPLGYGGFPKSVCTSVNECICHGIPDSRVLQNGDIINIDVTVYLNMNQVLISIDLKALKKGTQKLIRMLFFPVISKHFPLKFTEKFCFIEYVDEYGYSIDPFVGHGIGKIFHSEPIIWHTYDYEPGYMVAGQTFTIEPTLSMGGTQCTLWDDGWTAVTVDSSLTAQFEHTILVTGDGAEILTMHPRPNCPFKETKNPYSHTQKAEAPNGRTGALITDMWHSLTSATDYGSTSSFSYRKRPLAPCSSHEAIEENFLKDMKPPLIVSFLPVMAIQPIMNMGEYPHQEIVLVLYTHVEEYPY

SEQ ID NO: 18222 - protein, 221 aa, Glycine max
  unsure (1)..(221): unsure at all Xaa locations
IKXXAAXXXNVXXXXAYXXVEXDEVILNDSIDISXXVXTEKGLMTPIIKNADQKTISAISSEVKELAAKARAGKLXPHEFQGGTFSISNLGMFPVDKFCAIINPPQACILAVGRGNKVVEPVIGTDGIEKPSIATKLSLTLSADHRVFDGKVGAYLSSDLSDGMIWHNGTLGSMFIYKSGLALSPQHFIFNFCTRIWPSGWTNNGKFGQISSSMSMLDWIR

SEQ ID NO: 18223 - protein, 296 aa, Streptomyces coelicolor A3(2)
MAERIVHRRGYRKGLGGEMCAEFLGTFVLILFGVGSVAVAVAGLPGSGRQTADFGPANWLIISWGWGLAVVFGVYVAGGISGAHLNPAVTLGFAVRRDFPWRKVLPYWLAQVVGAFVAAALVYACYRWAIDAAIAKAGETRETSLNTYSIFATFPAEYFGDSWWGPLLDQIVGTGILLLLICALIDTRNTAPMANLHPYLIGLVVVAIGLTFGTNAGYAINPARDFGPRLFTFFEGWGDIALPGTFQWFSGYWWIPIVGPLIGGVVGVLVYDLLVSPVLKARLTEREEGPATEEPS

SEQ ID NO: 18224 - protein, 537 aa, Oryza sativa (japonica cultivar-group)
MWSSWAWTWSWSGAAAVAVAAAAAWVAVYAAAARAAEALWWRPRRVERHFAAQGVRGPGYRFFVGSSIELVRLMVDAASRPMEPPTSHDILPRVLPFYHHWRKLYGPMHLIWFGRTPRLVVSEPELIREVLLTRADHFDRYEAHPMICQFEGYGLSNLHGERWARRRRVLTPAFHTENLRMIAPFVAGTVTRMLDELAERARAGGAGEAEVDVAEWFQRVPQEAITFAAFGRRNYDDGAAVFRLQDELAGYATEAHSKVYIPGYRFLPTRKNRRVWQLDREIRSHLAKFVTGLQSCSSSHGDDADDGGDGGGGMREFMSFMAPAMTAGEIIEESKNFFFAGKETLSNLLTWTTVALAMHPEWQERARREVVAVCGRGDLPTKDHLPKLKTLGMILNETLRLYPPAVAMIRTAKEDVELGGCVVPAGTEVMIPIMAVHHDAAAWGDDAAEFNPARFAADDDGGRRRHPMAFMPFGGGARVCIGQNMALMEAKVALAVVLRRFEFRLSPAYVHAPRVLMILSPQFGAPVIFRPLTSAAA

SEQ ID NO: 18225 - protein, 306 aa, Eremothecium gossypii
MTAVNYTKEKKVGEGTYAVVYLGHRQTDGRQIAIKEIKTSQFKDGLDMSAIREVKYLQEIRHANVIELVDLFMAQENLNLVLEFLPADLEMLIKDSSLLFTQADIKSWLLMTLRGVHHCHRSFILHRDLKPNNLLLAPDGQLKIADFGLARTLAAPHEFMTSNVVTRWYRAPELLFGARHYTAAVDLWSVGVIFAELMLRIPYLPGRDDVDQIDVTFRALGTPTDKDWPEVSSFSAYNKIQVYPPPSRSELRSRFIAATENALDLMCGMLTMDPHKRWDTTRCLLSQYFVELPEATPPTELPKLNK

SEQ ID NO: 18226 - protein, 293 aa, Brucella melitensis
MSYDVVVIGTGPGGYVAAIKAAQLGLKVAVVEKRKTFGGTCLNIGCIPSKALLHASEVFAEAGHSFDTLGVEVTPKLNLTKMLAHKDTTVKANVSGVEFLFKKNKITPYIGTGKIVGKGKVSVTSEDGKVEEIEAKNIIIATGSDVAGIPGVKVDIDEKVIVSSTGALSFDKVPGSLIVVGGGVIGLELGSVWARLGAKVTVVEYLDKVLGPMDGEVSKQFQRLLEKQGIAFKLGAKVTGVEKVGKGAKITFEPVKGGDAETLEADAVLIATGRRPYTDGLGLQEAGVAVDER

SEQ ID NO: 18227 - protein, 292 aa, Zea mays
MAVDLMGCYAPRRANDQLAIQEAAAAGLRNLELLVTSLSTQAAAPHRAADQPFGEIAGRAVSKFRKVISILDRTGHARFRRGPVEPSPPPAPPVVPGPPVSVAQPPQSLTLDFTKPNLAVSAATSVTSTSFFSSVTAGEGSVSKGRSLMSSGKPPLSGHKRKPCAGAHSEATTNGSRCHCSKRRKNRVKRSIRVPAISSKVADIPPDEYSWRKYGQKPIKGSPYPRGYYKCSTVRGCPARKHVERATDDPAMLVVTYEGEHRHTPGAVQGPSPLATASPVPVAVSAGNGLVV

SEQ ID NO: 18228 - protein, 328 aa, Acinetobacter sp. ADP1
MSAKRLDQVAQATKTAFVFPGQGSQKVGMLAELAEQFSGVQETFAEASDAVGFDLWHIAQSGEGLDQTENTQPVLLTASIALWRVWLDLGGLAPKYMAGHSLGEYSALVAAGALSLGDAAKLVNLRGKLMQSAVPQGVGAMAAILGLPDEKVIELCQAVTASGDGSVEAANYNSQGQVVIAGSAALVNEVMTQAKEQSGKAIALPVSVPSHCSLMKPAAEKFAEALEQTAIELPSLPVIQNVNAGIATDVTQLRQALTAQLYQSVQWTRTMQYLQDQGIQYVVECGPGTVLSNLAKRLPNIEKAFAIDSKSRMEDALNAVLVAEGKIA

SEQ ID NO: 18229 - protein, 316 aa, Escherichia coli
TDKLTSLRQYTTVVADTGDIAAMKLYQPQDATTAPSLILNAAQIPEYRKLIDDAVAWAKQQSNDRAQQIVDATDKLAVNIGLEILKLVPGRISTEVDARLSYDTEASIAKAKRLIKLYNDAGISNDRILIKLASTWQGIRAAEQLEKEGINCNLTLLFSFAQARACAEAGVFLISPFVGRILDWYKANTDKKEYAPAEDPGVVSVSEIYQYYKEHGYETVVMGASFRNIGEILELAGCDRLTIAPALLKELAESEGAIERKLSYTGEVKARPARITESEFLWQHNQDPMAVDKLAEGIRKFAIDQEKLEKMIGDLL

SEQ ID NO: 18230 - protein, 235 aa, Triticum aestivum
  unsure (1)..(235): unsure at all Xaa locations
MTPSLQDAKITFLGGGNMAAAIIGGLLAKNTNKQNIYVSEPWDVNRNKMADLGVRTTADNKEAAADADVVILAVKPQVAKGVCEELSSAWAGRDSLPVVISIAAGITLASIAQWFKGDSGKAPHIVRVMPNTPALVGEGASGLYAAEDVTAAEKELTSALLGSVSKATEWVDKEELLDVVTGISGSGPAYFFAFVEHLISSGVSLGLXREQATRLATQTCLGAGKMLVESSDEPS

SEQ ID NO: 18231 - protein, 316 aa, Escherichia coli
TDKLTSLRQYTTVVADTGDIAAMKLYQPQDATTNPSLILNAAQIPEYRKLIDDAVAWAKQQSNDRAQQIVDATDKLAVNIGLEILKLVPGRISTAVDARLSYDTEASIAKAKRLIKLYNDAGISNDRILIKLASTWQGIRAAEQLEKEGINCNLTLLFSFAQARACAEAGVFLISPFVGRILDWYKANTDKKEYAPAEDPGVVSVSEIYQYYKEHGYETVVMGASFRNIGEILELAGCDRLTIAPALLKELAESEGAIERKLSYTGEVKARPARITESEFLWQHNQDPMAVDKLAEGIRKFAIDQEKLEKMIGDLL

SEQ ID NO: 18232 - protein, 579 aa, Glycine max
MCGILAVLGCSDSSQAKRVRVLELSRRLKHRGPDWSGLHQYGDNYLAHQRLAIVDPASGDQPLFNEDKTVVVTVNGEIYNHEELRKQLPNHTFRTGSDCDVIAHLYEEHGENFMDMLDGIFSFVLLDTRDNSFIVARDAIGVTSLYIGWGLDGSVWISSELKGLNDDCEHFESFPPGHLYSSKERAFRRWYNPPWFSEAIPSAPYDPLALRHAFEKAVVKRLMTDVPFGVLLSGGLDSSLVAAVTARYLAGTKAAKQWGTKLHSFCVGLEGAPDLKAAKEVAEYIGTVHHEFHYTVQDGIDAIEDVIYHIETYDVTTIRASIPMFLMSRKIKSLGVKMVISGEGSDEIFGGYLYFHKAPNKEEFHQETCRKIKALHKYDCLRANKSTFAWGLEARVPFLDKEFIRVAMNIDPECKMIKKEEGRIEKWALRRAFDDEEHPYLPKHILYRQKEQFSDGVGYGWIDGLKAHAEKHVTDRMMLNAANIFPFNTPTTKEAYHYRMIFERFFPQNSARLTVPGGPSVACSTAKAVEWDAAWSNNLDPSGRAALGVHASAYGNQVKAVEPEKIIPKMEVSPLGVAI

SEQ ID NO: 18233 - protein, 316 aa, Escherichia coli
TDKLTSLRQYTTVVAATGDIAAMKLYQPQDATTNPSLILNAAQIPEYRKLIDDAVAWAKQQSNDRAQQIVDATDKLAVNIGLEILKLVPGRISTEVDARLSYDTEASIAKAKRLIKLYNDAGISNDRILIKLASTWQGIRAAEQLEKEGINCNLTLLFSFAQARACAEAGVFLISPFVGRILDWYKANTDKKEYAPAEDPGVVSVSEIYQYYKEHGYETVVMGASFRNIGEILELAGCDRLTIAPALLKELAESEGAIERKLSYTGEVKARPARITESEFLWQHNQDPMAVDKLAEGIRKFAIDQEKLEKMIGDLL

SEQ ID NO: 18234 - protein, 316 aa, Escherichia coli
TDKLTSLRQYTTVVADTGDIAAMKLYQPQDATTNPSLILNAAQIPEYRKLIDDAVAWAKQQSNDRAQQIVDATDKLAVNIGLEILKLVPGRISTEVDARLSYDTEASIAKAKRLIKLYNDAGISNDRILIKLASTWQGIRAAEQLEKEGINCNLALLFSFAQARACAEAGVFLISPFVGRILDWYKANTDKKEYAPAEDPGVVSVSEIYQYYKEHGYETVVMGASFRNIGEILELAGCDRLTIAPALLKELAESEGAIERKLSYTGEVKARPARITESEFLWQHNQDPMAVDKLAEGIRKFAIDQEKLEKMIGDLL

SEQ ID NO: 18235 - protein, 314 aa, Oryza sativa
  unsure (1)..(314): unsure at all Xaa locations
MAAKAVMLALLVLVSTAQVSMGARRRMELYKPDPADMLSYHSGAVLQGNIPVSIYWYGKFTPAQKSILFDFLLSLSVAPYAAAPSVAQWWSSXDELYLSKAVQTNSNGQSKKTQVLVASQVSDINCSMGKSLTLAQVAALAAQAKPKKGGIALVFTAQDVTVEGFGMSRCGLHGSDAKSGTAYIWVGNPATQCPGECAWPFHQPMYGPQGAPLVAPNGDIGADGMVMNLASMLAGTVTNPFGDGYYQGSRDAPLEAATACPGVFGSGAYPGFAGELKVDQATGASXYNANGANGRKYLLPALYNPSTGTCNTLV

SEQ ID NO: 18236 - protein, 270 aa, Tradescantia fluminensis
MGRSPCCEKAHTNKGAWTKEEDQRLIAYIKVHGEGCWRSLPKSAGLLRCGKSCRLRWINYLRPDLKRGNFTEEEDEVIIKLHALLGNKWSLIAGRLPGRTDNEIKNYWNTHIKRKLISRGIDPQTHRPVNSGAQFTISSANNQANSTKIPVNEALKQSTDSSSSQDMQSSNSVLDVVERCPDLNLDLSINIAYSTDRKPFSSSTEMQITPAATEATTPTSVSPYFQPICLCYRLGFSRTEACSCKAISNSNSQNVFRYYRPLKEEGHQTN

SEQ ID NO: 18237 - protein, 445 aa, Phalaenopsis cv. 'True Lady'
MSKMFGKEVPLSKMAVSKAHGEGSPYFAGWKAYEENRYDAVGNPDGVIQMGLAENQLSFDLLEEYLELHPEAFSWASDSSSFRENALFQDYHGLQTLRQALASFMEKIRGGRSKFDANRIVLTAGATAANEILTFILADRGDALLVPTPYYPGFLRDLQWRTGVTIFPVHCYSSNGFQLTLSSLEKAYAEAKASNFNVRGLLMTNPCNPLGTSASLSLLQDIIHFISDKNIHLISDEIYSGSVFSSTNLFSISDLITDAISEQVHIVYSLSKDLGLPGFRVGALYSYNDRVVKTARRMSSFSLVSSQTQRLLSFMLSDEEFTVRYIEKNRERLRERYELVVNGLKEAGIECLKGEAGLFCWVNMEKLMEEETKEGEAELWKVIIDDLKLNISPGSSCCCAEPGWFRLCFANMSRETLEVALKRLKDFAQKKVAAKKKKMNNVYFC

SEQ ID NO: 18238 - protein, 254 aa, Shigella boydii
IVAAGIKEILLVTHASKNAVENHFDTSYELESLLEQRVKRQLLAEVQSICPPGVTIMNVRQGEPLGLGHSILCARPAIGDNPFVVVLPDVVIDDASADPLRYNLAAMIARLNETGRSQVLAKRMPGDLSEYSVIQTKEPLDREGKVSRIVEFIEKPDQPQTLDSDIMAVGRYVLSADIWPELERTQPGAWGRIQLTDAIAELAKKQSVDAMLMTGDSYDCGKKMGYMQAFVKYGLRNLKEGAKFRKGIEKLLSE

SEQ ID NO: 18239 - protein, 291 aa, Shigella boydii
MKTRKGIILAGGSGTRLYPVTMAVSKQLLPIYDKPMIYYPLSTLMLAGIRDILIISTPQDTPRFQQLLGDGSQWGLNLQYKVQPTPDGLAQAFIIGEEFIGGDDCALVLGDNIFYGHDLPKLMDVAVNKESGATVFAYHVNDPERYGVVEFDKNGTAISLEEKPLQPKSNYAVTGLYFYDNDVVEMAKNLKPSARGELEITDINRIYMEQGRLSVAMMGRGYAWLDTGTHQSLIEASNFIATIEERQGLKVSCPEEIAYRKGFIDAEQIKVLAEPLKKNAYGQYLLKMIKG

SEQ ID NO: 18240 - protein, 479 aa, Methanosarcina acetivorans C2A
MVAMKMQINGKAVEACGGEVFGIKNPATGELIEQVPRGTEEDVAVAVEAASSAFTGWASASPQQRGEVLYRAAEIVRQRKDELASLLTQEQGKPIVEARNEIEGFAHVLEYYCGLSGSQRGDFIPVPGNGYAFTVKKPLGVCAAIIPWNMPALIMGWKIAPVLISGNTLVLKPASNTPLTNLTLASIFVEAGLPAGVLNVVTGPGETVGESLVRSPEVRKISFTGEARTGKRVAELAACGMKRITLELGGSDPMLVCDDADLESAAAGALRGRFYNCGQTCTAVKRLYVFESVAEEFIKKLETGIKSLRLGNGMDKNISMGPLNNRTQWEYIKELAAEIEEKDAGRIITGGKVPEFKDSEKGYFFEPTLVSDVPGDSRLLKEEVFGPLLPVVTVKNLDEAIVGANSTCYGLGASIWTKNIDRARKGCEQLNAGIIWINQHLKVAPEVPFGGVKESGFGRENGPESLSEYLETKTIMLKI

SEQ ID NO: 18241 - protein, 481 aa, Capsicum annuum
MDSITIDTINPKVLKCEYAVRGEIVTIAQKLQQDLKDNPGSHPFDEILYCNIGNPQSLAQQPITFFREVLALCDHPSILDKSETQGLFSADAIERAFQILDQIPGRATGAYSHSQGIKGLRDTIASGIEARDGFPADPNDLFLTDGASPAVHMMMQLLIRSQNDGILCPIPQYPLYSASIALHGGTLVPYYLDEQTGWGLEISELEHQLNTAKSNGIDVRALVVINPGNPTGQVLGEANQREIVEFCKKEGLVLLADEVYQENVYVPDKKFHSFKKITRSMGYGEKDISLVSFQSVSKGFYGECGKRGGYMEITGFSPEVREQIYKLASVNLCSNISGQILASLVMSPPKVGDESYESFSAEKEAVLSSLARRAQALQDALNSLEGVTCNRAEGAMYLFPRINLPDKAIKAAEVAKTAPDAFYAKLLLNATGIVVVPGSGFRQVPGTWHFRCTILPQEEKIPAIVSRLTEFHKKFMDEFCG

SEQ ID NO: 18242 - protein, 436 aa, Oryza sativa
MAAGERPATMRAVQYSGYGGGAAALKFVEIPVPSVKKDEVLVKVEAASINQSDLMTQKGMMRPFHPKFPFIPVNNVSGEIVEVGSAVREFKVGDKVVSKLDFWMVEEADGSVQAAMETGEAWPACLGGDRGRGGAAGACKGRRKPARHDWHVQAAVEANKAAVEAAGHGTAALRICTTQGGAVGNGRSQYDARRHGGWWQRLVGCPVAERGLAEYVATSDKLTVARPAGISAADAAGVPVAGLTALQALKAIGTKFDGSGTSGGADVLITAASSGVGTYAVQLAKLGNHRVTATCGARNLGLVAGLGADEVLDYKTPEGAALSSPSGKKYDYIVNISNKNKWSVFKPRLSSHGRVVDVAPNFGNFVASVVTLFSRRKKLSLVSLKMSKEDLGLLLELMREGKLRTVVDSRHPFEKAADAWARSLSGHATGKVIVEM

SEQ ID NO: 18243 - protein, 316 aa, Escherichia coli
TDKLTSLRQYTTVVADTGDIAAMKLYQPQDATTNPSLILNAAQIPEYRKLIDDAVAWAKQQSNDRAQQIVDATDKLAVNIGLEILKLVPGRISTEVDARLSYDTEASIAKAKRLIKLYNDAGISNDRILIKLASTWQGIRAAEQLEKEGINCNLTLLFSFAQARACAEAGVFLIAPFVGRILDWYKANTDKKEYAPAEDPGVVSVSEIYQYYKEHGYETVVMGASFRNIGEILELAGCDRLTIAPALLKELAESEGAIERKLSYTGEVKARPARITESEFLWQHNQDPMAVDKLAEGIRKFAIDQEKLEKMIGDLL

SEQ ID NO: 18244 - protein, 364 aa, Setaria italica
MWWRAVRARRRIAGARPASTAAAAAEKSCRAVVVPRFGGPEVLEVRQGVPVPDLKPREVLVRTRAVSINPLDLRMRSGYGRSIFEPLLPLIIGRDIIGEVAATGTYASSFSIGQEVFGALHPTALRGTYADYAILSLDELTPKPSTLSHVEASAIPFAALTAWRALHGTARISEGQRVLVIGGGGAVGLAAVQLAVAAGCGVSATCGSQSIERVMGAGAEQAIDYTAEETEAAVKGKFDAVLDTIGVPETERIGINVLRRGGHYMTLQGEAAALADRYGLAVGLPVATAALLKKQMQYRSSHGVEYWWTYMRADAEGLHEIQRLSGAGKLQIPVEKTFPINQVREAHMAKEKKLVHGKVVLEFD

SEQ ID NO: 18245 - protein, 170 aa, Zea mays
MAPTVMMASSATAVAPFQGLKSTASLPVARRSSRSLGNVSNGGRIRCMQVWPAYGNKKFETLSYLPPLSTDDLLKQVDYLLRNGWIPCLEFSKVGFVYRENSTSPCYYDGRYWTMWKLPMFGCNDATQVYKELQEAIKSYPDAFHRVIGFDNIKQTQCVSFIAYKPPGSD

SEQ ID NO: 18246 - protein, 245 aa, Nostoc sp. PCC 7120
MSLTSIPSLREQQHPLIRQLADCIEEVWHQHLDLSPYHLPAELGYVEGRLEGEKLTIENRCYQTPQFRKMHLELAKVGNMLDILHCVMFPRPEYDLPMFGCDLVGGRGQISAAIADLSPVHLDRTLPESYNSALTSLNTLNFSQPRELPEWGNIFSDFCIFVRPSSPEEEAMFLGRVREFLQVHCQGAIAASPVSAEQKQQILAGQHNYCSKQQQNDKTRRVLEKAFGVDWAENYMTTVLFDLPE

SEQ ID NO: 18247 - protein, 532 aa, Oceanobacillus iheyensis HTE831
MAKKDESMNKSNLENDMSLTNRQGHPVTNNQNIRTVSNRGPATLENYDFIEKISHFDREKVPERIVHARGAGAHGYFETYGTVGNDPVSKYTRAKVFQDKGKQTPVFVRFSTVVHGNHSPETVRDPRGFAVKFYTEDGNWDLVGNNLKIFFIRDAMKFPDMIHAFRPDPVTNIQDSERFFDFCANSPESFHMVTFVYSPWGIPANYRMMQGSGVNTYKWVNKDGEAVLVKYHWEPKQGIKNLTTKEAEEIQATNFNHATQDLYDAIENGDYPEWELFVQIMSDDEHPELDFDPLDDTKLWPEDQFPWHPVGKMVLNKNPENYFTEVEQAAFGTGVLVDGLDFSDDKMLQGRTFSYSDTQRYRVGANYLQVPVNESKKRVATNHEGGQMRQKNDKAPSQNPHINYEPSVLGGLEENEQTGKEYTPHIEGNLVRESIDRNDNTKQAGHTFREFEEWEKAELISNLVGDLSVSDQRIQDKMIALAEEADDEYGRRLREGLEQAKKMGTPHNPLGAKDAEQAPKKAIDKGHDADPY

SEQ ID NO: 18248 - protein, 203 aa, Volvox carteri
MNPEYDYLFKLLLIGDSGVGKSCLLLRFADDTYTESYISTIGVDFKIRTVELDGKVIKLQIWDTAGQERFRTITSSYYRGAHGIIVVYDVTDQESFNNVKQWLAEIDRYASENVNKLLVGNKSDLTGKKVVDYQAAKAFADEIGIPFLETSAKNATNVEQAFMTMAAEIKNRMASQPVPPKPGGPVVRPTEGKPINNKSSSCC

SEQ ID NO: 18249 - protein, 178 aa, Glycine max
MASSMISSPAVTTVNRAGAGMVAPFTGLKSMAGLPTRKTNNDITSIASNGGRVQCMQVWPPVGKKKFETLSYLPDLDDAQLAKEVEYLLRKGWIPCLEFELEHGFVYREHNRSLGYYDGRYWTMWKLPMFGCTDASQVLKELQEAKTAYPNGFIRIIGFDNVRQVQCISFIAYKPPSF

SEQ ID NO: 18250 - protein, 268 aa, Tradescantia fluminensis
MGRSPCCEKAHTNKGAWTKEEDQRLIAYIKVHGEGCWRSLPKAAGLLRCGKSCRLRWINYLRPDLKRGNFTEEEDELIIKLHALLGNKWSLIAGRLPGRTDNEIKNYWNTHIKRKLISRGIDPQTHRPINAGSQFTISSANHQGSLKNIRDNEALKQSPNSSSQDMQSNSSVIDVVERCPDLNLDIAINIAYSTDQKPFSSSTEVQKAPAVTQATTPTSVSPYFQPICLCYNLGFSKSEACSCRASSNDNQHVLRYYRPLIEEGHQTN

SEQ ID NO: 18251 - protein, 327 aa, Shigella flexneri 2a str. 2457T
MATRIEFHKHGGPEVLQAVEFTPADPAENEIQVENKAIGINFIDTYIRSGLYPPPSLPSGLGTEAAGIVSKVGSGVKHIKAGDHVVYAQSALGAYSSVHNINADKAAILPAAISFEQAAASFLKGLTVYYLLRKTYEIKPDEQFLFHAAAGGIGLIACQWAKALGAKLIGTVGTAQKAQSALKAGAWQVINYREENLVERLKEITGGKKVRVVYDSVGRDTWERSLDCLQRRGLMVSFGNSSGAVTGVNLGILNQKGSLYVTRPSLQGYITTREELTEASNELFSLIASGVIKVDVAEQQKYPLKDAQRAHEILESRATQGSSLLIP

SEQ ID NO: 18252 - protein, 393 aa, Thermoanaerobacter tengcongensis
MITYEKKYLMDTYNRYPIMLVKGEGTRVWDSEGNAYLDFVAGIAVNSLGHCHPALVEAIKKQAETLIHCSNLYWNEKQIELARMISENSFGGKVFFANSGAEANEGAIKLARKYASLKYGGKRYKIITAKNSFHGRTFGALTATGQEKYHKGFGPLLAGFKYVPLNDIEALYEAVDDEVCAIMLEVIQGEGGIHEATPEYVKAVRKICDENDLLFILDEVQTGIGRTGKLFGYEHYGVVPDIMTLAKGLGGGFPIGAIVAKEDKAVFKPGDHASTFGGNPLACAAGIAVLNEVTKDGFLEGVDKKGKYFREGLETLQKKHKVVKEIRGKGLMVGCEVDLEDASEIVLKALEKGLLINSVSHNVLRFVPPLIVTEEEIDEALQILDDVLSEIRF

SEQ ID NO: 18253 - protein, 465 aa, Chromobacterium violaceum ATCC 12472
MLFELNRASRAEILAEARQIAGLALPMMVAQIAQVATSFVDTVMAGRVGTDDLAAVSLGASVFITVYVTLMGVVAALNPILSHHLGSRDRRAFSRDAAQGLWFGLMLGALGAGLMLLLEAPLRHWLHLPPDVTDKVMLFITGAAIGMPAAMAHRALHAYASSLGHPKAIMVVSLLALALNIPLNYILIHGLFGMPRMGGAGCGWATGIVFWFNCLALLTYVSWHRHFRDSRILAGLAAPDWRRFLAFLKLGVPIGLSFFVEVSLFSFIALLIAELGTVVVATHQSVLNFSSLIYMLPQSVATALSVRVGHHAGAGDYRAARFISGVGMLMGLAMAGGAMALVLLLREPIMWMYSADPRVIAMGTTLLLFAAVYQLTDAAQTIASGALRGYKLTAVPMLIHITSFWVAGLGLGMLLGLTDWIVPRMGIYGFWTALVISLTVAGLLLTYYLARASRKRLHRDQGILL

SEQ ID NO: 18254 - protein, 295 aa, Xanthomonas campestris pv. campestris
MTQRKGIILAGGSGTRLYPITKGVSKQLLPVYDKPMIYYPLSVLMLAGIRDILIINTPHEQALFQSLLGDGAQWGVNIQYAVQPSPDGLAQAYLIGRDFVGGKPSCLVLGDNIFHGHGLTDTLRRADAREQGATVFGYWVNDPERYGVAEFDQHGKVIDIAEKPEKPRSNYAVTGLYFYDGKASDYAAALKPSPRGELEITDLNRCYLDAGDLHLEPLGRGYAWLDTGTHQSLHEAANFIETIQMRQGLQVCCPEEIAFGQGWIDAEQLERLAAPLLKNDYGKYLTALAKRGAVH

SEQ ID NO: 18255 - protein, 348 aa, Corynebacterium efficiens YS-314
MVRKESRKMKLAVIGGDGIGPEVTDEALKVLRALRADIETTDLDLGARRYLRNGELLTDEDLALLREHDAILLGAIGAPGSVPPGVLERGLLLKLRFALDHHVNLRPSKLYEGVESPLKNPGEIDFVVVREGTEGAYTGNGGAIRVGTPHETANETSVNTRYGAERVIRYAFELAQSRRRHLTLVHKTNVLVHGGGLWQRTVDEVAREYPEVTVDYNHIDAATIYLVTDPSRFDVIVTDNLFGDILTDEAGAISGGIGLAASGNIDATGTNPSMFEPVHGSAPDIMGKGIADPTAAILSAAMMLRHLGDEANAVRIEEAVARDVAGRDPEAPISTTEVGDRIAAAVVA

SEQ ID NO: 18256 - protein, 221 aa, Leuconostoc mesenteroides subsp. mesenteroides ATCC 8293
MSQQVVVNAKYAVKVPEGLDPVEATSITCAGVTMYKALKVGETKPGEWVSVHGAGGLGNLAVQYAHSVFGAHVAVIDGNDDKLAAAKANGAEVLVNRKKEDVVAKVNELTGGVHNAQVTAVNDAAFSQAVNVLRPMGKLVAVALPQGDMALNIAKTVLDGIEVRGSLVGTRADLKEAFQFGAEGKVKPIVETVAFQDMNEIIDEMKAGSITGRKVIDFTTL

SEQ ID NO: 18257 - protein, 210 aa, Pongamia pinnata
YDRVMAYKFHEDDHGEVIAEITKPGLEPYMGLHYPATDIPQAALFLFMKNKYRMIVDCHAKHVKVLQDEKLPFDLTLCGSTLRAPHSCHLQYMANMDSIASLVMAVVVNDNEEDGSSSDAVQPQKRKRLWGLVVCHNTTPRFVPFPLRYACEFLSQVFAIHVNKEIELEYQIIEKNILRTQTLLCDMLMRDAPLGIVSQSPNIMDLVKCD

SEQ ID NO: 18258 - protein, 399 aa, Sinorhizobium meliloti 1021
MTFKTLDDLTDIAGKRVLVRVDLNVPVKDGQVTDTTRIERVAPTIRELSEKGAKVVLLAHFGRPKGEPVADMSLKAIASAVEEILDQRVYFAADCIGDKAANAIAELNDGEVLLLENTRFHKGEEKNDSDFVTALAANGDIYVNDAFSAAHRAHASTEGLAHHLPAYAGRTMQAELEALEKGLGNPKRPVVAIVGGAKVSTKIDLLQNLVKKVDALVIGGGMANTFLAAQGVDVGKSLCEHDLAETAKAILAAASEAGCAIVLPVDGVVAREFKAGADNEVVDIKAIPADAMVLDVGPKSIEAINEWISRAETLVWNGPLGAFEIAPFDRATVAAAKHAAARTRAGSLVSVAGGGDTVAALNHAEVADDFTYVSTAGGAFLEWMEGKPLPGVDVLRQRN

SEQ ID NO: 18259 - protein, 343 aa, Mycobacterium avium subsp. paratuberculosis str. k10
MRIGVLTGGGDCPGLNAVIRAVVRTCDSRYGSSVVGFQDGWRGLLENRRIQLHNDDRNDRLLAKGGTMLGTARVHPDKLRAGLNQIKQTLDDNGIDVLIPIGGEGTLTAAHWLSEENVPVVGVPKTIDNDIDCTDVTFGHDTALTVATDAIDRLHSTAESHQRVMLVEVMGRHAGWIALNAGLASGAHMTLIPEQPFDVEEVCRLVKRRFQRGDSHFICVVAEGAKPIPGSISLREGGIDEFGHERFTGVAAQLGAEVEKRINKEVRVTVLGHVQRGGTPTAYDRVLATRFGVNAADAAHAGEYGQMVSLRGQDIGRVPLADAVRQLKLVPESRYDDAAAFFG

SEQ ID NO: 18260 - protein, 297 aa, Zea mays
PRVRRHMEGFGVNTYTLINRDGKPHLVKFHWKPTCGVKCLLDNEAVTVGGTCHSHATKDLYDSIAAGNYPEWKLYIQTIDLDHEDKFDFDPLDVTKTWPEDIIPLQPVGRMVLNKNVDNFFAENEQIAFCPAIIVPGIHYSDDKLLQTRIFSYADTQRHRLGPNYLMLPVNAPKCAHHNNHHDGFMNFMHRDEEVNYFPSRFDPARHAEKVPIPPRVLTGCREKCIIQKENNFKQAGERYRSFDPARQDRFIQRWVDALTDPRVTHEHRTIWISYWSQCDAALGQKLASRLNLKPSM

SEQ ID NO: 18261 - protein, 434 aa, Geobacillus stearothermophilus
MAFEFKLPDIGEGIHEGEIVKWFVKPGDEVNEDDVLCEVQNDKAVVEIPSPVKGKVLEILVPEGTVATVGQTLITLDAPGYENMTFKGQEHEEVKKEEKAETVSKKEMVETAAPSAPAAEAEADPNRRVIAMPSVRKYAREKGVDIRLVQGTGKNGRILKEDIDAFLAGGAKAAAEPTPQAAEEKAAPQAPAAKPVVPEGEFPETREKMSGIRRAIAKAMVHSKHTAPHVTLMDEADVTKLVAHRKKFKAIAAEKGIKLTFLPYVVKALVSALREYPVLNTSIDDATEEIIHKHYYNIGIAADTDRGLLVPVIKHADRKPIFALAKEINELAEKAREGKLMPNEMKGASCTITNIGSAGGQWFTPVINHPEVAILGIGRIAEKPIVRDGEIVAAPMLALSLSFDHRMIDGATAQKALNHIKQLLSDPELLLMEA

SEQ ID NO: 18262 - protein, 362 aa, Arabidopsis thaliana
MARTIKYRLLIEFHRVNKQVERIYSKSSGSSNVNEGKRFAFDLNVEPVDETLDLNVEPVDEENRDALNPVDEENHDSMNHVAKQNHDSSNHVDQEIRDSQNLIDEENHDSPKDSDYLGDLDLCSICRGALVNENDVQRTLVTLKCVHKFHLDCIGSAYNAKGFMECPNCRNIEPGHWQFSDGTHFNPNGMIANNEEEEEDNDPGSFSQMIVKSEVCPFGCLGQRYPFDPLGRSDISMINAPMNLSCPSTSTVQLNPSDVWESTQPFLSSRHHLMVEDEIYRMIYGDRIEMGERSGNHRGRESNGNGDNGGSSTFGGNGNGNGINATVLCSSRTGSSNYFSTSQVKVTIQRLENVHGLIGISS

SEQ ID NO: 18263 - protein, 753 aa, Yersinia pestis biovar Medievalis str. 91001
MSIIRYPQLAHWGAYTAVVEDGKLIRCEPFADDPDPSPLLNSIVPMVYSDKRIRKPAIRRSWLKRREKSDRTLRGQEDFVEVDWDVALDLVAEENRRVRDQYGPAGLFTGSYGWSSAGRLHHARSLVRRFYFSGGGGVDQLGNYSWGAAQFFLPYVIGTFSPLTGRVTSWPSVVEHCELFIAFGGLALKNAQVSSGGSAEHSLKLWLEKLAQKGTPVINISPMRDDCPAFVNAEWIPIRPNTDVALMLALAYEIQRLDGHDEAFLATHCVGYGQLADYIRGANDGIAKTPDWASSITGIPAARIAQLAQQLIGVRSFMTCSYSVQRAHRGEQPYWMVIALSAMLGQVGLPGGGFSFGHGSMNGVGNPRIDTPGPAMPVGKNPAGLAIPVARICDMLLQPGQPYQFQGETHTYPDIHLVHWAGGNPFHHHQQLNRLVEGWQKPDTVIVQDIWWTPVAKMADIVLPVTSSLERNDIGGSSRDRYVLAMHQAIAPQHQARHDFDIFADLADRLGYRETFTEGRDEMAWIRHIYQECGAAQRSHDVEWPDFETFWQQGYVGLPAPSKAFVFFDSFREDPQANPLQTPSGKIELFSEKIASYQYNDFAPHAEWKPPVEWLGAPLAEQWPLHLISIQPGDRLHSQLDPAPLAQSNKTAGRETLYMHPLDAASRDITEGSQVQVSNLRGHCLAGVSITDGVTRGVVLMATGAWFDPGFGGTQHKIEQSGNPNVLTLDIGTSRLTQGPNAMSCLVEVALYE

SEQ ID NO: 18264 - protein, 118 aa, Zea mays
  unsure (1)..(118): unsure at all Xaa locations
METKRSVRTLGEADLKGKNAFVRADLNGPLDDAQKITDDTRIRAXVPTSSFLLQKGAKVILARHLGRPKGATPKYXSLKPLVPRLSELLAVEVLMAXDCIAEEVDKXLVEALPQGGVL

SEQ ID NO: 18265 - protein, 526 aa, Prochlorococcus marinus subsp. pastoris str. CCMP1986
MNNDFNSWDKYCNYLWFDKQVNIWLDISKINFTLDQISSLENKFKKVFSALKELEAGAISNIDEKRQVGHYWLRNPSVAPSNLIKDAINNEIRDISEFGEKILEGKITNNKNQKFTNVLWIGIGGSGLGPLLITEALQENSCGLNFSYIDNIDPFLISEKLDELSDKLATTLFVVVSKSGGTPEPKIAMNIIKKHVENKNLDWNSNAIAITMKDSQLYKKAQLENWLKIFNLPDWVGGRTSITSSVGLLPLALINRDVSEFIKGAAIMDDLTRIPNIKDNPAALLSSAWFFSGDGIGKRDMVVLPYRDRLQVFSKYLQQLVMESLGKKFNRKGEIVHQGISVFGNKGSTDQHAYVQQLRDGIDNFFCVFIELLDTPNSNFYFDSENPKEFLSGFLQGTRSALSNENRQSITITLDKLSCLTLGALIALFERAVSFYAELVDINAYDQPGVEAGKKAAAEIIDYQKQVTEIFNNGEELSIKEITSLLRNSSAEPIFFIIRQMCFGNDDYLINGDWSKPSTIRIKKIS

SEQ ID NO: 18266 - protein, 313 aa, Schizosaccharomyces pombe
MPGYDDKRYFTSTAVLLNELIKLVVCFSVGYHQGRKNVGKEAKLRAFLPQIFGGDSWKLAIPAFLYTCQNNLQYVAAGNLTAASFQVTYQLKILTTAIFSILLLHRRLGPMKWFSLFLLTGGIASFSCKSLLRRPNVGRPMNPVTGFSAVLVGCLISGLAGVYFEKVLKDTNPSLWVRNVQLSFFSLFPCLFTILMKDYHNIAENGFFFGYNSIVWLAILLQAGGGIIVALCVAFADNIMKNFSTSISIIISSLASVYLMDFKISLTFLIGVMLVIAATFLYTKPESKPSPSRGTYIPMTTQDAAAKDVDHKH

SEQ ID NO: 18267 - protein, 298 aa, Klebsiella pneumoniae
MNMANLKAVIPVAGLGMHMLPATKAIPKEMLPIVDKPMIQYIVDEIVAAGIKEIVLVTHSSKNAVENHFDTSYELEALLEQRVKRQLLAEVQAICPPGVTIMNVRQAQPLGLGHSILCARPVVGDNPFVVVLPDIILDGGTADPLRYNLAAMIARFNETGRSQVLAKRMPGDLSEYSVIQTKEPMVAEGQVARIVEFIEKPDEPQTLDSDLMAVGRYVLSADIWAELERTEPGAWGRIQLTDAIAELAKKQSVDAMLMTGESYDCGKKMGYMQAFVTYGMRNLKEGAKFRESIKKLLA

SEQ ID NO: 18268 - protein, 113 aa, Aerides japonica
TIGLGQDCMAFCTELEDVISMSLTVVTSLLEKYQIDPKQIGRLEVGSETVIDKSKSIKTWLMRIFEEYGNTDIEGVDSTNACYGGTAALFNCVNWVESSSWDGRYGLVVCTCP

SEQ ID NO: 18269 - protein, 254 aa, Shigella boydii
IVAAGIKEILLVTHASKNAVENHFDTSYELESLLEQRVKRQLLAEVQSICPPGVTIMNVRQGEPLGLGHSILCARPAIGDNPFVVVLPDVVIDDASADPLRYNLAAMIARFNETGRSQVLAKRMPGDLSEYSVIQTKEPLDCEGKVSRIVEFIEKPDQPQTLDSDIMAVGRYVLSADIWPELERTQPGAWGRIQLTDAIAELAKKQSVDAMLMTGDSYDCGKKMGYMQAFVKYGLRNLKEGAKFRKGIEKLLSE

SEQ ID NO: 18270 - protein, 431 aa, Thermobifida fusca
MSEIYMPRLSDTMEEGVISSWVKQVGDKVSVGDVLVEIETDKAVMEYEAYEDGYLVQQTVREGETVPIGAVIGVIADSPDAVPAAPEGGEGAEQKAEEPQQPAPAAQEAKEEQPTVPAPAAPAEQGGKPRPLSSPLARRLAREYGLDITKIQGSGPKGRVVRADVEAAAQQKREQEAAAPQPAAAKAPAPAAAPPQPEFEDLRASEEVPVTNIRRVIARRLTQAKQEIPHFYLRRRIDAEALREFRAQINEQLAPTGVKVSVNDLIVKAVATVLRDHPEVNSSWVDDKLLRHKRINVGIAVAVDTGLVVPVLHDADTLALSEVARRSRALVEKARDGKLSPQDMSGGTFSVSNLGMFGVESFSAVINPPEAAILAVGAMQQEPVVRDGEIVARHTIALELSVDHRAVDGAVGAAFLKDLAEVLESPMRIVL

SEQ ID NO: 18271 - protein, 419 aa, Rhodococcus ruber
AAERERMIWRVGDLLTQRAEEFGQLEALDNGKSAVIAAAVDTAWSADIFRYYAGWATKIEGSTVNVTMPFVPGGEFHAYTLREPVGVCGLIVPWNFPLLMAAFKLAPALAAGNTVILKPAEQTPLTALLLAEIFEEAGFPPGVVNIVPGFGDAGAALAAHDDVDKIAFTGSTEVGKKVVDAAKGNLKKVSLELGGKSPNIVFADADFDAAVQGSLDAWLFNHGQCCVAGTRLFVERPIFERFTEAVAEAASKVKIGPGLDPATQLGPLVSQEQLDRVTGYLREGLIDGARALTGGKRWGDKGFFVEPTVLVDVQPDFSVVREEIFGPVVNAMPFDADDGISAAANDSIYGLAAGIWTRDLSKAHRTARRLKAGSVWINQYNGFDTAMPFGGFKQSGWGRELGAGALDLYTQTKAVNIAL

SEQ ID NO: 18272 - protein, 577 aa, Oryza sativa
  unsure (1)..(577): unsure at all Xaa locations
RNFGSIEICSNFVLYTICVQLSEVLGKGAMKTVYRGFDELRGVEVAWNQATISDVLRTPDALHRMYAEVSLLADLRHDAIIAFHASWVHPSRRTFNFITELFSSGTLRSYRLRYPRVSRRAVAAWARAILRGLAYLHSRGVIHRDLKCDNIFVNGHLGQVKIGDLGLAAVLRGAXSARSVIGTPEFMAPEMYDECYGVGVDVYSFGMCMLEMLTNEYPYSECDNPAQIYKKVTAGKLPDAFYLLTDADARRFIGRCLVDAAHRPSAEELLLDPFLSPPQNHDDHNTIAHATAPPPPLPLACSNSSEEQEEEEAPAAKTTGMAITGKLNKEHDTIFLKVQIGGGGNVRNIYFPFDVANDTAMEVATEMVKELDIADREPTEIAAMIEQEIVRLVPGYKQHEYSYADDDDDDDVNGQPNPFYYLSSSPTSSQGSLCGVGPTSSEGFTDKNCVQLVVLQSSSXAASSINVKWNISHVTYTSIIYPRHYTYTWYIYSSPFHSSEDGGGHAGRPRQREGEEERRRRRMSRNRSMVDMRSQLLHRTLVEELNKRLFFNTVGAVHDIGFRDPTTYGSSSSSSSS

SEQ ID NO: 18273 - protein, 210 aa, Sporobolus stapfianus
MSYAYLFKYIIIGDTGVGKSCLLLQFTDKRFQPVHDLTIGVEFGARMITIDNKPIKLQIWDTAGQESFRSITRSYYRGAAGALLVYDITRRETFNHLASWLEDARQHANANMTVMLIGNKCDLSHRRAVSYEEGEQFAKEHGLVFMEASAKTAQNVEEAFIKTAGTIYKKIQDGIFDVSNESNGIKVGYVVPNSSGGAAGSSSQGGGCCS

SEQ ID NO: 18274 - protein, 187 aa, Streptomyces coelicolor A3(2)
MMRVDANDMGADLEKVLITKEEIDAKLAELAAKIDAEYAGKDLLIVGVLKGAVMVMADLARTLSTPVTMDWMAVSSYGAGTQSSGVVRILKDLDTDIKGRHVLIVEDIIDSGLTLSWLISNLGSREPASLKVCTLLRKPDAAKVAIDVEWVGFDIPNEFVVGYGLDYAEKYRNLPFVGTLAPHVYGG

SEQ ID NO: 18275 - protein, 370 aa, Pseudomonas aeruginosa UCBPP-PA14
MIKSRAAVAFAPNKPLEIVEVDVAPPQKGEVLVRIVATGVCHTDAYTLSGQDSEGVFPCILGHEGGGIVEAVGEGVTSLQVGDHVIPLYTAECGKCKFCLSGKTNLCQAVRATQGKGLMPDGTSRFSYKGEPVFHYMGCSTFSEYTVLPEISLAKIPKDAPLDKVCLLGCGVTTGIGAVLNTAKVEEGATVAIFGLGGIGLAAIIGAKMAKAARIIAVDINPGKFDIARELGATDFINPKDYDKPIQDVIVELTDGGVDYSFECVGNVQLMRAALECCHKGWGESVIIGVAGAGQEISTRPFQLVTGRVWRGSAFGGVRGRSELPSYVEKAQKGEIPLDTFITHTMGLEDINEAFELMHEGKSIRTVIHY

SEQ ID NO: 18276 - protein, 384 aa, Staphylococcus aureus subsp. aureus MW2
MKLSLNSNSKYLRAPSIRQFSNRMNNLDDCVNLTIGQPDFPMPDVVKKAYIDAINNDKTSYSHNKGLLETREAISQYFKNRYHFSYDPEEIIVTNGASEAIDTTLRSIIEPGDEIIIPGPIYAGYIPLIEVLGGKPIYIDTTATQFKITPDALESHISPKTKAVLLNYPTNPTGVVLKRNEVLNIVNVLKKYPIFIISDEIYAENTFSGKHVSFAEFEDIRDQLILIGGLSKSHSATGIRIGFLLGPQYLIDKLTFMHAYNCICANVPAQIACITALNEGLEAPKYMNEAYVERRNYLVSELTKLGFEITAQPEGAFYIFPSIKHITDDDFEFCVDLLESTHLAIVPGSSFTEFGKGFVRISYAYEMDVLKEGMKRLAKYLNTK

SEQ ID NO: 18277 - protein, 270 aa, Methanosarcina acetivorans C2A
MENQKIGFIGAGKMGSALMQGTIKAGIVTPENIGASDVYEPFLKDLQAKLGIRVSTDNAVIVRESDILILAVKPQTLSSVLSNLKNEITSEKLVISIAAGVPLSTYEDALLEGTRVVRVMPNIAATVSEAASGIAPGKNATPEDLKAALEIFSAVGTAVQVPESLMDAVTGLSGSGPAFIFPVIEAMADGAVLEGMDRKSALTLAAQTVLGAAKMALETGMHPGELKDMVTSPAGTTIQGIHSLEEAGIRAAFMNAVIRASERSKELGKK

SEQ ID NO: 18278 - protein, 344 aa, Mesorhizobium loti
MSNMMKALVKAKAEPGIWMEEVPVPEIGPNDVLIKIRKTAICGTDVHIYNWDQWAQKTVPVPMVTGHEFVGTVADFGAAVTEYKVGQRVSGEGHIVCGHCRNCRAGRGHLCRNTLGVGVNRPGAFGEYLAIPQHNVVPIPDDVPDEIAAIFDPLGNAVHTALSFDLVGEDVLVTGAGPIGIMGALVAQCVGARKVVITDINPVRLALAKKLGVQHVVDASKEKLRDVMPVLGMTEGFDVGLEMSGAAPAFRDMIDTMNNGGKIAILGIAPTGFEIDWNKVIFKMLHLKGIYGREMFETWYKMIALVQGPLDVSGLITHRIGIDDFQEGFDAMRSGSSGKVVMDW

SEQ ID NO: 18279 - protein, 318 aa, Ralstonia eutropha JMP134
MNQLEQLKQFTTVVADTGDFQLMKQYTPQDATTNPSLILKAVQKPEYRGLLEQAVRDYHNEGGVDAVMDGVLIAFGCEILAIVPGRVSTEVDARLSFDTEATVEKARHLIRLYEQRGVARERVLIKIASTWEGIRAAEILQREGIRCNMTLLFSLVQAVACAEAGAQLISPFVGRILDWYKKQAGDQWDAAANAGDNDPGVRSVRQIYDYYKKFGYNTEVMGASFRSTAQIVALAGSDLLTISPDLLEQLARTEGTVERKLSVDLAQAGNIARIPADEPAFRWQLNEDAMATEKLAEGIRLFAADAIKLEKLVAEIAG

SEQ ID NO: 18280 - protein, 495 aa, Escherichia coli K12
MNFHHLAYWQDKALSLAIENRLFINGEYTAAAENETFETVDPVTQAPLAKIARGKSVDIDRAMSAARGVFERGDWSLSSPAKRKAVLNKLADLMEAHAEELALLETLDTGKPIRHSLRDDIPGAARAIRWYAEAIDKVYGEVATTSSHELAMIVREPVGVIAAIVPWNFPLLLTCWKLGPALAAGNSVILKPSEKSPLSAIRLAGLAKEAGLPDGVLNVVTGFGHEAGQALSRHNDIDAIAFTGSTRTGKQLLKDAGDSNMKRVWLEAGGKSANIVFADCPDLQQAASATAAGIFYNQGQVCIAGTRLLLEESIADEFLALLKQQAQNWQPGHPLDPATTMGTLIDCAHADSVHSFIREGESKGQLLLDGRNAGLAAAIGPTIFVDVDPNASLSREEIFGPVLVVTRFTSEEQALQLANDSQYGLGAAVWTRDLSRAHRMSRRLKAGSVFVNNYNDGDMTVPFGGYKQSGNGRDKSLHALEKFTELKTIWISLEA

SEQ ID NO: 18281 - protein, 470 aa, Oryza sativa
MTIDLSMPGSSGLLDDVGGKKHMNFFSNRYVLALTGAAGIGGFLFGYDTGVISGALLYIRDDFPAVRDNYFLQETIVSMALVGAIIGAAGGGWINDTYGRRKSTLVADMLFALGSLVMCAAGGPYILILGRLLVGLGVGIASVTAPVYIAEAAPSEIRGGLVSTNVLMITGGQFFSYLINLGFTEDEKAKAISVLEKIYDSDRLEEEVELLASSSMHEFQSDGTGSYLDIFKSKELRLAFFAGAGLQAFQQFTGINTVMYYSPTIVQMAGFTSNKLALLLSLIVAGMNAAGTIVGIYLIDRCGRRRLALTSLAGVVVSLAILAMAFILQSSSDICSNALNGACQGALGWFAVAGLALYIAFFSPGMGPVPWAVNSEIYPEAYRGMCGGMSATVNWVSNLIVAQTFLSIVGLVGTGLTFLIIAGIAVLAFIFVALYVPETKGLSFEQVELLWKERAWGNQGNRQSLLGAAP

SEQ ID NO: 18282 - protein, 185 aa, Zea mays
  unsure (1)..(185): unsure at all Xaa locations
MGSVAETERTLYPFLTGSSVVAIKYKDGILMAADMGGSYGSTLRYKSVERLKPIGKHSLLGASGEISDFQEILRYLDELILKDNMWDDGNSLGPKEVHNYLTRMMYNRRNKFNPLWNSLVLGGVKNGQKYLGTVNMIGINFEDNHIATGLGNHLARPIFRDEWHXXLTFEXXXKLLEKCMRVLLY

SEQ ID NO: 18283 - protein, 421 aa, Escherichia coli K12
MSNNEFHQRRLSATPRGVGVMCNFFAQSAENATLKDVEGNEYIDFAAGIAVLNTGHRHPDLVAAVEQQLQQFTHTAYQIVPYESYVTLAEKINALAPVSGQAKTAFFTTGAEAVENAVKIARAHTGRPGVIAFSGGFHGRTYMTMALTGKVAPYKIGFGPFPGSVYHVPYPSDLHGISTQDSLDAIERLFKSDIEAKQVAAIIFEPVQGEGGFNVAPKELVAAIRRLCDEHGIVMIADEVQSGFARTGKLFAMDHYADKPDLMTMAKSLAGGMPLSGVVGNANIMDAPAPGGLGGTYAGNPLAVAAAHAVLNIIDKESLCERANQLGQRLKNTLIDAKESVPAIAAVRGLGSMIAVEFNDPQTGEPSAAIAQKIQQRALAQGLLLLTCGAYGNVIRFLYPLTIPDAQFDAAMKILQDALSD

SEQ ID NO: 18284 - protein, 383 aa, Prochlorococcus marinus subsp. pastoris str. CCMP1986
MSDIKEFNLIDVRNNSSIVNDLNNVYKLWGYEEISPSFINNLETIKGREVIDGDELIGIVSNSSLCLRPEMTTSIVKLTSTRLLNKKRPIRLFNSGIVFNKKQSYKNTYKFQENLQSGIELISYDTQYPEIEVINILFDAIDNINLIDSCNLTLLVSTTKIMDLILFNYKNNNYEEIKKCMVNLDHESLDKLNIDNNDKAILKELLFTRGEPAIILKKLKNIYGNNNVIEELDCLFNTLSKISKKYNIKIQLDPTYQPHLNLYAGIVFQLICDNKNVKTIIAKGGRYDELVRYFNPNEKIINGIGFTISIDNLRELIVEKSQTKKKVLLLFKNSYLLDKGINEQKALQKKGIITILYLNPCNDNSKANILMKEHNCTEIQWIK

SEQ ID NO: 18285 - protein, 370 aa, Rhodococcus ruber
MKTKAAVLLETGKPFEIMELDLDGPGPGEVLIKYTAAGLCHSDLHLTDGDLPPRFPIVGGHEGSGIIEEVGPGVTKVKPGDHVVCSFIPNCGTCRYCSTGRQNLCDMGATILEGCMPDGSFRFHSGSTDFGAMCMLGTFAERATISQHSVVKVDDWLPLETAVLVGCGVPSGWGTAVYAGDVRAGDIVVIYGIGGLGINAVQGAVHAGAKYVVVVDPVEFKRDTALKFGATHAFATAAEAAEKVNELSWGQGADAALILVGTVDEEVVSAATSIVGKGGTVVITGLANPEKLTVHVSGTELTLFQKTIKGSLFGSANPQYDIVRLLRLYDAGQLKLDELVTHRYSLEEVNQGYQDLRDGKNIRGVILHDA

SEQ ID NO: 18286 - protein, 189 aa, Cucumis sativus
MASSILSSAAVASVNSASPAQASMVAPFTGLKSSAGFPITRKNNVDITTLASNAGKVQCMKVWPPLGLRKFETLSYLPDMSNEQLSKECDYLLRNGWVPCVEFDIGSGFVYRENHRSPGFYDGRYWTMWKLPMFGCTDSSQVIQEIEEAKKEYPDAFIRVIGFDNVRQVQCISFIAYKPQVLLFLSSIC

SEQ ID NO: 18287 - protein, 437 aa, Oryza sativa
  unsure (1)..(437): unsure at all Xaa locations
MHAHQHQHALLAALLACALAASSSTAGAQPAGQQGYAYGDVSGQQVHVSTTMIVLLAAVVGVFLFIAISTIYLRHCTGYDPATEGGGVGGSRSMILPANSFVSRRQRRPRGLDSSVVRMFPTMKYAEAKALRVGKVAGAALECAVCLSEFEDDEMLRFLPKCSHAFHPXCIGQWLASQXTCTVCRRNLDPNKDTTEEVIIPAAAAADPNSTSSEIVVIRQEDGAHPAAVVIDVVTEEDDEERRKEELELQAIGTQLRAMRSRSGLRPKTSAAKLPRSHSTGHSLAVRLDGDLERYTLRLPEHVHREMVAAGEQSVRRGRRLGEGVGMGARCSPRFSRSGRWSSFLSNSLSGKLSFLSPSSRRTPDSTHVEVLSSLSVVGDEGEREARGRRRCCRRRLCSWDCTVPWLHCGQLGGGGGCGRGEGSYQASSNIENEQKF

SEQ ID NO: 18288 - protein, 515 aa, Triticum aestivum
  unsure (1)..(515): unsure at all Xaa locations
PSPSPLQSSDHRAQTHPDSNPYPATPTTPQSRRAYSTPWRRRGASSPPGGRLWRRKERCEGAGRNVPAGHPRKVPAPPRRRATTPPFKHPPATGTYLILASHVGPPTGLIPTSSLXPPVPRLSELLGREVVIAPDCIGGEADKMAAALPDGXLTTTWMNVRCYKGQLKTDTEIAKTLVPVARLFVNEAFGTELMALGSSIAHTNLPRLSATVVVLLQKTGCSLGAFANWRMGYDALLCAFVLVKVEIEEVYVKALFEFPLITDAECGAVPDLLNPSFAGYVSQNEVEYLEGVVSNPKRPFAATVGRGSLKCQLGCMVCRCLQXNISRFGGGRTFPFCNGRRLVVGSALVVEENLELATSLLAMAKIKAISLMLGADVIGGDKFAPDANGQTVPASAFPGGWMGVDIGPVSVRTLNDALETTQTXIWNGPGGFFEFDKFPVGTESIAKKLAELSKKGVTTIIGGGDSVAAVEKVGVADVMSHFSSGGGACLELLEGXELTGVVALDEGVMTRSVTV

SEQ ID NO: 18289 - protein, 223 aa, Glycine max
SGIPASTHASAGGGGAGGYGEGGAHSGGYGSGGGAGDGGGAGGEHGGGYGGGQGGGVGAGGGYGDGGAHGGGYGGGQGGGAGGGYGAGGEHGGGYGGGEGGGAGGGYGASGEHGGGYGGGQGGGSGGGYGAGGDHGAAGYGGGAGGGAGGGYGAGGEHGIGYGGGGGSGGGSGGGYGDGGAHGGGYGGGAGAGGGGGYGAGGAHGGGFGGGGGSGGGHGGYVP

SEQ ID NO: 18290 - protein, 176 aa, Glycine max
  unsure (1)..(176): unsure at all Xaa locations
KYTNGPLLSAEPCKSAQHACIQIVHRGGKITPGDVILSARSHTPVTAILPQQLRASTYLAQDEGVKVGNTYDQVREEGTPQELVPHKRFLGSRPTASILVGGAIGPAXPSALFVFWTPLTFTEGAILDLTSSVQWGVXLARVLAKYILKEHHEAGHGEGPNASTGGLIGAFNKYGI

SEQ ID NO: 18291 - protein, 484 aa, Proteus mirabilis
MEKKKLTTAAGAPVVDNNNVITAGPRGPMLLQDVWFLEKLAHFDREVIPERRZHAKGSGAFGTFTVTHDITKYTRAKIFSEVGKKTEMFARFSTVAGERGAADAERDIRGFALKFYTEEGNWDMVGNNTPVFYLRDPLKFPDLNHIVKRDPRTNMRNMAYKWDFFSHLPESLHQLTIDMSDRGLPLSYRFVHGFGSHTYSFINKDNERFWVKFHFRCQQGIKNLMDDEAEALVGKDRESSQRDLFEAIERGDYPRWKLQIQIMPEKEASTVPYNPFDLTKVWPHADYPLMDVGYFELNRNPDNYFSDVEQAAFSPANIVPGISFSPDKMLQGRLFSYGDAHRYRLGVNHHQIPVNAPKCPFHNYHRDGAMRVDGNSGNGITYEPNSGGVFQEQPDFKEPPLSIEGAADHWNHREDEDYFSQPRALYELLSDDEHQRMFARIAGELSQASKETQQRQIDLFTKVHPEYGAGVEKAIKVLEGKDAK

SEQ ID NO: 18292 - protein, 254 aa, Shigella boydii
IVAAGIKEILLVTHASKNAVENHFDTSYELESLLEQRVKRQLLAEVQSICPPGVTIMNVRQGEPLGLGHSILCARPAIGDNPFVVVLPDVVIDDASADPLRYNLAAMIARFNETGRSQVLAKRMPGDLSEYSVIQTKEPLDREGKVSRIVEFIEKPDQPQTLDSDIMAVGRYVLSADIWPELERTQPGAWGRIQLTDAIAELAKKQSVDAMLMTGDSYDCGKKMGYMQAFVKYGLRNLKEGAKFRKGIEKLLSE

SEQ ID NO: 18293 - protein, 293 aa, Shigella boydii
MKTRKGIILAGGSGTRLYPVTMAVSKQLLPIYDKPMIYYPLSTLMLAGIRDILIISTPQDTPRFQQLLGDGSQWGLNLQYKVQPSPDGLAQAFIIGEEFIGGDDCALVLGDNIFYGHDLPKLMDAAVNKESGSTVFAYHVNDPERYGVVEFDKKGTAISLEEKPLQPKSNYAVTGLYFYDNGVVEMAKNLKPSARGELEITDINRIYMEQGRLSVAMMGRGYAWLDTGTHQSLIEASNFIATIEERQGLKVSCPEEIAYRKGFIDSEQVKVLAEPLKKNAYGQYLLKMINTLS

SEQ ID NO: 18294 - protein, 101 aa, Zea mays
GTLRVGRLKVNQIGSVTESIEAVRMSKRAGWGVMASHRSGETEDTFIADLSVGLSTGQIKTGAPCRSERLAKYNQLLRIEEELGDAAVYAGAKFRAPVEPY

SEQ ID NO: 18295 - protein, 582 aa, Glycine max
MVLFNVSRVETTPFDGQKPGTSGLRKKVKVFVQPHYLHNFVQSTFNALTVEKVRGATLVVSGDGRYFSKEAIQIITKMSAANGVRRVWIGQNGLLSTPAVSAVIRERVGADGSRATGAFILTASHNPGGPHEDFGIKYNMENGGPAPEGITDKIYENTTTINEYLIASDLPDVDITTTGVTSFTGPEGPFDVEVFDSASDYIKLMKSIFDFESIRKLLSSPKFTFCYDALHGVGGAYAKSIFVDELGAQESSLLNCTPKEDFGGGHPDPNLTYAKELVARMGLGKSEPQDDPPEFGAASDGDADRNMILGKRFFVTPSDSVAIIAANAVEAIPYFSAGLKGVARSMPTSAALDVVAKHLNLKFFEVPTGWKFFGNLMDAGLCSVCGEESFGTGSDHIREKDGIWAVLAWLSILAYKNKDKLEDKLVTVEDIVRQHWATYGRHYYTRYDYENVDAGAAKELMAYLVKLQSSLSEVNQIIKGIRSDVSNVVHGDEFEYNDPVDGSISSHQGIRYLFEDGSRLIFRLSGTGSEGATIRLYIEQYEKDPSKIGRLSNEALAPLVEVALKLSKMEEFTGRSAPTVIT

SEQ ID NO: 18296 - protein, 383 aa, Oryza sativa (japonica cultivar-group)
MKEPSVATILTSFENSFDGFGSMSTPLYQTATFKQPSATDNGPYDYTRSGNPTRDVLQSLMAKLEKADQAFCFTSGMAALAAVTHLLKSGQEIVAGEDIYGGSDRLLSQVAPRHGIVVKRIDTTKISEVTSAIGPLTKLVWLESPTNPRLQITDIKKIAEIAHYHGALVLVDNSIMSPVLSRPLELGADIVMHSATKFIAGHSDLMAGILAVKGESLAKEIAFLQNAEGSGLAPFDCWLCLRGIKTMALRVEKQQANAQKIAEFLASHPRVKKVNYAGLPDHPGRSLHYSQAKGAGSVLSFLTGSLALSKHVVETTKYFNVTVSFGSVKSLISLPCFMSHASIPSAVREERGLTDDLVRISVGIEDADDLIADLDHALRSGPA

SEQ ID NO: 18297 - protein, 158 aa, Glycine max
  unsure (1)..(158): unsure at all Xaa locations
ALSMIASITDTTVNLAGAGLDATSTGLKPMVGCPTMKTNNDITYIANNGGRAQCMQVWTPFGSKKYETLSYLPDLDEAQSAKEVEYLIKKGWITCLEYKLDHSFLYRELKMPPXYFEGLSWSLWKVPMFGSTDTSHVLNELQYAXTAYPDSQIRIIGF

SEQ ID NO: 18298 - protein, 321 aa, Malus x domestica
ILPFKLPAIGPNDVRIRIKAVGICGSDVHYLKTMKCADFEVKEPMVIGHECAGIVDKVGSEVKHLVPGDRVAVEPGISCARCQQCKGGRYNLCPDMKFFATPPVHGSLANQIVHPADLCFKLPKNVSLEEGAMCEPLSIGVHACRRANVGPETTVLITGAGPIGLVSVLAARAFGAPRIVIVDMDDKRLAMAKSLGADETVKVSTKMEDLDDEVAEIKKAMESEVDVTFDCVGFNKTMSTGLNATRPGGKVCLVGMGHGMMTVPLTPAAAREVDVVGVFRYKNTWPLCLEFLRSGKIDVKPLITHRFGFTEKEVEEASLEF

SEQ ID NO: 18299 - protein, 221 aa, Bacillus cereus ATCC 10987
MLKKAIAEFIGTFVLVLFGTGVAVIGGGIEGIGTLGIAMAFGLSIVAMAYSIGTISGCHINPAVSVAMFINKRMNAMELCYYVLAQILGGLLGTATLVTILKSAKTPLDNLGQNGFGTLGLSGAFLVEFILTFVFILVIVAVTGKKGSSSLAGLVIGFTLVLVHLLGIPLTGTSVNPARSIAPALFAGGEALSQLWVFIVAPIVGGIVAAIVGKFILNTEK

SEQ ID NO: 18300 - protein, 458 aa, Anabaena variabilis ATCC 29413
MTFDYDLFVIGAGSGGLAASKRAASYGAKVAIAENDLVGGTCVIRGCVPKKLMVYGSHFPALFEDAAGYGWQVGKAELNWEHFITSIDKEVRRLSQLHISFLEKAGVELISGRATLVDTHTVEVGDRKYTADKILIAVGGRPLKPELPGMEYGITSNEIFHLKTQPKHIAIIGSGYIGTEFAGIMRGLGSEVTQITRGDKILKGFDEDIRTEIQDGMTNHGIRIIPNTVVTAVEQVPDGLKINLSGDQEPIIADVFLVATGRVPNVDGLGLENAGVDVVASSVEGPGYSTMNAIAVNEYSQTSQPNIYAVGDVTDRLNLTPVAIGEGRAFADSEFGNNRREFSHETVPTAVFSNPQASTVGLTETQAREKLGDEGVTIYRTRFRPMYHSFTGKQERIMMKLVVDTNTDKVLGAHMVGENAAEIIQGVAIAVKMGATKKDFDATVGIHPSAAEEFVTMR

SEQ ID NO: 18301 - protein, 470 aa, Arabidopsis thaliana
MRGEIDEANLAPETSLINKENQDSSATITTTLLLTTFVAVSGSFVFGSAIGYSSPVQSDLTKELNLSVAEYSLFGSILTIGAMIGAAMSGRIADMIGRRATMGFSEMFCILGWLAIYLSKVAIWLDVGRFLVGYGMGVFSFVVPVYIAEITPKGLRGGFTTVHQLLICLGVSVTYLLGSFIGWRILALIGMIPCVVQMMGLFVIPESPRWLAKVGKWEEFEIALQRLRGESADISYESNEIKDYTRRLTDLSEGSIVDLFQPQYAKSLVVGVGLMVLQQFGGVNGIAFYASSIFESAGVSSKIGMIAMVVVQIPMTTLGVLLMDKSGRRPLLLISATGTCIGCFLVGLSFSLQFVKQLSGDASYLALTGVLVYTGSFSLGMGGIPWVIMSEIFPIDIKGSAGSLVTVVSWVGSWIISFTFNFLMNWNPAGTFYVFATVCGATVIFVAKLVPETKGRTLEEIQYSIGYVEL

SEQ ID NO: 18302 - protein, 192 aa, Penicillium marneffei
MVVATIKCVVVGDGAVGKTCLLISYTTNKFPSEYVPTVFDNYAVTVMIGDEPYTLGLFDTAGQEDYDRLRPLSYPQTDVFLVCFSVTSPASFENVREKWFPEVHHHCPGVPCLIVGTQTDLRDDPAVREKLAKQKMQPVRKEDGDRMAKELGAVKYVECSALTQYKLKDVFDEAIVAALEPAPKKRPKCVVL

SEQ ID NO: 18303 - protein, 375 aa, Kineococcus radiotolerans SRS30216
MAGGDAGRPRRHPDRSRQRALPVPVDGPDGRHRFHDLQRPGRAVNAPTDSAVLEGGRGAANRAVRFRRYGGPEVLEVLAVPRPVATPGTVVVEVVSAALNPGEIGIREGAFALMWPATFPEGQGNDFSGVVAEVGPGVHGVQVGDAVLGFTPRAAQAQFVLTSPDRLAPLPPGLGWDEAASIAGAGATAWAAVRAVDPRAGETVLVSAAAGGVGVVATQLALLRGARVVGTVGEANEEFLTSLGAVPVRYGPGLLERVRAAAPQGLDACVDTFGPPNAEVALALGVPAHRVNTLADGRAVQRYGVRHEAQEQADTPQVWSELAQLVAQGRLHIPIAATYPMTEVAQAYRDLGARHVRGKRVLHIASAAGRAELTR

SEQ ID NO: 18304 - protein, 311 aa, Zea mays
MAASVALSSGHRMPAVGLGVWRMEKADIRGLIHTALRVGYRHLDCAADYQNEAEVGDALAEAFQTGLVKREDLFITTKLWNSDHGHVLEACKDSLKKLQLDYLDLYLIHFPVATRHTGVGTTSSALGDDGVLDIDTTISLETTWHAMEELVSMGLVRSIGISNYDIFLTRDCLAYAKIKPAVNQIETHPYFQRDSLVKFCQKHGICVTAHTPLGGSTANAEWFGTVSCLDDPVIKSLADKYGKTPAQLVLRWGLQRDTVVIPKTSKVERLQENFDVFGFDISGEDMERMKAVDRKYRTNQPAKFWGIDLYA

SEQ ID NO: 18305 - protein, 261 aa, Ralstonia metallidurans CH34
MNAAARKPKAVAPAQPKPVAGKAAAKVAPKAGGKPRKSDLPEVDAVPLPVETVVDAVRPAYWDEACADLMKRDRILRKMIPTYGPAHLVSRGDPFVTLARSIVGQQISVKAAQSVWERLAARCPRLTPAQFLKSGSEELAGCGLSKRKAEYIIDLADHFKAGRVHVKEWVAMDDEAVIAELTQIRGIGRWTAEMFLMFNLMRPNVLPLDDVGLINAISTNYFSGEPVTRSEAREVAANWEPWRTVATWYMWRSLDPLPVTY

SEQ ID NO: 18306 - protein, 467 aa, Streptomyces venezuelae
ILSGHDERAVSAQAERLHAYAIEHPEASAADIGLSLATERSLLDHRAAVVGTDRDELLSALGELARGEDSSGVVRGGATATGRTAVLLTGQGSQRQGMGRELYDRSPVFAASFDAICAQLDGQLPRPLKDVLFAPEGSEDAALIDRTVFTQAALFAVETSLFRLFEAHGLVPDYLIGHSIGEVTAAHLAGVLDLADACVLVAHRGRLMQSARAGGAMAAVQASEDEVREALATFDDAVAVAGVNGPNATVVSGDEDAVERLVAAWREQGRRTKRLPVSHAFHSPHMDGIVDEFVTAVSGLTFRSPTIPVVSNVTGTLATVDQLTSPAYWARHIREAVPFADGVRYLEGEGVTEWLELGPDGVLVALVEDCLAKEAGSLASALRKGASEPHTVGAAMARAVLRGSGPDWAAVFPGARRVDLPTYAFQHRRYWLEGPAEAPGDATALGLAAADHPLLGAEVAVADRDGY

SEQ ID NO: 18307 - protein, 411 aa, Brucella melitensis 16M
MSISFDLTIDDTRDQLARHARASLEAKPSLIGMSREEMAAALIAAGVPERQVKMRISQLWHWLYVRGVSDFADMRNISKDLRAMLAQHFTIARPEVVEEQISQDGTRKWLFRFPPRGAGRPVEIESVYIPEEGRGTLCISSQVGCTLTCSFCHTGTQKLVRNLTSEEILAQLLTARDRLGDFPDKDTPDGAMVPAEGRKITNIVMMGMGEPLYNFEEVKKALLIASDGDGLSLSKRRITLSTSGVVPEIYRTGDEIGVMLAISLHAVRDELRDILVPINKKYPLAELIKACREYPGLSNAKRITFEYVMLKDINDSLDDAKLLVKLLQGIPAKINLIPFNPWPGTNYQCSDWEQIEKFADYVNAAGYASPIRTPRGRDILAACGQLKSESERLRKSERLALEAMMIAGHGE

SEQ ID NO: 18308 - protein, 413 aa, Oryza sativa
MAFAAEPMDLEVSPDSSPAAAAAAAVCSICLDAVACGDGVAARSTARLQCGHEFHLDCIGSAFNAKGVMQCPNCRNIEKGHWLYGNESQPCSHSDTGDWLNGETFDYPFSFEFGWCPFNTPLTSVFGESESEPNPCFPVYEKWTVLEYIGSLHGFHHPMYAPSSSTASTESIPFHQRPTGTEGHATTDLRNTQVFNESEPRNHEREQQYLGSVQMPGTLNHSTAPFGIGMPRYDGGNQQRLRPHMHDNSLFHRPTARRASNLAHLRSLTAASETRGHGHGMTSHAVQQTIPSSMASNPQPPATRRVRPRALSITSFIAASSSAEIRAPHDFPLTETASTTNGNIRNGVGAPRHANQSYSWSSETFWPQTGEPHWWSPMAPVHNRSYDNFSGRSATELLSIYGAQNGLPTPRFL

SEQ ID NO: 18309 - protein, 143 aa, Cucumis melo
SNKALNRTRTRGSRSNRLRWLFPRSHSTGHSLVQPGEDTERFTLRLPVEIRKQVVNRKLHRATSMVVLARQSSSMRGYRFGSGEGSSRGKYYRRLERLDRTSKSDRWVLSMTPPFFTRMSSMKTPRGGSNRAEPGSGRELGQG

SEQ ID NO: 18310 - protein, 304 aa, Oryza sativa
MELAGEGKLKMVANSWHPFEEAAEPWEKSTGGHATRKTTGEIQELLGIMAAGGGIPATMRAVQYTGYGGGAGALKKGGGLAEYVAAPESLTVVRPAGVSAVDAAGLPVAGLTALKALMSIGTKFDGTGGTGANVLITAASGGVGTYAVQLAKLGNHRVTATCGARNMDLVRSLGADEVLDYNTPQGAALTSSASDEKYDYIINTAMNVNWSAMKPTLSSRGRVVDITPNPGNYVAAMLTMFARKKITMMALMSLGKEEMRFLMELVGEGKLRTVVDSRCPFEKAAEAWEKSMGGHATGKVIVEM

SEQ ID NO: 18311 - protein, 484 aa, Oryza sativa (japonica cultivar-group)
MAAPSVAVDNLNPKVVLNCEYAVRGEIVIHAQRLQQQLQTQPGSLPFDEILYCNIGNPQSLGQKPVTFFREVIALCDHPCLLEKEETKSLFSADAISRATTILASIPGRATGAYSHSQGIKGLRDAIAAGIASRDGYPANADDIFLTDGASPGVHMMMQLLIRNEKDGILCPIPQYPLYSASIALHGGALVPYYLNESTGWGLEISDLKKQLEDSRLKGIDVRALVVINPGNPTGQVLAEENQRDIVKFCKNEGLVLLADEVYQENIYVDNKKFNSFKKIARSMGYNEDDLPLVSFQSVSKGYYGECGKRGGYMEITGFSAPVREQIYKVASVNLCSNITGQILASLVMNPPKAGDASYASYKAEKDGILQSLARRAKALENAFNSLEGITCNKTEGAMYLFPQLSLPQKAIDAAKAANKAPDAFYALRLLEATGIVVVPGSGFGQVPGTWHIRCTILPQEEKIPAIISRFKAFHEGFMAAYRD

SEQ ID NO: 18312 - protein, 187 aa, Triticum aestivum
GYFNPNLERYEEIPSDTGIPFNVQPRMKAVEVAEKARDAILSGKFDQVRVNIPNADMVGHTGDLEATIAGCKAADEAVKIILDAIEQVGGIFVVTADHGNAEDMVKRDKSGKPIRDKDGNVQPLTSHTLNPVPIAIGGPGLAPGATFREDLPDAGLANVAATVINLHGFEAPHHYEPTLIQVSPVPF

SEQ ID NO: 18313 - protein, 266 aa, Novosphingobium aromaticivorans
MTARLEGQVALLTGGATGIGAAVVARYLEEGAKVGVLVRDADQADMVRMRHGKGIVVVEGDVRNYSDNQNAVAATVATFGKLDVFVGNVGIWDYMTPLADMDPDKLSETLDEIFGVNVKGYFFGARAAIPELRKTKGSIIFTASTSSFYTGGGGTPYVASKHAVLGLIRQLAWELTPDVRVNGVAPGGTRTPLGGTKAGGTADVHMEDMEGLDAMIAGMTPLARIAEPDDHTGLYALLASRRDSAYMTGAVLLSDGGIGIGKRPEG

SEQ ID NO: 18314 - protein, 615 aa, Oryza sativa (japonica cultivar-group)
MASISGAAAAAPSSSGASCGLRLRRDHLPRSSHFRLARPSSITDVSRSCSSSSSSPPRSLSSKQSGHADVLAHGAVDKDPIRLWNRYVEWLYQHKQLGLFVDVSRIGFTEEFLRRMEAPMGRAFAAMRELEKGAIANPDEGRMVGHYWLRNPALAPNSFLRDKIETTLERILAFASDVISAKIRPPSSPAGRFTQILSIGIGGSSLGPQFVAEALAPDNPPLMIRFIDNTDPAGIDHQIAQLGPELASTLVIVISKSGGTPETRNGLLEVQKAFRDAGLEFSKQGVAITQENSLLDNTARIEGWLARFPMFDWVGGRTSEMSAVGLLPAALQGIDIKEMLVGAAQMDEETRNTEIKENPAALLALCWYWASDGIGSKDSLLLLSRYLQQLVMESLGKEFDLDGNRVNQGLTVYGNKGSTDQHAYIQQLREGVHNFFVTFIEVLRDRPPGHEWELEPSVTCGDYLFGMLHGTRSALYANDRESITVTVQEVNPRAVGALVALYERAVGLYAYLININAYHQPGVEAGKKAAGEVLALQKRILLVLNEASCKDPAEPLTLDQIADRCHCPEEIEMIYKIIQHMAANDRALIAEGNCGSPRSIKVYLGECNVDDDMNS

SEQ ID NO: 18315 - protein, 546 aa, Streptococcus agalactiae 2603V/R
MNKFKVNISGMTCTGCEKHVESALEKIGAKNIESSYRRGEAVFELPDDIEVESAIKAIDEANYQAGEIEEVSSLENVALINEDNYDLLIIGSGAAAFSSAIKAIEYGAKVGMIERGTVGGTCVNIGCVPSKTLLRAGEINHLSKDNPFIGLQTSAGEVDLASLITQKDKLVSELRNQKYMDLIDEYNFDLIKGEAKFVDASTVEVNGTKLSAKRFLIATGASPSLPQISGLEKMDYLTSTTLLELKKIPKRLTVIGSGYIGMELGQLFHHLGSEITLMQRSERLLKEYDPEISESVEKALIEQGINLVKGATFERVEQSGEIKRVYVTVNGSREVIESDQLLVATGRKPNTDSLNLSAAGVETGKNNEILINDFGQTSNEKIYAAGDVTLGPQFVYVAAYEGGIITDNAIGGLNKKIDLSVVPAVTFTNPTVATVGLTEEQAKEKGYDVKTSVLPLDAVPRAIVNRETTGVFKLVADAETLKVLGVHIVSENAGDVIYAASLAVKFGLTIEDLTETLAPYLTMAEGLKLVALTFDKDISKLSCCAG

SEQ ID NO: 18316 - protein, 325 aa, Treponema denticola ATCC 35405
MMNSIFLFSGQGAQFKGMAQDIVDEYGAAKDLIKKIGDITGEDIDALLRHTENEELSRSDKSQLAIIAVETAILAVLKEKGISPKAVAGFSLGEFSALYASGILSFDDMIRIVQKRGTIMQAACDKIAARATEGSGALGMSAILKLEPEKVLELLKPYSDPKSGIVFAANMNSPVQTVISGTAEGLSLAEDLCKEAGAKRCVRLAVAGPFHSPLMEEAAKEFEEVLKSFDFKAPQIPVFSNVTGKQVKSGEEAKANAVLHLTHPVLWTSEEKEIASLSGSLKPFRLLEVGPGNTLCNLWRDSGFASDELACSPTGTLEQLNKIIE

SEQ ID NO: 18317 - protein, 215 aa, Clostridium perfringens str. 13
MKIFIDTANVEEIRKASKLGVLAGVTTNPSLIAKEGRDIKEVIEEICSIVDGPISAEVMALECDEMVREGRELAKIHKNIVIKIPMCEEGLKAVKVLASEGIRTNVTLIFSPLQALLAARAGASFVSPFLGRLDDIGNPGIEIVTQIAEMFALHGIDTEIISASVRNPMHVLDSAMAGSHIATIPYNVILQMVKHPLTDAGMKKFIEDYNKAFNK

SEQ ID NO: 18318 - protein, 181 aa, Acinetobacter sp. ADP1
MSQSIYHIPVQTISGQDTSLDTYRGKVLLIVNVASKCGLTPQYEGLEKLYQDKQQQGLEILGFPANNFLEQEPGSNDEIQQFCSLTYDVHFPLFGKISVAGEDKHPLYQTLIEAQPERIGEGPWWKDLVDYGLTPNPKPEVLWNFEKFLINKNGEVVARFAPDITADDPRLVDAINAELAK

SEQ ID NO: 18319 - protein, 387 aa, Escherichia coli O157:H7 EDL933
MSVIKMTDLDLAGKRVFIRADLNVPVKDGKVTSDARIRASLPTIELALKQGAKVMVTSHLGRPTEGEYNEEFSLLPVVNYLKDKLSNPVRLVKDYLDGVDVAEGELVVLENVRFNKGEKKDDEILSKKYAALCDVFVMDAFGTAHRAQASTHGIGKFADVACAGPLLAAELDALGKALKEPARPMVAIVGGSKVSTKLTVLDSLSKIADQLIVGGGIANTFIAAQGHDVGKSLYEADLVDEAKRLLTTCNIPVPSDVRVATEFSETAPATLKSVNDVKADEQILDIGDASAQELAEILKNAKTILWNGPVGVFEFPNFRKGTEIVANAIADSEAFSIAGGGDTLAAIDLFGIADKISYISTGGGAFLEFVEGKVLPAVAMLEERAKK

SEQ ID NO: 18320 - protein, 263 aa, Triticum aestivum
MCGCREVMHAMWRPQKFKGIYLMATAYVLTLTLPSAASVYWAFGDELLTHSNALSLLPRTPFRDAALVLMLVHQFITFGFACTPLYFVWEKLIGLHDCRSLCKRAAARLPVVVPIWFLAIVFPFFGPINSAVGSLLVSFTVYIIPALAHMITRGAARAREGAADRVLAIVGRWTGTYVINAFVVVWVLVVGFGFGGWASITNFVRQIDTFGLFTKCYQCPTPPIPDASWPFPGGLRNLTMLPPAPAPSPAHFLRHHRHHSHRL

SEQ ID NO: 18321 - protein, 266 aa, Gossypium robinsonii
LSVEEIEVAPPQKNEVRVKIHFTSLCHTDVYFWEAKGQNPLFPRILGHEAGGVVESVGEGVMDVQPGDHVLPIFTGECKECPHCLSEASNMCDLLRINTERGGMLHDGQTRFSKDGKPIYHFLGTSTFSEYTVVHVGQIAKINPEAPLDKVCVLSCGMSTGFGATVNVAKPKKGGSVAVFGLGAVGLAAAEGARVCEASRIIGIDLNPNRFEEAKKFGCTEFVNPKDHNKPVQEVIAEMTGGGVDCSIECTGSTQAMVSAFECVHD

SEQ ID NO: 18322 - protein, 292 aa, Salmonella enterica
MKTRKGIILAGGSGTRLYPVTMAVSQQLLPIYDKPMIYYPLSTLMLAGIRDILIISTPQDTPRFQQLLGDGSQWGLNLQYKVQPSPDGLAQAFIIGEEFIGHDDCALVLGDNIFYGHDLPKLMEAAVNKESGATVFAYHVNDPERYGVVEFDQKGTAVSLEEKPLQPKSNYAVTGLYFYDNSVVEMAKNLKPSARGELEITDINRIYMEQGRLSVAMMGRGYAWLDTGTHQSLIEASNFIATIEERQGLKVSCPEEIAFRKNFINAQQVIELAGPLSKNDYGKYLLKMVKGL

SEQ ID NO: 18323 - protein, 183 aa, Pyrus pyrifolia
MASSMISSGTVATVSADRPAPAQARMVAPFNGLKSSSAFPVTRKSNDITSIASNGGRVQCMQVWPPLGLKKFETLSYLPPLSSESLAKEVDYLLRKNWVPCLEFELETGFVYRENHRSPGYYDGRYWTMWKLPMFGCTDSSQVLKELEEAKKAYPQSFIRIIGFDNVRQVQCISFIAYKPAGF

SEQ ID NO: 18324 - protein, 266 aa, Gossypium raimondii
LSVEEIEVAPPQKNEVRVKIHFTSLCHTDVYFWEAKGQNPLFPRILGHEAGGVVESVGEGVMDVQPGDHVLPIFTGECKECPHCLSEASNMCDILRINTEWGGMLHDGHTRFSKDGKPIYHFLGTSTFSEYTVVHVGQVAKINPEAPLDKVCVLSCGMSTGFGATVNVAKPKKGGSVAVFGLGAVGLAAAEGARVCEASRIIGIDLNPNRFEEAKKFGCTEFVNPKDHNKPVQEVIAEMTGGGVDCSIECTGSTQAMVSAFECVHD

SEQ ID NO: 18325 - protein, 177 aa, Silene latifolia subsp. alba
MASLMSNAAVVTASTAAQANMVAPFSGLKSTSAFPVSRKSNVDITSLATNGGRVNCMQVWPPRNLKKFETLSYLPTLSEESLLKEINYLLIKGWVPCLEFEVGPAHVYRENNKSPGYYDGRYWTMWKLPMFGCTDASQVAAEVVECKNAYPDAHVRIIGFDNKRQVQCISFIAYKPE

SEQ ID NO: 18326 - protein, 265 aa, Gossypium hirsutum
LSVKEIEVAPPQKNEVRVKIHFTSLCHTDVYFWEAKGQNPLFPRILGHEAGGVVESVGKGVIDVQPGDHVLPIFTGECKECPHCLSEASNMCDLLRINTERGGMLHDGHTRFSKDGKPIYHFLGTSTFSKYTVVHVGQVAKINPEAPLDKVCVLSCEMSTGFGATVNVAKPKKGGFVAVFGLGAVGLAAAEGARVCEASRIIGIDLNPNRSEEAKKFGCTEFVNPKDHNKPIQELIAEMTGGVDCSIECTGSTQAMVSAFECVHD

SEQ ID NO: 18327 - protein, 200 aa, Oryza sativa
  unsure (1)..(200): unsure at all Xaa locations
LLSVVGRKMDKASIIKXAIEYIQRLQAEEQQMLREVAALESXAAAASAAPAAANPFAGLGADEEHEYGHHHPSSSXRSRTKKVKRALSVSSISDALLAAAAPAXPPVEIQELRVSEVGDRVLVVSVTCSKRRDAMARVCRALEELRLRVITANITSVAGCLMHTLFVEVDHMDSVPMKQMVEAALSQLVATGSPLSSMSY

SEQ ID NO: 18328 - protein, 505 aa, Novosphingobium aromaticivorans
MASGQLRYYAPMTSTSSSPVTETILNFIDGSYRKGSEGKSFPNVNPATGTAIGVVHEASQADVADAVAAAKAALTGPWGKMTTAERVKLIAAVATEIERRADDFLAAEVADTGKPRHVASHIDIPRGAANFRMFADVVSTMPGESFNTSTPDGGQALNYTVRKPKGVVAVVCPWNFPLLLMTWKVGPALACGNTVVVKPSEETPRTAALLGEVMNAVGMPKGVYNVVHGFGPGSAGEFLTSNPDVDAITFTGETGTGQAIMQKAAIGVRDISFELGGKNPAIVFADADLDKAVEGLSRSVFLNTGQVCLGTERVYVERPIFDAFVARMAAAAQGFKPGVTGDRAYLGPLISAEHREKVLGYYRRAVEDGATVVTGGGVPEISGAEAGGFFVEPTLWIDVAHGDTVMREEIFGPCCGIVPFDSEDEVIALANDTVYGLCASIWTENMSRGHRVAAAMDVGVCWVNSWFLRDLRTAFGGSGHSGIGREGGVHSLEFYTEITNICVKL

SEQ ID NO: 18329 - protein, 197 aa, Oryza sativa
MVGGGAGADAGIDRVLWTEAEIAARVSEVAAELAADLRALREPAVVVGVATGAFLFLADLVRRVDAPLAVDLVRAESYGDGTESSGRPRITSDLKVDVAGKHVVVVEDIVDTGNTVSCLIAYLEKKGASSISVCTFFDKPARRTAYFQLVGDGKFYRGFECPDSFVVGYGMDYAELYRNLPYVGVLKAEMYKKDTSN

SEQ ID NO: 18330 - protein, 269 aa, Pseudomonas putida KT2440
MSNSNIGNKQPSLRKPVVLMTMGSQERKGHDYQVMTHKYITPLVEFSDCVPVLVPTCCGTEDLETYLDMADGVYLTGAGSNIDPALYGQENQTPGKGQDQNRDLFDIPLVKAAIKRGLPIFGICRGMQEINVALGGDIYQKVYAEPGFNDHRENPEDPVEVQYAQVHGVKIQPGSWLHDTLGTDEIRVNSLHGQGLHKLGAGIEAIARAEDGLVEAIHAPSISPFLFAVQWHPEWQAAKNPDSIKIFQAFGDACRAQVRKAQIKRQHAA

SEQ ID NO: 18331 - protein, 566 aa, Brucella melitensis 16M
MSCNDRKHRQGARCQPIETNGNNMTVKTIATTPYQDQQPGTSGLRKKVPVFQQPNYAENFIQSIFDVLEGFKGKTLVVGGDGRFYNREVIQKLIKIAAANGFGRIMVGQGGILSTPAASNMIRKYKAFGGMILSASHNPGGPTQDFGIKYNIGNGGPAPEKITEAIFARSKVIDQYKIADAADIDIDKIGTSKIGDTEVVIFDPVADYAELMESLFDFAAIRAMIKGGFQMKFDAMHAVTGPYAKEIFERHLGAPEGSVVNFVPLPDFGGHHPDPNLVYAKDLYDLLMSSHAPDFGAASDGDGDRNLILGRGIFITPSDSLAMLAANAHLAPGYKGGIKGIARSMPTSAAADRVAEKLGIGMYETPTGWKFFGNLLDSGKVTICGEESSGTGSDHVREKDGLWAVLLWLNILAVRKESVKAIADDHWARFGRNYYTRHDYEAVDSDIATKLVADLRGKLAGLPGTSVNGLRIEKADDFAYHDPVDGSTSEHQGIRIYFEGGARIVLRLSGTGTSGATIRIYIERYEADPAKHNLDTQATLAPLIDAAEQIAEVKKRSGRTEPSVVT

SEQ ID NO: 18332 - protein, 343 aa, Archaeoglobus fulgidus
MIGIVSYGSYVPKFRIRVEEIARVWGEDAKKIKDGLGVHEKSVPGMDEDAATIAVEAAREAIRRAGINPEEIGAVFVGSESHPYAVKPTATIVGEALGVGNDYFAADLEFACKAGTAGMQICYSMVKAGMIKYGLAIGADTSQARPGDALEYAAAAGGAAFIIGENPIAEVEATYSFTSDTPDFWRRDLQPYPSHGGRFTGLPAYFRHVISAAKGLMEKYGYKVEDFDYAVFHMPNAKFPVRAAKMLGFSMEHISQGLVVKAIGNTYSGSSLLGLAATLDVAEPDERILLVSFGSGAGSDAFAIRVTDAIENYPREPKVWEKIERKAYVDYAIYLKHRRKIKA

SEQ ID NO: 18333 - protein, 494 aa, Triticum aestivum
  unsure (1)..(494): unsure at all Xaa locations
MDPYKHRPTSGANAGYWTTNSGAPVWNNNNALTVGQRGPILLEDYHLIEKLAQFDRERIPERVVHARGASAKGFFEVTHDVSQLTCADFLLAPGVQTPVIVRFSTVVHERGSPETLRDPRGFAVKFYTXREGNFDLVXGNNMPVFFIRDGMKFPDMVHAFKPSPKTNMQENWRIVDFFSHHPESLHMFTFLFDDVGIPLNYRHMDGFGVNTYTLISRDGKAHLVKFHWKPTCGVKCLLDDEAVTVGGTCHTHATKDLTDAIAAGNYPEWKLFIQTIDADHEDKFDFDPLDVTKTWPEDIIPLQPVGRMVLNKNIDNFFAENEQLAFCPAVTVPGIHYSDDKLLQTRIFSYADTQRHRLGPNYLMLPVNSPKCAHHNNHHDGLMNFMHRDEEVNYFPSRFDPTRHAEQYPIPPRVLSGCREKCIIKKENNFKQAGERYRSFDPARQDRFLQRWVDALTDARVTHEIQGIWVSYWSQCDASLGQKLASRLKMKPNM

SEQ ID NO: 18334 - protein, 383 aa, Oryza sativa (japonica cultivar-group)
MAPSSSSCHDAAASMLLCAEDNSSILWLEDEEGEVGERRSGGCRSMVGDLAAGGGGGSGGGGVEEEEDMFPRQSEECVASLVEREQAHMPRADYGERLRGGGGDVDLRVRSEAIGWIWEVYTYYNFSSVTAYLAVNYLDRFLSQYELPEGRDWMTQLLSVACLSIAAKMEETVVPQCLDLQIGEPRFLFEVETIHRMELLVLTNLNWRMQAVTPFSYIDYFLRKLNSGNAAPRSWLLRSSELILRIAAGTGFLEFRPSEIAAAVAATVAGEATGVVEEDIAEAFTHVDKGRVLQCQEAIQDHHYSMATINTVQPKPASTRRGSASASSSSVPESPVAVLDAGCLSYKSDDTDAATIASHGGGRRKSCFDSSPVTSKKRRKLSR

SEQ ID NO: 18335 - protein, 200 aa, Campylobacter jejuni
MKIILATSNKHKVLELKEILKDFEIYAFDEVLMPFEIEENGKTFKENALIKARAVFNALDEKQKKDFIALSDDSGICVDVLEGNPGIYSARFSGKGDDKSNRDKLVNEMIKKGFKQSKAHYVAAIAMVGLMGEFSTHGTMHGKVIDTEKGENGFGYDSLFIPKGFDKTLAQLSVDEKNNISHRFKALELAKIILKILNKG

SEQ ID NO: 18336 - protein, 808 aa, Escherichia coli CFT073
MSKNEQMVGISRRTLVKSTAIGSLALAAGGFSLPFTLRSAEAAVQQANEKVVWGACSVNCGSRCALRLHVKDNEVTWVETDNTGSDEYGNHQVRACLRGRSIRRRINHPDRLNYPMKRVGKRGEGKFERISWDEALDTIASSLKKTVKQYGNEAVYIQYSSGIVGGNMTRSSPSASAVKRLMNCYGGSLNQYGSYSTAQISCAMPYTYGSNDGNSTTDIENSKLVVMFGNNPAETRMSGGGITYLLEKAREKSNAKMIVIDPRYTDTAAGREDEWLPIRPGTDAALVAGIAWVLINENLVDQPFLDKYCVGYDEKTLPADAPKNGHYKAYILGEGDDKTAKTPQWASQITGIPVDRIIKLAREIGTAKPAYICQGWGPQRQANGELTARAIAMLPILTGNVGISGGNSGARESTYTITIERLPVLDNPVKTSISCFSWTDAIDHGPQMTAIRDGVRGKDKLDVPIKFIWNYAGNTLVNQHSDINKTHEILQDESKCEMIVVIENFMTSSAKYADILLPDLMTVEQEDIIPNDYAGNMGYLIFLQPVTSEKFERKPIYWILSEVAKRLGPDVYQKFTEGRTQEQWLQHLYAKMLAKDPALPSYDELKKMGIYKRKDPNGHFVAYKAFRDDPEANPLKTPSGKIEIYSSKLAEIARTWELEKDEVISPLPVYASTFEGWDSPERSAFPLQLFGFHYKSRTHSTYGNIDVLKAACRQEVWINPIDAQKRGIANGDMVRVFNHRGEVRLPAKVTPRILPGVSAMGQGAWHEANMSGDKIDHGGCVNTLTTLRPSPLAKGNPQHTNLVEIEKI

SEQ ID NO: 18337 - protein, 808 aa, Escherichia coli CFT073
MMKIHTTEALMKAEISRRSLMKTSALGSLALASSAFTLPFSQMVRAAQAPVEEKAVWSSCTVNCGSRCLLRLHVKDDTVYWVESDTTGDDVYGNHQVRACLRGRSIRRRMNHPDRLKYPMKRVGKRGEGKFERISWDEALDTISDNLRRILKDYGNEAVHVLYGTGVDGGNITNSNVPYRLMNSCGGFLSRYGSYSTAQISAAMSYMFGANDGNSPDDIANTKLVVMFGNNPAETRMSGGGVTYYVEQARERSNARMIVIDPRYNDTAAGREDEWLPIRPGTDGALACAIAWVLITENMVDQPFLDKYCVGYDEKTLPANAPRNAHYKAYILGEGPDGIAKTPEWAAKITSIPAEKIIQLAREIGSAKPAYICQGWGPQRHSNGEQTSRAIAMLSVLTGNVGINGGNSGVREGSWDLGVEWLPMLENPVKTQISVFTWTDAIDHGTEMTAPRDGVRGKEKLDVPIKFLWCYASNTLINQHGDINHTHEVLQDDSKCEMIVGIDHFMTASAKYCDILLPDLMPTEQEDLISHESAGNMGYVILAQPATSAKFERKPIYWMLSEVAKRLGPDVYQTFTEGRSQHEWIKYLHAKTKERNPEMPDYEEMKTTGIFKKKCPEEHYVAFRAFRVDPQANPLKTPSGKIEIYSERLAKIADTWELKKDEIIHPLPAYTPGFDGWDDPLRKTYPLQLTGFHYKARTHSSYGNIDVLQQACPQEVWINPIDAQARGIRHGDTVRVFNNNGEMLIAAKVTPRILPGVTAIGQGAWLKADMFGDRVDHGGSINILTSHRPSPLAKGNPSHSNLVQIEKV

SEQ ID NO: 18338 - protein, 486 aa, Prochlorococcus marinus subsp. pastoris str. CCMP1378
MTTALQTPQRRSRSKLQDASLVNGPMLLLRSIRGFSSNRSMLWLATVPLALFGLGIFNLSAHAADLPELNAAFLANNLWLLIATILVIFMNAGFAMVEAGMCRSKNAVNILAKNLFVFALAVTSYWFIGYSLMYGGSVADGWLYFGGLFFDPTVTADMVTDAGLVPTVDFLFQSAFAGTAATIVSGLVAERVKFGEFVVFAIVLTAFIYPIAGSWKWNGGWLDSLGFVDFAGSSIVHSVGAWAGLVGAMLLGPRIGKYSDGKPQAMPGHNMAIATLGALILWIGWYGFNPGSQLAMDQWVPYVAVTTTLAAAAGAIGATIVSTLTSGKPDLTMIINGILAGLVSITAGCGDMTLAGAWFAGLVGGIIVVFSVAALDAAEIDDPVGAFSVHGVCGVWGTLVIGLWGTAVQGDGAGMGLFNGGGINLLLVQALGAAAYAIWTLVTCWIAWSIIGGLFGGIRVSEEEETQGLDISEHGMESYPDFASAK

SEQ ID NO: 18339 - protein, 413 aa, Bordetella parapertussis 12822
MRGRAFRSCPGGACRAAGRSVRTLSLLQVLMKFDTLLTHGGRDPKAHKGMVNTPVYRTSTVVFESMAEYKATRGAKFDHVRYGRLGTHTVKELENLVAAIEGGHRAVLTPSGVSAIATTLNTLARPGSHILVPDNVYYPCREFCEKVLAPRGVRVEYYAGSEVERLVRPDTSVVYCESPGSLTMEMQDFARIAAAAHAVGAKVVADNTWATPVFLQPFEHGIDVSIHAATKYLVGHSDVMMGTVTAHDPELWLAIRTEAAAQGLSISPDDAYLATRGIRTLGVRMAAHYRNALDVAQWLAGHPRVAQVLYPALPQHPDHALWRRQMRGASGLLTLELEPCSLEQRDAFIDRLTLFAIGASWGGYESLVLPADTAGKRSLAGRDYAGPLVRLHIGLEDVEDLKRDLDQALRRED

SEQ ID NO: 18340 - protein, 535 aa, Mycobacterium tuberculosis CDC1551
MSAFHAQFVQTFTAGAGAYASAEAAAAAPLEGLLNIVNTPTQLLLGRPLIGNGANGAPGTGQAVGADGLLYGNGGAGGSGAPGQAGGPGGAAGLFGNGGAGGAGGDGPGNGAAGGAGGAGGLLFGSGGAGGPGGVGNTGTGGLGGDGGAAGLFGAGGIGGAGGPGFNGGAGGAGGRSGLFEVLAAGGAGGTGGLSVNGGTGGTGGTGGGGGLFSNGGAGGAGGFGVSGSAGGNGGTGGDGGIFTGNGGTGGTGGTGTGNQLVGGEGGADGAGGNAGILFGAGGIGGTGGTGLGAPDPGGTGGKGGVGGIGGAGALFGPGGAGGTGGFGASSADQMAGGIGGSGGSGGAAKLIGDGGAGGTGGDSVRGAAGSGGTGGTGGLIGDGGAGGAGGTGIEFGSVGGAGGAGGNAAGLSGAGGAGGAGGFGETAGDGGAGGNAGLFNGDGGAGGAGGLGIAGDGGNGGKGGKAGMVGNGGDGGAGGASVVANGGVGGSGGNATLIGNGGNGGNGGVGSAPGKGGAGGTAGLLGLNGSPGLS

SEQ ID NO: 18341 - protein, 335 aa, Nostoc sp. PCC 7120
MTTTPSPTINTKITPFNSKLNSPLIKQEINVLQINLGKRCNLACTHCHVEASPKRTEELTAEICQQLIEVIHRFPQIQIVDLTGGAPEMNYGFKPLVAAARQNNKQVIVRSNLTIYFVEGFNDLPEYFAANKIRIVASMPCYLADNVDKMRGTGVFDDSIKALQWLNQVGYGRDPSLILDLVYNPQLPTSEKFALTPEQSKLEQDYKTFLQEHFHIKFNNLFTITNLPVGRTKLYLERKKLETSYLQFLELHFNPHTVGNLMCRNQLSIDYLGNIYDCDFNQMMNLPAKTLNGETLTVAKLIEASSLDLINEIQTANYCYGCTAGCGSSCSGALV

SEQ ID NO: 18342 - protein, 266 aa, Gossypium barbadense
LSVEEIEVAPPQKNEVRVKIHFTSLCHTDVYFWEAKGQNPLFPRILGHEAEGVVESVGEGVIDVQPGDHVLPIFTGECKECPHCLSEASNMCDLLRINTERGGMLHDGHTRFSKDGKPIYHFLGTSTFSEYTVVHVGQVAKINPEAPLDKVCVLSCGMSTGFGATVNVAKPKKGGSVAIFGLGAVGLAAAEGARVCEASRIIGIDLNPNRFEEAKKFGCTEFVNPKDHNKPVQEVIAEMTGGGVDCSIECTGSTQAMVSAFECVHD

SEQ ID NO: 18343 - protein, 454 aa, Streptomyces coelicolor A3(2)
MVQEIDVVVIGMGVGGEHVAERLAEEGLDVVGVEAELVGGECPYWVCIPSKMMIRGGNLLAEARRIPGMAGQAQVTPDFAPVASRIREEATDDWNDQVAVDRFTGKGGQFVRGRARLAGPKRVEIDGREFTARRGVVIATGSRPQIPPVPGLDAVPYWTNREAIAVKDSPRSLMVLGGGAVGVELAQAFARFGTAVTVVEAAERLLPAEEPETSALLADVLGAEGITVRTGAQANRARHDGDTFTLTLEGGEELTAERLLVATGRRAGLAGLGLGTVGLDPDARALHVDEQLRAAPGLWGVGDVTGRGAFTHVAMYQAEIAVRAILGQPGPGADYRALPRVTFTDPEVGSVGLTEARAREKGLRVRTGTAQVPSSARGWIHKAGNEGLIKLVEDVDRGVLVGATSAGPMGGEVLYGLVVAVQGEVPVDRLRHMMYAYPTFHRAVEDALRALRSS

SEQ ID NO: 18344 - protein, 266 aa, Gossypium tomentosum
LSVEEIEVAPPQKNEVRVKIHFTSLCHTDVYFWEAKGQNPLFPRILGHEAGGVVESVGKGVIDVQPGDHVLPIFIGECKECPHCLSEASNMCDLLRINTERGGMLHDGHTRFSKDGKPIYHFLGTSTFSKYTVVHVGQVAKINPEAPLDKVCVLSCEMSTGFGATVNVAKPKKGGFVAVFGLGAVGLAAAEGARVCEASRIIGIDLNPNRSEEAKKFGCTEFVNPKDHNKPVQEVIAEMTGGGVDCSIECTGSTQAMVSAFECVHD

SEQ ID NO: 18345 - protein, 619 aa, Zea mays
  unsure (1)..(619): unsure at all Xaa locations
MDSDYGVPRELSEVQKKRTLYQPELXPPCLQGTTVRVEYGDAAIAADPAGAHVISHAFPHTYGQPIAHFLRKTAVVPDAKVISEHQAVRVGIVFCGRQSPGGHNVVWGLYEAIKAHNQNSKLIGFLGGSDGLLAQRTLEITDKVIASYKNQGGYDMLGRTKDQIRTTEQVNGAMASCQALKLDALVIIGGVTSNTDAAQLAETFAEAKCATKVVGVPVTLNGDLKNQFVETTVGFDTICKVNAQLISNVCTDALSAEKYYYFIRLMGRKASHVALECALQSHPNMVILGEEVAASKLTIFDITKQICDAVQARAEKDKNHGVILIPEGLVESIPELYALLQEIHGLHGKGVSVENISSQLSPWASALFEFLPPFIRKQLLLHPESDDSAQLSQIETEKLLAQLVETEMNRRLKEGTYKGKKFNAICHFFGYQARGALPSKFDCDYAYVLGHVCYHIIAAGLNGYMATVTNLKNPVNKWRCGATPISSMMTVKRWSRGPSATQIGKPAVHMASVDLKGKAYDVLRQNSSSFLLEDVYRNPGPLQFEGPGADSKPISLCVEDQDYMGRIKKLQEYLEKVKRIVKPGCSQDVLKAALSAMSSVTETLNIMTSSSTGQTPLSH

SEQ ID NO: 18346 - protein, 266 aa, Gossypium mustelinum
LSVEEIEVAPPQKNEVRVKIHFTSLCHTDVYFWEAKGQNPLFPRILGHEAGGVVESVGEGVMDVQPGDHVLPIFTGECKERPHCLSEASNMCDLLRINTERGGMLHDGHTRFSKDGKPIYHFLGTSTFSEYTVVHVGQVAKINPEAPLDKVCVLSCEMSTGIGATVNVAKPKKGGSVAVFGLGAVGLAAAEGARVCEASRIIGIDLNPNRFEEAKKFGCTEFVNPKDHNKHVQEVIAEMTGGGVDCSIKCTGSTQAMVSAFECVHD

SEQ ID NO: 18347 - protein, 177 aa, Pirellula sp. 1
MRTLIDESQLDDGVSKLAKEIDATYGDRPITVVAVMTGSLVLFADLIRRLSMPQRVGVIHASSYRGGTQAGKLEIDSKMLIDVQNRDVLLVDDIYDTGATLTKLSGAIADMGASSVSTAVLLRKLRPEQIGPKPDFVAFEIPDEFVVGYGLDYLDMYRNLPFIGVLEPDEIEATARQ

SEQ ID NO: 18348 - protein, 266 aa, Gossypium darwinii
LSVEEIEVAPPQKNEVRVKIHFTSLCHTDVYFWEAKGQNPLFPRILGHEAGGVVESVGEGVIDVQPGDHVLPIFTGECKECPHCLSEASNMCDLLRINTERGGMLHDGHTRFSKDGKPIYHFLGTSTFSEYTVVHVGQVAKINPEAPLDKVYVLSCGMSTGFGATVNVAKPKKGGSVAIFGLGAVGLAAAEGARVCEASRIIGIDLNPNRFEEAKKFGCTEFVNPKDHNKPVQEVIAEMTGGGVDCSIECTGSTQAMVSAFECVHD

SEQ ID NO: 18349 - protein, 325 aa, Arabidopsis thaliana
MAVDLMRFPKIDDQTAIQEAASQGLQSMEHLIRVLSNRPEQQHNVDCSEITDFTVSKFKTVISLLNRTGHARFRRGPVHSTSSAASQKLQSQIVKNTQPEAPIVRTTTNHPQIVPPPSSVTLDFSKPSIFGTKAKSAELEFSKENFSVSLNSSFMSSAITGDGSVSNGKIFLASAPLQPVNSSGKPPLAGHPYRKRCLEHEHSESFSGKVSGSAYGKCHCKKSRKNRMKRTVRVPAISAKIADIPPDEYSWRKYGQKPIKGSPHPRGNYKCSTFRGCPARKHVERALDDPAMLIVTYEGEHRHNQSAMQENISSSGINDLVFASA

SEQ ID NO: 18350 - protein, 164 aa, Methylococcus capsulatus str. Bath
MNIYEFEVRTLEGETVRLDGYRGKVLLIVNVASRCGFTPQYAGLEALYRRHRNAGLVILGFPCNQFGGQEPGSETEIRRFCSSRYEVSFPLFAKIEVNGEHTHPLYAYLKSAQPGLLGSEAIKWNFTKFLVGRNGEVVKRYAPTATPESIEPGLLPLLTVGSGG

SEQ ID NO: 18351 - protein, 310 aa, Photorhabdus luminescens subsp. laumondii TTO1
MSEFAMVFPGQGSQDLGMLADLATAFPVVEQTFAEASDVLGYDLWALVQQGPEEELNKTWQTQPALLAASVAIWRVWQEKGGKAPSLMAGHSLGEYSALVCAGVIDFKQAIRLVELRGKLMQEAVPEGTGAMYVIIGLDNESIDRACKEVAQGQIVSPVNFNSPGQVVIAGEKEAVERAGDACKAAGAKRALPLAVSVPSHCALMKPAADKLAVVLEGIEFGYPQFPVVNNVDVKIEQSAEAIRHALVRQLYNPVRWTETVEFITEQGVGQLLEIGPGRVLTGLTKRIVNTLSAAAVNDTASLITALENN

SEQ ID NO: 18352 - protein, 266 aa, Gossypium hirsutum
LSVEEIEVAPPQKNEVRVKIHFTSLCHTDVYFWEAKGQNPLFPRILGHEAGGVVESVGEGVTDVEPGDHVLPIFTGECKECPHCLSEASNMCDLLRINTERGGMLHDGQTRFSKDGKPIYHFLGTSTFSEYTVVHVGQVAKINPEAPLDKVCVLSCGMSTGFGATVNVAKPKKGGSVAVFGLGAVGLAAAEGARVCEASRIIGIDLNPNRFEEAKKFGCTEFVNPKDHNKPVQEVISEMTGGGVDCSIECTGSTQAMVSAFECVHD

SEQ ID NO: 18353 - protein, 233 aa, Bacillus subtilis subsp. subtilis str. 168
MQDSKEQRVHGVFEKIYKNYDQMNSVISFQQHKKWRDKTMRIMNVKEGAKALDVCCGTADWTIALAKAAGKSGEIKGLDFSENMLSVGEQKVKDGGFSQIELLHGNAMELPFDDDTFDYVTIGFGLRNVPDYLTVLKEMRRVVKPGGQVVCLETSQPEMFGFRQAYFMYFKYIMPFFGKLFAKSYKEYSWLQESARDFPGMKELAGLFEEAGLKNVKYHSFTGGVAATHIGWK

SEQ ID NO: 18354 - protein, 375 aa, Rhodococcus ruber
MKTKGAILWGLNEPWSVEEIEIGDPVAGEVQIRMEAAGMCHSDHHIVTGATPMPSFPVMGGHEGSGVITKVGDGVVGLEVGDHVVLSFIPACGRCPSCATGHSNLCDLGAGLLSGMAISDGTYRIQARGQHVIPMCLLGTFSPYMTVNQTQVVKIDKDVPFELAALVGCGVPTGWGSATHVADVKPGEAVAVIGVGGVGISALQGAVASGARQIFAIDPVPWKREQALKFGATHALPRRWRALMPIMETTWGRMADKTIITVGEMRGEYVEEALQLTAKNGRCVVTAMGHMTDMDVKLNAFLFAMLQKDLQGNIFGGCNARVDIPNLLAMYKAGQLNLADMVTRTYTLEQVNDGYQDMLDGKNIRGVIRYTDADR

SEQ ID NO: 18355 - protein, 453 aa, Photorhabdus luminescens subsp. laumondii TTO1
MAKFSNWRELKQLLFFSFPIIVSQIARTAMSFVDIVMSGHYATADLAAVTLGSSIWFPIFVLGYGTIIMLAADVAKQKAQHDDEGIKDSLKNYLFLAVILSIPIIILLMLVSWLLSFIGIDEHILEITQGYVIALACGVPSVMIFNVFRSFLQGLEDTKIAMYLSAGALLLNIPLNYILIYGKLGLPEMGGIGAGITTAIINNLIAVCLIIYFLLKKEYRRYRPDFSLPKYNSLIRTFYIGMPSGLALFVEMVFLDVIAITAAPLGAQVIAAHNIMLNITSIIYTITGGIAAAVTVRVGSYIGKRDKISLTGTIKISIALILSISAVIGVLIYYFAGSFISLYTNDNGVIIIALNIIFLLCLFQFFDSCQAALSGILRGFHDTRSVFYAPLFGYWLVGLPLGFILALTDWVTERMGIIGFWYGLVLGLFVNAILLFIILKVRQRGMISRLISY

SEQ ID NO: 18356 - protein, 295 aa, Sinorhizobium meliloti 1021
MTDKRKVRKAVFPVAGLGTRFLPATKAVPKEMLTVVDKPVIQYVVDEALEAGIEHLIFVTGRSKAVIEDYFDIQVELDQTLRERNKKAEIELLEAMLPKAGTTSFTRQQAPLGLGHAVWCARDLVGNEPFALLLPDMIMKGEKGCLKGMVELYEESGGNVVAVEECAPDQAHKYGIVGVGETVGDGFRITRMVEKPAKGTAPSNFFINGRYILQPEIFPILETQERGAGNEIQLTDGMVKLAEAQPFAAYHFRGDTYDCGAKDGFILANVAFALERGDIRPIVEGPLKTLLQGLK

SEQ ID NO: 18357 - protein, 140 aa, Prunus armeniaca
VMVYKFHEDDHGEVVSEIRRADLESYLGLHYPATDIPQAARFLFKQNRVRMICDCNANPVKIIQSEELKQPLCLVNSTLRSPHGCHRQYMANMGSIASLVMAVIINGNDLTRLWGLVVCHHTSPRYVPFPLRYACEFLIQ

SEQ ID NO: 18358 - protein, 346 aa, Mycobacterium avium subsp. paratuberculosis str. k10
MSTVSAYAATSATEPLTKTTIERRDPGPRDVAIDIKFAGICHSDIHTAKGEWGHTNYPVVVGHEIAGVVTEVGAEVTKYKVGDHVGVGCMVNSCRQCSSCTAGLEQYCKRGATFTYNSIDRDGSVTQGGYSQAIVVDEDFVVRIPDSLPLDKAAPLLCAGITLFSPLRHWNAGPGTRLAIVGLGGLGHMGVKLGAAMGAEVTVLSQSLKKMEDGLRLGAKHYHATADPDTFTKLRGSFDLMLNTVSANLKLNDYLSLLDVDGTLVELGIPEHPMEVGAFPLALARRSLSGSNIGGIAETQEMLDFCAEHNVTPEIELIEPDYINEAYERVLASDVRYRFVIDISKL

SEQ ID NO: 18359 - protein, 552 aa, Pisum sativum
MNQAMATPLSLSCCSPTLTRSTLFFTKTFPFSRSFSTPLPLSTKTLISLSPPHRTFAVRAESQNGADPARQYDFDLFTIGAGSGGVRASRFASNFGASSAVCELPFSTISSDTTGGVGGTCVIRGCVPKKLLVYASKFSHEFEESNGFGWRYDSEPKHDWSSLIANKNAELQRLTGIYKNTLKNAGVKLIEGRGKIVDAHTVDVDGKLYSAKHILVSVGGRPFIPDIPGKEYAIDSDAALDLPSKPQKIAIVGGGYIALEFAGIFNGLKSEVHVFIRQKKVLRGFDEEIRDFVAENMALRGIEFHTEESPVAITKAADGSLSLKTNKGTEEGFSHIMFATGRSPNTKDLGLESVGVKVAKDGSIEVDEYSQTSVPSIWAIGDATNRVNLTPVALMEGVALAKTLFQNEPTKPDYRAIPSAVFSQPPIGGVGLTEEQAAEQYGDIDVFTANFRPMKATLSGLPDRVFMKLIVSAETNVVLGLHMCGEDAAEIAQGFAVGIKAGLTKADFDATVGIHPTAAEEFVTMRTPTRKVRKNQASQGKSDSKAKAVAGS

SEQ ID NO: 18360 - protein, 413 aa, Wautersia eutropha
MMSLSHATNPQPKPAAAPHTLAALLAAGGLAGKRVFIRADLNVPQDAAGAITDDTRIRASVPAIAACLQAGAAVMVTSHLGRPQEGAPDPRHSLAPVGRRLSELLGRQVPLLSGWTEGGFQVPPGQVVLLENCRMNTGEKKNSDELAQKMAALCDVYVNDAFGTAHRAEATTHGIARYAPIACAGPLLAAEIDALGKALGQPARPLVAIVAGSKVSTKLTILKSLADKVDNLIVGGGIANTFMLAAGLKIGKSLAEPDLLADARAIIDIMARRGASVPIPVDVVCAKEFSATAAATVKDVKDVADDDMILDIGPKTAAMLAEQLKAAGTIVWNGPVGVFEFDQFGNGTRVLAQAIAESKAFSIAGGGDTLAAIAKHGIADRVGYISTGGGAFLEFLEGKTLPALAVLAQRAAA

SEQ ID NO: 18361 - protein, 266 aa, Gossypium tomentosum
LSVEEIEVAPPQKNEVRVKIHFTSLCHTDVYFWEAKGQNPLFPRILGHEAGGVVESVGEGVMDVEPGDHVLPIFTGECKECPHCLSEASNMCDLLRINTERGGMLHDGQTRFSKDGKPIYHFLGTSTFSEYTVVHVGQVAKINPEAPLDKVCVLSCGMSTGFGATVNVAKPKKGGSVAVFGLGAVGLAAAEGARVCEASRIIGIDLNPNRFEEAKKFGCTEFVNPKDHNKPVQEVISEMTGGGVDCSIECTGSTQAMVSAFECVHD

SEQ ID NO: 18362 - protein, 266 aa, Gossypium mustelinum
LSVEEIEVAPPQKNEVRVKIHFTSLCHTDVYFWEAKGQNPLFPRILGHEAGGVVESVGEGVTDVQPGDHVLPIFTGECKECPHCLSEASNMCDLLRINTERGGMLHDGQTRFSKDGKPIYHFLGTSTFSEYTVVHVGQVAKINPEAPLDKVCVLSCGMSTGFGATVNVAKPKKGGSVAVFGLGAVGLAAAEGARVCEASRIIGIDLNPNRFEEAKKFGCTEFVNPKDHNKPVQEVISEMTGGGVDCSIECTGSTQAMVSAFECVHD

SEQ ID NO: 18363 - protein, 429 aa, Ralstonia metallidurans CH34
MSAIVDIIGREVLDSRGNPTVECDVLLESGVMGRAAVPSGASTGSREAIELRDGDKSRYLGKGVLKAVEHINTEISEAIMGLDASEQAFLDRTLIELDGTENKGRLGANAMLAVSMAVAKAAAEEAGLPLYRYFGGSGAMQMPVPMMNIVNGGAHANNSLDIQEFMIMPVSQTSFREALRCGAEVFHALKKILSDKGMSTAVGDEGGFAPNFSSNEECLNTVVQAIEKAGYKAGEDVLLALDCAASEFYHEAEGVYSLEGEGLKLTSTQFADYLANLCDKFPIVSIEDGMAEGDWEGWKTLTDKLGKRVQLVGDDLFVTNTKILKEGIEKGIGNSILIKINQIGTLTETFAAIEMAKRAGYTAVISHRSGETEDSTIADIAVGTNAGQIKTGSLSRSDRISKYNQLLRIEEDLGDIATYPGKSTFYNLR

SEQ ID NO: 18364 - protein, 72 aa, Zea mays
MSIQKIFARTIFDSRGNPTVEVDLTTSKGLFRAAVPSGASTGIYEALELRDGDKANYHGKSVNKAVSNVNDI

SEQ ID NO: 18365 - protein, 464 aa, Escherichia coli O157:H7 EDL933
MPDAKKQGQSNKAMTFFVCFLAALAGLLFGLDIGVIAGALPFIADEFQITSHTQEWVVSSMMFGAAVGAVGSGWLSFKLGRKKSLMIGAILFVAGSLFSAAAPNVEVLILSRVLLGLAVGVASYTAPLYLSEIAPEKIRGSMISMYQLMITIGILGAYLSDTAFSYTGAWRWMLGVIIIPAILLLIGVFFLPDSPRWFAAKRRFVDAERVLLRLRDTSAEAKRELDEIRESLQVKQSGWALFKENSNFRRAVFLGVLLQVMQQFTGMNVIMYYAPKIFELAGYTNTTEQMWGTVIVGLTNVLATFIAIGLVDRWGRKPTLTLGFLVMAAGMGVLGTMMHIGIHSPSAQYFAIAMLLMFIVGFAMSAGPLIWVLCSEIQPLKGRDFGITCSTATNWIANMIVGATFLTMLNTLGNANTFWVYAGLNVLFILLTLWLVPETKHVSLEHIERNLMKGRKLREIGAHD

SEQ ID NO: 18366 - protein, 316 aa, Thermobifida fusca
MSELSANSTQRRAPEPEILDEKRSRTERYTIFTFVFVPLLALAAAVPFAWGWGLTWLDVAIGAVFYLIGGLGITVGYHRLFTHGSYRAARPLKIALAIAGSLAIEGGVIKWVADHRRHHKYSDHEGDPHSPWRFGDDWRSVAKGMFYAHMGWLFLDEQKTSPKRFAPDLLKDKDLVRIDRYFWVFVLISLLTPPLIGGLVTMSWWGACTAFFWGSLVRIALLHHVTWSVNSICHTIGEENFTVRDRSRNVWWLAIPSFGESWHNLHHAEPTCARHGVLKGQIDISARVIWIFEKLGWATKVRWPDPERLAAKRVAA

SEQ ID NO: 18367 - protein, 272 aa, Gossypium barbadense
LSVEEIEVAPPQKNEVRVKIHFTSLCHTDVYFWEAKGQNPLFPRILGHEAGGVVESVGEGVTDVEPGDHVLPIFTGECKECPHCLSEASNMCDLLRINTERGGMLHDGQTRFSKDGKPIYHFLGTSTFSEYTVVHVGQVAKINPEAPLDKVCVLSCGMTYSSSLLAGFGATVNVAKPKKGGSVAVFGLGAVGLAAAEGARVCEASRIIGIDLNPNRFEEAKKFGCTEFVNPKDHNKPVQEVISEMTGGGVDCSIECTGSTQAMVSAFECVHD

SEQ ID NO: 18368 - protein, 272 aa, Gossypium darwinii
LSVEEIEVAPPQKNEVRVKIHFTSLCHTDVYFWEAKGQNPLFPRILGHEAGGVVESVGEGVTDVEPGDHVLPIFTGECKECPHCLSEASNMCDLLRINTERGGMLHDGQTRFSKDGKPIYHFLGTSTFSEYTVVHVGQVAKINPEAPLDKVCVLSCGMTYSSSLLAGFGATVNVAKPKKGGSVAVFGLGAVGLAAAEGARVCEASRIIGIDLNPNRFEEAKKFGCTEFVNPKDHNKPVQEVISEMTGGGVDCSIECTGSTQAVVSAFECVHD

SEQ ID NO: 18369 - protein, 468 aa, Clostridium perfringens str. 13
MSNLKKKRVKSREQDPIERGKNFKEVSLGYGEEEAIEEANRCLGCKNPKCVEGCPVSVNIPSFISFIKKGDFSASFEELSKYNALPAVCGRVCPQESQCEGKCVLGIKGEPLAIGQLERFIADFARNNKLSSLKKSEKILEKVAVIGSGPAGLTCAGELAKLGYRVTIFEALHESGGVLVYGIPEFRLPKKDVVKYEIEEIKKLGVKIENNVVVGKTVDIDELIENEGFKAVFIGSGAGLPKFMGIKGENANGVFSANEVLTRVNLMKAFKNESHTPLNLGKKVAVVGGGNVAMDAARTSLRLGAETHIIYRRSEKELPARLEEIHHAKEEGVILDVLTNPTEILTDEKGWVKGIKCIRMKLGEEDSSGRRRPIEIENSEFIMEVDSVIMSLGTSPNPLISNATKGLKTNKRGCLLVDEESLKTSLKGIYAGGDAVTGAATVILAMGAGKKAAKSIDSYLRKEEQNNI

SEQ ID NO: 18370 - protein, 392 aa, Xanthomonas axonopodis pv. citri str. 306
MHGNHSPETLRDPHGFATKFYTSEGNWDLVGNNFPTFFIRDAIKFPDMVHAFKPDPRTNLDDDSRRFDFFSHVPEATRTLTLLYSNEGTPAGYRFMDGNGVHAYKLVNAQGEVHYVKFHWKTLQGIKNLDPKQVAAVQAKDYSHLTNDLVGAIKKGDYPKWDLYVQVLKPEDLAKFDFDPLDATKIWPDVPEQKVGQMVLNKNVDNFFQETEQVALAPANLVPGIEPSEDRLLQGRIFSYADTQLYRIGANGLSLPVNRPRVAVNNGNQDGQGNIGQTTSGVNYEPSRLEPRPQDTAARYSELPLSGTTQQAKITREQNFKQAGELYRSYSKKDRADLVQSFGESLAATDTESKHLMLSFLYKADPEYGTGVTRVAKGDLARVKQLASSLQD

SEQ ID NO: 18371 - protein, 172 aa, Xanthomonas axonopodis pv. citri str. 306
MRPGHLMVLALLAPTLIAPPVFAQSVLTRDNGAKVGDNQNSQTAGATGPTLLQDVQLIQKLQRFDRERIPERVVHARGTGVKGEFTATADLSNLTKAKVFSAGEKTPFFVGGAWQPLAGDAARSAWLRHQVLHQRRQLGSGRQQLPHVLHSRCDQVPRHGACVQAGSAHQSG

SEQ ID NO: 18372 - protein, 210 aa, Triticum aestivum
  unsure (1)..(210): unsure at all Xaa locations
MAPTVMASSATSVAPFQGLKSTAGLPVSRRSNGASLGSVSNGGRIRCMQVWPIEGIKKFETLSYLPPLSTEALLKQVDYLIRSKWVPCLEFSKVGFIFREHNASPGYYDGRYWTMWKLPMFGCTDATQVINEVEEVKKEYPDAYVXRIIGFDNMRXVQCVSFIAFKPPGCEGVRQRAKTATHDRPYIKCHLQVLQLLTLLLGFSFLHLIS

SEQ ID NO: 18373 - protein, 708 aa, Brucella melitensis 16M
MNRHTPISNIRIGHSACPHDCPSTCALDVELLDERMIGRVRGSKDNSYTAGVICAKVARYAERVHHPDRLKHPLVRAGGKGEGLWKEASWQAALDLIAERFERAEREYGSETAWPFFYAGTMGLVQRDSIQRLRHAKGYSNQFDSYCTNTAWTGYFAGTGSLTGPDPREMAKADCVVIWGTNAAATQVNVMTHAVRARKERGAKIVAIDVYANATVRQADMGIVLKPGTDGAFACAVMHVLFRDGLADRDYLQRYTDDPKGLAAHLQTRTPQWAAPITGLSVGEIEAFAHLVGRTKRTYFRLGYGFTRQRNGAVNMHAAASIACVTGAFQYEGGGAFHSNSGIFRMDKREIEGRAFQKNGIRYLDQSKIGRILTGDSEALYGGPPVTAMLIQNTNPINVTPEQRLVRKGFAREDLFVAVHEQFMTDTARMADVLLPATTFLEHDDIYRGGGQQHVVLGPKLIEPHADARPNIFVINELAKRLGVGHLPGFELDERTLIDHMNANSALPDFDTLKEKRFVDLQPSFEEAHYLNGFKWPDGKFRFRPDWLGSPSPNKPPEAMGLQGPYQTIPEFPDHWEVIEAADAEHPFRLTTSPAHNFLNSTFAETPTSTAKEIRPELLIHPDDAEALGIADGDRIEIGNHRGEVVLHAVLHAGQKRGVVVSEGLFPNSAFERGEGVNTLVGAQSPAPYGGLAVHDTKIWIKAYPARA

SEQ ID NO: 18374 - protein, 293 aa, Nostoc punctiforme PCC 73102
MTANFGAFAKSVGEAIAPERGKSPQLSWTNVVFFTTFHALALMSPWFFSWSALGLLVFLHWLFGSIGICLGYHRLLSHKSFQVPKWLEYAIALIGALALQGGPIFWVGGHRQHHAHTEDINLDPYSAQRGFWWSHILWIFYPRPEFFDYDTYKKYAPDLARQPFYCWLDRYFLLLQIPFALLLYGLGGWPFVFYGVFLRCVLLWHSTWFVNSASHLWGYRTFDANDGARNLWWVSLVTYGEGWHNNHHTYPHMAKSGLSWWEIDVTWWSILVLQTLGLAKKVVSRPPQGATHG

SEQ ID NO: 18375 - protein, 318 aa, Glycine max
  unsure (1)..(318): unsure at all Xaa locations
MNFNCTANKEQKKTVDQSILLCCKFFVSESRNNATLNAIERAARSNPETVIVNMFHDRAYNRARYDLVSYVLHDCTGNPIYSPLHQTVIAMAEATFNAVNLEFHEGAHPRLGAVDDIVFHPLGHASLDEAAWLAKAVAADIGNRFSVPVFLYAAAHPTGKELDAIRRELGYYRPNSRGXNWAGWAMPETLPLSPDEGPNVVSRAKGITMIGARPWVTLYNVPILCTDVSVARRIARKVSARGGGLPTVQTIALVHEDSTEIACMLLDSKQVGADRVQNRVEMLAAQEGLDIEQGYFTDISPEMIVEKYMKLINSANKS

SEQ ID NO: 18376 - protein, 404 aa, Vibrio cholerae O1 biovar eltor str. N16961
MLPEFQRVVTFMFTHLPAPVLDPILSLSVAFRNDPRPQKVDLGIGVYKNSLGETPIMRAVALAQDKVVASQKTKSYVGLAGCEEFNQSMMQLVLGSTLDTERTIAIQTPGASGALRMLGDLMRVAQPDTTVWITDPSYVNHKPVMEAAGLKVRYYRYFSRETKMVDTEQMLADLAQAGTKDVVLLHGCCHNPTGADIDFSAWQAITELAQKNGFIPFVDIAYQGFGDGLEQDAQGLRYMAERMEEMLITTSCSKNFGLYRERTGAAIVIGKNQQEVTNARGKMLTLARSTYTMPPDHGAALVKTVLRDEQLTAIWKQELSEMQQRLLTLRKNLCNELRNQHNTRQFDFIESHRGMFTVLGFSAEQMGRLREEFAIYGVADGRINIAGLTEKDIPYVANAIIHVS

SEQ ID NO: 18377 - protein, 256 aa, Silene latifolia
MGRGRVELKRIENKINRQVTFAKRRNGLLKKAYELSVLCDAEVALIIFSNRGKLYEFCSGPSSMLKTLERYQKCSYGAVEVNKPSKELESSYKEYLKLKARYESLQRAHRNLLGEDLGPLNVKELDQLERQLESSLKQIRCIKTQSMLDQLTDLQSKEHALMEANKSLKAELERIMVKDNQVRQSWEGHHEHQNVHYEHQHAHSQHQHAHSQGLFQPIDCNPNLHLGYNAETSDHQLTAGTSHAQVPGFLPGWMQM

SEQ ID NO: 18378 - protein, 162 aa, Dechloromonas aromatica RCB
MKRRFLIALFIFGSFFGSTAALADAATEAATAADPVAEKRLQKLSEELRCLVCQNQTIADSNAELAQDLRREVRTMIKDGKTDKEIVDFMVVRYGDFVLYRPPVKGITLLLWGGPIVLMLLGLFMLQRYLRRRSTRIDAEDQPLSADDASRADALLKENDQK

SEQ ID NO: 18379 - protein, 511 aa, Azotobacter vinelandii
MTATPKPLVLIILDGFGHSDSPAYNAIHAARTPVYDRLLATCPHGLISGSGMDVGLPDGQMGNSEVGHMNLGAGRVLYQDFTRVTKAIQDGEFFDNPAICAAVDHAVAAGKAVHILGLLSEGGVHSHQDHIAAMAELAARRGAEKIYLHAFLDGRDTPPRSAQGPIEALEATFERLGKGRIATLIGRYFAMDRDNRWDRVEQAYRLIVDGKAEYAAETAAAGLQAAYARDESDEFVKATAIGAPVRVEDGDAVVFMNFRADRARELSRTFVEADFKEFERPHVPRLAGFVTLTQYSASIPAPCAFPPTELTNVLGEYLANNGKTQLRIAETEKYAHVTFFFSGGREEPFAGEERILIPSPQVATYDLKPEMSAPEVTERMVEAIENRRYDVIIANYANGDMVGHTGVFEAAVKAVECLDASLGRIVAALEKVGGEALITADHGNVEQMRDESTGQAHTAHTCEPVPFIYVGKRALRIRAGGVLADVAPTMLKLLDLPQPREMTGRPLVEPA

SEQ ID NO: 18380 - protein, 244 aa, Silene latifolia
MGRGRVELKRIENKINRQVTFAKRRNGLLKKAYELSVLCDAEVALIIFSNRGKLYEFCSSPSMLKTLERYQKSNYGPPDNTAVSSREALEISSHQEYIRLKARYEALQRTHRNLMGEDLGPLSSKELESLERQLDMSLKHIRSTRTQYMLDQLADLQRKEHVLNEANITLKQRLIEADQVSSAQCYGHELDYGRQNPQAQADHVFFHPLECEPTLQIGYQPEQMNVTAAGPSINNFMTGWLPQN

SEQ ID NO: 18381 - protein, 493 aa, Pseudomonas fluorescens PfO-1
MTLARFQMCIGGEWVDALSGKTFESLNPALAEPWAELPDADEADVERAVQAAQTAFDSPAWRGLTATARGKLLRRLGDLIAENKEQLAQLESRDNGKLIRETRGQVGYLPEFFHYTAGLADKLEGGTLPLDKPDLFAYTVHEAMGVVAAIIPWNSPLYLTAIKLAPALAAGNTIVIKPSEHASATILELARLALEAGIPPGVVNVVTGYGPSTGAALTRHPLVRKIAFTGGAATARHVVRSSAENFAKLSLELGGKSPNIIFADADLDSAINGAIAGIYAASGQSCVSGSRLLVQDDIYDEFVSRLVERAQRIRIGNPQDDSSEMGPMATAQQLAVVEGLVADAIAEGARLRLGGKRPSGVGDGWFYEPTLFECDRNSMKIMQEEVFGPVASVIRFKDEAEALAIANDSQFGLAAGIWTRDLGRAHRLARDVRSGIIWVNTYRAVSAMAPIGGFKNSGYGRESGIDSVLAYTELKTVWINLSQAPMPDPFVMR

SEQ ID NO: 18382 - protein, 204 aa, Mycobacterium tuberculosis CDC1551
MALVTKLLVASRNRKKLAELRRVLDGAGLSGLTLLSLGDVSPLPETPETGVTFEDNALAKARDAFSATGLASVADDSGLEVAALGGMPGVLSARWSGRYGDDAANTALLLAQLCDVPDERRGAAFVSACALVSGSGEVVVRGEWPGTIAREPRGDGGFGYDPVFVPYGDDRTAAQLSPAEKDAVSHRGRALALLLPALRSLATG

SEQ ID NO: 18383 - protein, 288 aa, Arabidopsis thaliana
MESYKCRVCFKSFVNGKALGGHMRSHMSNSHEEEQRPSQLSYETESDVSSSDPKFAFTSSVLLEDGESESESSRNVINLTRKRSKRTRKLDSFVTKKVKTSQLGYKPESDQEPPHSSASDTTTEEDLAFCLMMLSRDKWKKNKSNKEVVEEIETEEESEGYNKINRATTKGRYKCETCGKVFKSYQALGGHRASHKKNRVSNNKTEQRSETEYDNVVVVAKRIHECPICLRVFASGQALGGHKRSHGVGNLSVNQQRRVHRNESVKQRMIDLNLPAPTEEDEVSVVFQ

SEQ ID NO: 18384 - protein, 404 aa, Vibrio vulnificus CMCP6
MQDILTVILAGGMGSRLSPLTDDRAKPAVPFGGKYRIIDFTLTNCLHSGLRKILVLTQYKSHSLQKHLRDGWSIFNPELGEYITSVPPQMRKGGKWYEGTADAIYHNLWLLERSEAKYVMVLSGDHIYRMDYAPMLEEHIANNAALTVACMDVNCKEAKAFGVMGIDERHRVHSFVEKPQNPPHLPNDPERSLVSMGIYIFSMEVLQQALIEDADDDASSHDFGKDIIPKLIDTGSVFAYKFCGSKGRVDKDCYWRDVGTIDSFYQANMDLLEPIPPMNLYQKDWGIRTYEPQYPPARTVSSGSGNEGIFINSIIANGVINSGGSVQHSIVSSNVRINDSATVVDSIIFDDVEIGEGCQLVNCIIDKHVKVPPYTQIGLNRLEDAQRFKISENGIVVVPESYQF

SEQ ID NO: 18385 - protein, 554 aa, Escherichia coli K12
MCSIFGVFDIKTDAVELRKKALELSRLMRHRGPDWSGIYASDNAILAHERLSIVDVNAGAQPLYNQQKTHVLAVNGEIYNHQALRAEYGDRYQFQTGSDCEVILALYQEKGPEFLDDLQGMFAFALYDSEKDAYLIGRDHLGIIPLYMGYDEHGQLYVASEMKALVPVCRTIKEFPAGSYLWSQDGEIRSYYHRDWFDYDAVKDNVTDKNELRQALEDSVKSHLMSDVPYGVLLSGGLDSSIISAITKKYAARRVEDQERSEAWWPQLHSFAVGLPGSPDLKAAQEVANHLGTVHHEIHFTVQEGLDAIRDVIYHIETYDVTTIRASTPMYLMSRKIKAMGIKMVLSGEGSDEVFGGYLYFHKAPNAKELHEETVRKLLALHMYDCARANKAMSAWGVEARVPFLDKKFLDVAMRINPQDKMCGNGKMEKHILRECFEAYLPASVAWRQKEQFSDGVGYSWIDTLKEVAAQQVSDQQLETARFRFPYNTPTSKEAYLYREIFEELFPLPSAAECVPGGPSVACSSAKAIEWDEAFKKMDDPSGRAVGVHQSAYK

SEQ ID NO: 18386 - protein, 270 aa, Bacillus subtilis
MRTKKRTKEMLPIFDQKKVAFIGAGSMAEGMISGIVRANKIPKQNICVTNRSNTERLTELELQYGIKGALPNQLCIEDMDVLILAMKPKDAENALSSLKSRIQPHQLILSVLAGITTSFIEQSLLNEQPVVRVMPNTSSMIGASATAIALGKYVSEDLKKLAEALLGCMGEVYTIQENQMDIFTGIAGSGPAYFYYLMEFIEKTGEEAGLDKQLSRSIGAQTLLGAAKMLMETGEHPEILRDNITSPNGTTAAGLQALKKSGGEKRFLKQ

SEQ ID NO: 18387 - protein, 505 aa, Streptomyces coelicolor A3(2)
MEAGKGRNRLRQRVPLPSHARAPAIPRRRTDREFRAMKRYDLVVIGGGSAGLTAARTAGRLGARTLLVERDRLGGDCLWTGCVPSKALLHVAADVQAARRATAYGLPPVTGPADLTAALAEVKRAIGAIEPHDSAEALAPYGVDVTHGAASFTGPGTLTAGEREVSFRYALIATGSSPALVPIPGLVESGPLTSDTVWELSELPHLLVVLGGGPIGCELGQAFARLGSQVTLVEAMDRLVPREEPRASQVLRERLQSEGVTVLTDYRAERVDADAVHGPGGPLPYDALLAVTGRRSHTHGLGLEAAGVELTDAGHIRTDGRLRTTNHRIYAAGDVTGRSAFTHLGGTQGGAAAVDALLGVRRPIDYRAAPRVTYTDPEIAGVGLTLDEAHAKYGDRARVHTLENDRVDRAVADGRTEGFTTLVLGPRGKIVGATVVSPRAGETVAHLAAAVRLGWTPSDYARTVHPYPTYADGPWHTALTDVYARLARGSGPIGALLKLRRGVIR

SEQ ID NO: 18388 - protein, 562 aa, Glycine max
MFFNQKIVLFKSFALMGTSNLLLFFSLMSLCAMAASKVVLIGNNITLSFDDIEANFAPAVKGSGKYGVLYLAEPLDACAELTNKVEQLPNASSPFALVVRGGCSFEEKVRIAQKAGFKAVIVYDNEEGGILVAMAGNSAGIRIHAVFVSKASGEILKKYAGLTNVEIWLIPTFENSAWSIMAISFISLLAMSAVLATCFFVRKHRIRRERPRASLVREFHGMSSRLVKAMPSLVFTSVLEDNCTSRTCAICLEDYCVGEKLRILPCCHKFHAACVDSWLTSWRTFCPVCKRDARTGLTDPPPSESTPLLSSTPASMASSVLSSARSSLASSSAIQIARTASMASSALPSARSSLASSSAIQIARTASMASSVLSSARSSLASSSAIQIARTASMASSALPSARSSLASSSAIQIARTASMASSALHSARSSLASSSAIQISRAASQTPSVSRNHSIASTPYVQPSLRSSYHQSPSLSISRSSVDLRNASQRSLASHLNSPCSMGYPSLSSLNSRYMSPHIPSPSNASVSYMGSSSHQQHPLRYSESAASFSPFASTHSLPEC

SEQ ID NO: 18389 - protein, 329 aa, Glycine max
MMRRLRLGMDGDGEELTAQETALYDRQIRVWGADAQRRLSKSHVLVYGMKGTVAEFCKNIVLAGVGSLTLVDDRAATEEMLSSNFLIPPDENVYSGKTLAELCCNSLKDFNPMVHVSVEKGDLSSFDVEFLSKFDVVVVSCCTLSAKKLANGKCRKLSKRVAFYAVDCRDSCGEIFVDLQDYKYSKKKQDETVECDLKYPSFEDALSVPWRALHRRMSKLYYAMRVIEKFEEAEGRSTGEVSIADFSGLLKLKKEICTAQSLNESQVPDSLLKRLVTNATEFPPVCAIIGGILGQEVIKAISGKGDPLKNFFFFDAFDGKGIIEDISPK

SEQ ID NO: 18390 - protein, 296 aa, Rhodospirillum rubrum
MGKELADAFPAARDVFQEVDDALSQKLFALMVEGPADELTLTQNAQPALMAVSMAVVRVLETGGVRLAAHADLVAGHSLGEYSALAAAGALGLADTARLLRIRGEAMQKAVPVGLGAMAALIGLSLEDARSVAAEAAEGEICEAANDNAPGQVVISGHRTAIERAIVLAKAKGCKRALPLPVSAPFHCALMAPAAEVMAEALERVTFKAPAVPLVANVTASAVSDPLEIRRLLVEQVTGAVRWRESVLYMVDAGVSELVELGAGKVLGGLAKRIHGDLGARSIQGPADIDAFIKGI

SEQ ID NO: 18391 - protein, 405 aa, Escherichia coli O157:H7 EDL933
MSPIEKSSKLENVCYDIRGPVLKEAKRLEEEGNKVLKLNIGNPAPFGFDAPDEILVDVIRNLPTAQGYCDSKGLYSARKAIMQHYQARGMRDVTVEDIYIGNGVSELIVQAMQALLNSGDEMLVPAPDYPLWTAAVSLSSGKAVHYLCDESSDWFPDLDDIRAKITPRTRGIVIINPNNPTGAVYSKELLMEIVEIARQHNLIIFADEIYDKILYDDAEHHSIAPLAPDLLTITFNGLSKTYRVAGFRQGWMVLNGPKKHAKGYIEGLEMLASMRLCANVPAQHAIQTALGGYQSISEFITPGGRLYEQRNRAWELINDIPGVSCVKPCGALYMFPKIDAKRFNIHDDQKMVLDFLLQEKVLLVQGTAFNWPWPDHFRIVTLPRVDDIELSLSKFARFLSGYHQL

SEQ ID NO: 18392 - protein, 177 aa, Azotobacter vinelandii
MAAGITCASLESWLGERPLVRCMPNTPALLRQGVSGLFANARVSAAQRQQAARLLGAVGLVLWLDEERLIDAVTAVSGSGPAYFFLLMEAMTAAGERLGLPHGSAVQLTLQTALGAARMATESGVDAAELRRRVTSPNGTTEAAINTFQAGGFEALVQQALDAAARRSAELAEQLGR

SEQ ID NO: 18393 - protein, 433 aa, Staphylococcus epidermidis ATCC 12228
MAFEFRLPDIGEGIHEGEIVKWFIKAGDTIEEDDVLAEVQNDKSVVEIPSPVSGTVEEVLVDEGTVAVVGDVIVKIDAPDAEEMQFKGHGDDEDSKKEEKEQESPVQEEASSTQSQEKTEVDESKTVKAMPSVRKYARENGVNIKAVNGSGKNGRITKEDIDAYLNGGSSEEGSNTSVASESTSSDVVNASATQALPEGDFPETTEKIPAMRKAIAKAMVNSKHTAPHVTLMDEIDVQELWDHRKKFKEIAAEQGTKLTFLPYVVKALVSALKKYPALNTSFNEEAGEVVHKHYWNIGIAADTDKGLLVPVVKHADRKSIFEISDEINELAVKARDGKLTSEEMKGATCTISNIGSAGGQWFTPVINHPEVAILGIGRIAQKPIVKDGEIVAAPVLALSLSFDHRQIDGATGQNAMNHIKRLLNNPELLLMEG

SEQ ID NO: 18394 - protein, 468 aa, Staphylococcus epidermidis ATCC 12228
MVVGDFPIETDTIVIGAGPGGYVAAIRAAQLGQKVTIVEKGNLGGVCLNVGCIPSKALLHASHRFVEAQNSENLGVIAESVSLNYQKVQEFKTSVVNKLTGGVEGLLKGNKVEIVRGEAYFVDNNSLRVMDEKSAQTYNFKHAIIATGSRPIEIPNFEFGKRVIDSTGALNLQEVPNKLVVVGGGYIGSELGTAFANFGSEVTILEGAKDILGGFEKQMTQPVKKGMKEKGIEIVTEAMAKSAEETENGVKVTYEAKGEEQTIEADYVLVTVGRRPNTDELGLEELGLKFADRGLLEVDKQSRTSIENIFAIGDIVPGLPLAHKASYEGKVAAEAIDGQAAEVDYIGMPAVCFTEPELAQVGYTEAQAKEEGLSIKASKFPYAANGRALSLDDTNGFVKLITLKEDDTLIGAQVVGTGASDIISELGLAIESGMNAEDIALTVHAHPTLGEMTMEAAEKAIGYPIHTM

SEQ ID NO: 18395 - protein, 354 aa, Thermobifida fusca
MSARTVKLAVIPGDGIGPEVVAEGLKVLSAVAPRHGLTLDTTEYELGAQRWHATGEVLPDAVEEELRQHDAILLGAVGDPTVPSGVLERGLLLRLRFNFSHYVNLRPVRLYPGVTTPLAGVAPEDIDMLVVREGTEGPYAGMGGVLRKGTPHEIATQDSVNTRLGVERVVRYAFAKAAERPCHKLTLVHKDNVLTYAGELWQRVVREVGAEYPQVEVDYLHVDAATMFFVTQPRRFDVVVTDNLFGDIITDLGAAVAGGIGLAASGNINPEGDFPSMFEPVHGSAPDIAGQGKADPTATILSVSLMLEHLGYADAAAQIDQAVAEDLQERAKNGGVRSTTQIGDDIAQRVAEQG

SEQ ID NO: 18396 - protein, 245 aa, Oryza sativa
  unsure (1)..(245): unsure at all Xaa locations
PRDDGGDGDGDGEGEEAEAARRRAAAGGERPDPVLPSQIKNKDKRKEVHAKLKREKKAQKRKLARERGQAAQRAVELGEQPPEKLVPRTIENTREPDETVCRPDDQELFAGNDADEFNAVLKQQTTPKVLITTCRFNSGRGPAFIEELMQVIPNSCYVKRGTYELKKIVEYANNRDFTSLVVVHTNRREPDALLIIXLPAGPTAHFKLSKLILRKDIKNHGNPTSHKPELVLNNFTTRLGHRVGR

SEQ ID NO: 18397 - protein, 167 aa, Zea mays
MGAEAQSVPAATKLFNQANEILGFEDGLKLVKLRGEAMQDASDAANSAMVSVIGLDSEKVRLAVAGAFHTSFMQPAVSRLESALAATEIRTPRIPVISNVDAQPHSDPNTIKQILAQQVTSPVQWETTVKNLMGKGLEKSYELGPGKVIAGILKRINKGTSIENIGA

SEQ ID NO: 18398 - protein, 141 aa, Triticum aestivum
  unsure (1)..(141): unsure at all Xaa locations
MAPTVMASSATSVAPFQGLKSTAGLPVSRRSNGASLGSVSNGGRIRCMQVWPIEGIKKFETLSYLPPLKHXGLLKXVDYLXSAPKWVPCLEFKQGGXTSREHNASPGVYDGRYWAMWKLPMFRCTDPTRXXQVEEARGYLT

SEQ ID NO: 18399 - protein, 512 aa, Synechococcus sp.
MAQATATTEKLNKFEKLKLEKDGLAVRDQIQHFASIGWEAMDPGDREHRLKWLGIFWRPVTPGRFMARLRIPSGILQSQQLNALANFLQRYGDQASIDITTRQNLQLRGLLLEDTPEFLERLHAVGLTSVQSGMDNVRNITGSPVAGLDAAELFDTRSLIQALQDDLTAAGQGNSEFTNLPRKFNIAIEGGRDNSIHAEINDLAFTPAYQDGTLGFNVWVGGFFSSTRVAPAIPLNAWVPADHSVIRLSRAILEVFRDNGSRGNRQKTRLMWLIDEWGIERFRQVVSEAYGAPLAAAAPELMDWEKRDFLGVHPQKQAGLNFVGLHVPVGRLTTEDLYELARLADTYGQGEVRLTVEQNVILTHIPDAQLPTLLAEPLLTRFSPQPAPLSRGTVSCTGSQYCNFALIETKQRAIAIAQSLEAELDLPRPVRIHWTGCPNSCGQPQVADIGLMGAKVRKDGQMVEGVDIFLGGKVGYDAHLGEKAMTGVACEDLPDVLRQLLIERFGAQARSH

SEQ ID NO: 18400 - protein, 484 aa, Cucumis sativus
MVTITISAILPSLHPPPCPTQINCTQASGTQLMILYLALLLTSLGAGGIRPCVVAFAADQFDMTKVGIAGRTWNFFNWYYFCMGMATLTALTVVVYIQDNVGWGWGFGLPTIAMALSVVAFVVGSPLYNKLKPSGSPLVRLAQVVVAAFKNRKAVLPDDSKLLYRNHELDAAIAIQGRLVHTDQFKWLDKAAVITSPDSTANPPNLWRLATVHRVEELKSIIRMLPIWAAGILLVTASSHQHSFTIQQARTMNRHLTPTFQIPPATLSIFGILSMLTGLVLYDRLLVPFAKKLTHNPSGITCLQRMGVGFAINILATLVSSIVEIKRKKVAANHGLLDNPTATIPFSVFWLVPQFWLHGIAEVFMSVGHLEFMYDQSPESLRSTATALYWLAISVGNYIGTLMVYLVHKYTGEEHNWLPDRNLNRGRLEYYYWLVSGIQVMNLVYYVICAWFYTYKPLEEEKINIENKDGDQEWERCEDTIKIA

SEQ ID NO: 18401 - protein, 464 aa, Zea mays
MASEAKDVGILAMDIYFPPNCVLQEELETHDGVSKGKYTIGLGQESMAFCTEVEDVISMSLTVVKSLLKNYNIDPMCIGRLEVGSETVIDKSKSIKTWLMQIFEESGNTDIEGVDSSNACYGGTAALFNCVNWVESKSWDGRYGLVVCTDSAVYAEGPARPTGGAAAIAMLIGPNAPICFESKYRGSHMAHVYDFYKPDLASEYPVVDGKLSQTCYLMALDSCYNVFCKKYEKHEGKQFSISDADYVVFHSPYNKLVQKSFARLYYNDFLRNCSTVDGESREKLAPYAGLSSEESYQSRDLEKASQQVAKNLYETKVQPTTLIPKQVGNMYTASLYAALASVVHSRHETLAGQRIVMFSYGSGLTSTMFSFMINEGHHPFSLLNIANILDISKKLKARHVVPPEKFVEALKLMEHRYGARDFVTNQDTSLLSAGTYYLTHVDSKYRRFYDVKGDGVATAMSNGH

SEQ ID NO: 18402 - protein, 452 aa, Bacillus cereus ATCC 14579
MKETTSFSQKLKQFVLLFFPIFVTQMSLFAMSFFDTTMSGHASPTDLSGVAIGTSIWIPVSTGLTGILMATTPIVAQLVGSKKKEDVPHVVIQAVYLAICASFVVILIGFFVVSPILNGMRLEEPVERIAAQFLSIIAIGIIPLFTYTVLRGFIDALGKTRTTMIITLLSLPINVILNYLLIFGNFGFPKLGGVGAAIASTATYWCILIITVIIIQTKEPFASFNIFKQLYRPSLSSWIAFLKLGVPIGFAIFFETSIFAAVTLMMSNFSTTTIAAHQAAMNFASLLYMTPLSLAMAMTIAVGFEVGAKRYDNAKQYGLIGIGLALAFALLYSILLYFFDDQIASIYTTDAKVHHLAKEFLIFAILFQISDAIATPVQGALRGYKDVNVALIMTLIAYWIIGLPLGYILATYTEWAAKGYWIGLIIGLAFGAAFLLIRLFQVQRKYTTQNSR

SEQ ID NO: 18403 - protein, 436 aa, Saccharomyces cerevisiae
AVSKVYARSVYDSRGNPTVEVELTTEKGVFRSIVPSGAATGVHEALEMRDGDKSKWMGKGVLHAVKNVNDVIAPAFVKANIDVKDQKAVDDFLISLDGTANKSKLGANAILGVSLAASRAAAAEKNVPLYKHLADLSKSKTSPYVLPVPFLNVLNGGSHAGGALALQEFMIAPTGAKTFAEALRIGSEVYHNLKSLTKKRYGASAGNVGDEGGVAPNIQTAEEALDLIVDAIKAAGHDGKVKIGLDCASSEFFKDGKYDLDFKNPNSDKSKWLTGPQLADLYHSLMKRYPIVSIEDPFAEDDWEAWSHFFKTAGIQIVADDLTVTNPKRIATAIEKKAADALLLKVNQIGTLSESIKAAQDSFAAGWGVMVSHRSGETEDTFIADLVVGLRTGQIKTGAPARSERLAKLNQLLRIEEELGDNAVFAGENFHHGDKL

SEQ ID NO: 18404 - protein, 230 aa, Zea mays
MEVAAASAASYGFKADDDVDSLRATELRLGLPGTEEKEEAEEPQHKAAPPPPSTPRGKKRDVVASSGPEDAPKKRDCETDADADAAPPPAAKAQLVGWPPVRSYRKSCFQQQAAAKNKPAAALAEEAPAAGGLFVKVSMDGAPYLRKVDLKMYKGYRELREALEAMFLCFSGAADAPAVNPSDFAVTYEDKDGDLMLVGDVPFGMFISTCKRLRIMKGSEARGLGSAKNN

SEQ ID NO: 18405 - protein, 392 aa, Pseudomonas fluorescens PfO-1
MSQHDKNARQQGFATRVIHAGQTPDPTTGALMPPIYANSTYLQDSPGVHKGFDYGRSHNPTRFALERCVADLEGGTQAFAFASGLATISTVLELIDAGSHIVSGNDLYGGTFRLFDKVRQRSAGHRFSYVDLADLSAFEASLQDDTRMVMVETPTNPLLSLSDLAAIARICKARGIICVADNTFASPWIQRPLELGFDIVLHSTTKYLNGHSDVIGGIAVVGDNPALAERLGFLQNAVGAISGPFDAFLTLRGVKTLALRMERHCSNALELARWLEQQPQVKRVYYPGLESHPQHELAKRQMRGFGGMISLDLNSDLAGARRFLENVQIFALAESLGGVESLIEHPAIMTHATIPAETRAKLGIGDSLVRLSVGVEDIEDLRADLAQALASI

SEQ ID NO: 18406 - protein, 427 aa, Thermobifida fusca
MASIEAVHAREILDSRGNPTVEVEVALDDGTIARAAVPSGASTGQFEAVELRDGGDRYGGKGVEKAVAAVNEEISEQIVGYEAEEQRLVDSALITLDGTPDKSRLGANAILGVSLAVAKAAAESADLPLFRYLGGPNAHVLPVPMMNILNGGAHADTNVDIQEFMIAPIGAESFREALRWGAEVYHSLKAVLKAHGLATGVGDEGGFAPNLDSNRAALDLISEAITKAGFTLGQDIALALDVAATEFYADGAYQFEGSSRSAEEMAAYYTELVESYPLVSIEDPLSEEDWAGWKALTESLGDRLQLVGDDLFVTNPERLQRGIDEGAANSLLVKVNQIGTLSETLDAVSLAQRNRYTAMISHRSGETEDTTIADIAVATNSGQIKTGAPARSERVAKYNQLLRIEEELDDAAVYAGANAFPRFARQG

SEQ ID NO: 18407 - protein, 457 aa, Arabidopsis thaliana
MASLGQITLPRAPSSEIGLLRRRFERPIIRTRIGFNGRIASVLTNAGDQAVSVKASVSQKVIEEEAKVIVGTYARAPVVLSSGKGCKLFDPEGKEYLDCASGIAVNALGHGDPDWLRAVTEQAGVLAHVSNVYYTIPQIELAKRLVASSFADRVFFCNSGTEANEAAIKFSRKFQRFTHPEDKEVATGFIAFTNSFHGRTLGALALTSKEQYRTPFEPIMPGVTFLEYGNIQAATDLIRSGKIAAVFVEPIQGEGGIYSATKEFLQSLRSACDAAGSLLVFDEVQCGLGRTGLMWAYEAFGVTPDIMTVAKPLAGGLPIGAVLVTEKVAETINYGDHGSTFAGSPLVCSAAIAVMDKVSKPSFLSSVSNKGRYFRDLLVKKLGGNSYVKEVRGEGLIIGVELDVPASSLVDACRDSGLLILTAGKGNVVRIVPPLVISEEEIERAVEIMAQNLTALD

SEQ ID NO: 18408 - protein, 561 aa, Neurospora crassa
MAPANTLSAWSDLQSHHSKVGKTFVLKDAFKSDPERFSKFARTFTLPADISSDSPNATDILFDFSKNLVTEETLDKLVRLAEEAGVEKKRDAMFAGEKINFTEDRAVYHVALRNVSNQEMKVDGVDVMNTKGGVNEVLQHMKEFSEQVRSGEWKGYTGKKLTNIINIGIGGSDLGPVMVTEALKHYGAKDMTLRFVSNVDGTHIAEALAASDPETTLFLIASKTFTTAETITNANTAKSWFLEKTGGQGDITKHFVALSTNEAEVTKFGIDAKNMFGFESWVGGRYSVWSAIGLSVALYVGYENFHKFLAGAHAMDNHFRTAPLKENIPVLGGILSVWYSNFYNAQTHLIAPFDQYLHRFPAYLQQLSMESNGKSITSDGSAAKYTTGPIVFGEPCTNAQHSFFQLVHQGTKLIPADFILAAKSHNPISNNLHQKMLASNYLAQAEALMVGKTAEEVRAEGNVPEHLVPHKVFLGNRPTTSILVGGHIGPAELGALIVYYEHLTFTEGAIWDINSFDQWGVELGKVLAKKILKEIDEPGAGSGHDASTGGLLGAFKKYADF

SEQ ID NO: 18409 - protein, 450 aa, Oryza sativa (japonica cultivar-group)
MDDRRGKGLEVDIRGTKHYASYGVINMSDISALSYLKVFMDAHCQLGNDQSEQTSLSFGRYFLSNASPYQPWTRSFASKNGDLVDAVVPFMGESITDGTLATFLKKPGDRVEADEPIAQIETDKVTMDVASPEAGIIEKFVASEGGIVTPGVKVAIISKSAAQSKTHTQSSEDTSQKHSTKPPSTKENKVEAKPPKVESSTTHESKLTSSSEPQLPPKERERRVPMPRLRKRIANRLKDSQNTFAMLITFNEVDMTNLMKLLSDYKDQFVEKHGVKLGLMSCFVKAAVSALQNQPIVNAVIDGDDIIYREYIDISVAVGTSKGLVVLVIHDIDAMNFADIEKGINNLAKKATEGAQSINNMAGGTFTISNGGVYGSLISTPIINSPQSSILGMHSIVQRLVVVNGSVLARPMMYLALMYDHRLIDGREAVLFLRRIKDVVEDPRRLLLDI

SEQ ID NO: 18410 - protein, 186 aa, Zea mays
  unsure (1)..(186): unsure at all Xaa locations
SLPVLGSLVPIVGGVALASFTEVSFNWTGFWSAMASNLTNQSRNVLSKKLLAGDKDVMDDINLFSVITVLSFLMSCPLMLFAEGIKFTPGYLQSTGLNLQELCVRAALAGLCFHGYQKLSYLILSRVSPVTHSVANCVKRVXXVIVSSVLFFSTPISPVNALGTGAALAGVFLYSRLTRTKKPKDA

SEQ ID NO: 18411 - protein, 256 aa, Saussurea medusa
MVRAPCFDKHGIKRGAWSQEEDNKLRAHIQRSGHSNWRQLPKLAGLSRCGKSCRLRWVNYLRPTIKHGNFTKDEKDVVVALHNKLGNKWSAIAARLPGRSDNEIKNYWHTHLKNRAQTDQTVLQTKQDGNAETSKGKGTPKAGCVVRKPNVKSQQEVEILLAVLSSASSSSFSSSTTSDQNESSPPSLSVSDANVTPQCSEEAARSLCIDQFLVEEDSIMLSSDKMYSPLGSVDYFISQDNVMDDVLLWPNLDFYY

SEQ ID NO: 18412 - protein, 492 aa, Vigna radiata var. radiata
MDPYKYRPSSAFNSPFWTTNSGAPVWNNNNSLTVGTRGPILLEDYHLVEKLANFDRERIPERVVHARGASAKGFFEVTHDVSHLTCADFLRAPGVQTPVIVRFSTVIHERGSPETLRDPRGFAVKFYTREGNFDLVGNNLPVFFVRDGMKFPDMVHALKPNPKNHIQENWRILDFFSHFPESLHMFSFLFDDLGVPQDYRHMDGFGVNTYTLINKAGKAVYVKFHWKTTSGVKCLLEEEAIKVGGANHSHATQDLHDSIAAGNYPEWKLFIQTIDPEHEDKFDFDPLDVTKTWPEDIIPLQPVGRLVLNKNIDNFFAENEQLAFCPAIIVPGVYYSDDKMLQTRIFSYADSQRHRLGPNYLLLPANAPKSAHHNNHHEGFMNFIHRDEEVNYFPSRYDPVRHAEKFPIPPAVFSGRREKIAIEKENNFKQAGERFRSWAPDRQDRFIRRWVDALSDPRVTHEIRSVWISYWSQADRSLGQKIASHLNMRPNI

SEQ ID NO: 18413 - protein, 304 aa, Dechloromonas aromatica RCB
MRLALLFSGQGGQTAAHWQQVQAGATGEWREVLRQVLPGIADQDAMVAPGILAKNKIAQPLIFAQQMLLWGSLQSRLPRPICAAGYSLGEMAACSAASAFTAIEGIALCVERAAAMDGAAAGEHGMLAVLGLDDALVATMAAEAGLAVAIRNAPRHLVVAGPLAGIVAVADKFAAAGASRLVHLAVQTPSHTPLLAKAAVEFGKRLDGLPDRRLAFPVLSAIDATAARTARPALDALARQICTPLDWAACLQAVREMQPDAVLEIGPGNALAKLFGELVPTIPVRACDDFRSVEGIVRWVEGCA

SEQ ID NO: 18414 - protein, 303 aa, Leuconostoc mesenteroides subsp. mesenteroides ATCC 8293
MPSVRHLAHEKNIDLTQVPATGRHGHVTLADVENFQGSDNSAPTQTQTSTTSQTESSAAVHEEPTPALPLREGRQPMAPVRKAIARAMDRQAAIPTVTNFDSVDVRKLVGHRKAFKEMARDDKGIRLTYLAYAVKALAAVAKKFPELNASVDMKAQEIVYHDDVNMGIAVDAPTGLFVPVIKNADRKSIFTIAQEITDLAEAVRDGSITPAQMQGGTITISNLGSARGTWFTPIINGKEVAILGLGSILKEPIVNDDGELAVGQNMKLSLTYDHRLIDGMLGQSALNYLKQLLSDPAYMLMEV

SEQ ID NO: 18415 - protein, 260 aa, Treponema pallidum
MTWDFWVLEQWDGRWQKGWCTQERCKRSSVRLCVKSGKVACAVYIFGHRCLRVSSGTGTEKVNGFFLAVKPSQISTGTARSPIFQESAISCAGMSCAAYEALFAADPHQGIRHLSLLPNLPCQVARGVIIAEARHTLHHDEHAALLAVLRTVAQVEVVDTAYFAIAGVIAGCAPAFAAQFIEALADAGVRYGLARDQAYRLAAHMLEGTAALIQHSGVHPAQLKDRVCSPAGSTIRGVLALEEQGLRRAVIHACRWLSSS

SEQ ID NO: 18416 - protein, 125 aa, Glycine max
MADKYNLKNPAVKRILQEVKEMQSNPSDDFMSLPLEENIFEWQFAIRGPRDTEFEGGIYHGRIQLPSEYPFKPPSFMLLTPNGRFETQTKICLSISNHHPEHWQPSWSVRTALVALIAFMPTNVH

SEQ ID NO: 18417 - protein, 531 aa, Zea mays
MEAVGVTPAPVAAPEKKKLLDLKDPFPAAANGGAKASPASKWAMKKKLVGGDAGYVLEDVPHLTDYMPQLPTYPNPLQDNPAYSVVKQYFVNPDDTVTQKIVVHKTSARGTHFRRAGPRQRVYFQSDEVNAAIVTCGGLCPGLNTVIRELVCGLYDMYGVSSVVGIEGGYKGFYSKNTVALTPKSVNDIHKRGGTVLGTSRGGHDTAKIVDCLQDRGINQVYIIGGDGTQKGASVIYEEVRRRGLKCSVVGVPKTIDNDIAVIDKSFGFDTAVEEAQRAINAAHVEAESAENGIGVVKLMGRNSGFIAMYATLASRDVDCCLIPESPFYLEGKGGLLEFVERRLKDNGHMVIVVAEGAGQDLIARSMNFVDTQDASGNKLLLDVGLWLSQKIKDHFKKKPSFPITLKYIDPTYMIRAVRSNASDNVYCTLLAHSALHGAMAGYTGFTVAPVNGRHAYIPFYRITEKQNKVVITDRMWARVLCSTNQPCFLSHEDVENMKHDDDEHHHMHNTQLLEGGSSPVSKCNGSAAAV

SEQ ID NO: 18418 - protein, 411 aa, ASPERGILLUS NIDULANS FGSC A4
MSSTTSSSPAPTDNGSGDNGGSSPTSSPLLFFVALGFGVVFTNLWIIVGVKYCFRYNQRNRQIRGGDNGEPIDLVAMPRTHRRRREKKLMTMDEVNERFPLTKYKVWRSSRANAGLSTAGGITAAHTENALDAEDDQQSLPEGATSLVTAPDAKSHQRLNSATSQQPTKPVDDGDMAPESEEKSIKGFSRTNNASPRVSSDRINPVVRDHDYHTVEDIIPTTVLTDLDTSPGDSCAICLDLIEDDDDIRGLSCGHAFHASCVDPWLTSRRASCPLCKADYYTPKPRPDASDLPSTSGRRAASPNHPQAVLIRGRVNPFRAQTLYGQASQSAPDTVSGTSRPIGHRLWAVRTTPTIEEGRSRNDTSIPRLSSWLSNFSNRFRVRNQDSTTVPGNSHLNAPRTPSQLEAGQTR

SEQ ID NO: 18419 - protein, 420 aa, Sinorhizobium meliloti 1021
MVEKRTQPLARDAMAYVLAGGRGSRLKELTDRRAKPAVYFGGKARIIDFALSNALNSGIRRIGVATQYKAHSLIRHLQRGWNFFRPERNESFDILPASQRVSETQWYEGTADAVYQNIDIIEDHGVEYMVILAGDHVYKMDYELMLQQHVDSGADVTVGCLEVPRMEATGFGVMHVDNADRIIAFVEKPADPPGIPGNPDMALASMGIYVFHTKFLMDMLRRDAADPKSSRDFGKDIIPYIVEHGKAVAHRFTHSCVRSDFEREAYWRDVGTIDAYWQANIDLTHITPELDIYDSTWPIWTFSEIKPPAKFVHDDENRRGSATSSLVSGDCIISGAALNRSLLFTGVRVNSYSRLENAVVLPDVTIGRHSILRNVVIDSRVVIPEGLVVGDDPELDAKRFRRTESGVCLITQTMIDKLGM

SEQ ID NO: 18420 - protein, 284 aa, Oryza sativa
MAGGDNNSQTTNGGSGHEQRAMEEGRKQEEFAADGQGCGLAFSVPFIQKIIAEIFGTYFLIFAGCGAVTINQSKNGQITFPGVAIVWGLAVMVMVYAVGHISGAHFNPAVTLAFATCRRFPWRQVPAYAAAQMLGATLAAGTLRLMFGGRHEHFPGTLPAGSDVQSLVLEFIITFYLMFVISGVATDNRAIGELAGLAVGATILLNVLIAGPISGASMNPARSLGPAMIGGEYRSIWVYIVGPVAGAVAGAWAYNIIRFTNKPLREITKSGSFLKSMNRMNSST

SEQ ID NO: 18421 - protein, 143 aa, Zea mays
SWRTFCPVCKRDANAGTPDPPVSESTPLLSSSAIRLPEPTASASFRSTVAAAASPPRPISRHPSPSRSISRKHSVSGSSIPGTPIPRFHASSSSPTCTSGSSLDLANMPSSPWPRASHLASAHSSCGGRLSPPIHIRNTSAGM

SEQ ID NO: 18422 - protein, 488 aa, Trichodesmium erythraeum IMS101
MTSKLKFRINKTKNRRLLSAKYSRFLEPTKLINYLSRTKWFSPTKLACIPLLCLIIALWAGAANAQDQELTPEYIKGVLDAIWILVASVFVIFMNAGFGMLESGFCRQKNTVNILAKNLIVFAIATLVYWSIGFSIMFAGDHPFIGAGGFFLTGESSTYGLNPFPAGLPVPVFFLFQAAFAATAATIVSGAVAERVEFLAFLLFSILITGISYPITGHWIWGSGGWLGAMGFKDFAGSTAVHSVGGWAALVGAYILRPRRGKYDEKNQPQAIPGHNMGFATLGCLILWIGWFGFNPGSQLAADENVVYIAVTTNLAAAAGGATAAITSWSKDKKPDLSMIINGVLAGLVGITAGCDGVSYLEAVIIGSIAGMIVVFSVSFFDKLTIDDPVGAISVHLICGIWGTLAVGIFVEDTSIITQFIGIISVGLFTVILSSIFWLALRATVGIRVHPEQEYKGLDISEHGMEAYHGFVKEPDSLATGVSHDHIQ

SEQ ID NO: 18423 - protein, 371 aa, Eriobotrya japonica
MGKGGMSDGDHADRCCGEAINGDVQQENMAAWLLGVKNLKIQPYKLPNLGPHDVRVRLKAVGICGSDVHHFKNMRCVDFIVKEPMVIGHECAGIIEEVGSEVEDLVPGDRVALEPGISCKRCNLCKQGRYNLCRKMKFFGSPPNNGCLANQVVHPGDLCFKLPDNVSLEEGAMCEPLSVGIHACRRANVCQETNVLVVGAGPIGLVTLLAARAFGAPRIVIADVNDERLSIAKSLGADEVVKVSTNIEDLAEEVATIQKVLENGVDVSFDCAGFDKTITTALSATRPGGKVCLVGMGQREMTLPLATREIDVIGIFRYQNTWPLCLEFLRSGKIDVKPLITHRFGFSQKEVEEAFETSARGGNAIKVMFNL

SEQ ID NO: 18424 - protein, 463 aa, Dunaliella salina
MQSKLLGLQDEISEARDKLRTSEARVAQNLKRVDELKAEAASLERMRLASSSSTDSTVSIASRGGAAVAATTSVPDHVEREGIQSRVRGSGMASTSYPSHVPQPSQAVRRGPKPKDSRRLRSSLELEDGLRNFWYPTEFAKKLEPGMMVPFDLFGVPWVLFRDEHSAPTCIKDSCAHRACPLSLGKVINGHVQCPYHGWEFDGSGACTKMPSTRMCHGVGVAALPCVEKDGFVWVWPGDGPPPDLPPDFTAPPAGYDVHAEIMVDVPVEHGLLMENLLDLAHAPFTHTTTFARGWPIPEAVRFHATKMLAGDWDPYPISMSFNPPCIALSTIGLSQPGKIMRGYKAEECKRHLHQLHVCMPSKEGHTRLLYRMSLDFWGWAKHVPFVDVLWKKIAGQVLGEDLVLVLGQQARMIGGDDTWCTPMPYDKLAVRYRRWRNMVADGEYEEGSRNRCTSQYDSWPDV

SEQ ID NO: 18425 - protein, 381 aa, Thermobifida fusca
MSYEGFETLAIHAGQEADAETGAVVVPIYQTSTYRQDGVGGLRGGYEYSRTANPTRTALEECLAALEGGVRGLAFASGMAAEDTLLRTIARPGDHLIIPNDAYGGTFRLVSKVFERWGVSWDAVDLSNPEAVRTAIRPETVAIWVETPTNPLLNIADIAALADIAHAADALLVVDNTFASPYLQRPLSLGADVVVHSTTKYLGGHSDVVGGALVVADAELGERLAFHQNSMGAVAGPFDAWLTLRGIKTLGVRMDRHCANAERVVEALVGHPEVAEVLYPGLSDHPGHKVAVDQMRAFGGMVSFRMRGGEEAALRVCAKTKVFTLAESLGGVESLIEHPGKMTHASTAGSLLEVPSDLVRLSVGIETVDDLVNDLLQALEP

SEQ ID NO: 18426 - protein, 276 aa, Prochlorothrix hollandica
LDLGMADPLGFELFDQCWVLFRDDQGTAACILDECAHRACPLSLGKVIQGRIQCPYHGWEYDRQGECVHMPSCQAISNPILTLPVMEQGGMIWVWPGTDEPGALPSLAPTLPDNFTLQAELVMDLEVEHGLMLENLLDLAHAPFTHTGTFAKGWPVPPFVRFANAATTPWTGHWDPYPIHMTFEPPCFVISTIGLRGKDCGRHLHQVHACLPRGQGRTRLLYRLALDFGHWLRWVPGTHCLWQHLANRVIQEDLRLVQGQQERLKGGANVWNQPVG

SEQ ID NO: 18427 - protein, 314 aa, Coccidioides posadasii
MASRHTTFRLNTGEDIPAIGFGTWQDENAQEDAVLTALSAGYRHIDTAAVYGTEKAIGRALARSRLSRDELFITSKLWNNKHRPEDVEQAIDQSLKNLEIDYLDLYLMHWPAAFAPGDDMFPKDSQGNSKTVDIDYVDTYKAMEKLVKSGKTKAIGISNFSKGEMERLLESCSIVPAVMQMELHPWLQQNDFVEWLKSKGIHVTQYSSLGNQNEVYSGRERYGRLIEDPALAAIGTKYGKTGAQVALAWGITKGHSVLVKSKTPHRIQQNFESDFELKQEDMKAIENIDKKLRFNDSSADFGYNFFVGLEGKEK

SEQ ID NO: 18428 - protein, 276 aa, Prochloron didemni
QNVNTTTPMPFELFDRSWILFRDRNSNIGCIHDRCAHRACTLSLGKVVNGRVQCAYHGWEYNTEGTCEVMPSCKQTKAAVKALPAIEQSGMIWVWPGSGVPGELPKLAPAIPENFTLQAEITMELDVEHGLFMENLLDLAHAPFTHTGTFAKGWPVPDFVRFANLPKTPLTGHWDPYPIDMSFEPPCYVISTIGLRGRDCGRHLHQVHVCLPKGKGKTRLLYRLALDFYKWLRFVPGMNLFWEHMAQRVIGEDIRLVRGQQKSLQEGGNVWNQPVG

SEQ ID NO: 18429 - protein, 831 aa, Aquifex aeolicus VF5
MKGVILAGGFGTRIQPLTNSIPKPMLPVANRPIMEHVVHRLKEAGIEEIVVLLYYQAEVIKNYFKDGSDFGVKITYVQPEADYGTAGAVKQAQNYLNETFIIVSGDVITDFNLSELIAFHKSKSSKFTLALYSVENPLQFGVVITNKEGKVLKFLEKPGWGEVFSDTVNTGIYVVEPEILNYIPEDKPFDFAMDLFPKLMKSGIDLWALKMRGYWRDIGNIDSYRDVHKDIFAGLVKIRIPGRIITTKEARIYVEEGTEIPENVSLKGTVILGKNVKVGEGSELKNCVIGNNTVIGRNVKLFDSVLWWNVSIDEESEIRNGVICNDVKIGKRVKAKEGVVIAEDCEVEDEVLFLKDVVVWPEKVIEKGSVVTKNIVCESKWEKGIFKGNKVIGRINVELTPDNATKLGMALGSVLPPKSTVILARDYHRASRTIKRSFLGGILSTGINVIDLHLSPLPVMRFTLTEDKKAVCGVYFSISQEFPGSVEICVFDENGLPIDTNFQKKIERVFFREAYRFETFTDLGLIKEKPYFSENYVTKLLSSIDGDSIKLSSNKVVYDALHSPISPFISEVLGKLEIENVILNALYDERKLSRISTYASSSEGNVSKVLKALSYDVGFVMEPSATKLKLVDDRGRTISGDRLLLVVLMLLDKSAEKQLRVYLPVWAPEVLDAILNNVIVERGKFTNLRKSFIEDFYMLADTDGSFTFTEFSYSPDALYASLKIMEMLTKLKVKVSEIYDSLPEYYFLHEVVSCSSEKKGTVLRKISEMAEGKEASFIEGVKIYEDYGNWVLVLPDSYKDLIHVYVQSTERERAEELIKNYMEIVRGICKK

SEQ ID NO: 18430 - protein, 242 aa, Oryza sativa
  unsure (1)..(242): unsure at all Xaa locations
YCYVQDYWRVFHFMPYLHESLXHFFFLFDDVGIPTXYLPIGGLGVQISPRVRPRVRXAKARYVKFHWKPTCGVSCLMDHEATLVGGKNHSHATQDLYDSIAAGNFPEWKLFVQVIDPEEEERFDFDPLDDTKTWPEDEVPLRPVGRLVLNRNVDNFFNENEQLAFGPGLVVPGIYYFDDKMLQCTVFAYADTQRYRLGPNYLMLPVNAPKCAHHNNHYDGAMNFMHRDEEVYIRTISTTSVV

SEQ ID NO: 18431 - protein, 255 aa, Glycine max
MGKKLMHAVQYDSYGGGPAGLKHVEVPIPTPSKDEVLIKVEAASINPFDWKVQKRMLWPLLPRKFPHIPGTDITGEVTEVGQGVQKFKPGDKVVAIVNPFNGGGLAEFAVAKESVTASRPSETSASECAALPVAGLTALQALTKSIGIKLDGSGERKSILVTAASGGVGHYAVQLAKLGNTHVTATCGARNIELVKSLGADEVIDYTVINSAYSQRFRHWKMLPSPSGKKACHPVTLRLQVSRDHLYLQENQRVV

SEQ ID NO: 18432 - protein, 493 aa, Pseudomonas putida KT2440
MTLVRFQMCIDGQWRDAQSGKTFDSLNPATAQAWAQLPDADEADVELAVQAAQRAFDSKAWRSITATARGKLLRRLGDLIAENKEHLAQLESRDNGKLIRETRGQVGYLPEFFHYTAGLADKLEGGTLPLDKPDLFAYTVHEPIGVVAGIIPWNSPLYLTAIKLAPALAAGNTIVLKPSEHASATILELARLALEAGFPAGVVNVVTGYGPSTGAALTRHPLVRKIAFTGGAATARHVVRSSAENFAKLSLELGGKSPNIIFADADLDSAINGAVAGIYAASGQSCVAGSRLLVQDEIFDEFVERLIARAKRIRIGNPQDDASEMGPMATAQQLAVVEGLVAAAKAEGAKLHMGGKRADVEGDGWFYEPTLFECDSNAMTIMQEEVFGPVAAVIRFKTEEEALAMANDSQFGLAAGIWTRDLGRAHRLARDVRSGIIWVNTYRAVSAMAPIGGFKNSGYGRESGIDSVLAYTELKTVWINLSTAPMPDPFVMR

SEQ ID NO: 18433 - protein, 494 aa, Burkholderia fungorum LB400
MSLLMAGSLLAGGIGAALADDASAPAAASAPDATASAPAPDASAAPAAAAASAPAADASAAPAASAAAAPAASDAAPAAPTAPFSVDSSKINSGDTAWMLTSTALVLFMTIPGLALFYGGMVRKKNVLAILMQSFAITCVVTIVWIVIGYSLAFTPGSSFIGGFSRVFMAGMSYIKGDKATTLTVSHLAPTIPETVYCVYQMTFAIITPALITGAFADRMKFSAMLVFMTLWSIIVYSPIAHMVWEPTGWLASAGILDFAGGTVVHINAGIAALVCALVLGKRIGYGKEAMAPHNLTLTLIGGAMLWVGWFGFNAGSAVAADGRAGFAMFATQVATAAAALAWMFAEWAAKGKPSVLGIVSGAVAGLVAITPASGFVGTLGSLVIGIVAGVVCFWSATWLKHKLGYDDSLDAFGVHCIGGIVGALLTGVFAVKDIGGADGSVILQAKGVLTTLIYSGVVSYILLKIIDMVMGIRVTEEQEREGLDVSLHGEHVE

SEQ ID NO: 18434 - protein, 404 aa, Sinorhizobium meliloti 1021
MAKKKVAMLTAGGLAPCLSSAVGGLIERYTDIAPDYELVAYRSGYQGLLLADRIEITPAMREKAHVLHRHGGSPIGNSRVKLTNTADCVKRGLVKEGENPLRVAAERLASDGISILHTIGGDDTNTTAADLAAYLGANGYDLTVVGLPKTVDNDVVPIRQTLGAWTAAEYGARFFDHVSNEQSAAPRTLVVHEVMGRHCGWLTAATARAYIHLAGNKEYVDGFMMNAQLKNIDGLYLPEMAFDLEAEAARLREVMDRAGFVTLFVSEGACLDAIVAEREAAGETVKRDAFGHVKIDTINVGNWFSKQFAALLGAERSMVQKSGYYARSAPANVDDLRLIQSMVDLAVESALNKVSGVTGHDEDQGGRLRTIEFPRIKGGKHFDTSAKWFGEVMDVVGQKWQTAD

SEQ ID NO: 18435 - protein, 354 aa, Bacillus cereus ATCC 14579
MEKRIVCLAGDGVGPEVMESAKEVLHMVERLYGHHFHLQDEYFGGVAIDLTGQPLPQRTLAACLASDAVLLGAVGGPRWDSAKERPEKGLLALRKGLGVFANVRPVTVESATAHLSPLKNADEIDFVVVRELTGGIYFSYPKERTEEVATDTLTYHRHEIERIVSYAFQLANKRKKKVTSIDKANVLESSKLWRTVTEEVALRYPNVEVEHILVDAAAMELIRNPGRFDVIVTENLFGDILSDEASVLAGSLGMLPSASHAEKGPSLYEPIHGSAPDIAGKNKANPIAMMRSVAMMLGQSFGLTREGYAIEEAVSAVLKSGKCTADIGGTETTTSFTKAVIQEMEEQALVGRGR

SEQ ID NO: 18436 - protein, 390 aa, Streptococcus agalactiae 2603V/R
MKIGIDKIGFATSQYVLEMTDLAIARQVDPEKFSKGLLLDSLSITPVTEDIVTLAASAANDILSDEDKETIDMVIVATESSIDQSKAASVYVHQLLEIQPFARSFEMKEACYSATAALDYAKLHVEKHPDSKVLVIASDIAKYGIKSTGESTQGAGSIAMLISQNPSILELKEDHLAQTRDIMDFWRPNYSDVPYVNGMFSTKQYLDMLKTTWKVYQKRFNTSLSDYAAFCFHIPFPKLALKGFNKILDNNLDEQKKAELQENFEHSITYSKKIGNCYTGSLYLGLLSLLENSQNLKAGDQIAFFSYGSGAVAEIFTGQLVDGYQNKLQSDRMDQLNKRQKITVTEYEKLFFEKTILDENGNANFNTYRTGTFSLDSICEHQRIYKKINN

SEQ ID NO: 18437 - protein, 521 aa, Solanum tuberosum
MAASIGALKSSPSSNNCINERRNDSTRAVSSRNLSFSSSHLTGDKLMPISSLRSQGVRFNVRRSSLIVSPKAVSDSQNSQTCLDPDASRSVLGIILGGGAGTRLYPLTKKRAKPAVPLGANYRLIDIPVSNCLNSNISKIYVLTQFNSASLNRHLSRAYASNMGGYKNEGLVEVLAAQQSPENPDWFQGTADAVRQYLWLFEEHTVLEYLILAGDHLYRMDYEKFIQAHRETDADITVAALPMDEKRATAFGLMKIDEEGRIIEFAEKPQGEQLQAMKVDTTILGLDDKRAKEMPLVASMGIYVISKDVMLNLLRDKFPGANDFGSEVIPGATSLGMRVQAYLYDGYWEDIGTIEAFYNANLGITKKPVPDFSFYDRSAPIYTQPRYLPPSKMLDADVTDSVIGEGCVIKNCKIHHSVVGLRSCISEGAIIEDSLLMGADYYETDADRKLLAAKGSVPIGIGKNCHIKRAIIDKNARIGDNVEIINKDNVQEAARETDGYFIKSGIVTVIKDALIPSGIII

SEQ ID NO: 18438 - protein, 473 aa, Oryza sativa
ASSSSSSSSAGRRRRPLVFSPRAVSDYQELRRPAYDPDASTSVLGIILGGGAGTRLYPLTKKRAKPAVPLGANYRLIDIPVSNCLNSNISKIYVLTQFNSASLNRHLSRAYGNNIGGYKNEGFVEVLAAQQSPDNPNWFQGTADAVRQYLWLFEEHNVMEFLILAGDHLYRMDYEKFIQAHRETDSDITVAALPMDEKRATAFGLMKIDEEGRIVEFAEKPKGEQLKAMMVDTTILGLDDVRAKEMPYIASMGIYVISKNVMLQLLREQFPGANDFGSEVIPGATNIGMRVQAYLYDGYWEDIGTIEAFYNANLGITKKPVPDFSFYDRSAPIYTQPRHLPPSKVLDADVTDSVIGEGCVIKNCKIHHSVVGLRSCISEGAIIEDSLLMGADYYETEADKKLLGEKGGIPIGIGKNCHIRRAIIDKNARIGDNVKIINVDNVQEAARETDGYFIKSGIVTVIKDALLPSGTVI

SEQ ID NO: 18439 - protein, 473 aa, Ralstonia eutropha JMP134
MKTLDRFYIQGEWVTPAAGSTLVDVINPATEAPVARLAMGTTADADRAVAAARDAFGTWSQSTREERIALLERIAEQYRARVPELAEAVRLEMGAPVTLCNAMQAPIGLVHIQNTLEVLRNFAFETTHGKTWLRREPVGVAALITPWNVPLNQIAAKVAPALAAGCTVVLKPSEIAPLDAVIFAEIMHAAGTPLGVFNMIFGDGPSVGAALSSHPDVDMVSITGSTRAGVEVAKNAAPTVKRVAQELGGKSPLVVLDDADMKTAVTTAVAQCMVNTGQVCVAPTRLLVSRTRYDEALAIAAATAGALQVGDPADPATKIGPLSNRAQFEKVQQMIGIGIEEGARVIAGGPGRPDGIERGFYVRPTVFADVHNSMTVAREEIFGPVLCVIPYDSEEDAIAIANDTVYGLAAYVASGDAERARRVAARLRAGTVRVNFAPADLTAPFGGVKRSGNGREFGAEGLVEFLEWKAISL

SEQ ID NO: 18440 - protein, 359 aa, Thermobifida fusca
MKAAVLHEFRKDLVIEDVTVSEPAPDEVLIRVAASGVCHTDRTMQQGANDLPLPLILGHEVAGIVERVGSAVTAVEPGDHVVTCASAFCGTCRWCMRGELQHCAHKRRSRDPGQPPRLSQGDTPVEPFVGLGGFAEQVLVYEGAVVKLPEEMPLDRAALLGCSVITGMGAVRNAAQVQSGQTVAVIGCGGVGLNVIQGARLCGAAQIIAIDRLADKLDLARQFGATHTIDASTTDPVEAVRELTGGGVDHAIEVVGIAATMEQAFRMLDTKGTATVVGVAHPEVQVSIRATDLLLEKRLQGSKMGSARPRIDIPFYCQLYLDGRLKLDELLTARVPLSEVNSALAALDNPLGARTVLTF

SEQ ID NO: 18441 - protein, 161 aa, Pseudomonas syringae pv. syringae B728a
MSENLLSIPVTTIKGEQKTLADFSGKALLVVNTASQCGFTPQYKGLEKLWQDYRDQGLVVLGFPCNQFGKQEPGDEGAISGFCELNYGVSFPLFKKIDVNGEQAHPLFVQLKQQAPGLLGTERIKWNFTKFLIGQDGRLVKRFAPLTKPEELTGEIEALLR

SEQ ID NO: 18442 - protein, 640 aa, Cryphonectria parasitica
MHRTVLLTLLSPSPELKKTHLSSPLSSFGRSPSQSTITDKDAKAQPQSGPSGTAPSPTPPDNNIASSEALTQTPVEFAPKPGILVVTLHEGRGFALPEPHKNIFSSHSTSASQGGGASIAGSVRTAPNGHRPNTSGGFGNVPTNHGRVSGKYMPYALLDFDKVQVFVNSVEGNPENPLWAGSNTQYKFDVSRVTDVTVHLYIRNPTAPPSVGRANDIFLGVVQIKPRFEEKHQFVEDPKANKKDREKAATEFAEKEKALGHSGVQWVPVGYGQGELKIGIEYVENRAGKLTIDDFDLLTVVGKGSFGKVIQVRKKDTSRIYALKTIRKAHIISRSEVTHTLAERSVLAQINNPFIVPLKFTFQSPEKLYFVLAFVNGGELFHHLQKEQRFDVNRSRFYTAELLCALECLHGFNVIYRDLKPENILLDYQGHIALCDFGLCKLDMKDEDRTNTFCGTPEYLAPELLMGQGYNKTVDWWTLGVLLYEMLTGLPPFYDENTNEMYRKILGEPLHFPSHDIVPPAAKDLLTKLLNRDPAQRLGANGSAEIKAHPFFHAIDWRKLLQRKYEPTFKPNVAGAMDTDNFDPEFTREAPQDSYVGGVPLSETMQNQFQGFSYNRPIAGLADGGGSVKDPSFIGSVTGR

SEQ ID NO: 18443 - protein, 325 aa, Methylococcus capsulatus str. Bath
MKTPVHVAVTGAAGQIAYSLLFRIAVGDLFGPHQPVILKLLDVPSAERVLEGVAMELDDCASPLLQEIEVSSDPAEVFDGAEAVFMLGATPRGPGMERRDLLQVNADIFSAQGRALNESASRRVKILVVGNPANTNALIAQRNAPDLAPGCFSAMTRLDHNRATSLLARHCGCNVAEISRVVIWGNHSPTQYPDLHHARVKGKPALSLVDPAWYVETFIPTVQQRGASVIAIRGKSSAASAANAALDHMRSWFLGTPKDDWVSMTVSSDGSYGIAEGLMFSFPVTIENGRFRIVQDLPLDTFSRERLRLTEVELLEERAMVSHLL

SEQ ID NO: 18444 - protein, 335 aa, Rhodospirillum rubrum
MMKAVRLHAFGGPEVLRYEDAPRPVAASGEVLVRVHAAGLNPPDWYLRDGYRALPAEWRPDPAFPLILGTDVSGVVEAVGDDGGDFSVGDEVYAMVRFPEKVMTGSNAYAQYIKVPVSDLALKPAGIDHCHAAGAPMSLLTAWQFLIDLGHDEPNPFQSVRHRPVPLEGKTVLVNGAGGGVGHLSVQLAKGKGARVIAVASGKNEALMGALGVYRFIDYTRAAADEVVHDVDLVLDTVGGPQMDRLLRPLKRGGALFLVNPLGFTAHKEAEKRGITVSSTQVRSNGRQLAEAAPLLDNGSVRVVVDSSYPLAEASRAHERAAAGGIQGKIILTMT

SEQ ID NO: 18445 - protein, 531 aa, GIBBERELLA ZEAE PH-1
MSIKEDTKGHLEHLEHSNSPDSIQEVNIDDLDSIEQTQTGKFSWLVSITAAIGGMLFGYDTGIISAVLVYIHQDLGKTLTSQEKELVTSVTSGGAFIGAIFAGATADRYGRKVAIYVGCLLFTVGAIIQAASFSVAQMTVGRVVVGFGVGSAAMIVPLYIAECSPSKYRGRMIGLDNMSITGGQLVSYGVGAAFAHVSSGWRWMVGIGAFPAIILACLLPFCPESPRQLIFHGKPDEAAAVIRRIFPNGTEQQVQDKIQHLTYHVNEAKALNAGKSGWWVFKQLYVIPANFRALVSACGLMAISQLSGFNSLMYYSPLLFSLVGFSNPVAVGTIIAGTNFIFTWVNLMLVDRAGRRRILLCTVPFMGIFLVIAAVCFKFIPINHDLSLASDAKIGWPAIVVLISMVFFVGFYSSGIGNTAWLSSEFFPMEVRAMGTMMLTMTCWGSNIIVASTFLTQMENTTPSGAFGFYAAICILGWVCIYFCYPEVKGMTLEDIRDIFQHGFGVQRAREVQKQMKMANKAITSEVLTRA

SEQ ID NO: 18446 - protein, 226 aa, Arabidopsis thaliana
MSLESDIKESKRVVEPFDDDDCAVCLEPLANDADERTVVKLRCSHKFHLDCVGSSFNIKNKMECPCCRQIEKGKWLFAEPVDQLEEDDMSPLDMLTNMVSPSFLHIDDGIFTNIASVLFPNALNQISNNANVSSNPLGEPRNTLLDTRMQRQVDEHVASTVDSERRLPDMLFELHDRTGGSGPSGYGRERSGGEGGENSCGGEAVAEEDQVGEAAEGAEMMDNLNF

SEQ ID NO: 18447 - protein, 339 aa, Triticum aestivum
VPPAGTQVRIPGVRPHDRPGHGTVYKGVLKDNRVVAVKRSKIMNVAETDEFVQEIIILSQTNHRNVVRLLGCCLEVEVPILVYEFIPNGTLFEFIHRSYGSPPPSLDTRLRVAQESAEALAYLHLSMNHPIVHGDVKSMNILLDDNYMAKVTDFGASRTLPKDAAQFMTLVQGTLGYLDPEYLQERQLTEKSDVYSFGVVLLELITGKTAIYNDGPKEGKSLVRSFLLAMKEDSLEDILDPSIVRAGTETLLGEVAELGRMCLGPMGEERPSMTQVADRLKALRSTWREELVLDRAVTENMVVHMPPAAAPVPGDLASSSSGAPSTVPDMSGMSMEAPR

SEQ ID NO: 18448 - protein, 501 aa, Arabidopsis thaliana
MSCSATDLAVLLGPNATAAANYICGQLGDVNNKFIDTAFAIDNTYLLFSAYLVFSMQLGFAMLCAGSVRAKNTMNIMLTNVLDAAAGGLFYYLFGYAFAFGSPSNGFIGKHYFGLKDIPTASADYSNFLYQWAFAIAAAGITSGSIAERTQFVAYLIYSSFLTGFVYPVVSHWFWSVDGWASPFRTDGDLLFSTGAIDFAGSGVVHMVGGIAGLWGALIEGPRLGRFDNGGRAIALRGHSASLVVLGTFLLWFGWYGFNPGSFNKILVTYETGTYNGQWSAVGRTAVTTTLAGCTAALTTLFGKRLLSGHWNVTDVCNGLLGGFAAITGGCSVVEPWAAIICGFVAALVLLGCNKLAEKLKYDDPLEAAQLHGGCGAWGLIFTALFAQEKYLNQIYGNKPGRPHGLFMGGGGKLLGAQLIQIIVITGWVSATMGTLFFILKKMKLLRISSEDEMAGMDMTRHGGFAYMYFDDDESHKAIQLRRVEPRSPSPSGANTTPTPV

SEQ ID NO: 18449 - protein, 302 aa, Zea mays
  unsure (1)..(302): unsure at all Xaa locations
MDGGGGAGGAEGELTAQETALYDRQIRVWGVDAQKRLSKAHVLVCGMNGTTIEFCKNIVLAGVGSLSLMDDNVVTEEDLNANFLIPPDESIYGGRSRAQVCCESLIDFNPMVRVXVEKGDPSLIDGEFLDKFDIVVLSRASLKXQRQKHSYVQKKPGGATEQQELTYSSLQEAISVPWNSLPKKTAKLYFAMRVLEDYELSEGRSPGETTLSDIDAVLARRKDMCDKMSLNESRIPTTLVERLLAAGKKEHPPVCAILGGILGQEVIKSISCKGDPVKNFFYFDVADGKGVIEDIPPPPPAK

SEQ ID NO: 18450 - protein, 465 aa, Aquifex aeolicus VF5
MEFDLIIVGAGSGGYEAGLYAFRRGMKVAFVELSPETVGGNCLNRGCIPSKYMRHGAYLLDKFQKMEQYGIISKGYDIEYKKLKEGRDNVVVTIRENFKKFAQQLRIPIYYGKGVLKDPNTVFVEGPEETLKAKYILVATGSSPTSVGNLVPDGKYVIDTDQIWEIDYVPKKVLIVGGGAVGVEFAYIFRKYGSEVVLVEIKDRLLPTPDIPEDSGRYLARKLRELGVDIRTRTSVESWEKTQNGVKAKLTDGSEVVADFILLGVGRKPNTKGIGLEELGIEMDERGFVKTNEYAQTNIPNIYACGDITSPLMLAHKSMYEGKIAVSHILGERDWKKNERIIPKIIYSALEVASVGLTEEQAEDEDIEVRVGVASFVSNPKAMDDGENEGFVRIVADDETGEILGCHIVGPHAGELIHQVVHMIKDGKTVEFASKTMYSHPSLSENIGIASSEVYYGPISWVKRR

SEQ ID NO: 18451 - protein, 290 aa, Listeria monocytogenes EGD-e
MKVKKAVIPAAGLGTRFLPATKAMPKEILPIVDKPTIQFIVEEAVASGIEDILIVTGKGKRAIEDHFDSVPELENNLREKNKLDLLHLVEETTNINLHFIRQSKPKGLGDAILQAKGFIGNEPFVVMLGDDIVQSKTPCAKQLIDQYEKTHSSVIGVQNVPREETYRYGIIDPDKEVSDRLYNVTGFVEKPNVEDAPSNLAILGRYLLTPEIFKYLETQEAGSGGEIQLTDAINRLNEIQPVFAYDFEGERFDVGDKFGFIETTLKFALKHPEIKDDVRDLIIRLGDELK

SEQ ID NO: 18452 - protein, 478 aa, Saccharomyces cerevisiae
TINKSHDVVIIGGGPAGYVAAIKAAQLGFNTACVEKRGKLGGTCLNVGCIPSKALLNNSHLFHQMHTEAQKRGIDVNGDIKINVANFQKAKDDAVKQLTGGIELLFKKNKVTYYKGNGSFEDETKIRVTPVDGLEGTVKEDHILDVKNIIVATGSEVTPFPGIEIDEEKIVSSTGALSLKEIPKRLTIIGGGIIGLEMGSVYSRLGSKVTVVEFQPQIGASMDGEVAKATQKFLKKQGLDFKLSTKVISAKRNDDKNVVEIVVEDTKTNKQENLEAEVLLVAVGRRPYIAGLGAEKIGLEVDKRGRLVIDDQFNSKFPHIKVVGDVTFGPMLAHKAEEEGIAAVEMLKTGHGHVNYNNIPSVMYSHPEVAWVGKTEEQLKEAGIDYKIGKFPFAANSRAKTNQDTEGFVKILIDSKTERILGAHIIGPNAGEMIAEAGLALEYGASAEDVARVCHAHPTLSEAFKEANMAAYDKAIHC

SEQ ID NO: 18453 - protein, 430 aa, Porphyra purpurea
MAKIQAIRGTKDILPDEQLYWQFIHEKVASLLKYANYKEIKTPIFENSDLYDRGIGENTDIVNKEMYRFNDRSNRDITLRPEGTAGVVRAFIENRMDVQNRLQKLWYSGPMFRYERPQSGRQRQFHQLGIEFIGSSDARADAEIIHLAMNIFNDLSVNDLQLDINSIGKAEDRNHYQAKLQEYLEQYYDDLDTDSQNRLSSNPIRILDTKNKYTQTILNDSPRISDFLSLESEKHFDDVCDYLTLLNVPYKINTQLVRGLDYYNDTAFEIKILKSQGQDTLCGGGRYDSLIHQLGGNKTPAVGCAIGLERLLLVAKDNILLPHMSIDCYIVSKGIKARKIGIIITQFLRNQLVKTELDISSSNFGKQLKQAHKKRAIACLILGDNEIQQETITIKWMYTQEQENMSIIEFKNKISYLKKKIAFNKKFNSY

SEQ ID NO: 18454 - protein, 437 aa, ASPERGILLUS NIDULANS FGSC A4
MSDPSPKRFETLQLHAGQEPDPATNSRAVPIYATTSYTFNDSAHGARLFGLKEFGNIYSRIMNPTVDVFEKRIAALEGGVAAVAASSGQAAQFMAISALAHAGDNIVSTSNLYGGTYNQFKVLFPRLGITTKFVQGDKAEDIAAAIDDRTKAVYVETIGNPRYNVPDFEVIAKVAHEKGIPLVVDNTFGAGGYFVRPIEHGADIVVHSATKWIGGHGTTIGGVVVDSGKFDWGKNAARFPQFTQPSEGYHGLNFWETFGPIAFAIRVRVEILRDLGSALNPFAAQQLILGLETLSLRAERHASNALALANWLKKNDHVSWVSYVGLEEHSSHEVAKKYLKRGFGGVLSFGVKGEAAVGSQVVDNFKLISNLANVGDSKTLAIHPWSTTHEQLTDQERIDSGVTEDAIRISVGTEHIDDIIADFEQSFAATFKVVRSA

SEQ ID NO: 18455 - protein, 505 aa, Cicer arietinum
DKVPHSSSSSKVANKAIQQSNLSFSSSHLSGDKIVTLSGAGRGRCTRKHVIVTPKAVSDSQNSQTCLDPDASRSVLGIILGGGAGTRLYPLTKKRAKPAVPLGANYRLIDIPVSNCLNSNISKIYVLTQFNSASLNRHLSRAYASNLGGYKNEGFVEVLAAQQSPENPNWFQGTADAVRQYLWLFEEHNVLEFLILAGDHLYRMDYEKFIQAHRETDADITVAALPMDEKRATAFGLMKIDEEGRIIEFAEKPKGDQLNAMKVDTTILGLDDERAKEMPFIASMGIYVISKNVMLDLLSDKFPGANDFGSEVIPGATSIGMRVQAYLYDGYWEDIGTIEAFYNANLGITKKPVPDFSFYDRSSPIYTQPRYLPPSKMLDADITDSVIGEGCVIKNCKIFHSVIGLRSCISEGAIIEDTLLMGADYYETDADKRFLAAKGSVPIGIGRNSHIKRAIVDKNARIGENVKIINSDNVQEAARETDGYFIKSGIVTVIKDALIPSGTVI

SEQ ID NO: 18456 - protein, 418 aa, Bordetella parapertussis 12822
MSYQHIKVPTGGQKITVNADYSLNVPDQVIIPVIEGDGTGADITPVMIKVVDAAVQKAYAGKRKIHWMEVYAGEKATKVYGPDVWLPEETLDAVKDYVVSIKGPLTTPVGGGIRSLNVALRQQLDLYVCLRPVRYFKGVPSPVREPEKTDMVIFRENSEDIYAGIEYMAESEQAKDLIQYLQTKLGATKIRFPNTSSIGIKPVSREGTERLVRKALQYAIDNDRASVTLVHKGNIMKFTEGGFRDWGYALAQNEFGAQPIDGGPWCKFKNPKTGREIIVKDSIADAFLQQILLRPAEYDVIATLNLNGDYISDALAAQVGGIGIAPGANLSDSVAMFEATHGTAPKYAGKDYVNPGSEILSAEMMLRHMGWTEAADLIIASMEKSILSKKVTYDFARLLEGATQVSCSGFGQVMIDNM

SEQ ID NO: 18457 - protein, 140 aa, Triticum aestivum
  unsure (1)..(140): unsure at all Xaa locations
MAPTVMASSATSVAPFQGLKSTAGLPVSRRSNGASLGSVSNGGRIRCMQVWPIEGIKXFETLSYLPPLSTEXLLKXVDYLXRSKWVPCLQFNKVGFIFPXAQPSPGYYXGXYWTIWNCLCSGXTEATQVXNKWEXVKKDT

SEQ ID NO: 18458 - protein, 364 aa, Nostoc punctiforme PCC 73102
MSATPLVSQVDSHNPEKSKLIPPLLGASVAELSAWVQQQGQPAYRGKQLHEWIYDKGVRSLADISVFSKQWRAEVAEIPIGRSTLHYRSVAPDGTVKYLLRLTDGQIIETVGIPTFAERGEGPKARLTVCVSTQVGCPMACDFCATGKGGYKRNLARHEIIDQVLTVQEDFQQRVSNVVFMGLGEPLLNTENVLAALKSLNQDIGIGQRSLTVSTVGIRDRIRQFAQNNLQITLAVSLHAPNQALREKLIPSARAYPLEELLAECREYVEITGRRVTFEYVLLAGVNDLPEHALELSKCMRGFQSHVNLIPYNPIQEVDYKRPNRDRIEAFVNVLKQQNTAVSVRYSRGLEADAACGQLRASKN

SEQ ID NO: 18459 - protein, 502 aa, Xylella fastidiosa Dixon
MHNGFDALQLHANRLRGVTIPDLLAAELKRPEQYARQVGPLYFNFARQKYDCVALEALFALARNHNVTGAFQRMFCGEQVNVTEGRAVLHTALRGDLSGTSVAVAAYTAAAKVRERMYALIAGLDASEVTDIVSVGIGGSDLGPRLVVDALRPISQGRFRVHFVSNVDGAAMRRTLDMLDPSRTAGILISKTFGTQETLLNGRILYDWLGGSERLYAVSANPERAVHAFDIVPTQVLPIWDWVGGRYSLWSAVGFPIALAIGSQRFEELLAGAAEFDAYALRVPLEENVAVLHGLTAVWNRNFLGCATYAVMAYDQRLALLPAYLQQLVMESLGKRVKCDGTPVDRDTVPVWWGGVGTDVQHSFFQALHQGTNIVPADFIGTIRNDDLYTENHFALNANLLAQIEVLANGQLSDDPHRVYPGGNPSTLILLDALTPQALGGLIAMYEHSVYVQSVIWGINAFDQFGVELGKHLAVQLLPALKGESVEVVDPVTRAVLVRLRG

SEQ ID NO: 18460 - protein, 432 aa, Halobacterium sp. NRC-1
MYDRLKGFRDFYPAEMGPRRAAIDAIEDAAASYGFREVGTPAMERTEMYVDKSGAEIVDELYSFTDQGGRDVALTPELTPTVARMVVAKQQALSKPIKWYSSRPFWRYEEPQQGRFREFYQTNLDIFGTSDPRADAEVLAVAADGLTSLGLTGADFEFRVSHRDILGGLLAAFDATVDTEAAIRTVDKREKIERAAYLDDLAAAGLSYDQAEQFDDLLDGDDLDALVSFAGTDRVRDAVANLRNVLDAAETLGVRQYCDVSLTTARGLDYYTGVVFECFDSTGDVGRAVFGGGRYDDLIERFGGQPTPAVGVAPGHATLNLLLENAGVLPDDEFTPDYYVLQVGDTDAEAADVASALRERGNRVDTDITGRSFGAQMNYADNVGADTVVIVGEQDLADGNVTIKNMASGEQTTAPIAAFPGAHDAPRVEDFA

SEQ ID NO: 18461 - protein, 431 aa, Clostridium perfringens str. 13 [sequence omitted]

SEQ ID NO: 18462 - protein, 512 aa, Clostridium perfringens str. 13
MSKKPVMLMILDGFGISPNKEGNAVAAANKPNYDRLFNKYPHTELQASGLEVGLPEGQMGNSEVGHLNIGAGRIIYQELTRITKEIKEGTFFTNKALVKAMDEAKENNTSLHLMGLLSNGGVHSHIDHLKGLLELAKKKGLQKVYVHAFMDGRDVAPSSGKDFIVELENAMKEIGVGEIATISGRYYAMDRDNRWERVELAYNAMALGEGEKASSAVEAIEKSYHDNKTDEFVLPTVIEEDGHPVARIKDGDSVIFFNFRPDRAREITRAIVDPEFKGFERKQLHVNFVCMTQYDKTLECVDVAYRPESYTNTLGEYVASKGLNQLRIAETEKYAHVTFFFNGGVEQPNTNEDRALIASPKVATYDLKPEMSAYEVTDELINRLDQDKYDMIILNFANPDMVGHTGVQEAAVKAIEAVDECLGKVADKVLEKEGTLFITADHGNAEVMIDYSTGKPMTAHTSDPVPFLWVSKDAEGKSLKDGGKLADIAPTMLTVMGLEVPSEMTGTCLLNK

SEQ ID NO: 18463 - protein, 330 aa, Zea mays
MVRPPCCDKEGVKKGPWTPEEDLVLVSYIQEHGPGNWRAVPTRTGLMRCSKSCRLRWTNYLRPGIRRGNFTEQEEKLIVHLQALLGNRWAAIASYLPERTDNDIKNYWNTHLKRKLQSGGDGAAKPPAHRPPSSSKGQWERRLQTDINLARRALREALTPLDDLKPQLQRDAAADAPAAGAGTGGGDSPASSSSGASQSSPLAPAAFAAAAAGPYVLTAENISRMLDGWAGRKVRGGGTPGTPGGAESASTGSSDASEVSYGGAAVASAAPAPACGGPVFEYEAKPGVPTSHQQMPLSAIESWLFDDDSHLHHAVQSASLLDAAPMDYPF

SEQ ID NO: 18464 - protein, 397 aa, Clostridium perfringens str. 13
MNFNKKTIEDVQVKGKKVLVRCDFNVPLKDGVITDENRLNGAMPTIKYLVDNGAKVILCSHMGKPKGEAKPEFSLAPVAKRLSEMLGKEVVFAADDNVVGENAKKAVAEMKDGDVVLLQNTRYRKEETKNGEELSKELASLAEMFVNDAFGTAHRAHCSTVGVTEYLKPAVCGYLIQKELKFLGDAVETPERPFVAILGGAKVSDKINVINNLLEKVDTLIIGGGMAYTFLKAQGYTVGSSLVEEDKVEYAKEMLAKAEEKGVKLLLPVDHRVAKEFKDVEAVVTEDQNIAEGFMGLDIGPKTEAIYAEAIKDAKTVIWNGPMGVFEFENFNKGTIAVAKAMAEADATTIIGGGDSAAAVNILGFGDKMSHISTGGGASLEFLEGKVLPGIAALNDK

SEQ ID NO: 18465 - protein, 492 aa, Thermobifida fusca
MSISSERIAALRDYVPEVRELTIDGKPVKPAGETWDVYNPATEEVIATVSGATKEQVDEAIRAARTAFDTWSKMSGEERSAAMHSLADRLEARWEELLASIVNEVGTPVSTAEFLQVKMGLGHLRWFADAAKKDRTVHLGPYDVPVPTMSDVDHYPVGVVAAITGYNYPLNLAGFKYGAALAAGCTVVLLPSPRTPLTTLLLGEIIRESDLPDGVINVVLGGADIGQYLSSHPGVDKVSFTGSDAVGAKIMEQAAANLNDVVLELGGKSANIVLPGCDVESFAVDMHMRWSRNSGQGCAALARLLVHEDLFDRFMKAGAEAFPKMKVGDPWDPETHIGPLIRPDHRDRVNGFITEALEQGGKALLQVETPLPEKGWYVNPILLGNLPHSARAVQQEIFGPVAVVLTYKDVDEAIRLANDTAYGLAANVWAPTLEEGRRVAEQLRAGTVWINGGGAMRPDAPFGGSGRSGIGRELGEWGIQEFLEPRHIQWAL

SEQ ID NO: 18466 - protein, 546 aa, Methylococcus capsulatus str. Bath
MPQSTDLPAWRTLSEHFKTIAPRHMRDMFADDPGRFEAFSVRLGDLLFDYSKNRITRETVATLIQLAEEAGLREKIDAMFRGERLNVTENRAVLHVALRNRSNRPIRVDGKDVMPEVNRVLDRMRRFSQSVRTGEWRGATGKAITDVVNIGIGGSDLGPKMVVKALQPYADPRLRAHFVSNVDESDLVEILRPLNPETTLFVVASKTFTTQETMTNGRSARAWFLERISDESAIARHFVAISTNRNKVAEFGIDPRNMFEFWDWVGGRYSLWSAIGLPIALSVGMDRFEELLEGAHFVDEHFRTAPFERNIPVLMGLLGIWYINFFGAQSHAVLPYDQYLEDLPAHLQQADMESNGKTVDVEGRPVNYSTGPVIFGQPGTNGQHAFYQLLHQGSMLVPCDFLAAAESHHPLAEHHDILISNFLAQTEALMRGRTTDEARQEIASEELPPERLEALAAAKTFPGNKPTNSFLYRRLDPHTLGMLIALYEHKIFTQGVIWYINSFDQMGVELGKQLAKTILAELPGDAPVASHDASTNGLIRYFKSLR

SEQ ID NO: 18467 - protein, 165 aa, Aegilops speltoides
VMASSATTVAPFQGLKSTAGLPVGRRSSGSLGSVSNGGRIRCMQVWPIEGIKKFETLSYLPPLSTEALLKQVDYLIRSKWVPCLEFSKVGFVFREHNSSPGYYDGRYWTMWKLPMFGCTDATQVLSEVEEVKKEYPDAYVRVIGFDNLRQVQCVSFIAFRPPGCE

SEQ ID NO: 18468 - protein, 383 aa, Arabidopsis thaliana
MVAEAEVVFQQSLPAVLEIELFDGVSSAVKSPVSSPKLGFTQSTASVSGSLTTSPVADIFPEGDCDPSVLDYIPTIRSGSFADIGPKRNMEDEHIRIDDLSSQVGSLFELPKPSAFYAVFDGHGGPEAAAYVRENAIRFFFEDEQFPQTSEVSSVYVEEVETSLRNAFLQADLALAEDCSISDSCGTTALTALICGRLLMVANAGDCRAVLCRKGRAIDMSEDHKPINLLERRRVEESGGFITNDGYLNEVLAVTRALGDWDLKLPHGSQSPLISEPEIKQITLTEDDEFLVIGCDGIWDVLTSQEAVSIVRRGLNRHNDPTRCARELVMEALGRNSFDNLTAVVVCFMTMDRGDKPVVPLEKRRCFSLSPEAFCSLRNLLDG

SEQ ID NO: 18469 - protein, 389 aa, Arabidopsis thaliana
MNHNSNLVLPSHQTETQTQDETDISVWRFRGSDNAAKASSVTMRVIVYKLFDECSLDVKKPLLPLAHGDPSVYPCYRTSILVENAVVDVLRSGKGNSYGPAAGILPARQAVADYVNRDLTNKVKPNDVFITVGCNQGIEVVLQSLARPNANILLPRPSYPHYEARAVYSGLEVRKFDLLPEKEWEIDLPGIEAMADENTVAMVIINPNNPCGNVYSYDHLKKVAETAKKLGIMVITDEVYCQTIFGDKPFVPMGEFSSITPVITLGGISKGWIVPGWRIGWIALNDPRGILKSTGMVQSIQQNLDITPDATTIVQAALPEILGKANKELFAKKNSMLKQNVELVCDRLKEIPCLVCNKKPESCTYLLVPPPTSLILFHDSRSIWMILIS

SEQ ID NO: 18470 - protein, 288 aa, Listeria monocytogenes EGD-e
MKGIILAGGSGTRLYPLTKAISKQMLPIYDKPMIYYPLSILMLAGIKDILIISTPEDTPRFEQLLADSDQLGINISYAVQEKPEGLAQAFIIAEDFIGDDSVSLILGDNIYYGQGLSKMLQRASAKKAGATVFGYHVNDPERFGVVEFDESMKAISIEEKPTEPKSNYAVTGLYFYDNRVVEIAKSIKPSERGELEITDVNKRYLELGELDVELMGRGFAWLDTGTHESLLEASTFIETIERRQNLKIACLEEIAYRMGYIDEAAVEKLAEPLKKNAYGQYLMKLINK

SEQ ID NO: 18471 - protein, 255 aa, Pseudomonas syringae pv. tomato str. DC3000
MSRTQLFDLDGKVAFVSGASRGIGEAIARLLAQQGAQVIVSSRKLEGCQAVADAIIAEGGQATAIACHIGEMEQITRVFAQIRQQFGRLDILVNNAATNPQFCNVLDTDLSAFQKTIDVNIRGYFFMSVEAGKLMREGGGGSIINVASINAVSPGAYQGVYSMTKAAVVNMTKVFAKECAEFGIRCNALLPGLTDTKFASALVKNDAILNMALSQIPLKRVAAPSEMAGAVLYLASEASSYTTGVALNVDGGFLS

SEQ ID NO: 18472 - protein, 165 aa, Aegilops sharonensis
VMASSATTVAPFQGLKSTAGLPVSRRSSASLGSVSNGGRIRYMQVWPIEGIKKFETLSYLPPLSTEALLKQVDYLIRSKWVPCLEFSKVGFVFREHNSSPGYYDGRYWTMWKLPMFGCTDATQVLNEVEEVKKEYPDAYVRVIGFDNLRQVQCVSFIAFRPPGCE

SEQ ID NO: 18473 - protein, 311 aa, Zea mays
MAASVALSSGHRMPAVGLGVWRMEKADIRGLIHTALRVGYRHLDCAADYQNEAEVGDALAEAFQTGLVKREDLFITTKLWNSDHGHVLEACKDSLKKLQLDYLDLYLIHFPVATRHTGVGTTSSALGDDGVLDIDTTISLETTWHAMEELVSMGLVRSIGISNYDIFLTRDCLAYAKIKPAVNQIETHPYFQRDSLVKFCQKHGICVTAHTPLGGSTANAEWFGTVSCLDDPVIKSLAEKYGKTPAQLVLRWGLQRDTVVIPKTSKAERLQENFDVFGFDISGEDMERMKAVDRKYRTNQPAKFWGIDLYA

SEQ ID NO: 18474 - protein, 164 aa, Aegilops bicornis
VMASSATSVAPFQGLKSTGGLPVSRRSRGSLGSVSNGGRIRCMQVWPIEGIKKFETLSYLPPLSTEALLKQVDYLIRSKWVPCLEFSKVGFVFREHNSSPGYYDSRYWTMWKLPMFGCTDATQVLNEVEEVKKEYPDAYVRVIGFDNLRQVQCVSFIAFRPPGC

SEQ ID NO: 18475 - protein, 455 aa, Oenococcus oeni PSU-1
MVSELEEITMKNQQYDYDVLYIGSGHGTFDGAIPLAAKGFKVGIVEYDLVGGTCPNRGCNAKITLDAPVALQRQFENLNGVIEGEAKINWSANLTHKQEVIGKLPDMIAGLAKSVHIDILSGHGVLDDPHTVLVDGTPKTAEKIVIATGLRPHRLDISGSELAHDSSDFMNLSAMPKRLTVIGSGYIAMEFATMANAAGSEVTVITHGNRALRKFNQDFVEKIIDDLQKRGVKFVRNTEVTSFEKTGTALTVNAEDNFQLETDWILDATGRIPNVEKIGLDKLGVEYNKNGVVVNDHLQTNVPNIYASGDVIDKIQPKLTPTAVFESTYLMHQFAGDSSSAIDYPAIPSVVFTSPRIAQVGVTPEEAKKNPDKYTIETHHTPDDWYRQVDKEQLGDNALIFDKEHHLVGASEFSDKADDAINTLLPAIEFKLGPEQLGRLIYLFPSISSSAAGQL

SEQ ID NO: 18476 - protein, 405 aa, Bacillus thuringiensis serovar kurstaki
MNIVFMFPGVGSHYSGMGKYLYENFPVAREIFEEASDTLKIDMASLCMEKIYKADLEKLQNSQTALVTTSMAAFRVFEQEIGNKPEAMIGYSLGEYTALCASGAIAFSDTLKLVQERSTILSSYALTIDGTMAWVNNLAPEIVEGICSELLTKGQEVYISAYDTPNKTSISGTNSAVQLACEMVVEHGGIAIPLKLSGPFHSPMMQPAAEKYKSVLENIDMKQPLVPVIANHDSSMYKGVENIRENLYLQLIKPVKWLDMIHYLMNQGSMKAIEMGPKEVLKYLLQAINPAISTFNYEREKDILNTKNSFTLQESDYEEVISGCLTVVVSTKNYNTDLSDYQKKVVLPFQKVQSQLEEKINSGYSVEKSDVEEAIQMMKTALTGKQIKEREQKRYLQRVLQCKSF

SEQ ID NO: 18477 - protein, 540 aa, Bacillus cereus ATCC 14579
MSYEKVWANNEKLNQTEKNKLEKDGLEIFNDIPYYAENGFESIPKEEWDAFKWAGLYLQRPKEAGYFMMRVNIPSGIITNAQAEVLASIAEDYGRNVIDITTRQAIQFHWLEIQQIPDIFKRLARVGLSSAGACGDITRNITGNPLAGIDANELFDTTHIVKEVYDYFQHNEEFSNLPRKFKMSISSNIYNSANAEINCVAFTPATKEIDGEKKVGFHIKVGGGLSARPYLADELDVFVLPEEVKAVAIAIATIFRDFGYREKRHLARLKFLVADWGAEKFKEKLIEYTGPLQSKGESALKGWNAGYFYGVQDQKQKGLKYVGFNVPVGRLHAEEMFEIARIAKQYGNGQIRTCNSQNFIIPNVPPENVKGLLSEPLFEAISASPKSFIGHAVSCTGIEYCNLALVETKERLRKIAEYLDTQIALDVPVRIHMVGCPNSCGQRQIADIGLQGVKMKTKEKGIVEAFEIYVGGTLLDGGAYNQKLKGKIDGEDLPDVLASFISYFKENKLPAETFYDFVGRVGVDTLQIALNNVLEEVIAS

SEQ ID NO: 18478 - protein, 103 aa, Oryza sativa
  unsure (1)..(103): unsure at all Xaa locations
MAPSVMASSATTVAPFQGLKSTVGMPVARRSGNCSFSNVSNGGRIRCMHALPIQGLHKLTTVSYLPPLTVEDLLKQIXEYLLRSKWVPCLXFNKVGFVYRENH

SEQ ID NO: 18479 - protein, 271 aa, Gloeobacter violaceus
MFPVLADKRSDEPISPQPSEAAVSRPASAPARAPSGSDTPVESTWPRRELLAEAVGTFVLVFAGTGAVVVNAVSGGALTHLGISFVFGAVVAALIYTLGHISGAHINPAVTLTLWALGRFPARRVVPYMLVQLAGAAAASVAVLVCFGNQAKLGATLPLAGNWAQAFAVELLLTFILMLVICGSALDARAPRGFAGLAIGLTVGLEAGFGGPISGASMNPARSFGPALVAGAWEAHWVYWLAPIAGALLAGWVWHQMRDPLEETSSRLDGG

SEQ ID NO: 18480 - protein, 255 aa, Candida albicans SC5314
MAVINQPNSQIRLTNVSLVRMKKGKKRFEIACYQNKVQDWRSKVEKDIDEVLQIPQVFINVSKGQVANNDDLQKCFGTTNQDEIIAEILNKGEIQLNEKERNANLQQKQNEFLNIISTKCINPRSKKRYPPSMIEKVLNEVKFHLNPTKPTKIQALDAIKLLVEKQIIPIARAQMKVRITLSKKAYLKTFQDEIKPVIDQIVEEDNNGKQYEIVGIIDPINYRVLVTLIENTDGSNKVAKGEGSIEVLDMSAIKE

SEQ ID NO: 18481 - protein, 165 aa, Aegilops tauschii
VMASSATTVAPFQGLKSTAGLPVSRRSSGSLGSVSNGGRIRCMQVWPIEGIKKFETLSYLPPLSTEALLKQVDYLIRSKWVPCLEFSKVGIVFREHNSSPGYYDGRYWTMWKLPMFGCTDATQVLNEVEEVKKEYPDAYVRVIGFDNLRQVQCVSFIAFRPPGCE

SEQ ID NO: 18482 - protein, 195 aa, Staphylococcus epidermidis ATCC 12228
MEDIVIATNNQGKINDFKAIFKNQHVIGISELIEDFDVEETGATFEENARLKSEAAAHALNKRVIADDSGLEVFALNGEPGVYSARYAGLGKNDEDNIEKLLTNLEDVQDRRAQFVCVISMSAPNEKTKTFKGTVSGVITTERHGKNGFGYDPIFFVPELNKTMAEITNDEKGKISHRGNAIRLLKEYLEGEQHV

SEQ ID NO: 18483 - protein, 336 aa, Thermosynechococcus elongatus BP-1
MVSCPSRLGGSSAHRRLQCLAGHPLRQRSHSSPMRGIILAGGSGTRLYPLTQVISKQLMPIYDKPMIYYPLSVLMLAGIREILIISTPEHLYLFEKLLGDGHQWGLSLSYCVQPQPNGLAEAFILGREFLQGEPVCLTLGDNLLYGHDLSEKLQRAAQLTAGAMIFGYRVANPQQYGVLEFDASGRVLGIEEKPAVPKSNYAVPGIYFYDHQVCDLAAQLQPSARGELEITDLNRLYLEKGQLRVELLGRGYAWLDTGTHDLLQQASSFIRTLEERQGLKIGCLEEIALHRGYITPQQLYELAQPLRKSSYGQYLLQVWAEVTGGMHGQGTTAGDR

SEQ ID NO: 18484 - protein, 165 aa, Triticum urartu
VMASSATTVAPFQGLKSTAGLPVSRRSSGSLGSVSNGGRIRCMQVWPIEGIKKFETLSYLPPLSTEALLKQVDYLIRSKWVPCLEFSKVGFVFREHYSSPGYYDGRYWTMWKLPMFGCTDATQVLNEVEEVKKEYPDAYVRVIGFDNLRQVQCVSFIAFRPPGCE

SEQ ID NO: 18485 - protein, 274 aa, Pseudomonas putida KT2440
MQRLSTRTGLDLPAIGLGTWPMTGSECTQAVRQALDVGYRHIDTATAYENEAAVGQALRDSDVPREQIHLTTKVWWDRLEPKAMRQSLEDSLRALGTEQVDLFHIHWPGTDWDLARSIDTLVALRDEGKARHIGVANFPLGLLRQVVETLGAPLSAIQVEYHVLLSQQPLLDFARGHDLLLTAYTPLARGQAAAQPVIQAIARKHGVLPSQVALKWLLDQDGVAAIPKASSRENQLANLAALTVPLDDEDRTAIAGLPKDQRVVSPPFAPDWNS

SEQ ID NO: 18486 - protein, 449 aa, Staphylococcus aureus
MMTKKYDLIVIGTGSAGSITAAKCNKAGWNVAMVDDRPFGGTCALRGCDPKKVLHGAAELIDWNKRMVKNGVPSEVSINWKDLMNFKRTFTDDVPEKKEEALNKQGIDTYHGNASFVSEDKLEVNKEVLEGSHFLIASGAKPTPLPIKGEEHLTYSDEFLELDELPQRIVFVGGGYISFEFAHIAARAGSEVHIIHRGQRPLENFDIDLVDILLEKSKEIGIQVHLQHSVESIEKEQGKFHVYARKKEDITRFEADIVIHGAGRVPALDMNLEKGNIERKKHGVHVNEYLQSVSNPNVYAAGDAAATDGLPLTPVASADSHVVASNLLKGNSKKIEYPVIPSAVFTVPKMASVGMSEEEAKNSGRNIKVKQKNISDWFTYKRTNEDFAAFKVLIDEDSDQVVGAHLISNEADELINHFATAIRFGISTKELKQMIFAYPTAASDIAHML

SEQ ID NO: 18487 - protein, 488 aa, Saccharomyces cerevisiae
DVREDRVVTNSTGNPINEPFVTQRIGEHGPLLLQDYNLIDSLAHFNRENIPQRNPHAHGSGAFGYFEVTDDITDICGSAMFSKIGKRTKCLTRFSTVGGDKGSADTVRDPRGFATKFYTEEGNLDWVYNNTPVFFIRDPSKFPHFIHTQKRNPQTNLRDADMFWDFLTTPENQVAIHQVMILFSDRGTPANYRSMHGYSGHTYKWSNKNGDWHYVQVHIKTDQGIKNLTIEEATKIAGSNPDYCQQDLFEAIQNGNYPSWTVYIQTMTERDAKKLPFSVFDLTKVWPQGQFPLRRVGKIVLNENPLNFFAQVEQAAFAPSTTVPYQEASADPVLQARLFSYADAHRYRLGPNFHQIPVNCPYASKFFNPAIRDGPMNVNGNFGSEPTYLANDKSYTYIQQDRPIQQHQEVWNGPAIPYHWATSPGDVDFVQARNLYRVLGKQPGQQKNLAYNIGIHVEGACPQIQQRVYDMFARVDKGLSEAIKKVAE

SEQ ID NO: 18488 - protein, 165 aa, Triticum timopheevii subsp. armeniacum
VMASSATTVAPFQGLKSTAGLPVSRRSSGSLGSVSNGGRIRCMQVWPIEGIKKFETLSYLPPLSTEALLKQVDYLIRSKWVPCLEFSKVGFVFREHNSSPGYYDGRYWTMWKLPMFGCTDATQVLNEVEEVKKEYPDAYVRVIGFDNLRQVQCVSFIAFRPPGCE

SEQ ID NO: 18489 - protein, 165 aa, Triticum turgidum subsp. dicoccoides
VMASSATTVAPFQGLKSTAGLPVGRRSSGSLSSVSNGGRIRCMQVWPIEGIKKFETLSYLPPLSTEALLKQVDYLIRSKWVPCLEFSKVGFVFREHNSSPGYYDGRYWTMWKLPMFGCTDATQVLNEVEEVKKEYPDAYVRVIGFDNLRQVQCVSFIAYRPPGCE

SEQ ID NO: 18490 - protein, 165 aa, Triticum aestivum
VMASSATTVAPFQGLKSTAGLPVGRRSSGSLSSVSNGGRIRCMQVWPIEGIKKFETLSYLPPLSTEALLKQVDYLIRSKWVPCLEFSKVGFVFREHNSSPGYYDGRYWTMWKLPMFGCTDATQVLIEVEEVKKEYPDAYVRVIGFDNLRQVQCVSFIAFRPPGCE

SEQ ID NO: 18491 - protein, 429 aa, Synechocystis sp.
MKRVLAIILGGGAGTRLYPLTKLRAKPAVPLAGKYRLIDIPVSNCINSEIVKIYVLTQFNSASLNRHISRAYNFSGFQEGFVEVLAAQQTKDNPDWFQGTADAVRQYLWLFREWDVDEYLILSGDHLYRMDYAQFVKRHRETNADITLSVVPVDDRKAPELGLMKIDAQGRITDFSEKPQGEALRGMQVDTSVLGLSAEKAKLNPYIASMGIYVFKKEVLHNLLEKYEGATDFGKEIIPDSASDHNLQAYLFDDYWEDIGTIEAFYEANLALTKQPSPDFSFYNEKAPIYTRGRYLPPTKMLNSTVTESMIGEGCMIKQCRIHHSVLGIRSRIESDCTIEDTLVMGNDFYESSSERDTLKARGEIAAGIGSGTTIRRAIIDKNARIGKNVMIVNKENVQEANREELGFYIRNGIVVVIKNVTIADGTVI

SEQ ID NO: 18492 - protein, 456 aa, Mycobacterium avium subsp. paratuberculosis str. k10
MTKHFDAIIVGAGQAGPPLAGRLTAAGQRVAIIERKLIGGTCVNTGCIPTKTLVASAHAAHLARRGADYGVGTGAVSVDMAKVKARKDEIMLGDRKGVEDWLAGMAGCTVVRGHARFRDPHTLQVGEDLLRAERIFLNVGGRAVVPDIPGLAEVDFLTNVSILELDTLPTHLVIVGGSYIALEFAQMYRRFGAAVTVVERGPRLASREDEDVSAAVQEILRAEGIDIVVNADDVRIAKTGNGFELTPRDGAPPIRGSHLLLAVGRRPNTDDLDLAAAGVRTDARGYILVDDQLKTNVEHIWAMGDCNGRGAFTHTSYNDFEIVAANLLDDDPRRVSDRITTYALYIDPPLGRAGMTVAQVRASGRRALVGKRPMTRVGRAVEKGETQGFMKVVVDADTREILGAAILGVGGDEAIHGILDVMSAKAPYTTLSRTMHIHPTVSELIPTMLQEMSPLA

SEQ ID NO: 18493 - protein, 576 aa, Oceanobacillus iheyensis HTE831
MTKSNISKDNGPLDEVEGIKERSNFLRGTIAEGLEDRITGAISDEDNKLLKFHGSYQQDDRDLRDERRRKKLEPAYQFMIRVRTPGGVTTPEQWLVMDDLAHKYANGSMRLTTRQTFQLHGIVKWDLKKTMQGMNQALMTTIAACGDINRNVMCNVNPEQSDVHAEVYEWSKKVSDHLLPETNAYHEIWLEDKKIVDSREESEPIYGSTYLPRKFKIGIAVPPSNDIDIYSQDLGFIAIVEEGKLLGFNVAVGGGMGMTHGDTNTYPQISRVIGFCVPEKVTEVAEKVVTIQRDFGNRSNRKNARFKYTIDSRGIDWFIDELNERLGWELEGKRHYEFDSNGDSYGWIEGKDYWHLTLFIQNGRIKDVEDYPLMTGLREIAKVHTGDFRLTPNQNLIIANVSSDNKKQINDLVEKFNLTEGKTYSGLRRNSMACVAFPTCGLAMAESERYLPELLDKIEVILDESGLREEEIVIRMSGCPNGCSRPALAEIAFIGKAPGKYNMYLGGSFNGSRLNKLYKENIGEEEILNTLRPIFIDFAKDKQKDEHFGDFVIRAGYVEEVKSGLDFHSSKEDVRS

SEQ ID NO: 18494 - protein, 505 aa, Helicobacter pylori
MVNKDVKQTTAFGAPVWDDNNVITAGPRGPVLLQSTWFLEKLAAFDRERIPERVVHAKGSGAYGTFTVTKDITKYTKAKIFFKVGKKTECFFRFFTVAGERGSADAVRDPRGFAMKYYTEEGNWDLVGNNTPVFFIRDAIKFPDFIHTQKRDPQTNLPNHDMVWDFWSNVPESLYQVTWVMSDRGIPKSFRHMDGFGSHTFSLINAKGERFWVKFHFHTMQGVKHLTNEEAAEVRKYDPDSNQRDLFNAIARGDFPKWKLSIQVMPEEDAKKYRFHPFDVTKIWYLQDYPLMEVGIVELNKNPENYFAEVEQVAFTPANVVPGIGYSPDRMLQGRLFSYGDTHRYRLGVNYPQIPVNKPRCPFHSSSRDGYMQNGYYGSLQNYTPSSLPGYKEDKSARDPKFNLAHIEKEFEVWNWDYRADDSDYYTQPGDYYRSLPADEKERLHDTIGESLAHVTHKEIVDKQLEHFKKADPKYAEGVKKALEKHQKMMKDMHGKDMHHTKKKK

SEQ ID NO: 18495 - protein, 718 aa, Glycine max
  unsure (1)..(718): unsure at all Xaa locations
FIFQWLQQAERRIPPFRRRKSTPHEPKLSHHSSNNNNNIDSMSKAIAQYTEDARLHAVFEQSGESGRSFNCSEPIRVASESVPEQRVTAYLVKIQRGGFIQPFGSMIAVDEPSFRILGYSDNARDMLGITPQSVPSLDDKNDAAFALGTDVRALFTHSSAXLLEKAFSAREISLMNPIWIHSRTSGKPFYGILHRIDVGIVIDLEPARTEDPALSIAGAVQSQKLAVRAISQLQSLPGGDAKLLCDTVVESVGGVTASDGVMVYRFHEDEHGEVVAETKRPDLEPYIGLHYPATDIPQASRFLFKQNRVRMIVDCHASAARVVQDEALVQPLCLVGSTLRXAPHGCHAQYMANMGSTASLVMAVIINGNDEEGVGGRTSMRLWGLVVCHHTSARCIPFPLRYACEFLMQAFGLQLNMELQLAAQSLEKRVLRTQTLLCDMLLRDSPTGIVTQSPSIMDLVKCDGAALYFQGNYYPLGVTPTEAQIRDIIEWVLAFHGDSTGLSTDSLGDAGYPGAASLGDAVCGMAXVAYITEKDFLFWFRSHTAKEIKWGGAKHHPEDKDDGXQRMHPLSSFKAFLEVVKSRSLPWENAEMDAIHSLQLILRDSFKDAEHRNSKAVVDPHVSEQELQGVDELSSVAREMVRLIETATAPIFAVDVDGHVNGWNAKVSELTGLPVEEAMGKSLVHDLVFKESEETVNKLLSRALKGILSNTLAFWSIH

SEQ ID NO: 18496 - protein, 341 aa, Shewanella oneidensis MR-1
MKALSKLKAEKGIWLVDAPKPEMGHNDLLIKIKKTAICGTDMHIYNWDEWSQKTIPVPMVVGHEYVGEVVDIGQEVRGFNIGDRVSGEGHITCGHCRNCRAGRTHLCRNTSGVGVNREGSFAEYLVIPAFNAFKIPDDISDDLASIFDPFGNAVHTALSFDLVGEDVLITGAGPIGIMAAAVCRHVGARHVVITDVNEYRLELARKMGATRAVNVAQENLKDVMKELGMTEGFDVGLEMSGVPSAFRAMLDTMNHGGKIAMLGIPGGEMAIDWSKVIFKGLVIKGIYGREMFETWYKMASLIQSGLDISPIITHHYKIDDFQKGFDAMGSGQSGKVILSWD

SEQ ID NO: 18497 - protein, 257 aa, Bacteroides thetaiotaomicron VPI-5482
MKIAIIGAGNMGGSIARGLAKGSLIADSDIIVSNPSAGKLEKLKEEFPGISTTLSNTEAATGADVVILAVKPWFVESVMRELKLKSKQTLVSVAAGISFEELAHFVIAPEMPMFRLIPNTAISELESMTLIAARNTNDEQNLFMLRLFNEMGMAMLIPEDKIAATTALTSCGIAYVLKYIQAAMQAGIEMGIRPKDAMEMVAQSVKGAAALILNNDTHPSVEIDKVTTPGGITIKGINELEHNGFTSAVIKAMKASK

SEQ ID NO: 18498 - protein, 224 aa, Candida albicans SC5314
MNLIEDNFKNSAERLDKPSAYLIRKARHNYGELERAMTSKTVYVGNLSHFTTEEQIHELFSKCGAIDRIIMGLDRNKLTPCGFCFVIYRTEQGSLNAMKFLQSTILDSQSISIDLDPGFREGRQFGRGKHGGQASQEMAAAGGFDNGRNGGGYRGRGRGGFRGGFRGGHRGRGGGFRGGFRGGRGGGGGGGGFGRGESSVYIPSKDPTFDAPTTFNPLADMSQN

SEQ ID NO: 18499 - protein, 373 aa, Bacteroides thetaiotaomicron VPI-5482
MKLFDVYPLYDINIVKGQGCKVWDENGTEYLDLYGGHAVISIGHAHPHYVEMISNQVATLGFYSNSVINKLQQQVAERLGKISGYEDYSLFLINSGAEANENALKLASFYNGRTKVISFSKAFHGRTSLAVEATNNPTIIAPINNNGHVTYLPLNDIEAMKQELAKGDVCAVIIEGIQGVGGIKIPTTEFMQELRKVCTETGTILILDEIQSGYGRSGKFFAHQYNHIQPDIITVAKGIGNGFPMAGVLISPMFKPVYGQLGTTFGGNHLACSAALAVMDVIEQDNLVENAKAVGDYLLEELKKFPQIKEVRGRGLMIGLEFEEPIKELRSRLIYDEHVFTGASGTNVLRLLPPLCLSMEEADEFLARFKRVL

SEQ ID NO: 18500 - protein, 495 aa, Oryza sativa (japonica cultivar-group)
MNCCSSEAVLSSKVALLNSLFCTIVLPKENCSNKMNCTKGGGFPLLFCAVICLMAQQGACNVVLIANNTTLSFDDVEATFTPEVKDSGVNGAIYAVEPLDACSPLRKKAANGPVSPFALVIRGGCQFDDKVRNAQNAGFKAVIVYDDEDSGVLVSMAGSSSGIYIYAVFLSKASGEVLKKYSGQSDVEVWILPVYENSAWSIMAISFTSLLAMAAVLATCFFVRRHQIRRDRGRIPVTREFHGMSSQLVKAMPSLIFTKVQEDNSTSSSCAICLEDYSFGEKLRVLPCRHKFHATCVDMWLTSWKTFCPVCKRDASAGTSKPPASESTPLLSSVIHLSAESTALSSFRSTVAVSPPRPIRRHPSSQSTSRAYSISSAPRNYNLQRYYTNSPYISTSRSNVDLANMSSQWSHTPHQASMHSLRSGHLSLPINIRYTIPHVSRSDYGSASLGLSHDSCSHHGSPSYYHSSLGQQRSYLMHRTESGPSLSTMVLQSPQ

SEQ ID NO: 18501 - protein, 318 aa, Bacillus subtilis
MSKIAFLFPGQGSQFIGMGKELYEQVPAAKRLFDEADETLETKLSSLIFEGDAEELTLTYNAQPALLTTSIAVLEKFKESGITPDFTAGHSLGEYSALVAAGALSFKDAVYTVRKRGEFMNEAGCRLAKEQWAAILGMDAEALKQVTDKVTEEGNLVQLANLNCPGQIVISGTAKGVELASELAKENGAKRAIPLEVSGPFHSELMKPAAEKLKEVLDACDIKDADVPVISNVSADVMTEKADIKEKLIEQLYSPVRFEESINKLIAEGVTTFIEIGPGKVLSGLVKKVNRRLKTIAVSDPETIELAIQTLKEENDNA

SEQ ID NO: 18502 - protein, 467 aa, Synechocystis sp. WH 8501
MFNRKKIDIPRLQPSWRAIIGEFPPNQSSQSLWHCQGFSLVEGVPKLSKNKRFAVVGDVSLSNTDLLLKRLAINPSRWQEDHQTLIAWGWEELGKDCLHYLRGIFSFVVWDTHEKQGWAIRDRVGGRTLYYYQQDSTFYISPRLKNLSPYFKKNLDLIALRDYLCTGFIPGKRTLWQGVKELRPGTILSLPQEKIETYWTPQENISQSPLSFDKSSEILRELLETIIQEYLPPQEPVGVYLSGGLDSSCVTALAKQFHQETVHTYSIHFGEDYPNELEFSSLVAAHCQTKHHILAISPQEMWENLPITMANLDSPIGDPLTVPNYLLAQLAKQDVKVILNGEGSDPCFGGPKNQPMLLHSLYHNSEQKIDLLSSYLTSFKKCFLDLPNLLNPDIFKQVKDAPSVFEADLLSSADYLNRLMLLNIKFKGSDHILNKVNNLTLSGLLEGRSPLFDSRVVDKIFIHSSSL

SEQ ID NO: 18503 - protein, 395 aa, Triticum aestivum
MPAQKRPHPSPDADDAHVDQEEEAAAAAAGAAGSGTEGGAAPRAANGGSAELAKDGGGGDSDAGEDEDEEEQRKQQQQQDEHEEGGGSGGDDEDADHSQSSESDAADVDEFILVKLMDIRKEVQCPICLGIIRKTRTVMECLHRFCRDCIDKSMRLGNNECPACRTHCKSRRSLRDDPNFDALILALYPDIDKYEEEERPPARPEKTRNKKIQDSIAETFRRQTEALVKKRSNAKAIASTRKTRGSMRTKKRGRTSSPDNAPTDIDDDEREENGNDGSKESSSVDDRSPDVKMKRARRWPVPRSSPAKTIGSVDSSYEENDDLGGARDILATSPLRGEMLAWGKNGTRSQTRHGSAGGSSGRMVKGGRVAKLVDHLRNADEFDTKFNLYLALISA

SEQ ID NO: 18504 - protein, 184 aa, Halobacterium sp. NRC-1
MSTLRFVTTNSGKVQEAASYLDGLRRVEQLDYDYAELQSDDLAAIATHGAREAYRETDDDTPVIVDDAGLFVRGLSGFPGPYSAYVEDTLGIERVWELASDLDDRHAAFRCVVAYTDGDTVETFTGAVQGTMVAPRGDGGFGYDPIFEHDGTTFAEMPTDRKNALSHRGRALATFADWLAERAD

SEQ ID NO: 18505 - protein, 330 aa, Oryza sativa
MMRDVCMEVLPPMDHYASRGNWFMARKWSPEENKQFERALAGLDLRCPDWDRVARAIPGRSALEVMNHFRDLELDVQQIENGMVPFPVYGAAAAGGAFTLQWDGAHGVGDFRNAYRFGGGGGGKRHFGRTPEQERKKGVPWTEEEHKLFLLGLKKYGKGDWRNISRNFVQTRTPTQVASHAQKYFIRLNSGGKDKRRSSIHDITTVNLTDDRPPSPSQSSLISNQSNTSTLTAAVAPFSSTADVKPQNAANASFNSPSRTLGMAGYGMGLQDQGLQCGGQKQSGHSLSDDGRHCCIEPSGLMWLLLLEILQAYTTGFSMSPDVPLQHQTI

SEQ ID NO: 18506 - protein, 251 aa, Salmonella enterica
AGIKEIVLVTHASKNAVENHFDTSYELESLLEQRVKRQLLAEVQSICPPGVTIMNVRQAQPLGLGHSILCARPVVGDNPFIVVLPDIIIDDATADPLRYNLAAMVARFNETGRSQVLAKRMKGDLSEYSVIQTKEPLDNEGKVSRIVEFIEKPDQPQTLDSDLMAVGRYVLSADIWAELERTEPGAWGRIQLTDAIAELAKKQSVDAMLMTGDSYDCGKKMGYMQAFVKYGLRNLKEGAKFRKSIEQLLHE

SEQ ID NO: 18507 - protein, 246 aa, Arabidopsis thaliana
MTTFSVPIDNGDSMKIAEEESQRTLYPYVTGTSVVAIKYKDGVLMASDMGGSYGSTLRYKNIERVKAIGKHSLLGASGEISDFQEILRYLDELTLNDNMWDDGNSLGPKEIHNYLTRVMYNRRNKFNPLWNTLVLGGVKNGKSYLGMVSMIGVSFEDDHVATGFGNHLARPILRDEWHADLSFEDGVKLLEKCMRVLLYRDRSAINKLQIAKITEEGVTVSQPYSLKTYWEFSSFHNPTAGAAGSW

SEQ ID NO: 18508 - protein, 165 aa, Triticum aestivum
VMASSATTVAPFQGLKSTAGLPVSRRSSASLGSVSNGGRIRCMQVWPIEGIKKFETLSYLPPLSTEALLKQVDYLIRSKWVPCLEFSKVGFVFREHNSSPGYYDGRYWTMWKLPMFGCTDATQVLNEVEEVKKEYPDAYVRVIGFDNLRQVQCVSFIAFRPPGCE

SEQ ID NO: 18509 - protein, 165 aa, Secale cereale
VMASSATSVAPFQGLKSTAGLPVSRRSSGSLGSVSNGGRIRCMQVWPIEGIKKFETLSYLPPLSTEALLKQVDYLIRSKWVPCLEFSKVGFVFREHNSSPGYYDGRYWTMWKLPMFGCTDATQVLNEVEEVKKEYPDAYVRVIGFDNLRQVQCVSFIAFRPPGCV

SEQ ID NO: 18510 - protein, 391 aa, Thermosynechococcus elongatus BP-1
MNLLEQLRQMTVVVADTGDILAIQKFTPRDATTNPSLITAAAQMKEYQSIVDETLRQAKADLGSGATSREIVSLAVDRLAVAFGLKILQIIPGRVSTEVDARLSYDTAATVQKARELISQYEAAGVGRDRVLIKIAATWEGIRAAEILEKEGIHCNLTLLFGFHQAVACAEAGVTLISPFVGRILDWYKKKTGRAEYPGPEDPGVISVTKIYNYYKKFGYPTEVMGASFRNIGEIIELAGCDLLTISPALLQELQNTTGELKRKLDPAIAATLDIEKVAMDEATFRKMHAADEMASEKLEEGIKGFTKALETLEDLLRRHLARIEGEATLTHAAEELFHVYDLDGDGIITREEWLGTDAVFDALDANHDGKVTPEDMGAGLGVVLHLAQAK

SEQ ID NO: 18511 - protein, 358 aa, Methylococcus capsulatus str. Bath
MGNPDQPTPQHIVDKLIESSRKGTNHRYSVSKGIPRLRRAICHWYLNRYGVELDPDSQAIVTIGSKEGLAHLALATVGPGDAVLVPNPAYPIHPYGFVLAGADVRHVPLLPGVDFFAELEMAIKTSWPKPKMLVLNFPANPTAQCVDLEFFEKVVEIAREYKIWVVHDLAYADLVFDGYVAPSILQVPGAEDIAVEFFTLSKSYNMPGWRVGFMCGNRELVSALGRIKSYLDYGTFTPIQVAAITALEGPQDCVENIRLMYQNRRDVLCKGLNDIGWPVEKPKGTMFVWARIPERYQSLGSLEFAKKMLLDAHVAVSPGIGFGEFGDDHVRFGLIENEHRTRQAIRGVRDMMRKDNAV

SEQ ID NO: 18512 - protein, 400 aa, Exiguobacterium sp. 255-15
MNQTEKIITQTEKFGAHNYHPLPIVISEAEGVFVKDPEGREYMDMLSAYSAVNQGHRHPKIIEALKRQADKITLTSRAFHNDQLGFFYEKVAQLTGKDMVLPMNTGAEAVETAVKAARRWAYEVKQIPGDAEIIVCEGNFHGRTMTAVSMSTEAEYQRGFGPLLPGIKTIPYGDLEALKGAITENTAAFIVEPIQGEAGILIPYEGFLKDAQDVCKEQNVLLVSDEIQSGLGRSGKWFASDWDNVTPDMYILGKALGGGVFPISCVAANHDILSVFNPGSHGSTFGGNPLACAVSVASLEVLEEEKLPERSLELGTYFMNRLKEIDNPMIKEVRGRGLFIGVELTEAARPYCEALKEKGLLCKETHETVIRFAPPLVITKEELDWAFERIEQVLGVSVAQ

SEQ ID NO: 18513 - protein, 164 aa, Bromus catharticus
VMASSATSVAPFQGLKSTAGLPVSRRSTGLGSVSSGGRIRCMQVWPIEGIKKFETLSYLPPLSTEALLKQIDYLIRSKWVPCLEFSKVGFVFREHNASPGYYDGRYWTMWKLPMFGCTDASQVIKELEEVKKEYPDAYVRIIGFDNLRQVQCVSFIAFKPPGCE

SEQ ID NO: 18514 - protein, 113 aa, Triticum aestivum
  unsure (1)..(113): unsure at all Xaa locations
MEATIHSVMARRIFDSRGNPTVXGDVCCSDGTFARAGASSGAXTGVYEAVELSDCXSDYLGKGVYKADDNVNSIIAPAVIGKDPTVQTELDNFMVQPLDGSKNEWRWRKHNPG

SEQ ID NO: 18515 - protein, 447 aa, Zea mays
  unsure (1)..(447): unsure at all Xaa locations
MDRKDVGILAMDIYFPPSCVQQEALEAHDGASKGKYTIGLGQDCMAFCSEVEDVISMSLTVVNSLLKKYKIDPKLIGRLEVGSETVIDKSKSIKTWLMQIFEESGNSDIEGVDSSNACYGGTAALLNCVNWVESNSWDGRYGLVVCPDSAVYAEGPARPTGGAAAIAMLIGPNAPISFESKYRASHMAHVYDFYQPDLASEYPVGDGXLSQTCYLMALDSCYRQFCNKYEKIAGKQFSICDAEYFVFHSPYNKLVQKSFARLYYNDFLRNCSSVDDDAKEKLQSFSNLTGEESYQSRDLEKASQQVAKHLHDIKVQPSTLLPKQIXGQRIVMFSYGSGLTSTMFSLRLNNGQHPFSLSNIASVLDVTEKLQSRHETLPEKFVETLKLMEHRYGAKDFETSRDTSLLQPGTFYLTKVDSMYRRFYSQKLSEETGGGKTKCCNGLANGH

SEQ ID NO: 18516 - protein, 334 aa, Oryza sativa
MRAVQYDKYGGGAQALKHVEVPIPTPKKGEVLIKMEAGSINQVDWKFQKGVARPFMPNKFPFIPVYDLAGEVVELGRGVSSFKVGDKVIAINFPVGGGGLAEYAVAQASRTAPRPPEVSAAVGACLPIAAVTALVALRTAGVSLDAGDGGGGGAKKNVLVTAASGGVGHFAVQLASAAGHRVTATCGARNAGLVGGLGADKVLDYATPEGAALRSPSGRRYDAVVHCAAVAGLPWSAFAPVLADAGVVVDLTPGAAAFATALRQRVTFSRKRLVPLFVSPTKEDMELVAGMVAEGKLRAVIESRHPLSRAEEGWARSMAGHATGKIIVEMGDEQ

SEQ ID NO: 18517 - protein, 534 aa, Porphyra purpurea
MMKKKVHPIVLAILDGWGHSNSHQGNAIKIAKTPTIDSLLETYPNTLLVASGEEVGLPKGQMGNSEVGHTTIGGGRVVEQELVKIGNSIENKSFFNNVQLNCACDHAISTQTSLHLIGLCSNGGVHSHLDHLLALIHVAESKKVPNLYIHLITDGRDTNSNSAKSFIKLIADHIEKKSFVIISTISGRYYAMDRDFRWSRTKAAYTVLTSDNSDITNQPLNYNDLIDHYYNKGISDEFIPPSRINTGSIKDGDAIIFFNFRPDRMRQLVQALVQKPFNCFLTKSLSHLHVLTFTNYDSSLNTALAFPPNTLNNFLGETISKYGLKQFRVAETEKYAHVTYFFNGGAEEPFSGEDRELVSSPSVTTYDLSPDMSAELVTQKSISAINKGIYSCIVINYANADMLGHTGKLKETIRSIETVDNCIALLFDAVSQSNGTLIITADHGNAECMLTNEGTSCTSHTTNLVPFILIEGEQATISGHGGQVEFRKNGSLADVAPTILDILNLKKPPEMTGKSLIINSKYETRNLDKTFIEL

SEQ ID NO: 18518 - protein, 274 aa, Rhodopseudomonas palustris CGA009
MDSIKTQGLNVPKLGLGTFKLQGKDCHEAVLTALSLGYRHIDTAEMYANEDFVGDALEDTDVPRDQIHLTTKVWWTNLAPDAIRKAFDQSLRKLKTDYVDFYLIHWPAPDMNLGAALETLLRIKDQGGARAIGVCNFPVALMKQAVEEIGAPIACNQVEHHVLLGQTKLLPYLQSKGIPLTAYAPLAQGRLASYPELQAIADKHGATAAQVALAWLLEQEGVMAIPKARGEASQRSNLGALKIKLDFDDRAVIAKLPKNQRFVTPAFSPKWDAE

SEQ ID NO: 18519 - protein, 332 aa, Lactobacillus johnsonii NCC 533
MKAAQLIKYDKKDPLIEIRDINSQPLGAHDLLIRTKTAAVNPLDNLISHGDLKLVVPYKLPQTMGNEFVGIIEKIDPKVTNFKIGDRIFARNPVDNIGAFAQKIVINEKAVAKVPEYLSDQEAAAVPLTALTAMQAFQLLNLKAGQTLFISGGSGSFGAMAIPLAIAQGYKVITTGNETSRAGLEKLGVEKFLNYKTEDYTKAVANVDAIIDTIGGEETVKQLSILKDGGEIVSLKGMPNREFAKKMNMGLAKELLFNVAARKIEKEAKKRNQNYHFIFVQANGQQLKEAAKILEKNQIHPLIGNQYSLTEVNAALADVAQRKSLGKVIINF

SEQ ID NO: 18520 - protein, 380 aa, Neurospora crassa
MASTVGKTITCKAAIAWGAGQELSYEDVEVAPPKAHEVRIQIKHTGVCHTDAYTLSGKDPEGAFPVILGHEGAGIVESVGEGVTNVKPGDHVIALYTPECKECKFCKSGKTNLCGKIRATQGRGVMPDGTSRFRARGQDILHFMGTSTFSQYTVVADISVVAVNPEAPMDRTCLLGCGITTGYGAATITANVEKGSTVAIFGAGCVGLSVIQGAVANGASKIIAVDVNPSKEEWSRKFGATDFVNPSTLPEGQSVVDKLIELTDGGCDYTFDCTGNVKVMRAALEACHKGWGQSIIIGVAAAGQEISTRPFMLVTGRVWRGSAFGGVKGRSQLPGLVEDYLNGKIKVDELITHRKKLAEINNAFEVMHQGDCVRAVVDMS

SEQ ID NO: 18521 - protein, 204 aa, Yarrowia lipolytica
MPQPTDLRRKLVIVGDGACGKTCLLIVFAKGTFPEVYVPTVFENYVADVEIDGRRVELALWDTAGQEDYDRLRPLSYPDANVIIICFAIDSPDSLDNVQEKWISEVLHFCQGVPILLVGCKVDLRNDPKTIEELRRTSQRPVTTEEGNAVAQKIGAGKYLECSARTHDGVREVFEHATRAALTAHGQKGSKSSSREGKKKCLIL

SEQ ID NO: 18522 - protein, 478 aa, Zea mays
MAASLLRRGVVTSRRRCPVEMLRRLVSSEAAADRAPSRPPPEMPPFDHRPRPYAGLGGAEIFEKRKAVLGPSLFHYYQKPLNIVEGKMQYLYDEHGKRYLDCFGGIVTVSCGHCHPDIVNAVVEQTKLLQHTTTIYLHHTIVEFAEALTSKMPGNLKVAYFVNSGTEANELAMLMARLYSGNLSMVALRNAYHGGSAGTIGLTGLQTWKYPIPQGEIHHVMNPDPYRGTFGSDAAAYAKEVEEHITYGSSGRVAGFIAETFQGVGGAVELAPGYLKLAYDIVRKAGGVCIADEVQSGFGRTGSHYWGFQTQGVIPDIVTMAKGIGNGLPLGAVVTTPEIASVLAQKIQFNTFGGNPVCSAGGLAVLKVLDKEKRQAHCADVGSHLLERLKSLQEKHEIIGDVRGRGLMLGVELVTGRKEKTPAKSETIELFEKLRDLGVLVGKGGLHGNVFRIKPPMCFSKDDADFLVDSMDYAMSRL

SEQ ID NO: 18523 - protein, 287 aa, Zea mays
MATPPALLFPSPSSASSPPSSAQVEAVVLFNVCDSYVRRPDQADRVIGTLLGSLLPDGTVHVRNSYVVPHSESADQVAIDIDYHHNMYASHQKVNPKEVIVGWFSTGFGVSGGSTLIHEFYSREVQSPIHLTVDTGFTRGEASIKAYVSSNLSLGDRQLAAQFQEIPLDLRMIGAEKAGFEILKSTMVEKLPNDLEGMESSMEKLYILIDEIYKYVDDVVEGRVAPDNRIGRLVSESVASMPKLSPAAFDKLFNDKIQDNLALVYLSSITRTQISIAEKLNTAAQAL

SEQ ID NO: 18524 - protein, 438 aa, Penicillium chrysogenum
MPISKIHARSVYDSRGNPTVEVDVVTETGLHRAIVPSGASTGLHEVVELRDGDKTKWGGKGVLNAVKNVNDVIGPALIKENIDVKDQAKVDEFLNKLDGTPNKGKLGANAILGVSLAVAKAAAAEKGVPLYAHISDLAGTKKPFVLPVPFQNVLNGGSHAGGRLAFQEFMIVPDTAPTFSEGLRQGAEVYQELKALAKKKYGQSAGNVGDEGGVAPDIQTAEEALDLITEAIEQAGYTGQIKIAMDVASSEFYKEDAKKYDLDFKNPESDPTKWLTYEQLADLYKSLAAKYPIVSIEDPFAEDDWEAWSYFYKTSDFQIVGDDLTVTNPLRIKKAIELKSCNALLLKVNQIGTLTESIQAAKDSYADGWGVMVSHRSGETEDVTIADIAVGLRAGQIKTGAPARSERLAKLNQILRIEEELGANAVYAGEKFRTAVNL

SEQ ID NO: 18525 - protein, 360 aa, Gloeobacter violaceus PCC 7421
MRGALCCERCGFCLTVKGSCAVLNNFWYGLAHSPAITSIPRQVVVMGRPLVLYRTVGGRVVALEDRCAHRDTALSGGWVEGNCLRCPYHGWRYAPDGGCTEIPANQPGVAISRLAKVETFPVQERHGLVWVFLGELPEAQRPELPSLPEYAAPGWRAVRGEFTWSGHYTRVIANTVDMSHAPFVHAAAFGRKEAPRIQTYHIESERWRGSASIQFKTKPAYFLKLVLGKTPPDGSITSTFHLPNVTQVHHRFGRIQFILFLVHVPVDERTTHTCWLHLRNFVTHAWADPFMHRDVVRTFRQDDSVVRLQPPGPVPEQLNAEVHAPSDGLEVAYRRLRRLCGRLEWASPTQNPRITEGASP

SEQ ID NO: 18526 - protein, 507 aa, Gloeobacter violaceus PCC 7421
MSEQPIGIAPMDVHNTRLVAHTHPLDWVNPKPAGRYNLVVIGGGTAGLVSAGGAALLGGKVALVERHLLGGDCLVAGCVPSKALIRSARAMADVKDAHRYGIRVHGNVEADFGAVMERLRRVRADISPHDAAERFKNWGVDVFLGAARFTGPDTVRVGEVELRFKRAIVATGGRAARPEIAGLAEAGFLTNETVFSLTERPERLVVIGGGPIGCELAQSFARLGSQVTLLHKNERVLDREDPETSRIVGCALERDGVRVLTKARIEKVSRAGSIKTVHLAGGEQVACEAILLAAGRVPNVEGLGLEAAGVRYGKGGVEVDDRLCTSNPRIYACGDICLPWKFTHAAEASARIALENALFGGTLVLGQKKTSALTMPWCTYTDPEIAHVGLGEDEARKRGIAFDTIRLPLAESDRALTDGEEDGFIAVLLKQGSDKILGATLVARHAGEMISEITLAMVAGKGLATLSQVIHPYPTQAEIIRKVADAYESRSLERLRPFTEKWLAWLR

SEQ ID NO: 18527 - protein, 637 aa, Arabidopsis thaliana
MVLPLFRRAAIARTSSLLRARLFAPASEFHSRFSNGLYHLDDKISSSNGVRSASIDLITRMDDSSPKPILRFGVQNFSSTGPISQTVLAMPALSPTMSHGNVVKWMKKEGDKVEVGDVLCEIETDKATVEFESQEEGFLAKILVTEGSKDIPVNEPIAIMVEEEDDIKNVPATIEGGRDGKEETSAHQVMKPDESTQQKSSIQPDASDLPPHVVLEMPALSPTMNQGNIAKWWKKEGDKIEVGDVIGEIETDKATLEFESLEEGYLAKILIPEGSKDVAVGKPIALIVEDAESIEAIKSSSAGSSEVDTVKEVPDSVVDKPTERKAGFTKISPAAKLLILEHGLEASSIEASGPYGTLLKSDVVAAIASGKASKSSAFTKKKQPSKETPSKSSSTSKPSVTQSDNNYEDFPNSQIRKIIAKRLLESKQKIPHLYLQSDVVLDPLLAFRKELQENHGVKVSVNDIVIKAVAVALRNVRQANAFWDAEKGDIVMCDSVDISIAVATEKGLMTPIIKNADQKSISAISLEVKELAQKARSGKLAPHEFQGGTFSISNLGMYPVDNFCAIINPPQAGILAVGRGNKEVEPVIGLDGIEKPCVVTKMNVTLSADHRIFDGQVGASFMSELRSNFEDVRRLLL

SEQ ID NO: 18528 - protein, 707 aa, Burkholderia fungorum LB400
MAGKTNTQKPAAKNAQASGPQSDPKAKDLEQFRVSPEGEALRTNQGVKISDNQNTLRAGPRGPSLLEDFIMREKITHFDHERIPERIVHARGSAAHGVFQVYESMQEYTKAAFLQDPAVQTPVYVRFSTVQGPRGSADTVRDVRGFAVKFYTQEGNYDLVGNNMPVFFIQDAIKFPDFVHAVKPEAPNEMPTGGSAHDTFWDFVSLVPESAHMVLWTMSDRAIPRSLRTMEGFGIHTFRFVNAQGKGRFVKFHWRPVLGSYSLLWDEAQKLAGKDPDFHRRDLWESIERGDFPEFELGVQIIEEADEHKFDFDLLDPTKLIPEEQVPVKIIGKMTLNRNPDNFFAETEQVAFHPGHVVPGIDFSNDPLLQGRLFSYTDTQISRLGGPNFHEIPINRPVCPFNNNQRDAMHRQTINVGQASYEPNSLSGGWPKETDPAPSDGGFETYQERVEGTKIRVRSESFADHFSQAALFYNSMSPPEKDHIAAAYQFELGKVTKPEIRARVVNEILANFDAGLAAQVAEGLGLPAPKKGTAKLTGPKESPALSLLNRVKPGIKTRKIALLAAPGSDGAAIKKLQQALQGEGATPMLIAPTLAAIDGMAPDATIAGLPSIMFDAVIVVGGDQGAKALAQSGDARHFVLEAFKHLKAIAAIGAGRDVLAAAHLPHNADGVATGDDKQAAEVLKAFIEAAGQHRVWSRAQQAETVPA

SEQ ID NO: 18529 - protein, 509 aa, Arabidopsis thaliana
MTLTIPNAPGSSGYLDMFPERRMSYFGNSYILGLTVTAGIGGLLFGYDTGVISGALLYIKDDFEVVKQSSFLQETIVSMALVGAMIGAAAGGWINDYYGRKKATLFADVVFAAGAIVMAAAPDPYVLISGRLLVGLGVGVASVTAPVYIAEASPSEVRGGLVSTNVLMITGGQFLSYLVNSAFTQVPGTWRWMLGVSGVPAVIQFILMLFMPESPRWLFMKNRKAEAIQVLARTYDISRLEDEIDHLSAAEEEEKQRKRTVGYLDVFRSKELRLAFLAGAGLQAFQQFTGINTVMYYSPTIVQMAGFHSNQLALFLSLIVAAMNAAGTVVGIYFIDHCGRKKLALSSLFGVIISLLILSVSFFKQSETSSDGGLYGWLAVLGLALYIVFFAPGMGPVPWTVNSEIYPQQYRGICGGMSATVNWISNLIVAQTFLTIAEAAGTGMTFLILAGIAVLAVIFVIVFVPETQGLTFSEVEQIWKERAYGNISGWGSSSDSNNMEGLLEQGSQS

SEQ ID NO: 18530 - protein, 286 aa, Nostoc punctiforme PCC 73102
MASVMLATVDPGDEVIVFEPYYENYGPDAILAGATPRYVTLHPPHWTFDEAQLHQAFNANTKAIIINTPHNPTGKVFTREELTLIAELCQKWDVLAFTDEIYEHILYDGTQHIALATLPGMEERTITINGLSKTYSVTGWRVGYILANPALTGAIRKVHDFLTVGAPAPLQRAGVTAMQLPPSYYEELGKLYHQKRDSILQILDGVGIPYFLPQGAYYVLADISKFGYKTDIEFTYHLIKNIGVAVVPGSSFFSQPEKGHSLIRFCFSKTPETLQAASDRLLKLSK

SEQ ID NO: 18531 - protein, 480 aa, Lactobacillus johnsonii NCC 533
MTISNKVMLITYPDSLGKNIKDLDDVLHTDLKGAVGGVHLLPFFPSTGDRGFAPTDYSMVDPQFGDWSDVEKLGEDYYLMFDFMINHISRQSKYYKDFQKNKDQSPYADLFLSWDKFWPKNRPTQKDIDLIYKRKDRAPYQEITFADGSKEKLWNTFGEEQIDLDVRKDVTKQFIKQTLNNLIDHGSDIIRLDAFAYAIKKLDTNDFFVEPEIWDLLKEVQDDISAKGALILPEIHEHYSMPFKIARHGYFIYDFALPMVVLYSLYSGKSQRLASWLKKSPMKQFTTLDTHDGIGVVDARDILTPNEIGYTSNELYKVGANVKKKYSSAEYHNLDIYQINSTFYSALGDDDKKYFMARLLQVFAPGIPQVYYVGMLAGKNDIELLEKTKEGRNINRHYYSREEIHEEVQRPVVSSLINLLRFRNNEAAFDLNGSIEVTTPTENEIHIIRLNQDKTRKAELRANLETLAYKVLVNGREMAF

SEQ ID NO: 18532 - protein, 290 aa, Bradyrhizobium japonicum
MGPGLRRDDTEFVVTTVANSTLQNITGTILLAGAGKMGGAMLTGWLAGGLDPRRVAVVDPHIAPEISALAAKGVALNPDAKAAGQVETMVVAVKPQMFREAGAKLKPFVSEKTSVVSIMAGTTIASLQEVCGGAVVRAMPNTPAAIGRGITVAVAAKNVSTAQRAVADALLRATGSVEWVEDESLMDAVTAVSGSGPAYVFLLAEELARAGVEAGLPEALATKLARETVAGSGELLHQSELPSGTLRQNVTSPGGTTAAALGVLMGEPGLRDLMIRAIAAATQRSKELAK

SEQ ID NO: 18533 - protein, 537 aa, Lycopersicon esculentum
MVSSLLLPTPQILSISSSLQSSLPFKPHNFLQITRKKNTLISSPLRVAAPPTTTTATEEEEKLDSKSSDIEDTENDEQDSSSKFSWRDHWYPVSLVEDLDPSLPTPFQLLNRDIVIWFDKSGSQWVALDDKCPHRLAPLSEGRLDENGDLQCSYHGWSFNGCGSCTRIPQAASQGPEAKAFQSPRACATRFPTMVSQGLLFVWPDENGWERAQATKPPMLPEDFDKPEFATVTIQRDLFYGYDTLMENVSDPSHIDFAHHKVTGRRDRAKPLPFKMEASGPWGFAGANNDKPKITAKFVAPCYSMNKIEIDTKLPIVGDQKWVIWICSFNVPMAPGKTRSIVCSARNFSQFTVPGPAWWQVFPRWQEHWTSNKVYDGDMIVLQGQEKVFLSKSKENGTDVNKEYTKLTFTPTQADRFVLAFRNWLRRHGNSQPEWFGSTDNQPLPSTVLSKRQMMDRFEQHTLKCSSCKKAYYTFEKLQKLLIGSVVVCCASAGIPADVNLRIILGSLAIISAGLAYILHELQKNFIFVDYVHAEID

SEQ ID NO: 18534 - protein, 301 aa, Fusobacterium nucleatum subsp. nucleatum ATCC 25586
MSLKEAFMKKVTKAVIPAAGLGTRVLPATKALPKEMLTIVDKPSLQYIVEELVDSGITDIVIITGRNKNSIEDHFDFSYELENTLKNDNKLDLLEKVSHISNIANIYYVRQSMPLGLGHAVLKAKSFIGDEPFVIALGDDIIYNPEKPVTKQMIEKYELYGKSIIGCQEVAKEDVSKYGIAKLGHKVDETTYQMLDFLEKPSVNEAPSRTACLGRYLLSGKVFKYLEETKPGKNGEIQLTDGILAMMRDNEEVLAYNFIGKRYDIGSKFGLLRANIEFGLRNEETKEEVKEYLKKLDIEKI

SEQ ID NO: 18535 - protein, 493 aa, Glycine max
  unsure (1)..(493): unsure at all Xaa locations
TQRFLSVQSWKTSRTSRNLRNSKPGSGIAHAVLTSDINEDSMAFQGVPTFEKPEVDPKSVASIILGGGAGTRLFPLTGRRAKPAVPIGGCYRLIDIPMSNCINSGIRKIFILTQFNSFSLNRHLSRAYSFGNGMTFGDGFVEVLAATQTPGEAGKKWFQGTADAVRQFIWVFEDAKNKNVEHILILSGDHLYRMDYMDFVQRHVDTNADITVSCVPMDDSRASDYGLMKIDKTGRIIQFAEKPKGSDLKAMRVDTTLLGLLPQEAEKHPYFASMDVYVFRTEIVILLLRWNRSSCNDFGSEIIPSAVNDHIERKLFYYGXVFIHKGKYSNSIILYDITXQPPKFEFYDPKTPFFTSPRFLPPTKVEKCKIVDAIISHGCFLRECSVQHSIVGVRSRLESGVELQDTMMMGADYYQTEYEIASLVAEGKVPIGVGANTKIRNCIIDKNAKIGRNVIIANTDGVQEADRAKEGFYIRSGITVTLKNATIKDGTVI

SEQ ID NO: 18536 - protein, 248 aa, Rickettsia rickettsii
MNQTNFGFKKVDYTKKQGLVNNVFSNVADKYDLMNDLMSLGLHRLWKDEFIRQIPNLNSHILDVASGSGDIALKLAKKARDRVNNISLTLSDINEEMLKQAKKKAIDLNLFQNLKFTVASAEELPFPDDSFDYYTIAFGIRNVPDINKALKEACRVLKPMGKFICLEFSKVKEGYIKDFYKFYSFNIIPSIGQMIAGNKEAYEYLVESIDLFPSQDEFRIMIKDAGFEEVGYKNLSGGIVAIHSAYTR

SEQ ID NO: 18537 - protein, 416 aa, ASPERGILLUS NIDULANS FGSC A4
MTVLNVSPVPPDEIFALNRAYIDDDFPQKVNLGVGVYRTNEGQPWPLPVVEEAEKQLAAENSVFRHEYTAIEGDRAFLPLARDLMFGFDGQATSDAKQEAAKARIGTVQTVAGTGANHLGALFLATHMKPRNVWLSNPSWANHLTIWELAGVPRKTYPYYSAATRSFDFDGMISTLESEAQEGDVILLHACAHNPTGLDPNKEQWKAIIDLCERKRIFPFFDSAYQGFASGSVDEDAWAVRYVLNEKPQMEMCVAQSFSKNFGLYGQRVGAFHYVLNEGAEDLRDTVVNNLCHLIRGEYSMGPTAGCNIVKKVLTSPELTAKWHQDLKVMSSRIISMREALYNELVRLKTPGTWKHIVEQNGMFSYTGLTPSQVYALKDKFHIYLLKSGRASISGLSPKNVNYVARAIDEVVRNVN

SEQ ID NO: 18538 - protein, 265 aa, Zea mays
MLCCAGHQASLLLFALLSVSSLLLVDGSHQDQEFGEAVGSRILQTNPDAHEVHCSRERSRAAWEAIDEYLMPFVEKEKYELPSKCRLRPDNDMFREQEQHKIHFDINEWHCGFCKKAFRAEKFIDQHFENRHKNLVDNSEGRCMADLCGALHCDLMMQFKKPKSKCNAAAATRNRHLCESLADSCFPINQGLAASRLHEFFLRQFCDAHTCSKGTKPFPKGGRKQTNRLYLALSILTLILLPLFYLIVFLHQREMRKGTQDLKRF

SEQ ID NO: 18539 - protein, 288 aa, Bacillus subtilis subsp. subtilis str. 168
MITYVFPGQGSQKQGMGSGLFDEFKELTDQADEILGYSIKRLCLENPYSNLNKTQFTQPALYVVNALSYLKKIRDEEVKPDFVAGHSLGEYNALFAAEAFDFETGLQLVRKRGELMSLISNGGMAAVMGLNEEQVAKALKEYHLHDVDIANVNAPYQIVISGKKDEIEKAASLFETMTEVTMVLPLNVSGAFHSRYMNKAKEEFEEFLHAFYFSPPSIPVISNVYAKPYTYEFMKQTLADQINHSVKWTDSISYLMKKGHMEFEEVGPGNVLTGLIHRIKKDAEAMPR

SEQ ID NO: 18540 - protein, 1292 aa, GIBBERELLA ZEAE PH-1
MRFTTGILPTLGAIASLGEATPTFFTGGGGASGGVGGHLGAGAGVDAGAGAGAGLGAGAGVGGSAGGHLGAGAGVDAGAGVGGGAGGKIGAGAGVGGGAEGHLGAGAGVDAGAGVGGGAGGKIGAGAGVGAGVGGKIGAGAGVDAGAGAGVGGGAGGKIGAGAGVDAGAGVGGGAGGKIGAGAGVDAGAGVGGGAGGKIGAGAGVGAGVGGKIGAGAGVDAGAGVGGGAGGKIGAGAGVGAGVGGKIGAGAGVDAGAGVDVGGGAKGGLKGGAGGHLGAGVGLGGKIGAGVGAGAGLGGHLEGDVKGGAGGKIGAGAGLGGHLGGGLGVGAGIGAGLGAGVGAGIGLGLGGLGGLKGLLGGGIEWSAGGGADWHTGTSCSIGNTWKDHVLFQGVCSPETETTPAVNLGLNLPSCQITGDIGFACGADFLKTPNVRVGLGGISAYIEIDLSASAAVHQSVELFAAPKLGVAIPGLEASADLKAAIEAAIALDLIVGCGKAIDLSAGVYVKFPADAYVDIDLLTKKVINASLEGLVTKALPVGVGADVELGAGIDLQIGLRLRSELAIPGGLEIPVLGLSGKAGADVGFGAGVWFSLLDYSAKIGGGAGVSAGIDITGSFDCNLGLSVDKKWDFSGGFFNLIPNLSVGLAKGIKSTFSQKTRGTCGSFIGHFKKGGFIGGPTIPASGLITATTAGSDASVTIPAGVTQSVEFSGTVVVPDASVSVEIPDSTDSASPEGPSDVTGSGSLPVATSAAEIPDTTDSATQGGPPVDATESGSSPVTTSAGEVPVGPGGEVPNQTITKGGDVTAIFGPGETITVSGSEGFTTILSGSEGFTSVITGSEGFTTVISDSEGSFTSFFSGSEGFTTVISGSEGVTKVVPGTPGFTTVVSGSETFTQVVPGAGFTTVVSGSETMTKVVPGAAFTTIVSGSETFTQVVPGGGFTSVQSGSSPVSTGGNNYELPSAPGADATASGDVPAETGSGSLPAATTAPNGDNGTPGDATTGSGSDAEVTSAPAAGVTEAPDASGMITSTIRETHVYTITSCAASVINCPASYTQKIVTQTVIERTTVCPATATAVPNTPTEGSDESGKTPDSPDSPDTPKEGGNASHQGPGGDKGAEYPTPGDKTPVEGGNGSGSHGDAPAPTAPPAAAQTTIDLVTITQDVTTIVPCTKFVTSTFVAPTTVHPPAVPVVTIIDNHTGQAPQNTATEQPGAFTTLTRVMASATDSGDYPAATDSGSDAAAPGYEAPGAVPTYKVPNNGTVPSQVPVIAGASLVSVGSMLLALPMALAFIM

SEQ ID NO: 18541 - protein, 424 aa, Methylococcus capsulatus str. Bath
MPESMHASSRFVSRLTRQTLALILAGGRGSRLQKLTEWRAKPAVPFGGKFRIIDFPLSNCVNSGIRQVGVLTQYKADSLIRHIQQGWGFLRGELGEFIDIMPAQQRLQESWYAGTADAVYQNLDIIRQRDPEFIMILAGDHVYKMDYGLMLAYHVERKADLTIGCMEVPLADAKAFGVMQMDGEQRIRKFVEKPSDPPPMPNRPDHAAASMGIYIFNTAFLFEQLIKDADTPGSNHDFGMDIIPQVIQKYRVFAYRFRNAQSGVQAYWRDVGTVDSYWAANMELIGVDPELNLYDQEWPIWTYQAQTPPAKFVFDDDDRRGMAVDSMVSGGCIISGAEVRHSLLFSNVRVNSFSRVLDSVILPDVNIGRHCRISRAVIDKGCNIPPNTVIGENLEDDRKRFYVSPEGIVLVTPDCLGQRLHFHR

SEQ ID NO: 18542 - protein, 557 aa, Dechloromonas aromatica RCB
MYKYDAIDRQLINQRVDQFRDQVRRWKAGELSDDEFRPLRLQNGLYIQRHAPMFRIAVPYGMLSSDQLRTLGQIAIKYDRGYGHFTTRHNLQLNWPKIEDVPDMMAELAKVEMHAIQTSGNCLRNITTDPFAGVAADEVIDPRPLAEILREWTTFHPEFAFLPRKFKIAISGTREDRAVTWFHDIGLHLQEQNGEVGFRVIVGGGLGRTPIRGQVVSEFLPWQHILTYCEAILRVYNRAGRRDNAYKARIKILVQATGIEAFSQQVEAEWAYMKDGPATLTQAEFDRVAAHFGAPDYAKQDEVTLPADQAFVKWVERNTHPHKVPGYAAVTLSLKKHGIAPGDITSEQMAAVADLADQYSFGELRISHEQNIILADVKKSDLHEVWQKAKAAGLATPNIGLLTGIICCPGGDFCDLANAKSIPIANAIQARFDDLDYLFDIGEIDLNISGCMNACGHHHVGHIGVLGVDKNDSEFYQVTLGGRQGNDAKLGKVIGPSFAAEEMPDVVDKIIKVYIENRHADERFLDTLDRIGIDPFKNRVYEGRAHGKAKAAQQEAA

SEQ ID NO: 18543 - protein, 245 aa, Zea mays
MGGGGGGGAEEEELTAQETALYDRQIRVWGVDAQKRLSKAHVLVCGVNGTTIEFCKNIVLAGVGSLSLMDDHIVTEDDLNSNFLIPHDESVYGGKSRAEVCCESLKDFNPMVRVAVAKGDPSLIDGTFIDRFDIIVLSRASLKTKLFINDNCRKRSKHIAFYSVDCKDSCGEIFVDLQNHSYLQKKPGGEPEQQELKYPSLQEAISVPWEDLSKKTTKLYYAMRVLGSYESSEGRDPGETSLSDL

SEQ ID NO: 18544 - protein, 251 aa, Zea mays
  unsure (1)..(251): unsure at all Xaa locations
GAPARPPRTPTATATASVPPVPXGIKSQGXSRRAXLGLXEXXLRQRAXDLGQQSXRGKQPHDXLYKSRAKQXQEFNHVPXXXREALLGXGWSFGRSPXHHAVTASDGTTKILLKLEDNRLIETIGIPXDDDNKGSXRLTACFSSQXGCPPRCSICXTGKGGFARNLQPHENXEQVLAXEETFKHRVTNVXFMGMGEPXXXLKSVLEAHQCXNKELKIGQRMXTISTXXXPNTIKMLASHKLXXTXXXSNTQ

SEQ ID NO: 18545 - protein, 440 aa, Methanococcus voltae
MRNNIVNKGTEELSYEIRGIVAVAERAQKLGKKIIWENIGDPIAKGEQMPEWIKEIVSESTLENKTYGYCPTQGLLETREFLADLNNSKNGAQITSDDMIFFNGLGDAITNIYGLMRKECRVIGPTPAYSTHSSAEGLYSNSSPVMYSLDKDNLWYPDLDDLENKVKYNPSVSGILLINPGNPTGAVYSKKVLSDIVDIANEYDVFILCDEIYQNLVYNGKKHVSLSEVIDDVCGISMKGISKDLPWPGSRCGWTEFYNKDKDPVFKKYVENIGKFKMIEVCSTTLPQTIIPKVMGDKRFEKSLGERKKYYEKASNYAYKTINKVEGVSVNLTNGAFYGALTFDDGVLNDKQHLKMDNELDTYINGVLDQCGQHSLVEKDKRFVYQLLGASGICMVPLTSFCSKHEGLRFTLLEKDENLMKWTFKTLSEKIDEYLNSSAN

SEQ ID NO: 18546 - protein, 451 aa, Shewanella oneidensis MR-1
MAQHFDYICLGAGSGGIASANRAAMRGAKVLLIEAKHVGGTCVNVGCVPKKVMWYGAHIAEAMNLYAKDYGFDVSVNKFDWNTLVNSREAYIGRIHEAYGRGFTNNKVTLLNGYGRFVNGNTIEVNGEHYTADHILIATGGAPTIPNIPGAEYGIDSDGFFALREQPKRVAVVGAGYIAVEVAGVLHALGSETHLFVRKHAPLRNFDPMLIDALVDAMKTEGPTLHTNSVPQSVVKNADDSLTLNLENGESVTVDCLIWAIGRSPATGNIGLENTEVQLDSKGYVITDAQQNTTHKGIYCVGDIMAGGVELTPVAVKAGRLLSERLFNAMSDAKMDYSQIPTVVFSHPPIGTMGLTEPEARAQYGDGNVKVYTSSFTSMYTAVTSHRQACKMKLVCAGKEDKVVGIHGIGFGMDEILQGFGVAMKMGATKADFDAVVAIHPTGAEEFVTMR

SEQ ID NO: 18547 - protein, 193 aa, Bacteroides thetaiotaomicron VPI-5482
MKRKLVFATNNAHKLEEIAAILGDKVELLSLNDIDCHTDIPETAETLEGNALLKSSFIYRNYQLDCFADDTGLEVEALNGAPGVYSARYAEGEGHDAQANMRKLLHELEGKENRKAQFRTAISLILDGKEYLFEGVIKGEIIKEKRGDSGFGYDPIFKPEGYEQTFAELGNETKNKISHRALAVQKLCEFLQR

SEQ ID NO: 18548 - protein, 469 aa, Capsicum chinense
PIPVPVFGNWLQVGDDLNHRNLTDYAKKFGDIFLLRMGQRNLVVVSSPESAKEVLHTQGVEFGSRTRNVVFDIFTGKGQDMVFTVYGEHWRKMRRIMTVPFFTNKVVQQYRGGWESEVASVVEDVKKNPESATNGIFLRKRLQLMMYNNMFRIMFDRRFESEDDPLFVKLRALNGERSRLAQSFEYNYGDFIPIFRPFLRGYLKICKEVKEKRLQLFKDYFVDERKKLANTKSMDSNALTCAIHHILDAQQKGEINEDNVLYIVENINVAAIQTTLWSIEWGIAELVNHPHIQQKLREEIDTVLGPGVQVTEPDTQKLPYLQAVIKETLRLRMAIPLLVPHMSLHDAKLAVYDIPAESKILVNAWWLANNPAHWKKPEEFRPERFLEEEKHVDANGNDFRFLPFGVGRRSCPGIILALPILGITLGRLVQNFEMFPPPGQSKLDTSEKGGQFSLHILKHSTIVMKPRSF

SEQ ID NO: 18549 - protein, 605 aa, Methylococcus capsulatus str. Bath
MCGIAGLVLKGRNVQADRLHPMIERLAHRGPDGQGVFTEGGFGLAHTRLSIIDLSGGRQPILADDGRLAVVANGEIYNHVELREALEREGRRFATHSDSETILHAYALDPEGFAGRLHGMFAFALYDGVRRRLVLGRDRLGIKPLFYAALPDRLVFASEMKAILPLLPNAPTIDAGAFSQFLHTHCSTGEETLFSGIRRLGPGEILEADAELNLRKRRYWTPLGVRSRALDFAEAEAEFEGMFEQVMKEHVRSDVPYGLFLSGGNDSAILLAMLSRLQAQPVRTFSIGYVDAAMKDELGDAERIAQVFGSRHTSIRLRREDLFRRIPHTVWAADDLMRDYASFPTSALSEAAAKELKVVFTGEGGDEVFGGYRRYRQPRLAWLARNLLAPGTGGFRTRSEWWRKRSQRLFGPALAAERKHFRAPYLKAWSEAPAVWSHLQHCQYTDLVTDLPDSLLVKVDRMMMGFGLEGRVPFLDHRVVEFGLGLPDALKTDGKRPKVFLRRWAERHVPKEHLYTKKRGFTVPVREWLGGELLDRLEGKLSGNAAVREWFDTRHFPALFQAQRKKGNASREIFCLMQFAIWHRLFIDQPGLKPSPDEDPLDWIS

SEQ ID NO: 18550 - protein, 445 aa, Arabidopsis thaliana
MASNGVTNCNANANVWRFKGNGATSDAAAVTLRKLAFGMFKNCTMNSGKTILFPTPGEPSAHSNFRTCPEAEEAVADAARSGMANSYAPSPGVFKARRAVAEYLNGELPTKLKAEDVYITGGCNQAIEIVIDSLAGNPSANILLPRPGYPHYDARAVYSGLEIRKYDLLPESDWEINLDGLEAAADENTVAMVIINPNNPCGNVYTYDHLNKVAEMARKLGIMIISDEVYDHVVYGDKPFIPMGKFASIAPVITLGSISKGWVNPGWRVGWIAMNDPNGIFVSTGVVQAIEDFLDLTPQPSFILQEALPDILEKTPKEFFEKKIKAMRRNVELSCERLKDIPCLFCPKKPESCSYLWLKLDTSMLNNIKNDFDFCTKLVSEESLILIPGVALGAENWVRISIGTDESVVQEIFDRLKGFYDRHAISKEAIKLSGHAINQIVVSVN

SEQ ID NO: 18551 - protein, 138 aa, Triticum aestivum
VAPFQGLKSTAGLPVSRRSNGASLGSVSNGGRIRCMQVWPIEGIKKFETLSYLPPLSTEALLKQVDYLIRSKWVPCLEFSKVGFIFREHNASPVEVEEVKKEYPDAYVRIIGFDNMRQVQCVSFIAFKPPGCEESGKA

SEQ ID NO: 18552 - protein, 267 aa, Xanthomonas campestris pv. campestris str. ATCC 33913
MTVPAFGLGTFRLKDQVVIDSVRNALALGYRAIDTAQIYDNEAQVGQAIADAGVPRDQLFVTTKIWVDRFSRDTLQPSLQESLRKLGTDYVDLTLIHWPSPKDQVPMREYLEALADAKAQGLTRAIGVSNFTIALTRQAIEILGADAIATNQIEVHPYLQNRTLIAFLREQGIHVTSYMTLAVGEVLKDPVIQAIARRHDATPAQVTLAWALQQGYSVIPSSTKRANLESNLKAQSLHLSEQDMAEIAALDRGERLANPKAIAPDWD

SEQ ID NO: 18553 - protein, 191 aa, Saccharomyces cerevisiae
MQTLKCVVVGDGAVGKTCLLISYTTNQFPADYVPTVFDNYAVTVMIGDEPYTLGLFDTAGQEDYDRLRPLSYPSTDVFLVCFSVISPPSFENVKEKWFPEVHHHCPGVPCLVVGTQIDLRDDKVIIEKLQRQRLRPITSEQGSRLARELKAVKYVECSALTQRGLKNVFDEAIVAALEPPVIKKSKKCAIL

SEQ ID NO: 18554 - protein, 230 aa, Streptococcus suis
MKKPVIGISGNEYKTGDHTEPLLSYTQTCLVQAIEDAGGLPLILPATEPDLAKYYIHLIDKLILTGGQNVQPSYYHEERTIDSDNYLPKRDEFELALIRAAQENQKPIFGICRGLQLYNVAQGGSLHQSISEHWQDIDGQEVSQTIQLTQNSPLYDIYESDPSVNSFHRQAIKDLAPDLEIIALSDNQQIIEAVHSAYPTKFLGVQWHPELLYGKREIEKDLFHYIVNKL

SEQ ID NO: 18555 - protein, 155 aa, Petunia x hybrida
TLINRAGKATYVKFHWKPTCGVKSLLEEEAARVGGENHSHATQDLYDSIAAGNYPEWKLFIQTMDPAHEDSFDFDPLDVTKTWPEDILPLQPVGRLVLNKNIDNFFNENEQLAFCPSIVVPGVYYSDDKMLQTRIFSYSDTQRYRLGPNYLQLPA

SEQ ID NO: 18556 - protein, 526 aa, Chlamydophila pneumoniae TW-183
MERKRFIDCDSTKILQELALNPLDLTAPGVLSAERIKKFSLLGGGFTFSFATERLDDAILAALISLAEERGLHESMLAMQQGQVVNYIEGFPSEMRPALHTATRAWVTDSSFTGEAEDIAVRSRVEAQRLKDFLTKVRSQFTTIVQIGIGGSELGPKALYRALRAYCPTDKHVHFISNIDPDNGAEVLDTIDCAKALVVVVSKSGTTIETAVNEAFFADYFAKKGLSFKDHFIAVTCEGSPMDDTGKYLEVFHLWESIGGRFSSTSMVGGVVLGFAYGFEVFLQLLQGASAMDQIALQPNARENLPMLSALISIWNRNFLGYPTEAVIPYSSGLEFFPAHLQQCCMESNGKSIAQDGRRVGFSTSPVIWGEPGTNGQHSFFQCLHQGTDIIPVEFIGFEKSQKGEDISFQGTTSSQKLFANMIAQAIALACGSENTNPNKNFDGNRPSSVLVSSQLNPYSLGELLSYYENKIVFQGFCWGINSFDQEGVSLGKALANRVLELLEGADASNFPEAASLLTLFNIKFR

SEQ ID NO: 18557 - protein, 347 aa, Pichia stipitis
MSIPTTQKAVIFETNGGPLLYKDIPVPKPKPNELLINVKYGVCHTDLHAWKGDWPLDTKLPLVGGHEGAGVVVALGENVTGWEIGDYAGIKWINGSCLQCEYCVTAHESNCPDADLSGYTHDGSFQQYATADAIQAARIPKGTDLALIAPILCAGITVYKALKTAQLQAGQWVAVSGAAGGLGSLAIQYAKAMGYRVVGIDGGADKGEFAKSLGAEVFVDFLSSKDVVADVLKATNGGAHGVINVSVSERAMQQSVDYVRPTGTVVLVGLPAGAKVSASVFSSVVRTIQIKGSYVGNRADSAEAIDFFTRGLIKCPIKIVGLSELASVYELMEQGKILGRYVVDTSK

SEQ ID NO: 18558 - protein, 438 aa, Treponema denticola ATCC 35405
MKKTDFSISTLGECKIQSPIMLSETHGDLIANYVTDNEFIRYNLDASLGETGEPLTHADIIEKAGPRQKIYFSPNYVHAAIATCGGLCPGINDVIRAIVRCLWTRYGVRRISGIKFGYKGFISEYGFSPVPLTPEAVNGIHKTGGSFLGTSRGGGTRVTEIVDGIEQMNINMVFFIGGDGTQKGALEVSREIERRKLKISVIGIPKTIDNDLSFIQKSFGFDTAIAKATESVAAANMEASSQINGIGLVKLMGRESGFIATHTAIACHEAHFVLIPEVRFELGGENGFLKLLEKKLIENGYALIVAAEGAGQHLMNIEEETDASGNKKLADIGLFLKKEITEYFDKIGMHINLKYIDPSYQIRSSIAAPIDSVYCERLGNNAVHAAMAGKTRTLIGLVNNKFVHLPIEQVVSERKYVNPESSLWRDALDATGQPTTMI

SEQ ID NO: 18559 - protein, 170 aa, Zea mays
MAPTVMMASSATAVAPFQGLKSAASLPVARRSSRSLGNVSNGGRIRCMQVWPAYGNKKFETLSYLPPLSTDDLLKQVDYLLRNGWIPCLEFSKVGFVYRENSTSPCYYDGRYWTMWKLPMFGCNDATQVYKELQEAIKSYPDAFHRVIGFDNIKQTQCVSFIAYKPPGSD

SEQ ID NO: 18560 - protein, 411 aa, Rhodopseudomonas palustris CGA009
MPTHDGCKEKTMPFLATALDRVKPSATIAVTDKARELKAAGRNVIGLGSGEPDFDTPANIKLAAIHAVEAGKTKYTAVDGIPELKQAIIDKFKRENGLTYKPNQIIVGTGGKQVLYNALMATINPGDEVIIPAPYWVSYPEMVALAGGESVPVVCTAEFGFKLQPAALEAAITPKTKWIILNSPSNPTGAAYSRAELKALTDVLVKHPHVWVMTDDMYEHLVYDDFEFTTPAQIEPKLFDRTLTVNGVSKSYCMTGWRIGYAGGPAELIKAMSTIQSQSTSNPCSIAQWAAVEALNGPQDFIDAHNKVFKERRDLVVSMLNQATGIDCPRPEGAFYVYPSCAGTIGKTAPSGKKIETDQDFVTELLEAEGVAVVQGSAFGLGPAFRISYATKTSDLEDACKRIQRFCGNLR

SEQ ID NO: 18561 - protein, 397 aa, Bordetella pertussis Tohama I
MTDESRHIDTLLQHLGTAPFDPDTGAAPVNLPSMRASTVRFRDLAALEQAQRRKAGGDRAVTYGRMGMDTHAALEHVFKELEAGTHCYLASSGMGAVTMAFLSLLSAGEHALVADCVYGPVYELDNAVLKRMGIELTFFAPGDDLQALVRPNTRLLYVESPGSLLFQMLDLPALAEFARRNQLVLATDNTWGSGYIYRPLELGAQVSVIAGTKYVGGHSDLMLGAVVTNDEAVAQRLNRTQYAMGYSVSADDAWLALRGVRTLPIRMAQHARHAQRVCEFLQGRPEVARIYHPAWPQDPGHALWLRDCSGSNGMLTVELRLSQPAARVFVESLQLFDIGFSWGGFESLVQLVTPGELARHRYWQGGGNALVRLHIGLESPEDVIADLTQALARAASA

SEQ ID NO: 18562 - protein, 110 aa, Zea mays
  unsure (1)..(110): unsure at all Xaa locations
SAQHLGDLYRDFVKDFPIVSIEDPFDQDDWSSWASLQSSVDIQIVGVMVSHRSGETEDNFIADLAVGLASGXIKTGAPCRSERLAKYNQLLRIEEELGNVRYAGEAFRSP

SEQ ID NO: 18563 - protein, 221 aa, Pseudomonas syringae pv. syringae B728a
MSSESDSTDREHAEAVAALRSLDPQWQALIDLVGPCLHPVSAAQDPFQALVEAVAYQQLHARAGDAMVMRLRSLFPEVSFPSAPALVELDDQALRSCGFSAAKCRAIKAIAAARLDGLVPEVSAALAMGNEALVERLIQLPGVGRWTVEMMLIYGLGQLDVMPASDFGVCEGYRRLYALQLKPSHRQMARLAERFAPYRTIAAWYLWRVPVDFSELGSSRI

SEQ ID NO: 18564 - protein, 73 aa, Zea mays
MVTLAASEMDYRPSRMAVVAKHAEAFIREFFDQNPLSHVGLVTIKDGIAHRLTEIGGSPESQIKALMGKLECS

SEQ ID NO: 18565 - protein, 648 aa, Eremothecium gossypii
MKASIIGLWALSSLIGVSNGLNNMEGSRERTNASMSGVDVNSGSDISIETAVVGAAANGQGAVGGVADERRGLVSLAAPAKYPYMEHLGLRPLPRNALLASLQFYMQSNSFQVGKQQDGSDYNHYTVFPKSITPVMENTQTRQLHLRFTHGLWDHENWGQLPHAGAKSGGSGVELWAVMEAGSRDEAFRNWLLMTHSLSGLFCASINFIDSTKTTFPVSSFQPRTDERIPLLNGTNHLYLLRGSLANEPVCTENLTPFLKLLPTRGRQGLSTLLEGHKVFGSRWHSLSLDVSTICSEEGLCHYEMEEFIELALDVPSTLARVERPIPKPLDGSNLRCDTCKHHDSWTCFPLSDSTSAKIELSKLFGRYIMDATELSDTPSKACVKVSDNWKVLIKAGDAYFTTATNCFDVKGKKWHDIYLDTDDTTKVYPVDSSPVFVTRSLTGYSQDKGGLRTVFRNPTDQPVSLVYFESLPWYMRLYLSTVKIETDDNLSINDVIKSTYYLPARDRERPTHLEYQMVIPANTTFALTYQFDKSLLQYAEYPPDANHGFEIESAVVTVLSPFKYEFRTATLLLSLSTPDFSMPYNVIILTSTVMGLIFGTLFNMLVKKITTVEEADKHMQHSGLRARARSIKQNLFDKLGSQKLKKD

SEQ ID NO: 18566 - protein, 487 aa, Chlamydomonas reinhardtii
MPLAELWRLTKLVPLACTVLLLSVRALAVDSGGLNDSADNSSRSLLQESGQASGTSQPYTYSSSDFVLLNGFLIFFMQIGFVSAESGQGRAKNVRNILLKNSVNIMLCAICWWAVGYAFAYGNSGGGFIGTSRFFSDGESFGSKPWFFTWTFCLSCVTIASGCLAERTHLFVYPVYTAVVSIAVHPVIAHWVWAPDSWLNSMTGSPCRFLDFAGGAVVHTVGGLTGLIGAMLCGPRLGRFEDGVGKDIPGHDVSSVSLGSLMLWFGWYGFNCGSTYIYMAQGGSEASAAVSRVALNMTLCASVAGMTSLVVSSIQTGTFDLAVCCNGLMAGLSASTSNVGFLTPWAACITGALAGLLYVGISRLLVRMGVDDPLDSSAIHCGSGILGVLVSGFLARPSYVMQMVGCNCGGVVYATNGGMQLGMQLLGLSCSMVWTAMWALLTFGILKKLQLLRVDQQTELAGIDNMEHGGPAYPEFLQRVQSTRPGY

SEQ ID NO: 18567 - protein, 367 aa, Listeria monocytogenes EGD-e
MEKSSIYGLTWTNLTEWLEAHGQKKFRATQVWDWLYRKRVKTFEEMSNVPKETIELLTANFVMNTLEEQVVQESTDGTTKYLFKLSDGNLIETVMMKQEYGLSVCVTTQVGCNIGCTFCASGLLKKSRDLTAGEIVEQIMNVQHYLDGRNLEERVSHVVVMGIGEPFDNYDNVMDFLRVINHDKGLAIGARHITVSTSGLAPRIIDFANEDFQVNLAISLHAPNNELRTSIMRINKTYSIEKLMEAIHYYVNKTNRRITFEYIMLKGVNDHKKEALELAALLGEHRHLAYVNLIPYNPVDEHIDYERSTKEDVLAFYDTLKKNGINCVIRREHGTDIDAACGQLRSKQIKRVGVRERMKQKQAAAEE

SEQ ID NO: 18568 - protein, 587 aa, Oryza sativa
MAPLAALRGLRALSIANNNLTGPFPDVSMLPALKMLYMSRNKLDGGIPPAAFAHMRGLRKLFLSDNAFTGPIPTSITSPKLLVLQLSKNRFDGPLPDFNQKELRLVDVSDNNLSGPIPPGLRRFDAKSFQGNKNLCGPPVGAPCPEVPILASPSPSPLSSSWWSPRSLKILMIIALVVVVVGALLAFAGALTAMLARRREATTETQGGGVGGAAANAAAARMKATPNPAVTVAHGGGGGGGEQQPHVTVSAVPAKRGGRRDDHGRLVFIQEGRERFELEDLLRASAEVLGSGSFGASYKATLVEGQSMVVKRFKEMNGVGRQDFNEHMRRLGRLVHPNLLPVVAYLYKKDEKLFVTEYMVNGSLAHLLHGGSSMAALDWPRRLKIIKGVTRGLAHLYDELPMLTVPHGHLKSSNVLLDAAFEPILSDYALVPVMTPRHAAQVMVAYKSPECGETGRPSKKSDVWSLGILILEVLTGKFPANYHRQGRTGTDLAGWVHSVVREEWTGEVFDQEMRGARGGEGEMVKLLKVGLGCCESDVDKRWDLRDALARIEELRERDAGAGADDSSAASSVASGGGGGEASRSHSS

SEQ ID NO: 18569 - protein, 416 aa, Escherichia coli
MESKVVVPAQGKKITLQNGKLNVPENPIIPYIEGDGIGVDVTPAMLKVVDAAVEKAYKGERKISWMEIYTGEKSTQVYGQDVWLPAETLDLIREYRVAIKGPLTTPVGGGIRELNVALRQELDLYICLRPVRYYQGTPSPVKHPELTDMVIFRENSEDIYAGIEWKADSADAEKVIKFLREEMGVKKIRFPEHCGIGIKPCSEEGTKRLVRAAIEYAIANDRDSVTLVHKGNIMKFTEGAFKDWGYQLAREEFGGELIDGGPWLKVKNPNTGKEIVIKDVIADAFLQQILLRPAEYDVIACMNLNGDYISDALAAQVGGIGIAPGANIGDECALFEATHGTAPKYAGQDKVNPGSIILSAEMMLRHMGWTEAADLIVKGMEGAINAKTVTYDFERLMDGAKLLKCSEFGDAIIENM

SEQ ID NO: 18570 - protein, 285 aa, Nicotiana excelsior
MENKEEDVRLGANKYSERQAIGTAAQSDKDYTEPPPAPLFEAGELTSWSFYRAGIAEFMATFLFLYITILTVMGVSKSESKCSTVGIQGIAWAFGGMIFALVYCTAGISGGHINPAVTFGLFLARKLSLTRAVFYMVMQCLGAICGAGVVKGFGKTLYQTKGGGANVVNHGYTKGSGLGAEIVGTFVLVYTVFSATDAKRSARDSHVPILAPLPIGFAVFLVHLATIPITGTGINPARSLGAAIIYNQDHAWDDHWIFWVGPFIGAALAALYQQVVIRAIPFKSK

SEQ ID NO: 18571 - protein, 287 aa, Nicotiana excelsior
MAENKEEDVKLGANKFRETQPLGTAAQTDKDYKEPPPAPLFEPGELSSWSFYRAGIAEFMATFLFLYITILTVMGLKRSDSLCSSVGIQGVAWAFGGMIFALVYCTAGISGGHINPAVTFGLFLARKLSLTRAIFYMVMQCLGAICGAGVVKGFMVGPYQRLGGGANVVNPGYTKGDGLGAEIIGTFVLVYTVFSATDAKRNARDSHVPILAPLPIGFAVFLVHLATIPITGTGINPARSLGAAIIYNDEHAWDDHWIFWVGPFIGAALAAVYHQIIIRAIPFHKSS

SEQ ID NO: 18572 - protein, 122 aa, Triticum aestivum
MGGGGGGGGGGAEEELTAQETALYDRQIRVWGVDAQKRLSKAHVLVCGVNGTTIEFCKNIVLAGVGSLSLMDDHMVTEDDLNSNFLIPHDESVYGGKSRAEVCCESLKDFNPMVRVAVAKGN

SEQ ID NO: 18573 - protein, 166 aa, Cynodon dactylon
IAAVSALQNQPIVNAVIDGDDIIYRDYIDVSVAVGTSKGLVVPVIRDAENMNFADIEKGINNLAKKATEGALSIDDMAGGTFTISNGGVYGSLISTPIINPPQSAILGMHSIVQRPVVVNGDILARPMMYLALTYDHRLIDGREAVFFLRRIKDVVEDPRRLLLDI

SEQ ID NO: 18574 - protein, 348 aa, Treponema denticola ATCC 35405
MSIKIRTAAVTGPHKVEILELNTPDLRSGEVLVKVHAVALCTLEQRIFRGEIPMPLPCTGGHEVSGEVVALGDGVNTKKWSAGDRVAVRLLYNCGECHYCHSGHNNLCERAQKKPVRENLLVGPGGLCDYIIVNTSALFPISDELSYEEACLTEPLACCVHSIERANLQLGEDVVVIGGGIMGQYHIMLAKCRGCRVILSEVDPERCKLGKQLGADIVFNPLEHDPVTFIQSLTNGRGADAVFNTTPIPGVVPQAIAMTGKCGRMIQYSSMHPDSPTPVSPQMLHGSEIVLTGAISPDERNFYTANRLLSTGIINCKPLIAKKFPFEEAQKAFEAAIVPGTFRMIITD

SEQ ID NO: 18575 - protein, 350 aa, Streptomyces sp. TP-A0274
MLAGGSGSRLRPITHTSAKQLVPVANKPVLFYGLESIAEAGIREVGIVVGDTAAEIEAAVGDGSRFGLDVTYLPQEAPLGLAHAVTIARDYLGDDDFVMYLGDNFIVGGIGALLDRFRVSRPDAQILLTRVSDPRAFGVVELDTDGRVIGLEEKPEHPRSDLALVGVYMFSARVHDAVSRLKPSWRGELEITDAIQELIDADCRVESTLVSGYWKDTGNVADMLEVNRLVLDGVEADCSGVVDSSELVGRVVIEEGATVTGSRIVGPVVVAAGSRIHDSYIGPFTSIDRGCSVIDSEVEYSIVLRGASIVGVRRVERSLIGREVEVTSTPRILRSHRLVLGDHSKVQVAS

SEQ ID NO: 18576 - protein, 494 aa, Treponema denticola ATCC 35405
METLKYVKKEPYQLFIDGKYIPSENGSIVDVINPVNNLPFAKAYRGTKTDCEKAIAAARKAFDEGPYRKMSAKDRSKLLLKAAQILERRAEELAVIETLECGKNYSACRYWEVPMAIDSFEFFAGKARCLDGKVVPSEYGTLNYVTWNPCGVVGEILPWNGPFLMGCQKVNAILAAGNTVVIKPPSWGVLSMILMASIYEEAGFPSGVVNVVTGSGAEVGNCLVESELVDMVSMTGGVETGREIIAHSAKLVKDIALELGGKSPNIFFEDVDIEQAARFAVYGFTNHAGQICVSGTRILVQRRIYEPFIKAMVETAYKLKPGDGFDPSTTINTLISREHANTVWEYIEKGKKQNARLVCGGNPYSEPLLKKGNFIPPTIFADVTPEMEIFQNEIFGPVACITPFDTEEEAISLANATKYGLAGGVFTKDIKRAIRVADRINSGQIYINNYFSKGMIESPGTGWKESGIGIAGIHKYMISKTVFVETVDNVLLPI

SEQ ID NO: 18577 - protein, 307 aa, Candida parapsilosis
MTQSNLLPKTFRTKSGKEISIALGTGTKWKQAQTINDVSTELVDNILLGLKLGFRHIDTAEAYNTQKEVGEALKRTDVPREDIWVTTKYSPGWGSIKAYSKSPSDSIDKALAQLGVDYVDLFLIHSPFFTTEQTHGYTLEQAWEALVEAKKAGKVREIGISNAAIPHLEKLFAASPSPEYYPVVNQIEFHPFLQNQSKNIVRFCQEHGILVEAFSPLAPLARVETNALAETLKRLAEKYKKTEAQVLLRYTLQRGILPVTTSSKESRLKESLNLFDFELTDEEVNEINKIGDANPYRAFFHEQFKDL

SEQ ID NO: 18578 - protein, 404 aa, Escherichia coli
GKKITLQNGKLNVPENPIIPYIEGDGIGVDVTPAMLKVVDAAVEKAYKGERKISWMEIYTGEKSTQVYGQDVWLPAETLDLIREYRVAIKGPLTTPVGGGIRSLNVALRQELDLYICLRPVRYYQGTPSPVKHPELTDMVIFRENSEDIYAGIEWKADSADAEKVIKFLREEMGVKKIRFPEHCGIGIKPCSEEGTKRLVRAAIEYAIANDRDSVTLVHKGNIMKFTEGAFKDWGYQLAREEFGGELIDGGPWLKVKNPNTGKEIVIKDVIADAFLQQILLRPAEYDVIACMNLNGDYISDALAAQVGGIGIAPGANIGDECALFEATHGTAPKYAGQDKVNPGSIILSAEMMLRHMGWTEAADLIVKGMEGAINAKTVTYDFERLMDGAKLLKCSEFGDAIIE

SEQ ID NO: 18579 - protein, 169 aa, Zea mays
MAPTVMMASSATAVAPFQGLKSTASLPVARRSSRSLGNVSNGGRIRCMQVWPAYGNKKFETLSYLPPLSTDDLLKQVDYLRNGWIPCLEFSKVGFVYRENSTSPCYYDGRYWTMWKLPMFGCNDATQVYKELQEAIKSYPDAFHRVIGFDNIKQTQCVSFIAYKPPGSD

SEQ ID NO: 18580 - protein, 511 aa, Cryptococcus neoformans var. grubii
MFARQPLSRNLLRPLSRPSSSFSRASTIPKLAFLQSARGFASASEPYDVVIIGGGPGGYVAAIKAAQLGFKTACIEKRGALGGTCLNVGCIPSKAMLNNSHIFHQTQHDLKNRGIDVSGIQLNLPKMLAAKEASVKALTGGIETYLFKKNGIDYIKGEASFETANKVNVKLLEGGETQVEAKNIIIATGSEVTPFPGLEIDEERIVSSTGALELKEVPKKMVVIGGGVIGLELGSVWSRLGAEVTVVEYLGAIGAGMDSEVGKQFQKILTKQGFKFKLNTKVVSGHREGDIVKLKVDSAKGGKEETIEADVVLVAIGRRPVTTGLNLEAIGVETDKRGRIIIDDEFNTSAKGVKCIGDVTFGPMLAHKAEEEGIAAIEILKSGHGHVNYDAIPSVVYTHPEVAWVGKNEEELKAAGVQYKIGKFPFAANSRAKTNQDSEGFVKFVVEKETDQVLGCHIIGPAAGELIASAVLAMEYKASAEDIARTCHAHPTLSEAFKEAALSSYDKPINF

SEQ ID NO: 18581 - protein, 531 aa, Corynebacterium glutamicum ATCC 13032
MKVMAQIAMIMNLDKCIGCHTCSVTCKQAWTNRQGTEYIWFNNVETRPGVGYPRGWEDQDKWEGGWVRTNSGKLKPKAGGRLKKLATIFHNPKLPTIDDYYEPWTYEYDKLLSAPAGQKTQPTARPVSQLDGRPIDKIEWSSNWDDNLGGSTTTLDQDPVLEKMNLTVQKEIEDSFMFYLPRICEHCLNPTCVSSCPSGAMYKRAEDGIVLVDQDQCRGWRMCVSGCPYKKVYFNHKSGKAEKCTLCYPRLEVGQPTVCSETCVGRLRYLGVLLYDADRVAEVAATPDEKDLFEAQKTLFLDPHDPQVIADAQRNGIPHSWLEAAQNSPIYDLIFKYEVALPLHPEYRTLPMVWYIPPLSPIVDEVTASGNDGEDHKILLTALSTMRIPLEYLAGLFTAGDTRPVEKSLRRLAAMRSYMRDISLGREPQEEIAEAVGMTGKVVQEMYRILAIAKYDDRYVIPTASPETPRGISSLDPFGDVDPARATEQLNIGLGEGAPEACGTGAPSGKVSLTSWNVGERPAAMFPPRKD

SEQ ID NO: 18582 - protein, 438 aa, Zea mays
MSSSPADLSCVLPRVLIVSRRTVRKNKFVDFVGEYHLDLIVGYGAVPVIVPRVAGVHALLDSFEPIHGVLLCEGEDVDPSLYESADASLSPEQLEAVRRLHASDAAVDREKDSIELRLARRCLERNIPYLGICRGSQVLNVACGGSLYQDVEHELAEAQQVQVQHINYADYDEHRHPVRVVPGTPLHEWFAGDLADGARLMVNSYHHQGVRRLAQRFVPMAFAPDGLVEAFYDPAAYSPGEGRFIMGLQFHPERMRRPGSDEFDYPGCARAYQEFVRAVVAYQEKTAATHLPRPGAALPLPASSSPKLSKEMERRRKVISRSFSLAKDMYLSGGRTKPAEQRELEAGAEFLESNTASLSVQQEKRLKQMGATVRNASGYLNSLKVKGVREAAARALMAEMTVNQVSDLVTFYQTMGKICSEVLDAKLQGLHLSTNLYE

SEQ ID NO: 18583 - protein, 527 aa, ASPERGILLUS NIDULANS FGSC A4
MADAVIAGQRVEAPVTWKAYLMCVFAAFGGIFFGYDSGYINGVMGMDYFIQEFTGKVKSETPAAQFVISSSNKSLITSILSAGTFFGAIIAGDLADWYGRRITIINGCGVFMAGVAFQIASTTVPMLVVGRLIAGVGVGFVSAIIILYMSEISPRRFRGAIVSGYQFCITIGLMLASCVNYGTENRNDSGSYRIPIALQLLWAIILGIGLFVLPESPRYYVRKNNLAEAAKTLARVRGQPPESEYITQELAEIVANNEYEMQVIPQGGYFATWLNCFRGGLRSPNSNLRRVILGTSLQMMQQWTGVNFVFYFGTTFFQNLGTIDDPFLISMITTIVNVFSTPISFYTMEKLGRRPLLLWGALGMVVCQFIVAIAGTVDGDNSKTVSAQISFICIYIFFFASTWGPGAWVVIGEIFPLPIRSRGVALSTASNWLWNCIIAVITPYMVDIDKGNLKSRVFFIWGSLCACAFVYVYFLIPETKGLTLEQVDKMMEETTPRTSAKWKPHSTFATEMGMTEKNASTTVESAA

SEQ ID NO: 18584 - protein, 469 aa, Eremothecium gossypii
MDSRSASESDEDAITAVSGKRNREGVRVNPQASGKKQVRIADEGEEEQDEQEDEEEDVDEGAEGKRRKKKKLNKNLQGVNGGYAWEDEIQRSWDLVKVDNEGNMAALVASIIEARKKRSANKDITPYQRGIIRTMILVIDCSEAMLERDLRPNRHAMTVQYAIDFVHNFFDQNPISQLCIVAMRNGMAQLVSQVSGNPQEHIEALKAVRKQEPKGNPSLQNALEMARGLLLHVPSHCTREVLIVFGALSSTDPGDIHQTIASLANEHIRTRVIGLSAQVAICKELCKQTNYGDNSYYGVILNETHFKDLFAEAVVPLPVNKMNKGFTLVKMGFPTRIFEDTPSFCTCHSRLVHGGYFCPNCKSKVCSLPIVCPCCDLMLILSTHLARSYHHLMPLKVFQELPVDIQFPTENCFSCQKKFPRLRNYKTQDLLTSSRYRCENCKCDFCIDCDVFVHEILHNCPGCESKAVL

SEQ ID NO: 18585 - protein, 400 aa, Bacillus subtilis
MNNLAFLFPGQGSQFVGMGKSFWNDFVLAKRLFEEASDAISMDVKKLCFDGDMTELTRTMNAQPAILTVSVIAYQVYMQEIGIKPHFLAGHSLGEYSALVCAGVLSFQEAVKLIRQRGILMQNADPEQLGTMAAITQVYIQPLQDLCTEISTEDFPVGVACMNSDQQHVISGHRQAVEFVIKKAERMGANHTYLNVSAPFHSSMMRSASEQFQTALNQYSFRDAEWPIISNVTAIPYNNGHSVREHLQTHMTMPVRWAESMHYLLLHGVTEVIEMGPKNVLVGLLKKITNHIAAYPLGQTSDLHLLSDSAERNENIVNLRKKQLNKMMIQSIIARNYNKDAKTYSNLTTPLFPQIQLLKERVERKEVELSAEELEHSIHLCQLICEAKQLPTWEQLRILK

SEQ ID NO: 18586 - protein, 567 aa, Saccharomyces cerevisiae
MASEQSSPEINADNLNSSAADVHVQPPGEKEWSDGFYDKEVINGNTPDAPKRGFLGYLIIYLLCYPVSFGGFLPGWDSGITAGFINMDNFKMNFGSYKHSTGEYYLSNVRMGLLVAMFSVGCSIGGVAFARLADTLGRRLAIVIVVLVYMVGAIIQISSNHKWYQYFVGKIIYGLGAGGCSVLCPMLLSEIAPTDLRGGLVSLYQLNMTFGIFLGYCSVYGTRKYSNTAQWRIPVGLCFLWALIIIVGMLLVPESPRYLIECERHEEACVSIAKIDKVSPEDPWVLKQADEINAGVLAQRELGEASWKELFSVKTKVLQRLITGILVQTFLQLTGENYFFFYGTTIFKSVGLTDGFETSIVLGTVNFFSTIIAVMVVDKIGRRKCLLFGAASMMACMVIFASIGVKCLYPHGQDGPSSKGAGNAMIVFTCFYIFCFATTWAPVAYIVVAESFPSKVKSKAMSISTAFNWLWQFLIGFFTPFITGSIHFYYGYVFVGCLVAMFLYVFFFLPETIGLSLEETQLLYEEGIKPWKSASWVPPSRRGASSRETEAKKKSWKEVLKFPKSFN
